United States Patent Application Publication US 2019/0348154 A1 - sequence listing, part 42

SEQ ID NO: 156011 - DNA, 345 bp, Enterobacter cloacae
atgagcactgataatttactagcagaactcacttcaaaaacaggcctgacagaaacggaacttaatcggcaggcattgattatcggtttgatggcattgtgccacccggatgctattgccggtgatttggtgagcgcggcacttacggggtcatactcagatagtactgataaactacttacccgtggtgataacgcatcagacagtgtgttgatgtccatgcgtatcttacttcaccggttgagtaagtatgaagggtctgatggcaaagtaggtcagatcaataaaatgatgcaccgactcggctactttaaggcatccgatgtgttacgcgaggctcaataa

SEQ ID NO: 156012 - DNA, 285 bp, Enterobacter cloacae
atgggtcgtcactttactggtctgattgatagttcgcagcaaaattttacaatgccaatccgtccgtatggacggagccgcatggctgcaaaattaaaaggaatctcccgattgaaaaaatctgaaaagcatgacgatgaatatcctgatgaactctggaaatttatgagtccttcagagaaagctaaatttctggtcgcggatgtattttcacgcagtagtaaagactcttccgccattcaaccgggagaacataagcaaaaggagcatgataatgagcactga

SEQ ID NO: 156013 - DNA, 414 bp, Enterobacter cloacae
atgaaaacgaaattattgctggcgctaattgcgggatcgactttctgcatcaatattgctgaagccaatattcctcttagagcagatggaagtccggcagcggggcagacaccaactcagttcattcagcttaaaaatgaatgtcctgaatgcgtcatggtcgcaactgatgtagtaaagatgcgtagcgatagctgtaaacagcaggcatccatcgattctacaatcctacaggatcctgtttacgcatatctcaacagtatccgtctggtagttgccgggaatggtggttatgcaagtccaatctatacatccgcccgtcaggtcgtagcgtcaaacatcaattgcagtgatgcaaacgactgggtagcgagaagtaaaacggtaatggataacaccttcaaaacgccgtaa

SEQ ID NO: 156014 - DNA, 348 bp, Enterobacter cloacae
atgaacaatgccaatatgcagggagatggtactgaacatcgcctggagcgcttttcccgtattcagaaggatgcgttggtacttcttcttttgtgcaaagaaaaaggcactgcgatagtgccattcaccaggttgctggggtttattaactctgttccagacagccaggatgtagctgagcccaacctacgtaagtcactcaaaacattgcagcaaaatggctatgtatggaagtaccggaacaaaaacgatcttacagtttcatttgagttaacttcatcaggagaactccaggcaacttcatttcgggtgcgaagattagaggcatggggccaggcagacgagtaa

SEQ ID NO: 156015 - DNA, 681 bp, Enterobacter cloacae
atgccaaacactaacgactcgctgacaggactcaacgtcgagctcgttggtgcatcgaaacaagagtttactctcctcactgaaaaccatctgatgcgccgcatcatagtggctttatctgagttaatgcgtaacgcggaaggcgtgatgattgattctcatgtttacccgtgggatcaagttctccctgctgcgatggacattccatcatccaacgcttctgatgaagagatacagaactggatgatcagtgcctgtaaggagtggcagtgcgaatacaatcgccgggttcagtcgtttaccgcatcagaagtaaaaagcaaaagcgacaccgagaacgataacctattcctgctgaatatcaccaacctagcccatatgctgattgaccggttactgccgtttgtcagtatcgaggagattaatcatgaggatccagatttactcccccaagttattgatatcgtgaattatatggttggtgttataaatggtacaaccagcacacaacaagtcagacaagaattgtttactgccggtgctgatgacgcagtatttgcactcaaactaaagcacaaagagctaaccagccggggtgaagatgctggatggcttgaagaggcaatgaagataatcgaagaaaacaaacgccaatccatcgactttatgcagcgcagctaa

SEQ ID NO: 156016 - DNA, 162 bp, Enterobacter cloacae
atgaaaaacgtcgtcaaaactttactaccctcagtgaacactggtgatcaagacgaaagcgtaaaatcggatacgctgactggcactactaaaccctgcgaccacggactggttcataatcatcttttagggcaggaggcctgttactatgccaaacactaa

SEQ ID NO: 156017 - DNA, 198 bp, Enterobacter cloacae
atggtaatccgcgagcagattaccattcaggcattcatcaatcataatatgctacggttattattttataataccgcactgctttgctatctcgataacatcgccattttttatgatgatacccagagtttgcgcatcctcaatgtgtctagtggcgcatccaccgacagctttaacctgctcgatgagacggtctga

SEQ ID NO: 156018 - DNA, 558 bp, Enterobacter cloacae
atgactaatcgtggctatagcaaagtaattatcgaaggtactgtaggccgtgagcctgaaatccgacaacaccctacccacggcatctacgcaaagatttatgtaacaacatctgagtcctcaatggaggataaatctggtctggagaaaattacggaagaacactatcagatcattttgcttggtcaatttgctgatgtggcccgcaatcatcttcatgtcgggacaggagtgtacctggaggcccaattgcgtacccgcctaatcaaggaggatggtaaagaacgcttctttatggacgtacttgtcaaccccgtgaaggggcatgttcttcgcaaagtcaatgtaggcggtaataaactggtgagtcgtcacctccagcagaaccgtgggcaggatcaccggcagaataccagttatagccgcaggccacaaaacacgaacgcgaggccagcaacaccacgcaactcgcccccaacaatggaaaattattatttgggaaatcaggatgaagttccaggaagcactggtgcttatggaactgagatagccttttaa

SEQ ID NO: 156019 - DNA, 153 bp, Enterobacter cloacae
atggaaacacaatgtattttcattgcaggtttcaaaaattgtttcactctgggccatacatgtttagtatggggacataacaaagagaacgctggcgagtacgctggcataaagatcacctttcccggcctggccgggattttttttgtctga

SEQ ID NO: 156020 - DNA, 531 bp, Enterobacter cloacae
atgtacaaagaccattttccacaagcgtgtccttcatcgataaaagagggccagtcatgctggcgggtatttattgatatggacgtagacaacccgtcgaaaataaaaaccagcgtcgaattaatagaagttggcgtaaaaacaattcgaatgaaaaagaatgcggcagaaggcagtgaaaaaactgtttttcttgtggataaaatccctggaatcacatttatcaaaattcggcctagcgacaaaaagccaagcgtctggaatacaagcatcagcagtttctataaacatgacgtggaaatcgggaaaacattccccgttggtatcagaacgactaaaagcgctgcgtttcgtacagcaacaaaaaaagttgaacagagtatgcaagaatacactgatactatagctaagcttgaaaacgactatgttaagaatgagacggagattgctgagtacaaaaatgaactcgctgcttaccaaacaatactccaaaccctaaaacgtatggcaaaaaggcatctcaagcaataa

SEQ ID NO: 156021 - DNA, 453 bp, Enterobacter cloacae
atgtcattacagcaatcgcatgaaaatctggagttcctgaagggggcggtctggtgcgccgcaaaactcgttcaggaaattggcgattcaaaaggtgcagctattcttatcacaaacttgccggttggaattttccctcaatgtagcgaaagggatttatttgttctgaggcaatatgtcaggaaagatctgccacttggtattgatgccgaatatagcgatatcaggccggtcttaattgattatctgggagagccagtagaccttcctgagtgtgaactggataattatgaaccggctcctggtgaaatgctccgctggggagtaactggagatctcagttccgggacacgatgtgtgctggtggataatcttgcttatctcgctgaagcaattggtatcagcaacgcactaaggcaacaggccgcagagtcaatccagcgcaccctgtga

SEQ ID NO: 156022 - DNA, 303 bp, Enterobacter cloacae
atgaaatgtgcgtacctacgaaagtttctgatcattgctttcataaccggcattagcggatgccagagtctcggaatagggttaagcctggatgagcgctaccagaaggcttatcagaaagtactggctgaccctaatgacgataacattaagactttcatgaaactcagccaggaaaaaggcgaaagagacatgcaagaggcaaattcgaaagccgcagccgacactcgtgaaagcgataaggggtttactgagtattttaaatcatatggcaacgatggatttaagcgggccagacaataa

SEQ ID NO: 156023 - DNA, 528 bp, Enterobacter cloacae
atgactgcactacgccgtatctcaacagaaccaagctggactccagttggcatccggggcgaagggttaccgactaaagcaggtgtataccgttttattgttccccgggaagccgatagctcagaacatattgagtttctggcgttagtgcgctggcgtaaacacggtgttcatcaactgttatttcccacctttgaatacatcgtatgcgacgagaatatcgtgctcccagaaggcacatgctggcgtgaacgcgaaccgtgggatccagatacgctgggggaaaccgagttcatcatcgttcctgaaatgagcgcgggtgctcaacgctgtccgttctgcaaagaagttccgcgcatcgttggtgataaatacaactttgagtataaggaaaactacatcacgaaaatgcctcaccggtttaaccgcctgtggttcagctgctgtaaatgggttgctcctgtgcccacttctgggattcagtcactgattacggcctggaacaaaatgctcgggtcatcccggtag

SEQ ID NO: 156024 - DNA, 885 bp, Enterobacter cloacae
atgcatgatctccagaattcgttaactagcaaaaataccaacattatccgtgctgaatttgaaaatatgctttctgcgcgtggaacatctatcgtgcgttttgataccaacgcaggggcgaacagcggcgagtatataggaaaaggaattcaacgtgagtgggttgggtatttgctaaaccatacgagttctggccatacggtcaaggcatttgaaccggtgtattctattcctttaaaaatcaggccagaccttcaatccagaaatattgcagaccaccagactaaagtaaaaaagttatttgaaagttatgatgaagcgtatcttacagccgctatagactcagaagagtattgcaagccattctgggtttatcagaatgcagatgacggtcattactcgatcagtactcgcggtttcaaaaatgcaaatgcacctgcaagcattccgagcgataatcgcattgatatcgctcagatgaaaatgggatatcccatgctcgattattgccataacattataccgtcctcagtcgtgcgattaggatttaatgggcgagtgtttacgcaaggtaagtattattacaccaatgaagaggttttcagttggttgtcccggaacccggatagcgcagttttcattacgttcccaaaagttaaccagactgatagatctgaattgatgtcaattatgaaacgagaattcctgaattcgtggggtttattctcatattatcgctggctgggacgcagcaccgcattactggcattgagcccggtcagttctaatgcttctgttaagttaagaagtagcaatgcacacttcttcaaaaatgcaatgctggctgttaacacgatcattcctaaaggtaacggaatttcgtaa

SEQ ID NO: 156025 - DNA, 402 bp, Enterobacter cloacae
atgtcgaatgtcttgcagaaagaaaacatcatcatgtctctgcctcatcgtgactggagttgtgaagtcatcgagtgccgattaaaagtgtgccccgtacctgacgaactcgacagggggaataacatctttttcatcgtggaagacctttaccagctacgcgagaacagtgaatcacttaacgtgcttggacaaattctggcgaaacgtttcccacacataccaccaaaaagaatgcaccttgtgctgcaccgacgtgatgtgcagaaagctcatggagtagccatccacctctaccgcttcatgcgtagcgagaaagaaaataaccgtagtattttcattggtcgtaaccctactgaagtttcccagaagacggcatacgcctcgatgtgcattttctga

SEQ ID NO: 156026 - DNA, 462 bp, Enterobacter cloacae
atgaaaacaaacgaaaacctgctgaacagcattggaaaaagtattcgaatgtggcgagataactgcttccctccatttcagcgagtgtatggaacatggttattggttctggtttcggttaatgccgggatatggttttacataacctctgactggtctgtacagttcgtcggcaatatagcagggctcttggttttcccaatgctgggtcgaaaggtttttacaaaacgcgccagatcttggcaagaagaactggatattaagctggcaaaatacaaaccgcataacatagctgcatggagggagttgcaggcttatgccttggaatccaatacgctatcttcacaaattgttgaacggtggtatttcaaagagcgggaatttatcaagacggcccaaaaagggaagccgggtagttctgaactcaaatttctcaagaataatactggatcaaagccttaa

SEQ ID NO: 156027 - DNA, 336 bp, Enterobacter cloacae
atgggacaaagaaaatgtgcagcagcgttcctgctcgctgaagaaatgtaccagataccagcgaccaaatcggtgatacttgcccgggacctggaagaaagagggttgtatctccgcgctgccaggcaatggggagaggtcatgtttgaacatacccagtgtactgagtacattgttgaacaacgggaacgttgcattcggttatccaattctcgccatgaagaccgtatcagacagcatgagcaggcaagtgatcttcaatatattcacaagcatattaatgatgtatacacacggatgggactaaaagacgatggtgtctttaataccgcctga

SEQ ID NO: 156028 - DNA, 318 bp, Enterobacter cloacae
atgacgatggtaacggccagaaattgtactgaaacacggttcaaccagttatgggatgctctgcatgaaaaaagcagtgcggaaaacgaatccttgtttcagcaagaattgcatcgctgccgcagtaaacgtcagcgaagtaaactggccgggcgattcgccggtgcctggcaaaccttattcgatgccttctgtgaaggtcgggtcttctgctcacttctggactcggttatccaccaggagagtatcagcgaatggcaggttgaagagttaatctcattcacttctgcccagatgtcgactctatacaaagggtag

SEQ ID NO: 156029 - DNA, 1071 bp, Enterobacter cloacae
gtgagtgatttaatcgacgataactttattattcctgcactgagtagcatagcaggcatcaccacgccactatcaggacaaacgtacaggaacgctccagatatcgacatatcttgctatgacgtgataatcatttgccttagcggcggaaaagactccatagcctgccttctccacttaattgacatcggggtcgatctgtccagggtggaactctggcatcacgatgttgatggccgcgagggaagtactttaatggactggccatttatggccgactacaaccgcaaaatagcttcaacatttcagataccgttgatgttctcctggcttcagggaggaatggaaggtgagatgctgaaagagaatggctacagtcgcccgcaatgtatcgaaaccccagttggattaataatcgcggaacgtgatatccagcgaagcactcccgccacgcgacttcggttccctcagcaatcaccaagccttaaaacacgttggtgctcatcagcactaaaaattgatgttggtcggcgagcactcacaaatcagagacgctttgacggaaaaaaggtgctttttattacgggggaaaggagagcggaaagctctaatagattcaattacttacaactggagccacataccagcagttgcaaaaaaagacaagttgatgcctggaggccagtacttgaatggtctgaagaacaagtctgggagattttagcaaaacatcgtgttacagccccagtaccgtatcgtcttggatggggtcgcagttcatgcttaacgtgtatatacaacagtgctcgcatatgggcaaccatcaaacattatttccccgagcgtattcacgcaatggccaactatgaaaaccgctttggggtcactatcagtcgtaaacgaataaatgttctggatctaagccagaatatttctcctattaatatcacggatgaggaagcgctgctgcaagcggtaaatccggtctatacattgcccgtcattaacatgtcaaaagaatgggtgctacctggtggggcgtacaaccgggagaaatgcgggtcagactaa

SEQ ID NO: 156030 - DNA, 324 bp, Enterobacter cloacae
atgcctaaagacgatgttgcaacaatcataatccagaatgggttgacgcataaagtaaatgtgatctgcaaattcagcgcacaaatcgacaatcaaatgttctcattcatcatccatcgcacattaagcgtatgtcgatatgcgcttgtctgtaaggcaacaggccaaagaattgcagttcttgataccagtcgagtaaaggcacttggtatggaagcagcaggtaaactagcgctatcagatctggcctcatcattaggcgagactagacttgctgcgattctgacaaattcacttcagagcaggagcgcggcaagtgagtga

SEQ ID NO: 156031 - DNA, 990 bp, Enterobacter cloacae
atggatttttctaaaactactgtagtgaaacccggtttaattggtgataacaacgcgtattgggcgatgcacttttgctcaattattgaaaccctttatgataataaccggatgaaggtacgttttaattcccctctcatggggaaacatacaccaacaatgagaaacctagtttcattagctggtgaaggatatttttctttaattaaagatcagttcagaaacttcggtctacaaaatttgctctgccactatctgatgagttatgaaggtagagaagtcttaaatactatacttattaatttgtctgattatcgcaatgtcgatatcctcgctaatatgagccagtttggtgtattcattagctgccgtgactttagaagtggcactaattttgcggtagagcataatccttatctacttggccatgagaatgtcttttataattcagtttataatagcttaaagtttgcagatctatgcattcttttccgtatgagaacgaatcctaaccaagaatcagctactttgtttggcattcttggagaggtcgaaggaaacaatggtcaggacttgaagagaccggccttctggggaaggaaaggtttgtatttgtcttttggtattggagtcaatcctaaacccaagggggaaaaacgttctaatcaatttcagcttaatgactgtacttgccagtgggtaaacgctgctgatggttataaatttgtcgctatttttgagtcagaacaccatcttgttacagattatctcgatgcaataggtactattgaacaccttaataaatttggccccaaccatccttttctaacacattatccagctcggcacattctaaacattgtgagagatggctgggataaatcagttgatatattgattactgaactgcgacgttatcttgcgcctaacgaattagcttcgctaggaacaaatccagtaataccctttataccctcattcaaacattaa

SEQ ID NO: 156032 - DNA, 405 bp, Enterobacter cloacae
atgaaaaaagctgtttttggccttttagcactattgcccttcataaccagcgcagaatcgatcgatccgaacgatttctatgctcagcagccttctcaaaactaccaacaacctgctgccagcgagcaacaggacgatgctgacaattccagtgaccagacagctgcgatcgtattgaacctggaaagttacaaaccgctggggaattttgtagtcccccagggagtagaacgcccattcattggtcttattaacagcaaaattttcatactgtctgagcaaccagataaacgcttggctggcctatggataggtcgtagtcaggatggtcgtgaagcactttgtggttacctgaacaacagtatgcaggtcagaaaatgttattacatcttatatcgtgagtaa

SEQ ID NO: 156033 - DNA, 552 bp, Enterobacter cloacae
atgactgaagacaacgccggtagtgtttctggaaaagcacagaacgccccaaaagcaaatgcccacctggacaggctctttgatttcattgtgacagaaatcaaagagcagggtgcagcaccgtcttacgagcagatctgttcttctctggggtattcaaaagggctcgtttcccggcgtatccggcagttgcatgaccagggacgaatcattatcgatggtgaaagaaagtctatgacgctgcgcgtagcgaaaggacaaggtcatgatgacattgccgaactcccggacatgaccagtgacaggaaagcaatcatcacgtatgtcaaaaaatacatgaacagaaatggtggccgtgggccatcagttcacgcaatagggaaagcgctcggcttctcgaataacaaggcgcgtagacatgtggactatctcgacgaagtagagagggtacgttacagccctcatcttaatgaagtaatcgttatcaatcagggtgattacgttaaaattacccaggacaacgatgaaccaccgagcccggcagaaggttag

SEQ ID NO: 156034 - DNA, 237 bp, Enterobacter cloacae
atgtacagtgaatctatcgatcgtgctatcagtatcctcaaggacgcgggcgaaaaaatcggtatggaactgggtagtaatgtgacatctcaggaatcagaactgcttgaggatgcgctggtgggcctgactaaagttaaagggcaactctgcggtaatcactccttaactgatgtaaaagcggacgtcgtgccttttagtctcagttcgacgaagaacgtcgatagcccgcattaa

SEQ ID NO: 156035 - DNA, 291 bp, Enterobacter cloacae
atgcagacatgttcggaagtcctggcggttgaaatattcaatcaagttggacgtgaggcagctattgctcaatataacttaatttgtgaaatagcccagcgacgttacgaagacagcctggccaaatatggttccgtgccagctggtttcaccgcgctcaatttcctccatccggcagaacttcaggagcgttacatcctggggttgggaattcagctttgtatcgatgagcagcatgaagccagggaacgggttttagctcgctgcctggcaagaaaaagggccgcataa

SEQ ID NO: 156036 - DNA, 402 bp, Enterobacter cloacae
gtgccaaactgcataccccttaatccggtattacctaaaaacttcgacgatacacctaatgaaaagcgctcaaagtctcagcttgatgcctggtgggatcatccatatggcattacttgcccggacgggaaaatcactgttcgatgcctgaatggaggagcttgggatcgttcgacagtgctgggagtagcggacaattacgaagaagcctgcgagctcgcagagcgcgagcaatcagcatgggtcaaacgccgtgcggagccaatattctactatagcggtgaagctccattcagagcgataagggatgcacaacgtcctgatcaggagcagacctttgtcgcgtcttttgacacgcaagatgagctaatcagctggcttaatagtcagaaaaccagttaa

SEQ ID NO: 156037 - DNA, 771 bp, Enterobacter cloacae
atgaccagataccttggatactgcgcccttgcgctccttaccgtcctgccgaccgcttcggtatattctgctgtacagaatgatacaatgggcctatacgctcccgatcccagctacacacctgacatccaaaattcagcacctgtaacgccttctccgggggatgacagtctgtacagtgatgacgtacccgattcatctaccgctccagaaagcaccattacccccctgaatagctttgatgttatgtctttttctatagggccggtaagcctgcggatgacagcttctgaagcgatcactgctatcactgacaaacttggccagtctgctggtgaagaaattcaaaagcgctacagtaacaactcattgaatagtattttctggggagatgctcaccaggagacggtggtctattttatccccgatacggcagttgaccccattgagccggtggcttacaaaatccgcttttcattcagcaaccctgatctcttactgaagtcggcgatcgagaaatatggagagccttcagtctctgatgcccagagaggtcgttatatctggtgcaaggcactggcggagaaaacgaataagtgtgatgacagtaaatctgagcttacgctgacaacgcgagaagttgaagacactggcatcctgactctcagcgacccaacggtctcatttgatgcctcgcggactgcaacggccaccccggataaagaccaggctgcgactgaagataaccaggggccattgccacagctctga

SEQ ID NO: 156038 - DNA, 492 bp, Enterobacter cloacae; identical to SEQ ID NO: 32290

SEQ ID NO: 156039 - DNA, 252 bp, Enterobacter cloacae; identical to SEQ ID NO: 32291

SEQ ID NO: 156040 - DNA, 579 bp, Enterobacter cloacae
gtgaaatactttgaatgtgcgctcaggttcagaatcgccccaggtgacgtgtatgggatccaccagcaactggataaggtagtccaggaacgttctgggtcgcgactcccatacaccttctactctcgcaaacaaagtgcctccgacacccaggttgttctgagaacggctgttgcactcgggctccctggcgaagtcatgaaggaaatcatgtttgtgtctggccagaaaattcgaatctgcggctcgctggccactattcgacgcgaggaagctggaggccggaaaagagagatttgtccacctgcccatgaactcccggattatatccactatcacctggaacgggccggagtgatctgtggacggttacgtatcgttcgaagcaccaagttccatattattaagcccgggagcgttggccgtacatcccacaagatcattgtaccgatgagccagtacgatgctgaatgcgtgattgaagatgtcggcgcacttgaacaggcatacgctttcgggatcggcagaaagcggatattcggctttggctatatgaacagcatcgaagtgctttcctga

SEQ ID NO: 156041 - DNA, 891 bp, Enterobacter cloacae
atgaatatctcaacaactttccagacgctggagagcgagatcacacaacttcgtggagtgctgggttcccggcttccgctcaaggcgagtgtctgcgtcctgccagccgttgctgatggcgaagaagatatggccatcgaacacatcatgcctgagctgaaacagggacacgatgctgtccatgctgcctgcgcggcatacgctgacctgcatatcagggatggctattcgcagaagtccgctcggcgcactaccggcgtattatggtacgacaatacagatgcggaattctctcagctggttacccgtttggtgacatccatcaaccagcataaagagagcattcaacgccacatcatcgaaaactacggtggtgatcgccgaccggaatacatgcgcttcaacgcgctgcatagcgcctgccctggtgtcatgaccctgcatctctatcggcagctgcgtatgtttgataatgctaacgtcaatctggtcagtttcggctggaggcaaaagacgctttttagcagggttaacaaaatcgagttgctccagaagatgggcaaggacatcgaggaagatgaagataaatcagtcagactcaactcgttgattaaggctattgcgcgtgtaccggaagaaaagcttcgcttacgccgtccggttaaagtgcatccagctgcaaacatcgcgatggctgatcctgaacaccccgaccagatactgcgtctttctgccgcttcatctatgccgttcattatcattcaggatgagcacgtgaaaattcggccattgccagagttcgtggccaatgaagtaaagccgaggagtaaccgcctcaagacagatgtgatcggtatattccacggcgaaagtatcgaaatgattctctga

SEQ ID NO: 156042 - DNA, 1266 bp, Enterobacter cloacae
atgttctgcctggtggattgcaactcattttacgcctcctgcgagagagtctttcggcccgatctggtgaacaagccaattgtatgcctttcgaacaatgatggcatggtcgtggcacgttcagcggaagctaaaaaattaggtatccagaatggtgacgtgtacttccagaagaaagcattctttgaagctaacggtgtacatgttttcagttctaactatgccttgtacgcggagatctcccgtagggtgtgtgagacattatttaaattctccagtaatactgaggtctacagtattgatgaagttttcctttcgtttgaaggaatgcagaaaaattataattttgatgactatggaagagaaataaagaaaaccgtattaaagagcacccatatacccgtgggggtgggcatatcgacaactaaaactttggcaaaactagcaaataaagctgcaaaaacatggactaaaacaggcggagtggttgatctcagcagtccagaaagacaacgtaaattattgccatatattgacgtaagcgatgtctggggggtgggccggagatatgccaccagactgaacagcatgggcatcaggactgctctcgatctggccaatgcgccaacatcgcttatccgtaacacatttggagtcgtactggagcgaacgcagcgcgaattgaatggcgagtcctgcatagccctggaagaggtgaggaaggttaagcagcagatcatcagctcgcgttcattcggccagaaaatagagcactacgaagcaatgcaccaggcggtgtgtgagtatgccgaacgtgcaggcgagaagctgcgcgaagagaagcaatactgtcgctgcataacggtttttattggcacaagttactattcgaaaacggccccttacagtggccagcagacagtcaagctggaaaaccccaccgccgatacccgggaaatcattgcggctgcggtcgcagggctccggcatatctggcaggagggataccgataccataaagccggagtgatgctatctgacttttatgatagcgccaccagccagctcgatttgtttggtgagaaccgactctttgccaatggtgaagcgttgatgggcgtgatggatagaattaaccggtcaggtcgggggaaattatggtttgcgggccagggcatcgacaaagactggacgatgcggcgggagttattgtcaccatcctatctcactaacattaatgaaatccctcgcgtcaggattggctaa

SEQ ID NO: 156043 - DNA, 240 bp, Enterobacter cloacae
atggtagaggcacgtattcacgaaggcgatctggtcatcgtggatagctcacttgaggcgaaagagggggatattgtgattgcgaccgttgatggtgatttcaccattaagcggttgcagctaagcccggctcccgcgctactgccaatgaatagccggatgtcaccgatctatctgaaagaaggcgaagaactggccatttttggcgtggtgaccttcatcgtgtacaaggccttgtga

SEQ ID NO: 156044 - DNA, 504 bp, Enterobacter cloacae
atgaagcagtttacaaatgaagcaactcaacaaatgctggccgactttgacaaatcccctttctctgacgctgatctggccgcaatggatgtggatgctcgacaaattattgagcagaacgctgaaagggatcgccaacacccggtaacagcaatctggcgtgttgcggtcgagggaagcctgactgcgcgaggtggtgtcgtaaccgctgttgatagcgccagggttatggatctaggcaacggtcaaatggtcaaaatcgcagtggagggtgatgcagtcacttataccgatggttcatctgcacggattgtttcaagcgctggccagaaagctacacacttcgagaaagggctcgcgctggtgggcagcgtactggataacggggatgaaattgtctcgaccccgcaggacagattagtgctgttatcgcgcaaaggtatggctgaagcccccgactttctggcaatacccggaggcgtgactcatggggtatcgaactaa

SEQ ID NO: 156045 - DNA, 231 bp, Enterobacter cloacae
atgagggcaggtacccgctaccggtttgaaattgataacgaactggcattcaggataacgatcgcaggaatggaagattttaccaaaacgagaacgacgctgtaccagttgtccgcgctggcactgggggcaggcgattgccgtttcatctggcttatcaatttgttccgtatgttcacattcaggatagcgactgcaaccaatgaacataccaaaacggccctgccgtaa

SEQ ID NO: 156046 - DNA, 810 bp, Enterobacter cloacae
atgtgcagcgtcgtactcatagctgacggttgcaccatttggcttagtcagcgagctcaggaggcccacagcatcatagttgtaggccgtggttccttctggtccagtggagctgacaagtcttcctctggcgtcataggtgagggtttgggttacaccgttgacgccctgaatggtcccggcgcgaccgttcgcgtcgtagtcaccaaactgcatcacctgccccagcgcgtttgttgtccggatcaggttgccctggtcatcgtagtcaaatgtcgtaacatcgctgacgtcggtgcgcggaccatcaaccgaggccaacaggctcggctttcctgtaccaacaggggcataggtgtaggtccatgtccgggaagcgcccgagctgcgatctgtgaccttgcggcttatcacccggagatgagtgtcgtaggtaagctcagtgatcctggttggttccgtgatttttgcagggagcgacttggaaggaagccagtcggtcgtaaccttgcccccatcctggtctatctgggtggtttccaatccccggtcgttatgggtgaacgtgcgcttctgtccagcacgatctgtaatgctggagacgaggcctttgctgtcgtagacgtaggtttccttgcctcccacaaagccggtacacggcgcaccctcaacaacatcaggcttgagcatcccgttgtgacggctgtaggtatatcgctgaacgtggccgagggcgttggtgacagagacgcttccgtcagcgttgtagcttacctgagtcttctctgcgcccccggcgtgttcacttag

SEQ ID NO: 156047 - DNA, 234 bp, Enterobacter cloacae
atgatggtgttgaagcgcattttgtctacttcggtgctcacggctacaacccgccattgtgcaaaagcaacgcatggcaaagttgcgagcaccacaacggccaatgaccgcaggtttcgcatcagtaaaagggaaggtctcgatctcatttacagctccagtttttatgctggagctattttcaggtgggagagtcgttatcaacgactgcgtttttgcccttttagggtatga

SEQ ID NO: 156048 - DNA, 147 bp, Enterobacter cloacae; identical to SEQ ID NO: 49881

SEQ ID NO: 156049 - DNA, 852 bp, Enterobacter cloacae; identical to SEQ ID NO: 49880

SEQ ID NO: 156050 - DNA, 558 bp, Enterobacter cloacae; identical to SEQ ID NO: 49879

SEQ ID NO: 156051 - DNA, 219 bp, Enterobacter cloacae
atggtggtgatcatcgtaaacacaggacactatgagtttatcggccttggtgagacccacggacaagccacagaagggcttttgaaacgctgggacgaacactgcgaacgtaatccggatgctgagtctggttacatgcaggagctgatagaagaaggaagcgcacaagttgtcgatatggagcccggctccgccgtaatttacggacttgacggctaa

SEQ ID NO: 156052 - DNA, 270 bp, Enterobacter cloacae; identical to SEQ ID NO: 25098

SEQ ID NO: 156053 - DNA, 1317 bp, Enterobacter cloacae
atgagtcagtacaaagcgtatacctcatacaaagattcaggcgttgagtggattgggcaggtgccggagcattgggaggtgaaaaggttacgtcatgtcgggcgttactctaatagtggcgttgacaagaagagctacgaagaccagcagacggttgagctttgtaactacacggatgtctattacaacgagttcatcagtgatgatatgcctttcatgcaggctactgccagcgcccacgagattgagcagttcactctgaaaaaaggcgatgtcattatcacgaaggattcagaagacccatccgacatagggattcctgcctttgttccacatgatatgcccggagtggtttgtggctatcatctcactatgattcgtgccttaaatgataactatggaagctatatccatcgctcgatccagtcggatcatacaagagctcacttctttgttgagtcgccaggaataacccgatatggcctgaatcaaaatactattggtaatgccccagtagcgctccctccaccagaagaacaagccaccatcgcggccaccctcgaccgcgaaaccgcccgtattgatgcgcttgtcgagaagaaaatccgctttatcgagctactgaaggaaaagcgccaggcgctgattacccatgcggtcaccaagggcctagaccccaacgtgaagatgaaggattccggcgttgagtggattgggcaggtgccggagcactgggaggttaaacccttcttcgcgttggtgtcagaactgaaccgaaagaatgtgggcctagctgaaaccaatatactgtccctcagctacggaaacatcatccagaagcctgaaaccagaaatatgggattaacaccagagtcttatgaaacctatcaaattgtagagtctggcgaagttgtatttaggttcaccgatctgcaaaacgacaaacgtagcttgcgttcagcccaggttacgcaaagaggaatcattacctctgcgtatatggccgtgaaaccgcacagtattggttctacatattttgcatggttgatgcgttcatatgacctttgtaaagtcttttatgcaatgggtggaggattgaggcagtcattgaagtttgaagacgtcagaaggcttcctgtacttatccctccagtcggtgaacagagtgaaattaccaatacaattaatgcaggaactgctcgcattgatgctctagtcgagaaaacagaacaaagtatcaccctgctcaaagaacgtcgcgctgcctttatcaccgccgctgtcaccggccagattgatttgcgaggaaaacaataa

SEQ ID NO: 156054 - DNA, 171 bp, Enterobacter cloacae
atgaacggcctgacatacctcctgaaattcaagagtcatatcaggcgtcatcagccccggacggggcggttgggaaaggtggaacgccatcaccttgacaatagtataagtcagaaaaaagaacctgtcagccagcttttttccttacagcgagccgctaatgaaacgtaa

SEQ ID NO: 156055 - DNA, 501 bp, Enterobacter cloacae
atgccacggtcgtctgggggtatcgggttgaaaatggtggaggcactggtcaatctggggctcagggtgacattgttggtgttgggtgccaaagtgatgaccccacttgatgccgagatgattgccgtattacaccaggagctccggcagaagggcgtcaatttgcgtttgcaatcgggtatgggagcgattacgcaggtgggtgatacccagcttttacagctcagtttgaatacgggcgaggtgttggcgacggggatggtgttgctggctattggtgtaaaaccagatacgcaattagccagaagtgcctggttggtgcccggtacgacaaggcagaggtccatctcaatgagcaatcacagcaggacttacagaatctcgaaaaaattatcttcggagacagttagcactcggtccggtcggtctttgatcgggccactgcaatataaaaaaccgccttacgtacaatattttcactttcccaaacggagcccatga

SEQ ID NO: 156056 - DNA, 252 bp, Enterobacter cloacae
ttgcgtttcgctgagcaggagtttttcatagctctcgtggcaaacctcccccgtctgctcattcctgatgtggaccactttcttgttagcctcgatctgcaacacctgatgctcaatacggacatcaatgttgaaacgttaaataaaatcctgcggtgctttcaaaagcaattgctggcgttcggggatctcgcctccgatgtgataaggcagaccacagatggccaaagatacataggcaccacgctctaa

SEQ ID NO: 156057 - DNA, 207 bp, Enterobacter cloacae
atgataaagctgctgcgcatccccacccgggaaatcacaacgcgcggtgcccacatcaggcataaaaagggtatcgccaaggaaaatcgcatcagcaatctggaaagccatatctgctggcgtatggccaggaacctgcaacgcctgcactgtcaagccccccagttaaaaggtttcaccgtcagtcagcagatggtcaaactgtga

SEQ ID NO: 156058 - DNA, 144 bp, Enterobacter cloacae
atgagtaacgtgtttattggccataaaaaaatgcgtgataccgccagtgcagccaccgccgtattgcgtgctttggcaaatgatgaccggctactgctgctgtgccacctcagtcagagacaagcttctgtggggcacatataa

SEQ ID NO: 156059 - DNA, 429 bp, Enterobacter cloacae
atgaccattaatctggtgcaattcactccgttactgagtttcttagggggggtattgatcggctgtgcggcctggatattgctcctgttctgcggacgtattgcagggatcagtggcataatcgggggtgcgctctcagcggctacccgagatcgtggctggcgtctggcttttctgatcggcattatcgtctcgcctcttttatatggcctcgttcatccgcttcctgtgatcgaggtttctgcctcctggcctgtcctgatgatcgccgggttgctggttgggatcggaacccgctacggttcggggtgtaccagcggccatggggtttgcggtctgtcgcgtttatcctcccgttctctggtagctacgttgacgtttatgggggttgcttttatcaccgtctggctgatgggattgtggatttag

SEQ ID NO: 156060 - DNA, 798 bp, Enterobacter cloacae
atggtcatttcgttactgtcaggtctgctcgtgggagcagtgctcggcatcacaggagcgggtggtggcatttttgccattcccaccctggtgatgggcatgggatgggcaccacaacaggctgctccggtggccctggtcgccgtcgccgggagtgcggctcttggaacctttgaggcctggcgcaagggcctggtgcgctatcgtgccgctattgtgataatactggcgggcgtgcccatgacgagcgttgggttatgggttgcccaccgaacttcccctgcgttgctgagcctgctgtttgcgggggtaatgctaatcgtcgcgtggcgattggttcgggcccccgagatagttgccaggcatacttatcccgtcgaactggatgaacacaccggacgatttatctgggctgtaaacacatggttgctgtttctcatgttcggagctgttaccggttttatgaccgggctattagccgtgggtggaggatttattatcgtcccgttattgcggcaatttaccccccttcctattcacagttgcatcgcaacctcgctgatgattgtcgcattggtaagtataggcgggattgcagtggcagtgatacagggtgccactctgcccttgccttttactctctggtttgtgcttagtgctgcgacagggatgtcgattggccgaaggctaagccagcatttacctgaacatattgtgcagaaggggttttccggactactgatcgtcgttgccctggggatggtatttaatgccgttatgatgaagtttagtggctaa

SEQ ID NO: 156061 - DNA, 387 bp, Enterobacter cloacae
atgcttctgatacgaaaagcttttaagcgcctgcactatcccattgatgttattgctcaatgtgttcgctggtatctgacttacgccctcagcctgcgcaatctcgaagatatgatgacggagcacgtcgttatcgttgaccattccactcttcatcgctgggttatgcgcctggcaccgtcgttccgccagtataagcgtaatgtaggtcggcggtggcggatggacgaaacttacattaaaatcaaaggccagtggaaatatctgtaccgggaggttgataccgcggggcagaccgtcgacttcctgttgaccgccagacgcgacgctgcggctgccttacgcttctttcgcaaggccattcgccaccacggtgagcctgagtag

SEQ ID NO: 156062 - DNA, 297 bp, Enterobacter cloacae
atggccgacaaaaaagtggatagcgcacgtgcccttgctgccggaggatggcgaataagccttgtcagctgttggctacgggtctcacgtgcgcaactgcatgctatggctcgtcggtcgaagaactggcaggagcgtcgacgcaagcgcaagcctgatgatattgaagctctggatcgtatccataccgttatcggcgatctgcctacgtatggttatcgtcgggtgtgggcactgctgcgcagacaatcagaaacggacgacatggcggtgatcaatgccaaacgcgtatactga

SEQ ID NO: 156063 - DNA, 270 bp, Enterobacter cloacae
atggcggcgctggccacactcaacgccagtaaacctgaagaagaaaccatcaccatcaggcagagtaaatacctgaacaacctgattgagcaggaccatcggaatatcaaacgccgaatacgacagatactggggttcaaatcatttcggcgagcgcagacgataatggagggcattgagttagtgcatatgatacgtaaagggcaatatcagcatcccgctgaagagcctttatcaccggcggaacaattttacctgttggttgcctaa

SEQ ID NO: 156064 - DNA, 741 bp, Enterobacter cloacae
atgcttgccatcgctgccgttgcaacgttttttctaaccgctatcatggccatggccggagtcggagccgcttttattctggttccgatcttcttggcactaggggtcgaaattcatgcagcgatggccaccgccttgcttctgaatgccatatcgacgagcgtgtcgacaacgacattcattcgcaagcgtttggtcgaatggcggttggcactccccattttgattgtggccgtggttttgtcgccaatcggggttcatgtcagccaaaggttagaccgccattttctactgtggctgttctccggttttcttatttttgccagcctcatgatgttgttgtacgcgccaaaatcttctggaattcagcgtagtgcgcgaagccagatgttgagtagtttgtcccttggcggtgttgcgggttttgtcggtggcctgttaggggttggaggtggcagcatcatcgtcccggcactcgtgggggccgggctggaacccaaacgggcgtcagcaaccgcttctttcgtggtcgtgtttgcttctctgaccggtttctttgcccacgcaacgctttcgggaatggattattcgctggtcggtgccaccggtatcgcatcggcgggaggggctgcatttggcgcgtggttaatgagcgaaaaactcaaagggcaacagcttaaatacatcattggattcgtcctgttagggaccgccgtcaagatcatctgggggcttttgtaa

SEQ ID NO: 156065 - DNA, 624 bp, Enterobacter cloacae
atgacacacgatgaattcgaagcggcgatggtctttcacggccataagtgtccagcaatgcctttaggctaccgtgctgcgcaagcagcgatgagagcgctcggtgtggaacgggcagaagacaaggagctgcatgtcatagcagaaacagggaaaggccatgctgcgggatgctttctggatggcgtaatgtcggctacgggatgcacctacggcaagtcgaacatcgagaagcgctattacaacaagatggctttcactctgatagacgtgaagaccgggcgctcagtacgtgtacggctaaaggacgagtttttcggcaacatgctcaactcgccttttgttgcccaacgcaaacaaggcatagcgccacaggatattcccgccgaagtcactgaccccctggttaacaaggtcatatcgatgccggaagaaatgtttctcgatatcgggctaaagaagccgtttgaacttccacgcggtaaaagctgctttgacacggaactatgcgccaaatgtggggaacgtgtctttgtcgataaactgatcgacacggaagcgggacggctttgcattccttgccaggaaaaactggctggacatactgtatcctcattttgctaa

SEQ ID NO: 156066 - DNA, 888 bp, Enterobacter cloacae
atgggactaacttcagacggtcggtgggaaataaataatattttattgcacgatttattgacatactctgatggcagcgcaagagttggagaactcaaggcttgctggagttcaggccatggtttttatatcgtaaaaggtattgttacctggttaacgatgcgctctttaaagattgaaagattaccgtggatggctgacttttcatttacgactctcaagtatgaaaaaagattatatatacctattctaaaatatttacaagaacacccagaggtagtagatgaagcatgcaatgagcttcttgaaatctacgcccatacgcagagattctatgcaggtaaaacgcatattaggcttggcagagggtataaaagctcagatgaagtgattacaaagaatgacgattatgccaaagcggtatatcatcatgctgtcgcagcacagatggttaataaaggaactattgacatacctcatgatgtgattacctcatggggtaaaaacagcaattacaatgctgactacctggttggtgttgatatggacgtggctattgaggatattttattatcagctgaaaccattgctccaagacaaaacgaaatacaacatagtgctctcgaatctggagaattccttgtgctgaaccgtagctgggatggtttgcttaaagtaaatgctgaagctgttacggcgctgaatggattttcaatacaagaacccgaaaatcaggatgaggcaagaaaaatattatcggaaccattaccagcgtaccggccgatggataattataatcaactagttttagataaacgaaaatctccacagtctttccgttcacgtatatcacgagcgtggaatatcttaacaacgaaatatcaataa

SEQ ID NO: 156067 - DNA, 375 bp, Enterobacter cloacae
atgaagcccactctctcacgcgaactggcactcgacgcgctgatgatggccgtctggcggcgaaaaccggacggcgaggtcatcgtgcactcagaccagggcagccagtacggcagtgacgactggcagcgcttctgccgggctaataacctggccccgagcatgagcaggcgtggcaactgctgggataatgcggtggccgaatcgttcttcagttcgctgaaaaaagagcggatcagaaaacgcatctataaaacccgggatctggcccgggccgatatcttcgattacattgaagtgttctacaaccgggcccggtgccacagtcacctcggcggcctcagtccggaggccttcgaacaggcctcatcgtga

SEQ ID NO: 156068 - DNA, 126 bp, Enterobacter cloacae
gtgcttgccggagttaactgtgaactgctggcgaccataagagatctgccgttgccaaaactggcgtcactggctgaaactaaccaactgattataacaatcaggcaggatatattgctgccctga

SEQ ID NO: 156069 - DNA, 234 bp, Enterobacter cloacae
atgcaagtgatagtcgtttgcaataatgaaagtccttttatttttacgatgccgaagtatgaaagtgtgtttctgtatcaggatggtaagggaaatgtacaggtgttggacgtgaacatgcatttccttgaaaaggaagataaaaatgtttccacaatcatcactgcttcagaaaggatgattactgatacggagttgaagaagctcgtcagacaattacactacccgacttag

SEQ ID NO: 156070 - DNA, 192 bp, Enterobacter cloacae
atgtctcatctgaacaatctcaaatccgtaatgatctctctcgccgccgaacataagctgcctgaaatctaccaggatgacatcactaccgatgtggagtctctggatcgattcgatggtttacgtctggtcttgaagtggtcaacaaaaactggccaccgcgttagagtttttccagtatcggttttctga

SEQ ID NO: 156071 - DNA, 336 bp, Enterobacter cloacae; identical to SEQ ID NO: 83979

SEQ ID NO: 156072 - DNA, 1032 bp, Enterobacter cloacae; identical to SEQ ID NO: 83983

SEQ ID NO: 156073 - DNA, 528 bp, Enterobacter cloacae; identical to SEQ ID NO: 83984

SEQ ID NO: 156074 - DNA, 2040 bp, Enterobacter cloacae
ttgtggattggccgagttggtaacgactactggagtggcaactgttcgatttatgaggaatacacgcgggtccaagtcagtaatccagacgccatagtgtctgcaactcttgagtacgccaagtgggatgactacatgcaagtttgggttggtaaatcaggtcaggaaactaaagtatggtccggccctgacggcaatttccctccagaaacggctggccgatgtgaattgtcaacaagttgggagcgaaaccctaatattgatgtcactccctatttcaagaatgtgaaagatggtgatgttgttacgtttaagatccgcgtttcagtaactggcgcaggtgagggttttggccgcataaagctacgctatgacccatcaaaagccattaccaaggatgagtgggctccacagagctgcatggattcagccaaaggggttgtagatggttttgcggaaggcgagatcacatgtatagatgacccgactgatgctacgggctgcacagtcatcaatgggatcaaagtttgcgaatctcaactcaagccgtcacctttgcctggtattccaaaactatgcaaaaaggttcgagttaaagctgactatgacttttataaggggcaaatggactgctggacagaccctcaaggtgaaacgcactgtccggtaaacacgggcgggaatctcgatagctgtcagaaatatgaagaaaaccctcagtgcggcttcatcagttccaaatgtgttgatggtgctcagggaagttctggtacgtgctacgtccacgaggatacttatgactgtggtacagatgtttctgttccgaccttggaaaaggaaactgagtaccagtgcggtgggcctatacgctgcatgggagatgactgccttgatttgaccaaaacacaaagcactgattttgctcgcgctactgcgttgctcaatgcagcccaattcatgacgcaggatatgagctgcacaggccaagatggggatgacaatcctaccggggatgaaaacgttatttgctctgcttttgcaggggaagctggcgaatgcaagatagctgttgggggagtttctgattgctgtgaaaagccaaccaatatatctcttgccgattatctgaacctaataatggccgttccaaagctcgatggcgcagtgatggggctgactgatggtaatgcgcttaaaggtgcttatcaggtacttagggaacctgcccttcaagggtggacagaagtcacaaaaccgttcacaagttatatagagaacgtttcaggtgctgttgattcgttcttccagcctgtagagcagtttgttgatcaactcattgaccagctcaaagagcaagtcaaagaagtgatgatggatgtcatgaaatcagcaggccaagatgcagcaacagagcaggcggctgccgcagcatctgaacaagctgccgaagcaatgatggagactgcgacaacatggcttagcactgccatgacgatatataccgtctatgtcgttgcgatggtgatgatccagatgatttataagtgcgaggaagaagagttcactatgaacgccaaaagagcgctcaagaattgcacctatgtaggctcttattgtaaatctaaggtgttgggcgcttgtattgaaaaaagagaagcgtattgctgcttcaattctccgctctctcgtattatacaagaacaggttcgccctcaattggggcagaactttggagaccccaaaaatcctcagtgtgaagggattccactagataaaattgccgaaattgattggagcaaaattaatttggatgagtggcttgggatattacagcagaacggtaaattccctgatccggcctcaataaatctcgactcgctgactggagcagggaatgacttcaatattgacgggacgcggaagaatgctcaggaaagggcgttggagcggttggaagggattgatattgacgcgaagcgaaaagaggcgacaaacagcatagaccctcaaacaggcgcgccaactggtggtggtggataa

SEQ ID NO: 156075 - DNA, 162 bp, Enterobacter cloacae
atggacaacctcacagtccgcgctttgatctacaacacgctgacaccgttcatactctggaatgtgggcgttgatagtattctgattgatggttgtttcggcagaacaatccccaaagccacctgcgatgaggtccatatcctcataggtctttttgcttag

SEQ ID NO: 156076 - DNA, 1584 bp, Enterobacter cloacae
atggccaggcgtaagataaaaggatggatcagaccagtaaaatggaagcataacctttccattctcattttctcattatttttatctggtttactcttttttatggcatccgagggcgtagcttacctcattttccgggataaaataaaagactacacttctgatgttctcgttcgcgcggaatctctcctgattcagctcgagtctgtaaggattgcagcaaagaccgggccggagaacggccgatggccctgctctcatgaaaatcttcgtcatctgcgggtggttgtctggccctacccgctgattaaggacgcaggctataccacaaaaaacggattaatctgtagcgcactgtggggaagcctgtccacaccgttatccctggagcgattcgataaaaaatggtcttcatggggagggctgtggctctttggtgttaaacttcaggacgatatctctgccgatgcttatctctcagaagatgtaatggttattgtctccccttttgtgttcagacgatttgaaactgatacacatacagtaaatttcagcgcagttgtcggtaatcgcaagcatgacgggcactacttcaaaattggacctgatgctgcttttctggataagcatgatgacgttcctccgaaattcagagtgttcagagcatgcagccttcagtatgatctctgtgtagccggggggggatactttacgggggtgctttctggacactggagtatacagatgctgatggccgcagtgtcagtaatatccgggttaatgatttatattatcattatgaaccgtacagagctcaacagctccctttccttaagattcgtaaaagcattaagaaataatggattatctcttgtatatcagcctgtttacagaattaacggcgaaaatctctgcggatttgaggccctgctcagatggaaggatgaaagactcggaaatattggccctgatgtttttatccccctttctgaaaagcaaggattgcaggaagacgtgacattatatgttattaaccatgccatccgggagttcatccatacggccatgcaggaaaagatatttctgagcgtgaacattaatgccagcgatcttgattccggaaagttcagggacacacttattgcactaatttctgaatacaacataccatccggaacaatccttcttgaaattaccgagcgtcagggtggtgattttgaggatatgaaagtacatattgaaaattataaaaagtatggagtcaggtttgctatagatgattttggtacaggatattctaacctgaatatttttacagcactcgatgttgatgaaattaaaatagacaaatcactgacggatgctatcggcacagaatcgctgagttacaatctgcttcccggtttatatgaaatgttccggaatatttctgataaaattgtgtttgaaggggtggaaacgcaggagcaggtgaattatctgaagaagttctggccacagagtagtgctcaggggtggtattattcccgggcgctgacacttgcagaagcgacagaacttatatgccgacataatacaaaataa

SEQ ID NO: 156077 - DNA, 705 bp, Enterobacter cloacae; identical to SEQ ID NO: 83453

SEQ ID NO: 156078 - DNA, 957 bp, Enterobacter cloacae
atgaataaagatatgcgtgacagaaaagaagaaaaaagattacattcactctacaccatgggcatcctcgacagtaacactgaggagcgttttgacaggctgacaaggatcgcctcaaaacttttccaagttcctgttgcgctgatttcattggttgatcgagatcgccagtggttcaaatcagcctgtggtctggatatcagatccacgccgagaactgattctttttgtgctgttgcggttgaaaacgggcgtccgcttgttgtcaacgatacgctcagtgagccagcattttctcataatcgtctggtgcttaatgaacccaatatccgcttttacgcaggctatcccgtacaccttccggacggcgaaattgccggaacaatctgtatccttgatactaaaccccgtgaatttacagctgatgagttttccttactgcaggatcttgcttttattgttgaagacgaattccggataatcaaccaggcaacgactgatgccttgaccgggctctgtaacagacgttctttcacactgatagcggacgaaatacagcgaaaatcgctcaggaataacaatacattttgcctgatcatcatagaccttaatgatttcaagctaatcaacgacacctacgggcatgcggaaggcaacagagccctgaaggatttttctgaaatactgcagaacacagtaagtgaaaatggtttcattgcaaggatggggggggatgagtttgccgtgctcatcccggaagcatcggaaacggaaggtgagacgtttataacgcagatgaacgaatccgtaaaaaaatataatttaaagcatacagactacagacttgatttctctggcggagtggctgtctttgataaagacaaactaaactctgtttcacttatgatgaaacaggccgacagagagatgtatcgtaaaaaaaaatcatcaatatga

SEQ ID NO: 156079 - DNA, 396 bp, Enterobacter cloacae
atgcttgatacccgtttctgcgcgttcatcctgcgcgagcagccggaagccgtgctcgcgcgaatggagcaggcggtgctgcgcggccaccgtatcgtgatctctgccgtcacctgggccgaactgtcacaggcggcacgggcgtccggtcccgccacgcaggcactggccgacgcgttctgcgccagtctctatgccgtgctggcctgggaccgggctgctgtggaggccaccactgaagtgaaagcgtccctggctgcagccggaacgcccatcggtccgaacgacacggcgatcgccgggcacgccattgccgccggtgccgtactggtgacgaggaacgggggggagtttgagcgggtgccgggactcacgctggaagactgggcccgctag

SEQ ID NO: 156080 - DNA, 231 bp, Enterobacter cloacae
atgagaaccgtatcgatatttaaaaacggcaacaaccgcgccatccgtctgccccgcgatctggattttgagggagtgagcgagctggagatcgtccgggaagggaactgcatcatccttcgtcccgtccggccgagctggagctcattcgccatgatgggcagggccgatccggagtttatggcggagcgcggggacgttgtcagcgacaaaggaaggagtgaacagtga

SEQ ID NO: 156081 - DNA, 192 bp, Enterobacter cloacae
atgacctatatgttttcttctattttcaccggagatccgaaaactcccgaagtcggatttgaactgagtaatcatatggacagtcaatggatatacggctggaatgagttcagggcaaaagtcaggagggaacggaaagcggaagttcgtagcccggccccagaatcatacgggaaatctatttctaattag

SEQ ID NO: 156082 - DNA, 345 bp, Enterobacter cloacae
ttggcagacaaacgcagcaaaatgctcacgatgtgggtaacggaggacgaacaccgccgtctgctggaacgctgcgacggtaagcagctcgcagcctggatgcggcagacgtgtctggacgagaaaccggctcgggctggcaaacttccgtcgatctcgccggtgctgcttcgtcagcttgccggcatgggtaacaacctcaaccagattgcccggcaggttaacgccggtggtggcagcgggcacgaccgtgtgcaggttgtcgccgcgctgatggccattgatgccggactcgaacggctgcggcatgccgtgctggaaaagggggcagacgatgatcgttaa

SEQ ID NO: 156083 - DNA, 294 bp, Enterobacter cloacae
atgatcgttaagtttcacccgcgagggcgcggcggtggcgccggtccggtggattacctgctggggaaagaccggcagcgcgacggcgcaaccgtcctgcagggaaagccggaagaagtccgggagcttatcgacgcctcgccctacgccaaaaagtacacctccggcgtcctgtcttttgccgaacaggacttaccgcccggccagcgtgaaaagctgatggcgagtttcgagaaggttctgatgcccggactcgacaaagaccagtacagcgtgctgtgggttgagcactag

SEQ ID NO: 156084 - DNA, 216 bp, Enterobacter cloacae
atgacggagctggaaaaacagttgctgagcgcattagagcagctacagcaggactactcgaaaaggctggacgagtgggagaacgccttcgcggaatggcggacgatgtctggtcttatgcaacgggagaacgcggcgctgagcgagcgcgtcacgggcttgagcaggcaggtgcagagtttgagcgagcagctgcgccggttgtcgcaaggctga

SEQ ID NO: 156085 - DNA, 189 bp, Enterobacter cloacae
atgtatacttatgaatgggctttctttgataagaacggcgataaacttccctcggcagtaacaactgaacagcgaacgtatgccgcgggcgatgtgaaaaactacaatggcaaaaactataaaattgttcacaggatcattgatcgagtgactaaagatagtgacctcaacattgctgttgaagtttga

SEQ ID NO: 156086 - DNA, 513 bp, Enterobacter cloacae
atgtctgaaaaggccaaacgctcaggaagaagaaccctggctacaaaaagagaaaacctaattgcaggattatggggggatgagcttgaagagttaaatatatggagccgtcatgaacatgatggattcactacattacctagaaccctcacgtatataaacagaatactggattttctagggggatctggctctccattatctcaaacctaccttgctctttggtgcagagtttttgatgagggatttgtcgaaattcgggataaagaagcttttgcgtatgagtcaggatttagcggtcagagagctgttactacatggtctgggaggatgaaaaaactaaaagaacttggttttattttaaccaagcctggcacgtcgggagagtttcaatatgtgatcatattaaatccgttcccggtaattaaaaacatttacgagaacaaagagaaagatgaacgttataacgcactagttgggcgtatgcaggaggtcggagctaaatgggaatga

SEQ ID NO: 156087 - DNA, 546 bp, Enterobacter cloacae
atggctaactattttccggatttagttatatcagaagttaattatgattttagtcacttagatccattcgtaatggtggtgaaaagtgatatggctagaaaggagttgaaagtacacgttagattcacaaaccattgttttactaagggatacgatgcttttagccatcctgcaggggagccgattattcctgaccatagcggaaacaaaagaactttttgcccaataagatataggctctcgttgagtctgcctgcaatcatcagcagcttggtgaatccgcaagaaaaggtttttcaaacagcagcaaggcgaaactgggcttactcaataacgattgatgatcctgcagggccgtatcatttgttttttgaaatacgaaaagcctctcgtgctgaaaggcatctacaggatttgaatgttgttgttgaaagtgcgtatcacgaagaaaaggggtatggaccacctgatcttcttggtcgaataggatttgtggctctttgtggaagagtttatgagggtaaaccgctggctacaaaaagataa

SEQ ID NO: 156088 - DNA, 1083 bp, Enterobacter cloacae
gtggcaatatttcatttaagttttaaagtattaacgcgtacaacaaaaacaggaaaaagcaaaagctcattatatttggctgcttacaacagccgcgaaaagttaaaagatgagttaacaggtttaacttttgactacactaaaaaaaatgacttatataaaagcggtattattttaccagaagatgcccctagtaaattttatgatagggctacactatggcaaaattgtgaggcatcagaaacacgccgggacagtcagatctgcaggtactttatcgtggccttgccacaagagcaaaacggcgagcaaaacgaggcgctattaaaaaaatatttaaaaaataattttgtaaaattgggaatgtgcgcggattatgctattcacgatataaataataaaccacatgcccacgtaatgcttacaatgagaaaatgcgaaaacggaggatttagtaaaaaaaaggcgcgagagtggaacgatccaaaattagctgaggtatggcgtaggcagtggtcagtgttggttaatagaacattaaaagaaaatggacacaataacaccattacccatttaagctttttacgtcaaaaagagttagcgatagcaaaagcacgcgaagcattagaaaataacgatattaaaagagcggaagaactaacaacgttagctaaacacttggcaactaaaaagcctgttaagcgaaagcctaccgctaaatatttaaaagacaaagcgcggaaaaaaaatataaatccagaattgcgccaaaggctcaggcagcaaaaagaacaaaaagaagaaacaaataaaaaagaaaacaaattaaatttgatttttaaaaatttaatattaagatttaaaggaagtaaaaaaacagaaacaacaaaaatgaccgaggctgattttttaaaaaatatgaaaacagacgagaaagaggccgaagatttagaattaaataaatatatagataaggagttagagaatgagcttaataagaaaaatgacattacacacacacccgaggggaatagaattagaaacagggagaaaaagagtaataagccaccgcgacgaaaataa

SEQ ID NO: 156089 - DNA, 213 bp, Enterobacter cloacae
atgacggcgggggcaacctttgcgaagcattgggaagccttgcgccgtgcggtgcgcgttagcgttccgcttgtcgcttgcgacaaagggcgaagccctaaagcctcgcagagaccgcacgttccccgaaggggaatgtataagcgggcatttatcactaacgttcaaaatgggcttacttcgtgcgcagctaccgccttttttattatttaa

SEQ ID NO: 156090 - DNA, 807 bp, Enterobacter cloacae; identical to SEQ ID NO: 34948

SEQ ID NO: 156091 - DNA, 225 bp, Enterobacter cloacae
atgcacgaggcacaggccaaccgaaacggcagacggcgcttccagcgtgacgaccatgccgagcacgcagcgggtgaacacgtcgatggcgagggtcaggtacgggcggccaataggttgccggtcgcggtcatcgaccacgatcaggtcgatgaccgtatggtctatctgcacctgctccagcggcgcggtcacggcaggaggctcgccgcccacaccttgtag

SEQ ID NO: 156092 - DNA, 432 bp, Enterobacter cloacae
atggaaaaaacattaaaaaccgaacaatttgattcaaatatttcgcacgcagatccttatattaccccctccctctatatatctctcagaactcactgtgttagtgttcggcttaataatgaagaactcaatattctaaatgcgagaagagggaaaaaaagcaaaggcgagtggctgcgaacatcatcattgaaaaagcctcctctagtaataccttcgataaatattgaaacttggaaaacgttgagtgagattaatcagaagctgaaccgcattgttctgcatgtagatagcaagagcaaagacagcaagcttacccatactgaactatttgcagtcagaagacagatcagtgaacttcgtcaacatcttcttaatgcagatatttggagtgtccctcgtgaagggtatgcagaagatcaaaaggggtaa

SEQ ID NO: 156093 - DNA, 1221 bp, Enterobacter cloacae
gtgaagggtatgcagaagatcaaaaggggtaagagcttcacaggtgttgttcaatatgcattgaagccgggagcacatcataaaagtgatcccatcatcattggcgggaacatgttaggtgattcagccctcgaactgatagttgaatttgatggcaccaaacagcttcggccagatgtccagaaaccggtttggcacaactcgcttcgcctgcctagtgtagaatccctaacggctgaacaatggtccagcatcgcagatgactatatgaggagaatgggattcagtgatactcaccttcgttgctatgtgcttcatgacgatccggctggtcagcacatacacattatcgcaagtcgcatagacctcaatggagggaagctctaccttggcaggaatgagaaccttataagtacccgcataatcagtgagcttgaaatcactcataatctaacagtgaccaagacagcaccttccattacaccaaagcaaccgaagcggaaaagaatctctcgcaacgaacagatgctatcagaacgaactggtgttccctcccctaaagaagctctacaacaaatacttgataaaagtttgactgatatgcccgaccttcttacttttgttaagcgactcgaagatgcagaactcggttggacggcgaatgtcgcaagcacaggtaaaatgaacggcttctcattctcttaccgcgatatagctttcaaagcttcgcagttaggtaagggttactcctgggtaaatctcagtaatcggcttaactacaaccccgaccacttagaagctttacgaaccaacacaccggcaaaagaccaccctgctcctgctcctgttcctgctcctgctcctgttcctgctcctgctcctgctcctgctcctgctcctgctcctgctcctgctcctgctcctgctcctgcaatagttttgaaaaccgctgagagaaaggaaagtatcggtaaaaaaattgcagaactggaactacggctcagagaagacaaacggaacgaaatcgtagaaaagatccttcaaaagaatgcagccaaacagcaaaagcatctcaggctcaccggctggattccctttttacaacggctcatagagcttctcagaaaatatggaaagagcatcctccacaaggttcctacaaacttctcagaagtctattcaacacatcatctgaaacctacaagaaaaattcgtttatag

SEQ ID NO: 156094 - DNA, 336 bp, Enterobacter cloacae
atggcttctcgtgatgatgaattgtattcagaaattgggcggatattgtttgaatcggcacctgaggatgcgcagaaactcttcctggatgctgagttatcccctgaaaatgatcatgcaaaatttttatacgattacatcaataaacaaggtgagaaaacatggtttttgcctggaacctctgcaacagacagcttacttcttaagaaattagtagaattaaggaacttctacatagaacaaggacttactggtgggcggccagtatggcatggctgccttgttacagttgatcttgaaaaaatgaagattaatttagactatcgttacgactaa

SEQ ID NO: 156095 - DNA, 1539 bp, Enterobacter cloacae
atgagaattaattctccggtcactcaaaatgagtatgtactggataaaaatatcgtactgatgtccacaacagacatccacagtcatatcgcttatacaaactcagcatttattgaggccagcggttacacgcaggaggaactgtccggacagccacataacatcatgcgacatccggatatgccagaggaagcatttcgtgatatgtggaacacgcttaagcagggagaatgctgggctggtacggtcaaaaaccgtcgtaaagacggtgatcattactgggtcagggcaaacatgtcccctctctataaaggaaaccagcttttcgggtacatgtccgtccgctatacgccgctgccggaagaagtgaagcaagcagaacagctttatatacatctgaaagagaaccgtgggcgtgggaaaaaactgcataaaggcgttgttgtcagaaccgggttattttcctttttatccctgtttaaaaagatatctgttcaggctcgtatgcggatcgctcttgctggggcactgctcatgagcctggccggcagcatgacagacacttctccgtgggtgttgcccggtgtgatgataatcgccttcctgctcgccgactggtttttacgccagcagatcagcaagcctgtgggtatggtgcttaaacatcttcaggatatggcatcaggcaaagagcccggctcccccagactcgacagggttgatgaaattggcatgatgttgcgtaacgtcaaccaggtcgggatccgtctttattcactggtaaacgatactgatgttcaaatcagggaaatgtcggtggcaggctcgcaactggctgccggaacagaggagctgaatgcccggacgacagaaacgctggcgaatcttcagcataccgctcaggccactgaagaactgatggccgcagtgcgtcagagtgcggatacagctgcagaaacagtaaaacttgcagcctccgcagatgactctgccggaaaaggtgaagcagcaatgaatgaaacaaaggtcatgatgaaatcaatttctcaggccagcgaaaaaatcgttaatattatcagtgttatcgataatattgcttttcagaccaacattcttgcactgaatgccgcagtcgaggccgcacgggcaggctcacatggacgcggttttgccgtggtggccagcgaggtcagaaaactggctcagcattcagcttccgcagcggcagagattaaggggctcattggcgcgacggttgataccgtggcttccggcgaaaaaaccgtagagatcgccagcggtcatattgaaagcatccgtgccgaagtctccagggtgtcgtccatgatcaatgagctctatcacacgacagaagaacagacggcagcgttgacactcattaaccgttctgttgaaaaggtggagctgatggctcaggataacagcacgatggtcgcacagtcggccagctccacgcgggatctgatgacacggagcaccagacttcaggatgccgtatcaacttacggtctgaaataa

SEQ ID NO: 156096 - DNA, 444 bp, Enterobacter cloacae
atggtcggtttcaccggtgcatcggtgtcgatggtcacggtccagctgctgctggctgactcgttgcccatcgggtccttcgccgtggcggtgaaggtgtggtccccgcggcccaggtccacgctcggcgtgaagctccaggtgccgtccgcgcccgcggtggtggtgcccagcacgttgctgccgtccatgatggtcacggtgctgcccgccttcgccgtgccgctgatttgcggacgggtgtcgtcggtgagtgcgccctgcgacaggctgccggtcacgctgccggtgtcgtcggtcacggcggtgatttccaccttgcccgggaccacgtcaacggtgatgaccacgtgcgagccttccggcccggtgttgcccgacggatcggtgacggtggtggtcaggtcgtgtgcgccgttcgccagcggctggtccggggtgtag

SEQ ID NO: 156097 - DNA, 255 bp, Enterobacter cloacae
atgatggtcacggtgctgcccgccttcgccgtgccgctgatttgcggacgggtgtcgtcggtgagcgcgccctgcgacaggctgccggtcacgctgccggtgtcatcggtcacggcggtgatttccaccttgcccgggaccacgtcaacggtgatgaccacgtgcgagccttccggcccggtgttgcccgacggatcggtgacggtggtggtcaggtcgtgtgcgccgttcgccagcggctggtccggggtgtag

SEQ ID NO: 156098 - DNA, 552 bp, Enterobacter cloacae
atggaaatagctaaagacaaagagctacctgttgaatatctgcaggaatgttttcattacgatcctgaaaccggtgagctaacttggaaagaaaggccgttaagtcatttcgaacactccaccaaagctgatggcggatttaataaaaaatacgctggtaaaattgctggatctgtcatggcgagaggctatgtatggattacgctgaataagcgtcctcatttcgcgcatcgcatagcgtgggccattcactacggcgagtacccaaaggatgttattgaccacgtgaatggcattcgtactgacaatagaatctctaatcttgtgcaatccacgcctagcgccaattccagaaaccagaagaagagatccactaatacttctgggcacatgggagtttgtcgccgaagcgataacggaaaatatcgaagctttattcaggaaggtgggaagagagtgtggcttggttgtttcgacaccttagaagaggcaatcgccgtcagaaaggaagcggaaaaacgcttcgggtatcatgaaaaccacggtcgataa

SEQ ID NO: 156099 - DNA, 276 bp, Enterobacter cloacae
gtgctggaaaacgtcattgaacgcgcggtcctgttgacgcgcgggaacgtgcttcagctgtccctgccggaggtttctcttgcggaaacgaccgtggccgcaaccgaggttgcgaaggatggagaggatgaatatcagctcattttgcgcgtgctcagggagaccaacggcgtggtggccgggccgaaaggcgcggcgcaacggctggggctgaagcgtaccaccctgctctcgcgcatgaagcgtctgggaatcgataaagagagcctgaattaa

SEQ ID NO: 156100 - DNA, 321 bp, Enterobacter cloacae
atgtcactgcaagccggaggaaaagtgaatatctctgatttcgtgcgcaaaaacccattcgccaacccactgcaacggttaatcatgattcgtatcctgatggcaggttcgatggacggagagggggagcgagttatcgatcatcaggtcctggctgaattctgttgctgctcaaaacaagccatgtttaaggagatcaaggcacttgaacgcgcagcttgcctgaaagtgagaaaaattggtgcccacgatacagactttaaaactcggattgagccagctcgcgggtacacaatcacgccagttcaggagtttgtatga

SEQ ID NO: 156101 - DNA, 804 bp, Enterobacter cloacae
atgaaactggaagcatcactcaaacatttcagccctcagggcatgcacatcagcgacgacgtgaaaggaacctctccggaccgccttacaggaacagatgtaatggcggcgattggcaccaccagcagccgtgcgcgcttcggcctggctgctttcttcggcaagtccggcatcagcaaaacggatgaacagctcgcagttcaggcgctggcgcgatatgcgatggaagccgcaccaaagaacgtacgtaaagcagctggtggcgagttcggctggtgtatgcagatgctggcgcaatttgcctttgccgattactcccgctcagcagctactagtgtgacgtgtcacagttgcagtggcaccggttttatctccggatatgaagatgtgattaagcatcctggtatttttgatgcagacggcgccgaagtgttggcaccgaaaatcaaaaaagaaatggtgaaaagagtgtgtggagcatgtgaagggaagaaagtgatccttgcccggtgtcggtgtggcggtaaaggcgaggtgctggatcgcaaagctactaaagaccgcggcgcaccggtattcaaaacgtgtgaacgttgctctggtaatggattttcttcagtaccttccacagctgcgcataaagcgattatgaagcgtttgccagatctgcatgtaagaacatggacacgcaactggaagcctttcctggaggtgctggtagatatttgcagggcagaagagggtaatgcagagcgggaattccagtcagctactcgcgcatgtgaagaaggctgcaaaatctag

SEQ ID NO: 156102 - DNA, 471 bp, Enterobacter cloacae
atgatcggcgccgtcatcaagaagctgtggctgccgattgtggtgatagcgctactgggttcattggtatgggctgttaatcactatcgcgacaacgccatcacctacaaagagcagcgcgacaaggcaactgagaatctcagccttgcgaacaataccatcgatgacatgaaggtgcgccagcgtgatgtggccgcactggatgccaagtacacgaaggatttagccgatgcgaaaaagcagcttgatgatctgcagcgttgcgttagcaatggcaagtgtgggctgcacgtcaacgccagatgtcccgcgaacggaacgaccagcaccggcggcctgggcgatgagtccagccccagacttactgactccgctgaacgggattatttcaccctcagagagcgaatcgtcacagtgacgaatcaggtcggttatctgcagcattacatcaaaaatcaatgtttgaactag

SEQ ID NO: 156103 - DNA, 246 bp, Enterobacter cloacae
atgcaacaatctaagttagctgtttatttgggcctcacagacgatcaacttgatgaaatgggattggatgaggatgtcatccatgaggacactggcaactcaggtgatatgacctattcatattacttcaatgttccggaagagactccagaagatatccttcaggagaaagactggatggttggcgatcgcgttgaaataccagtatggattttcagtgaatccgaaggtcctgaagaagattaa

SEQ ID NO: 156104 - DNA, 930 bp, Enterobacter cloacae
atgtctctgacctatcaaatttgtgaagtaacggtaacgcttccttctttaggatccatcaccaccgacggccccggtaaccagatcaagcatggtgataaatgccgtgtggatctttatgccgtgaaaccagactggcgctcaggaagccactttgaaggcttcatcgtcggttggcttacgtatcagggctattgcgaaacgccatgcgaacgcagccaaaaaatcatgatgccagccggttataaactggtggccttgatggttgacgagtacggaacgccaaagtcgtgggacagcctaccagttcagttctctggcggtcccatcggcaccgcgatagatgctctggatggaattgcagatcttcccctttacagcatcagtagtgatcgagcgattcaacaaaaaattgcagacgcgctcgatactgcgctgactcgccatcatgtgcagtatggtaattcaacacctgaaaaaactcccgtggtgttccttgcagaacggtgggtagcgcttgaaggtaaatacacagtagaagaaattcgggatgccgtggagcacataaagcggaaaaggaaggagaaagcagacgcaaaggcgctggctgaatcatccccattcgatattaaagacgggcaggtgtttatcaatgatgcggttattgggaatagagtaggttctggttggcgaatcacaaatggcatagcctctcataactttatcccgaagaaggatatcagcgatcactgccagcagggtgaaagccgcgtgaagattttggctgaaaagctttctgttgctgctaatacccaaaacgcgttagagactgccttgcagcagtccatcaaaaaggttgtggacgaagctattcaacaagctatgcggcccggcggcgtcatctgggaagcacggtcgcgtggaatctga

SEQ ID NO: 156105 - DNA, 216 bp, Enterobacter cloacae
atgaagctctccttccatcagcacattgcgctgttctggatgatcggtgctccgggtgtcactttcagaaggcgacagcacgaaatatcaaaagtcgaccgcacggtcttttctgacgttggagtcgcctcagaaaacggaatctatggtcactcccgtttttgcaacaccgattttgacgacaagttggcttgcttgaatctatccggcgtctga

SEQ ID NO: 156106 - DNA, 165 bp, Enterobacter cloacae
atgaaattgcttaacgtcattgaagctctacttaactgcctgtatctggcggccgagctgtgggactggctggagaagcatttacctgtttttaaggcgttggcgctgattttagtgtggctttacacgccatgcatctggctgcatggctatgcagtcgggtaa

SEQ ID NO: 156107 - DNA, 177 bp, Enterobacter cloacae
atggcgatagccatggctgggacaccgctggcgctctcactaggcgttccgctgggaacctggcttgggcattatcttggctggcgcctgacgttcggtattatgtcagtactttcgctgttactaatgatatggatccgtatcagcgttccggactctgcggggcggctttgttga

SEQ ID NO: 156108 - DNA, 702 bp, Enterobacter cloacae
atgaaagagcgcggaatgatttttaacggcgagatggttcgagccattcttgatgggcggaagacgcagacgcgtagagttattgccagtgtaggacatgataattgcctgcctttgcaaaaaagaaccaaaacaaaggacggtatttatacccatgtcatggatgcccctatctatgggctttgcccatttggaaagattggcgatcgcatttgggtgcgtgagacgtggtctgatgtgaaccttgatggggcccctgctgtggcatatcgcgcagatgatgaagtttatgatctgatggaagatgaatcactcttggatgaagacggagctttcaactatcaggacccgcgagtatgtaaatgtcaatttgctgcatggcattccgacttaattagtggaattgagggtaactggcgtccatcaatccacatgccccgctgggccagtcgcctcacgctggagattaccggtgtgcgggtggaacgattgcggagtatcagccaggcagacgcgatcgccgagggcgccccgccaagccacccatcaattgatgctgtttctcgggattacggctaccccgatttttcccgctcatggtacggccagacatggcaatccatctatggcgaagaaagctggcagactaacccatgggtctgggttatcgaatttaaacgcgttgaggaagccgcccaatga

SEQ ID NO: 156109 - DNA, 348 bp, Enterobacter cloacae
atgcaggttgagaagctggctgcggagaattcggggcttattgagcaagctgaagaggtttacgcagcaggctataaccacgggcatctaaacactgttgatggaatcgcgtatgcagattgcgtcaaagatgatttttatggcctggctgtggagttaatgcgtgaagcagaaaccccagccaccgacgctttcctggttgaagtgcgggcgcagggtgttgagatgtttgcaacatggaatgacaagcacattaagaatggcgttgagcacaaagaatcattaactgcagttagccatgcggctcgttggttcgctgaattgcttcgcaaaggagtgcagtcatga

SEQ ID NO: 156110 - DNA, 1002 bp, Enterobacter cloacae
atgagtaaaattggcattaacggattcggacgcattggacgccttgttctgcgccgccttcttgaaactcaggacagtaatactgtcgtcgccatcaacgacctcacctccccgaaagtactggcttacctgctaagacatgattccaactacgggggcttcccgtggagcgtagatttcactgaagatgcgctgatcgtcgacggtaagaccattgcggtatacgcggagaaagaggcaaagcatattccatggaaaacggcgggggtggatattgtcgtggagtgcaccggcttctacacctctgaagagaaatcccggtcacatctggacgcaggtgcgaaaaaagtgctgatttcggcacctgcaggtgacatgaaaaccatcgtctatagcgtgaatgacgacacgattaacgccagtgacaccattatttccgtcgcgtcctgcaccaccaactgcctggccccgctggcaaaagccctgcacgatgcgtttgaaataaaagtgggcaccatgaccaccatccatgcctacaccggcacccaggcgctggtcgatggaccgcgcgggaaagatctacgcgcctcgcgggcagcagctgagaacattattccgcacacgaccggtgcggcaaaagccatcggcctggtgatccctgcgctcagcggcaagctgaaaggccacgcgcagcgcgtgccggtaaaaaccggctccgtcaccgagctggtcgccattcttggcaagaaagttaccgttgaggagatcaacgctgcgctgaaaaaggcgacccaggggaataaatcgttcgggtataccgatgatgaaattgtgtcgtcagacgtgattggttcgcactacggttcggtattcgacgccacacagacggaggtgtcggaagcgggagacctgcaactggtgaaggccgtcgcgtggtatgacaacgagtatggtttcgtgacgcagctggtgcgtacgctggataagttcgccgcgctgtga

SEQ ID NO: 156111 - DNA, 456 bp, Enterobacter cloacae
gtgttcttcggtggctgtcacccggaagccggtccgctggttcgccagatgcgtgaacagggcgtgcaggcgaaattcttctccggcgactgcattgttaatgaagagatggtgacggcggcgggcggtccacagtataccaacggcatttatatgactttcggtaaagatcctcgcctgatcccggacggtaaagcagtgattgagaaattccgcgccgctaaatttgaaccggaaggttacaccctctactcctatgcttccgtgcaggccattgctgctgcgtttaaagccacgggcggcaaggactccgccaaagccagcgagtggctaaaagcgaatacggtcgacacggtgatgggtaaaaaagcctgggacagcaagggcgatctgaaagtctccgactacgtggtttaccagtgggacgacaaaggaaaatataaggaagtgcagtaa

SEQ ID NO: 156112 - DNA, 384 bp, Enterobacter cloacae
atgagcaacatcgacaaacgtggattacgggaagcagcggagaaggcgacgaaaggccggtgggctgttgagttcgacgatgagatttactccactgacggcgtgaaccatgagcaaatagccatggtattcagtgaaaacgaagcgcgtgatgctgcatttatcgccgcagccaaccccgccaccgtgctggcgctgctggcatcgctggaagccgcagagaagcgaatcgctgaactggaagcgaagctcgatagcgcagataaattgcaagatagcgcatttcgtcatggtcttcagcatggcttcagtttaggtcaaacggataatcaggctggatttgaagagtgcttatctgcctatggcaccggtaaaggagagtga

SEQ ID NO: 156113 - DNA, 726 bp, Enterobacter cloacae
atgagcactattaccagagaactggcaaagctgttcagaaaaattacgaattctgaaattgatgcggagggtaacgctcatgttgttttatctcctgctgatagcctcctgattaataatgcgcgtatcgcgctggcatcgctcgaagcggagccggtggcgtatatgaacaggtttacaggtcgtgtatttacgcttgaagaacaacctggtgccgacaccgacgctcaggtttacatgccagtctacaccaccccgccagcgccggtatctgtgcctgccgaagttggctgggaagatgtcccagaggatatcaccgaagatgacatggaggttgccctggcgtgggcgcatggattcaaccagtgccgctccgccatgcttaagcactctgagccattcatagtaacgagcgatcatcgcatgatggagatgcctcaagttgaggctatcaacgctgtcaccgccatgcttcagggtgccgctggcaactctccggtggtgtcggatggttgggtggcttgcagtgagcggatgcctgagcgtgatgttgacgttcaggtttactgcgctgacaagaaggagcagatggtgggctacatggaacgcaacgaacacgaaggctatttccgttttgcgtcgctacctaacggcggtggtgtttattgcaaacctacccactggatgccacttccagcagcaccgcagcaggaggtgaagccgtga

SEQ ID NO: 156114 - DNA, 429 bp, Enterobacter cloacae
atggaagtggggcgcgtcaacaagacgctgtaccttctaaattatattgatgatgaagattatcgtcggcggatcctgacgcagctaaaccggggagaaggccgccatgctgtggcgagggcgatctgctacgggcagcgcggtgagatcagaaagcgctatcgtgaaggtcaggaagatcaactgggtgcactgggcctcgtcactaacgcagtggtactgtggaacacactttatatgcaggaagccctgagctggatgcgcaggaatggagaagaaaccgggggtgaagatatcgtccggttatccccactgatgcacgggcatatcaatatgctggggcattatacgttcacgctaccggaggatattttgaagggggaactgagagaattaaattttaatttaaacaatgaattaccttcttag

SEQ ID NO: 156115 - DNA, 351 bp, Enterobacter cloacae
atgccagaaacattctcatggacaccgcagaagggctacagcgtcgagcgaacgcctaacgtagccgtcgtcaaactcggcgatggttacgagcagcgacagaccaagggcatcaacccgctaatggataaatactctctgacgtttaagggagtagacgggagctgcaatcggccaaatgcggctaaggaggccaatgctttccttatagcgcgaatggccgttgaagcgttctattggacgccatctgatactggagtcaggaagttgtttgtctgccgctcatggagtttaacgaagatggggccgctattcgaactgacggcaacgtttgagcaggtaccgcgataa

SEQ ID NO: 156116 - DNA, 627 bp, Enterobacter cloacae
atgaatattgtacataactacgaattaactttccagaatatcaacttcgcttacatggaggttgcagggcagatttggctgaccgctgcccaggtaggcgaggctctcggctactctgatgataaagccattcatcgcctttatcgtaagcatgctgatgaatttacagcaaatatgacaggggtggttaaagtgaccacccccggtggagtgcaggattctcgcgttttttctctgcgcggagcccacctgatgggtatgttttctcgaaccccagttgccaaagagttccgacgctgggtgctggatgtgctggatcgcgaggtgcagcattcaccgatcgctaagcaattctccgatgaggaactggttagcctttgttacctgcagttgtggatggaaaggagccagttggtcagcaagaatctttatcccgcgatgaagcaggcaaaatctgagtatgcgggggcgctgtacgatattgcccatgatattcactacatgactgtagagaccaaaaagattttactccgggaagctaaaaatctggatgacaagaattttgtcgtaagtcacgctcagccgatgctggcaaaacttcgcggcgaagacggatggattcactga

SEQ ID NO: 156117 - DNA, 321 bp, Enterobacter cloacae
atgaaactggcgcgcgagttcggtcgccctgactggcgcgccatgcttgctggcatgtcttctacggaatatggcgactggaaaatcttctaccgggacaactactttcatgatgcgcagctggatgctcatttctccggcctgctctacaccatatcaaccctgtttttcgccgatccggaattaacccccgacagtttcagcattctttctcctgcatcggatcctgtcgatatcgatgggcctggcgatgagacgctgatggcaaaggcagcaggaatttcaggaggcgtacgctatggcccagacggcagtcggtga

SEQ ID NO: 156118 - DNA, 471 bp, Enterobacter cloacae
atgagcaacatcgacaaacgcgcacagaaggaactctatgcgaaagttgagcggcaggctcattcgcttcgcgggaatcctcgcgaataccaggcagtaactggcttgtgtccggtaaacgttatcgaaatgcatgcaaagaaaattctggcgctgctggatgagctggaggccaaggacaaatatatttctgagcttaaatcagccgtcaaatcagcagatgaccgctatgaaaaccgcacaccaacacaatgggcttatgaccaggcgtgtttggcacttgaaaaacaccgcgctcgagctgaagccgcagagaagcggattgctgagctggagcgtaaagaacagcacagtgaacgccagtcagtcattgatgcgctggctgcttcgggtgaagcatggagtgatatcgaagaatacatgcagaagtgggacgcggaacgcgcctccgcagccggtaaaggggagtga

SEQ ID NO: 156119 - DNA, 180 bp, Enterobacter cloacae
atgaaagcatggtcccttgaagagctggcgctgctgtggcggcactcaaactcagaggtcgcagagattaccggccgcagcattgaagaggtgggtgatcgtcgcctgcaggcaaatctggagcgcaacgggtgggataagaaagacccggctgcggtgactaagtgggaggcagcatga

SEQ ID NO: 156120 - DNA, 633 bp, Enterobacter cloacae
gtggtcccagcctggcgcaccgcagcggctgaagagttcgatgcgcggaacgtcaccgtacagtttttcgagacggtgacgcgcttcccatggcttttggctatgctcgccgagtgggctgtagataacctgcttgatgcttgcgcactggcgctcaagtccattccccctggtggctatcagcaggtcttccgtattggctcgggtgtaattgccaccgttcatgcgggtctgcgtgttcagcaggtcgaggaagtcgtaaaagtcctcaactccaccagcctgaagcgctttattgatgtgctgttccgccagcgggttgaacttcacccaggtaaagcccttcatcgtgcggaccttaaagccccatgcttcagccagttcaatagcctcgcgggtgtgcgttccggtgaaccacatggccagaacagcatcatcggcagccaggtcccagaccggaagacgcttcatgtcgataagcttcatcgtgccgtagtgattagtagccgcgccgttgctgacggtgttcccgtattcccaggcagggtcagcgtaaatcagagagtatttcatcagacgttcctcgctctgccagccagacaccatccatcacctgatggcttagttcgctga

SEQ ID NO: 156121 - DNA, 348 bp, Enterobacter cloacae
atggctttagagacattcacctggggcattaaggcatccagccagcccacgctcggcagtaaagactcggtgcgaaaagcgcagtttggggatggttatgcccaggtcagtgggtcagggctgaatgacgaaatgctcacctatgagttttcgttctccggtgatccacaaaccgcgatgcagatacatgcttttctgcgccggcataaaacgaagtcgtttatcttcacaccgcctttcggtgataaagcgttgtggcgcgtcgaacctgacagcctgaaacagtcgctgaaaaacgtcaaagtgatgaccattactgcaaccttcgagcaggcgttcgcaccatga

SEQ ID NO: 156122 - DNA, 1548 bp, Enterobacter cloacae
atggtggcaaaagcagaagccgcctttaagaaagcggatgaaatctggaaccttcgtaaaaatgatggttatgtcaattctcaggcacgcgatctttactggaatgatcgagagacagcgagagttgagcttgaaaatgccaggcgcaaggccggagctgagaaggagaagcaagataatgcatcgcgtgaagcggctgctgaatctgaccgcctaaagtacgccgcgcaggcccagtccaattacgccaaaacacaaagcgcactggaaaagtacacggcccgccagaatgagcttaacaaggctctgaaggatggtcggatcctccaggccgactacaacatcaacctggctgcggcgaaaaaagagtatgaggatactctcaagaagccgtcgaaaaagactgccacggtcagaacacccgccggcacctgggcgaccgataccgccaccgcacagacgatggagcttgagacgcagttacgcacactgcaagagcacaagggtatcaatgacactatcagccagcagcgacaggagctctggcggcagcaggcccgcttctccgttctggaagaggccgcaaaaaaacgcaccctctctgtggaagaaaaatccctgctggccagtaaggatgaagtgctttcgcgcgcggagatgaatgcaaaactgggtgatcagattgccgctcaggaacgccttaaccgtcttcaggatacttcacaaaaatacgtcacccagatgggcgagaaaacccgcgcgctggtggcgggcgggagtatgggaagtcgggcagcgcaacgtcagaatgaagaggcccagctccgtcagggctgggtgaacgctggcgggtctgatactgccccgggctatcagaatgagctgactgcactgaaaaattattacgatgaacaggataacctgcgcggagactggctttccggtgcgaaatcagcatgggcggattatgccgattctgctactgatgcctacgggcaaatgaagtcaattgcctcaagtacgtttgacggtatcgggcagaacatggcggatatgctcacgaccggtaaagccaactggggtgattttacccgctcaacgttgtccatgcttactcagatactgatgaagcaggcaatggcaggtctggttagttccgccacaacggctctgggatttgatggggggggatataccggctcaggtgggaagtatgagcctgccggtatcgttcaccgtggcgagttcgtcttcacaaaagaagcaacaagccggatcggcgtatctaatctgtaccgcatgatgaaagggtatgccacgggtggactcgtcggcggaagtggtgcggtaccagccgcaacgccttttggtgtgcgcgtgtatgcgcctgtgaccgttgaaaatgcctctgcgggaacgcagcaacaaggcgatggtgaccgcctgggtaaggcatatcagcaggtcatcgataagtctgtcaacgatggcattgctcaggctatccgtcctggcggactcatctggaatgccactaatcgcaggtaa

SEQ ID NO: 156123 - DNA, 492 bp, Enterobacter cloacae
atgagcagtcttttaacgctggcgaaggacttagagcagcaatcgaaagcgcagcagaagagtaccggcgagatgctgaaagccgcattcagcgagcacgagcagtctgtcagagcggaactgaacgcaagcgcgaggagaatcagcgacgccatcagcgcccacgagcagagtatgagcgaggcgatggagaaaaaccggcggagcgtgttgctgacggccgggaggacatggctcaccatcctgatggtgtcagcgctgctgatcgccacgagcgggagcattctgtggtggcaggggcagcagataaccgacaattacacgcatcttcgtcagcaggaagataccctggcgaaaatgaccgcccggacgtggggagtgcgctatcaggagagcagcgacggccggaggtttcttatcctgccgccggggatgcaagccgaagccatcccctacgacgggacgacatggatccgcctgaaacaggagtag

SEQ ID NO: 156124 - DNA, 216 bp, Enterobacter cloacae
atgacggagctggaaaaacagttgctgagcgcattagagcagctacagcaggactactcgaaaaggctggacgagtgggagagcgccttcgcggaatggcggacgatgtctggtcttatgctacgggagaacgcagcgctgagcgagcgcgtcacgggcttgagcaggcaggtgcagagtttgagcgagcagctgcgccggttgtcgagcgactga

SEQ ID NO: 156125 - DNA, 774 bp, Enterobacter cloacae
atgaaatacttcgagcttgaaaccaagggtatgcgtattgtcggtgaagacaagaattacactggggaaacgtcaaaccttcttcaccagctaatatcttcattttatgaagcaaacgctgctctaaatttatacatcaagcaggacgatgcgttatttgaggagttaagttctccacctccatctctacctacggatgaagagtgggctgagggggtcaaagagcgtgaaaggctggcttcagaagttatagaggaatttggaataccacctgatgactggaatgaaatttactaccaagttgatctaaagtcgaagagaacaaaatggttacagggtagtgttccacgtcagattgaatctgccgaacatcagatatatgcaaaagcattcgtctacgcgtttgatacgattgtggagacccttaaaaatctgaaggaacgggaaggtgtatctgaggttgtggctaaaaaaatcgaagagataaaagaagcatttcctgaccttaaagatgtacgagacacttctcatcatttaggtgatagggttgtggggttaaaagtagtgcgcaggcagaaaatcccgattaatcctgaaggacaaaacatagtccttaacagccacggagatggtacgttttacacaatgaaaaaagacggcactcaaggttccatttctataacttatgagtctttagagaaaatggggcaaattattcaagatattttggactcttttcagtggcaagggcataaacaacacttaccatattaa

SEQ ID NO: 156126 - DNA, 183 bp, Enterobacter cloacae
atgactgaacaggcttatgatttaactaaaatcaaagaggtagaccagaccgatgataccatgaaagctaatcggcttttagctagtggctgggtgttattgaaagtaactgaaacccaatcgcacgatgaatacggtgctttgtactccacagtttggttcacagttggaaacccccagtaa

SEQ ID NO: 156127 - DNA, 810 bp, Enterobacter cloacae
atgtacgggaaggatgttgctgcgctgagcgaaagtgaaaagcagaccgtcagcgccctggctactcttgccgcagggatagcaggcggcgttgcgggagacggcacggcaagtgccattgcgggggcgcagtccgggaagacggtggttgagaataacctgatggccgggagtgaggatgcacaggttgcgtggctacaacagcacggaactgatatgacgagctgtgcagatgccccctcttcagcaagctgccagaaagcaatgaatgaacgggatgccgtcggactggcactggcaagcggtggcgtggcgttattgcccggtggtgctcaggtaatgtgggggcttggtgctggcgctaatgccggggtcagctattgggtagatggcgcaattgacccggcgaatgtcgccatcgctggttgggtaaacatattcagtatggggaacggaattacaggtaccgtgggctggaatgcggcaggtggtgcgctgggtaactggattgacaataaagacccactttctagtgcacttatcaatggtgtcggtgcgggtattggttatggtattggtaaaggactttcatggggcgttaatgccggggcaaactggtggaaaggcggctgggatccgaagtttaatgctgacctgagacagtttactgaagtaaaaggggattatggtatttcaaaagaaattaaaccaagcgatattcctggtaatttcggtgacattggagcctctttctcctccgaatatggcggtaaaaaacttgaaccattcattgaggataagtttaaatga

SEQ ID NO: 156128 - DNA, 249 bp, Enterobacter cloacae; identical to SEQ ID NO: 141188

SEQ ID NO: 156129 - DNA, 324 bp, Enterobacter cloacae
atgctcaccatgtgggtgacggaggacgagcaccggcggctgcttgagcgctgtgacggcaggcagctggcggcgtggatgcggcagacctgcctggacgaaaaacctgcgcgcaccggaaagctcccctcaatctcgccggcgctgctgcgccagcttgccggcatggggaataacctgaaccagatagcccgccgtgttaacgccggcggcggcaccggccatgacagggtgcagattgtggcggcgctgatggccatcgatgccgggcttgagcggctgcggcacgccgttcttgagaaaggaacggacgatgatcgttaa

SEQ ID NO: 156130 - DNA, 597 bp, Enterobacter cloacae
atgcttaaaacaagatataaaatggctataaatcaaatcaatgtatggatagaaaatcaaggtgaaataaaacaatttagacaattgataaataacttaaaactcatacttgacgaattagataaacccggtgctaatctaaaggcaattagagacattgagatagtatcatcgttgaccgcatatattgcatttcaaatatcacaggaaattaaaatcgatattatcggttggttttctgatagagatgcaatgttaagttataagatagcaaagttttccaaaccaatgatatacgatttggcattcaatacttataataaccttatgtataatatcaatgaagaatatcaagaaaaatttgtctttggtctacctgaaacagaaggtagggtatggtatgactcttataatcgagtcccggacttgattgcagcgactttagctgactataactatgaagaagataaatgtagtcatgaaaaatataggcctgtaattaaaggggttttagctgataatgaaaaaaacatcatatacaaaatatcatttaatgatcctgacaacccattttccgctggtgtaattccgctgtga

SEQ ID NO: 156131 - DNA, 345 bp, Enterobacter cloacae
atgcctttaaccaaagaagaactggaacaaatcggcagcatgatcggccaggctgttgcgaccaatactgaagcggctattaagcctctcgcggaaaaggttgatgcgctacaggccaatcagaagcaactcgcggaaaccctgaccgccaactcccgtgccgaagagaaagcaaagcgcgaagcggttgcaaaggtccatggcgatatcgtcgcgaacgctctgtcaggcgaatctctggacgcgatgtttaagtcgcttggcgaagctgctccgcttggcgctaacaatgcacagcagcacaaagaaaccggcgcacctgccgcagacgaacacttcaagtaa

SEQ ID NO: 156132 - DNA, 252 bp, Enterobacter cloacae
atggttaacgaactggctacacgccttgatgttaccagcgtcgcgctttgtgaagctttggcgcagcgtaaagaactgtctgagcagaacgccaccctacgtgaggatgttgccagttgggccaaagagtgtgaccgcatcgaagagcgccacaccaaaacgcctaccaacatgcacctgctggaagcgcagcgagaattgcgtgagctgtctccaatagtcatttccctgaataacgaggttgctctctga

SEQ ID NO: 156133 - DNA, 615 bp, Enterobacter cloacae
atgcataaaacatttctaagttatcatcatgctaatgaacaagatttaaaagatagtataatagagacatatggcggggaatcttttatcgataaatccgtaagcgacggtgacattagtactgatgtaagtgaagaatacatcatgcgtaagatacgcgaggaatatctcgctgatactacagttactgttgtgcttatcggaagagagacctcccaacgtccatttgtgaactcagaaatacaagcatcgctatggggagaaaatccagcgggattgataggtgtcgtcagagatgaaatctggaatgaagtttttaccgatactgtatgtactgactttcgatgtaactgcggagtgagtttaaggcagatttctactggttatacactatatctcccttatctggtacaaggtaatcatcgtcttcaaaaaacagttccgcattacaccgatgaggaagtgtattgtgcagtggtaaggtattccgattttattgctgattgcgaaaaatatattgatgaagcatttaataagcgagcaattatgaatcctgccgttaaaagaaattcagatacagtacctgctatccgaactaaacctaagctatggtaa

SEQ ID NO: 156134 - DNA, 729 bp, Enterobacter cloacae
atgtacaagagatgggttgtgtgggggtctgtttgcatagttgttattgccctcttgggaactgttcagttgccaacgactgaagatataaccttcggtaagcgtttacttcaaaatattggggtgcttagctctctgctttctgtagtggtattaatcattgtggctatctttctattagatggcatgatgaatagaaaatactcgtttaaagttgaacgacttaattttggtggtttaaatattctttttgataattctgatgcccttttcataaagtctatacagaactttctcgatacaaaaagaacgctttttaaaataaacgtccagcaggatgcttttgatgaggtatttaattcttactacgaggtctatcagtttattcgtgttgagatgcgggttctgaatattaaaagaaaaaaagaccttgagttatatatgttggcgaatactatgctcaaaaaactaaatgtatttctgactgagcaccaaaataattataggcgctggcataaatacgtctcagataaagatgaggttaaaattgacgagaagcctgatggtgaagcaattgttcttaggtatcatctgacgccaatcggtaaaattcagacttactattatcattttaataaacttgttaatgattttactgagctgaataaattctttcaagatagtgttgccagcagatttagtattgacatggataaatggagcaactaa

SEQ ID NO: 156135 - DNA, 444 bp, Enterobacter cloacae
atggcgactcttgaacagaaattgagaaaagcattgcgcggttatcttgaacgcctaggtaatatgtcgctcgctgaccgggttaaatacgccgatgcttttgaggatgtttataacatcgtgctgaatagccccggcaggctggaactacgccacgccgacgtggccgccgtccgtgtcttcttatggaactatcaataccgccgctgtgccataacgggcaagccgttgagccttgcgtctgctgtgcttgatcattgtcaccgaaccgggcgcgtgcgtgctgtggtacatcgctccgcgaatgctgctgagggcggctatcacgcagggcgtttatgtgggctgacccacgacagtatgagcacaatgttggtaagttaccgacgccaatacaaggggataggagttatctatccccataaaactgagcaatttacttaa

SEQ ID NO: 156136 - DNA, 309 bp, Enterobacter cloacae
atgacaacaacgatcaaattacagtggcggtacattgacccgccgccgatgacgggcgcacttgctgacctgaaacaatgggtagcagatgccggagcgcctgagcttgaatctaaatttcgtgagttgcttgggcttgtgcgccgcaacggtatcagtgatgagctggtctattcgatgtcggctgaactcaacgcactgcttaagctacgccagcgggaagagtttgaagcctgcaagcgtgctgaccgtgacggcgaggatttagagcgctggttgcagggagaaatatataatggcgactcttga

SEQ ID NO: 156137 - DNA, 447 bp, Enterobacter cloacae
atggctgatgaaaagccgattaagccgctggccgaggatgacccgtgccgccagcgttacgccgaactgctggccgaagcgcagcgcgtgaccgtcccacggttacaaccgggagatgctgatggaatcatgtgccagctcgcggcattgcttggcgctcctgtcccctctgttggttccctgactgaacacgccgttgcatggtgtgcctgtctgcttgcacaggggcttggtgaactgctggagggaaacagcaagcaggtgctgaccatcttctttttactctgttggaaagatgctgctgtgaaatttgaaggagaacgccgggaagagatggccgcagcccgtgaggggcttacggttaaacggttccggcaaacccatccagttaatgacgaggagaaggataatgacaacaacgatcaaattacagtggcggtacattga

SEQ ID NO: 156138 - DNA, 678 bp, Enterobacter cloacae
atggctgacaatcagaacccgtatttatcagacgctggtcaatctccagcccagcaatcaccgtacaccgctccacctgttggcgcggacaatggagcatcccgctttagctccgcgcctgctgatgctggtttcctgaaaacgcaacccgttaacggcaacgatggcggacagtggaacaatggcaatatcgcgaaccaacaagaccagaacgccgatgtaactattcaggttggggataccattccccttatggatgggacgactgtcgagtacaccgccgagatgcaaagcctgattggtcaattccatcagtcagttgaaagccagttagggcagggtagctttgacgccatgctgcaatacgctggcactctcgacgccgggactcaatccacccttgaaaggctggtcatgtctggcgaccccgcgcagatgtcgcgtgcggttcagtatctgcaagagcgtatggctgctggctctgtcactggttatgtccagcacggccagcctgccgctcaacctgtcggtatgtctcatgccgagtttatcgcagcgtatgaccagctttcgcagtgggcgcagcaatcagggtatggccccggccatcgccagtacgacgagcaataccgcgctctggttgcacagcgctccgctggcaaacgtgctggccgctaa

SEQ ID NO: 156139 - DNA, 261 bp, Enterobacter cloacae
atgaatattttagatagcgctgctaagacgattgtcctcatccagccgcgcaccgccactgagggtggcgtgcaattgaagttcatcgccgcgacgcttgatatgagacaaatcgatatcgcccgcgcgtatcaggtggacagacaggatgttaacaaaatgattcacggcatgaagcgaatcccggaacgctgcgttcctgtacacatgctgctgctggaattggcgcagaaatccattctcgttaaagaggttgcttaa

SEQ ID NO: 156140 - DNA, 240 bp, Enterobacter cloacae
atggacgagaacgacacccacgaaatcattaacccggcgtttgaccctgcccggtatgcgaatctggacgaacaacgagaaggttatgcccccatgcagtcgcgtgactggggcatcctgacgcagaacctgactggcgaacctgcacctgaacagccagccaccacccgtggacgccgccagcgtccgcgcggctcagtgggtgaacgccgctggcttcgcagtcgcggcctgctgtga

SEQ ID NO: 156141 - DNA, 582 bp, Enterobacter cloacae
atgacgaccaccaataagaccccgctgacgctggccgaaatccagcgcattaacaccctcgccaaacgcgatttgctgaacctgaacgggattgttgctgcaacaggattcgacccggtagatgtggacttagtaatcaaaggccaatatgtggccgacctcgccgaccagtggaaggatgacgctgatatcaccctgcaagaatacgaaactatccaccgccgctatcagcccggcaaggggcactgggatactgaatacgcaatcgcccgcgatatgttaattcgtccggccactgtgttagctatcgcgcattcccgcttccagaacgcccacacgcacccggcaccaaaaccagtcaaagcgaagccggagaaatctaaagcagtgcgtcgcctgttcagtgccgaccttgacgaaatccacaagttagagcgctttggctggcctgctgccgagattgccgaaaagctgggcgtgcctgtagaagccatcgcccatgcgcagcgctgcctgcgtaatcgctggtcttatcccgacattctggaatccgttaattccaaatacggtaaggccgcatga

SEQ ID NO: 156142 - DNA, 192 bp, Enterobacter cloacae
atgcagccgcaccagtttcggcaatggttcgcctcgttgcctgataaatatcagaagcaagccaaagctctgtacgacgacgcccggcgtggtggcggtgtccacacggcatccagcctcgacctcatccgcgcactaattgaagaccaaatttcatttgatggagcttatacatatgacgaccaccaataa

SEQ ID NO: 156143 - DNA, 210 bp, Enterobacter cloacae
atgaaaactgatgctgagtttcaacgcgatacatggacgctcaagtgcttattgcaggacgccctaatccgtcgcctgaaagacgatgcatccggcgagtcccgtatggtggctgctgaattgtcgagtacggttaacttccttaagaccaatgccgctgaatcacccgacgcgacattcaataacgttttcccggaggatgatgactaa

SEQ ID NO: 156144 - DNA, 435 bp, Enterobacter cloacae
atgcctgatgaaacctcgctgcatcgcgcggggcgttctgacgccctgattaatgcacaactggcctatgccctgaacggatatacctttgacggactggcctcccgtcacgtccacgcccttaaccgggaagctgtcatacgcaaagccagcacgccgctgatgcgcttttgtgtcaccaatggctgcgaagtgtgggaggtgttggcgtccgtcctgaacaggatgaagcgccgggacggttcccgcctgtggccgacttggcggctggcaaatgaagttttcaatggacgattgcaccgggagcgcaagactaatgaagaagtcttggctgcagtgcaacgtcgcttattccttcccaagactgttcaccgtgaagctgttcaacatttgcgtgcgctcggcctgttgcctctggttggagatgaccaatga

SEQ ID NO: 156145 - DNA, 1893 bp, Enterobacter cloacae
atgccaacaacattaaaccgcctgcttacgctggctgctgatactgatttaatgaaggatgctgacctaacacccaacgaactattgtctcgcgggcttgttcacgccaagttaaagaaagttgatggtagtgttttacgcgccgcttatgatgagcgtaccggggaatttctctatcacggtgacgggcgattgatgcttttcaaagagtggaaagcgctcaacgggattggtcgcagtaagcgagcggatgctgatactcgtctggttatccagcccggagacgcgattaactgccgacgcgccgagcttgagcaatggctgtccgatgcacctgcccggtacgctgacccactgtcgccagacttccccggtgttcgtgtcgatgacgctgcacttaaaccgcgcgaacactgcattccagaatcgacaaccgggcagaacgctttccttaaagcctgtcgcgaattcctgatttgtgatgagaagaccatccgccgcatcaatcgtggcatgagcaagctggaagcgatgcgcaacgcagatttcaaacgctacggagactcagcggagtttcgtcaattgtggtgtggagagtcgaaacccactgatgataaattcaacacgaaaaatctgcactgcgatgcaggtggctcgacgttgccgccgaccatcccgccactgacaactgagtcatacgaatttaaagcgctaacacagtgcgaccgatatgcaacctccgctttactgccgccgcttgattctgatggttcgataaaactggactggcgaccggggcagatggacgtggccgaagctgttttccgtcatgggcgggatgtgcttgctgttcttccgaccgggtttggtaaaacggctgtgtttacgtacccgttattttatgaatctcgcgctggcgttggtctgactgtggttgtggttccaacgaacacattgaagcgccagcttctccagcacctgcgcgacattgacgttcacgccgtggcctttggcgataagctgccgaagcgccgcaacgcgcagcaactggccggaattgctgctggcgctttccgtgtcgctgtcatttctcccgaacatctcgttccatcaagccaagtgtttgctgcactgatggcttacggcgtggacagaatcatcattgatgaagtccacacggtggacgattgggaatttcgggacgccctccctgcaatgaagcacaccttgcaaaatgctttccctaaaacgcagcggtgtgcattcaccgcgaccctgccaaaagggaatgaggctgacctgatgaaagagttgggctgtcgtggcgggttcctcacctttcgggctgacgtttcaagagagaacatccagttgattcctgtccggcaatgcgcaattcagcgccgggctgctgttggtctggttaatgctctgccggaggatgagaaagttttgattatggtggacagcataaagatgctgtacgcctatctcgctgaactgggaggccgcgcccggccttatcattctgacgttgagcgactgagccgcgaccagaggcacgcgaacgctgagtggttcgcctcaacgccgggcgctgttctggtggcgaccaaagcctttggtctaggtgcagatatcccggatattagtaacgtcattgtgacttacgtccccgacgacctcgccgacatggtgcagatgatcgggcgggcgggtcgcgatggcgagccagcccgcgctttcctgctctggtctgagctggcgttatacggcgacccgattgtttacgacgccgactctgcccagttgccgtccggtgtgcctgatgagctggcttacttctaccgccctgaaaactgcaactggggctatatctcccgctatctctga

SEQ ID NO: 156146 - DNA, 549 bp, Enterobacter cloacae
atgaagaccaaaagaaagagctttgatcaattcttatggcatgatattgattttgaagatgatgctgcaaaacagaaagaataccttgaatctgcactgccacttatcggccagattgttatgtattttaatgcgctagagaaagaattagataaagtcatttatgaagggttcagcgatcggtcggatcagttaggaataataattgtgcataacatgaattatgcagcaaaagtcgagttatttagacgtcactccgaattattccatttgggtgttgggcagcatgttgatatgtttgacggtcttataaaggatctcaaggaatgtggacggttacgaaacattactgtacatgctgactgggatagcactgatgccgaaggatatacatatttaggcatcaaaataactaacaatggaatatctcaagaatatatccagtttgacctaggatcattggaaagtatccttcaattgattttcagtacgagatataagttgagtgattattcaggcttaaggggagatatactggcttcacgttag

SEQ ID NO: 156147 - DNA, 726 bp, Enterobacter cloacae
atgtcagattggtcactttctcaactatttgcttcgttacatgaagatattcaacttcgactgggaactgcacgtaaagctttccatcatccaggggctaaaggggatgccagtgaaggagtatggattgaaatgctcgatacatatcttcccaaacgctaccaggcagctaatgcttttgtagttgatagtttgggtaattttagtgatcagattgatgtggtcgtttttgacaggcagtactcaccatttatttttaaatttaatgatcaaataattgttccagcagaaagtgtctatgcggtttttgaagcgaagcaatcagcgtcagcagagcttgttgcttatgcacagcgaaaagttgcaagtgtccgcagacttcatcgtaccagccttccaattccacatgctggcgggacatatccagcaaaaccactcattccaattttgggagggttacttacttttgaaagtgactggagtcctgcattggggggggcgttcgacaaagctctcaatggggatttatcagatggacgacttgatatgggctgtgttgcatcacatgggcatttttacttcaataacattgatggaaaattcaattttgaaccaggaaataagccagctactgcttttcttttcaggcttattgcacagcttcaatttagtggcactgtgccaatgattgacattgatgcctatggaaaatggttagctaactga

SEQ ID NO: 156148 - DNA, 933 bp, Enterobacter cloacae
atgaacgtaaaaccatcacttgatgaattgtttgagcggcgtattaacttccctgattttgagcctcaggagcgtctggctcgtttagttggtcttgatgaacacaaagatcgattatcaaaaatattaggcttgcttgtaaatccttatgggattcaggaatgggccaaaaaatatcatccagatgctcgtgcggctgttgatacagtactcagacggccacctttagttgtattggctggggacgtgggctcaggtaaaacagaactggcggaaaccattggtgatgctgttgcccggcaggaagatattgatattacgttgtatcctttgagccttgctactcgagggcagggtagagttggcgaaatgactcagctggtttcagctgcatttgattacaccattgaggccgcagataaattaaaaaacacgaatggaaaagctcgtggtgcggttttgctgttgattgatgaagctgatgcattggctcaatcccgggaaaatgctcagatgcaccatgaggatcgtgctggtgtaaacgcttttattcgcggaatagaccggatcgccaatcagaaactaccagcggcagttcttatgtgtactaaccggctgaaagctctcgatccggccgtccagcgtcgtgctgctgaagttttaactttttccaggccaaatgatgaacaacgacactatttattgcattcaaaacttacggggttgggattaaattctacggcgatagaagaattagtcaggttaaccggtccaagggacacgaattcgccgggatttactttctcagatattacccagcggctaataccatcaataattcttacggcctacccatatagcgcagtgtcagtccattcagcactgcaggtagtcaataaaatgacaccaacacctgcatttattgaccgctaa

SEQ ID NO: 156149 - DNA, 519 bp, Enterobacter cloacae
atgtcttcttatagttatacggtagcagagacacaaactttcagcgtaacccacgctcgtcacatggccgctaaagttgcaactgacttgcggcggatgcagcgtttttatggttaccccagtgatgccgacattgaagcatacgaagaagaattggttgtgattcttaaggctggatatttgggtgaggtctcttatggttttcagaaaaataataactggatcgagccgacccttcgatataccgcaggcgacttgcttggttcaggaacagatgacgatcccggaaaaatccgccaaggaaaagatgtatcgggtgcatccttctacagttttatgacttatagctcgaaatatctgaatgctactcaatcggaaaaagatactgctttgaaagatctaccattcaaacgggtaggtgcccagtctccagggattaatggctacctcgaaaatgataagacttactcggccggtggtcgctccctcactcgcactagcgtaaggaattttgtatga

SEQ ID NO: 156150 - DNA, 966 bp, Enterobacter cloacae
atgtcaacagaacatgtcgaccataaaactatagcgcgatttgccgaagataaggtaaatcttccaaaagtaaaggctgatgaattcagggaacaggccaagcgattacagaacaaactggaagggtatctttctgatcatccagacttttcattaaagcgaatgattccatcaggtagtctggctaaaggaactgctcttcgttcgttaaacgatatcgatgtggctgtgtatatcagtggatctgatgcaccacaggatttacgtgagttacttgactatcttgctgatagattgcgtaaagcatttcccaactttagtcctgatcaggttaagccccagacatactcagtaacggtttccttccggggctctggcttagatgtcgatattgtccctgtattgtattcggggttacctgactggcgaggtcatttgataagccaggaagatggctcactccttgaaaccagcattcctctgcaccttgatttcatcaaggcccgtaagcgtgctgccccgaagcattttgctcaggttgttcgtttagctaaatattgggctcgtttgatgaagcaagagcgaccgaattttcgctttaaatctttcatgattgaattgattcttgcaaaattacttgataatggcgtggatttttcgaattatccggaagctttacagacattttttacctatctggtgagcactgaattacgtgaacgtattgtcttcgaggataattatcctgcgtcaaaaataggcaagttgtcagacttagtgcaaattatcgatcccgttaatcctgttaataatgttgctcgtttatatacgcagtctaatgtggacgccattattgacgctgcaatggatgccggtgacgctatcgatgctgcattctatgcaccaaccaagcaattaaccataacctattggcagaaagttttcggttcttcattccaggggtga

SEQ ID NO: 156151 - DNA, 132 bp, Enterobacter cloacae
atgttcattttcgtcggccacaaagttcggtatagcgaactttttataagaatgagtgcatttttcatacttgtcaaactttttgttcggaatagtggtacaatgatgaaagagatgaaagaggagatataa

SEQ ID NO: 156152 - DNA, 324 bp, Enterobacter cloacae
atggcaacccgtcttggcgaaaaactgcgcgatttgcgtaaacagcgtggattaacactggaaaaactcgctgacatggctggactcagtaaaagctatctatgggaactggaaaatcgcgagtctcaacgtccttcggcagaaaagctaactgccctggcagatgcactgggagttgggactagtttctttttagaagatgatcttcgagaaccagaagaaagacatcttgatgatgctttctttcgtggctataaaaatcttgaacctgaagcgaaagcacagttaagaaaaatattggacacctttaaaaaggacttctag

SEQ ID NO: 156153 - DNA, 867 bp, Enterobacter cloacae
atgcaagaacaagagatatggacgcctcaaaaagcagctattcggctaacaaaaatttgcgatactttcagtgagattcacggcacagaacgatttcctgttaatgttgaggaattgtctctggaggcggcagagttgttcaaatgggctgaccctatagtaaaaatagaacccgttgacatcaaaggatttgatggtgcattaatggccaatgaatctcgcagccgttggatgctactttacaataacggtttaacatcccctggtagaattcgattcactcaggcacatgaactgggacattacatacttcatcgtctaattcgtgatgagttcagatgtagcagtgatgatatgttatcctgggaagataaaaatattgaatcagaagcagatttatttgcttcttatttactgatgccattcaatgacttccgaaaacagttgacgccagacgttgatattgacgtattaagtcagtatgcgattcgttatggagtatcgctgacagcagctgcattaaaatggcttgaatgcactgaagaaaatgccgtattcattttatctcgtgacgggtacatgaaatgggccttttccagtcccgcagctcgccataacggagccttctttcgcacacaacgcaatgtggtaagtattccagaaggatcgattgctgcaaaccagaacatttcaatggaaagagcaggaatgaagatccctgcatcaatttggttccctcatgcagataaagacgcttcagtgcgtgaaatgaaaatacattcagaacagtatgaatatgtcatcacccttctaatcctttcccgaaaaacaactgtatggcctccttttcatggggaagatgagtaa

SEQ ID NO: 156154 - DNA, 474 bp, Enterobacter cloacae
atgccccaggtttgcctggtcaatcagttcaaagtcaaagcctgttgcggtacccagttcaataatggcaggcaggttaaacggaaatacaagaccgtctttgatctggctgaacgctttcgtcgcgcggctgacaatcgcctcaacgccgttttccttgcccggacgttcttcccatggcttcaggctgacgaaagcgataccggagttctgcccctgtccgctaaagctaaaaccgtttacggtaaagacctattcaacgttcgctttctctttcgtcaggtaataatcctgaacctgatcgagtacctgctgagtacgcatttgcgtcgcccctgccggcaactgaaccatcgtcataaacaccccctgatcctcttccggcaggaaggaggaaggcaggcgcaggaacagaactgccatgccgccgacgatgatgacgtaaaccagcagatagcggccggtcttacgtaa

SEQ ID NO: 156155 - DNA, 294 bp, Enterobacter cloacae
atgagtgaagcaaaaccgcaggacggcagtactgtaaaaggctaccgcacattaaccgctggcgacattgagcgaatgaaccgccttaaaggtgtcagccgccacttctgtaatttgcttgataccgagcgaggtgaattgttggctgtccgtaatggcccggcaatgttaagcgctgagcaggctcgggagattgatgaagctatgcgcagcctggcaatcgcgcgtaccaaaatgcaggaggcctgtatgtgggcatgccgcgcagttacccggccagatgctgactgctaa

SEQ ID NO: 156156 - DNA, 357 bp, Enterobacter cloacae
atgctgaggaggtacgctataacaaacaccgtgtatcagccgcggcagcgtgatgtagtcagcctgagtcttatcagcaacaatcagtcgttcagctatctgcatttgatactgaggtgggcggccggtaccgagataaaagctcagcatgtagtcagggaagcggttaagacactcacccaccagatcagtaaaaccagcaacaggcatcgcgtcatcttccagcacgactacccggcaaggttgctcggcagcccattcaagcgcgcgtcggtgattccagttcgcgccgtggttaccgtcatcaatcagcagatgagcatccagcagcgcagcaagacgttgtgcatgttctaa

SEQ ID NO: 156157 - DNA, 792 bp, Enterobacter cloacae
ttgtcagaaccttcaatcgtcccttacgtaaaaaccactcccaaaccttttggtgtggacgtcgaatggaaatggccgggtggctgcgcggtgctagaactgcaataccttcatgaagatggccgacttatgaaagaacgcatcttctggccagctaccgtatgccttatttccggcctcaaagctggtgagagattgcaggtgcgcctgcgtccaattgcagaggatggctcagcacgagattggcgagccagtgactgggtcgaaggggtttcttctgtcgatgtcggagaaattgtagaggcgctggacgaagagatccgtaacagctgcgcacttcatggccttaaaggtggctggtttgtcgataaaaccggcaaggcttacatccacgaagcgctgattggcggtggcgtattgtctacgaactataacgtgaagttgaatatcaacaacgttggcaaatcacacgaagctggcatgaccatcggtgttgaagatggccagagcaacgttgagtttatggctgatcgctatacggtgcatgaaaccgctcaatcaattatcggaaacgccgtcgtaacaaaagcgaagataaatatcgcgcttggcgatgaaacgaagcaggccgtcattgatgctgtgcgtgaaagcgatttgttcgcatccctccaggcaaagattgatgcgcaaacagcttcagtagttgggttgcaacaggcgatgcacgatgcggtgaacgatgctctccgaaaggcgctcaagccaggcggtctgctgttcaaacgataa

SEQ ID NO: 156158 - DNA, 222 bp, Enterobacter cloacae
atgacagcagaaatcatcgatcaggccaacgaactagcgcagcagcgcatcgacatggcgatcgcagcacaccgcatcaaccgcaacgccgtatcagctgaacattgtagtgaatgcggagaggttatcccagcgccgcggcgcgctgccgttcccggctgccagacatgtgcggaatgtcagacagacttagagctgattatgaagcagagaggtaagtga

SEQ ID NO: 156159 - DNA, 231 bp, Enterobacter cloacae
atgcattccttgcaagacgtacacgacaagttagccgatcttgtatcagaagcgcacaaagtagcgtgtgccctcgatgttggtgacgagcgcactgaagctttcgagctatacgaggcacttcgccgacttcagcgccaaggtgcagcagctgagcttctttccgcgaccaaccctcttctggcctctccttattacgacgaggactgggaagaagatgaagatgactaa

SEQ ID NO: 156160 - DNA, 246 bp, Enterobacter cloacae
atgtacttcgacatcattggtcgccccgtcttacagatcccctggaccatgccgccgattttcgccgcatggttcgtgaccggcggcaatatccctgccgtgatctggtccatctgcacgctggttatttccgccctggtctggctgccgtttttcaaactggccgagcgcaaacaacttgaaaccgaagcggccgaagaaaatgcccgccgcaacgcggacacgctttccgaccccatcttgtaa

SEQ ID NO: 156161 - DNA, 447 bp, Enterobacter cloacae; identical to SEQ ID NO: 103901

SEQ ID NO: 156162 - DNA, 1323 bp, Enterobacter cloacae
atgtctgaaacaaaaataacaccgcacatgcagtcttttgtcgataaatttgttgagttctcggcgcgcctggcaaaccaggtgcatcttcgctccctgcgcgatgccttcgccacggtaatgccgattttcatcctcgccggtctggctgtgctggtgaataacgtggtgttcccctggatcttagagggcgacacgctcacgcagtttaaggtgtggggcgaggcgatcatcaacggcacgctgaacatcgccgcgctgctgctggcgccgatgatcgcctggtcgctggcgcgcaacaaagatttcgacaatccggtctcggcagtggttatcgccgtcagcagtttcatcatcatgatgccgatgcgcttacagattacccccgtcggcagcgacgccacggtaaacgttacccaggtgctgacgttcgccaatatcggctccaccgggattttcgccggggtgctgattgggctgctctcaaccgagctgtttatcgccatttcacggctgaaggcgctgcacatttcgctgggggagaacgtaccgccagcggtgagcaaatcctttaccgcgctgatcccgacgatcctcacgctctccctgtttgcggtgctggcggctatactggcgaacgtgctgcacacggatctgatccatctcattacgacatttattcagcagccgctgcggctgatcaacaccagcctgcccgggacgatcttcatttacagcttcggtaacttcctgttcacgctcggtattcatcagtcggtggtcaacagcgtggtgctggagccattcctgctgatcaataccaatgagaatatgctggcctttgccaacggccagccgatcccgcacatcatcaacaacatctttgtgccgacctttggcatggtgggcgggacgggcagcacaatctcattgctgattgctatcttcatcttctcaagacagaaatcagcgaagcaggtggcgcgtctgtcgctggcgccgggtctgtttaacatcaacgagccggtgattttcggcctgccgatagtctttaacctgccgctaatgatcccgtttgtgctgctgcccgctatcgggatttactttgcgtggctctgtaccacgctggggctcatgtcgcgctgcgtggtgatgatcccgtggacgaccccgccgatcctcagcgcctggctggcgacggcgggggactggcgggcggtggtggtgcagttggcaatcatcgtatttggtgtattcttctacctgcctttcctcaaagttgccgagcgagtggcgttgaaaaacagcgggacagaacactaa

SEQ ID NO: 156163 - DNA, 1371 bp, Enterobacter cloacae
atgaaaatattatcccctttaacggtatgccttgctgtcctgcttagtgctggctgcgccgactctctgaaaagcgactatcagcctcctgaggtgaaataccctgccaactggtatcaggcggatgctgcggaggagaggatgccgttcgactggcaggcctttaacgatccagacctcgacggctggctgcggcaggtgatggtgcgcaataacgatgtcgctggagcagtattgcgtgtttatcgcgcccgcctggaagaagagcggattggcatcacaaacgatccgggactaaaaggttcgctcgcgcttgacggtaaaaaacagctgaacagctcagccaactggagcaggggcagcgttgccagtattaataccagctatgagctggatctgtggggcaaaatagcgcggcagcgcgatgcgaaggcgtgggcacgttttgcctcggaagaggatctgcgttctgcacgcctgacgctgctttcaaatgccagtaataattactggcgcttaggctttattaaccagcagctgtctgtcctgcaacaaagcatcgactatgcaaaagagacgctgcgcctggctaacgcgcgctatgccgcgggcggtgcctcctctctggatgttgtggatgctcagcagggcgtgctttcgcaggaaaacaggctggcggcgttgaagaatgaacgtttacaggcgctcaatcagcaagccgttttgcttggaaccgcgccgggcagcgcgatagtcgaaccgaaagcgttaccaatgggaccactgccgcaggtcagtggaaagatcccggtcaacgtgctgcggcatcgacccgatatcagcgctaaagagtggcgggtacgggaagcattggccaccgttgatgtccagcgtactgcattttatccagcgtttagtctgaccggctcgcttggcaccagcagcagcagccttatggccttcctggaaaatcctgtaggctctgttggagcaaacctgaccctgccgttcctggaatggagagaaaggggcatggacgtgaagattgcccgcaacgactacgagcaacgggttctggagtttaaacaggaactttacaaggcgatgagtagcatagaagatgcgcttgctttgcgtcatcaactcctggaacaggagacgcttctacgtgaaggcctggaactggcgaaaaaatcagagaggttaaacgaagttcgctatcgccagggcgcggtgcgaatttctttctggcttgatgctcaggagaaacgccgtcaggccgaactggcactgtatgaaaatcgctttaaccagttaaataatctggcaaaaatctatatggagttcggcggttcggtatctttcccctga

SEQ ID NO: 156164 - DNA, 183 bp, Enterobacter cloacae
atgtctgctgctcatctcggtttcccgacggaaaccgttgttgtcttcgtggtgatggccgttggggcgatgtttatcgacctcttcatgcaccgtcacgataaaccgatctcgctgaaaagcgcggtcatgtggtccatcttctgggtcatgatggcgatggccttcgccggattcttatag

SEQ ID NO: 156165 - DNA, 1845 bp, Enterobacter cloacae
ttgaagcccttttcgcgctccgtcatcgagctttttgatggcaccaaacgttatgtcatccccatgtttcaacgccagtatgtttggcgtgaagagaagcaactatcacgactctggtccgacttacgtgcgaaaacaaaacaacgtctggatcggaagacaacgtcaccccactttctgggcgcaatcgtgattgcgaacctgccaacctatggtcggcaagtacaagcgtatgatgtgatagacgggcagcagcgccttacaacttttcaaattcttctaactgcattccgtgatgttgctaaatcgcacagttctgagtttgctgaagaactcaacaagtacatcgtgaatgttgggatcatggatgataagaccgtcgaacgttacaaggtctggccgacccaggtagatcgccttcagatgaagacgctggttgattctggctcactcaataccgttactgaattggagcaaacatcgctcggccgccaacggactggtgtagagccgtttatgattgttgcctataaatactttcatcagcaaatcgccgattttgtagctactgattctgccgacagcacgcatgacgatcgcattgagacgcttttccatactctcaaacatgacctagctttggtctcaattgaactggaaggtggggacgacccacaggtaatctttgaaaccttaaatggtttcaatgaaccattgcttcctaccgatctactgcgcaactttgccttccagagagcctatcgagaaaaacgtggagagggtgacaaaacacccgatgagctttacaacgaatactggttaccatttgatcaacatttttggaaacgagatgaaaaacagggacgtctgaagcgtccacgagccgacatcttttttcaacattttctagcgatgaagcaggcaaccgacgtcaacgtcgcacggctatatcacgactacaagatctggattgaaacggaagcaccttatccccgcatcgttgatgaactcaaagacttggcaaagtttgccagtgtgtttaaaaagctactgacacccgatgagccaagcgaactcagtgcgtttgcaggcatgcttaatgcctttgatgtcaaaacaatatctccactgattttgttcctttgcggcgaagtggagttggaaggagatgctcttacccaggctctaaccatccttgagtcctttctcatcaggcgtgcggtttgctgcttaaccacgaaaaactacaaccgccttttcttgcaacttgtagaaatccttcgtggaaaagatgatgttgttgaggcattgcgcgttgcactacttcatggcaccggtgatgcggttgtctggcctgacgatattagtttcaaacaagcttggctcaatcgaccgctgtacaacgatctaacatctagccgtgttcaatatattttaaaaagcattgagcaagcgaagcgcaccaccaagaacgaggacattcacatcaagtccgtgctcactgtcgaacacatcatgcctgtagcctgggagaaaaattggccactagccgatggttctttcgccaaaccagcaattgatcggttgctagtagatgaagaaaatcctgaggtagaaaaacgggctcttctggtcaatacgatcggtaacctaacgctgctcacccatcctctcaattcatcactacagaatagcggttgggatgtaaagaggcctgaaatcaccaagcaatcgtcactggcgcttaaccgcgaattgctggatattgaggtttgggatgacaacgagatcatgcaacggcaaggaaaactcttggagatagctgtgcttgtttggcctcgttaa

SEQ ID NO: 156166 - DNA, 3273 bp, Enterobacter cloacae
atgggtattatttccaccagcgtattacgattttttggttctctcataagagttgttagaccaaaagctaagcagctttatgccgagcgttctgcagcaaaagctccagatgctgatttaaccaatattgccgataatatacttgatgaggcgcttagcaggttaggggctctcgagaacaaccacccatggtggaagagtgcgcttgctgagctggggagggctgcaattcagccggatttgttcaaaaaacctcacgtcatggaatggctttcgcaaactgacgttcaatgttttcttaaacaaacagcgatagcaagactacttgagaaagaagttgattctggtgtttacaaagctctcgtagagtccttgatcgcaaaatcgggtgaagaccatcgatatgctgagtcaataatttcaactgccgtagcagtgctcaaggcaagtatcacaggctctgtctgcgatccaggaaccgcggcaattactcaagctgccatgatcgaattgttaggtcaattaggttccatgaatgaaacacttaacactcttatgtcttcaggccttgaaaaggaaactaactgggcccagcatccagatgcttcttatctggctttggccattctgatagggtcctggcaagacaagggaccatacgatattgaagtggtaacccaactattcgggataagttatgaagaatggttaaaaaaagctcgagaaatattgcattgttctgctagtccactgactcttaaaaatggtatttggtcggtagttaaccgggctgagctatgcaaccaattaggctcacgtattctggatcagaaccttgatatgtttagaacactggctatcactgtactaaaagagccagaccctgcatttgagctgcctgtcgaagagcgatatgccgccagtattcatggaaaacagctgaagtattcgagtactctacgaaatggtattgcagaagggttggctattatgagcagccaccctcatgtatttactaactgctctcaagggaaatctgaagcaacttgcgttctggtgatacgcgagctttttgctggttctgactgggttttatgggggagtctgaaccgtatactgcccgttcttgccgaaactgccccgagtgaatttgtcgacgctgttgagaagtcgatgcgtctgagtccatgtccttttgatgagcttttttcccaagaaagcactggcataacgggcaataattatctaacaggtcttctttgggcactggaagggattgcttgggatgaacaatatctggttcgcgtctgcgtagtgcttggtgaacttgccagccatgaccctgatggtcaatgggccaatcggccatctaattctcttgtaactatttttctaccatggagaccacaaacgcttgcatccattggcaagcgtaaggttgctattcagactctttttaatgaatggccggaagttgcatggaaattgattattcagcttttgcctgatcaatgccaaacctcttttggaacccataaaccaaaatggcgcatggtaattcccgatgatgggggaaaaggtgttacggatcaggaataccttgagcagtcttctttctacgctgagtttgccgtggcagcagcaggcaaagatcctgctcgcctttctacaatgattaatatttttggcagcttgaccaagcctgcctttgaccaattgctccagatccttgtatctccaataattaccgaacttcctgaagaagaaagactttccatatgggaccatctcactaggtttacaaataaacaccgacgatttgcagacgcagaatgggcattgcccgatgaattggtgattcatattgagaaggttgctgagcaacttgctcctaagaatccattcaatttatatcaacgcctatttacagagagagattttgatctttatcaagataacgatgattgggaaaagcagcgaaaaatactggactcccgccgtgatgcggcaattttagagatttttaaacaagatggtattgtaggggttattagattttgtaaatctacttctttatctggaaatatagggcgtgcacttggggacatcgaggatgatattatcgaaaagacccttctccctcactttttagaaacgcctgataataaactcaaagaattagtgagcaatttcatctggcggcgctaccatcgatatggctgggaatggtgcgaccatattgataagtctgactggtcaccaaggcagttgggagagtttttggtttgtttaccatttatcgaagagacatggaaccgcacatatgaatggcttcaaactcatgagggggagtattggtctcgtacagccgcgaatctttttcaagcagataattatcccgctattgctatcgataaattaattgaatatggtagaccacatgcggcaatcaattgtttgagtataatgcgttatgctaagaaggaaattaatattgttcaatgtgtaaaggcgttacgtgacgcagtctcatcaagcgagccgcatcacgatatggatgggtacaagattatcgagttaataaaatttctccaacaggatctaacagttaaccaggacgatctttttaatattgaatgggcatatgtatctttgcttaaccgtgatagaggagccgcgccgaaacttctggaaaacaggttagccaataatcacgattttttttgcgagctaattcggttgatctatgcttctgataaagaagaacagatatgtaaagaaacgtccgttgaatcaaatgtaataagaaatgcctttcgactgttaagtgaatggaaaaccccgcccgggactcaacaagatggaactttcagcaaagagtgtttcactgactggctgcaaagtgtgaaagtatcctgttcgaaatctggccacttagatgctgcgctcaaccatataggtcaagtattaatttatactttgccagatcctgatggattatggataaaccgtgtagttgctgccgcattgaatgaccgtgacgctgatgaaatgcgcattggttttagaaaagcaaaatacaattcacgcggtgctcattgggttgatcccacaggtaaacccgaaagagcgctggcagagcagtttagggggaaagccgaggatatagaaaatgctggttttcagcgatttgctattattttgcgagaactagcagatgactacgagcgggaggctgaatgggtgataagtaaccataatggcctagtttaa

SEQ ID NO: 156167 - DNA, 696 bp, Enterobacter cloacae
ttggcagccaacgacacagtcagggacactgttaaaaatttaggtgaggcggcaggagaacaaatcaagagccgattaaaaagccattacttcagctacattctaacatccttagttgcctacaactggcaaaatatacttgtattattgaagtcaaccagaaacatcgagacaatccttgaaacatggaataaagctccgggtttcacctatgattttatcatcttacctgttttagtcggctatatagcatcattcattctgcctatgcttgccatccctgtcgcctggataacttcgttggtggctgaaaacattgacatagcggatatctggtccaaaaacataatagagcgttataaagcgcggattgaaagaaggactgccgaatttaaaagacgtgcgattttttcctctgcggccttagaggaaatagaagctgatatcgatagcgcgctcaccaagagagacacattattagaacacaagaaaatgctcgatgaatatattgcatctctttctcaggtgtatatggaaatgaaagtaatatccagcccggaggatttggaacgattctttgaactggtgaaggaaaaagggttacttcaagcctaccctgcgaattcaatagtcaatatgatggtggacaacatttattatcttcgaggaagccgcgaagatcctccctcgacataa

SEQ ID NO: 156168 - DNA, 612 bp, Enterobacter cloacae
atgttcagaagattaatgagcagacttagtaagaacgtaaactatgagaccgagttcacttctgctataagacgctcaaaaaaatggggtcttgaggtacccatagtcaggttgagtaaaacgccatttctgacgaatgataaaagtgaagccgcgctcaacgtcattcaggaaatcgcttcaaaacatacaccagaagagatatcacagcaatgctttggatacatgtatttggtacaggatgctttagaggacgccttgcaaactccgctctattatactttaggttatgtagattatgataaaaggcccgttttttatacatgcgaagaaacattaaaaagtaatcttggcattcctatgtcaggtgtcggagcaataaatttacatgcgtggctgacgacgccaaatatggaaataatagacctaacatttgctaccacatatggcattgtgaataatgtcccctcggtaattggccgctgtgcgtttcaacactactctgcatttaatgaaaacatggtttatcatcctcaactggtcggtgaggattatttaaagcgtattggtgcctttgttgatttaagagcgttaaatttatttacaatctaa

SEQ ID NO: 156169 - DNA, 846 bp, Enterobacter cloacae
atgaagaaattattaattacagatttggataacacgttatatgattgggtttcattctatgcccagtcatttactgcaatgctagatgtattagtcaatattttagatgtgccgaaaagtgagttacttgaagaatttagacaagttcacatcaaacatgggaattctgaatatccatttggtgctttagagatagattcagtaaagaaaaaatatgcccacctaactagagatgaggttgctgtaaaactcgatgaggcttttcatgcctttaattctactagaaagaaaaccttaagatgttatgagggagttatcgagaccttagcctacctcaagaatcaaggggtcgtcattgtaggccacaccgaagcccctgttagaaatgctatattccgattgaaatctcttggcattcttgaatttatgacacatctttatacccctcaagatagattctacgatgaattggatgttaaaactaagtcttggattgaatcatatggtgattttatttatttattaagtgaagaggaaaaaaaacctaacccacttttgttagccgacatttgtgctaaagaggggttcagtacaagtgaggcagtttacattggggattcattaattaaagatatctccatggcaaatgatgcaggtgttgaatcaatatatgcagagtatgggcgacagcatgaaaaggtatactgggatattttagtttcaataactcattggacgcaggaagatgttcaaagggaaggtaaattaaaggaactttataaacatgtagttccaaatcatataataaaatcttttgataaagtaattgatgttatcctgaaataa

SEQ ID NO: 156170 - DNA, 1611 bp, Enterobacter cloacae
atgaattgcaaaactatcattctacgtttcagagatttggtcactcccgccggagaaacaatcactcgacatcaggaaataatcaaagctaaaggctcagtttggtggggatggtgggccaagccggatgaaagagtttcttctgaatttataaaaatcaaacaaaatttggtaggtaaaccattaggtattttcctttttgatagtgggcaaaagaagttgtatgaagccaagctaaaagatatttttttaaatggcgatttagctccgtgtcctgacccagaaatgtctcctgcatattatgcggagcaatgttataatttatggtttgaattatttgatataaatcaaattaatgatagcgtaattaataattacgcatactctgacaaggttaaagacttttttgatgaccctactttattttcagtattcgataacaagcaggtgtcggggcttagggagttaagatttcaagacagaaccatttggtttgttaatgattatgaccctacaaagcatgaatctcatgagattttgttgaacgatgcaaacattggaattcccggagtgtttccaaaacgcccagtggacttacacaatggaaaagtagtttggttttcggatatccatttcgatgaaaataaggagaaacatcaattcaaccaagttaatcaattgtcgctttctaagatattaattggcaggcaggatcttgacatagacgggatgattatttcaggtgatttaacttggaaagccacaaagcaagagtttgaattgactacgaatttcttcaatgacatctgctctgttaaacgagtaaaatatgatgcgataggattttgcccaggtaatcacgatgtgagctttagtaaaacacttccagctgacgtaaaaaaagcacttaataactatcatgaagctcagatggggaagaaaaaaatcactaaagctgattggaatattcttgctgcaagaagtctttctaataaaagcaaagaaaactataagaatttttttaaattgacagtaggtacagagcctaacgaatttctttcgatgggcaaacgctttattattagaaaccaaaagatagttgatttctgtttcttaaacagcaattttcttcagcaacatcaacttgcttttcaaggtcaaggatttgtcggagcagaacagcttgatgatgctgaaaagaaaatgctttggcaaaataatgagaaaattaaaggggggtaccgggtggttgttttgcaccataatttgtatcctgttaattatacctcagagccgtatgtgagtgctccagctagtctggtatatgatacggaagcaataattcaatggtgcttcaaacatggagttgatttgatacttcatggccatacacatgaacgtttcatgactaaagtatccagaaggatagatggttgcactaaaagtctatggatcactggtttaggtagttcaggtgtgatctcttctcaccttgtaggttttaatgagtttgcagaaattgatttcaatgaggaaaaaataaatatcaagttctataatataaagaataatgcaattgatgaccaatttgaaataattaacttggactga

SEQ ID NO: 156171 - DNA, 519 bp, Enterobacter cloacae
atgtccttttacattaggaaagttgatacatccaaatgggaggatgaacttcctgaagatggcgatgtgttggatatggcagtagatggcattacaaattgttgcaagacttacgaaaactgtttatcggtatggaagacagaaagtttagatccttattctgaacaaaataaaaaacttcttaccgcaatggctatgtctctagataaaccaattgcaatgacagttgtttttctttctgataatgaaattgatagtttagaacttgagttgattgaaaatgatggtatgactccctacacagagcaagcttcacttcatagagatatatctaatttgactttaaaaaaaataggccatctaggatgggttatacaccaaaaagttaatgatgatgctgaaataaaaataatttctgaagaagagttggtatcatttgttaaggggattttccctaatgctgatgctcttcctgaagaaaaacgtaatcaaaaaaaatggaaaaaaatttatgagtga

SEQ ID NO: 156172 - DNA, 150 bp, Enterobacter cloacae
atgctgatgctcttcctgaagaaaaacgtaatcaaaaaaaatggaaaaaaatttatgagtgagtttggtttcagtttatgtgccgcctttgctcagaaaattatttgtttttttgaatgtaatgaatgtattaaattgataggggcgtga

SEQ ID NO: 156173 - DNA, 513 bp, Enterobacter cloacae
atggctattatgattcttgctgtaccagttttagcagcaggatttagttatggtcctccaacagaagtatgcctcaataaatatacgatcccgtatatccacactgataggctcgcaattgagatagttgatgaggcatacgacaagtgtcaggacgttcttgctcaatgggataaggaaaagaagtcattacctcccaaacttgttgtcagcaaggatgaagagtttcacgtattttacgtccatatgatcgaagctcgccgagaatcgaatactaataaaaaaatgactattgtttttattcctgctttggtagcggttcttttgagtgaagaaagaaaaatcggaagagagttaactcagcaggaggttgagtcaatccgtgattccgctacagctgtacaagtgccagttgatgttgcaaaagaaatgattaaagaacggggataccttgacatcgatcctgagaatgcttgggaagaatggcttctgtacaaaaaatatgtcaattga

SEQ ID NO: 156174 - DNA, 789 bp, Enterobacter cloacae
atgaaaatgaatgcagggactcttctcgattatctcaatgcaacacttgaaaactctaacgatcacgcacaggaacatcctcagctaatgtatatggttctgcagatggatcagatatttcaaaaagagatttttgacaatgaatttgatgtgagtcctattaccggttttttggcaatgaattcctactctatgctgctaagcgcagttgggcaggcgctatctggacacttggtggctgtctttccgatcgttcgcaccgcgcttgagtccgcctgttatgcttacctgatcgctcataacgaagcgatggaacagatatggttaaataggcacaaaactgagagcgcacttcataagtgtcgcaaaatgttctctgtgaagaaggcctcaaatgaattaaaatccatttctcctgaaatggctgaatatgtgatggctaactatgaagctgctatcgatttcggagcacatccaaataataaagctatctttaatcacttgacggacatgggtgaggtagatgaaagatttcatggcttccagcttaccggtgtttatggacggaatagctggcatgtgaactatgcactacttatctgcacggaggttggtcaggctatagcattcctgcttgctgcatgtgccgataaacatcctctaattcatgatcgcttagaagtgttcactagctgggttgatgaaaaaaatcgaatagttgacaaaatcaatggtgaaccaatggactacactgggtctatgtattgttcagttatcccaccagagtaa

SEQ ID NO: 156175 - DNA, 249 bp, Enterobacter cloacae
atgattggactcatgcccttgcatggcgctggtgagatccggagcggggttatactcagcacggccggtgactattgcgtaacggaaaacttccccgcagcgctgcctaacttttttggccttttctgtagcgccgcgcccctcaatgcgccgcagcacattcaacagttcaagcggtttgatatcggctattggttttttgccaatgtaagggaacacatctttgttgaaagcctcaaggatgtctga

SEQ ID NO: 156176 - DNA, 606 bp, Enterobacter cloacae
atgaaacaccactttaaagcgctacctgttgtacctaaaatattttataaacagaacactcaagataatgccaagggtgcagacagcgtacatattgttatagaagatgacaacaactttacgttatggttcggtgaagcaaagttttacaatagtattgaagatgaccgattcgattcaataatcacatcagttaacaattccatttcaacagataaaataaagaaagaaaacagtataataacaaacactaaagatctagttagcttggtaaaaaatgatggactaagatctaaaataatgtattccttgtcatctaaaaactcaattgataatattaagccaatactcaatatccctattttcattttacatgaatgccctataacagaaaacgcctcgtctctttcccctgaatataagtcatcaattatagaactccataaagaaagagctaagtctttttttaaaaaacaccaaataaaaataaaaaacatccatgattatgacaagataaagtttcacctaatccttttccctattccaaagaaagaacaaataattaataagtttgttgaaacagttcgttttcacaaggaacagtaa

SEQ ID NO: 156177 - DNA, 432 bp, Enterobacter cloacae; identical to SEQ ID NO: 117743

SEQ ID NO: 156178 - DNA, 690 bp, Enterobacter cloacae
atggaactggtaggaagcacaactcaattcaatttttttgtttctagttctgtcatgcctgcagagcctgaagcaattgttaagttaatgccatttatatctagtgggtatgtgccgtctttcggagaagaagttaatgaaaatgggttgagacataaaataataagattagaaaaagaaattaactctattaactattcagttacttttacacaaaaagctatatcaattcagattgattccgctagatttgaagcaaacatagaaatttttgaaaatgttgttgtaattctttcattactaaatgatgttttgaaagtaaataaacccatttcttatagattgtctgtggtttgtaatcaaggttatatttatgaaaagaatatagaagagcgtgtttataataaaatttttgcaggtggcgctattccttttgagtggagttttagacatgcacatacagatatgttgggtgaagaatccatttatcatgttgttgcagcaactagaggtgttgctttagtaacaattaaaggaagcgtttctcaacacgatactataatgttttcaattgataataacacttctgataaaaatctcgacttcaggttttctatcaatgatcattcttttttaaagagtttatttgaaaaaacattaagtgattttaataatcttgcgagaaattga

SEQ ID NO: 156179 - DNA, 768 bp, Enterobacter cloacae
atggaaaacattgaaactggagtgctgctacccggtgctgaaccattctcagattgcaacatcaatcagacttggaaggggcatgtcaaaactgctacagagacagtagttgtctatgccaagctcatcgatgcaagagaaatatgcgtcgaagcgttctgcgctattttagggcgccaattaggtattccgattcccaagccctacttaattctagctgatagaaattctcttcctatcattccagagggtcagcatgcgttaatgtttggttcggaggatgcggattttccaagctttcgcagatatgctaactgcgaacaggctttaatccggttacaaaaattcaaatcaactttagatgttggtgttttcgatgaatggatcgcaaatcacgaccgtaatatcggtaatatcctatatgatggtggtgacagttttctatttatcgatcacggtctagccattcctaatggcatgaaccctctctcgccagcatctgacaataatattatcagagcattattttcaattcagtcagaaattgaaaaattcagaactatgaaaacaactcttcaagatattaccccgacttataatttgttaaaactagacgaaatcatgcgtcaaacgcactcggaaaaataccttgcagaagatgagatcacttatgttctagactttttgaccaacaggttgtctgtcattaattctctgataagatgtagattaggcatcgctcaaatggacattttcaatggcgcttga

SEQ ID NO: 156180 - DNA, 873 bp, Enterobacter cloacae
atggcgcttgatctcagtattttccctagcaaacccatgtatcatgggaaatggtgggcagtatcatttgaacctatagttggttcaggtgaaagaatcaacgcgatcgttgtagcaaggggcgatgatggaaggcacgatgtcattcaatcaattcgagatgatgtgcttgactcactatatggaatgaaatcagacagcatcaaagatatgctatcttgggtcaaacaatctattttgatgcatattgctaatgattccgatctagattcttggatctcacctgtatcaggttttgaagtaattaaatcagccagagcacttgatgacaatttgccgggtattttccgccaagcaattcgacttacctctagccttgggacgctgagtcttgaagccgaacggagtgaagaagatgagcaatctggtcaaaagcaaactgagcaatgggccacaagaatatttgatgaatcaagtatattatgtccttctttaaatggtttttttggaactcgagttagactttctggcgttaacgtatatactaaatttggtttttacaacgataaatatgcatcaaactttggtttaattgtcccttctcgcctttctgcatcaataaatactattaaggccaaagtttacgatcttgaatcattaaaaaaatcgagtatggtgcttaaacctgaaactgtcgatattattgttgggattccgtcctttgacgatccaaccatcccccaaaaaactgttgataaaatgcgaagccatcaagatgagatgactgaactggcgtctaaagaaggtattaattttatatctgttcataacgcaaagcaggcagctgaacgtatagcgcttaaagctgcctaa

SEQ ID NO: 156181 - DNA, 318 bp, Enterobacter cloacae
gtgggccagcagctgcgccatgcgcgtaacgtcctccttttcgtatccaccgactgtacgcagatacttttgctcccgcacttcactgaagtgaagccggttttccagcgcgatgacgctgcagctgatgaagtcttcaaacactttgaaccggtggtgataccgggccgtctgactgaacaacttaacaaaggctttttcgtggttaatcatgccaggcatgcgcttctccataaaaaaggggacgcgcaccctgaccaggggacatgtcccctgagggtaaaaagccacggcagtgccgtggcagggttaacgtag

SEQ ID NO: 156182 - DNA, 462 bp, Enterobacter cloacae
atgaacgttaacaccccgaccgctgcaccaatggcctttttcgttccgtctcataacgctgtttatgaccgcgcaacacagctggacgggcagtgggtgactcagcgtgaagcgaaaacgctggaatccctgcgccgtctctatccggacgcggagctgatccccgcgactcaggtgcaggaaaagcagaatgacggctatcgccgtccctgggtggaaatcaccgaggcccggtacatcgaccagctggaaacgttgccgccagtggactggtgcagagggtatggcggggagtcgttcaagtcgatggagtttacaggtggggatgtgaccgcgatttttgtccggtacggcgagcgcttctttgagtgccacgacctgcacacccgccatcaccgggagctgattggcgacgtgatcgcccgtttctgtctcgatgcgccgctgaattcagcgcattaa

SEQ ID NO: 156183 - DNA, 792 bp, Enterobacter cloacae
atgtcacaactgagttttgaatccctgttcctggcagaccagaccgatccgcagccgcgggtttccgctcctgtccgggtattgacgccaactgaggcgcgtaagcagttcgccagtgtattccgccagactgcgaaatatatgcgccgttccgaagtgttccgcgatttcatcaccctggtagccagtgggctggatatggcgcgcatacgctcgccagaaaacatcgaaaacagccgacgcatctgcgaacggtatcagccagacgatttagacgccatgagacatctgtactgcctgttggtggaggggctggcgggtgaaactcatgatttcctcggcgctctgtatatggagcaggagctgggcgcggatgaaatggggcagtatttctctccgtcctccatctcccgcctgatggccggaatactcatgcccggcgctcaggagacgataaagcgtgagggttggatgacgctcgatgagcctgcctgtggtagcgccggtatggtcattgcctttgcatactggatggctgacgcgggatataacccgtcagaacagctgtatgccacctgcacagatatcgatccgatggtggctgatatggcctttattcagctgtcactgctgggtatcccagcgaaagtcgtgaccggtaatacgctgaccctgaaagcaaatcgcgtgcgttatacccccgtttattacttcaatgactggcagggacgtctggagttccgcagccgtttcgaagcgatgaaaaactttctggccaccgtggccgcctga

SEQ ID NO: 156184 - DNA, 1440 bp, Enterobacter cloacae; identical to SEQ ID NO: 82809

SEQ ID NO: 156185 - DNA, 264 bp, Enterobacter cloacae
atgaaggacactcattattcggttgaagtcaatttgccgaaaactcgcttccggatttattggatcaaaaccaaaatagttaacagcgacatcaataacagcagaaaaggctcggcggttatctgtgcgtttgctccagccccggataccttttttgagttttgtttttgcaccaggctcaaaatcgatattttcagcaacatgattacgagcattagcttttgtttgatcgacctttgccatatcaataatcctttaacataa

SEQ ID NO: 156186 - DNA, 900 bp, Enterobacter cloacae
atggagcagattctgccatggcagaatatgaccgctgtcatcgagccgttttatcccaaggcgggcaatggccgacggccctatccgctggagaccatgctgcgtattcactgcatgcagcattggtacaacctgagcgacggtgccatggaagatgccctgtacgaaatcgcctccatgcgcctgtttgcccgattatccctggatagcgccctgccggatcgcaccaccatcatgaatttccgccacctgctcgagcagcatcaactggcccgtcaattgttcaagaccatcaatcgctggctggccgaagcaggcgtcattatgacccaaggcactttggtggatgccaccatcattgaggcacccagctctaccaagaacaaagagcagcaacgcgatccggagatgcatcagaccaagaaaggcaatcagtggcactttggcatgaaggcccacattggtgtcgatgccaagagtggcctgacccacagcctagtcaccaccgcggccaacgagcatgacctcaatcagctgggtaatctgcttcatggagaggagcaatttgtctcagccgatgccggctaccaaggagcgccacagcgcgaggagctggccgaggtggatgtggactggctgatcgccgagcgtcccggcaaggtaaaaaccttgaagcagcatccgcgcaagaacaaaacggccatcaacatcgaatacatgaaaaccagcatccgtgccaaggtggagcacccgtttcgcatcatcaagcggcagttcggcttcgtgaaagccagatacaaggggctgctgaaaaacgataaccaactggcgatgttattcaccctggccaacctgtttcgggtggaccaaatgatacgtcagtgggagagatctcagtaa

SEQ ID NO: 156187 - DNA, 705 bp, Enterobacter cloacae; identical to SEQ ID NO: 8686

SEQ ID NO: 156188 - DNA, 435 bp, Enterobacter cloacae
atgaatcttaaatatttttctccatctgaaaatgcgttttatgccggggagcttaaagaaagctatatcgctgctggctcatggccttctgatgccttggaggttgatgaaagtctgtatcttgagtttatcgatgagccgccagcaggtaagtatcgtggagtagatgatgcaggtatgccctgctggcttgaaattcctccacccaccgcagaggaaatggcatcgaatgcagagaatatgagacagcagctcattgatgaggcaaatgcctttatcaacagtcgccagtggcctggaaaagcggctattgggcgattaaaaggtgatgatctgacacagtacaatatctggcttgattatctggatgctctggaggcgattaatatctctgaaccgcagaaaattatctggcctgaaatcccggacgcataa

SEQ ID NO: 156189 - DNA, 708 bp, Enterobacter cloacae
atgcactcaaccccaaccaacctcatgaccactgccagcctgcctgtagatcgccctttcttttcttatcagcatgaatggaatagcggcgcacgcagcagaaaccgcgtacttacaaaaatgcgtcaggctggcgcagatttctttttcgcctacgaagccctgaatgatgcgctgcataccggacgaaaccagatttttctgggctgctccccggcagcggccctgaccgtcaaaaactatatgtcagcctttttagagcaggccgcagcctggacacacccaggaaaaataaaatcaggtaaagcacatctggaattaccaaacggtgcggtcatttattttatcgggccagaaagtctcgctgccgcgctccatggaaacgtctacgtgtcagaatacgcctgggcggattccccgaaaaatatgattgcgctcgccaaaggcctgtccatgcacgcgcgttatcacgcaacctactacaccaccccaagccccagcccggaagcatggcaggaatacaaaaagctgattgcccgcaacagcacaaccagcatgatttttacggctgaagacgccgcaacgtcaggggcaacgctctttgatgatgaatggctgaatacaatgaaaagcgaattatcagcagcggactggagaatgctgtttatgtgcgaatggccccaggctgataaggagcaggtggcatga

SEQ ID NO: 156190 - DNA, 339 bp, Enterobacter cloacae
atgaacaaaatcgcatacaagttgcccgagggtgacctggcttcgcgcaatcaggctatcccccaacggcacaagattgaagtttttatcaatgaggggaactctgtagatttggatttaagtggggtttattcaatttccgagtcatactctgatgaaatttttggtgtgctagttgttaagtttggtgttaccaaagttttgagtcaggtaaaaatccggaacgcatccccttcaattttaaaaagtattgcaaaggtaatccaacgtcgcagtaatgaagtcgcatcaaagaaggtgcattctgttggatttgatggcgcgtatgctgtttgctga

SEQ ID NO: 156191 - DNA, 975 bp, Enterobacter cloacae
atgggattaggattaaaagatggtattttgcatacagctgctttccatcgaaaagaaactaacaagctgcttttgccgaataatcattgccatcccggtttcataacggttttagctgcgtatgtgaatcatcataaaattacagaagatgattgcacgttaccttctccagagtatatgcgtgcaattaatctgcagggcgccctttggggtgaagaccaataccggcaagagcgtgttaacgtcggtagaaactatagccttgtcactgcattaacaaacgtagaggctgttgacgttgcaaccagcagtatcaacagttgtgtgaggcaattaactttcccggatcgtgggccgggtgagtatcctaaaggacttacggaccttacgcatgttataggtgagcttcacgacaacgtatggtcacatggcaaatcgaccggcttctcttttgcacagcgatatgctgtaccttacacacaaaggagagagcattttttagagttctctcttgctgactgtgggtttggatttttaagagaattgcggcgtgcaggtatagccaatattgaaacgcatcaggacgcaattgcatggtgtattcaggaagggcattcctctaagcacgctgacttacaggacgattgggcgcagcagctcccccaagacttcattggtggaagtatgtttggtagcggtgtagcggtaaaagaaaaagataataatcatcaagggcttggcttgtaccacttgatgaaattggtaaaaacttataacggggaattgcaactggctacaggaaatgtatgcttagaggcaactggtgatgaagtgagctacactgaattacgtaacgagtggcagggtgttgctatttcgtgccgttttaagattcatgaactggcagttgataaagataacgaagaaaatgaccctcagcttatggaaatcatgcgggcgttaggaggagagtaa

SEQ ID NO: 156192 - DNA, 282 bp, Enterobacter cloacae
atggcaacttcaacagcagcagttatcgaagcgcgaaaccgtttgaatgctacaaggaaaaatggtgcgcgcactttatcgcgtagcggttacggccccgatcatcaatacagcagatcgcgtaatgtggtccagggtatggctctttccgatattgcgcgaaatggttttgaggtgcgttgtatagaaacaggcattcaattttcaattcttccgggcggctcaatttgcgaattattctccgcagaattagaagcgtactggaatagcggcgcgagctaa

SEQ ID NO: 156193 - DNA, 171 bp, Enterobacter cloacae
atgaagaaaaactcagcggcacgccggctgcttgggatgaaccattggcgcagcaacactcagcttatgcagttcgtgtcgtggcatgttgcagccaaaacgggaaaaccggcccctgaatggattgctgtgcgaacgcgtagctctgacttttgctatttcactgaatga

SEQ ID NO: 156194 - DNA, 126 bp, Enterobacter cloacae
atgtggaatttggatcgctgcaagcgcgtcctctatctcaataagctttgctttcgtccgtttataatcatcctgcaaacgttgctcctgctcgttatacgccaccagaacgatgcatccttttga

SEQ ID NO: 156195 - DNA, 5670 bp, Enterobacter cloacae
gtggcgggtgatgacgtcatcaacagcgtggagcacgggcaggcgcagatcgtcagcggcaccgcaaccggcgccagcgtcggcgataagctggttatcacgataggttcgaaccagtacaccaccaccgtagacgccagcggcaaatggagcgtgggcgttcctgccagcgacatttctgccctgaccgacggcaccgtgaccctcagcgcgacaatcaccgacagcgcgggcaacagcagtacccagacccatgacgtggtggtaaataccgcatcggtcgcgctgaccgtcaataccctcagcggtgatgacgtgatcaatgcggcagaagcgggcgcgtcgctgctcatcaacggctccagcgcgcagtttgctaacggcacgcaggtcactatcaccctgaatggtaagagctatacggccactatccagagcgatggctcctggacaaccaccgtaccggccgccgacgtgggcgccctggccgacggcgcgcgctatcaggttactgtttcggcgcaggacagcgccgggaacagcgcctcggcgacgcacaccatcagcgtggacaccaccgcgccggtgattagcgtgaacacgttgtcaggcgacgacgtgctgaatgcggcggaagcccagcagccgctcaccgtacacggctcttccagcgcggaagcaggccagacggtgaccgtcacgctgggcgggaaaacctacactgcgcttgtggcaaacgacggcacctggacgctcgacgtcccggccgccgatcttgccaacctgagcgaaggcgcgctgacggtcacggcgtcggtgaacgacaaggcgggtaataacggccagacgacgcataccttaacggtcgataccgttgcgccagccgtgactatcagcaccgtggccgatgacaatatcatcaacaacgccgaacagctggcggggcagaccatcagcgggaccaccaccgcggagcagggccagacggtgaccgtctccttcaacggccacagctatcaggcgaccgtggcggcgaatggctcctggtccgtcttcgtgccgggacgcgacttcctcggactgagcgacggggattacacccttaccgcaacggtgagcgataaagcgggtaacccgggcagcgcaacgcacgacgtgacgctgaacggcgacgtgccgaccatcgccattaacacctttgcgcaggacgatatcgtcaacgccgccgagcacggcacgccgctggttatcagcggcaccaccgacgcgccaacgggccagacggtgaccatcgcgcttaacggtaaaacctacacggctaccgttcaaaatgacggcacctggagctatacggtcggcagcgcagacgtgaccgcgctggcggacggcggttcgtacgtgattaacgcgcaggtgaacaacgccatcggcaacagcgccagcgataaccatactgtcaccgtggatctcaccgcgccgtcgatggggatcagcattgattccctgcaaaacgataccggcctcagcgcgaatgacttcatcaccaacgacagccaggtggtggtcaacggttccctgaccgcgcagctcggcaataacgagaaggcgcagatcagtcttgacggcggtaccacctggattgatctgaccgtcaccggcaccacctggcgctacaccgatggtcgcaccctgaccgacggtacgtaccagtaccaggtgcgcgtgatcgacaatgcgggcaacgttggggcaacggacagccaggacgtggtaatcgatctgaccaagcctgcggcggcgaccattaccgtggattccgtctcgcaggataccggcctgtccgacagcgacttcattaccagcgacagccagatcaccctgaaagggacgctcggcgcggccctgggcagcggtgaccacgctcagatcagcctcgacggtggcgcaacctggactgacgtcagcgtcagcggcctgagctggacctacgttgacggccgcacgctggccgacggagactacaactatcagctgcgggtgattgacgacgcggggaatatcagcgccactaccagccaggtggtgaccattgataccgtcgcgccggacgccagcaaaacgatcgctatcgacagcatcagcgacgataccggcctgagcagcagcgactttatcaccaatgatacctccctgacgctgcacggctcgctcggcgcaacgctggccgacggcgaatatgcccagatcagcatcgacggcggcgtcacctggcagaacgtgatcgtcaccggcaacagctggtactacgtggacgggcgcacgctgggtaaccagacctatgactactacgttcgcgtagtggatgcggcgggcaacgtgggtgccagcgctcatcagcaggtgacggtcgatacggtcgcgccggatgcggcgattacggtgaccgtggataacatcaccgtcgataccggcttcgacaataacgacttcctgaccagttcgacctcgtacacgctcaacgggacgctcggggccgaactcggggcgggtgagtatgtgcaggtgagcatggatggcggcaccacctgggtttacgccacggtcagcggtactcagtggcgttataccgacgcgcgcaccctggccgacggcgactaccgctatcaggtgcgggttgtcgatcaggctggcaacgtcggggccaccaccacgcaggacgtgacggtggatacccaggcgccgcagtacggcatcaccattgacagcatcagcgaagataccgggcagtccgggagtgatttcatcaccatggacacctcgctgacgatcaacggctcgctgggcagcgcgctggcgagcgatgagcgggtgcagatcagcctcgacggcggaaacacctgggttgacgccacggtgactaatcagcgctggagctatacggatacccgcgatctgcctgacggggattacacctaccaggtgcggatcatcgaccaggcgggcaacgtcggctcaacctcgtcgcaggtggtaacggttgataccacgccgcctgacacggtgggtacggtggtcagctataccgacggggaaggtgaacgtacgggcacgtacggcgcatcagtcgcgacggacgatacctcgccgctgatcaacggtacgcttaaccgcgctccggaagacggcgaaatcgtgcagctttaccgggacgggatcttgctgggtcaggtgacgatgaacggcagcgcaagctggtcctatcaggacaacggcctgctcgatgggaatcacacctacattctgcgcgtcaccgacaaagccggtaactacacggaatcggatggctttgtgctgaatgtcgataccagcatcccgaccaccacggcggcgattactgcccagaccacctcggataccacgccaattattaatggcacggtgtctgcggacctggtgaacggggaatacctggtggtgatggtgaacgggaaaacctatacgtcgcagaccggcggcgcggtggtaatcgacccggatcacaatacctggtatctacagatcccggacagcgatgccctgagtgtggcgagttacgacgtaaccgcgcaggtgaagagtagcgcgggcaacggtaacaccaccggtacggcaaccggcagcctggtgatcgataccacctcggtgaataccgactgggcgaccacggcggggaacagcaacaactcaaccatgactctcggcataaacagcagcgggctgtggaatatcattgctaacggacagtcttattccagcagcgatgattcaacctatgccgggaatacgttaactaacacccgtagctactacgtggtgagccagacggcagctgactttgaccgtaacggcacccaggatattttcgcaactgagaacacctacgcgggctctacgcaggtgatgtggacctacgatggcagcagctacaccgccagccagctggcgatggggaccaccatctggtacggcggcgtaattgcctacgacaaaaccggcgatggctatcttgatctggcgtacggcgatgccggtatggactccctgacctacctggtgaacaccaacggcgttctgtcgccggacggcaccggcggggaaggtggattctacggccagttcgattccgggcgtgaaatctccggcgtcgacctgaacaacgacggtaccgtggacatcgtgcagcacaccaaccgcagcggggcgtactcgctcaccgtgattaccaacaacgggaacggtacgctttccattggccagaacctgaccaacgtgtttgtggccaacgcggcgaataccaccacggcggcctccatgacgtgggcggacttcaacggcgatggctacatggatctgtacctgggcagcagttacaacaacaccggcggggtgatttactacaacaacggtgcaggacagctttctacgaccaagagcgcggtagaagcctctaacgcctcggcgggctatctgtcggtggcggtagactggaacggtgacgggcagatggacatcatcaagctcagcacctacggcagctcacagacggcgaccctgttcaccaacaacggctacggctcaacctggacctcaagccagctggcttccggcctggcgaacgttaccggtgtggccgcggtggactacaactgggacggtgcgcaggatcttctggtgtctcagcagaacggcaaggtggtgctggtgcagaacaatgcggagatcgctgacggtaccgcgatgcatctgcacattgtcgatagcgagggcatcaacgcctactacggcaacacggtcaatctgtataacgctgcgggcgtactggtggcctcgcagatcatcaacgcccagtccggcattggctcgaacgatacctctgcgctggtgagtttctacgggctggatccgaacgaaacctactcggcggagatcgtgaagatcaccaacggcgtgtcggataacgtcacctggaccggcctggacgcgggcaacggcaaagagggttatgttctcaccgctgaagcggccactggcggccacagcggaacccttaccggtaccgggtataacgacacctttatcgcagaggatgggacctatacctataacggctccggcggctggaatacccattccgactacgacacctggagcaataccggcggcatggacgtggtggattaccgtaatgccacctctgggataaccatcgcccgccgtggtggcgagcgtcacgctggcatccgctgtagaaacggttacggtgatactgcccgcagaggtcgttttactgccgtcgatctgcacgacggaccaggtatgttccccgtcggcctgggtcgggagtgttaccgtccaggtgccgtccttcgcaaccatggtgctggcgatggtgctgccgctgccgtctttaacctgaatggtcgcgcccggctgcccggtaccgctgaaggtgggggtgttgtcatccgtgaccgcttttgcactcagcacgccctgcttgtcacccgcgttgtccgtcagcaaaaatgtcggcgtggcgctttcgacttcttttgtattatcaataactttggttttggtttcaccatcgccgccgtgagccagcagtgcgccgatcgcaccgccccctaa

SEQ ID NO: 156196 - DNA, 558 bp, Enterobacter cloacae
atgctgacagtgctgttttacgtgctgttgggtttgggcgcagcacactttatttatgagcggattattttgccatcaatccgacttcattatagaaatcaactgtttgcactacgtgatgtagccagagaaagaatcattgaaggtggttcagaatcatcagtacaggccgctacgcttgtacatgattcattgaacaacgctatcaacaggctgcatttgcttacgttgcctaacaagtttcgagctcaaaagcgtgttgcggaagaccctgctatccggcagaaaattaaacgcgaaatagacgttttcaaacgttgcgacgatgaagagatcgttaaggttttgattaagtctggtcatgttcttgaaaatgtattggtgttcaatagcttgatgttattgctatacatgttgccattcgtacttgctgtggtgttttgcgttaaggtcgttaagactgcaagcagtgtggtgcaatgggtcaaaggacgagaattggaagaagctattatgttgctcccagatccacaagtcagacaggttgtatacgcataa

SEQ ID NO: 156197 - DNA, 390 bp, Enterobacter cloacae
atggaattcactaaagagcagttgatagagcgcataaatgaagcattaccgtgctttcgtcattgcatttcgcctgataacgaattgcaggtgctcaaaaagaccatagccatttatgaaatcgcactggctgcgctgactgcgccggactctatgcataaaccacataaagtgattccaaggcatagaaccgacagtgtcaaactgatggcaatcgtccaccgcctgcaacaaatcatgattaacgaaaatctgacacccgccgagctggtcgggtgtgccgaaattgttcgggatagctacgggaaatgtctcgacatcagcaatccgaaaatcgaggtgttcgcaccggcgaggggtcccataattccgccgccacgtcgacgatag

SEQ ID NO: 156198 - DNA, 201 bp, Enterobacter cloacae
atgattgagtatcatgaagttgtaagtattcacgaatatctaaccaaacactatgaattctctgaagaccccatatcgcctcctggagtcaaaagcgttgagctactcgaatcagcagttgcaaggccatttatgaccgtgaatggcaaagatgcatatccggaggtgatggataaagctgctgctctttttcagggataa

SEQ ID NO: 156199 - DNA, 1143 bp, Enterobacter cloacae
atggaattaaaaaaaataggcaagaaagtaaagccagagcttaagtgtgaagaaaaaaatgatatcggtgattacttctttgagtttcctgcatcgcgtgggattcaggggggagagatcacccttttgatgatggtacccgcacgcgcattaactcgcgttctggcgtctgataattctggcggcactcttgaccgttcacagcgcgaaatcaatccggcacgagtcaaaaaattctttgaataccttgagtgtgcatacaaggaaaagcagccattcataatccccccgctggttggtaactgcaattcatacatagaatttcaggaggtcggcaacacaaatgtaggtattgcacgaatcccgatggatgccgaaataaagctttttgacggccaacatcgtgcagcaggaatcaccaagtttatctgcacctatggtgagccattcgacgtgccattgatgcttactcataagctttcacttaagacacgtcagcagtttttctctgatatcaataacaacgtttccaagccttcagcggccatcaatatggcttacgacgggcgcaaccacattgcacaagggatggttagttttctctccagtaatgaagtcttcgaagcaatcactgacttcgaacataacgttgttccggccaagagcagtaagtgggttagcttcaaggctctttgcgatgcaacggccaaatttataaccatcaacggcgaaaaggttggcaataacgatgtgtggtcgatttgggaggagtggttagttcttacagggattgatgtcattcgtcacggtacaagccagagcgactacaaacgcgattatatccagtttcatgccgtgatgattaatgcgtttggcttcgctattcagcgtctactggcagagcactccgtatctgaagtgttagaaatgttaagggcattaatcatcaatgaaagcctgactgcaagggaagattttttcctgatctcaaattggggtggcatttgtgccagcaccgataaagaaaaagcgaccgtcattgcgaacgtcgcggcgcagaaggcagcggctgaccgcctagtacgggtgttcaaaaggcaaagtctggctgacttcgctgtgagcgaagaggggtcagcatga

SEQ ID NO: 156200 - DNA, 219 bp, Enterobacter cloacae
atgtcattcgaaaaacacgacagcccgttgtacttccggtctgcgcgggaagctatgcgccttgagcaggcgggagaatacgaccgggcggcgaaggtgtgggccaaagcaaaccgggaatcacgcaacccggttaaccagcagtggagcgataaccgctcagatttttgcctgatgcagaacatgcgcgaaaagcgtaaggcggttgacgatgcctaa

SEQ ID NO: 156201 - DNA, 213 bp, Enterobacter cloacae
atgaaacatatgtatctggtcatggatagccgtgcgcaattcgacattgataaatccgctatcctggaatgctgcggtaataaaaaaccttcatggaggtcccttggccaagactggggaaaccagggagcagttcttgtacgttgccatcgccgcaaaattaacggggcggtagtttacgctgacggtgaggttgtcggcgtcatcaactga

SEQ ID NO: 156202 - DNA, 639 bp, Enterobacter cloacae
atgaaagagcttggcatctctcaggagcagctgggcgaaatgctgggtaaaacccagggggcgatcgcacattggttaaatgggcgacgcgacccgggtatcgacaacatagccagtatcatgcgagcgttaaaaatagacactattaacctcatgccggatggaagcgttacaacgccagtcgccacaccggatgaagtagaacttgttggaatattaaaatccggcttaatccctgtagtcggtgaagccgtgatgggaactgatggagagtttgaaatgcaggaagtgtcacaagggtggctccgcatttacagttcagacccagatgctttctctgtaaaagtaaaaggcgatagcatgttcccgcgcatcaattctggagagttcgtagttgtcgaacccagaacacaaatctgcgcaggtgatgaagtgtttgtaagaaccaccagcggaaagaatatgattaaaaagctggggtaccatcgagataacacctatcagttcattagcgttaaccaacaacacccgccactcacaattgaagattacgaagttgaaagcatttacttcgtagccgctatcgtaaaatctaccagattcatggataacatcgctgatcttaacgcatcggcataa

SEQ ID NO: 156203 - DNA, 219 bp, Enterobacter cloacae
atgaacaatctaaaaaaattgagaaaagaagctggcatatcgcaagcagcattagcttctgttctcaaggtatcgcagggtgcggtagcccactatgagaagggtatacgcaaactgaatgttgatagcgctaaaaagatcatcgaagcgttaaatgcgaatggggtgagatgcacattcgaagatgtgttcccttccaaaacatctaaaaaggcgtaa

SEQ ID NO: 156204 - DNA, 1233 bp, Enterobacter cloacae
atgaaaaaatattcaaacccaataacatatattgttttctttgtaatggtttgggcaataagttatctttccccaatgcaatccgatgattatgcattctacaatcttggttttagcattgataaacatattgccatgtatatgggatggagcggaagatacatagtagactatattagtccgatgatcctttttgctaaatctaaagcgataagtgcaactgttaccgcgacagttagcacacttctgatccatgttatacagagaatagcacaaggtagcactgcaatattctccttaatatcattatcattctttatatttaacccttcattaggacaaaatactttttgggttgtagggtttgttaactatctgataccttcattatttctaatgctgttgtgcaataatttaataaaaggtgcaaagtttactctaccacaagctacattaggatttttagctggcgcatcaaatgagtcagtagcagtgttatctgtaggatttatcgtttgccattgtatattgacattcataaacaagcgtttcgttgtaaaagatttagctctactgccatttgtacttgttggttctgcttccatgcttttggcacctggtaacgcagcaagggcgtccggaccttcattcagttcatggtattcaaaagaattaactgaaagaatctactttcacctgcttgaccgtatgcctgagatgttcgtgcagtatggggcgctaataatcgtaattatgatgtcaatgtttattttatcatcactgtcaatactgcaagataaaataaaaatgcaatacgcatttatattctttgctcttgccattggctcgaatgtaattatgtttgcagctccttactatccgcaacgagctatgactacagggtttatattacttctcgcatgcctggcattggtaatttcatcatttgaagtaaaggcttcaagaatctatacagtagtaacctttatgtccttaacgcctatatttttgattgattattttatgttgtcatcatattacatagatataaaaaaccaatacttgaacagagttgtattgatagaaaaaggaattaattctggggcaaaggttattacggttccaaaatataatgagaagagcacttttaggttaggggatcgccttgataagttccataaccctaaagccgctggagaatattacggcattgattacatctaccagaaataa

SEQ ID NO: 156205 - DNA, 288 bp, Enterobacter cloacae
ttgcgcttcgctcaaccgctgcgtcggtgcctcgtcgccggcattcatccagggcgcgtgcagaaccatgctcggcagcgccagcttgatctcctgctggttcagcccctccagaatacgaatattgatctcctgctgaatatccatgtacttgttgtagtccgccgtattaacgatatggaccacctcgaaggtcaggcgatcgcgatcgaagcccaggaaatgggcgcggtcaaacttcgtttccccgacgtcggtaatgatctgtttgaccatctcacccactga

SEQ ID NO: 156206 - DNA, 177 bp, Enterobacter cloacae
atggcatttaaaggcatcccctactgccccctgtcgcgtgggctgttcccccgtcacctgcgcgtgacatttgctccgtttttcgtgcatctgtcgatcagggggcagaccacgccgccacagggtggaaaggatataaatggcttcaaaaaaattgtgcaaaattgtgcgctatag

SEQ ID NO: 156207 - DNA, 1731 bp, Enterobacter cloacae
atgatacaggacgcttttgtacgtcagagagcaaaacaactttactggcagggctacccgccagcggagatcgcgcgtctgatgggaattaatcagaacacaatttattcatggaaaaaacgcgatgaatgggatgaaacgccgcccgtccagcgcgtcagccagtctatggatgcccgcctcatccaactgacggacaagaaagacaagacggggggagacttcaaagagattgatctgcttacccggcaactgaaaaagctgtctgacggacagcaggcagtgactggagcgggcaaaaagccgcgcaagcgcaagcagaaaaatcacttcaccgaagaacagatcgtcgcgctgcgggagaaaatactggattcgctgtcgtggcatcaacgtggttggtatgagcaacgccatcaccgaaaccgcatgatactgaagtcccgccagattggcgcaacctggtactttgcccgcgaggcgttacttgatgcgctgcgtgacgatgtgaaatacccgtaccagcgaaaccagatatttctgtctgcatcccgccgccaggctcaccagttcaggggattcattcagagagttgccgaagaggtagatgttgagcttaagggcggtgacaaaatcgtactgagtaacggcgcagagctgcatttcctcggcacgtctgcggcgacggcgcagtcctatacgggcaacctgaagtttgacgaattcttttgggtcagcaactttaccaacctgcgaaaggttgctggggcgatggcaacgctgaaggggctaacgcgtacctacttttccacgccgtcaggtgaaacccatgaggcttacccgttctggacgggcgatcgctggaatgagaaacgcacaaaggcacagcgcaaagcgtttgatgtgggctggaaaacgctgaacagcgggctgttatgcccggataaaacctggcgtcagatagtcaccctgaaggacgtgatagaccacggctgggaatacaccgaccttgaagaaatccaggatgaaaacagcgaggatgaattccgcaacctgtacatgtgcgagttcgttcgcgatggcgagtctgcattcaaccttaacgccctgattggctgcggggcagatggttacgacgaatggccggactggaagcctttcgcgtccaggccgatgggtaaccgcccggtatggattggctatgacgccaacggcagcagcggcaacggtgacagcggcgcgatttgcgttgtggtaccgccactggtgccgggcggtaaattccgcactgtggaaacggaacaggtgcgcggccttgagtttgaagagcaggcgaaagttatcgaaaacttcactttcaaatacaacgtgcagcatgtcggcatcgacgtgacaggcggtaacggagaggctgtttaccagatagtgaagaagtttttcccgatggcaatgccctacaccatgtcaatgacgtcaaagcgcgccctggtgctgaaaatgctacagctgatccgcgccgggcgatgggaatatgaccgcagcgagcgcgccctgatcaacgcgtttaactctgttcgcaaggtaaaaacgcctggcggattcatcacctatgacactgaccgctcacgcggcgtcagccacggtgatttagcctgggcgaatatgctcgccattattaacgaaccgctgggccaggagagcggcagcggcgggtttgctatggagttctaa

SEQ ID NO: 156208 - DNA, 2166 bp, Enterobacter cloacae
atggcagtgaaatttaaaacagttatcaccaaagccggtgcggaaaaactcgcggcagcaaccattccgaacgggaaaaaggtgaactttacggcgatggctgtgggcgacggtggcggtacgttgccgacgcctgacccgaatcagacaaagctggtcaaagaggtctggcgtcacgcgctgaacaaaatcagccaggacaaaaagaataagaattatgtcgtggcggagctcgttatcccgcctgagactggcggtttctggatgcgtgaaatggggctttatgatgacgccggcacgctgatcgcggtcggcaatatggccgaaagctacaagccagcgctggcggaaggttcaggccgtgcgcagaccattcggatggttatcatggtaagcgacatcgagtccgtcgaactgaccattgatacctcaacggtgatggcaacgcaggattacgttgacgacaaactcgcggagcatgagcagtcccgccgccatcctgacgctacactcaccgcaaagggtttcacgcagttaagcagcgcgaccgacagcacgtcggagagcgtcgcagcaacgccgaaagcagttaaaacggcgtatgaccttgccaaaggtaaatacacgtctcaggacgccaccacggcgcaaaagggtatcgtccagctcagcaacgcaaccgacagcgcgtctgaggcgctcgcagcgacgccgaaagcggttaaagcggtaaatgatgaactggcgaaagtaaaagacagtctcaagacagcgtcgggtaaggatgtcgtcgcttctcagaccgatactacagcgggcagagtgttgacagttggctatggggggcttggtgggacagccccacggacaaccgtggccgggtcaaacaattatgacaatattccaaccggattaccttctggcttctggacgcatgctattggtggtggcccgtacgctcacactattacactgctacaggatggaggaggaaacagggacgacagacatctgattattccgtcagacagcacaggcaaaattgcgattcgctgggatgccgggcaaacaaagagttaccaatatttttataccgataagaataaacctacagccgcggacgtaggtgcggttcctagcgggcgcaaggtcaatggccgggcgctgatagccgatataaacgtaacctctcaggatattttcaacggtcaggctattgggctttcgacagaggatttggatacgctgaaaacgccgggaatttattaccaaccagcgaacgccaatacctcagccgctaggcactaccccgaaaataacgccggaacgctggttgtttataaaaatgccggagtaacgcaggtttacagggtttataacagttccagaagttatacccggagccagtattcaactggtgcctggactgcgtggacgcctgttgatgcgtttcctgttggtgcccctattccgtggccgtccgatgtggcaccgttcggttatgccattatggcggggcaaaccttcgataaagcggcttatccccttctggcggcagcatatccgtcaggcgtaattcctgatatgcgcggatggacgattaaagggaagcctgcaagcggtcgtgcagtgctgtcacaggaacaggacggcattaagtcgcacaatcacggggcatcagcttcatcaaccgatctcgggacgaaaaataccagcgcattcgattacgggacgaaaacgaccagcgcctttgactacgggactaaaacatcaaacagcaccggtgcacatacgcacagcgtttccggtactgctgcaagtgctggcgaccacagtcacgcccagagagcatggcgtgatggtgggggcgggaatggcgtttatatcgaccgtaacgtctttaataaagccggctttgttgatacgtcatcttataccgtaaatgctggggcacacacacacagcgtaacgggtactgcggccagcgctggcgcgcatgcgcatacggtagccgtaggggctcatacgcatacggtggccgtagggtcgcacacacactcggttgttatggggtcgcatacccacaccattaccgttgccgctgccggtaacacagaaaacaccgttaaaaatatcgcttataattacattgtgaggcttgcataa

SEQ ID NO: 156209 - DNA, 123 bp, Enterobacter cloacae
atgacgattttactctggattgttggtggtctggctgcatggtggctctttggcttttgctggctcagactgtttgcaggtgatgaaacagaaaaagactatgaagaatacccctatgattaa

SEQ ID NO: 156210 - DNA, 948 bp, Enterobacter cloacae
atgagttctacacaccaagaatatctttacaggcagttatttcgactgaagattcatgaaagcatgggcgatgcttttcaggctcttttttcgaaggttatgcaatatacgacccctggattccaggctgtatcaccgtggggaaactggggagatggtggaaacgatggatggatagaaaccgaagctcactacttccaggtttatggccccaagccttctaatcaaatcaaagagctagaagctgttaataaatcgattggcgattttgacaagttagttgttaagtggggaaaggtatcaaagtatacttttgttatgaatgattattttaagggtattcctgcacctgtaggaaattccctaaaaaagcttgcggacgaaaaatgccttgaccatgcaggagctatgggagggatggaactcctcaaagagtttatgtctttgtcagagtgtgataagcaagatattgtaggtttaattccagacgtagatctggattttattgatagtcgtgctgtcggcgaagttttgaattatttggcatataaatcctcttcagacttggcttttttaagcgaaacagcacctgattttgatgagaaaataaaaataaatggtatttctaagcctataaaattaaggcttgaaatgaatagctatcaattatacctaataaatgaatttctcaattctgtagataatggtttagaacaacgcatagcacaggaagtcaaagagacttatgcacaaagtaaattagccatatcttccgaaattcctgaacgagcggacttgagatatctttggatgattgatagattactcccatcaggaattcacgaaaatgctaaagctagctatagatttgccgctgagctgatcttggcaaaatattttgagacgtgcgatgcgtatgaacatccaaacaatgcttctgccacataa

SEQ ID NO: 156211 - DNA, 216 bp, Enterobacter cloacae
atgttgggacaagaaccaccaactactgatgcagaagccgttattgagattttgaaaattttttacatgtctcttcctgccgatgtgaagagtacaatcaattatgaaattcagaaaaaaatcaaggatgaagacaagcagcttccttataaagataagggtagggctatttatcgagtagcatccaagatcattcctgtagctaatcttgtttag

SEQ ID NO: 156212 - DNA, 516 bp, Enterobacter cloacae
atgtctggaaaaaatcaattttggaattatgattataatgcagcacaacgtaatagagaaatcgtagactcttaccaacagaccaatgaagcaagactggattcccagcaggctcagtttgaagcatctatggctaatggcagggttaacagaatacagatgcagttgaataacacaatcaatagccataagaaggttgtcgctgattacgagcaacgtctgcttaacttcttcaaaataatgatgcaatcgaatattttctacagaacgataaacagattgcgagaagaatggcctgaccaaaaagaccatattcttgatgaaattcaactgtcagcccatcttcttccaagaccggagcgaaacgcgccccacgtccagctaagtataaatacatcgataccgatggttctgaaaagacatggacaggtcagggccgaactcctcgtgctatcgctgctgcacttgaagcaggtaaaactcttgaagtgtttgagattaaatagcattatatga

SEQ ID NO: 156213 - DNA, 450 bp, Enterobacter cloacae
atggaaaacaacaacgagcaaagctttatggaaatcttcgaaaaagatcaaaaaatcgcttttgttgactcgttcagcgatgctgctttgtcttacgaatacgaacaggcgggcttcaccattaattttatgcaacgctcggttcttctctttaaccataatataaagaaaaacgtaactgccaagcagttgcgtaaaaataatataaagaaaaacgtaatgtcttcgacattgcgtaaaaatatgaacagcacatttatatatccatatagcaacatcagggaaatcaactactcgctgcctgattgcagatccgatgatgccgagatctgtattatgactgatgatgtattaaatccagtctggacgttcagggttccatctcacgcacattatatttgcgagcaatgggtggaagtatttaatagccatattttctttggcccataa

SEQ ID NO: 156214 - DNA, 441 bp, Enterobacter cloacae
atgaaaattttaataaaattgagtaatgactggcctgaacatgtgagtggcaatccagtccttgataagtgggttcacaagattccttggtccggcatcgaatgctttttattatgtgaagatggtaatgtttatcagtcatatataaaaatgcctttttctgtagagataaaagaatttcaacttttcaggcatacacacatagatgaaacttcatttatgattgaagaaatcaatgaatggcctgaaggtgttaacataagaaaaggttttatatcaaaaacagataagagacatccatataataaaaaagaaaatggctgctggtatgtatcacctgaagggaatgatgcagtaattatttttgatgcccctgaaattcaggagcataaaaatagatataaagagatgccaattatctcatgcgaggtcttaaagtag

SEQ ID NO: 156215 - DNA, 216 bp, Enterobacter cloacae
atgacagaccgtttcttgattactccacatagcaccacacttacttacagaatcggggaaggagaggaaatcactcaggaaatccctctttatatcgtgttcgatattatttctcaggaaattgttgggatttatggttctttagaagaagcccagctaaaaaaggccgagcttgaagaaaaaataaagtctactttaagacctcgcatgagataa

SEQ ID NO: 156216 - DNA, 336 bp, Enterobacter cloacae
atggaaaatatatttacagttcacattgaggaaggtttcccaatttcaagcattccggctttaatagatttatttttgcgtcattatcattgtaataattttgatatagaaaaagctcttgaggctacaagggaaaacatagccgataatttaggagcattaactaaaatgaaaaagccaaaagtcgatattgaaaggattatggttgaagatattatgtcagggttaaaaacaatggtttctgaaatgggaattttggaattatataaaattcattttgaaataaacgaaatgggaatgagttggggggttgaggaggaggttaataatgagtaa

SEQ ID NO: 156217 - DNA, 252 bp, Enterobacter cloacae
atggaatataaaaatatatataaaaagtgttgtaagtgtaggaaagaaacagaacacgaaagagaagagggttatgtaacggaaaaatctttaagtaaagacgattgggagtattcaccggctgaattggcttcttatatgaatggtgagttttatgacgattacgaagaggttttaaggctgtttgatacctgttgtgtatgtggggataaatcttatggtcgttggtcaagtgaagaattaacaaaataa

SEQ ID NO: 156218 - DNA, 1161 bp, Enterobacter cloacae
atggctatatatcatttaagttttaaattgtgcaaaaggtcagagggtaaatcttccgtctatttggctgcatatcagaatagaaataaatttaccgataatagaacgggtgccgtatggaattacagcaaaaaagaaggctttgacggttcgttaatcctggcaccaccacaagcaccaggatggcttgtgaagtcgtctgaggccctatggaatgaggttgagaggacagaacgacagaagaacggacagactgccaggtacttcgatgtcgccttgccggtggagctggacgacaaacaaaaaaaagaccttttaataaaatactgtcaggataattttgtagatgagggaatgattgccgatattgcattccacgatctaaatagtaaaaatccccatgcccatgtaatgttaacaatgaaaaatgttgggccagagggatttttaacaaaaaacagagaatggaacgataagaaatgtttagaagcctggaggcaaaattgggaaattattacaaatgaggcattaaaaaaatatggtcataaatcccgtattgattcccgttcattggaagaacaaaaagaagaggctgacagaaaagcaaaagttgcaaaaactccacaggcaaaagctgcctggattgctaaatctatccgtctggacagaacgccaatgacccgcattcacaggcataattggaaaactgggcagaaattaagaaaattggagcaagaagaaaggaagattttatataaaaaggcttcgttaacatatcaccaaataactaaaccaattgagcctgagcaatctatgaaaatagaaaaatcacaaatagctcaaaaaataaaatctatattcgaaactgccaaaaataaattaaattcgaaaatcgctgactttttcaagcctaaacccaaaaaagaaactcctgaaaaatttgtcagtagttatgaaattgacgagttaggaaatcacatattgaaaaaagaggctgaaaattgggatcagaaaaacaatgataaaattaaaaagcaggttcgtgagaaaaaagaaaaagaagaatccgaaaggttgaggcttaaagaagaggatgagaaattaaaaaatagctccaagccaattcagcaaaataacaatcataggaaattaaagcgatag

SEQ ID NO: 156219 - DNA, 990 bp, Enterobacter cloacae
atgcaaacagcgggtattgacagtggtatgacgcaatcagcaacgttagcatcaggtttgcagggtgcatggaaagaaacatcaacagtttacagtaatatcaccagtgcaggtcttatggcctatcgtgttggatacgattctgctatgtattctgtttatctccgtcgtgatggaacattgccgatgacgggaaacctcaatatgggagctaatgatattgataatgcaaaaaacataacagcatcaggaacaggtgattttggaagtgatataacatcaggaggaacagtaacggctgctggtcaagttatagcgcacaatggatatggcgacatgataacattcggtggtgatgctgctaataatgattatgaaatacgtttaggagcagcaaagcagttaacgttatactcaccatcagcaggaaactatactactgtattacaagttaatagaaatgttaagatagatcaaagattagggataatgggatatgacccgaacgatttacctgccggatggggtggcggtttaagaacgcttgatgtatatgccgcgggcactctggcaacaggaagtgggggtaatctgacatcatatatgaatgctacgggtgttcatacacagtccaatattacagcctctggaaacatagaggccgccaaaaatgtcaaaggcgctacattagaatccactggacgcactacggtgggagaatttatacagcttaatggacaggcatcagttaatagtagttgttctcctaatggtttacaaggaagagatgccgagggctcggcattaagttgtgttaatgggttatgggtaaaatttagatttaatgaaaagatatacagtgttgtgtttgaatcatccagcaatggagttggtgatgtttataaatcattaaatcttggacaacacctcctttgtgttttttggaaggctggtgttattacatgggctagagcatcttgttttgattga

SEQ ID NO: 156220 - DNA, 210 bp, Enterobacter cloacae
atgcccattcgagatggtataatccaggttctaaagaaaaaacacttgcatttgaaaaaaaaggaaaaagaaacagaaaagttactaaaaatattttcattgtacaatctccacatggaatgctggctcaccgctatgcaaaaaagggctaatgtatttaaagccatcattattagcagcatattccgtaagagctttatcaaaggctaa

SEQ ID NO: 156221 - DNA, 288 bp, Enterobacter cloacae
atgagtgaaaaactgataaaagaatcccggaaggttttcatgcatatggcaagtttattctatgaaatgaaaataaatacgcttaaggaaattcgtctcgatgaagttgatgtgttaatggaagatgatgcattcatggaaggcatttataaagagagcattaaaaatgcaggtgcagcttttaaaaaagtagtcagggctgagtattatgagcaagggcattcagtaaaaatggttgataaggaggtggtgttaataacattacgtgttaatcacaaacgaagataa

SEQ ID NO: 156222 - DNA, 1029 bp, Enterobacter cloacae
atggctggcagcggtaacgcgctgcgggaaacgttcatcgtcatagcgcagggtgacatcgatcgctcgcggctcatcgtgcagaccgaccagccgcccgtgctcatcccattccgtcagcaacgagttgccgtactcgtcgctgagggaggccaggcgcaggatggaggggttagcgcgggtcggtttatacagacgccacaccgcgccgtcatcgtcagctatcgccacgtcgccgctctcattgcggcggataatgatgccttcgctgatgctgtaaaacgcgcggtcgaccggcggcagttcaaagctcagctcgcgcccggtttcatcgaaccaggtggcgttgttttcttccagcgccagatagctgtcaaaggtggtagcccagcccagaccgaaaagcccttcgcgggtggtcaggctgttgtagctgcgctgccagcgcagcggaaagcgccctggcagcgagaaatcgagttcgtcgtcgtcattcagcaccttcacgccggtagcggcatgaaccgggtgcgaggagccgaacacggcgttgacggccatatcagccagcatcccgccaccggcagcagccagcgcgcagggcatgtttttcaggatcttgcccggacgcccgcgcagcagggagagcgcaatcatccccagcgccagacccggcgttttaccgcttttgatatcgcggaccgtgagcgtgtcgccgcctatgatcacgttcggggagacgtcgtcggaaacggtgccctcgcaggtggtgcgatcttttgcgcgcaccgcaggctgtccgttgatgaagacgcttttcgagccttccgccagatactgcggcccggagtgtttatcacacgccaccttgtcttcttccagcggcgaggtccctgcggcggcagaggcgacgctcggctgccacatctcgctgccgaactgtccggcagcggagagcagcatacccgcgtagtcggcaaagctgcccggcgactgcggctcaggggacggggtatcggcaggcgttaa

SEQ ID NO: 156223 - DNA, 501 bp, Enterobacter cloacae
atgagtaaggccaacaagatgggcgtggtgcaactcactattctcaccatggtgaatatgatgggttcggggatcatcatgctccccaccaagctcgctgaagtggggacgatttcgattatctcctggcttgttaccgccgtgggttcgatggcgctggcgtgggcgtttgccaagtgcggcatgtttagccgcaagtccggcgggatgggtggctatgccgaatatgcgtttggtaagtccggtaactttatggcgaactatacctatggcgtgtcgctgctgatcgccaatgtggcgattgccatttccgctgtcggttacggcacagagctgtttggcgcgacgctgaccccggtgcaaattgggctggcgaccatcggcgtgctctggatctgcaccgtcgctaactttggcggcgcgcgcatcaccggacagctcagcagcatcaccgtctggggcgtcatcatcccggttgtcggcctgtgcatcatcggctga

SEQ ID NO: 156224 - DNA, 288 bp, Enterobacter cloacae
atggggtttgattactggctggtaatagggtgctcgctcctgttcggcccgattgctttagtggaggctgtcgcatacgtaaggcgggggatttacactaaaacattcaaagggactaggcggagagaatacattcacaaaaacatgcagccaatggagtactggtttagtgtgatttgtcacttcgcaatgagtttcgcgatgattggacttgggttatggtttctggactacattccatttttccatgatttttattctgaaatgcgcgcgatgttacccttttag

SEQ ID NO: 156225 - DNA, 486 bp, Enterobacter cloacae
atgtcgttatataatcgcgttcaaaaaaagttaacagaatacaaagaaactgaacaacgttactgggacgatctcaaggcgcgccttactctattcaagcctaaacttattgattatcttggcgttgaaggtatggaactttgtgatgatcatgataaaaataagtaccctatcgtcttggttggcaacaaagttggcgaagaagttgaagatgaattagtaagaaattttgaaaaagtagatggccaaaagcccagcttacgtttctttgttcagataaacctttcaaaatacaatagtgaaatttatgtgaagtcggagatatttgaatgtcttttctgggggaaagacgatggctacactatggttatctgtggggaaagcgttggttgcaggaaagttacggataagacagattttaccaatgcctttgattttattgtcaaaaaaattgaagagtctgtcgatacagagcgatttttataa

SEQ ID NO: 156226 - DNA, 438 bp, Enterobacter cloacae
atgaacgagctaactgttggtgatgtgatttcaagccttaaagactatcgtgcatatctcgaaaaaaaagcagcagacttcaagcaggagattcatgatcactggcatgagagtagacatttgcaaactcagttcctgattgaaatcaatgagaatgaagaaatcgcttttagcattcctgcattgcattttaaatgttggtctaattttagaattgtctttctagagaagcttcctgttgcagaagttcggttctcaagtgaagttgatgaaaaggcattagatatcgagacatactatttggatactcaaggtcacttacatgtgggtttgcctggcacgaataaaccaattgattttgagtttgaaagtatcggagcgacattttttggatcaattgttaaatccgcctcagcgaaaaaactgatttctttatga

SEQ ID NO: 156227 - DNA, 339 bp, Enterobacter cloacae
atgggcagattaattctcgctgcgttacttagtagcattactttcagcacatgtgcacttactactggcaatgacctttacgagcacgggaaagcgtacaactctatttttaagcaaaatcaagaagcaaacgcgataagtggtacagaggccgggatgtactcaggctatattatggccgtaaatgaccttgccccgttctgtttgccagagggtgtaaagatgggacaagtgtatgatgttgtattcaattacttagatgctcacccggaagcccgacagaaaccagctataactctcattgcgaaagcagtgcataaggcttggccgtgtaaatag

SEQ ID NO: 156228 - DNA, 303 bp, Enterobacter cloacae
atggttgatttacgccacatgaattcacgcctgcaactggagctggcaaccgctgccgccgaagcgttaagcacgattagcgccacgccgcaacaactggtctggagtgaaactgttatcccgcattacgtgcgctgcgctgtcacggacaagacggtacagggagcattccacaaacgtctgcgtgtgtattactacaatcccgatggttccgttatgaccttccgcgcatggcgaaagctgcacggcgtgaccaaaaagagaggtgtccaccgccgatacatctggcggaaagctgcttga

SEQ ID NO: 156229 - DNA, 1890 bp, Enterobacter cloacae
atgcccacgagattgaaccgcctgcttgcgctggccgctgacgccgaaccgctgaacactgcgcctgcggatgctcagcaactggttgcggataagatagttgtatcgcgtaacaagcaatgtcctgtaaagcgtaaacccatacaggctgcgtttaatacggagtcacaagagttttactttaacgctgacgattctgttatgtcgttccgagaatggaaagaggctaacggaatcggacgcaagacacacgcccgccgcgctgatgcagggttgcgccagattatccagccgggcgatgcaatccactgccgccgcgctgagctggagatgtggctaaacaaaaagcctgcccggtacgccgagccgctgccaccagatttccccggtgttcgcgtagacgatgccgcattgaaaccgcgcgagcacgccatcccggaagcgaccacggggcaaaacgcctttcttaaagcctgtcgcgagtttctgatttgcgatgagaagaccgtgcgccgcatcaacaggggcatgagcaagctggaggcgatgcgccacgctgactttgacaccctcggggatagcccggagtttcaccagctatggggcagtgagctgaaatccactaaggacaatttcaacacgaagaaccagcactgtgacgttggcggcgctgacctgccgccgtccatcccgccgctggttacagcgccgtacaggttccgtgagctggagcaatgcgaccgcccggcattcgtaccgttaccgccgccagatggtcatgactggcgatccggtcaactcgacgtggccgccgctgtgtttgcccgtgaccgcgatatgttggccgtactgccaaccgggtacggaaagacggctgcattcacctatgccctgcaatttgagtctgatgctggcgaaggtatgaccgttattgtcgtgccgacgaacactatcaagcagcaggtgctacagcagttaagggaggctggcgttcacgctgtggcatttggcgataaactaccgaagcggcgtaatgcgcagcaacttgcggggttggctgctggtactttccgcgtcgcagtcgtttcgcctgaacatctggtgccgggtagtcaggtactggccgcgctgatggccgctggtgtggacagatttatcattgacgaggttcacaccgttgatgaatgggagtttcgggacgctttccctgcaatgaagcacaccctgcaaaatgccttcccggatgctcagcggtgcgcgtttactgcgaccctgcgaaaaggtgatgaggctggcttgatgaaagagcttggttgtcgtggcgacttcctcacctaccgcgccagcgctgccagagaaaacatccagcttattcctgttcagcaatgcgtaactccgcgccgggctgccgttggtctggtcaatgccctcccgctggatgagaagacgctggtgatggtggacagtatcaagatgctgtatgcgtatcttaacgaactgggagaccgcgcccggccttaccattctgacgttgagcgactgagccgcgaccagcggcacgccaacgctgagtggttcgccagcacccccggtgctgttctggtggcaacgagagcttttggactaggcgctgacattcccgatatccgtaacgtcatcgtgacttacatccctgacgatcttcctgacctcgttcagatggttggccgcgcaggtcgtgacggtcaacctgcccgtgcttttctgctgtggtcatcgctcgcactgtatggcgaccccatcacctatgacgcccactctgccccggtgccgtccggtgtacctgatgagctggcctacttctaccgtgctgagaaatgtaactgggaatacctttcccgtttcctctga

SEQ ID NO: 156230 - DNA, 210 bp, Enterobacter cloacae; identical to SEQ ID NO: 38818

SEQ ID NO: 156231 - DNA, 177 bp, Enterobacter cloacae
atgacgccacaccagtttagggcgtggttcgcctcgctgcctgagaaatatcagcgtgtcgctcgtcacctgtacgacaacgcccgcaagtctggcacacacaccgcgtcaagccttgcgctgattcacacgttggttactgaccagatcaaatttgattcggagtttaatttatga

SEQ ID NO: 156232 - DNA, 348 bp, Enterobacter cloacae
atgaccttactgacacctgaaaacgtggcagcggctagggctgcccgtagcgcaaggattgaacactggaaagccaacgccagccagcttaagcaggactttgccgacgaagcgcactggcggcggctcgcctcacgcttcggcgtgcgtatgccctcggcgtatgttcccggctccgagctgcgattgctgcgccgggcggccaaacgcgcgggcatctctggtgctgatgtgcgtgatgcttttggtggaggcgttgcgcatctgcacgagcttaatccccactggcctgctttcgcgcttatcggcctgattcttgaggtagctgttgaaaaagctgctgcctga

SEQ ID NO: 156233 - DNA, 615 bp, Enterobacter cloacae
atgaatgacgtctcacaccgcgaatcgttcgcgttcagcgcccgggtactgggcgcgctgttttatttcgctccagacagcgagcagaccgcgccgctggtgagtgccctgaccgcaggtgactgggttcaggactggccgctggcggaggaaaatctgctgcctgtcgccagtatgtttaagaccccatcggatgaagcgttgaaagacgcctggctgcgtctgtttattggcccgtatgccctgcccgcccccccgtggggctcggtctggcttgatcgcgagtccgtgctgtttggcgattcgaccctcgcgttgcgtcagtggatgcgtgaaaaccatatcgcctttgagatgcagcagaatgagcccgaagatcatttcggaacgttgctgatgctggcggcatggcttgccgagaacggtcgcgaaacagaacgcgaccagcttcttgcctggcatctgctgccatggagcacgcgtttccttagcgtattcgttgaaaacgcggcccatccgttctacaccgcgctgggtaaacttgcccagctgacgctggcggaatggcagtccactttgctgatcccgattgccgaaaaaacgctgtaccgataa

SEQ ID NO: 156234 - DNA, 177 bp, Enterobacter cloacae
atgctgaacgtgaaaaatctcaccattgcgccactcttccgtgaggtcaacttcctcgtcccggcgggggagattgtcacgctgatgggccctccgggagcgggaaatcgacccttttcgcctggatggtgggggcgttatccgctgattttaaggcgcacggcgagctgtggctga

SEQ ID NO: 156235 - DNA, 753 bp, Enterobacter cloacae
atggcggcagaacaggcgcaggcgctgaaggcggatgtcgacagccagatacagatgtttgagcagcggttgaagcctctcaatgaggtgctgctgatgtccgctccggaagggatggcgctgaccagcggggagcatctgcaaatgacagccacaaaaaacgttgccgttaacgccgggggcgatatcagcgccggaacaatgggcaatctgacgctgcttaccggggagaagctgggactgtttgcccggacaggtcaactgagcgtcaagtcaggggaagggccggtggaggtgcaggcgcagaacgccagcctgcggctgtttgcggagaagaagctaacgatgagctcggcgggtgacatctccctagccgggaaaaaacgtatcacgctgattggtggcggcagttacctgaaacttgaggcggggaaggttgaatacggcacgacagcaatatacctgcgaaaggtgaaaaggacgatggcggcgggaagcattaccctggagcagcgtccgactgaaatgcccgctccattaccaaatttatcatgtggtccaaatacagcgtatttcagggtcctggattccttaacaggatctgaaaatattgagtttgcatatcaattacagacatctaccggtacagcggcaggaagaacggattcagccctgacgcatgtagtaaattcagatacagaagaaaacgtaaacctggtctatgttttccagatcagagcggggacaaggtaa

SEQ ID NO: 156236 - DNA, 309 bp, Enterobacter cloacae
atgttccaggccgcctgtcgccaggaggtgtggcttaaccctgtggatgcggagcaacgtggtatcaaaaacggtgatatggtgcgcgtcttcaacgaccgcggcgaagtgcgtattgccgccaaagtcaccccgcgcatcatgcccggcgtaagcgcgatgggccagggcgcctggcatgacgccaacatgaatggcgatcgtgtcgatcacggctcctgcattaataccctgaccacgcaccgcccgtcaccgctggcgaagggcaacccgcagcacacgaacctggtgcagatcgagaaggcataa

SEQ ID NO: 156237 - DNA, 291 bp, Enterobacter cloacae
atgctcaataaagaacggcattatgcaattttgacctggcttaacaggtatgaacgggcgacggtgaatcagcttgccaaagtatttaatgtcaccagggaaacgattcgtaacgacctgaacttattggcgaaggaaggcggcattgagcgatgtcacggcggtgcaattattaaacgccgtatttttcatactcaatccgtcaataatttagatagcaatatcattcatttttttgattctgcgcagtcaaaaaaacgatcaaatcccgacataaagggcgaaagatga

SEQ ID NO: 156238 - DNA, 792 bp, Enterobacter cloacae
gtgagtaacagagatgattttccccaatcggtgaagcgaacactggccgaacgcgtaggctggaaatgctcttttcttggctgcaaccaggtaacagttggcccggatagcagcaatccaaacggcaggattaataatgggattgcggcccatattacggcagctgcaaaaggcggcccgagatatgactctagtttgacccaagaacagagaagctcgattgataacggtatatggatgtgtcgttcacatgccgcactcatcgactctgactacgttgtctattccactccacaattgaaactttggaaacagcaggccgaaactcagcaagctctactgctccagatgacgcaccaggtgagccaaaacaattactcagaaagagacatcggtgttctaaattctattactgatatttttaattacaactacctccaaatactgaagaacgagcagttccgagtaaaagtaagtaccaacattaccgaccctctctacgcttttgatgatattgcaaacaatcccttttacagcttcaatgatgttgttttagaaggacttcgtatagcgttgatcggcaaagttaacaactttcgggcgctgttcagacagcattgcgctggagggtatggcgggtattatgactatatagacatacccaaaatcagacagttccgccctgatgaggttgaacgccattacgatataattaacgaaacccaagatctggcgtatgacatcagtgtcgcggcacaaaaattactcgaaattagagcaaaactgccgtga

SEQ ID NO: 156239 - DNA, 501 bp, Enterobacter cloacae
gtgaaacgcgtaattgtaggggcgatggccattgctctgatcggatgcgtgccaaagcagcctcaagatgaaaagtcagctggcgggtacgtcaacatttactcaacttccagtgttgctattgcgcaagatcgtgctgataagctttgcggtggtaaagcctacctgacagacaacgaaaactcaccaaatcgatattactcgtacaaaccaacatttccaaaaattgagtttaactgtgatatagaaatggccgcttatcttggaaacgaagaggctaaaaaaatcaaaatgaagcgcatagaggaagcctacaaggagatgtacaaggctcaatatgagctgaaagaagtgcgccgtaagaatgctgatccgaagaagctggagtcctacactgaacgcgatccggacggcactattcgcagctacagcttcttgaacggcaagtcgtgcgaatccatcgtatacccagacggcacaggcaaaacgacctgcgattaa

SEQ ID NO: 156240 - DNA, 747 bp, Enterobacter cloacae
atgtcgtttaacttgagccgcacgcagtttttacagatgtttgccgttatgcagtccatcaaactgattaacagccacacagcgaaaagcggtgcgccggcactcttctggaaaaacgataacattaacgctgaacagttcgcggtgttaaccagtctattatcttcgacaccgtcgatgccaaaattgactgagctgccgtcaggaagcacagcaccaatcctgatcaatccgtttgttgaaggtggctatctcccacatagtgggcctggtttcgtggcgatctccgagaccggtgcgctgaacatcaatgagaacgcactcttcggggcgatggagccacacataagcgcagctttcaccaacctgaccagacacgtcaacgcccgtgccagtcatgttgcgatgcctggaattgcgttcgccaacttctttatcgagcacaatccattttcacccggtactgagccaaccagattctgctttatggatgagaacggaaagtgggcggctcttgaagtccttctcccccacatattccgcgcggatgagagagaggcacataagctgatcgacatcatgcgacatttcatcggccagagcatgatcgatgcagacattgctgcaggcgttctaaccaacgatagcattcacgttgttagcgacattccgaagccgccaactcgcgagccggaaaagacacttgaacagaaactaatggaatgcccaacctgggctacgtggtaa

SEQ ID NO: 156241 - DNA, 837 bp, Enterobacter cloacae; identical to SEQ ID NO: 86060

SEQ ID NO: 156242 - DNA, 1191 bp, Enterobacter cloacae; identical to SEQ ID NO: 86059

SEQ ID NO: 156243 - DNA, 618 bp, Enterobacter cloacae; identical to SEQ ID NO: 86019

SEQ ID NO: 156244 - DNA, 483 bp, Enterobacter cloacae
gtgagcgacttgaaagaattactgaccgagctggattttgaacaatggctcgatatggaaggaatcatctaccgtcgtggtggcgtcagtactcgtggacgtgaggtgaatatcaaggagtgtccggtatgcggcagctcaaactggaaggtttatttcaacctgaccaatggcgtcggcaaatgctttgctggtgatcatcccgaagagattcagttcaacaagctggtcttcctcaagcactacagcggcaaatcccgtcgcgattttgaagagtacgtccagaacgcgctgatctcacaaggatgggcgccgaagacggaagaggtcgtgctggccagcaaggttgaactcgaagggccagtagctctcccgcgccattacgaactccccattgacggtcgtcttcctgattatctggtggagcgccatatctccccggagctggccaaatactttgatctggggttcgaggtccaatga

SEQ ID NO: 156245 - DNA, 2004 bp, Enterobacter cloacae
atggaaaattcattatttctaaattttcacggaagaataattgatcatttggggatccaaatgtatcaaagtccaaccgcagcaattgcagaaatggtctctaactcatgggatgctgatgcaagcgaagtgaagatcactttacctacacgtgatgatttctccattacaatcgaagataatggaatcggcatgactcaagatgagtgtcagaataaatttctgactgtcgggtatgataaacgtcaaaagaacgcaaaaacgctatcaagagacctcaagcgtccattaatgggacgaaaaggcattggtaagttcgctggttttggtattgcatcagttataactgttacaactattagcaaagatactggcgaaaaaacatcatttgttcttgatattgataagattcgtgattcttcaaataatgactatataaatacatccaaactttctatagatgtaattgatcgagtcgaagctaatgaggagctaaaagcaagtcacggtacaacaatcaaacttacaggtttaaaacttcaacgtttgatttcagccgaattcttttcaaaatcgatggccagacgtttttctgttaatgcttccgcggccaatttttatgtcagcgttgatggaaatataatacctacagaaaattttctgattcagtcagagatgtcgttccctaaagattataaaccaacagaaaaacctgaagggttaaccaccatcgataatgatggctggggaactgagatggtaggtgaacaccaaataaaatggcgagtatttttcctcaaagaaacaattaaagaagaggaactgcaaggcatttctattttctcgcatggtaagttatcacaaagaccatttatgtttaatttgactggtggtttgcctagccagaatggccctgaatacatgactggagctgtaatagctgattaccttgatgagtttgatgaagacgtaatatcaacggaacgacaacgtttaaactgggggcaccatcatttagcaacacttgaggagtggggaaaatctcgcatccgtagtttgctgagaatatggaaagaccgtagggccgaagagaaaactaaactaatcgaagataaagtctcagacttcagctctagaatcgaaaagctcgcgccgagcgagaaaaaaactattatgacagcacttaaaaaactagccagcattaatcaaattaatgctgaacagtttaaagaactgggtaattcaatattaacagcgtgggaaggtgggcgtttaaaagaacttattagacaagttgcagaagtgccggatatggatggagataaactcctttctatgctcattgaagcaaatacaattcaagccttacacactgctgaatcagtaaaagcgaagcttgatactatcatagggttggagtctcgtataaaaaacagagagttagaaaacgctgtacgtgattacattgcaaataacccttggttgatctctccaaagtgggaaacttttgctaaagaaaggaatgtcggagatttagcaactgaagctgcaaaagattcaggtctagataaagaggaagattttaatgggcgagttgatttagttttggctagtggtgaacatttgctcattctggagttcatgcgcccaggcctaaccatcgatttagaccatctaaacagatttgagacatatgttgatacattccgaggtcatattgaaaactcaacaggctcaagatttaatactgctacaggctacttagtagctgacaaaataaccaaaaagaatactgcttttttgaaaaaagtcagaaaacttaaagaagatggtctcgaaacgttaacttggggagatctactctcggaagccaaacgtcagtggcaggagtttttagaccatcttgttgaaaggtcgcctaacgacaagcgaatccaggcattaatcaatgcaaaaacaactgaagatgaaaaagtgccagaggcgactcaacaagtgcattaa

SEQ ID NO: 156246 - DNA, 1029 bp, Enterobacter cloacae
atgaaagcgatagatctcttctgcggcgcaggtggcctgacggttggtcttaagatggctggctttgacgttgtgtcggctgtcgaaaaggagcctattgtttctgaaacctacatgcagaaccaccctgatgtgtctttgcgtacgggagatattagagaattatcacccgaaggagtcatgaatgagcttggcctcaaagctggtcagctcgacctgcttgcaggatgcccaccttgccaaggattctcaagtttaagaacaagaaataaaaactcctcggtcagtgatgagcgcaatgacttgattttttcgttcttagattttgttaaatgtttcctaccgaaagtcgtaatgttggaaaatgttccagcattagctaaagattttcgtataaaaatattctgtgatgaattgcgtcaattaggatattttattgatgaaaattcagtggctattgaagatgcttcatattttggcgtacctcaaagaagacgtcgaatggtaatgcttgcttccagactaggatatttgccaagagcaaaaaaaagtaacactaaagtgacggtgaaggacgcaattggacatctaccactaccacaggatagtgaagactttttacataacataaaagaaaacagaactgagaaagtcaaaaaaataatcaatcttgttccaaaagatggagggagccggtcagatttaccttacgagtactggctgccttgtcataaaaaatatccgggtggatttaaggatgtctatggccgcatgaagtgggatgctgtttcacctactatcactagcggttgtaccaatccctcaaaggggaggttccttcatccaacacaggatagagcgataacattacgtgaagctgctttattgcagtctttccctgctggttattacttcccaataaaatatggtaaagatagggctgcgctaatgattggtaacgccttaccgccagagtttatcaagcgacatgctgaagtaataaaaaagcatcttaaagaaataggatga

SEQ ID NO: 156247 - DNA, 231 bp, Enterobacter cloacae
atgataattaacatcactctaacccctgttcaaaacttagacgacactaggctcaaatcgctcgagaaagaactcaatcggagagtgaaaaatacattcccctcctctaccgtcgttgtccaaaaaggatccataccaaaaatcgacattaagggtttcccgagcgactcagaccgagaacgattgggcattatttttgaggatgtctggcaggacgtgacatggcattag

SEQ ID NO: 156248 - DNA, 183 bp, Enterobacter cloacae
atggttgcagaacatttcaaccaagcacaacataaatgggcttgtgtacaatttatcgccgaggtgtcgctaattgcgaattgtaagtcttctgacctcaagcttgccctctccatcattgccgatttagccagcagggaaaacgacaaagaagaaagcgatattttttatgaggttcagtaa

SEQ ID NO: 156249 - DNA, 474 bp, Enterobacter cloacae
atgagtattcgtatcgaagtcggcgacaagtgggttattaccagcgaccaatatcaattcatcctgaatgaaaagaaagtcgttaagactggcaataaagctggcgaggaatggctcgacactatcggctattacccaaaaattaatcagcttatttccggcttgattcatcaccatattcataactccgcgattacctctattgagtctatggttgcagagattgaccgcatcggtgagttgtgcagtgaagcatttggtgtcacaaagccgagcgaaaaaattggcggttgcgattgggtgtcctggaatgaattaagcgcgcgcggtctcatcgttcgtatcaacaaagagattttacaccccatcgggctggcggtatttcgtgaccccaatacaggaatatctcagggggctttaatcgctcctgatggtgtgtgggaatatgaccagtcagtatccgtgaaggggtaa

SEQ ID NO: 156250 - DNA, 522 bp, Enterobacter cloacae
atgcatattatcaatgctaaagaacagcatagtactgcgatacgcaatatttatgctcaccacgtcctgcatggtacaggtagcttcgaaaccgaccccccggacgcacaagagatgcttagccgactgagaaacgttcagtctcagggattcccatggtatgtcgccctgctgggcgataccgtcattggctactgttatatttcgcgttaccgcgaacgccatgcttatcggtttacggttgaaaactcgatatatattgatccggcttatcagcgacagggcgtcggaaaagcattgcttggtcatgctttaaaatgggcccagttccggggatatcgtcagatgattgctgttgtgggggacagtgcaaacgtagcttctgtatcgttacatatccgtgcaggatttactgaaataggcacactgaaggacattggtttcaagcatggccgctggctggacacggttttgctacaactaaatcttggtgaagggagtagtactcagccaaaagattaa

SEQ ID NO: 156251 - DNA, 216 bp, Enterobacter cloacae; identical to SEQ ID NO: 142298

SEQ ID NO: 156252 - DNA, 492 bp, Enterobacter cloacae
atgagcagtcttttaacgctggcgaaggacttagagcagcaatcgaaagcgcagcagcagagtaccggcgagatgctgaaagccgcattcagcgagcacgagcagtctgtcagagcggaactgagcgcaagcgcgaggagaatcagcgacgccatcctcgcccacgagcagagtatgagcgaggcgatggagaaaaaccggcggagcgtactgcggactgccgggcggacatggctcaccatcctgatggtgtcagcgctgctgagcggcacgagcgggagcattctgtggtggcaggggcagcagataaccgacaattacacgcatcttcgtcagcaggaagataccctggcgaaaatgaccgccaggacgtggggagtgcgctatcaggagagcagcgacggccggaggtttcttatcctgccgccggggatacaaaccgaagccatcccttacgacgggacgacatggatccgcctgaaacaggagtag

SEQ ID NO: 156253 - DNA, 450 bp, Enterobacter cloacae
atgagtgaatttaagccctttgataaccagctcgcgggactgcttgctgccctgtcccccgcagggcgtcggaagcttgcctgtcacattgcaaaggagctgcgtaagtcgcaacaacagcggattaaacagcaaaaagctccggacggctcatcatatcaggcgcgcaaacgtcagccactcagggctaagaccgggcggattaaacgggagatgtttcagaagctgcgcactaaccggtacatgaaagccattggacatgacaacagtgctgtagttgaatttagcgacaaagtgcagcgcatcgcgcgaattcatcagtatgggcttatagatagaccgagcccaaatgcacacctagttcaatatccaatgcgcccattattaggtttacataaatctgaaagaaataaactggaaagactgattttatgttattttaataaatag

SEQ ID NO: 156254 - DNA, 1473 bp, Enterobacter cloacae
atgaaaagtttaaatatactatctttaacccaagctcatgattcattacccccagaatgcttccattcttttttaaatcactatgggataaacattaaaccagcagagctttctgatctgaaaagccttgtagattcaatttaccctctttctggagacttaaaggtgtttaatgattactatgttggctataaaatcccccaaatcggaaaagaatttgaccttttgagagtcggtacaagccatatcattaacattgaactcaaacgcattagcacagaagaaaaaataaaaaaacaactaatcagaaataaatactatctaagcttcaccgaaaagtttgtaattgcattatcttatgaagctgactcacagacgctattcatgcttaacgataaaaatgacatcgaaaaaataagcatcgaccatgtcgcccgacttttattttcacaggatttaaacggcaatcaagttttagacaatatgtttaatccttccgattacttggtctctccatttaactcaaccaagaaattcctatcaaaccaatatttcctgacacatcaacaagaagagattaaagatcagattttaaagtctataacttcaggcaccccttttagattcatttcaataactggaggagctggcacaggcaaaacattgttagtgtatgacatcgctaaaaatgccattcaaaaacagcttgggacattaataatacattgcggcaacttaaatgatggacagaaagaattaagggcatcaggatgggaaatcataaaaatcaaagaccttagcttatatagtttatctaattacaccttgataataattgatgaagtacaaagaatctacccatcccaactaaatactataataaccgccataatgggtgggaatggcagttgcatcttcgcttatgacaaactacaaactcttgctaaggctgaggagttgagagacatagattctaaaatatgcagtttaagctcaataaaatcatatagattatctgaaaaaatcagaaccaataaagaaatagcaaacttcattagaatgctatttaatcgcaatcgaaagctggaatcaacaaacacgtctaacatagaaattaactactttaaatcacttccagatgcaatgcggtttttgaagtcattggatagtggagaatgggaggttttgaggttcaccccatcacaatatgacaatgagcatcatgagaaatattcagataccacgatgaaaacttcacatgaagtgatagggcaggagttcgataatgtagtcattacaattgacagtttctttgcctatgatcattccggagctttgacatatcaaggcaaagcatattactacactatgaagatgctcttccaaaacgtcacaagggcgagaaagagactaaaggttgtgattattgacaacattgaactattaaacagatgcatggaaattgttaagtaa

SEQ ID NO: 156255 - DNA, 159 bp, Enterobacter cloacae
atggtcgctatgttgcagaacccaatgacgtgcagctggcgcgctattttcatcttgatgagcgagatcttgccttcattaaccagcgacggggaaggcataaccggctgggaattgcgcttcagctcaccaccgcccgttttctgggcacctttctga

SEQ ID NO: 156256 - DNA, 567 bp, Enterobacter cloacae; identical to SEQ ID NO: 152639

SEQ ID NO: 156257 - DNA, 186 bp, Enterobacter cloacae
atgcgcctgtttaatccgaaaatgttaactgaggttattcctggatttcatgacaccactgatgcaattgaattgccggatgacaactggtttttcacaacaactgaaatacctgaagggaaaatactcgccgcaaatgaacgcggcgagcccgttctgattgatattactgtcccggaggagtag

SEQ ID NO: 156258 - DNA, 597 bp, Enterobacter cloacae
atgaaacctgttttcgatgtaaacggactggcaacagaaccgggtgaaatccgctgttattactacgacgctgtgacttctgaatatatgggatggtctgacgagtttattaacatcggtgtcagtatgcccggatgctctacggcgatagaaccaggggccgaagcaggagggaaggtatttattttttctggatctgagtgggtgcttaaagaagaccatcgtggagaaacagcatacaccaccagtaacgggaagccggtgactatcgaatatattggaccgttgcgtgaaggctttacttttgaagcaccaactacaaagtttgataaatgggatggtaataaatgggttgccgatcccgaagctcagcgcgcatatgatatttctgtggcggcaacaaaactacaggcgctgattagccaggccaatgactttatgaatggtaagcaatggcctggtaaagcagcaatgggtcgcctgaaggacgcagaaaaagaacaatataatgcctggcttgattatctggatgcgctggagggcgttgacaccgccagcgcaccggttattatttggcctactcctccgggacagtaa

SEQ ID NO: 156259 - DNA, 138 bp, Enterobacter cloacae
atgcaggcgcaggggctgctggcgaggtggtttagatttcagccgggggagattgatgccctcgatactgacgatctggagatgtggctggagcaggctgaagagcaaatcaaaagcgagttcggcgacaatcagtaa

SEQ ID NO: 156260 - DNA, 267 bp, Enterobacter cloacae
atgaaatttaagaccgctgttctgatttctacctttttagtcgctggaaataccatggctgatagcgtcatgaaagctgaatttcattcattacaagaatgtctctcagctataaaggcaaatggtggcgaaccactcaaaatcattcaggataagccagacatggtgactggacgattgccaaacgagaaaatgttcgcctgcgaaaagaaagagacagggtctaaaggcacttactttgaaggttggtttatggtcaaagattaa

SEQ ID NO: 156261 - DNA, 552 bp, Enterobacter cloacae
gtgtcctggaaattaaaaaccggtaaatctaccgaagagcgccagcaagccaaccagcaaataagagaaacggttgaacaaatacttgcggatattgaaaaacgcggaaataaagccattcgcgaattatccattaaattcgatcgttatgaccgtcaggattatcgtctgacgtccgcggagattgaccactgcataaaacagttaagccgccaggatattcaggatattgaattcgcccaacagcaggtggcgaattttgcccgcgcgcagaaagaatgtctgcgggacctggaaattgaaacgtatcccggggtgatcctcgggcataaaaatattccgattaacgccgtaggatgttacgtgcctggcggaaaatatcccctgctcgcctccgcgcacatgtcgatcatcaccgccagcgtggcggggtgttcaagaatcatcagctgtgccccgccgtttaacggtcagcccgccccggcgattgtcgcggcgcaaaaaatggctggcgcaacggaatctatgcccttggcggcattcaggcgatag

SEQ ID NO: 156262 - DNA, 777 bp, Enterobacter cloacae
atgtctaaaattgacacatggttcgcaagaatagctaatttatcacaactaggcgttttaatattagccgtttttggttatttttacacagtgttacctgtttatcaaaagtctctgttagatgaggaaatcgcaaaaaaaactttggaaatagagaaaaaagacaaacagatagcagctataaataaaaaattggaagaaagagctagtgaactagaatcattatccagtgagattaacaaggcaaaagatgatgctgcgcaagccaaaacaaatctccgagccatgcaaggaaagtattccaaacaatattctgaattgagagtgcatttactatctcaattcataaacttggcttattcccaatgttatgaaaagagctgggaaatacaatcattaactaattgctttattaaaacctcagaatctgcggaactaagagaacttaacaacaatgacattaaaaaattaaaaagcagcatttctcttatagcccctaaacttatatccagctataaagagcaaaaaaacgagctcgatagtaagttaaaatccttatcacttgagaaggactccattgaaaaagaatgcgaaattaacaaaacgaaaaaggaatatgaagacagatttgaaaaaattaacattgattatgattgcattagaaagaaatcagcagcagacaataaaaaaatagagctagaaatgagatttatttttgctaaggaaaaactcatgtccaaagctctagaagacattgcaaaccgtactgtaaactaa

SEQ ID NO: 156263 - DNA, 828 bp, Enterobacter cloacae
atgtcagacccgacgatttacgaggctttactcaggtcaatttcttcgcagggattggtgtttggtcatatgccctgcgccgtgctggctggccggacgagcgaccagcatggacaggctcctgcccatgccaacctttcagcgcggcaggcaaaggaaaagggtttgatgacgagcggcacttatggccctccatgcattggctggtcgggcagcgccgccctgtcgtcgtctttggcgaacaatctgcaagctctgacgcgaatgactggatcgaccttgtacaagctgacgtggaagcgttgggctatgccttcggggcgtgcgcgtttccggctgcgagcgtcggtgcgccgaatatcagagaccgagcttattgggtggcccacaccaacagcgaatgcctggaaacatccgagcaattcgggacgtcagggtgggttaaacctgcagacagcggcgcagctttcgggctggactactccgagcgcgagcgacagcaggcggggagggcaggggattaccgcgggaatgtccggcagcagccttgcgcagctggtcaagatggctggttggcccacgacaacggcgagcgatcacaaggggggatatcctggggggcggattcgcaatgtgaaaatctcgatagaccgtctggacgtagtagcacagatagcaggcccggtccggttaacggtttctggagagatgctgactggctgttgtgcagagatggaaagtggcggccagttaaacccagccttaagcctctggttaatggggctgcctccagagtgggacgaattcgaacttacggaaatgccctaa

SEQ ID NO: 156264 - DNA, 900 bp, Enterobacter cloacae
atgggggttctatttttatttggcgctggtgcaagttacggtagtggtccatgcctaccagctaacccacctttaggtagagatttgcttttacggatgaaagaggaaggtggcatcgcctcaacgattgaaggagacttattggattgtttcattaatgaccctgagaaaggcatggtcaagttctttgaagaaagaaatagagataccactgaattacttaaacaaatgtgtgcttaccttgcaagattcagaattaatgatggaaatacttatgtaaaattatttaacatattaaaaaaaagaaaaagcatctgtattgctacgacaaattatgatctacttattgaacaagccatttcatctgtcggttgttttactcaatactactcatcagaacgagtcccgaacaatattccagttctaaaaatacatggttctatcaatttcatacccttagccaacatctttaacattggatttgaaatccttcctgatagcaacagcgcaataattgatggcccaattgaaatctatgataacgctgaaaaaataatagaatactgcaaaagtgacacagcgctatcaccagcagtcgcaatgtatcaccctaacaaaactgttctgcactgcccttcattagttgcaaaacagcaaaaagatttccattcagaaatttcaaaatcatcgaaaatattcatagttggacttaaaataaaccctgatgacaaacatatatggtcaaaaatagaaaatacaaaatccgatatttatataattgatagagataaagaagcaaccgaatcatggattaatcgaatcaacaaaaaaaacatatatcacatagccaatactttcgaagaatccgttatgagaattaaaaatattcttcaactctaa

SEQ ID NO: 156265 - DNA, 447 bp, Enterobacter cloacae
gtggatgacctgcagagggtggatgactggctggcggccctgctggcgaatctggaaccggcagcccgcaaccgtatgatgcgacaactggcgcaggagctgcgccggtcgcaacagcaaaacatcaggctgcagcgcaatccagacggcaccgcctttgaggcgcgccgggtgacggccagaagtaaaaaggggcgcatcaagcgccagatgttcgccaaattgcgcactactaaatacctgaagaccgcagccactgcgaactctgccagcgtgctgtttgatgggaaagtccagcacatagcccgtgttcaccattatggtctgcgtgatcgagtcagacgcaatggcccggaggtccggtacccagcgcgtcgcttgctaggtaaaaatggatatattgaagatttaataaaagaaacctttatcaaatggctaagcatttga

SEQ ID NO: 156266 - DNA, 1206 bp, Enterobacter cloacae
atgcaatccaaacgagatctaaatggcgctatatttaatacggagttagacagcttttgtaggaagtatcttattaaaagaagcatcccccttagcaacaaggaaatcaacgaagcgcctaaatattacgaagaaataaaactatcactatttgaaagttttaccctccacaatgaagttaatttcaaagttgatggcgagaacattcctttaactattttaataaatgaaataggattaaggggagttgaagaattaatagatgatggagcacttagctttaccgtgtggtctcctctcgttctatatatgaatgataaccaatatggtgtagaccctttatgcgcgggccgtcgaaatgaatccgtatttttcgacccagaagagtcaattcgtacaggacttaatttcatgaggagtccattaagaaaaggggaagttagagctttaacacgaaaagtacgtgacctttatttttcagtccctaaaggtatggagaatgacagcgttagtgtaactatgtctgctctcgaaagtggaaaacttgagaggctggggctaagccttaaaaataaagataaaaataatcttaatgaatctgaaaaacagcaattgatttcctgtgcctctgatttattgggttacaaatatcttatgcaaaaacgcgctcaggttagcccaacaagcaatataagcactctccttgaagactcaatgcaaaaagccacaaacctatctaaagatgaaattttttcagcgattgttcaattcgaaaacatgcctgatattaaaacatctttcagagatatgggcatgcctatggacgaactcgttaaattcagaaaaaacaagagtacaaaaaaattcagaaaatggatgtcagatttaaacgaaatatcatcacctattgaggcccaaagattttattcagaaagcaatgcatctccacgtggatttttcgaaacattctggggtaagtccactaaaagtgtaacaatgatgatgatcggtgcttatgctggttcttttgctgacactaaaattggcacaatgcttggtttgttcggtggattagtcgctaataatgcaacaggttatatcttagatatggccgatgaatatcttctatcagagttaacaaaaggttggacgcctaaattatttatttctgagcttaaatcacttaacaataagtattcactataa

SEQ ID NO: 156267 - DNA, 591 bp, Enterobacter cloacae; identical to SEQ ID NO: 129013

SEQ ID NO: 156268 - DNA, 639 bp, Enterobacter cloacae
atgttgtcactcccaccgatcaatcataccatcatccgtaacgggatctactacgccagcttttgcctgtcgggtcataaatatttccgtcggtcgttagagacagatagccacagccacgcgcaactcttgatgtcatttgcatctccagccattccattagtcaaacgtggaaccattcacccggatcagtttggtcaacgtctttctgatttcagcaaccgcttaaagcaacagaatgaacactggctggttcaacaatttctcagtgatgaaaggagcaatcttcagccgatagttgttcaggaattccgtgaggttgttgcgccttcagaagatgaggaagaacaaacagaagcacagtcaaaggatgtgttaacgctggctggcgcttggaatatgtacaaaaaggagaaagcccaaaactggacgaaggcaatttcacaggccaatgagcgctttatggaagtcatgttcattgtcctcggtgcatcaacagatgtaatgacgatcaccaagcaggacatcaagcaggtgatggaagttgttgaaaacttgccgaagcgtgttgtacagccttatcggtcgatgactgttcagcaattgatcgagtgtgatgatgttcgatgttccgcctga

SEQ ID NO: 156269 - DNA, 612 bp, Enterobacter cloacae
atgaaaaagttattatgtctgttttttgctgtgtttttcttatctgcttgtgatgatttgcctgaagctccatttggtttcaaatgggggcaatcagttaaagatacattggcacaaaatatagatggtttaaaggtagatggtgacgaaaagaaagttgtttttgcagcttcggactccgcgcctattccttcaacctatgcagggcgctataacttaatgtttatagctggtagaggcctaactcacataaccttttcagttaacgtcgataaaaattcaacgtcattcattgagggcgctaaggtatataaagacattagtaatattctagatggaaaatatggcgctccagttcttgtaaaggaaagtgttagcgatgaaaaacacggcttttataactgtctgaaaaaaaccaattgtggagaatggcatcgtgattatgattttaatggtatgaaagtcacgctgtctgctcgccctgtgccatacaatgcaaatgctggtgacccaaatggtgttataagcgtcaaatatgaatattatactgacgcgatgaaaagagctgacgctaaaaaatttggcgcagataattactctaatgggttttaa

SEQ ID NO: 156270 - DNA, 345 bp, Enterobacter cloacae
atgtcttttctttattcgggtgacctcaataaaaaaatagttctgcaacgcactgagaacgggcgcggcccccttggtgaggtgctccccggccatcttattgatgtggctacggtctgggctcgcgccgaactaaaatctaaccgtaaaatcaggacgctggaccagaaacaggttgtcgagacctggctgttcaccgttggtccgcgcagtgatgttgaaattgactggaagatccagtggcagaatggttcgttcactgtcgtggcggtcgaccgcagccactccgatcgggttgaaatcaaagctgaaagggatggccggcatgatagagcaggcaattaa

SEQ ID NO: 156271 - DNA, 327 bp, Enterobacter cloacae
atgattgaactcgtcacccttgaagaggttaaagaacactgtcgtatcgatggcgattacagcgacaacgatttggccgggaagatcagggcggccagttccgcgattattcgtttttgtcagggcagcagggacaaaatcgtagatgccaataaccggccgctggaaagtgaagaatattcgctggcaaaagaggcgacattgcgtcttgttaccaagctctaccgcgatcctgatggcacgaccatgagggacttaaagcagggggagcttccatttgatgtgaccatgcttatctgggatctccgcttacccaccattatttga

SEQ ID NO: 156272 - DNA, 582 bp, Enterobacter cloacae
atggatcttgctccagccaagaaagagttaaacagggcaaaacgatgtattgagcgtatgaaagcggcaaaatcatatgatgagtatgatgaggcatggagtgattttttaagccgaattgaaaacattttcagcaggattaaagttgccgctgaacctcacaagaaatacccatcattctcatctagagcaaatcatcttcgtgctacagatagtttgcttatctatctcaaacaggcacgtaattctgtccaccatggaattgcagatatttccaagtatgtttccggtggatttggcataaatcctgccataccaggaggcatacttaatcttgattcattaagcattgatgaaaatggtaatgttaatattgtatccagttcacccatcagaattgatgttattcctggttcagtagaggccattccatgcagaaatagaggcgttacctacaaccctccgaactcacatttgggtgaagacctgaaaagtaaaaaccctatagatatagctgaattaggaattaaattttacgaatcataccttttaagtgctgaagaaacgtttcttaaaaaatag

SEQ ID NO: 156273 - DNA, 150 bp, Enterobacter cloacae
atgaatccgcagggcgaggtcgctgtgttcgtacatgccgcgaccgtaaaccggatcgaatccgcccaccttctcgatggcgctgcggtggtagtacagcatcacgccgcgctgcccggtatacgccacatgctgatcgtcacggtatag

SEQ ID NO: 156274 - DNA, 495 bp, Enterobacter cloacae
atggacgctcaggactatgggaaacaggtcaacttcgcggacggcccggactatgggaaacaggtcaacttcacggacggcccggactatgggaaacaggtcaacttcacggatgaccgggagtgtgggaaacaagtcaactccgcggacggcccggactgtgggaaacaggtcaactttgcagacggcccggactgtgggaaacaggtcaactttgcagacgtccgggactgggggaaacaggtcaactttgcagacgtccgggactgtgggaaacaggtcaactccgcggacggccaggactgtgggaaacaggtcaactccgcggacggccaggactgtggaaaacaggtcaactttacagacatccgggactgtgggaaacaggtcaactacgcggacagccgggattgcgggaaacaggtcaagttaggcaagcactatgggaaatacagcaattttagtatatatcatctaatcagactaaagcactga

SEQ ID NO: 156275 - DNA, 327 bp, Enterobacter cloacae
atgataaaaaaagtaaattatatatccattgagatatttaatgaaaccttcgataacttgcgttcgcgagtggaatctgctttcgataagtatctgaaatttgaagaaaacaaagaaattaaggataatgcagacagtataaaaagtagtattataggtcttatcgacaaagctataaaaaggatgaaaactgttaaatatctcgcatctgccatgttctatggaggtcttatctatgttggatataaacagttcccatccttttttgaaaaattgacaacgaacacattctattttttatgtcacactgtcagtaataattgctag

SEQ ID NO: 156276 - DNA, 129 bp, Enterobacter cloacae
atgaaccgtaacgtcccgatactgatctaccgtgccggcaggacgatagctgccctggcgggtatggctgaaaacggtctgcttcccctgtttaatgtcgatctgcactatatccacaggcaccattaa

SEQ ID NO: 156277 - DNA, 222 bp, Enterobacter cloacae
atgaatccgcagggcgaggtcgctgtgctcgtacatgccgcgaccataaaccgggtcgaatccgcccaccttctcaatggcgctgcggtggtaatacagcatcacgccgcgctgcccggtgtaagcgatgtgcttatcatcccggtacatgaccgccatatccttaagcttattcgtccctgccagatcgaggaactggtaagccaggtgcggttcgggtga

SEQ ID NO: 156278 - DNA, 888 bp, Enterobacter cloacae
atgtctcagacatatcaaatttgtgaagcaacagtaacgctcccgtctttaggaaccatcactactgacggccccggaaaccagattaagcatggagataaatgccgtgtgcatctttatgccgttaaacctgactggcactccgggactatctttgagggcttcaacgttggggctatctgctttaccggttacacagactcaccattcaaacgttctcaaaaaatcatgatgccagacggttttaaattagtggcactgcgagtggatgatgacggagtgccaacgtcatgggaaagcctgccagtgcagttttccggcggactcatcagcctgaacgatgccgatggagctatcagagcaaggattggcaagattgatggcgcagagcccttaatcaaggataccgcaattggtaatagcattgtttctgcgaactatagcgtaaatctgaatatcaacaataatggcaaacagcacgctgcgggtatggctattgaagttgaagatggccagagcaccgttgagtttatggctgatcgctatacggtgcatgaagccgctcaatcagccagcaataatgaaaagacgacattcaatgttggtttgtcttttggtggcttccctggagcaattagtcatgataaggctaatcccgctgatggtaataatgccaccaaaaccagcctcaatgatgagatgtgcgaagccattatctccgccgtacgcgaaagcgatttgttcgcagccctccaggcaaagattgatgcgcaaacagcttcagtagttggcttgcaacaggcgatgcacgaagcggtgaacgatgctcttcgcaatgcgctcaagccaggcagcatcctctggaatacacggtcgcgtggaatctga

SEQ ID NO: 156279 - DNA, 162 bp, Enterobacter cloacae
atgactttagctgaacgcgtaaagagaattgagagcgaattaaaagattttaaatcgcaaatcaattctggtgccgactctaagaaaacagcaaaagcaatgcccttatccagtcttgcaaaagagggaggtatccctggtgggttatttaaaaaaagttaa

SEQ ID NO: 156280 - DNA, 1176 bp, Enterobacter cloacae
atggatattatttgtttagaatgcggcaatcttcttgatgaccctaacgttgcttgcgataaatgcggcgctacaccccatgtagtagtgctgaacaaacaatccttctttcctattggtgctgtaacagcaagccttgaaaaaaatgactcaagggtatttgagtatcgattaggcgacatttgggatttacgaaatgaagttgcttctgaattcataactagaattgagaaaaaattcagcagaaaaaacaaattccacaatttccttgattcagatcaaacccccttttcaatcccctcaattctaaaaaaatacatcaataaaaataatgaatttattaatttagctaaggcaataatagaaaagctaaagcaaaatgctaataatgaaacgagagtggctcaacttcaaggtggcagcgttgttttaatccattataagtctgctgacccagaagacttagggaaacttttaatcgtaatggttgataaacaaagcgcctatgactttgatacagataaattgacgccaacgagattaaacccaataaataccgatgctttacgccaggctgcgatgttcgatctaactttatttgaagcaagctatccagaaaataaaggcgactcatatgtccattttttacaaggtaaatccaaaagcgacttttttaaggattctttaggctgccgacacgattcggacaataaaagaagcattcagcaattattcaatgccatagatgtttttgttagcaaaaactcacttggccgtgtactacgtgatactattgacaatgaagtcaaacttttattagagaaaaaatcaaaagataaaagcggtaataaatccgtaaaaatagaagatatatccaaagttattgatcaatgcttgactgattcacataaatgcaaaggaacgtttgttgattttgttaatattaatggtttccagattgaccctcagtttgaacccactcctaagtctgctgagagcgcacttacaatagaggtggctgataacgacaataattttaaattgaaaataatgcgcggggctattggaaacgaacagtcgaataaacctgtaattctcactgacaacaagtgcgaagttgtgataaaattgagtcaggcagattacgatgtacttaaaagatatagagatagttaa

SEQ ID NO: 156281 - DNA, 810 bp, Enterobacter cloacae
atgacaattgctgatgacttatccagattagcacagatttttaatggagcctcgagcagagtcgaaggctcctacactgttataagtcttgaagaaagcactgtcaatgtaaatggccctgaactaattagattattacagtcgataggttataaaaaagcaagtgactgtattgagcagaatgaaatttggctagatcgtcaagcttcattttgggatgattctataatttttgaaaattttgaatccttctggtatagagtaaataaccagagctctctgccgaaaaattatattatcgggacacctttaatatttcctacaactaaaaatgaaagcattgaaaaaatccatattttctttatgtggaaagacatcctttcgctaatatctgatcatcataacaacgattgctccgtcttattcttcactaatgaagacaaaagttacacagtcgaacttaagcactttttacaatataacgagatcgaccaattatctaacccgtcaattaagtatgaaataataaaggaattactagacaccgttaaaattaaagacttgcataaaagcgagcgtaaactagttatacgctcagcaataaatgaagtatttaaagcaaatgacgcttttaatttcattgaattacttaattcaactgaacaagtcagaaaaaagtatgatgaactttacgaggtttataccaagagattttccgtaaataaaatacttaatgaactcgatgaaaaaaatcttgagtttactagtaaaatcaatgaatttatacccgtgatcattgaagacgcttga

SEQ ID NO: 156282 - DNA, 1026 bp, Enterobacter cloacae
atgaaaatctttatcactgaccaacaaaaagctgaacttgagcgtcttcatgactccagtcgtgataagcgcgtttgcgatcgcattaaagccattcttctggcctccgagggctggagttcggccatgatcgctcaggctttacgcctgcatcagactactgttgaccaccatatcagcgagtttctgaacaaaggcaagctgaagcccgaaaatggcggctcagacagcaaactcagcgctgaacaaacggcttttttaatcagccacttatccgacaatttattttaccatacccgtgatattgtcgcgtttgtcgcgcggacatggaacatcgttttcagcattccgggaatgaataagtggctgcaccggaacggcttcacctataaaaaaccgtcaggcgtcccgcataaattcagtgaagagaaacaaaagcaattcattgaatattatgaggaactcaaagccaccgcaggtgatgaaccggttctttttattgatgctgtccatccgactcaggccaccaaaataggttatggctggatacgtaaaggccagagaaaagcggtaaaaacaacaggtagtcgtacacggctgaatatcatgggggcgctgaatctgaaggccccggaacatccgctaatctgcgaatataaaacggttaatgaatacaacgtatctcgttttttaaatgagatacgtaaaatttatccagattatcagcagaaagttcatgttattctggatggtgctggttatcaccgttcacagttagtgaaagactgggcggaggtggtaaatataaaacttcattacctcccgccgtacagcccgaacctgaatccgatagaacgaatgtggaagttaatgaacgaacatgcccggaataaccgctacttcagcaacagcagggagttcagggatgcaatatctgaatttttcagccatacgttaccggggatagcgggttttctgacgtcccgaattaacgatcattttcaggtgctcaaacctgcatcttga

SEQ ID NO: 156283 - DNA, 438 bp, Enterobacter cloacae
atgaatggtttaactcgtggaattgatcaaattaactggttacatcataaatttaagacagaagttaactgtgcactggttgaacataatattccattgacgttatcaaaactccgcgtgctggacgtcatcgcccacacgccacattgcagggcaaaagaaattatcgaaatacttgggttcagtccccggactgttactgaagcattagattatcttgatatcaaaggctttatattaagaaaaaagagcaaagaaaacagaaaggacaagattcttagtttgactcaacgtggtgatagtattctttctatcgctatagaaatccgtatggcaaaacttcatgaattaattgaaccgctaactgaggaacagttaatgcaattaatccacttaagtgatgtactttacaatgcttcacgttcttttaattcataa

SEQ ID NO: 156284 - DNA, 201 bp, Enterobacter cloacae
atggaaaaaatgggggattctcttccgattatccttgataaggcggttgactttatggcatcaacacaagcatttaaagaatatatgaaacagtcttctgtatcagaacatattcctgaagatatcccggatgagaaggtgtttttttatatacaaagacttaattattacagaagtatataccatcctatagggaagtaa

SEQ ID NO: 156285 - DNA, 2940 bp, Enterobacter cloacae
atgagtaattttaattttctaacagacatcagccctgaactcgctcaatttggtaaaagtgccgagctgtattgccatgatgataagcaggtagcactagtgaaacttaggtgttttactgaagtagtcgttggggaaatttattcacgtttatcgctaaccccacctgttcgtgatgatttatataatcgactgcgcagctacgaattcaaggacgttgtcagtgataagggaatctgggccaaattagatgtattgcgacataaaggtaacaaagccgcccactctagcaatggttcagacgagatttccctcaatgaaacactctggttaatcaaagaagcttatttagtcgcccgttggtatgctcaagctattctcaataagcctatcactccgccagagtttgttgatccggtaaaacctatcgatcatacatctcgcttagaagcagagttagaacggcaacgtcaagaactcaataaacgagaggctgaattaaagacccagcttgctgataatagtgataaatatcaacaacagacgagtgagctaatagctcaactagacgaaaaaaacgacacactttccaatgtaaaaaaagagcaagcactattacagattgaacttgaacaaaaacaaaaagatctagtcgcttcacaacaagccttctttgattacaggacgcgtgaagagtttaaacaagctagtatttcatcagcttcaagctttgatcttgatatggaagtgacgcgccgaaatattgatatatttgattgctttgaaggagtaagtttaactaaaggtcaaaaccaaatagttaagcaaataaatgagtttttaaccgataccaaacaaaacgtatttttacttaatggttatgcaggtacaggtaaaacatttataactaaaggaattactcagtacctagaaagaattggtcgtgaattcgctattatggccccgacggggaaagccgcgaaagtgatatcagacaaaacaatgcaacctgccagcactattcaccgcgtgatatacaattacgacaacgtgaaagagtacaaagttgacggtgtggaagggtctgaaacttatcgttgctatgctgaccttaaagtcaatgtagatactgccgaagctgtttatataattgatgaagcgtcaatggtttctgacagatattccgatggtgagttttttcgttttgggagcggatatttattaaaagacttgctcaagtacataaatattgaccacaacgatcataataagaaagttatttttattggtgataatgcacagttgccacctgttggaatgaatacgtcaccagcgctagatgccagttaccttaaagaaaattatcaagtcgctgtggcttcagggtacttgactgaagttgttcgtcaaaaaggtgatagtggtgttttgaacaatgctgccatgttgcgtgacggtttagagcaaaatcttttcaataaactgaaatttgaagttaatgatcatgatgtatttaatttgtcctcggaaaatctacttagcacttatctagactcatgtgatagaaaagttagccgtacaggagaaagtattattattgcttcttcaaaccgacaagtagctgagtataaccgtttggttagagagtacttctttactggtcaacagcaaatggtcgcgggagataaagtcatttcggtagcaaatcactatcgagcagacgcttgtattaccaatggtgaatttggaatgatcaaggaagtactatctcctcattctgagttgattagtgttgacattagcgtcaaaggtgacactggtgacatggttaagcgaaaagtaaatctgagttttagggatgtgattctaggctttcgcaacgactacggtgaaccattcttctttgaagccaaaattgtagaaaacctactttacaatgatcagccgaccttatcgtcagatgagcacaaagcactctatgttcactttttaaatcgacacccagaactgagacgtaaaggtaatgaacaaaagcttagaattgcattattgcaagatccttatttcaatgcttttaaactgaagtttggttattccattactggacacaaagcacagggtagcgaatggaaaactgttttcttacagtgtcaaacacaccaaaaagccttaactaaagattacttccgctggttatacaccgctataacgagaacttctggcatcctgtatgtaatgaatccacctcagttgcgcttaggagatggaatgaaaatagcaggagcgtaccaacccaaagcagtaaacctagacaattctgctcctgaaggcgttgaggttgtgcgaccaagtaccgaagcaacgaactcagtagccacagcgaagtttgattttcagactgacatcccgcaacttaaaaagctataccaacttgttgatgcatgtattgaaggtacagggattactgtagtggatgtccttcattataactatcaagatcgttacatcttgcagcgcgggaatgagcaggcttcgataagtttcaattacaagggtaactggaaagtgtctggcgtaaagagcattactcaagatgggttcgatgttgaactcatggctttgcttggtcaattagaaggtactttgctcgatgtacctgagccttcaaaggatactcagttccatttttcagagccattcttagaagagttttatctaaatgtaatggatcaaatcaacagtgttggagctgatataagcaaaattgaatctcgttcattttgtgaaagatatgcatttgttaaaggcaatgagttggcggtaattgagttttggtacaacaagtctagccagtttactaaagttcaacctatgcctcagcttagtaattccacaaggctcattgacgaaataatatgtcaaataggtgtgcttctatga

SEQ ID NO: 156286 - DNA, 1425 bp, Enterobacter cloacae
atgaatgagccagctaatcgtacagtaaataatttgagaaagagcggagacctgcaaggggcttgggagtttggttttcaagcgttgcaggcagcaccccaagatacttacttgaaaggtgctttattttgggtgtgttatgagtttcttaagcaccagcttgaaaatctaaataagcgagcgagttcttcaaacaactatcgtcctactgattttgaatttgagcaaatagagaacttgctgcaaaccatagtaaatttagatattgctactggcggcctagagtacaaaatgctgctggttcagtttaagaagagtttggaatggtttccaaccttgattcaccttgtgcttcgacatcaaactgtactatttgatgatgaggctaaaacaccttttcaagctgaaaaaggtgaagtgccaagtttgatgctctcaacagcacgccaagtggcgagtgcatggcttagagcacgagagtattggcatctagatcttaaccaagtgatggcatttattaaccaaacacgcgagcaagcctctgacactaaacatatgatgtggcttgattacgaccaagcgaagtgccttgttattgcgggccaatacgatcaggctcgcgaactcattctacccattttaagaaagaagcaaaaagagtcttgggcttggggagcgttggctgctacttattcaaaacaagatcagcgtttagcaatgaagttttttgctaggggaatagtatccgcacatgacgttacttttagtttacgtttattacagggaattattcctttattacttgcaaatcaacagcaagctgaagcctcaatgtgcctaaaaacggctattgcggcttatcaagcccatgggtggaagctaaagcaagagctagaacagctatctatgcaggcttggtatgattctggtgtcgatgagaagcaactgagtccttttttaaactctatttctcacgacgctttaaattacttgcatgggccgatggagaaggttgttgctatcgtagagaatatccataaatccggtaaaggctttcaagtattcgtaaataagtcgacatcactatcagttcgcatgggggttcataaaggtaagcagaaacctcaggctggtgactatgtcgagctatccgtagcgagtgttgatggaaacaaagaagtagtagcttcctcatcgtccaagcaagtagatatggctgatgtttcgtatgtagagggtacgcttcgaatagcacccaaaggcttcggatttgtcgaggatacttttgttcctccctttgttataggtaatttaaaaaatgaaacaaaagtcagagcactccgtatcatgagttgggacaaatctaaagctcgccacaactggaaagcgattaagttaacggaactaaattttaatgaatactaa

SEQ ID NO: 156287 - DNA, 1293 bp, Enterobacter cloacae; identical to SEQ ID NO: 144311

SEQ ID NO: 156288 - DNA, 1998 bp, Enterobacter cloacae
atgagtgaaaatgatacaatccaaaagaagtctaaaagccagattaacaaagcggtattctttacatctgctttgttaattttccttcttgtcgcctttgccgctgtattcccggatgtcgccgacaaaaattttaaactacttcagcaacaaatcttcacgaatgccagctggttctacatccttgcagtggccctgattctactgagtgtctcgttcctgggactctcacgctacggtgatatcaaactgggtccggaccatgcgcagcctgattttagctatcactcctggtttgcgatgcttttctcggcagggatggggatcggcctgatgttctttggcgttgctgaacctgtgatgcattatctttcacctcctgtcggcactccagagaccgttgcggcagcgaaggaagcaatgcgcctgacgttcttccactggggcctgcacgcatgggcaatctatgccattgtggcactgatcctggcctttttcagttaccgtcacggtctgcctttaacgctgcgttccgcactttatcccattattggcgagcgcatatacggacctgtaggccatgcggttgatattttcgccgttattggcaccgtctttggcgttgcgacatcgctggggtacggtgttttgcaggtgaatgctggtttgaatcatcttttcggggtgcctattaatgaaacggtgcaggtgattctaatcgttgtcatcactggtttagcgacgatttcggtggtgtccggcctggacaagggaatacgtatactgtctgagctcaacctgggcctggcagtgctgctgctggcgctggtcctgtgtctgggaccaaccgtgcttctgctgaagtcatttgtggaaaatacgggcggttatctttctgaactggtgagtaaaacttttaacctttatgcgtatgaacctaagtcgagcaactggctggggggctggacattactgtactggggatggtggctttcatggtcgccgtttgtggggatgttcatcgcaagagtctcgcgcggtcgaaccattcgcgagtttgtcaccggcgtgctgtttgttcccgccggcttcacgctcatgtggatgacggtgtttggtaacagcgcaatctatctcattatgcaccagggggcggctgatctcgccaataccgttcagcaggatgtcgcgctggccctgtttaatttcctggagcatttcccgttttcttccgtgctgtcatttattgcaatggcgatggtcattgtcttctttgtcacctcggctgactccggggcaatggttgttgatacgctggcatcgggtggcgtcgctaacacgcctgtatggcagcgaattttctgggcctcgctcatagggattgtggcaatcgcactgctgattgcggggggactgagcgcgctgcaaaccgtgacaatagcgagcgcattacctttctcagtgattttactgatatccatatacggattattaaaagccctgcgtcgggatttgaccaagcgtgaaagcctgagcatggcgactattgctccgactgcagcgcgtaacccgattccatggcagagacgcttgcgcaatatcgcttatctgccaaagcgctctcttgtgaaacgctttatgggcgacgttatccagcccgccatgacgctggttcaggaagaactgaataaacagggaacgataagccatataagtgatactgatgacgaacgaattcggcttgaagtcgatttgggcaatgagctgaactttatttatgaagtgagacttcgtggctataactcaccggctttcgccatggctgcaatggacaatgacgagcagcaggttgagcaacatcgatattatcgcgctgaggtctatctgaaagaaggcggtcaaaactatgatgtgatgggctggaatcaggaacagctgattaatgacatactggaccagtacgaaaaacacctgcacttcctgcacctcgttcgttaa

SEQ ID NO: 156289 - DNA, 1167 bp, Enterobacter cloacae
atgaagggtatgcagaagatcaaaaggggtaagaacttttcaggtgttgttcattatgcattgaaaccgggagcacaccacaaaagtgatccagtcgtcattggcgggaacatgttaggtgattcagcccttgaactgatcgctgaattcgatagcaccaagcatcttcgccaggatgtcgtaaaaccagtttggcacaactcgcttcgcttacccgacggtgaaacactaacgaatgaacaatggtccggcatcgcagatgactacatgaagaggatggggttcagtgatactcatcttcgttgttatgtgcttcatgacgatccggccggtcagcacatacacattatcgcaagtcgcgtagacctcaatggagggaagctataccttggcaggaacgaaaacctcatcagcacccggatcattagtgaacttgaaatcgctcataacctgacagttaccaagacagcttctgcgatttcaccaaagcaaccgaagcggaaaaaaatctctcgcaacgaacagatgctatcggctcggactggtgttccctcccctaaggaagctctccaacatatcattgataaaagtttggcagatacacctgaccttttaacttttatcaagaggctggaagaagcagaagtcggctggacggcgaatgtcgcttctaccgggaaaatgaacgggttctctttttcctaccgcgatatagctttcaaagcttcgcaattgggcaagagctacagttgggcaaatcttagtaacaggctcaactacaacccagaccatctagaagctctgcgaaccggcataccaccagaagaaccccctgctcctgctcctgctcctgctcctgctcctgctcctgctcctgcaacgattttaaggacaactgagagaagggaaagtatcggtggaaaaattgcagaactggaattacggctcagagaagacaaacggaacgaaatcgtagaaaagattcttcaaaaaaacgcggtacaacaacaaaagcatctccgcttccttatgtggcttgactctttaaggcagttcatagagcttctcagaagctttggtaagagtatccttcacaacacgcccccaagattttcaaaaatctatgcaactcagcatctaagccagaaaagaaaaatccgtttatag

SEQ ID NO: 156290 - DNA, 441 bp, Enterobacter cloacae
atgggaaaacaaccaattattattcattctgataaacgcagaaaaaaagaaattcagcattgtaaaaaaaatgcaaaccctgttatggattcaaagaggacttactgtgttagtgtcagattaaacaaaaatgaattatcgaaacttaatatattaagaaagcattactcaaaaggagagtggcttcgtatggcttcccttcaaaacttgcctcctgttataccggcgattaataccgaagcctggaaagccttaactgtcatatcacaaaagctaaatcgaattgcgatccatatcgacagtaagagtaaagatagccagcttactcatacagagcttttcgctgttaagcgacaacttgaagagcttcgccagaacctgttaaatgcagatgtatggagcaaacccgatgaagggtatgcagaagatcaaaaggggtaa

SEQ ID NO: 156291 - DNA, 291 bp, Enterobacter cloacae
  misc_feature (278)..(287): n is a, c, g, or t
atgttttccaaagaaaaagttagcgatattttatttgcgaatggttttgagataaaaaatcaaagtaatataggtgactcatatacgtttgatttaggtaatgaatggcaagtctctgtattttgtccttttgttgggaatgtgtttgaaggaaatgtggataaattaaattatgaggcaataagtgcgtctttatttgattgtattggtacaaaatttaaatttaaaaacgtagcttcattagaagctaatattaaaagagtactcagaatactaannnnnnnnnnatga

SEQ ID NO: 156292 - DNA, 141 bp, Enterobacter cloacae; identical to SEQ ID NO: 36145

SEQ ID NO: 156293 - DNA, 141 bp, Enterobacter cloacae; identical to SEQ ID NO: 36145

SEQ ID NO: 156294 - DNA, 141 bp, Enterobacter cloacae; identical to SEQ ID NO: 36145

SEQ ID NO: 156295 - DNA, 291 bp, Enterobacter cloacae
atgtcatacactatcaacaatattatttatgctactaagaaagatataatcagtcaggcacaaagcattctaaacaaaaccaaagaccatcaagaagtgagcattagtgattataattttttgatcgaattatttaaaaaccacgatgagtgggaagaaaaaagtaagaatgaatgcataggaatcactgcaggtagatcactacacggcaccagatgtttttatttgaaaacaaaaactggattagaggacatttcttttcattatgctattaaatgcctcaaaaaataa

SEQ ID NO: 156296 - DNA, 162 bp, Enterobacter cloacae
atgaaacgtaatctgaatgaccgcctttatttcattaccgtcacccgcgaagggagtttaacccgtgcggaggctcaaccaggggggacgcaaccggctctcaaccaggcaggcgtgggaataacggctgcagatccgcctgctcacacgaactactcataa

SEQ ID NO: 156297 - DNA, 186 bp, Enterobacter cloacae
atgtctggcgtaactggaaagccgcgcctgcccccaggtcgctatgttactttgcagattcaggaaaaggtcattcgatacggtatcagaacgcaagacccactgaaaaatacgaggcttttccggtacaaagcacatatgtataagcttgtggaagacaagaaaaacaaaggcacttatagttaa

SEQ ID NO: 156298 - DNA, 177 bp, Enterobacter cloacae
atggtcaaaacggttggtaatggcttagactcgcttaacgcaaagactaactggcgtgttgagtcgaccattgcatggtctaaaaaatggcatactaaccactctgttactttcaccactagcccaatgaagcaggttattttctttaaaataaatgagattttcaatccttcgtaa

SEQ ID NO: 156299 - DNA, 819 bp, Enterobacter cloacae
atgtggaattatattaaaaataacgaagcaattactgttgctatacttagtgcactagcttacgtcgccacgtatatcttcgagtgcggatacgcaaatttttacggcatcccaaaagagttaatatccatctccttgggaaatattataacaatgtccctcactctttttgttgtgtcttacatgtgtttcattttctgcagccttcctctggtattaatggctagactgaataaaaatatatacatatcaaccatattaccacgtataatctcattttccatttttgttacaatcattctttttttgaatggttccgctaattatattaatttaaagaaaaccatttatactatggtggcaattttctttatggcttcattcatggctttcctcaaggagaaggagaaggagaaggagaaggagaaggagaaggagaaggagaaggagaaggagaaggagaaggagaaggagaaggccatacaaatgaacgaagcatcaccttttaaagtaattgacagcgcttttgcaaatttatttattgcgggtgcagcgtcgatgatatttattttaagctgcgggacatatattgctaaaacgaccttacctttagggaatattcagttaagcggtaaggaatactctatcattcgcgtttatggagagaatttcatagccatagcaaaagaagacatgagtaaggaaactgcaaaaagaaataaaatctatatatttaaaggtgaagaccttaagtccaccccaataattacccatgaagtaaatcctgccaaggaaaataaaacaatactccttagataa

SEQ ID NO: 156300 - DNA, 408 bp, Enterobacter cloacae
atgacagaaaaagaaacccttatcgcccgactgaaagagctgggcgtaaagcttgatcgtgaggtcaacgtcacaggcacgatccaggagcttacgttacgtatttctgagctcgaagaggaactcgacgaagacggagaagagggagcggaagcggccagtagtgctgttaccagcacgtcgagccagcctggcgcggataacacttctggctcgattaccgaaaatcctgcatcaacagagatcggcgcgctggtggcggttgaaacgctggtgaccttgcacataaacgcgcttcacgccacgcgtaacgagtctgtgtctattgtcgagcctggtgtcgttatccgcgtgactgacgtagaggctaacgacctgatatctcgggagctggcccgggaaatctga

SEQ ID NO: 156301 - DNA, 399 bp, Enterobacter cloacae
atgagtgtagtaggccaggatttcattaacttcgctgaaaaatgcctccagaatggtgatgagatcggttatcgaaacaccgttgggagagcttattatggagttttccatgaaatctgcactaagcttgagcattgctatgtactaaactctcatgaaggtgtgcgcaactaccttatgagagaaaaagagtgcaaaaatgagccatttgataaagctgagctaagaaaaattggcgcatttcttcaccatctgcacgttcagcgtaaatgggccgactatcaactaatgcgcgatctggacaaatccgatgcagaagcagcattgaatatagctaagcaggctatgcagcaaatcaaggccactcacgaaactatctatccgccatctgcagcttaa

SEQ ID NO: 156302 - DNA, 768 bp, Enterobacter cloacae
atgcatgctcagcccaaaactaaacatgaagagctgcttagtacgctactatcctatatagactctaacaccacattggaagagtctcttgcatctgatattcaacgcgatatcagaaccttacctaatacctcacgttcatatttaacagcgtggcttatggttgcattgggtaaacatgatgaggccgtggagtggttcaacgatgctatggacacttcgggtgaaaactcttcaattgttgcaggaaactatgtgggatacctgagttgctctgctcataatctttttcatagagaagaagtgtttcgtttagccgaggtttactttactcagcgaatcagaaaaatggcaagaaacgctgcgttttgcataggcaatgaaagacttgtaaaacgttacacaaccatgctcaaggcctcactcgacggtgaggagcgtgcaaaaattgagcaggagggggccgaaatggtagatgctattctcgaattcaaagaggccactaagctaacttcgaatgagattcaacaactttgcgatgctgctgaaaagatcgcaaatgaccacggtgttaactgtgttggtgtggagtacttcctcactggaggttatgacaacgccttgatactatgcgccgcgactaaagatgctgacaccctcacaactttgaatctggagctaattaacttactagttgatgatgcttacatagaccgcccattcacgtcttggtttaaaagtgcagaacagggaggattggagttatga

SEQ ID NO: 156303 - DNA, 1692 bp, Enterobacter cloacae
atggacggccatactattccactaatctatcttttaaatactactttaaattctgacaaagcgcttcaagcatcgggttttaatgcacacagatgtaaattgaatggattagtcctacaagaacaatctctattatcgacatccatcccttatttgcacaatatccctgaaaacattcacgaagcagaaatcattgtcatagatacttcgcttagtaacttcagtcatggagcaggaagaacctcttcatttaatgtgttctttaaacacacaccttcgtatgtagacttgctcccaatcgatatgtccataatcagcgcacgaatattcgaaactagaaaagatcaagcagtcattgttttttgcggcagtaacacaaacgttatttatgcaattgaaagtggcccagcaaggaataaaagggatttaaactataatacgtatgaatttaataatgcttatcttgatgtagttgatagaacaggttatcgcttcaagaaaccagacgatgtaatttcaaaaagcttaaccgacctgatatttaagtacgcacatggtagtagttacaatgtgattttcaatggcataacaaaaggtgatgttatattagctgagaatgaagctggcgaggtaatatcattcattaccatgataaaagaaaagccttttatcttcttacctgtaataaataatcaaaacgaattcttaaatgaattattcaacaatgtcttacctgacataccactattttcgtcatattttcctaataatggtagttttcaatggatcaatagcgatttatacatctcacatgaagaaaagacaaagttcaatgaaattgaagccctaaattctgattacgaaagaaatcttgccaagctacagcaagagttaagcgacttgtcaaaaaaagatgagaatataaaaaccaaagctttactgactgcgactgatgatgaacttgtaatttctgtgaagtggttcctcgaatatatcggattcgaaaacgttacaattccagatgaacatattaatgaagataatggtgaactatttgaggaagatttaaatatagaaacaagttctaaagtctttcttttcgaggtgaaaggtattggcggaacatcatctgatgaccagtgcgcacaaatttcaaagatagtctaccgtcgtgaagaggccaatcccaacaagaattataaaggcatctatattgtaaatcatcaacgccagaaaaatcccaaagagagaaaaaacccgccattcttcgaccaacaaatccttgatgctgctatagctcgtagaggcatgacttacacatatgaattgttccaagtctatcatatgattgaatcaggaataattgagaaacatgaggtgagagaagcatttaaccaacgcggacttattgattttcgaaaatccttgatgcccttaacctgtgaccatgtattccgtgaaataagtgtttattcttttgatctaacttcaacaccagacacaacgataagtaaagatgatagcgttgtggttaaagatgaagataataattggcatttgctatctattgtgggtattcagacaaatagaattcccattaatgaagcaacagcaaatagcggtgctagtgccggggtgaaggtagacagaattgtcccaggagctagagagtttttcgttttgaaaaaatga

SEQ ID NO: 156304 - DNA, 144 bp, Enterobacter cloacae
atgccgagacaaaaaacacacagtgagcgagctcaaatcatcaccagaatcattgggttggtgaaggtgcatggccgtatcacgatgaaaaatgtcgtagcgatgatcgatttgtatcgcattaccactaagtcaaaagaataa

SEQ ID NO: 156305 - DNA, 459 bp, Enterobacter cloacae
atgaaccgagacgatttagagtttgatattaactattcgtatttcattgaaaaaatgaattacacgcttctcaatcgaatagataaaggtataactctggtgttgattgtcttgggtttttcggtctttgctccgtacagcaatatgtttttatttggtgtggctgtggcgatactgtctgtgcttcaactcgtgtatcaattcggtcaagaagcagggctttctaaggaacaaatgcgacaatacaagcgtattcttgtcgagttctcgaccctgagtgaagatgagttacgaacgagatatcttaaaattcaagatgcagatagtaatccctggcaatcacttcaagacgcagctttcaaacgcacatgcattgctctaggtcgtaaagatgatactgagctttcattttttcactgtgtaattgcatggctggcgggtgatctgcctcgtaactga

SEQ ID NO: 156306 - DNA, 843 bp, Enterobacter cloacae
atgttcatatgtctaatgttcattatcattatgctcggagcgggttacggatatttaatcttcaatggagtatggccatttgatagcatggagttaaccgagactggtttgttcggggactcatggggggcctttacctctatattttcagcacttggtttttgtggtgttctttggtcaatcaaacttcagcgagatgctaccaagcaaatagaattagatgccaaaaaaagggagctttctgagaagttgagggattttgaaaattctttttttaacatgcttaatatcttgcagacaataattaaagatatgcgggttggaggtgatgataaaaaaattaaaaaagaaggtcgtcaagtgtttactcattattattataggtttaaaaacacaactataaaaaaatacgatataaatccggtagcctatttagatagacaggcattttctttatcaaaagaaaaggaaatattatcaaactcatttgaattttttttcagagggcgttctgggaatttttcacattacttcaggtatgtatataatatgtttaagtttatagattgtgctgatattgatgataaagacaaagaaaagtattcgaagatattgagagctcagatttcaaactatgaattaatgattttattttacaactgcaatgggccttatggtaagaaattcgagtcttatataaataaatatgcattatttgataacttgccgattgataagcttattagcgacgtgcatgttgctttttttgatattgaatcttggggcgctaacgacgaggctttaacgaagattcaagaaatacaaaataagcaactcaattga

SEQ ID NO: 156307 - DNA, 267 bp, Enterobacter cloacae
atgaatggtatgaatagtttaacgctgattatggagtttgaaaccagcgtcatgaaattaaatgacttttttcatgctcccgtactgtttggggcgtcctgggggcatcgctgtcggcatctgattgttcagcatgttgacctgatcctggcgcatatctcctatcaaactggaataaacctcgtcgccaatcccaagaaatcgaattttttgaaaaatagatctcatttgctcgtgattttttctctggtggaaaacgaaacgtag

SEQ ID NO: 156308 - DNA, 210 bp, Enterobacter cloacae
atggtaagaagagtgttgttgatgggatttattcttgctgcgttcagtgccaatgccgggcgtataactatgagcaacccggagcagtcaaccacggcgaacgggcaaaccttgtgtgtctattccagcagtatttacacctttaccttcaccaccagatcgaaaaaatgcccgtacagcaagacgttcgacaccgacgacagcaaatga

SEQ ID NO: 156309 - DNA, 474 bp, Enterobacter cloacae
atgaagcagtacaccaacgagatcacacctgaaattcgtgaagcccaatcaaaaccgccttacgacgaagagcttttgtcactctgcgatgacaaaacccggaaagaacctgaggaaattaataaacagtatttaagccgcccgttagctcacattttccggtttgcagtcgttggaagtctgacccgtcgcggtggagtcattcgccatgcttcaggcggtgcgactacaggaggattacaacttgctcgggttggtgacaaggttgtatatgccgatggcagtgaagccacgatcatttctggggcaggtaaggcccgtgttatgcaaggggtatcagcggcactcgttggcagtatgcttgataatggtgatgaaataatctctaccccacaatcatgcagcaaactggtttttcatgaaggccgcgaattcccggaaggattcctgaccataccagggaataagcactga

SEQ ID NO: 156310 - DNA, 1428 bp, Enterobacter cloacae
atggcggttaaaggatactatttattcaggggtgataaaactcgatgtggtggtgttatcactgaaggatggaccgaccaccagcactttgacagagatatggcctgcgaagggcataaagtcacttgtggtaagcatcctgggctttatcgtatctgtggtggtctggatgacgacattcacggtaaaaggattgccggaacgctgcatagttatagttcgtgcccctgcaaatccaaattcctccattcaaattgggatgatgattatgagttcgccagtgagtctgctgtaactgaagttgggcaaacccaacttcccgaatttcccaaactcccggaaccaattgaaccagaacaacacgcacaaacggcgaaaaagaaaacgggcattgatgcgggttttgccattatcccctacggcggtactacagaagcctggcagcgcctgctattcactgagaatccaccagcaggagccaaagaactatttgcaacgctgaacggcccggatgaaagatacaaagccggttctattatgatggtggttgaccctaataagcaggacagcgaacagattgcacatatgcaggctgcgaaagcgcgagttgatgcagcgttagcccctctttccattcagcaagccaacttccttttcaaacacaaagacaccattgagatgttcgccgctgctgccagtacggcgagcgatacttatggatactcaggacaagcaaccgaagccgcgaaagggtatttcgaacaggtagaaaaaatccttgtcgagatcgagaagacctacaaaaaccagtacatcaccagcggcacactgattggcgaacaattcttcgttgaacgccgccgcttgtttggtcagcttgatagcgttcttaagatgttcatgaaacatcgcttcatgttcaacgagtacgcagatctgaaaagtgcccttggcctctcaagccgttcaatcacacaccgctggaacgagacaggcgttagcgatattgaaggttacgcaacccatatcgagaagctggcgaagtacgttaagtggatggaaacagccgggaagatcggcattggtctttctgcttttgataccgcagcgaagatcaccgaagcctgcactgtaggcagggattgcgccaaaacctcgtttacttccatcggtgaattttcaggtggcctagtaggtggagctgtgggagctaggattattggcgctggcgcagctaatactatttgtgctgtggttctgggggctgcaaccatagaggcaggaggagcgggagcgctgctttgcacgctcattgtatctggcggaattgcctacggaagcgataaagcttttagctggtctgttggaaaagcgagcgaatccattggggaggccctcggtctttatgaggttaccagtgatgattag

SEQ ID NO: 156311 - DNA, 405 bp, Enterobacter cloacae
atgattagtataaaaatggtatcggttatagccacacttacaggattgttattaggtgtcttgagcatcgtcgtgtccgtcttaaaccgtaaacggtttagcgaaatttgcatcctgtacaaaaaaaaatatggcagccttcctgatgccgtcttgctgttcgaaaacgtcaacacgctttacatcaacatagcctatagcacgaaagtgcagttcatctacatccctctattatggaatcgcagttcaatcctgaccaaaaacgatgacaaggacttcatcagaggacttcccaaacgacttatcggacctttctacgtcgagatatatctggctgtcgtcagtctaatcttctttatcattggggggctactgatggtagcgatagagcgcggttgggtgtga

SEQ ID NO: 156312 - DNA, 264 bp, Enterobacter cloacae
atgtttgaccgtgatgcagatggtgcccgcgaagctactgaacgtggcaaaagggatatgcgttttaaagacctaatggattcaatcttttatgaattaaatgattgccaacgatttgggcaatctagcgcaagctacagactaagcgaagaggatatcaatgaatttctctatgatgttaccgagtcattgcaagcgcgtgactacgaagtcaccttcgagcatccatcattaaaaatctcctgggagttaccagaggaataa

SEQ ID NO: 156313 - DNA, 690 bp, Enterobacter cloacae
atgacaagagtaacttctgaatcccacattggcgagctaggttcagcttttttacaatatctatgtagcaaacaagaagtaatttaccgtccagttaggatttttgatgttggtatagatgcgtttattgagcctcaagtgggaaatattgctacaggagcaatgataggagttcaaataaaaacagggaaaagctttaaaactagttcaggtcgttattctttcaaaagtgataaagctcattttgaatattggtctagatgcactttacctataataggtgtcgtctatgatcctgaggatgaaaaaggtgtttgggttaatttgagcgatatagctaaggacaggcttaccaataaagggccatgggtaattaatctttctgttcaagaacacttattagactctgacagcttgcaaaaccttattgatagcgctgaattaacaaggattaagaaagattttattaagttttcttacttaaccatgcctcaatcgaatcaaaagaaagagaaagattcatttcaaaatttaagcaccatctcatctcatactgcatgggatgaactattagatacttttctttcccttctttatgatgacagaattgttgctgatgctggttatagattaagtttatatttcccgaaggaaaaaagtgattttcgctgcttaatgatgtccagttaa

SEQ ID NO: 156314 - DNA, 924 bp, Enterobacter cloacae
atgatttctatatttttgggggccggtttttctaaatgggctttcgatttgccactggtaagtcagctttttgattttaatatttcttaccttactgcctcagaagagaaaaagctcgatctaattaaggaggattggtctgtctggatacaaaaaaatccggaagcaacatacgaaaattttgtttattggtgtattaataaatcctctcaccgtaggagcagagttgtttggtatgttaatagaaggttaactgaaccattcattactaggattcgtggtggatattctgctgctatgttcgatgaaaaaattgtgaaacaaaatgaaaggatagtttatttacgtaatttatttaatgagctagagggggctggtttaaaaaatatcattacttgtaattatgataatattgtcgagtataccctaggttgctctgggtttaattatggtataaaaaatgaaattttagtgggaagaggaagaaatccacaatttccttggcaaaatgcagatgtgagagttactggtgagatcctactggctaaattacatggctctttatcgtgggacaaatataataaatacaccagcggcaaacctggcaggacagggaaagctttaattgttccccctgctcctgaaaaagaacctccgcttgaattactagatgtttggacatttgctaggaatgccttagtcaatagcaaaatcttaattgtttttggcttttcttttaatgcgtatgataatgctttgctgaatctattgagggaaagtggctcaaatttgaaaaaggtaattttgatagatccctatccgaaagttgatgaggccaaatgtctttggccttcggcatcaatagagactatcaaccccataaatgatattgtttttccggaaaagtggttcgaaatattatga

SEQ ID NO: 156315 - DNA, 498 bp, Enterobacter cloacae
atgacggaatcaggctttatattaccgatggcagcgggagccgtgcttagctgggccagttacagcatagttgctcacgtttcaataaaacggcagatcagcagcctacgagcaatatcatggggcattttgggaactctcgctttggtgctgggagtgtgtgcgttttctgctgtgagtgcagaacacacaacagaaaagcaaggcgctgcttgctcagataacacaccggaatgctatgcaaaagcgcaccacaaccccgtcagacagtgcaagcaggtaatggacaataaagcgacgtttcgccatgtgtggcaggaaactgaagctcaaccggttttcggaacttacttatggcacgacgagaaaaagaaaacgattcaagcatttggacaacaggctaaggccattaacagtcttgggatacaaacaccgcttcagtatttttgtgttttcaacgccaataccggggaagtaatcgcagcttcatttgaatga

SEQ ID NO: 156316 - DNA, 504 bp, Enterobacter cloacae
atgtctgcggagaatttatcccaaatgggtgcggcaaaagtgcagcgtttggtggatcaatatggtcagcaggccatagaaaaatgtcctgttagccctgtggaatacgctttctacgagcatgcggcggaagagctcaacagcagggggatcaaaacgccgacgctgttgtctgccgatccacatctacgccggttaaggctggaatatatccctggaaaagtgtctcaggatgaggtgtcgggggatgacatattgaaatgcctttctcatcttcatcgcactccaccagacccaacctgggtgtatcaccctcattcctggcccgagaaagcgcttgaaaaatcactggcgcttttgaaattaccggaccgctcggcccaccagatgcgctgttttcagcaagcgggcagcgttttgtttcggcagaaatgtttaatctcaggggataccaatgccggtaactgggggaggagagaaaaacggagagtgggttctctttga

SEQ ID NO: 156317 - DNA, 786 bp, Enterobacter cloacae
atgactgtggatgaaattgttcgtgataataatatttcagatccaaataaaatatatctcgggcagtcaatatcaataaaaaaaagtggttgcaaaacacctacgcagagtgaggcttcgagagctacctctactgactcaaaatcagtgccaaaacaatcacaaaataagaacatcactaatgctaataaagaaatactggaatctgtcggggggaagaaatctggaaatccgattgctttacttccacatgatcagcgagaagttccttggatgaacatagctttaaatgaagcaaaaaaatggcatggaacaaaggaagatcacataacaagtaattatcatgcattaataggtcacaaatggataaaaaatctaattgggaaaaataatgcttggtgctcttctttcgccaattattgttttcaagaagcaggatatcataaaacaggaccagatccatatcgtgcaatttctttttttaaagatagcgtcaatttttttgagatcaaaaaacctatatatggatgtgccgcatcatcaggacatcacgcaacttttgtttatggtaaatctaagtctggagcattaatttgtttgggagggaatcaaggggacacaataaaattttcaccctttaatggattacgattctttttgcctgtgacatataaaggatattacgaatcaaatgcacataaagaattagaaatctttgatgtagatgaactcaatgaaatgattggtattcattccgtaacaactgaacatgagagcacaagatga

SEQ ID NO: 156318 - DNA, 543 bp, Enterobacter cloacae
atgattctgaaattcaaattaacacttgcattgcttttggttgttttacctataagtagtagtttggcatctacatataccaaagagtttgaacgtgttgatggtgttcataaagtgacgattaatatccaggaagaaaatgataacgatttaaagaatgcaaaaataactgcgtcggaatatgtaaatgacaaaaaaatatggagtcttgttgattatgtaaatgaatgtccgcttgatataagtatggatttgattaaggactcattcgagattaagaaaataaatggttcatttgatacagtgttattttcttatacaataggttgtgtgggcggtctcgatcctgttgatgtaaagtactttgcttacgaaaatggtgtaaagcatgctcttcgaggaggagaacgaattattacgcctgatggggtgattgatgataatgttaaacctgtgcctgatgctaatttgagaaataacatccgtttatataaatacatgaccaataactggcttaaagcatcgacgcttgtttggaaatga

SEQ ID NO: 156319 - DNA, 591 bp, Enterobacter cloacae
atgggttttataaagtatttattgaattggcagggcaaaattaaagtattgtcagcggttatctgtgggctaattattgttattgctcttatgtctccccaattagcgttcgccagtcccgagatcgtccaaaaggtatggggtgataattcaggaaagcatactgtaattatagacaagcggcttgatagtaaagacggtggagaaagtttgcttataaagcaaataacaaacaatagagaggattggattcttagggattatgttatagattgtgaagaggatataaaattagatgtggtagctgattctatagaaatcaataaagcattatctgatgacataggcacagttttatttgcatacaagattggatgtgtaggcgggatagatcctgtcacggtaaagtattttgcgtttagaaacggagtgaaatattccttaaggggagaggaacatattattgttggtaacgatggtttcggtggagagaaagcaccagtgcctgactttaatctcaggaatgataaaacacttctggaatacatgatgagaaaatggacatctatttcaactaccaaaattaattaa

SEQ ID NO: 156320 - DNA, 474 bp, Enterobacter cloacae
atgaatcgctttatgtcggtcgttttactttcttctattacttttaatgttttctcgtttgatgtagagcttacagataatgtcacaatggaaataaaaaatagctctgcaatcaaaaaaattcatcttgacactatcgtcaatggttacactgttaagtgtgatggttcaaaaatagttgtgtgggggaaacctgttaaattcaatgagagtaacccacaggatacaaatattataattactaatctgaatgaaagttataagacggttgaaaaaagagtgagcgagggcgtctttggtattgaatatttaaaaggtaaagacaatgctttcattgatgccgggaatggtttatttgtcaacctaaccaccggtcagcttgatgaagtaaagagtgagtttgattcttcagatgaaaataattttgagtcatgcgataaaaataaatcatgggaatttaatcgttacaattaa

SEQ ID NO: 156321 - DNA, 594 bp, Enterobacter cloacae
atgaaaaaaaataatgttactgtccctgttgaatacggcgaagggaacggactcagcattattgatgattggttgaatactcgtattaaagataaagcaatgttgttgattgtggggcttcagtttaatccctcagactctgacaataccgcagaggcaggggtcgcaattctcctcggcaaccgcctgacacaggaggctctcgaacctgtagcactgctgcatcgaccggaccccgccccaccaggagggctggaagaggggatgcgaatggccgcctataacgttccgctcaaagaaaatatcgtcaaacacctgtggctagccggattgacgaaagagcaacgtgcagaggttgttgagagccagaacaagcatcctgcccagtccgttgaagacgacgctgtagcaaaccttgacgtatcaatgggacatgccggtgcagccgccccctggctggccatcgctgcagcaacagaaattgcccggcaaactcaattaccgcagatgatcatcagcggtgacaccacacaggatgtgctgtggagcacactcgttaccccgattgcttcccgacaggagatggacgcgtga

SEQ ID NO: 156322 - DNA, 1596 bp, Enterobacter cloacae
atgagcacactgcagaaccttgtgactgcctgtcaggctgatgaaacccaattgaaacaacaggcacaggcgcgaacggaaagctggcatcgctggacaacacccgtcagcgacagtcacccgaccggtgaagatcccggatacgacgatgatttccagcgtatccgtgaagaggtcaataaactctccggcatcgatactgcactgatttgccagctggcggaaaagctgctcaccaccaccgccctggacattcgtgttgccacctattactgctgggcgcgcctgcatcaggatggcgaagccgggttcgccgaaggactggagttgctggccgggatgctgcagcactttggcacgcagttgcatccgcagcgcgaccgaagccgtaaagcctcactggagtggctggcgggctcccgcgtgctcgacagcctgtcgctgtatccggaagtcgtgggtgatgacgtacagcgtactgtcggcgcgctgttgcttatccaggaatgcctggagtcagagccggaagcctcccggccagagctcaatgcgctttacagcgcactgggatcccgtctgatgaaagctggcggcgtggatgcggtggtaccgcagaacgccagcagcacgccagcatttgtacctgacatgacggggagcacggctcccgtgctgacccgcatcacgtccggacaggatctgctggcacaggcccgcacgctgacgggctacctgcgtgaacagcctgatggctggcttgccgcacatcggctgatgaaaagcctgcgtcatgacacgctgagggcgatcccggctccggatgcggaagggaaaacgcgcatcgaaccgccgcgagcagatcaacgggctatgctcaagcgcctgtacctgcagaaaagctggtcggaaatgctggagcaggctgacagtgccttttcccgtggtgctaaccatctatggctggatctgcaatggtatacccatcaggcgctactgaaatccgggcagaacgtcctcgcagagattatcgtggccgacctgaaagggctgcttcgccgcctcaccgggctggaaaccctggcctttaatgacggtacgccgtttgcagatgaagtcacgctgaactggataagcgaaagcgtgctggacgatatgccgggctggaaagatgagcccgtcaccgccatcagtgccacggacaacgatattctggccctggagccggaagcgctggagaaagcggacagcgaaggccttgatgccacactgcagtggcttcagacccgtccgtgtacagatagcacccgtgataaatggctgctgcgcctgctgatggcccgcgtggctgagcagaagggaaagaatgagctggcccttcatctgctgggtgaactcgatgggactgcacagtccatcaccctgacacaatggacgccagagctgctgtttgaagtcaaatcacgccgcctccgactgctgcgcatgaaagccactcgcagtgaaaccgacaaatcgcgcttccagcccgagatggatctgcttctggcgggtcttatcgcgcttgatccggcaagcagcgcggtactgtgcggataa

SEQ ID NO: 156323 - DNA, 1269 bp, Enterobacter cloacae
atggcagaaggtaactatctggtacagggtgataaaacaacctgtggcgggagaataacgacgggtgcagaggatcataccctttttgataaacccgttgccagagagcgggacagtgtgacctgtggcaagcatgccgggctttttaaaattgccggcggtatcgataacgacaccattcatgaccggcgtatggctggcaccctcgacagttacagcacttgcccgtgtaaagcaaaatttattccgtcaatgctggatgatacatacgagaagagtagcggagcatctactacagaatcatccgcaggctttgtggcaccagtgcaaacctccccggaattgccctcatacctcacaggggagcagaagccaacagggtttttggctgattatccagttttacggaatactcatgattttcctgatggtagtttgagggagatgttgaatgctaataaccacaacgttatgttactcacacttggagaagtttttgaatatttgacatcaatgggattctataaatcagggtggtctttagtttctcaaagccaacctggtgaatttattgttaactatggtacgagtataaaagacgcatattccacttcgaaggtattatatcagctaggtagccttggtataactgcaacagtttatgttaaccataaaggaacagaactgataaaaataagcggttatgcggggatcaggaaaatattaaatgcacctgtatttgctgcaaaaaaccctcagatcatcaagtatggaataggaaagtacgggctgaataacgcaataaaagaagggtttcttttcggtctgatttatgtctctgtagctgattccgttgactttatctttaatgatgaaactacgttagcgaaattcatagggaagtgggctgtagatgtggttaaagttggtatttcgtcagcgataacctggggggcaggggtcgttgcaataggcgctttctcgacgattgccgcacctattgtcgttgtgttagtggccggcgctttatccgcatgggctcttaatgctttggatgctgaatttgaaatcaccgataaagtagtgtctttagttgagtcagctcaacaggaatttgttggcaaggcaaaggatattgagaaaggaatttgggatttgggaaaaatgtatgctgatggaatgcttcacaaaggaattgaagttgtggaagctgaggtgataaaatacgtcaggcgcaccttcgataatttttcaatgaggtggttctaa

SEQ ID NO: 156324 - DNA, 435 bp, Enterobacter cloacae
atgcaggaatttccattgaaacgcaggtttggtcttcttctaggtaccatctttatttatatacctctaattattggtggttcgtggctttctttttacatgctcagtgtatacttctatcttccggaagaattaacatactcttcgtttgtagtttatggcttttctgctgcattgattctaacaccagttgcatatatatcaatgtggccgattttatatggtcggcgagtttccgctaaaacacaaaagtgcctgagcaagtatgtggtgattgtttttatctttacattactatctcaaattggatttaaaatgtattttacaagccttttggatagaaatggctatattgcgtgtttaggaaccccaaaagcttggacgccaggcatggcaacgaaatacgtaagagaccgacaactctgcagtcaataa

SEQ ID NO: 156325 - DNA, 423 bp, Enterobacter cloacae
atgaaaactgaaaagataagacccttttttgcaattgttattatcttgggggtatggatgctttgcttcttcttcgggcgttctgagtttggtgagtatttttcatttggtcagggggttgtattttcatggttatcaattttctttgttgcactaccactggtgatggttttccctcttttctattttttactttttttcattaaagacgaacgctatgccacccagtatatggagagattcgtagtatattttgagtttttatttgtacttatcggcgtggttagttttgcgtttatcattatttataagtatgaacttagtgaaagaagctacacatcttgtaatggaatcccttcagggtggatgcctggtatggcaaaaaaatatgccatagagccctccctttgtaatcagcattga

SEQ ID NO: 156326 - DNA, 537 bp, Enterobacter cloacae
gtgttacgtacaagtttgattaaatctgcatgctgcctgctggcattaagcctgaccggttgtggcgtcacgcagggcatcttcgatggcaccaaatcggcctacaccgccatttttcacaagaagataaaggtgctgcatctggattttaccgcccgtgaagcgctgaacaccgatgcgcgcgaaagcaactcgttatccgaatccgttgtggtccgtgtctaccagctcaaagaccgcaagacctttgacaaaacggtctatcagcagctgctcaaagatggtgacaccgtgctgaaagccgacctgctggccagccgtgacgtggtggtgaagcccggcggtgacgcaaacctcaatatgccgatggaagaagacgcgcggttcgtggccgtggtaggactgttccgccacccggatatggtcaacaacacctggaagcaggttatcgaacgagacgacatggatccggacaagccgcgcattctggaagcgggcaataaccacctgacgctacaacccattaaggataactga

SEQ ID NO: 156327 - DNA, 471 bp, Enterobacter cloacae
atgtcagtaaaatcacagttcctcaaaaaactgcaggccagacagtctgcaccggtctcgtttgccagcaagactcaggccgatatcgcagaatttcgcctgcgaataacgcagcttcaggagcagatggacgcgtggctggtggataccggactgaatgtggaggcgtttgcggtatccgttacggatctgctggtggagggcggggcttttgagattgccggtatcgtcctgcgtatcgacgaccgggccgtaaaatttatgccagtatttttgtacggccagggcgtgaccggatgcatggaggtgacctttcatgatggagggaatgtgacgtcactggggcgtttgttcatgcggtcaggtaccacgaacaactggacctttactcctcctggtacattatctcgccttgggcagtgttttgatgaaagaatattttttagtttgatcctggtgcttctgccatag

SEQ ID NO: 156328 - DNA, 282 bp, Enterobacter cloacae
atggctaactataaaaatcatttcattggagtaatgcaaaaaggttatgctcgcatcagagtcggtgaccggggaggcgcatacattccttctgaagaaattgccactctccctgaggttcaggacatgcagaaacgtgcagcagcaatagtggggcgtagacccaagattaatgctgcatatattgcagggcaagaggcaggtcgtaaacaagcgtcctttgcaaaagacgttattgttaaagaacaggctttagaacaaaaagataaagcgaaggcataa

SEQ ID NO: 156329 - DNA, 828 bp, Enterobacter cloacae
ttgtttgcattattactgatacctattcttgtcagcggctacatccttgtagtcgctaatttatatcatttttaccagttgcatcgttatgatggacagcttttatacttaaaagttgctgctcatggtacaatgagtgtagtttttgttttagcagcagcattagtaacgaaatttctttttccagattttcacccgatagcaatcgtttctgaaatattgaatgtcaaaaaaacaattgataacaataaagcagaaacatggcttgctttaatatctattgcctctatagtttcttctttgctttgggtttttatcatttggtctaagaatgtaatactgggtttcttttgtgagaaacagcatcatgaaggtgtttttcacgcaaaaaaattgcgaatcctaaggaaaaccatatctaactcaacgcttgatagtatgttgttggatgctatggagagtagcccaaaaaaatcaattctagtcacgcttaattctagaaaagtatatgtcggaatcgttaatggaattcaagagccgactgaaagcgaagctccaaatagctatatatctatcttccctattatgtcgggctatagagataaggatacactctcaataacatttactaattcgtatccctcagaagtatcagtttcatctgctgcgactgctgattcaacgaaaattcacaaagtagctaacatggacattctcatcaaatctgatgaaatttcccatttatcttggtttgattttgcagtgtttgacgaagttaatggctccttcgaggaaggaaccatcgatctgagaactgatgctacttaa

SEQ ID NO: 156330 - DNA, 633 bp, Enterobacter cloacae
atgagaactaatagaacaagatacgatatgccatacatcatacctgaagcagatttcgacagaaaactgaacatgtcagagaaaaatgttacccacaccgagggctttctcgctaaaggtgtgcaggactttactctgcctgggtttactacgccatatggttatcgtcttgttaaatcactcagagacgatcactataggctgatcactgacagcgaatcgcctgagaccgtatatgcggtaaaattaatcttccgagaagacattgttgaaactaggaagtcgtgtactcaaatccttgtatggcgcacgccaaatgtgattcacgaccgtgcggtacatggtttaccgcaagattttttccggttcttcttggagcagtttgctatagtcgtttcagatgagcagcaaacaattgatggtcgtagattctgggagagaatgatttcttgggcgataactactcctggatatcatgtctatgtgtctgacggtactgaagaagagcgtccattgacatttatgacctcttgggatgatttctatcagacctgggctgatttttgctggggtgcagataaagatgtgcatacgcatcgcttgttagtcatcagtaaagatcaactccattag

SEQ ID NO: 156331 - DNA, 3144 bp, Enterobacter cloacae
atggcccagcagattagcgatctggtcatcaaccttgacgtcgatagcaccacgtttagtgagcaggttgcccgcataaagggtcagctaactgggatggctgaggactctgaaaaagtccagacccgaatgcagcgcgcttccgagcggcaggcggctgcgtttaaaaccgtgggcgacgctggcgcggcggctgctgcagatatgaaatcccgccagtcggccgcaacggaagggctgaccaaagactggcagaacgtttccaggtccgttgatgaaactcaccgccgcgtgaccgagcttaatcagcgcatgcgtgagaacgacgggcaggccgcagcgcttgcccgtcgacaggatgaactggcggcatcatttttccgccagattgacggcgttcgccagctcaatggtgagacacagtcgcttgcgaacgtgcaggcgcgctttcgcgcagcgagggcacagggcaacataacccagcaggattatctcgcccttatttcccgcaccacggcccggcaaaaagaactgcagatcgtggaggaaaaatcggccgcagcgcgcacgcgattcctcagccagctgaagcaacaggttgcagagcaaaagctctccggtaccgagctgctgcgcatgaaggcagcgcaggtcggtgccagcgatgcggctgaggtctatatccgcaaacttgaagctgccaaagtggccacgcaaggtctggggctgcaaagtgctgctgcccggcaggagctgggggtacttatcagcgaggtcatgcgcggtaacttcggtgcgctgcgcggctccgggatcacgctggcaaaccgggcaggatggatagacccgctgctgtcgctgcgcgggcttgggatcgctggcatggttggtgggattgccgcggcggtattcgggctgggtaaggcctggtatgacggcagcaaagagtctgaggaatttaacaggcagctgatcctgaccgggaactacgcggggaaaacgtcagggcaacttcaggcgctggcgcgctcgctggccggtaatggcatcacgcagcatgccgctgcaggtgtgctggcgcaggttgttggaagcggcgcgttcagcggtaatgacgtcagcatggtcagcaatgttgccgccaggctgcagcaggctaccggacaggccgtcgacgaaaccataaatcagtttaaacgcctgaaggatgatccggttaacgcggtcgcgacgctcaacgattcccttcactttctgacagccacacagtatgaacagatagcttctgctcaggcgctgggggattctcagaaggccgccgagctggccatgcgggcatattccgacgcggtcattcagcgcgccggggcggtcgaggataatctcggatccctcgaaaaagcctggaactgggtgaagaatgccgcctccggcgcgtgggatgcgatgctgggcgtcgggcgaaatcctgacaccgcgatgaagcgccaggactcttttgctgaatggcaggcagcagagaaagagtaccgcgcgctgtccagcaatcttaaggtcgacccggattatgccggtaacaacgttctgcagaaagctgatgcggaaaggttgagaaacgcgcgccagcaggtggagctgaaaaagcaggcttacgatcttgccgatcagcaatacgcccaggaagggctggcagccgcgcgggaaaaaatgcggacggaccagcaggctcaggcaatccgcaaccagcagcagtttaaccagctggtggagtccggcgcgacggcggcagaaaagcgggcttcagcagagaaaaagctcagccagcttattgagaaaaaccgccaggatgcgaaagacggtgtcgccacgctgtggactgaaaaggacattgccgcggcccgtgccgggattgaaaagcagtggaaggatcccaaaacgccgaaaggcaaaagctactcaacgcccgccggggacaaagccgaggaaaaggcgcaggccgaacttctcacccttcaggcccagcttaaaacgctcgagcagcataccagcgtgaacgacgtcataagcaaacagcgtcaggatctctggcagactgaaaatcagttcaccgttctgcaggaggcttcggggcgtcgtcagcttacggcgcaggaaaaatccctgctggcgcacaaggaagaaacgctcgagtacaaacggcagctggccgacctgggcgataaggttgccagccagcaaaagctcaaccagctggccgatcaggccgtgaagtttgagcagcagcaaaaagccgccagggcgggcctgcaggctcagtctgagggggtatccacacgggaagccgggcgacaaactacgctgcaacgcctcagcgaaagctattcctacagtcctcaggcacagcaaaaggttctggaagagcaaagggcgacgttcgaggctgaagatgccctgcgcgcaaactggctggccggtgctaaacaaggctgggctgaatatcaggattcagcgacaaacgtcttcagctcggtacagcagatttcgcaggcaacgttcagcgggctggcgggccagcttaccagcctgacaacaaccgggaaggcgagcttcagggacttcacaacgtcgatcctcaaaatgattgtctccgttatcaaccagctgctggtggcctacaccatccagagcgcgatgggctgggtgagtggtggtaccaatacagcatctgcaggtcagtcattttcggtaccgtctttccgccctacgggctttgacgcaggcggctttaccgggcatggcggcaagtacgagccagccggtatcgttcaccgcggggagttcgtcttcaccaaagagtcaaccagccgcatcggcgtggccaatctttatcggctgatgcgcgggtatgcatccggtggtctggtcggcggggggagcgcagcagcttctggtatcggcgggattagcgtttacgcccccgtgtcagtgactacagctcagtctaacgatacgaagcagcaacagagtggtgatggtgcacttgctcaggcttatcagaaagtggttgatcgttcggtccgcgaaggcatcgcgcgcgaaataaggcctgggggaatcatctggaatgccaataaacagaggtaa

SEQ ID NO: 156332 - DNA, 288 bp, Enterobacter cloacae
atggctggccgtcacttcgataccgccgtccacgccgaggtggaaggtggcaaagtaaatctcttcggtgccggacaagccgatatccagcacgtccactcccgcatcctgcagcccttttgccagcgccagcttcagggactcactggtcaggcgcacatcgccgcccaggacaatcgtttgtggcttaagatattcgccgtatgcgcggccaatgcgccacgcaatgtcttcattcagctcttcgcccagcttgccgcgaatatcgtaggctttaaaacaggttaa

SEQ ID NO: 156333 - DNA, 780 bp, Enterobacter cloacae
atgtatatgtattgttttaatagcccggaaaaaatagaagctctcagaaccccgcttaaattgttagtggcttcggtcccattatataatgagcaaaaagatagtgtatccgatgcttaccattggtatgacttggctggtaagctactagctgtgaaagatattgattttgcaatttcgctcacgcaacagattatttctgctagcaagcatagcatcgaacacggcactatatggagttatataaaaccattactcacgactcttatgcatgatttttccgaaaacctatggccattatttgctgatgcaatcatcaattctgaaagaatgcagcggtattggctaaaagagctcttagatcgagaatctagcgcagtaaacaatatgccaagtgtcttggcagaagtgtcagtagacacaattataaattggtgtaaacagcatcctgaaattggaccggtctttattgcctgctgcctaaatatctttgaagaagttgaaggtgaaaataaacctactgcattatttattgctttgctcgaacattttggacatatcgaaagcgtcgctaatgaactaaagggaaacatgatgtctcgaggttggagtggatcgttagtaccctatttggaatcagataaaaaagcccttctacctttgcaagaacatgataattacaatgttagacattgggcaagtgaacagatcgtttatatagatagccagatttctgaagagtcccaaagagatgaagaaaataactttaatttttattag

SEQ ID NO: 156334 - DNA, 255 bp, Enterobacter cloacae
atgccccaaaagccctctaccagcactgcaagctatatctgtcggctcgcaaaagagcataacattgcagcttcccgcgacaatacaagctacatggcagcagccattacagcgctttcaggcgataccgtagaattagatagcattgagcaattacttgttaaccttaaaagaaaaggtatcctgactaaggctgaaatcctgcagcttcaggggtgttacttacgtgagcaaagagattttcgcaagaaataa

SEQ ID NO: 156335 - DNA, 2784 bp, Enterobacter cloacae
atgccgtctcctaaacttacactagcccgtttggaaagcctgctgctcaccgcctgtgatgatctgcgtggcaatatggatgccagcgaatataaagaatacatttttggtatgctttttctgaagcgcgccagtgacctgttcgaccaacgcagaaatgagatcgtaaaagaaggcaaggctgcaggtctgtctgatgctgatatagctctcaccttagaagatccagaccaatattccggcaagtactttttcgttccgccccgagcacgttggaacgatccatggatagatgactcaggcaaaccacaaccggcgttgaaacacgttaaagaaaatgtcggctctacactcaacaaggcgcttgaggccttggaagaatgtaacgttgatgccctgcaggacgtactcaaggttaccatcaacttcaaccgtaagatcgggcagaacacacttgacgacgatactctggtcgatttcatccagaacttcgaaaaaatccctctccgtgatgaggatttcgaattcccagatctacttggtgccgcctatgaatggttgatcaaacactttgctgattcagcgggtaagaaagccggtgaattctataccccggctgaggtagtacgtgtttgcgtcgaaatttgtgacccacaagaaggtatgagcgtctatgacccaacggtaggctcaggcggtatgttgatccaggcgcgtgattatctgcgcgaatgtggtgctgatgccagcgagctggcgctatacggtcaggaaaaaatgggcaccacatggtctatttgtaagatgaacatgctactgcatggtatctcgcacgcagacattcgcaatgctgataccctgacaaatccaaggcataaaaccgaaggtgatgagctgagacgctttgatcgtgtattagctaacccaccgtttagccaaaactatgcccgcagccaatccaaagatgatggcagtggtactaaaaagaaagtctcaatcgcctaccctggccgtttccatgtgtggatgcccgaaaaaggtaaaaaagccgacctgatgttcgtgcaacacatgctatcggtgctcaaaagcgatggccgcatggccactgttatgccacatggtgtgctgttccgtggcggtgaagaacgcgaggcgcggcagtattttattgaacaaggttatcttgaagccgtcatcgggctccctggtaacctgttctatggtaccggtattccagcctgtattctggtattaaacaaggcaggagcgtcaactcgcaagcatgttctgtttattaacgccgaccgtgagtaccgtgaaggcaaagctcagaatcatctgcgaccagaagatatcgataagatcgtacaggcctaccgaggtggaaaagatatcccggcctatgccaaacgcgtagcagtagctgatatccaagcagaggattacaattgcaacatccgccgatatgtcgacaatactccaccaccggagccgcacgacgtacgcgctcaccttcatggtggtgttcctgtcagtgaaattgatgccctagctcacttctggcagaactatgctggtctgcgtgaaagctgctttgtgcctcgtgctatcacagagcctctcgttaatggagcagttccttatgccgatttcgcaccagaattgcatgacaaacgtgctattgctgaacacatcaatcgccatccgagtattgcccagcgacaagctcgatttatgactgaattgcaagactggtggcaacaatacctgcctgtagttgaagcactagcacctgatgctgacaaccaacaggccaatgccaataatgtctatcagatgcgcgccactttgctggacagcattgagcgaaccttcagcaatcagaatctgctcaataaatatcaggtacgtggagctttcgccaactacttcaagttactggcctccgactttaaatcaatcgccgccagcggctggggcccggaactaattccggatcaggatatccttcaaagccagttccctcaggtgctagccgagctagagcaacaacacgcccgactggccgagttgcaggccttatttgccgccgctggcgaagatgattttgaagacactgacgattcaggcgttctgccttccgatgaagttaagtccctaaaggatgaactgaaagaggccactgcggattggaaagcacaactcaagaccctcaagggtgcagtaaatgatttgttcacagaaatcaaagtggcaaatttgctgcccaagggtatcgataaaggccactattgcagcgatggccttacggccaaagatgcccagtttgataacgctcagcgtatactgaatctagcagcttctgttggccaccactctacgatcaaaatggtgatcgagcaatgtatggacgctgggaggcaagctaaaacccgcgcaaatagagctgaggaaaaactagccgctcataaagccctagaagacgaagctaaagagctaaagatagcgatcaaatccacagaatcgaagaaatatgaattggtggagaaggctcggctaaaaatcagtaaagatgaagctcgggtagttatagttgaacgtcttggaaaagttttgttcgaaagctaccgccagtatttgcgtgccgatcaacgtgcttgtattgcagctatcgaaaaactatggaacaaatacgcagtcacggctaagcagattgaaaccgagcgggataaagcgacaaaagacttacaggcatttttagcggagttagggtatgaataa

SEQ ID NO: 156336 - DNA, 1284 bp, Enterobacter cloacae
atgaataaaattatttatgctccgttgactaactttgctgatgttgtaatgggtcaatccccaggagctaattcatgtaatactgaagagcaaggtttgccattccttcaaggatgtgcagagtttggtgcatattaccctcatactaatatttactgttcatttccgttgaggatagcaaaaaaagactcggtactaatcagtgtacgagcaccagtaggcacaatgaattttgccgatcagcactactgtatcggaagaggattaggtgctttcaaagctaaagagggagtatcaaatgcggtttttctcaagcatgtagtcgaattaaattctggttatctacatcgtcgtagccaaggttcaacttttgcagcgatttctacagatgatctgaagactgtacctataccaatatttgaacccaaaaagcaggaaaaaattgctgctatttttactgctatcgacaacgctatcagaaacaccgacgccctgataacaaaatatcagcaaatcaaggcgggtttgatgcacgatctgttcactcgtggcgtgttacccaatggccagcttcgccccaagcaaaatcaatctccagagctatatcaggaaaccgagattgggtggatcccgagtgagtgggaggtttcaggtctcgcggcgaaaggtcgtcctggtacgaattggattcgaactggtccattcggctcagctttaaaaggcgaacactggcgcccccatgggcaccccgtaattacaattggtgcgttaggagagggggtttttacaccagaggagcttttatttgttgacagaaaagacgccgctcgtttaattgactttcaattaaaacctggcgacgtggttttttcacgtgtcgcagatgttggcaggtcggttgttgttcgtgatgaacacaatggttggatcatgtcatcaaatcttatgcgactcgcggtcgatgaaaccaaagtacggccagattttctccaaatggcacttgctggtgacacacgaatcaagtcacaaatacgtgcacaagttaacagcggcggacgtgatgtagcaaatagcaatgtactaaatcgattacgattttcttggccaagtatttctgagcaagatcaaatacttaacattttaaaccaagaaaattacaagattattgcggaacagaagaaagctaataaacttcacgcccaaaaattaggcttgatgcaagatctactcaccggcaaagtaccagtacaggtagataaccccagcacaaaggttcctgcatga

SEQ ID NO: 156337 - DNA, 1056 bp, Enterobacter cloacae
atgaccccaaaattcccggattcattggccccaacccctagaggttatgccgactggttggtcgaacttaagggtcgcattcaacgcgcccaacaacgcgctacattggcggttaaccgggaattagtaggattgtattggcaaataggtcgtgacattctggctcgtcaggctgaacaaggctggggagccaaagtcatcgatcggcttgcacgtgatctacgcacaacctttcccgaaatgaagggcttctcacctcgtaatctcaagtatatgcgtgcttttgccgaagcctggcctgatgaggaatttgtgcaagcggtgcttgcacaattgccctggtatcatcaattggccctgctcgacaaactaacccgaccagatgatcgacgctggtatgcagccaaagcaattgagcacaactggtcacgtaatgtgctggttatgcaaattgaaagtcgtttgttgcagcgcagcggcaacgcagtgaataatttcgatgtcagattacctcagccgcaatctgatctggctagggaatcgctgaaagatccctaccgcttcgatttccttgggctcacagaagcagctcaggaacgggaggtagaaagcgctttattaaaacatgtcactgaatttctgttggagcttggtgctggttttgcctttgtcgggcgtcaggtgctgatggatgtgggaggcgatgagttctttatcgacctgctattttatcatctcaaactgcgctgttatgtcgtcattgaactcaagggcggcaaattcaagcctgagcatctcggacaattaggattttacctgaccgccgttgatcggcagatgaaacacgaacaagacaacccaaccatcggtctcctgctgtgtaagagtaaaaacaaagtagttgccgaatatgctttaggtgacaaaacccaaccgatgggtattgctgaatacagattggttgaatccctgcctgaggagttgcaaaccagcttgccaagtattgagcaactggaacaggagttgaccaagggtgcagaagaggactctgaatga

SEQ ID NO: 156338 - DNA, 3264 bp, Enterobacter cloacae
atgagcgaatacagtgaagttgaaaagccgtttctgagccaactggctgaacaaggctggacggtgatcgatcaaggcagcggtataccgcagcatgctggtgcaagtttacgtagcaactttcgccagtggcttttgccggaggtcttcgacaacgctgtacgatctatcaaccgtactgacgataatcgagagtggttaacggacagacaactggaggatctacgcagccaactgctgcggcaacccaatcgtacattgctggaggctaacgaatcagtacaagcattgttattcaaggcacagaccgacagtaacgaactgaccggcgaggctgatccggtggtacgcttgattgacttccataaccctgcaaacaatcagttccatgccattaaccagttccgcatcgacacaccgggttgtgtgaaagcctttatcattccagatattgttttgtttgtgaatggtatccctctggtggtagtggaatgcaagaaaggttccgaaacctgcgcaaacccgatgcaggaagcgttcgttcagttgcaacggtatatgcgtcggcgcaaagaaacgacaaatgcagggttgaaggaaggcgagcctcggttattccacagtaatctgttgctgatccgtagctgcggccagatggcggactatgggagcatcacctcaggcgaggagcattattacgcctggaaaacgctctatcctcaaggagaaacggcgaaagaagacctaaatgctcagcaactattgatcgcgggaatgctggacaaagctaatctgttgcagattttacgcaccagtgctgtgtttatggatactgatagtggaacacgtatcaaagtggtatgtcgctaccagcagtttcgcgctgcgagcaagattattgaacgcttgcgccaagctgatacagcccaggatcgtagtggcgtggtatggcatacccaaggctcaggcaagtctttgactatggtatttttggctcgaatgatacgtgccagccgtgatctgaatgattataaaattgtactggtaaatgaccggcaggatctggagaaacagctgtctgacactgctaccctgattggtgggcgagtgaatgtgattgaaagccgtcaggctttacgtaccaatctatccactgacagctcggatgtgagcatggtgatggtacacaagtttcaggaacataagcagacgcttactaatacggtcgctgaggcgctgggcacttatcttgccatacctgcaggtaaaacttttggtgtagtgaacagctcggatcgcatcattctgatgattgatgaggcacatcgaacacaaagctcagatttgggtgacaatctgtttgaggcttttcccaacgcggtgcgtattgcttttaccggcactcctttgatcactgaacgtcatggtgaaaagaaaactcttaaacgttttggcgattatatcgatacctaccgtctaatggacgcagtaaatgatggagccacgctacagatcctctacgaaggaaaaaccgctgacagcgccctgaatgaaaaacatgcctttgatacggcctttgaagatttattcaaagatcgcagcgatgaggaactgctggcgatcaagaagaaatatggcgcgactggcgacattcttgaggctgaaaaccgtatcaacgccatttcccgggatttagtagcgcactatgtagacaatatcctgcccaatggtttcaaggcacaggtggtatgccactccaaactggcttgtatacgctaccggaatggcatcgaagcggcgctggcagaaagaattaccaaggaagaagaacaggccatacccgatatagcgttaattcaacgtttacgttttctgaaaactgccgtggtgatctccagtgacggaaccaacgaggcagcctttatcactcatgcccgtaagcacgcacagcagatgaatgcggtagaaaacttttgccgaagcttcgattttaatgatccggataaggtctacactggaattgcatttctgattgtgtgcgacatgttgctgacagggttcgatgcccctattgagcaagtcatgtatatcgataaaaagttgcgcgagcatagtttacttcaggctattgcacgaactaatcgcgtgaaaaaaggtaagcaacgtggctatatcgtcgattatataggtcttgccaatcatttgaccaacgccctgacgttgtatgctgccagcgatgagttgcaggaactgcacgacggcatgcagaacatttcatcggagttgccagtactggacgagcgctatcagcgtttgctgcaacattttaccgctcttggtatcaagcaaattagggcgttcgttaatggtgagctacctcatcaagatgctgatgccgcagtagtgcacgaggccgttaaggtactcaaagatgaaaagaaacgtgccgattttgaggtgtatcttaaaaagttccttatgagtctggatattatcctgccgaataactctgcacagccctatcgggtgccagcaaagcggtttggctatatcctgcaggtagccagggaacgttacaaagataccagcattgatcttggcagcgcaggtgagaaggttaaagaattgattaatcaacatcttatcagcctgggtatcaatccgaaggtgccgccggtagagctattgtctgaagactttctcgagaatctggcaagccatgctggcaataacagcgaagccaaagcaagcgaaatggaacatgctatccgtaagcactgcaccgttcaccacgatgaagacccagcgttttataagagactgtcggaaaaagtagatgcactaatcgagaaacaccacgacgaatgggatatgttggcggataaactggcagagcttcgtaaagaagctattgcagggcgacaacaaggtgaagaaggtatgagtaaagaagcaacaaccttttaccaatatatcgtccaacttggctttgccggggggatcgttgaagattctgataagcccgctttcaaggcattgatggagacctcagtgaaactactgcaggaaaccatagctagtatcgatttctggcaaaatcccgataaacagaagcgtgtgcgcggtatgattaaaaatgagatcatcaagtcgggaattgaagaacttaagctcaatcgtgaacgtgtagctgtagagatcatgagactagctaaacatcgccacgatgaactggccaacgtagcgcatacaggaggcatgtga

SEQ ID NO: 156339 - DNA, 708 bp, Enterobacter cloacae
atgcaacctcgccaagtgcgcgatattaaataccaacttttacctgggaccgatcgccagactaccgatattgttatcgaacgagatggcgtaatcactgttcgtccccctcggagaatgacgccagagcaagtagatgagaccgtactgagcaagcggatgtggatctatcgcaacctggctgagtggcgcgaccttaacgcaacacgggtgacaagagagtgggttaatggtgaaacatttctctatttgggaagtggatatcgtcttcagctagtagcaaatcaagacgaagcgctaaagctcaaagatggccgcttttgccttcggcgtgagcttgttgaacatggtggtcgcaatgcagcctatctggcattcgaaagtttttataaatcaaaaggcttacctcgtatacaaaagagagtagcctatttcgcagccagagttggtgtaactcctggagtgatacaaataaaagacttgggctaccgctgggcctcgtgtacgcctaatggctctctccatttccactggaaatgtctgatggcaccgctgactgtcattgactatattatagtccatgaactttgccacctacattatcgggaccactctgacgccttctggaacgaggtggacaaaatactaccagattatcgagagagaaaagaatggctcaaaattcgtggagccgagctagacctgtga

SEQ ID NO: 156340 - DNA, 1041 bp, Enterobacter cloacae
atgaaaaatggagtcaggacagggctgttggctctgacgatactaagcgcccctctgatggcgcaggaaagcggcgcatccttcagccataaggactgggaagtggtgtgtgataacacgctgacctgccgggcggcgggatacagctctggggaaggaacaggaggttcagtattactgacccgccaagccggtgcggggaccgctgtgttgggaaaggtgatgttgtcggagattgatgcagaaagtgatgctcaggtccctaggctgacgctctggatcaatgaccagccagtcggtgaggtgaagtccggtaaggatggcgatgggttgctgtcggacaaacagagccagtacattattgcggcagtcaaaggcagcggaaaagttgagttcaaaggcgggtccgatccgtttgttctctctggtgaaggggcttatgcggtgctgctgaaaatggatgatgttcagggacgcgtcggaacgcccggcgcgctgaccaaaaaaggcgacaagccggaaagtcgcgttaaggctgccgttccggcgccagttattcatcaggtaaaaactgagaaagcgcaggaaaggcccctcacagcgcctgaactggcaatactgcagccaaagcttctcgcaactctgagtgaggatgactggtgcgatcgcatccagccttcagaagaacaggaagccgagacgatcagcctgacaccgctggataacgcccattccctgatttcagctctgtgctggcgggcggcgtataacgagggttatggttattgggtggtggacagcaaacttgcggggaaaccagaactcatcacggtttcaggttctgattatggcgatggcgttatcttcatgagccagaaaggacgtggccttggggattgctggggggcggcaagctgggtttgggatggcgagacattccgcaaaagccgcgaagcgacgaccgggatgtgccgttatctccgcctcggcggcacctgggatctccccacctgggtgacggatgttaaaccggcaaagtaa

SEQ ID NO: 156341 - DNA, 825 bp, Enterobacter cloacae
atgctgaagtggctacaaagaccatcccaaagccagccacctgcgccaaacgctatgctgccggagggttggtttgcgccacaatccgcagagcgattgctggcgacaccgttacgccagtcctgtttgcaacagttacggcaactgaccccgctgccggataccctgtttgatagctggatcctcacggcgattcatcgcttcgccgcactggtgcagctgctgcccgcctcacaaaatcatcaccattccattcccggcgggttgctggatcattcgctggaggttgcctgcaacgccatccggctgcgccagggttatctgctgccaccggaagcgggcgcggaagaacaggcccggcaggccagcgcatggacggtcgcagtggtctgcgcggcattgctgcacgatacgggaaaaatcgccgtggatatggagatttatcaacatgatggcacccgttggcatccgtggcaggttaatctggcacaaccttatcgctggcaataccagagccacgctcgcgactatcatctacatcctgccgctaccgcaatgctgattaatcagttgataccctcgccattactggactggctggccggatacccggcggcttttgcgtccctgatttatcagctcaccggacactacgaaagggctggcgcactggctgaactggtgcagcaggccgataaagcctctgtcgcccgatacctcggcggcgatatcaaaaccgcgctggcgcaaaagccctcttccttccccccagcaacttcttacagccttgcggtcgctggtacagaacgagtaccggctcaataa

SEQ ID NO: 156342 - DNA, 1077 bp, Enterobacter cloacae
atgaactggaatcccgaagccccttacaacgatctgccaaaactgccgcctgatctgcagcaaattgaaactcgcaatgtactaaaagcgtgtataaatgcgcgtgcggcaattgcagagctgaaaacagcgggtgagttgatccccgaccagggattgttgattaacattcttccgatgctggaagcgaaagattcctcacgcattgagaacatcgtaacgaccaacgatcagctctttcagtatgctgatcgtgcagacggagcagatccagcaaccaaagaagcattgcgctatcgtacggcgctttatgatggttatacccatcttgagacctatccactttgcacaaacacagcaatcgctatctgcaccaaattacgcgcagttcagaccgatataagaaaaacaccgggcacggtactgcgcgatcagaataacagcgtggtgtatacgcccccggtgggtgaagatactatccgtaacttattggcgaactgggagcagttcatacatggcgatgatgatttagatccattggtgaaaatggctattgcacactatcagtttgagtgcatccacccttttccggacgggaatggacgaacaggtcgtatcctgaatattctttacctgattcaaaatgaattactttcactacctatcctgtacctgtcccgctttattctggagagacgtagtgattactacacgctcttgcgtagggtaacagaggaaggaggctgggaatcgtggatattatttatgctggaggccgtagaaaacacgtcccgatggacgactgacaagattgcggttgttcgggcattgatggcagaaacgaccgagtatgtacgtgagaaactaccaaaaatttatacctatgaactcatccaggtgctctacgcgcaaccgtattgccggatcgataaccttgtcgagcgaggtatcgctaaacgccagacggcatcagcgtatctcaaacagttagtcgagataggcgtgctggaagaaatgagcgttggtcgcgaaaagctgtatatcaacaccaggttggtacaggaattgaatcaataa

SEQ ID NO: 156343 - DNA, 216 bp, Enterobacter cloacae
atgaacgtaacctcacccaaaattctggctcaggcagtcaagaatgcacgcaagcaacgtaagctgacccaacgtgaaactgcagaaagtatgggcacgaaacaatcaacggtttcagagtttgagaaccatcctgaggggacccgcctaggtacgctctttaagatgcttgccgctctggctcttaagcttcagatcgtaagccggaggggctaa

SEQ ID NO: 156344 - DNA, 690 bp, Enterobacter cloacae
atgagtgagcataaacgcggtacggccgcgtccatcgatattgatgacctgctgcaggatacctggctgcaggtcatcagcctgcgccacggaccgaagtttcaggacggtgaggggcgggtcctgtgggagcgctgtattgccgatgtggatcgggttcagcaagcgctgaaagcgcgtgagctggatgaggcgggctgtcagcacattcttgctgcgcagtgtgccctgcttgatgaggcggtgaaaggtcggtgcgtggaggacgacgcctgcgtgcagtggtacaacattccgctgcagggacatttcctggggaccatggatgcaggtgatacgctctgtgacaggatgcgtgatgtcctgcgtgaacctgcccccgatgcggcagtactgacctgttttcagcgtgtgatgatgctggggttcctcggcagctaccgctctctgaacgatccggcgcggcagtccctcgtcaacgcgctcagtgaatatgttacgccgttcagctatccacaaacccatccggtcctggcggaaagccgtaccgggcgtggaatgggcggctggctggcgtcatggcccgtgcgtattggcctgagcgtggtggtggtggccgcgctctggtggggactgtaccactggctggatcagacactgctgactctgctgccgggagcggtgaaatga

SEQ ID NO: 156345 - DNA, 1707 bp, Enterobacter cloacae
atgagtcctgcacaacagcgcggactggcattgtgggccgctctgctgagcgccgtggtgtgtctggggtttctgccgttctcccggctggtctctgtgtttatcctgctggcaaccctggggattctggcgtactggattgtggccagccgccgtgcagagcatgaatcaacgttgcgcctggatgacctgcctgatgcgacttaccgccagccggtggtcttagtctgcggcgatctgccacaggcctggccggagcactctcagatactgaccgtcacccaggggtgctggatccgggtggaagaccatcaggacctggagcaggtggcgcgtcagctgttatggcttcgtccggactgggggcgacagctgtcggtaatggtcagcgtttgccctcagaagcacgcagatcgtgaggcactgaccagccgtctgctggctctgcgctggcaaatcagccagctgcgtaaggagaccggtcattccattccgctgatcctgaacggccaggcaggcagcgccatgatgaacgacatgctctggcaggcggcaatacctggcgaaggggtcagcgtctggcgcggatcgtcggcgccctgctcgattgctaactgggtcaccaccggcggggcgatggcgatgcagcaacaggtgctgatgaacaacctgatgagctggttccaccatcacgtcaaagcggtcttcatggatgaaaatccggatatcccggccattgtcccgatcgccgtactgtggggaacaggacccattctggccggcagcctggcctcatccctctggactgcctcattatcccgccacaccgcgatgcaacacgtcaccggatggcagcctgtcggcaccgacagcacggtgatgtcactgtttccggactttgttctgccgctgctgccagaaggccaggagctgacaccgcggggcagaacgttgcgttgtgctctcgggatgttcaccctggcggcgatggcggcactgctcagcagtggctggaacaatcatcaactgctgcagcgtgtggccttcgacatcgcccactatgaccgcatttcgatggatgattacgacctgaaggcagaggccgtgaaggtgctgcgtcaggacggcgccttgctggataactggtcgcgtaacggtgaaccgctgaacatgagtctgggactgtatcagggcgggcatctgcgcatgccggtgctggaagcgatccgctcgtatgtgcctccgccgcctccgcccaaaccgcagccgaaacccaaaccggttccgaaaatagttcgcttcgacagcatgtcgctgttcgattccggtaaatctgaactgaaatcgggctccaccaaaatgctggtgacctccctggtgggcatcaaagccaaaccgggctggctgattgtggtcagtggtcacaccgataacaccggcaacccccaactgaatcagacgctgtccttgaggcgtgccgaagcggtacgcaactggatgcgtgacaccggcgatgtgccggaaagctgttttgcggtgcagggctatggcgaaagccacccggtcgccacgaacgacaccccggaagggcgcgcacttaaccgtcgtgtcgaaatcagtctggttccgcaggcagacgcctgtcagataccgggcaatccccaggcgtcatcggatgatggcgcagataaaactgtaatggagtaa

SEQ ID NO: 156346 - DNA, 2700 bp, Enterobacter cloacae
atgagctcgaatcttaaaatcctcttcagccacaatcaccacatgctttcggtaaaaggctgtgagtccgggctggacgttctggcctttgaaggtcacgaagccctgagcaaaccgttcagctaccgtattgagttcaccagtggcgatcatgccatcagcaaggaaatgatgctgatgaaagccgcttccctgacgctgcaggcaccggtggatcagggctacggcattaaggtgcaacaggccgttcgtgtgattcagggggtagtcagcggttttgaacgccttagtacctcaaaagacgaaacgcactatgccctgacgctgaccccacgtctggcgttgctcagccgttcacaccagaacgctatctatcaggacatgtcggttccccagattgttgaaaaaatcctgcgcgagcgccacaacatgcgcggccaggattttctgttctcactgactcaggactatccgcgccgcgagcaggtcatgcaatacggtgaggacgatctgcattttatcactcgcctgctgggcgaagtgggcatctggttccgcttcaccaccgacacgcgcctcaatattgatgtggtggagttttacgacagccagcagggctatgagaaaggcctgaccttgccgtctgtgccgccgtctggccagcattcgaaaggggtggactctgtatggggcatggaatgtcaccactctgtcgtgcaaaagcaggtcagcacccgcgattataactaccgcgcggcaaacgaggacatgaacactcaggtcgatgcgacccggggggacgccaccacctacggtgatgcctaccactatgccgacaattacctgacgccgggcagtaaatatgaccgtcatccggcgccggaatccggggccttctatgcccgtattcgccatgagcgttatctgaatggtcagacacaaacccgcgccatcaccagttgcccgacgctcttcccgggtcaggtgttaaaagtcaccggcggttatgaggtggcagaggtgtttgcgcatggcgtggccatcacggcgatgcacactcatgcccgtcgtgacgaagattttggtgtggattttgagggtatcccggacagccccgattttggcttccgcccggagccggggaaacgcccggtgatggccggcacactgccggcacgcgtcaccagtaccaaagagaacgatacctacgggcacatcgaccgcgatggccgctaccgcgtcaacatgctgttcgaccgcgataactgggaaaccggttttgaaagcctgtgggtgcgccagtcccgcccgtatgccggtgacacctacggcctgcacctgcctctgctggcaggcaccgaagtggccatcggttttgaagatggtaacccggaccggccgtacatctctggcgtgctgcacgattcggcgcacggtgaccacgttaccatccagaactacaaacgtaacgttctgcgtaccccaaaaaacaacaaactccgcctggatgactcggaaaatcaggagcatatcaagctctcgactgaatacggcggcaagagccaactaaaccttggacatctcgtggatgctgagcgccagaagcgcggggaaggctttgagctcagaagtgacagctggggcgcgatacgtgcgcagaaagggatgttcattacggcagacggtcaggcgaaggcgcagggccaggtgctggagatgcagccggctgtcagtaatctgggcgatgcccgggagcagatgacgtccatctcagaagatgcacagaaagcgacggcgaatcccgctgatctgcaggcgcaggtcaaactgctggaacagcagctgacggagctcaagaaatcggtgctgctgatgagtgcgccggacggcatcgcactgaccagcggacagcatctgcagctctcagccagtcagaacctgatcgccactgccggcaagaatgccgatatcagcgtggtgaagaatctgtttgtgggggttggaaatgcgctcagcgtgtttgtgcgtaagcttggagtaaagctcattgctaatcagggaccggtacaggtacaagcacaaaacgacttgatggaattattagcccgcaaggaaatcagcattgtcagtaccgaagatgaaatcaaaatcatcgccaagaagaggctaactctgaacggaggggggagctatataaagattgatgcaagtgcgattgaatcagccaccgcgggtgaataccgcacgaaggctgggcattatggacgtaagggcggtgcatcagaaaaggtcacgttacccgtatttccagtgatggaacctggcgtgcaaagtttacgttttgctttccctggtgcagatagtgtcagccaaagtatggattggatgataaatcaaccgttcagcatcactgacagtagtgggaaaatattgtctaccggaacggtagacaactcaggacgcttccccaaaatagaacttccagaaaacgatacattaaatttaatcattggacgagagacttgggggcaggaagaactttctatttgctcaactgagtatgacagtgtggaggattttggaaatgaagactctgatgccaatctttatttaagtgaagaggatatcgcagaggatagtacatcaacattgactgaatcaatgattgccactttattaaatgtaacaaaggtcggttga

SEQ ID NO: 156347 - DNA, 426 bp, Enterobacter cloacae
atgttaaatatatttatgaaactcatgctgagtatggctatcttattatataacttcagtgcatatgcattatgcctgaaagaaggtgataagattgaactctcaggaataatgaaagaagaattgttttacggtccccccaactggggtgaagatagggaacatgacgaaaaattactctactggatcctgcatttaaacagtccactaaagtgtgttattgatgctaatactgagcaagatggttggggcagtaatgtgcagctcattattagcggtgacgattataaagctaaacgcagtttgcttaaccaccaggtcactgtagatggaaatattatgcttgctgttacaggctatcatattacttcagttttactaaatcattccagttttaagttagcgaaaaaaaataaaaaaggatga

SEQ ID NO: 156348 - DNA, 426 bp, Enterobacter cloacae
atgcgacaccagatgctgggcgggcagccaaccggtaagcttgtcaccacccggtttgtctgggaagggttccgcctgctgcaggaagtgcacggggacgtgccgctgacctgtgtctactgcgaccaggacagctacgatccgctggcgcgtattgatggcgtggatgcaccggagatcttctggttccactgccagcccaacggtacgtcggagcggatgacggatagcgaagggcaggtgcgctggggaggggtgaacagcgcctggggcaagctgttgcgggaaagcgagacgcagttatcaggatattctcagaaccttcgtatgcggggcaatacccggatcgtgagacaggtctgcactacattctattccggtattacgacccggactgtgggcggtttacgcatcaggacccgatag

SEQ ID NO: 156349 - DNA, 288 bp, Enterobacter cloacae
gtggctggccgtcacttcgataccgccgtctacacccagatggaaggtggcaaaatagatctcttcggtcccggaaaggccgatatccagtacgtccacgcccgcgtcctgcagcccttttgccagcgccagcttcagggattcgctggtcagacgcacgtcgccgcccagcacgatagtttgtggtttcaggtattcgccgtacgctcgaccgatgcgccacgcgatatcttcgttcagctcttcgcccagtttgccgcgaatatcgtaggctttaaaacaagataa

SEQ ID NO: 156350 - DNA, 930 bp, Enterobacter cloacae
atggcaatattatttaatgaaaaatctttaaatgatgatatacaaagtaaagaacaattatttgaacaaataaaacatgtcatgcgagcacggcaatatcttctacaaaaatctttaaatctttattgcaagcgcgattttataaactatagactatctaatgacgagactatatttaagtatgtaatgggttttgaaaaaactgaaaaaattgatgttcttacttggctatccaaagctggtccgttctgggatgacgaacagttacattctctagaagatttatatgtacatgataaagaagaggttacaggtacggcattagctgaagctgcagcacaattattctgcgatgaggaatgcgagactttcagtttaacaaacgcaaaatatttgggaaacaacattaaaatcacctggatagataataataaacaccatgattttctaataaacaatcataccaccataatttcattagaggaaaaaataaaacaatccaacaagtctatcgagagctggaagaggcttgaggaattaacaaggagtgaatttcagaacttaagctttattgatgaatgttttattccaatatataaattaccttttcataaagcagcatcaaaaagcattatggaaaaattaaatgttttaaataaaataaaaggttgtttcgataattcaggtaaattcacaaccttaggtcatgagatttatcaaaaccactttactggtgataaagcatggtttagtgattcttcagatggggaaaaaatagattttgcaaatgagatgacttttgaattaaagaaaagtgataagcgtttatgcgcctggcatggtaaaataaaaaccccacaattaagaatccatttttcttttcctattgaaaaggaaaccccattatatctgtctcttatacacatctga

SEQ ID NO: 156351 - DNA, 1131 bp, Enterobacter cloacae
atgatcaataaattagctcttgaatactttaaatgttttgaaaatattcaaatcgatcttaagcatttgaatattttatcgggagagaatgcttctggaaaatcatcattgatacaatccattcttgtattaaaccagacaatgcatctaaacgaatggtcaaaaaaactaattctcaatggatccaatataaatttaggaactgtttcagatgtaattgataaagtgaatggaagaaacgcaattaagattaaattctctgatgatgaaaatgtagttagctggacattctcaggagagcggtcacaattatctatgcaaatagataatgttcaaatcgatagcaagatcgttgaatcaccttctatcttacaagatcttctccccccagagtttaatgattctaatatagtttctacgcttagggatatgacatatataaaagctgaaagatgtgggccacgtgacttttatacactaatagataatgaagaaaaaaaaaccaccgttgatggtgaacattcgatagctttactctttaataatttagatagtgatgtgtctcaagatcttgtccttgatacagcaccaccaactcttttccaacaagttcaagctcgaatgagagaatttttcccaggatttgaatataaaattgaatccctggaaaaaataaacgcagttacactcggaataagaacatctgaagatacaaattttcatagacctatgaatgtaggctttggattaacacaaattttaccaattataatttcatgtctcacagctaaagaaggtgacttgcttataattgaaaaccctgaggtgcatttacatcctaaaggtcaagctatgatgggtgagtttttagcagaggtcgcaaatactggagtacagattataattgaaacccatagcgaccatgttttaaacggcataagaagatctgttaaaagtaagggaattgacgatagcaaagttgcgttttattttttcaacaacagaacttttaatgaaagtcagataatctctccacagattgacgaaaatggaaggattgaccattggcctaatggtttttttgatcaatttgataaagacataagttttcttgctggatgggatttataa

SEQ ID NO: 156352 - DNA, 687 bp, Enterobacter cloacae
atgcattcctggcaaaaaaaccgtgcaattaataatagtgacgtggttatttgcgtttctcataatacagctaaagatttaatgaggttttgtgctgtatcagaagagaaagtgcgtgttgtacataatggggtttcggagaaatattatcccatccttgatgttaataaaactaacgaagttttgtttgttggtgcaagacatggatataaaaatttcttaatggccgttgatgctctttcactttctccatcgcttcgattgagtattgttggtggcggtaaattaactagcgcagaaatagcactactagaaaataaaatccctggacgttataagcaccttggacgtgtttcggacgaagaacttaatagtatatataaccgtgttttctgccttctttatccttctctttatgaaggctttggcatacccgtgattgaagcaatgcgtagtggatgtgttgtcattgctgtcaatgtttcatctataccagaagttgcaggtgatgcagcaattttgttagatgatccacatcctgcagctatagcccatgctctaaaagaacttgaaaaccagttgttctataacaaattacgcaataatggtttcactcaagcaaagaaattttcgtgggaaaaatgctataaagataccttggcaatatacaaggagtgcttgaaataa

SEQ ID NO: 156353 - DNA, 267 bp, Enterobacter cloacae
atgtttgttgaactggtttatgacaagcgaaatgttgaagggctcgaaggggccagagaaatcatactggccgagctgaagaagcgggtgcatcagattttccctgatgccgaagtgaaggtgaagccgatgcaggcaaacggcctgaatagcgacgccagcaaaagcgatcgggaaaaactgaaccgcatgctggaggagatgtttgaagattctgacatgtggctggtttctgattctcccactgttcgtcaggttggtctttga

SEQ ID NO: 156354 - DNA, 618 bp, Enterobacter cloacae
atgaaatacgtcctcacgccgctggcctgcgcgctggcgctcagtttttcggctcacgccgccaccgcaactgacttcaaaaacgtcatcaaccgtaccggcgcgccgctcttcatgcaggatttcgacaacgacgaccaccagcggtttaatcccttttttgatatgggtgcctggcatgggcatttgctgccggacgggccgcagacccagggcggatttcccggcgtagcgctgctcaccgaagagtacatcaactttatggcgacgaattttgatcgcctgtccgtttaccagaacggtaaaaaagtggatttcacccttgaagcctacagcctccctggcgcgttggtgcagaaactgagcgccagggatgttcagatcgtgatgacgctgcgctttgcttctgcgcgtacttcgctgcttgaaacccgtattaccagcaaaacgccgctggagctggtgtgggacggcgagctgctggaaaaactggaggccaaagagggcaagccgcgttcggataaaaccatcgacagcgcatatcctgattatcagcgtaaaattgtagccacgcgcgacggcctgaaggtgaccttcggcaaggtacgctccacctag

SEQ ID NO: 156355 - DNA, 267 bp, Enterobacter cloacae
atgtttgttgaactggtttatgacaagcgaaatgttgaagggctaccaggggcaagagagatcattctggcagagctgacgaaacgggtgcaccagattttccctgacgcagaagtgaaggttaagccgatgcaggcgaacgccttaaacagcaacgccagcaaaagtgatcgtgaaaaactgaaccgaatgctggaggaaatgtttgaagattctgacatgtggctgacctctgagtctcctactgttcgccaggttgggctttaa

SEQ ID NO: 156356 - DNA, 519 bp, Enterobacter cloacae; identical to SEQ ID NO: 120062

SEQ ID NO: 156357 - DNA, 318 bp, Enterobacter cloacae; identical to SEQ ID NO: 133996

SEQ ID NO: 156358 - DNA, 273 bp, Enterobacter cloacae
gtgcttcgcttcggcatcgcggcgggcctgttctgccgcttcgcgcttaatgcgttcttcgtgctcacgctgagcctgttccgccaggcggcgctgctcttcgcggtcacggtcaaacttttcattcatcagcagagccatttcgtggtctgcttcgatctgcgcggcgcgctggtcatcgaacatcttgttcatcaccaatgcttcttcgtgcatagcgttccaggcttcttccacccggattcgttcctgctcagcttcccattcggttag

SEQ ID NO: 156359 - DNA, 165 bp, Enterobacter cloacae
atgacagtcacccacaacggcaagcagtacaccgtaaagcgctgtgccatgaacgataacgaatggcggctaacgtcgctaaccaacccgcgggagcagatcactcttaaccgctggcagatgcatatcgctggcctcctggaacaggttgaggtgaaggtatga

SEQ ID NO: 156360 - DNA, 525 bp, Enterobacter cloacae
gtgagcgccagcaacaaaaagctggtgggctatgccgtgcgctggaacagcctgtcagaagttatctgggatgagttccgcgagcagtttgcgccgggagcgtttaaagacagcctggcatccggtagcgatgtgcgtgcgctgtacgagcataactatacccagctgctgggccgcaccaaatccggcacgctggtgctgtccgaagacgataccgggctgcgcttcgagctgaccccgccgaatacccagcttggcaacgatgtgctggagctggtggagcgcggggatatctcaggcatgagcttcggtttccttgcgctgaaagaggcgtgggatattgctcagtctccatatctgcgcaccgtgaccgccgctgaactacgggaaattaccgtaacctctatgcctgcttatcctgaatctggcgtggaaatcgctcaccgttcgcttttctcccaacatcctgaactgcgccgcgctggcgataaccgtcgccgctgggctgaattagcggggctttga

SEQ ID NO: 156361 - DNA, 225 bp, Enterobacter cloacae; identical to SEQ ID NO: 120290

SEQ ID NO: 156362 - DNA, 288 bp, Enterobacter cloacae
atgcatcgtcgggcgggcagccagcgcgagtccgtgcaggccgttacggatggcgcgctgtatgacgtcaccgatatgcgtgagtggcgggaagagaagggcaatggcgtgctcgcgttacccgttcccggctggcagagcaccctggagcagcgtggctttgtgggctgcgcgcgtcacttcattacctgcgtgcagaatcagacggttcctgaaacgtccggggagcaggccattctggcgcagcgcatcgtggaacgactctggcgcgaagcgatgtcggaataa

SEQ ID NO: 156363 - DNA, 465 bp, Enterobacter cloacae
atgggagcaaatcactggcaaccgtgggaaaacctgttcctgcatgaagttgccggacagattcccgtctcattgattgccgaaaaactggagagaagtaagcgcgccgtttacacccaggccgctcgcctcgacgtgaaatttcctggcaataccaactgcaggaaatggaccaaagcagagttgtttctgttgggccggttcactcccgaggaaatcgccgcggcaaccggccgctctatccactccgtgcgcagcaagcgcaactcacttgcccgatcgtcaggaggaaaagtcatgcctgaatggactaccgaagaactggcgctgctgtggcgacactcaaacgctgaagtcgctgagattaccggccgctgcattgaagaggtaggagataagcggctgcaaaccaatattgagcgcaatggctgggatgtaaacgatccggagcgggaggctgcatga

SEQ ID NO: 156364 - DNA, 525 bp, Enterobacter cloacae
atgaaaagacactcacctcctgacatcaaagagctgacatcatctcttaactatgacccactaacagggaaattcacctggaagaagcagcgtgcgtcaaattgcgttattggcaaagaggctggctatataaccggttatggatataggcagatatgtttcaacggcaagccatacagggcgcatcgacttgcttggtttattacctatggcacttggccagacctgattgatcatatcgatatggatagagctaataacgcaatttccaatctccgagaggctaccacttctgagaattctcgaaatcaatcaatgaaaagacgaaattcatctggtgttccatgcgtttactggcacagcaccagaaatagatgggtcgtaaaggtgacgcgtgaaggaaaggaatactacggcggggcatttactaattttgatgatgccaagctgacatccgaaaagctacgcaaagaattacatggtgaattttatcgtgatgtctcacgcaaaggagtgcagtcatga

SEQ ID NO: 156365 - DNA, 213 bp, Enterobacter cloacae
atggacttaaaagttgacggcatcaatgtttatgatgatgaggaaggaaagattgtttcagtaaccgtgcatgtaatgagggatgaatatcgaagtcatgcaacgacatacgttgagatcccgtattctgatgcgctgacaatccatgaaattcacacgcaggcgctcaatgccgccaaagagaaacttaagctgatcgcaagcagcatctga

SEQ ID NO: 156366 - DNA, 435 bp, Enterobacter cloacae
atgagcaattacgtttatagccctaaaaataatgcattttatgctgtgtcgctaaaggatgcgtatgaaatggcaggctcctggcctgacgacagtagcgatattagtgatgagatgttcattgaatttaccgcgagcgcacctgaaggcaaagtgagggtcgccggagatgacggcatgccggtatgggctgatattccacccaagactcccgagcagttgcaggttcaggctgaaaaagagcagcagcatttacttaatactgccagcggcattactgaggactggcgcacagagctggctcttggaattatcagcaatgatgataaggctaaattgattgcgtggatggggtatataaagcaagttaagtccgtcaagattgaggaagccaaagaaccgggattcagctggcctgaacagccggcaatgtaa

SEQ ID NO: 156367 - DNA, 240 bp, Enterobacter cloacae
atgccccgcaaatcagacattcacagcgcatttgtcgctgccatacacctaaaccctaaggggtatcagtgccttcgcaccgacgactttatccgagaactgcgcgccagaaactggcatttcagccagaaagatgccaacgagtggattgagtattatcaggagttcttcgtcgacaagacgccggacaacagcgaaaaccgtctctggatgctccgcaacatggggagggtccactga

SEQ ID NO: 156368 - DNA, 198 bp, Enterobacter cloacae
atgactaacgatgcatataatcgaaaacttacgacgtataccgataacattcctgatgcatcgcaagttatttttcgaaatttactgtgtagctttttttcaggtttcccatgcgtgcggggcaaacaggtagcccttattacgtacggttttaatgcggtagggctcggtggcgctgtcctgcagtttttttcgtag

SEQ ID NO: 156369 - DNA, 780 bp, Enterobacter cloacae
atggcaaaaaccctcgccgagattaaggcagatccaaaataccaatacaccgataaagatggaaaagtaagagatcgtacaatcaacatcccgcattacttccgagagattccacgtatttattctcccaatctcgaaaatggtttcatggatttttgcccgaaggcgcaaaagttgtactgttattttcagggatgggaaaattcagggaatttctgttacgaaagccagacagaacttggaaaggtgatcgatttatccagggagcacacctgcaaactcattcagaagctgcaagatgcagggctaatcacgaaagagaaaaaccctggttatcgttccaaagtttaccgcacgtttccgatcactgatgcgcacattactccaccagaagcactgacagtgcagcctgtagcagcgtctgacgaagtgccagcccctgagccagtgaaggccgcagaggagcattcagttcctgattttgatgatcttccgtttgtctgggatgctccagaatacctggagccgccagcaccaacaccaacgatccccactcagcaggacaagccagaccttccctggggcggtgtagctatctgcaaaccgaatggcgatcccattgatgccgctttgaaatgggcgttaacagagacaatgggcgatgaggaagcagcctaccgacttatttcccagacagcgaccaaacatcttggacgtgagattattttaaccgtaccaacgaatgaaaccttcgacgaattcgaagatctaccattttaa

SEQ ID NO: 156370 - DNA, 1320 bp, Enterobacter cloacae
atgaacaatgttctgggatttcttgaagcaaaactgatgccgctggcggcgaaaacggcccagcagcgtcatcttggggccattcgtggggcctacgtttcattcatgccgtttatcatcgtcggctccatcctgctggtgatctcctccttcccgaatcaggcctatcagcagtttatgtctcaggcctttggtgagagctggagtgcgattatagagattccattcaacgcggtattctcaaccatgtcgctgtttatcagcttcctggtggcctaccgcctggctgagcactatggcgaggaccgcgtctcctgcggcatcctggcgctggtcgccttcctgatcctgacgccctttatcaaagtggcggaaaacggcggcattaccgtgatgccggtggagtggattggcagcaaagggttgtttgtggcgatgatcggttccctgctgtggacggaactgttctgctggctgaagcgcaaaaagctggtcattaaaatgccggacggcgtacctccggcggtgcaggagtcgttcgcggcgctgatcccggccctgctggtgatgattctggtgcttattatccgcatcatatttgaaaacacccactaccacaccatccaccagtttatttatgaagtggttgccaccccggtgcgccactacggtacctcttatttcggtgcgctgatgaccgtattcagcatcaccattctgtggtcagttggcattaactcaggttcgatgatcaacggcattattcgtccactgtggatggaaaaccagaccgacaacatcgccgcgatccaggcgggaacgacaccgccgcacattatcaccgaacagttttttgacatgatctggatgggcggcgcgggggccacgctgtcgctggtgattgcgatgttgattttcgcccgcagcaaaaacatgcgagaagtggcgcgcctcggcgcaggagcctcggtatttaacatcaacgaaccgatcctgtttggcctgccggtgatcatgaacccgatcatgctcatcccgtttaatctggtgccgctggtgctggtcaccgtgcagtatgcggcgatgaaaattggcgcggtcgccgtcaccaccggggtgtttattccctggacgctgccgccggttatcagcggctttatcgtcaccgggcacctgagcggcagcgtgatgcagctgatcaacctgctgattggcgccatgctgtacctgcctttcatgcgtatcgtggataaacagtaccgcgccgcggagctgactaccgctacgcaacccgacaccacccttgcaaaacaggagtaa

SEQ ID NO: 156371 - DNA, 504 bp, Enterobacter cloacae
atgccctcaccccaaccctctcccacggggctgagggttccccacaaaataatgcctgcacagacggccccctctcccttgagggagagggctggggtgagggggaacatacggctctggtggtcattccgttcactatatgttccttgctactctgtcacgacatggccggtgaacgtgccagggtggctcagtcgccaccaccctggcgacccgggcttccggcggaaaatcgccgcttcgcggtgccttcggctcattccttccggcttatcggggacgggcggaggtaacatccctgtaaagcccgccctctcggcgcatccctgcgcctcgccccggcctacaggaaacgcctcagcgatttacagccggaccgaggcatcgctgaaagccctcagttattctgaggcaacgttatcgcttttgctttcaaattactggggaaccctctacccacgaagagagggagaattaagcctttgtaggcccggtaaggcgtag

SEQ ID NO: 156372 - DNA, 474 bp, Enterobacter cloacae
atgagcgttggattaattacagacgagccaggacgtttctacaccttccagtctacattgccagccggtgaatatttcgaatttcgcccacgcaatcctccactgaactcaaaacccatcgttgatgacgaaagcgggatgtgtattggttattccgtcgctcaggctcccggtttatggcagatttatgatgcagacggcatgtttgttaggctggaagaagcgccattagaagcccccctgattgacccaacagacctcgctctaattgcttttggtgcatttcgtcttttacgggcaggtcaggcgttactgaaaagtggtgtcaaagccggcgtaactgtgaggctcagtgaggctaccatcagtctcttgcgtggccgccttaaaatgggcttatccgctcgcgcgctcaggatgagcgaatcatcggcaaaacacatgctgaccccaggttgttatgtgcctttatag

SEQ ID NO: 156373 - DNA, 774 bp, Enterobacter cloacae
atgacaaacgataaaagcgcaccgggtaaagatccagccggaaaaaaaccggcaaccgaaagcggcgctgcagcagtagatcgcgcgtttgccattctggctgtatttgataaagatgcctcccaactgacgcttgcagaaatagcgcggcggaccggcttttataaaagcactattcttcgactattaagctcgcttgaaaaagcaggctttgttcgtaaatccgctgatggccgctactgtatcgggcctgagccgctcagactgtcatctctctatcaggcatcattccgcttacgggatgtattgctgccacacctggaacatctttcagacctcagcggtgaaacatcatcattttacatcatggacaatgactggcgggtcattctgtaccgcgtagaaccgcgacgggcagttcgtgtctcaatacgtgaaggcgatcgcttctctgtgaagtacggggcgtcggggaaaatattaagtgcgtttacctataccgacgatccaatttttgatgaagtcagggaaaaattatgggcagagtcttacggtgagcgagatcctgaaaccgcgtcagtatcggtgccagttttcggagtagagggggttttacagggcgcactaacgctctcaggacccagggagagattcacgccacaaagcatcagaaacattctgagccccctctttcagtgcgctatacatacatccaaagaactcggtggagattattctttactggtcgaagcccggaaaaaattgtcagggtag

SEQ ID NO: 156374 - DNA, 1347 bp, Enterobacter cloacae
atgtcagcaacatcgcaccctgcagtgaatatccggagcggcaccatgccgctgacttccgaagagaatcgcatattaattaaagcagcctggcggcttattccgcttctgggtctggcttatttcttcaactatcttgatcgtaccagcgtgggatacgcagccttacaaatgagctcgcagcttggcctgtcggctgcacagtttggcctgggtgcgggaattatgtttgtcggttattgcctgtgtgaggtgccaagcaaccttgccatgtatcgctttggtgcgcgcgtctggcttgcaagaattatgataacgtggggcctcgttgcttcagccatggcactggtgaccggaccatggagcttttatattcttcgctttatgctgggcgttgctgaagccggttttttcccgggtgtcatattctttctgagtatctggtttcccattcagttcaggacccgcgtgctggcctggtttacggtagctacccccgtgtctttccttatcggcgggcctttatcaaccagcctgctgcagttgcatggttttcttggcctggatggctggcaatggatgtttatcattgaaggtctgcccgcttgtgtactgggcgttctgacgctccgctatcttgctaaccgtcctgaagatgcccgctggcttacgcctgaagagaaagctacgtttgtgcaccttatgaaggctgaacaggctgtcacaaaaaaaaatgagcattttaatgcagccctcaaagatgtccgcgtctggcttttaagcggcattaccttcagctttaccctgggaacctacggcataggtatatggctgcctcagatgctcaaagccgaaggaattgaaacttcgttgataggctgggtggcggcaataccctatttcttttcgacgatcgggcttatttattgggcacgtctggttgataagtcgggtagaggggcgcttcaccttattttcgcgctcatcctggctgcgatttcactcatgctgtctctgtatgtaaacagtttgctgcctgcaatgctgggcattacgctcgcactggtaggcaccatttcggcaaaaactattttttatacgttgcccggtaaatttctgagcggacaggcggcagctggcggcattgctctcattaattccattggcgcttttggcggattcgcgggccctttcctgatgggcatggcaaaagaagtgacacactcattcagcgcagggatgatgcttatgggatgtattatcatgttttcagcatttctggcgcttctactgatgtttatgatgcgggaccagccagcagaagcagaatttttacgcaccgactga

SEQ ID NO: 156375 - DNA, 1203 bp, Enterobacter cloacae
atgtctgttcagaatgagaaaaaacttcccctggaaggcgtccgcgtcattgagtttgttcatatggtgatggggccgacctgcggcctgctgttggccgatcttggcgcagaagtcattaaaattgagcctgcaccgagaggagataataccaggcgtttgacgggatcaggcgcgggatactggatgacgtataaccggaacaagaaaagcctggcaatcgatgttaaatcagttgaaggcctggaagttgttaaaaagctgattgctacggccgatgtatttactgaaaatttccgtccgggtgccatggaaaagataggtcttggctatgaggccgtcaaagccattaagcccgatatcatttacagctcaatgaaaggctttctgcctggtccttatgagaaccggacggcgctggatgaagtggtgcagatgatgactggtcttgcatatatgacgggtccggaggggcgcccgctgcgggcaggcgcgtcggtgaacgatgtcatgggcggaatgttcagcgcaataaccattcttgctgctctgctgcagcgtggccaaagcgggaagggacaattcgtgcagacgggactctatgagaactcagccttcctggttgcccagcacatgatgcagaaggccgtaacgggtaaatctgctgcacccatgcccagccgactgtctgcgtgggctgtctatgacgtatttaccacgtgcgaaaacgagcaggtgtttattggcgtggtgagtgatacgcagtggaaagtattctgtgaagcctttggcatgcatgatttcgctgtggatgagggacttactacaaacactcagcgcgttcaggcccgcgaccggattatgccggttatcagggaacatgtactgacgatgccaaaacaggacgttatggcactatgtgaacaatttggtctgccattctctccgattcgccgcccggacgatctttttgaggatatacatcttaacgagtctggcggtatgaccggggttacgctgccagacggaaccgaagtcagtattcccatgcttccttttgagatggacggacagcgtttcggagcgcgcatcaacgtgcctgaagttggtcgtgactcggcatcaattcttgaagagctgggttatacatcagatgcgatagagcgtctggaagaacgcggcgtcatttcctctccaatttaa

SEQ ID NO: 156376 - DNA, 939 bp, Enterobacter cloacae
atgagccataacagcaatatagatattctcatcagtgaagtgggcccgcgggacggactgcagagcgtttctggggtcatgccgactgacctgaaaaagcagtgggtcagggatttagcctcagccgggttgaaggaaattgaagttggctcttttgtttcacagacgcttctgccccagatggctgatacgggtgagattgtcgggtatgcccgtacgctgccggatctgtttgttaccgcgctagttccgaacctgcgcggggcagaggcagcatttaaatcaggggcacagaaagtcaccataccggtttcagtcagcgagccacattcgctgtcaaatgtgaataaaacccatgaccagattttcgcagaagtggaaaaaatcatcgcctttcgcaatgaaaactatcccggggtagaggtggaagcaggcctttctaccgtatttggttgcaccatacagggcgtggtccacgaagataacgttctccgtattgccagcatcatggctgagctgggcgttgatgaggtcggactcgctgataccgtaggttacgggacgccggtccaggtaaagcggcttttccgcaggctgaaagaagaggtcggcgatctggccggcagcgcacattttcataatacccgggggcaggggctggcaaacgttcttgctgcactggatgcaggcgtaaccacatttgacgcttcgctcggcggtattggtggatgcccgtacgcgcccggcgcatcgggcaatatcgttacggaagatctcgtctatctgctcgaatcaatggggcttcgtactggcgtggatatagacaagctgataatggctcgtgaaacgcttaaacgcgggttacccggagagcaactctacggttttattcccgatgccggggttggaaaaaactttcactatgcaggtagaaaataa

SEQ ID NO: 156377 - DNA, 927 bp, Enterobacter cloacae
atgagcctatttacggcgccatcagcaagaaaatgcaaaattttcagtagcatgcctgaaaacttttatcgtaatggtgattcagactgggtccgggcaaataagcctggacagaagataacggcattcatagaagggcccgcttttgaccggaacggggacctttatgttacggacattccttatggcaggattttcagaattgatcagctaggcgtatggtctctggtagtcgaatataatgggtggcccaatggtctggcttttcaccgcgatggccgccttttcatcgcagactacaggcggggcatactggcactcaacccgtcctcacctgatgtttcccccatacttacacacatacgaagcgagagttttaaaggggtgaacgacctgttttttgacgagtccggacggctttattttaccgatcagggacagacgggcatgcaggacccaaccgggcgcgtttatcgctttgaacctgaagcaaacaggattgaatgccttttatcaaacggacctagtccgaacgggctgcttctggaccatgaaggaaaggcgctgctggttgccatgacgcggggcaatgccgtctggcggctgcctgttactgagcatggcccctcgtcaaaagtgggcatttttactgccatggcaggaggcgtcagcggtgcagatggcatggggcttgatgcggaaggtaacgtatacgtatgcgatgcgggccacggatgcgtatggattttcagccgctatggcgtgccgcttttccgatatgacagctgtaccggtggccgtacgcttactaatatcgcattcggcggccaggataatgccaccgcattcgtaacggattcttctaccggcaccattcaacaatttcccgccctcgcacccggccgtaggttattttctcacacctga

SEQ ID NO: 156378 - DNA, 906 bp, Enterobacter cloacae
gtgacaatattaagctacctcatgataggcgtgttcatgttcctgatcatgactcgcagaatgtcagctctgcttgcattaatccttgtgccgctgtttttcgctgttgtggcaggcttccatgcggagctgggaaaaatgatgatagatggtgttaagctgcttgcccccactggtgtcatgctgacttttgccatcctgtatttttgtgtcatgaccgacgccggactgttcgatccttttatccggctcattgtccgtatcgtaaaaggcgatccgcttaaggtattagtaggcaccgctatcctgggtatcagcgtggcacttgatggcgacggagcaaccacctatctcatctgtacggcagccctgcttccactttatcgccggctgggaattaaacttcagtacatggccactgtgctgttgctttctatcggagtaatgaacatgcttccctggggagggcctacggcgcgcgccgccagcgccatgaaagtagacgttggtgatctctttatgttgcttctgcccgttatgctctgcggtctcgcctgggtaatgctggttgccgttatttttggactacgcgaacgtcgccggcttggtgtaattgaaatcgatctgagcgaagagaccgaacagcgtacctccgtaaccaattaccgttatcttttcaactctgcgctgaccattgcccttctggttatgttaattctgggcattttgcctatggcgacacttttcatgattgcctttgcgctggcgatgttggtgaatttccctgatctcaagcgtcagaaggaactccttgccaaacatgcagaaaacgtgcttgccattgtttctctgatttttgcggcaggtattttttaccggcatactttcaggtactggcatggttga

SEQ ID NO: 156379 - DNA, 381 bp, Enterobacter cloacae
atggttgatgccatgtctaacagtcttgtgcagtcactaccagcctcggctgggccctggattgccattcttacggcgctgatcagcatgccgtttacatttttcatgacaaacgacgccttctatttcggcgtgttgcctattctcgcgcaaacaggcgccagctatgggttctcgcctatgcaaatggcgattgcttcgttgattggacaaccggttcacctactcagcccgctcgttgcgtcaacttacctgcttgtcgggattctcgacctggattatgggttgaatcagcgcgcaagccttaagtgggcggtgggaaccgtactatgcatgctggcaggtgcgatagtgctcggcatattgccgctgcatagctaa

SEQ ID NO: 156380 - DNA, 1302 bp, Enterobacter cloacae
atgtctcttatgcttatcaccgggatagttatgtttattatattaacctggtgtcttctgaaaaacatatttcccccgagcatcttatttattatcctgcctaccgccgccgcattagtctgtggcttcggttttaaagagttaggcgactatgttgcccaggggttgaaatctgtagtgggaacggcaacgctcgttgccttcagcgccatgtttttcaccctgatgaaagaagccggcgtgttcgacgtgatcgtgcgctttattctgcggttcattacgccgtcgaccttctccgtcttactcgccaccctggtgatcgcctccatttgcagccttgacgggaatgcctatgccaccctgctggtaacggtgcccgccctgctgcccatttatgaaaagatgaacatcagcaaaaagacgctgttactgctaatcaccgtgggtgtgggcgtcaccgggatcaccccttggggcggctcgctcaacagagcgattgcggtgacgcatctggatattctggacgtctattaccggctgatcccgttacaggcaattctgtttgtactgggggttattctttgctggtttatggcgagggtcgaaaacagaagcggctcgggtatttccccggatgagtttcatcttatgcgggccgatatgctgacctgtaaaaccgttcatcatccctggctgctgaagctcaattttgctttagtcatcgccaccattgttattctggtatccggcctggttgccgggaattatctgtttatgatcgccttctcgctggcggttattattaattatcccgatacgaagactgcgcaacaaaaaatcaaagagtacgccctgacgatattcccggtgatcgtcatctttttaactatcggcgtatttgtcggtattctgcaaaacacaggcattattaaagtgttggtgaacgagattgccgacatcttccccaccagcctggggccctatctatatcttattctcgcggccttcagcgtgccgattgtgattctgataggttccgatgcgttctactttgcgctgttgcctctcgcggtcgggctggggcagagcttcggcgtgtcgcctctgcacgtcaccatcgccatgcttatcaccgagcagattggcttgctgctgagccccgtcatcccggccacgcatctcgggctgagcctgcttaatttacgggttgacgagcatatccggcactcgatggctaaggtgtggattatgagcgtctgcgcactcgtcgcagcactggtaatcgtaacgatacctgtatga

SEQ ID NO: 156381 - DNA, 639 bp, Enterobacter cloacae
atgagtgaaaaacagttaagagaggatatggttcgctatgcacgttccatgtttgagcgcggatacagcagcggcggcgcgggcaatatcagcctgaaactgccggacggtaatattctggcgacgcccactaactccagctttggcgacctcgatgcagacgagctgagcaaagtcaccatgcagggagagctgctgtccggccagaaagcctctaaagaggtgctgatgcaccttgcaatgtaccgtcagcgcccacactgtggcggcatcgttcatctgcactctccctggctcaccgccctgtcgtgcctgccaggcatcgaccctgaaaatgccctgccgccaattaccccctattacgtgatgcgggtgggtaaattgccggtggtgccttacattcgccccggttcaccgctaatcgcagagcatgttgaaaaactggcggcggaacataacgccattcttttagccaatcacggacccattatttcaggcaaaaatatccgcgaggcggtatttaatgccgaagagttagaggagacggcaaaactgtatttcatgcttaaaccatttggcatgaataccctgactcaggaaaatgtcgacgagcttaacgccacatttaatatgaagtaa

SEQ ID NO: 156382 - DNA, 1260 bp, Enterobacter cloacae
atgactaagttaggcgttatcgccgacgactttaccggggccacagacatagccagttttatggtcaacgcaggctggaaggtggtgctttttaatggcgtgcccacgggcgttttcgacacgcaggatacggatgccatcgtgattgccctaaagagccgctctatcccggtcaacgaggcggtggagcagtcgttatcggcctcggcctggctaaaggcgcaggggtgccagcgacagctctttaaatattgctccacctttgactcgaccgctcagggcaatatcggcccggtgactgatgcgctgatgaagttcttaaatacgcccgccaccctcgtctgcccggcggtaccggataatggccgcacgattgtgcacggccatttgttcgttaagggtgagctgcttaatgaaagcggcatggaacatcatcccgtcacgccgatgaaacactcctccctgaaaaagctgatggaggcgcagtccgtggggctgtgcgggatgattaatctggataaggtgaaaaaccacccggatgacatagcgtctgagatggaaaaagagctggcgaacaaagcccgttatttcatcttcgacgtccttgataatcaggatctgctgactgtcgcccgggctaccgcgaacttcccgctggtgaccggtgccgccgggctgggttacgccatcgccaccctggatgagcagagcaccttgtccggaaaacaggctatgcacattgatgccagcggcgccagcgtggtgctctcaggcagctgttccgccatgaccaatcaacaggtggatttctatcagcagcgcgcctcctctctggcgctggatgtggaaaaaatcattcacgatcccgcctatctggagttcgtggcgcaatgggcgatcgcccatgccggtgagcctctggcaccgatggtctacgccacccagccgccgcaaatcattgagctgatccagaagcactacggggctgaatacgtcagcgaccggattgaaaccttcttctcttcgctggcccagtcgctgacccgggctggctttaacaagtttatcgtcgcggggggcgaaacttcgggcgcggtgacgcagggattgaacattgaggggatggttattggtgaaccggtcgcgccgggcgtgccctggacccaggtcctcaacaaactgcagtgggtgatcctcaaatccgggaactttggcagccaggatttcttccagaaagcacaggaacattatcatgagtga

SEQ ID NO: 156383 - DNA, 1071 bp, Enterobacter cloacae
atgcgcattctggttctgccatgtgacggtatcggtcctgaaatcacttcagccgcagtaacagtgctgaattcactggataaagccttcggcctggattttgaatttgactacgaagatgtgggcttcaatagcctggaaaaatatggcaccacgcttcgtcaggagtcgttagacaaagcgaaaacctacgatggcatcattctcggtacccagtcccacgcggactatccagcacctgaaaagggtggccgtaacgtctcagcgggcttccgtatcggtctggacctgtatgcgaacgttcgcccggcccgcacgcgtccattcctgacgtcgaacatgaaagaaggcaaaaccatggatctggtgatcatgcgtgaagccacagaaggtttttacccggatcgtaatatgacgcgcggctggggtgaggtaatgccgagcccggatatggcgctgtctacccgcaaaatcacccgtcattgctctgagcgtattgcgcgtaaagcctttgagctggcgatgcagcgtaagaaaaaagtgacggctatccacaaggccaacagcttccatatgacggatggtctgttcctggaagcggtgcgcaccgtggcgaaagagttcccggaagtgcagctggatgacctgctggtggatgcgtccactgcgcacctggtgcgtaacccggaacgctttgacgtgctggttgctaccaacttctacggcgacatcatcagcgatctggcaagcgaactctccggaagcctgggcttagcgggctccattatggccagcgatacccattgctgtgcgcaggcgcagcacggttccgcgccggatattcagaaccaggataaagctaacccggtttcgatgatcctctccgcagcaatgatgctggcctggtatgccgagaagcataaccagccgaaattcctgaaagcggcggatgagatcaaccgtgcggtggacgaagtgctggagaacccggcgacccgcactccggatctgggtggcacatgcggcaccaaagcctttgctgaaaaagtggcagcggctattcgcgcctga

SEQ ID NO: 156384 - DNA, 654 bp, Enterobacter cloacae
atgagccaacgtattgtcctgatccatgccacccctctggccgtggcaccaatcaatgacacctttaagcagttgtggcctgacgctgaagtcagcaacctgcttgacgatgccttgagcgtggatcgcgcgaaagtgtccacgcttaccccgcgcatgaataaccgtatcaatgcgttagtggagtatgccatcagcattgatgccgcagcggtgctgtttacctgttcggcctttggcaccgccatcgaagccagcgcgcaggaaaaatcgctacccgtgctcaagcctaacgaagcgatgttcgaggatgcgctgaagaaagggcggaatatcgtcatgctggccaccttcgggcctgcggtaaaagggatggaagacgaattcagggaactggcggccgcatgccactcagatgccaccctgagcagttatgtggtccccggtgcccgcgatgccctgaacgccggcaatgccagcctgcataaccagctgattgtcgaggcggccctgcaacaccaggaggccgacgctattcttctggcccatttttctatggaaatcgcttacccgcaggtcagttccgccgtctcctgcgcggtattaagtagcccgcagtccgccgtaaataaattaaagcgtttgatgaattga

SEQ ID NO: 156385 - DNA, 891 bp, Enterobacter cloacae
gtgaataatgagaaaacagaggcagagattaaatacagccatattacgtctctgcccggtgtcgtattacctgcgaatagctgtgactgccatcatcatatttttgacaggcgttacccttatgcgcccgatgataaacgcaatttacccgctgccaccgttagcgattatcgcgcgtttaaacactggctgggttttacgcgccacgtcctggttcaaccttcctcttacggtgcagataaccgctgtttactcgatgcgctgaagtcctttggcccggtagcgcgcggtgaagctgtggtcacggataccgtcagcgacgcggagctggactgcctcgccgccgccggggtgaccggcatccgcttcaattttggcgcgggcagtatcaccaccccggagatgctgatgccgctggccgcccgggtagccgaacgcggctggcatgtgcagatccatgccaccgccgaccagctctgggcgctgcgcgccttgctaacccagcttccgggccggctggtgatcgaccatttctttcggctgccacagcccgagccgatgtcccatccggcatggaggctcgcctgggatctcatcggtaccggccgctgctgggtaaaactgtctgcgctttaccatcagtcgcagcgggatgatgtgtcggacatggcgggtgtgattaaaggttttttacatgaagccaccgagcgcgtggtctggggaagcgactggccgcacccgaatctcattagcgcaaataagaagttgccagatgacgcgttaattctttcaaatatttttcactgggcaagtaatgagcgggttcggcacaagttatttgtcgataacccggctgaactttacggatttaactcttcgtcttcctcataa

SEQ ID NO: 156386 - DNA, 1380 bp, Enterobacter cloacae
atgacaactcctgactctgcttcaacaaaaaagagacccactcactatcgttatatgattttgctgatggtgttcttaagtatcgcattaaaccatggcgatcgtgccaccttctccattgccggacccgatatggtcaaagccgctggcctggatattgtggcgctgggttatctgatctccacctttacctgggcgtacgtgcttgggcagtatccgggcggctggttactcgaccgttttggctctaaacgggtgctggtcaccggggtctttacctggtcactgtttgttttcctggtggggttcagcacctcatttgacaacgtctgggtcacccgcatcatgatcttcggctttatttttatgatggggttaattgaagcgccgacgcttccggccaactcgcgctttcttgctgcctggttcccggcgcgcgaacgcggtaaagcatccggttttaccacggcggcacagtacttcgcgctggtggtctttttacccctgatggggtggttctcttatcgcttcggctgggaatcggtgttctggtttatgggcgggctggggatcctggttgcactggttatgcaccgggtccttgccgacaccccgaaggtccatccgctggtaaacagcgaagagctggattacatccagtcgggcggggggctcaccaacctgaaggccaccaaaaagggcgacaccgagggcaagggctatacccgcaaactgttgaccaaccggctggcgctcggcgtctatatggggcagttcttctttaccgtactctcgtacttcttcctgacctggttcccggtttatctggttcacgatcgcggcatgactattctgaaagccgggttcgtcgcttctttacccgcgctgtgcggctgcgccggtgcgcttctggggggcgtattgtcggattacatgctctctcgcggctttagcctctctgcggcccgcaaaacgcccattgtgatcggtatgctgctggccgtcagcatggtgatctgtaactacgtggattctgcctggattgtcgtggcgatcatgtctctggccttcttcggtaaaggattcggcgcaatggggtggtgtgtggtttccgacttctcgccgaaagaggcggtcggcctaagcggcgggctgtttaatatgatcggtaatatttcggggatcttcacgccgattataattgcctacattattaaagacaccggctcatttaacggcgcgctgatcttcgttggcgtctgcgctttcctgaatttgtgctgttatttattcgtcgccggcaaaatccagcgcctgagtttcgataccgaacatcatgaccgtaaccgtcttccggaggagccccatgtcagccattga

SEQ ID NO: 156387 - DNA, 678 bp, Enterobacter cloacae
atgtcagccattgaacccctgcgttttgccattaatctgggtaatgccgtgcttgcaaaggaactgccggacggcagcccaggcgggatcacggtggaactggcgcataaaatcgccgcggagtggggcagaacggcgcagttcaaaacctatccgaccgccggaaaggtggtggacgacgcgcagaaggggctctgggatatcgcgtttctggcggtcgatccgcatcgagaagaggttctgcattttacccagccctatatccagatccagggaacggttctggttaacgacagcagcccgtggcaaagcgtatcgcagatggataaaaccggggtggtgatcaacgtcggtaaaggggcggcctacgatctccatctgacgcgccagctaaagaacgccaccctgaaccggcttagctcctctcaggttgctatcgatgcgtttctgaatggcgaaggggatatggcggcggggatccgtcagccgctggagcggacagccgcagagcacgcgggatatcgggtcctgcccgataattttggtcagataaaccaggctatctgcgttccccggggtaacgaacagtgctaccaggatctcgttgcgctcctgacccgctggcaggcggaaggcagcgtacagcagattattgaccgagaattagccgcagcgtga

SEQ ID NO: 156388 - DNA, 2649 bp, Enterobacter cloacae
atgacatcaaccctggctctcgaacgttctgacctggtgattcatcatcagcgctatcattttgtggatctcacccagctgctgcccctgccgcagttgcaggccctccctttcagcctgcgcgtgctgctggaaaacgtcgcgctgcgctccccggaggccctgccacaatttttgcagatgctgtccggggcggcggacaaaggcgaggttgagttctatcccgatcggctgatgttccacgacaccacctgcctgccagcactggctgatttcgcggcgatgcgcgatttaacaaccgagctgggcggcgatgccacggcgatcaatccgcgtattccggcggtactgactatcgatcactcggtgattgtcgaaagctatgcctccgcctctgcgctggaagataacctgcagtttgattttcgccgcaacgctgagcggtaccgctttatccgctgggccgaaaagagcctggataacttccgcgtgatcccgccgggcaccgggattattcatctgatgaaccttgaaaccattgccgaagtggtgacggtggataataccgcgcctgtgccgctcctgcatgcggattgcatgatcgccaccgatagccataccccgatgatcaacgccctgggcattctggggtggggcgtgggcgggctcgaagggcaggccgcgctggtgggggaacccgtcaccctgagcttccccgaggtgattggtatttcgctatcaggggcgctgtcacccgatgtcagcgacagcgacctggccctgcatatcacccgcttgctgcgcgaaacaggcgttgtcggtaagtttgtcgagtttaccggacctgcgttagccagcatgtccgttgaatcccgggccaccatcgccaacatggcaccagaatacggcgcgacggtggtgttctttccctttgacgaacgcagcgctgaatacgtggcgttaaccgggcgtagcgaagagaatcaggccctcatcagcgcctacatgcaggcgcagcatctgtggcggacggcggatgcaccgcagcctgaattcagccagcttattgcgctcgacctctcgaccattgagccgtgcatggccgggccggttaatccccatcaacagatcccgctgggtcaggcggccagcagcttcaccgacacgctcagtccgcaagtgcgggagcgccactggtcgcggtctgaataccctgaaccgatccgccagggcgcggtggctattgccgccattaccagctgtacgaccacggcgaatccctggcttatcattcaggcagctctctttgcccgcaatgccgccagacacgggctgcggcctaagccgtgggttaaaacctcgttctcgccgggctccagagcggtcaccgactacctcagtgcatcgggtttgctgagcgaaatggaaaaagtgggctttgacgtcaccggctacggttgcatgacctgcattggcagctcgggtgccctgcaaccagcaatggaggcgctggtcagcgaggggctacaggcggtatgcgtcctgtccggcaatcgtaatttcccccgtcgcgtgaacccttctctcgggcacggctatctcacctctccggcgctggtgattgcctgggcgattgccggacatatctctcatgacatggtgaacgacctgcttggcgttgacgaggcagggcggccacttaccatgcgcgatttaatgccgtcccgggaggaggtggaaatgtggctcggacggatcatgaaaccggagcactacatcaaacgccgggacattatctggcaggggaccccgcactggcagcagattgtggcccccggaagcgtgcattatccctgggaggcgacctccacctatctgcgccgtccgggttatcttgaacgtctgcctcgggatccggccgcaaccctgaccctctctggcgcgcatcccttcctgtggttaggcgatgatgtcaccaccgaccacatctcgccggccggggcgatcccgctcgcaagcctggcggggcaatggctggttgagcatcatgaaaatccgcaggatctgaacctttactccacgcggcgcagtaaccacgaagtaatggttcgcggcgcgttcaccaataccgcgctggtcaaccgtttgcttccgcaggcgcagcgcagcggcggcggcaaggcctgggatgcgcagcatcagcagatcctgccggcgtatgaagcggcgcaaagctggctgcagcgtgaaacccccctggtgatcttcgccggtgagcggtatggcgcaggctccagccgggactgggccgctaaagcccaggcgctgctgggggttaaggcggtggtggcgcacagttttgaacgtatccaccgcactaaccttatcgggatggggattttgccgttacatatctcgcctgaagaggcggcgcgtttaccagaaatggacgggcgcgaggagattaacgttgacgggctggatcatttgcagacgggctgcacacccctgacgatgcagatccgacgcggcacatcgctgctgggcgaattcatgcttacgctgaccctcgattcgcagcaggagctgcgctatctccggcacggtgggattctgccttacgtcattcagcaaacactgaagcattaa

SEQ ID NO: 156389 - DNA, 924 bp, Enterobacter cloacae
atgcgttttgatctggtctctttatctctttttgtggcggtcgcggagacgcaaaatctcacccatgcggcccgcagaaaacataccgcggtatctgcggtcagcaaacgtatcgccgagctggagcagcaggtgggtacgcagctgatgctgcgtatgccgaggggcataaccctgaccccggcaggtcattccctgctctatcatgcccgccaggtgttccgcaatctggagaagatggaagaggagctcagcgattatgccgcaggcatccggggacacatccgtatttacaccatctccgcggcgctgatgaatcacctgccgcgggtggtgagcgactatctttcgcattacccgcagaccgacattgaaattgaagaacagaccgggatgagcgttgtgcaggggttactggctggcgaggccgatgtcggcttcttctccagctggaccccgtcggcagggattgagtactggccctggcagcacgatctcctctcggtgctggtgtggccctctcaccccctggcggcgcgcagcgagttaacttttgccgatattgtgaatgaaaaactgatcggctcgcaccgcaacagcgccgtgagccatatccttgaacgccaggcgcgcgccctggggaaaaaccttagcgtggggctgcgcgtgagcagctttagtgcgatggccgagctggtggcgcagcagctggggattgcggtgctgccggtgaatgaggtggcatcctcaaccctgcacagcggcgtccgcgttattccgttagcggagccctgggcgagacgggagctgcttgtcggcgtgcgggattacgggcaggcttcgccgtcggtgaaaacgctaattggcagcctgctcccggcggagcaggctgtgcaacccgaaggagaggcagagcgacgctga

SEQ ID NO: 156390 - DNA, 1092 bp, Enterobacter cloacae
atgacaacctatgcttacgttggctgccggacctcggcatggcgcggtgcgcgcggtaaggggattagcgtctatcggattgccgattccggaaattgggaactgttacaatgcatcgcctccgtgcaggacaaccccgcctggctgacgctcgatcccgggcgtaaccggctctacgttctgcacggcgatggcgaccgcgtggcggtattcaatcgagatcccgacaccggcctgctgagcctttatcaccatcaaaccaccggcccacgtcacagcaacccggacctcgatcccgcccgtagaaataatccggttggcgcctcgctgacgcctgacgggaacaccctgctgatcgccaatcatgagggcggcaacattgctgccctgcctgtcagcgacgagggtctggagccgccagtgcactttgcgcctatcgaaggccataccgccgcccatgccacactgtcgcgcccgcatgaagtcgtttttgcgcccggcagtccgctgtttgccgtgccggttcagggccgaaaggctggcaacggcatcgatatgatccgtctgtaccactgggaggagacccgctcatgcctggccgatgaggtgcagctcccggaaggcagctggccgcgtcacgtcgattttcaccccagcggaaaatggctgtatggcatcagcgagctgagcagcaccgtcacggtttatcatctcgaccgggaaaaggggacgttctcactcacacaaaccctcagcgcgctgccggcaggctatacgagccggagcgatgccagtgaaatcgaggtgcacccgtccgggcgatttgtctatgccgccaaccggggccatgactccatcgccgtgttcagcatcaatcaacaggatggctcactgacgcccactggatgggtgccctgcggcgggaaaacgccccgcttcaccaccctttcacccgatggctcacgcttcttcagcgcgaatgaagactccgacaccattcaggtgttcgacgtcgacagcgaaaccggtatgctttccgcgacagaaatcgtcattgcaacggccagcccaacctgcatctgctttgcctga

SEQ ID NO: 156391 - DNA, 744 bp, Enterobacter cloacae
atgacccaacgtatcgcgtatgtcacatctggaatgggtagtctcggtacggcaatatgtcgtcggttagcgcaggatggctttattgtcgttgccggttgcggtcctgattccaaaagaaaggacgcctggctggaagataacaagaagttaggttttgattttatcgcctctgagggaaacgttgcagactggaattcaacggtaaatgcctttgaaaaaattcgtgccgaggtcggcgaggtggatgtgctgattaataattccgggaccgcgcgtaatgtcttattccgcgatatgcagcctcaggagtggcaggccgttatcgataccaacatgaactccttatttaacgtaacgcgtcaggtggtggatagcatgatggcgcgcggctgggggcgcattattaatatctcctccctgaatgcgcagattggcaccgtcgggcaggttaactactccaccgcaaaatatgccgtgcgtggctttacccgcgccctggcgcgtgaggtttcggcgcgtggcgtcacggttaataccgtctctcccggctatctggccaccagcaaactgaagacggtcactcccgttcaggtcatcgataaaatcgttcaggaaattccggtccggcgtctgggatcgccaaaagaaattgcctctatttgtgcctggctggcttccgatgaagcgggttatgccaccggggcgaacttctccgtcaacggcggtatgcacatgagttaa

SEQ ID NO: 156392 - DNA, 1338 bp, Enterobacter cloacae
atgctctcgttcctgggttacggcatgattgtggtctttatgatcctcatcatgaccaaaaaattatccgcgctgaccgccctgactattattcccatcctgtttgcactgattgctggcttcggtggcgagatgggcgaaatgatgattgagggattaaagaaggtcgcgcctaccgcgattatggtaattttcgccattctttatttttgtaccatgttcgataccggattattcgacccgataatacggttcttcttacgtattattgatggcgatccggttaaggcggtgatgtgtaccgcgctgctggcggcgatggtctccctcgacggggacggttcaaccacctacatgatctgcgttacggcgatgcttcctctgtttaaacgtattcgtcttgacccgcttgctctgacctgtgtggtcttcctctccgggagcgtcaccaacctgcttccctggggcggcccgctggcgcgcgtatcggcatcgttaaaggtggagtcgagtgagctatttataccgctgattccctcgatgatctgcgggctggtaggggtgctggcgctctcctggtatattggcattcgtgaacgccgtcgtttaggtaaactgagtatccagaccaatgcacatggcgcggtcatcgaagaagatgccgaaagctatctgcctgccatcaatgaagtgaatgacgagctgcgtcggccaaaaatgttctggtttaatgccgccttaacgcttgcgctgatggcctcgctggtgatggaactgcttccactgtccgtgctgttcatggtggcgtttgccatcgcactgttgattaactacccgcatctggatgcgcagcgtcagcgtattgctgctcatgcccccgccgcgctgaaccagacctcgattttcctcgcggccgggatcttcgcaggtattttgtcagggacggggatggttaacgcaatgtccaacacgctgctggacattctgccgcagtcctgggggccttatctcgcaccgattaccgcgctgatcagccttccgggcaccttttttatgtccaacgacgctttctattatggcgtgctgccggttctggctgaggcggcaaaagcctacggcattgatccggttgagattgggcgggcatcactggtggggcagccggtgcacctgttaagcccgctggtggcttccacctatctgctggtggggctggcaggggtcgagttcagcgaccatcaaaaatacaccttcaagtgggcgttcctgctgtgcatgatattcctgggctcgggattattgctggggctttatccgctctattcggtcgccagttaa

SEQ ID NO: 156393 - DNA, 894 bp, Enterobacter cloacae
atgaagattagtgcactaactgaaagaatctctcagaaaattatggggttaattaataatggtgatattgctccaggttcacatttaagtgtaccgaagctggccgaaatctttgatgtctcccgttcccccgtacgcgaagcattagtttatcttgaacaaaaagatgttttgttacagaagcaaaaccgcggtttttttgttaaggatgactacatccctcatgctgataccaagcaagagctgtcagaagaactcgacttgcctgagtattatcaactggctgaggattggctgcaggataaaatcgaatctgaagtaaccgagctttttctgatgaaacgctacaacctcaccaaaagccagttgtctacagtgctcgccagaggcattagtgaaggatgggttgaacgtaagcaaggttacggctggcgctttctaccggtggcaaaaaccaagaccgcactggagcagattttcagcttccgtatggtcatagaacctatggccatcctggaacccacgttcaatgctcctcaggaaaaaatcaacgatatacgacgcgaactggaaatgctgctggagagcggaattgagcgcctcacccctacccagctacagctggcaggctatcgctttcacgaaacgattatcgctttttcgaataatccgttttttgaaatctcgctgcgcaatgtcaaccgcatgcgccggctgatggactatcggatcatggatgaccgtaaccgttactacgctgaggtaaaagatcatatgcggatcctcgccctgattgaatccgggcagcgcattgaggcgtcctataccatgaagcagcacctgtccgtcgccctcgataataaaaaaatgcgccgaatcagcgcggaaagttaa

SEQ ID NO: 156394 - DNA, 144 bp, Enterobacter cloacae
atgagccgtcgcggtaactgtcatgccaacgcggttgctgaaggctttttccagctacggaagcgtaaacggataaagaaaaatatctacggaacgagagacgaagccagaagcgatatttttgattacatcgaaatgttttag

SEQ ID NO: 156395 - DNA, 168 bp, Enterobacter cloacae
atgaaaaaagatagctatgcctttttaattccactcatcgttggcgggttagcgttgatatttggctttgttgtctggtcaatcgagatttatcgcgtgacatttcttacggccctggggaacagtatcttgctgctgtcacattgctgctgccgctggtggcgatag

SEQ ID NO: 156396 - DNA, 858 bp, Enterobacter cloacae
ttgagcgataccctgggcgtgctggacgacaaactgctgtttaccgcaggcgcacgccatcagaaagtggtgattcgcgggtacaacaaaattaccggtgcggaaaacgacgcggacggttttgacggtagccgctggatgccaacctacggcgtggtctataagccgtgggaggaaatttccctctacgccaaccacaccgaggcgttacagcccggtgaaactgcgcctcgctcagcaaacaactacggccagagcaccggtatcgtgcactctaagcagaacgaagtgggtgtaaaggcggactttggccgcgtgggcggctccctggcactgtttgagatcaaaatgccgtcggccatcctcgacgacagcggccactacggcctggacgctgaacagcgtaaccgtggcgtggagctgaacgttttcggcgagccaatgcttgggatgcgtctgaacgccagcgccacctggcttcaggccgagctgaccaaaactaaaaacggcgtgaaccaggggaacgacgcgatcggtattccaagcttctacgccgtgctgggcgcagaatacgatatcaagccgattgagggtctgacggcgaccgcgcgcgttaaccactccggcacgcagtatgctgacctggcgaataccaaaaagctggacagctacaccacgctggatctgggcatgcgctatcgcttcgcggtgaaccacaatgaaaaccagatgaccgtgcgcgcaggcatcgacaacgtgaccaacgagaactactggtcaagcgtggatgattccggtacttacatcactcagggcgagccgcgtacctttaaggtctcggttggctacgagttctaa

SEQ ID NO: 156397 - DNA, 264 bp, Enterobacter cloacae
atgcagcaaaatgccgttgatcgcctggattttcaccgggcgggcaaagacggtcatgccgcgcatgatgagggaatcgcagaccttattgttttcatccagcgcaacagcgacgacaacccgcggtttaaagcgtccaccggaacgcccgacgcccacacggcctttctggcacagggcgtcaaaggcgcggttaaactgatggatttgccagccgccaaacgccatctggcagatctaggcgagggcggcgaaggtgattaa

SEQ ID NO: 156398 - DNA, 156 bp, Enterobacter cloacae
atgcacgatgaaatcattaatcaggcccgcgaaatcctccctcagcggctcaaccataccgacacattggcatcacagcaggacaccgcgtactatctggccctacagtggagcgcaatgctgctattatctattcccctatccacgacaccctga

SEQ ID NO: 156399 - DNA, 432 bp, Enterobacter cloacae
atgggaaattacttttatagtgcaaagaaaaacgcgttttaccctgtgtctctggaggatgcctatcgcgatgcaaactcctggcctgaggatggcgtagaggttgatgattccgtttatcttgaatactcagcaacgccgcctgagggtaaggtcagggtggcaaaaaacggaatgccgtcgtgggctgatattccaccgccaactcatgaagaacttgttgcctctgccaatactgaaaaacaaaagaggattgaccaggctaacgacaatatgaacggtaagcagtggcccgggaaggcggcaatggggcgactgaaagattcagagaaggaacagtataacgcgtggcttgattatctggatgaactggaagcggttgatacttctaccgctcctgatatcaaatggcctacgccaccagcggcttag

SEQ ID NO: 156400 - DNA, 915 bp, Enterobacter cloacae
atggcaacaaataactttaaagcgttcgcacttgatcctaacgctaacgtcacatcacaggctgactgggaggcccttcccgctctgctctctgggttcacggcgggcaaagcatccagtgcacaggtaaacaaagcaattcgtcaggctagttttatcgctgccgcgattgctcagtatgtggtaaacaaaacgaatcaggatgtcctggataacgggaatattaacggttttattaatcaattcatcgctgcgcttgcagaaagccccaattttaccggcgtgccaacagtaccagatactcatacaggtaattatggtgagcaagctgcaaacacaaaatttgttcgtgatgtagtgaatgaacttattgataatgctcctgacggactgaatacattaagagaactggcagcagcaattaataatgacccttcattttattcatctgttaataatgccctctcagggaaattagccaaaagccagaacggtgctgatatacctgatgcagcaacattcagagcgaatatcggtgtgaagtctgcgggtgtgcgcgatgtaggaaccggggcgaatcagatacctgatatgtcatcgtttgggctatccacatccgtaaacggatggtgcaagctacccaacggtctaattattcaatggggaaaggcgggaccacttacaccatcaatgccggataactccgtcaacttcaatattacatttccaaatgcatgtctgtttattacggagcatgaccagggcacagcccctataatgagcatgatccaattgggatatataaccacaacaggtttttcggcatacaaccttgggcaactaaaccggaatatcccttctggtttgcaaccagtctcattaatctacgtacaatggttcgcaataggatattga

SEQ ID NO: 156401 - DNA, 474 bp, Enterobacter cloacae
atggcagcattaccaacaatggctaaggttatgattattcaatcattagcttgctatgaacccccttccagaatcgtcgaacttgtaaaacaagattttggcatcgttgttacccggcaacagatatcggcctacaaccccgaaaatacaatggctaaaaatcttagccaaaaatgggttgatctttttaatcacactcgcgcccgcttccagagtgaaatatcagatatccctatcgccaacaaagcgtatcggctgcgtatgctcgatcgcatggcgaaccgtgcagagtcaatcaaaaactacgcattaacagcgcagcttatcgaacaggctgcgaaagagtgcggggacgcttacaccaacaaattaagggttgaaacaacgggtaaagatggcggtccgatcagaacggaaacaacgaacctaactgccgaagaagccggggaggtataccgcaaatttatgggataa

SEQ ID NO: 156402 - DNA, 162 bp, Enterobacter cloacae
atgagcaatatcgaagtgatcaagccagaaggtgagcagtcacagcctcgcacctggcaggaagatatcgaatcccacaacgcagattacagcaggccagaagataaacggctttcgagtgaggcgagactcgttgaacgcgccgggcatcaaacgaactga

SEQ ID NO: 156403 - DNA, 672 bp, Enterobacter cloacae
atggcgcagttaagacctgtagacgatacagaaatctttgatttaaattatgagcgagccaagtctggccttcgtgtatcactgcctggcacgattaaatcctttgatcctgaaagtgtaacatgtgaggtggagctttctacgtttggcctgagtgctacggccaagcgcggctctacgtcagtagatagaattaagagtgaggatggttactatcctgtcattcaagatataccggtagtattcccacgcggtggtggctgtactctgacgtttcccgttaaagctggcgacgaatgtctggtgattttttccgaccgttgcatagatttctggtggcagaacggtgagacacaaaacacgtcgcgagcaagatcacactccttctctgatgcgttcgttattcctggcccacagtcacaggcgaagaaaatttccaatatcagcaccagcgccgcgcaactgcgcaccgatgatggtgctgcgttcgttgaggtggacgctggtggagccgtaaccatcaccagtccacaaatcacgttaaacggtccggtacaggtaaacggggcgataacgtctacaggcgatcagactgctaacggtatcagccagattaaccacacccacggcggcgtagagtccggtggaagcaatacaggtaaaccacaatga

SEQ ID NO: 156404 - DNA, 162 bp, Enterobacter cloacae
atgacccttatgccagcgcgtgacggaaatatgtacggctttgaatatattcgcccagatggagatagtaaacgccgttggcttaatgtcgaacttattcgcacgaacatggatcagccgcgcattattggttctttcgattgcaagaacacagcggggtaa

SEQ ID NO: 156405 - DNA, 1077 bp, Enterobacter cloacae
atgtcaacaaactggatgcgtcatttcgaattgcagcttattgatgataaggggcagggcattgtcctgagcgacttcaaagttacttttagtatacagcgtaacgataaccgttggcctgctacggctgatgtgaaaatttataatctttcgactgaaacacaaaataaaatcctgaatcaggagtttagccgtatcgttattattgccggttatgacgggcttgacgtcagtcagagcgatattgtgccagccagtgaagtaggcaaggttcgttatatcgatgataactctgacgggcgcaatgacgattcaaactatggcgttatttttagcggcgatattacattttccgtgaccgggaaggagaatatcaccgattcctacatcatcattgtcgccaacgatggggaaaaggcgttcagggaagcgatcattagtgccagcctaaaaaaaggttataccctgcgcgatgaatatgacatgttgatgcgttaccttgagccatacggcatcaaaaaaggtattgagcctgttttccctgatacggtttatccgcgcggagcttcctattatgggaaagttgctgattacctctctgatcttgccgccgatctcaatgctacatggcaattcagctatgggaaaatcgattttatccaggaagaatatgccagaaaggcggtggtggttctcaatgctgatacagggctggtgggtatgccgcagcagactatcggcgctggcgttaatgtcacctgctttatcaactcaaaaattcagttgcatagtcttattcaactggatcaggcgtcggtgtaccgtgcgcaactgagtaacgagcaggtgttacaatccgggggcatccgtgagcaggagataaacggcaatctggtgacaaccggccttgcacagaaagaggcacccgccagcattgcgacggatggcgtatacatcgtgcgctatatcagctacagcggcgatactcgcggtcagaattggtatatggatatggcttgcgaggcgcgtggtgcgcaggatggcatttcagattccacagttaataaatggttatga

SEQ ID NO: 156406 - DNA, 306 bp, Enterobacter cloacae
atgcagattaatgaaattccactaactggcggcaatcagaagttccgtattgacctggacggcacgacttacacactgcgtacaacatggcgtgatgttgctggttggatcatggacgtaatggacgctgacggagagccaattcttatgggtgtccccgttatccccggcgttaacttgctggagcaatacccgcaccttggtatcaatggtgccatgttgctgatcggcgcaaaagatgccccggagtacccgggcgcaaatacgctgggtagccagcatcgtttaactttcattcaggaatag

SEQ ID NO: 156407 - DNA, 645 bp, Enterobacter cloacae
atggatattctttcgacgctgtttaagttgtcaaagcgacagatcgggataatggttcccgatgttgtcgtatcggaaaaacacagcgattcactggagattaccgaacaccctgtagagcgcccaacggaatcgggtgccggggtggttgctgatcacgcctacaagcgcccgtgtgaagtcacaatggaatgtggcttcgctggtggcggttctctactcgatgcctttgatacccgaaccatagggttttccaccccgttaaactcgatgtctccgcgcgacgtttacgctgcgtttctcgatatgcagcaaaagcgagagctgttaagcgtgactaccggaaagcgcatttataaaaacatgctgatcagaggcattgaggtgacgacagacaaggcgactgaaaacgtcttgtcgataaccttaacgttgcgagagatcattctcacatcaacccaaaaaatacaggtagcggccaaagcggatatggcgctgggagaaaataccgccgcatcgaaaaacgccggcactaagtcgctaaccccccctgatacttctctggccgcgagcattaataattttctttctggcgttcccggtgatgcccttagcgcaattggcatcccgctcgctaaaccataa

SEQ ID NO: 156408 - DNA, 288 bp, Enterobacter cloacae
atgagcatttacaacgattttgtacgagtccacttcccagatcttgaccaaggcgaactccagcaactgtcctcgcgtgccgaatgcgccgcagaaggtatccttaccggggttgccgccgttggtaagatgatgttctacgccggtgataaaggctacgcgccggacaaaaaagattttcaggatattggcggaatgttgatggagttaatgccgctggttcgcgcgttatctgataccgctggaaatgcagacttctgtagacgccgtttagagaagggaaaataa

SEQ ID NO: 156409 - DNA, 246 bp, Enterobacter cloacae
atgagcacaaaaatcacagtcattgaagcggaagtgattccaacagttaccgacgctgccatagcagttcgctatgccaatgaattgcttgagttgtggatgcttcaccttgataagccgctgcgggatgccaatccgcgagctggtgcacggttcaagacactgattagcgaattgagacacgcaaccataaggacagagcaccggtttaatcgtcttgttaatgagaaggaggggaaagcatga

SEQ ID NO: 156410 - DNA, 270 bp, Enterobacter cloacae
atggctagatccgcacaccctaaattcacctggctttttctcgccacacccaaagataacgcctgcacgccgattgtattgcgcactcaggccgataccgaagaatccgcacgtaacactttcctaggctgggatctgacctttgccgccaaaattcgtacagaaacgccgtttgcgcacacctggtcagatatggacggattggcgttatggagtgttatggctggcgttgtcgatactgatagcagtgcgggggtgagcaatgtttaa

SEQ ID NO: 156411 - DNA, 282 bp, Enterobacter cloacae
atgcccgctgttgagttgatgaaccgccgtatccagatagctgataacgctttcgcctcgatccgcattctggaagtagacccggcaattttaggtagccagcaccaatacaagtacagcctggcctacatcgtagatggcgagtgcgtcatgcgttacgacaacgaacgtggcaaaggcgaccacaaacacatccatgatcgggaatatccggtgacattcaccaccattgagaacctgatcgccagctttcaggctgacataaacctgttgaggaggtaa

SEQ ID NO: 156412 - DNA, 360 bp, Enterobacter cloacae
atgcgagtgctgaccgtcagagtgatgaccgttgatgatgctttccgggtggccatgtccgacgcctcccgcgcaatgaacggggatttcatcggttccgaactgattttccccactgtagaacaactggctaaaacgatgcttgcccctaaccgctggcagatcatcaaagcgatggagggagcgcaagccgtctcaatccgcgagctatcacgcattgttaaccgtgattttcgcggtgtttataacgatgttcagtcactgcttaacggcggcgttctggacaaagacggcgaaaaaatcgtactgccttatgacagaattcacattgaattcaattcagatgatgcggcagcgtaa

SEQ ID NO: 156413 - DNA, 213 bp, Enterobacter cloacae
atgtctataagtggcggtgatattctgttaaaaggtgaagtgaaagcgcgtttgcgttatcgctcagactcgtcattctacgagttcctaaaagacgagaaaaacggctttccaatgccttttaaagtcggtgggcgtaactgctggtatgaagatgaagttgacgcctggataagtagacaaagcgagaagcgcgggatctgcacatcatga

SEQ ID NO: 156414 - DNA, 1230 bp, Enterobacter cloacae
atgattgttaggccactaactagcgtcgaagtgaaaagcgcgaaggcacagggcaaggatttcagtttgcacgatggtttcggtttgttgctttacatcacaagccggggcggtaagtcatggcgttttcggtatgtacacccggtaacgaagaagagacaaacctataccattggacgatacccggagtttactttgtccgaagctagggaggaacgttcgaaactgcgccgtatggtagcgcgagggatagatccgaacgaagtcaaaaaagatgccaggaatgaacagcgtaaaatgtacgcgcagtcatttcaggccgttgccgatgaatggctaaaaatcaagatcaaagaaggtgcgaggagcaacacgcttgaatcgcacaatgtgacgttgaagcatctttccacgatttttaggcataccacggtacataaaataaacgcagccgatactattcaggcttttaaacctttcagggaaaggccgtcaacgcttacgaaaatggttattaccattaacgccataatggattatgcggtaaatattggggttatcgagcacaacccgctatcgaaaattggtaaagcattcccggctgaaaaaaacgaaccaagagcgactttacagaaagagcggttgacagaatttttaagcgcatggaacgagttgagcttatgggagccgtcgaaactggctttattatttcagatcataacgatggtcagacctacggaggctggcggcgctctctggaatgagattgatttcgataattcagtctggcaaatccctgcaagccggatgaaaggaaagcgcccccacgtagtaccattatcgagccaggctataaacgtgcttaaagaggccgagaagtggaagcgctgcgattatgttttcccctcatggagaaaagaaaataagccgatctcacgatgtgctactcaggccggaatacataaaacagcgtttaaagggcagatagttcctcatggattcagggcgttggcctcgaccgttttgaacgatgaagggtttaatcctgacgtgattgaggctgccctcgcccataaaagtgcggatgcgattcgaaatgtttataaccgtagcgactatctggaaaaacgccgggttttaatgcaatggtggggagactttatcgaggccgcagaacgtggcgaaatactggagacaagcggcgataaggggttaaggctggtggtataa

SEQ ID NO: 156415 - DNA, 774 bp, Enterobacter cloacae
gtgcgtaaactgcgccggtccaaaggatggcaaatcaagcgctgctggcgttacgccgaactggcggcgcatggcatcgaatatcgaaccgcgccgcagatcatccggaccgtaaaatattcgcttcgtctggcgtggcgatggcggcggataaaactttgcggagctgcgaaactcatttttacgctgcgttctgagcgtggtatcacttcggactgctttaactggcaggtcttcgtaaagttccggccatgccgtcttaatgaatgtcccagcgggcagttgtttgacgaaagcgcgctggtaaatggtgtctcccattcccaacatgccatcgatgtaaatcggaggattcagcatgtaacctcgctgatcgccgcttcaagaggtaagcgacgaaagcaattaagcgccgtccggcggctgctgttgatgatattgacgcttccacgcagctgcgccgcaactctggcaaattctccatgccagcgctttacgttcgctgctgtcgggttatcgagggctgtatggtcgccgtgccagtggctaccgtttgatattgagcaatcgaagccgagcaggatgatgcgcatggcaccgagccagtgcgcgaacaggatcgctctctgccccgaattgaatgtgccgctggtatctgtcgggaagaggttcacaccgtatcgggtgtgtgctctctggttacatgaccagcgttcggggccatcgggcagcgcgggaatgttcacatcccaccagcgcagatcgccagcgtaa

SEQ ID NO: 156416 - DNA, 252 bp, Enterobacter cloacae
gtgaacgacattcagcgttacagaatgggatatttcggctggcttaaaaacgctttcgccatggccaggactgcgattggcgacatggtatcaatagtgttctcgtttgaaatggcgtgcgcattgctgtggattgttatcatcctgacctttccagtatcaatgcccattgtcgccttggtacagatgatttataccagacgaaaattgcgcaagcggtatgggcatgacgagctgatgagggacgactga

SEQ ID NO: 156417 - DNA, 501 bp, Enterobacter cloacae
atgaacagaatcaccgaaggtaaaaaatactgctatcgctaccacgacgggaacgacagcgaaggctgcccaatagtcaccatgcataagcgagtcattatccgcgagacagataaaaccttctggcatgtagaagattttccgcacatgaaccttgagcaacttattaactactggactggcggacgcaaggaagatcggaagaaatacatcaaacgctgttctaagggcgctgaccgttctcggtatcactacacgaaagaagaggcgatgaaagcgtttatctaccgcaaaaaatatcagttgtctcgaattcagctaacggcagaaaccgtaagtttatgcctaaaagggcttaaagatgccggatttgttacctacaccaccgatcagtatggatttcagcaacgatctatcgctggggttcctgatggtgattatttcctggctgcccaagagccggggccaatagcgtcaacgtatagctggggggaatactga

SEQ ID NO: 156418 - DNA, 483 bp, Enterobacter cloacae
atgaccgaacaaaccattctcgatatgtgctgcggatctcgcatgttttggttcgataagcaggacgagcgcgctgtattcagcgatattcgcgccgaacagcacaccctctgcgacggtcgcagtctcgttatcagcccggacgtaatcgccgatttccgcgcgcttccgttctctgacgcctctttccctgtagtggtctttgacccgccgcatcttgagcgcgtaggtgaaaacgcctggatgggtaaaaagtacggaaaactaaaccgtgaaacgtggcgtgatgacctgcgcgccgggttctatgaggcgtttcgcgtattgcggccacatggcgtactcatcttcaagtggaacgaaacccagataccggttcgccagattctggaactcacagacgagaagccagctatctggcaacgcactggcaaagccgacaaaacgcactgggttattttcgtgaaagggggagcagtatga

SEQ ID NO: 156419 - DNA, 264 bp, Enterobacter cloacae
atgaaaacattgaacgcccgccatcaaaaaacattgcagttgattttctccatgccaacgcccagttctctggaatggcgcaagattgaagcgctttttatcgcattaggcgcgaaggcctcagaagggaacggctcaagggtaagatttgaaatcaatggggttgtggcctcgtttcatcgtcctcatccggataaagaagcgaaggtttatcaggttcgcgacgcaatggcttttctcatcgcaacaggggtttctccatga

SEQ ID NO: 156420 - DNA, 372 bp, Enterobacter cloacae
gtgacggtcgtgcagcttgccaccgcgtcgctggtggcgttcgcgacgatggtgccggcaggggagtccgtcccgccgatgtctaccgggcttatcgtcgtggcgctggggctgggcttttttagcgccattattcaggtcaccatgaactgggcgcagcgcagcgtatctccgacacgggcgacggtcatctataccggtgaaccggtgtgggcgggtattttcgggcgactcgccggggagcgtctgccgctgctggcgctggtgggcgcggcgtttattgtcgccggggtgctggtgagcgagttaaagttaaaaaaacgacgtaagtcgattgccgggttgggcactgaacaaggggcagatagctaa

SEQ ID NO: 156421 - DNA, 699 bp, Enterobacter cloacae
gtgctggaggatgccgatatcgaacaggcggtgcgtgggatctgctacggcattttcagctcggcggggcaggcgtgcatcgccggatcgcggctgtttatccacgagagtatttacgccccgctgatggcgaggctgctggaattaactcgcgggctgcgcgtcgggcatccgtttaccgacggcgtgcatgtaggaccgctgatcggcgagaaacatcgccagagcgtgatcgagtacgtcgaacttgcgaagcgggaagggggccgcgtgctgtgcggcggcgagatccccgccgatcccgctctggcaaacggcagcttcttccagccaaccattatcgaagggctacacaacagcgcccgcgcatgtcaggaagagatcttcggcccggtgctggtggcgatgccgtttggcgatgaagcggcgcttattcgcgaggcgaacgactcggtttacggcctggcggcggggatctggacgcgcgataccgggcgcgccctgcgtctcagcgagcagctggagacaggcacggtgtggatcaacacctacaaagtttttgcgatttcgaccccgttcgggggctttaaagagagcggtctgggccgcgagaagggtatccaggggctgaaagcctggatgcaacaaaagagcatttatctggcgacgggtaacagcgtcaaccactggtgcgactga

SEQ ID NO: 156422 - DNA, 231 bp, Enterobacter cloacae
atgcgaagtaccattaaccctaatctggtgaaattactgtacaaaatcacacgcgtaatgctagtgaaataccacctgttttatgctaaaaacaagctttacattcagcaaaaaagcaaaccatgcggatgggatgacttatggaaaaagaaaaaatcggtgcatttcctgcaaaaagattttttgtggacatgctcacaagggatattgagctacaagatgcgattttag

SEQ ID NO: 156423 - DNA, 618 bp, Enterobacter cloacae
atgacaatgcaatctggaatttttaaacaatatgacccattagagaaatgggggaaatataccccggcgaaagtggctaaacttacaccggaggagctcgaattatattatgttgccaaatcacctgtaatgaatgttgtttttctgaaagatgaaaatggcaatgactggtatcagtggcttaagacactttcaaaagaaacgttgaaagtctctttcaatcctgactcgaaagaaatcattcatttttcatatgatgcgagcacgatttttccggttaatcagactgttgtggaaatcgcgcctgagaatgtaccggatgattttaccgctgcgggagaaaaagcattaggcggcgcgtttctttttgttgatggcgaaattactgccgcgccggtggattatgaggcagaggcacaacgcaaaaaactggagctgctggctcaggcaaataacgtcatcgccacgctgcaggatgcggtagagctgaacatggcgacagacgaagaaacagcaaatttgcaggggtggaaaaagtaccgcgtgcttctgagtcgggtcgatgttaaaaaaccggtctggccgccattgcctgagactgcgattttagtcagttag

SEQ ID NO: 156424 - DNA, 507 bp, Enterobacter cloacae
atgtccacacgtcgtccacacatcgaaaaaagccctgccttgtgcggggctttactttttgtttcatacggtgccagaataagactcaaacatatgtttaataaggaaattacattgaaattctataaagcagcagcttttttaactcttgccctaacgtcctacaccgcacaggcaaatgatatctctgtaatgaaaaaatctctcaagccgtggcagccgattgaagtttcgaaaagtggcgacatacttacggtggtactaaacgagaatcggatcacccctgacgtttacgatgctgtcatcagctcgggtgcttgcatggatatttggaccaaagacgtcccagcaaaatatcttaaatcgacaaaggagctgcatatcctcaacaagcataaagctcagggatatgttttggagcagccgctaaacacttgtaatgaaatgggaaaagagcaacccgaaagagcaaaagtgattatgctttctcatacacaccttttctga

SEQ ID NO: 156425 - DNA, 294 bp, Enterobacter cloacae
atgctgattgaacagttcctgacccggccgctcactaccgccgggcttgcgcgagaagtggcattgagtgaacgccagctcaaccgtctgttccacgcagaattcggcaaaacggcccgcgaatttatccgcagcgccagactgcgctatgcttgctggctgctgaagaactcgcagcaaagcgtgacggatattgcgcagcggatgggattcagcgactgcgcgcactttattcgtcattttcagacggagtatggttgtacgcctggggtgtggcgcacgtcgcagaattaa

SEQ ID NO: 156426 - DNA, 225 bp, Enterobacter cloacae
atgaaaattgaattgattattagcgcatataaaacaaatagttataaaaccaattcagactccgccagcccaccaaataatgatccggatatgtccggtgaagtacagaaagcccgcactgcgcaagctctgcgtgcttttttgtatctatcccttctcgcccagcgccccctcacacgccagcgccagcaccatcagtgccgcctcatcctcctgcaccgataa

SEQ ID NO: 156427 - DNA, 330 bp, Enterobacter cloacae
atgcaaaccatatcatcacacccgacacgggcgactcagccctgcctgtcacctgttgaaatctggcagcggctgctaacttatctgttattgcagcactatggcctgacactgaatgacacaccattcagcaatgcctccaccatccaggaacatattgatgctggaatatcgctcagtgatgcagtgaactttctggtagaaaaatacgggcttgtccgtatcgatcggaaaggattttcgtgggaagaacaaaccccgtatctttccgtagtggatattttgcgagcaagacgctctaccggcttgctaaaaactgacgtgaaataa

SEQ ID NO: 156428 - DNA, 366 bp, Enterobacter cloacae
atgaacaatcactcagaatccggtactaagccggagagtcccgcccgccagttgtggggactgaagcgcgatataacaccttgttttggggctcgtctggttcaggaaagcaaccgactgcactatctggctgaccgagcagaatttagcggggcgttcaccgatgatgttgaaatgcgccttgaccaggcatttccgctcatgatgaaacaacttgagctgatgctgaccagtggagaacttaaccctcgccaccaacactgcgttacgctataccacaacggcctcatctgcgaagccgacacactcggctcctgtggctatgtctacattgctatctatcctgagcagactgagccgcaataa

SEQ ID NO: 156429 - DNA, 222 bp, Enterobacter cloacae
atgaaaaccatcagtaaacgccaggccatggccttgtaccgacagcatccagactcccggctgtttcgcttctgtaccggcaaatataaatggacaggcagtatatgccattatgctggccgggaagttcagtacatacgcggcattctggccgtgtttgctgaacgttgtcaggaccgccatggtccctatgtcattcttcgaagtgtcactctcaattaa

SEQ ID NO: 156430 - DNA, 543 bp, Enterobacter cloacae
atgagtaccgcaatatccccactgttatcgcagcctgaactcttgccggtgtcggtcatggctcagcatggctgtttactccctacgacttccggactgacaccatacgcccagcggaccattcgccgcgctatcaacctgctggataaatatctgcgtcagcccggtatagcctttacctcaagtactgctgcccgtgactggctccggttacagctggccagacaggagcgggaagtgtttatggtgctctatctcgataatcagcatcgtttactggagagtgaaacgctgtttgccggttcggtaaaccatgtgcaggttcattcccgtgaggtggtgaagtcggcgcttcgtttcaatgctgcagctgtcgtgctggcgcataaccatccctccggcgatccggagcccagcaaagccgatcgccagttgacggacaggctaaaggaggtgctgggactagtcgatgtgaagacgctcgatcacctggttgtcggcctggatggcattgtgtcgtttgcagaacgaggctggatatga

SEQ ID NO: 156431 - DNA, 444 bp, Enterobacter cloacae
atgaatacacaaaatcttgagttcgctgagcaggcagcaataactgcctcagcggtccctgacgagttacgcatcggcttctggccgcagcactttggctccgttccgcaatggataaccctggagtcctgtatctttgactggatggaccgcctgtgtaccgattatcacggcggtatctggagctttttgacgctcagcaatggcggcgcttttatggctcctgagtcagagcacgatgagaagtgggcattgttcaacagtatgaacggcaacggtgcggaacttactgacgaagctgcggggatagtcgcttgcctgatagcatacagccatcacgcctgccgtaccgaatgcgatgcgatgactgagcattattatcgcttacgagacttcgcgctgagccatccagagtgcaccgccattatgcatctcattgactga

SEQ ID NO: 156432 - DNA, 204 bp, Enterobacter cloacae
atggacttaccaatgaaaaacgcaaaatctccggacgataccgtgccaaaagagcaaccgctggatctgacctggcccgttgttttcagtgtcaccggactcacgctgctgcgaagcaaatcggttgtatgccagacgctcggggccacgctgaccacactcagcctgatacgccttataaaaaaattcgccacccttgcctga

SEQ ID NO: 156433 - DNA, 840 bp, Enterobacter cloacae
atgtcgacattactctcacgcctggttttactcccgatccttttgttcccggcacttagctttgccatcactatccaggggcatattcaccctgagcggtacaccttctttctgacggaaaacggcggtgaaatgctgcgtgatatgaacaatgaggcagtcagcgtcaaactcaacaataaagccggtttcaacgctgaggcgcaaaatatggctgcggcggcaaatatatctcccttgctgtatgccgcctcaccgcttgaacagaactttatccgctacgacggaaagcctgtaaaagccctgacttgcctcatcaccacccgcaccatgccgggccagaataaaaattatgcatgggaggaaacctactgcctggatgaaaccggtgcggcctacattggcactaaaggctggccgtctcgcactattttcagtaagagctgtgtcgtgggcgctgctgattgccctgtttacctgagcatgaacaacgacccgccaaccttgcgtaatgactcggtgcaatatgttccttacagccgcgagcgcgtaggtgggcagaaagaacgttatcctgcgccaaaaccaacgcctgcggaaaccgtcgcagagcaggacggttatgtggtgaattttgttaaatccagtaactgcgccgacagcaagctcattgtgaaaaacacaaactcagggaaaagcgctgtaattgcaggactcaatgggtgcacgtttgatccaaagaccaatgcagtcatcatctttacccaaaatgaatacgtcggcgtttacagtggccccactaacgcttctcaggaaatagcctccgcagatcttccctaa

SEQ ID NO: 156434 - DNA, 435 bp, Enterobacter cloacae
atgttgaagataacctctgcactgttcttgagtgccacgctgtttagcaccgcttcggacgccatgggccgggagcaacattggggcagctggtttggcactatcaatgtgatggagtttgaacttaacaccgacaacagcgcaggtgaacggctgactctgacctgccgagacaatcagctggtcgtgggttacagcgcaccagataaagctcatgcggaaacgcccgacgacggacaaaaaacagtggggctgaatatcaactccgtccattaccaaacgagtgaggccgcgtttatggcactcaaaaattcagacagcgatggacaaattgaagtcacaagcatgaacaaggccttatctcacccctttaaaactacaggactgcatgacgcattgcaggacctgacctgggaagactgcattagccattaa

SEQ ID NO: 156435 - DNA, 123 bp, Enterobacter cloacae
atgctacgattgatgggagacggctacgaaccttatgttgataagttagatgatagactaatctattcattacctgtcgagtcgggattcctcagctttaatttcgagtttgttatttgttag

SEQ ID NO: 156436 - DNA, 495 bp, Enterobacter cloacae
ttgaaaagttatttaactgaagattattgcccgattaatctggaagtagatgacgtgacgtttaaacgttatccggccgtattgttaaaagcgttgcagcgcgcgatcaatgtgggtttatcaggcaggaaagatattcaaatacagcctttagctacattcatttacaaagatgggcagcaaatactcacctttaccggaatcgttttacctaataacaatgaagataaagaactgttttttgcaaaatcgagaatagaagcatggccattttttaatggaacttgggataccattaggaatattagtgttcccactatgtccttgagagaaagaatgtttatagaagaaagattaccgtttggaaccgagctccagatcaaagagcagctcggtttttatctaggtgaaaatgaagaagaagcaagtgaacacttgcagaacttcattgagtattacaaagttgtaccgtggtactcaaaagttcttttttaa

SEQ ID NO: 156437 - DNA, 1215 bp, Enterobacter cloacae
atggtaaaagtgatggtagaatgtaagatcattaactggattgttgggcatggttatctaaatatgaacgtagttgatttattctcaggggttggcggtttaagcttgggagcagcgcgtgcgggctttaacttagctggggccgttgaactagataagcatgctattttttctcataaacttaattttcctaagtcagcacatttgcataatgatgttagtaaacttactgcgcaagatattctatctgcttgtaatgttaatgaaatagattgtgttattggcggtccaccatgtcaggggtttagctctataggcaaagggaatgctgatgatacaagaaatgaattgtatgttcatttctttcgacttgtaaatgaactatccccgatttgttttttagccgaaaatgttcctgggattatgaatgaaaaatacaatcctgtaagagaaaaggcattttcattaataagtgagcgctattgtttgctgcatccaataaaagttaatgcttcaaattatggtgcgccaacgactagaacccgtatattttttattggttttagaaaagattttgcaaacgagcttaaagaatcggacttcttcccaaaaaatataatagagcaagtgtttgtcaaggatgcgttatatggtgtaccacgaataataaagaaagagtggcaggaagagtcgcaaggctggcgtagagttaagatggacaaggaaggtgaattctataaaaaactatggggacacgtaccagaaaatgtaggtgatgctgaatctttgaagaatttagagaatggtttggtttcaggatttttaggaacagttcataacgaagaaataataaatagatatcaaaagctttccttcggtgaaacagacaaaatttctcgttctcaacgcctagatccaaatggtttttgcccaacattaagggctggaactggcagcgataaaggaagctatcaggccgtcaggccaatccaccccacgcaggcaagagttatcacgcctcgtgaagccgcgagattacagggcttccccgattggtttcggtttcatccgacgaaatggcatagcttcaggcaaattggtaatagcgttagccccttagtggcagaggctatgctattaccattacatcaattttgcatgaatgttaaaaaagaacttttgagtaccacggtacaactttgtaatactcaatga

SEQ ID NO: 156438 - DNA, 162 bp, Enterobacter cloacae
atgaaccatgaacctatgatgcatgcgccgcctgtgcataccaccacaagtattatgctaatcaccgtcgtgcattgtctgcagcaaattacgattaacgagaacctaacccctgataagctggtagagggcgcaggtatcgtaagagatagtgttcgataa

SEQ ID NO: 156439 - DNA, 306 bp, Enterobacter cloacae
atgaaagtttatttaatccagacggataattactggtgtgcattcgatttaggcgatccgaaaggagataaatctgtgggggttatatcccgcgtagatgagaaaacagggataacagaggttttgtcgacgcttgataagcatggtatcggcttggtcgcggagctggctgataagctggccatagcaaaaaacgaaaagctgatgttgaggcgatgctggtgcggctctatgccgaatgtgacacgggcgaacgtcggggcaatggcagtcaatcaggcgttgcgatgccgtcgtgggctgtag

SEQ ID NO: 156440 - DNA, 582 bp, Enterobacter cloacae
atggctgaacagaacgaaaatactgaaaaaggattcacccgcacactgaccgtgcggaacatgcctcttgatgtggatattgagatcacggaacaggcgaaggcggccggcaagtcaaaaagcgattttgttaaagaattcctttcagcatccttcggagatctgatcggtaactttatgcgcgggaatggcctggtggcgctgatggacaaagacgtggccacaatgatgaacgcaggcctcgccgattactggtatgacagtgcccagacgctggccgagaaccggacctggtgtcgcttgctgggcatttataaagaagaagatctgcagcagatcatgcgtaacggcgttcccctgcttgaactgcgcgccgcgcagctgcctgacatcacgcatatcccgcatggcacctcactggcgtttgccctcttcatcgaggccgcgcgtcgtgatttgccgacattaatcaaggtgcataaagaactgttcttcctgcagaaagaaggggattttctggacatggtcgatcagatacggcaagcgctgcgcctgccgcccacggaacggccggttttctga

SEQ ID NO: 156441 - DNA, 1032 bp, Enterobacter cloacae
atgacggcacaacattacatcaccacagcaaggctggatatctacagaaagcaccttaaggttaaacccgctcaggttatggcagcatatcactggaacaaagcactggctggcgcattgcttcctgctatgcagtgtcttgaagtcactcttcgcaatgccatcaacacagccatacagtcttttccacctgctggggccaaaggcctctgggataccaacactaactgggtgaccagcctaccgaaatacatgggcgataaccgagtcaagccttccgaacgctacaagcgagcacgaaatcctaaagatcgtcaggatgcggcaggctatttactggataagtgggggaacagactcctggcaagaacactgattgaagaaaatttagtagaccaggccaaaagccagataagtaaggaaggaaaaaaacctacacctgaccggatcatagccggactgacgtttggattctggaccacccttttgacggacccatatgaagatccccacggggaccggttgctctggccgactctgacctcgcaggtatttccgaatgcccccgcagggtattcacgacgtgatatctgcgctgccttctttcagataaaagaactgagaaaccgtctgtcacatcatgaggccgtatggaaatttcatcaaaaaaatccggccaccggtaagacagactactccaaaccggtatacggaacacaggcaagctgcagcttgttgaggaaacattatgacgacatcattgagatggttggctggatgagcactgaacgaaaagacaatttcctgaatcattctgccaatctgcgattctatgccctgtgctctgtggacgggctgaacagctatattgccccggaaaaaatcaaggaacaaattgaggtttcaaacgatgataatgaagacattaacagattaatcaacgtcctcggaaaaaatgaattcatacggcttgtgaaggaggagcaaacgatactcaccatcggcactgacaactccttttcccttctctga

SEQ ID NO: 156442 - DNA, 633 bp, Enterobacter cloacae
gtgaaaacattcatcagtccttttggactaagcaatcagcatcatatggatcgtattcgtgaaacacttgataagtctttacaggaatacccaaggacgtttgtgttaaatatcatactaagattgcctgatgagaattatgaacattacaaggcagaccctaaattgataacccgatttattgaatctttaaaatctcagattgagcatacgcagaaacgtaaagccgcagagggtaaacgtattcgctcctgtaatgttcgttatgcctggtcgagagagtttggtgaagaaaagggcaagaagcattaccatgtggcattgatgctgaataacgatgtgtactgtaatgcgggtacctactattccatacaaggtctgtatatccataatctggcattaatgattatggaagcctgggtgagaacgctgtgtctcaatgtcacgcctgactatcaaaagtattacccactggtacattttgttaaggagggagatttcaggctggataagaagggtaaaaactttgagtactattacagtcaactggatcgcagtttgtcctacttaacgaagctcgccacgaaagacagttctgatggcatgcgtaattttggttgcagtcagtcctga

SEQ ID NO: 156443 - DNA, 1563 bp, Enterobacter cloacae
atgacgtacaacccaattacgactctctctcagctggtaagccagtcagaggaatcgtcccttcccatcacagccttcccgcaaatcttacaagatgttattcgctatcttcaggatggcagtaaatattcagccgtgttagcagccagcacggtattagctgccgtctcaaacagctgccagtcactgattgaggttttcaataacaatcacggctcatcagagacgacagcgctttactttatgacacttggtgaatcgggttcaggaaaaacatccctcagcaaactggtgatgaaaccgtatgatgcattgaaggctgaactggcgcaggaatacctggagagaatggccacctatggacgtgattttgccgtctggaaaccagaactgcaggctctggaaagcaaactccgcaccgcaatcaaaaaggatgacaatcctgaggaaatccaggcgaggttacagcaacatatcgctcgcaaacccgttcaaccgattatgccaatccttgtatacaacgatacctcgcttgcggctctgcttgatggattgagcgtatatccgagcgcttttttacggtctgaagaaggaagtcgctttttcgagcattgcaatatcgctcagcaggcattctgtaacgaggcatgggatggaggggtttatgattataagcgcagcaatcgcgagccctgtagtttcaaaccaacactgacggtatcgctcatgttgcagccatctctttttctcagttatatgaaaaaacatggtactgaagcattagacagtggtttcttatctcgcttcctgtttgcctgcattccatccaacaatcagtatccttccggaggcatgagctatcgttaccgccaggatacattttcccgtgatgaggaggctttacgcgcttttcataaccggattactgcattgctggcaaaacaaaaagaactcatttggtccgcggaaataaagaagaaaacactcaaactctcatctgacgcggttgcatattgggaaggtaaacacgatgagtggatttcaagaacaatggctgactcgtcatggtcattcattaagccgatggtaatgaaagcgagtgggaatactttgcgcatcgctgcatcgcttcactacttcgttaatcaggatgatgagactatttctctggattctcttcatcgagcagcggctatcatggaatggtatcttagtcatactgcagagtggttttatcagttcactccacactacaaattcctgcaagacgtacaggaactcacccaatggatccgtcataaattcgcatccaacaatggtttgccgttcaaaaagaatgacgttattaaatatggcccgaacaagtttcgccgaagtgataagctggagccacttttgaattacattatgaacaccggtgagtttatctacatccacaaatctccgccgcattcggcggtatatattacctggcgtatgcccaatgggcactatgcccctattgcagaacataatgtacatcactatttacctccacaacaagatactgaccagattagctag

SEQ ID NO: 156444 - DNA, 1119 bp, Enterobacter cloacae
  misc_feature (768)..(777): n is a, c, g, or t
atgagtctcatatgcgcagaccccgttgcagaagagtggtatggccgtatttttggcagaatcaacagcatacttcagagggaagggataaccggaaaacaggctcagatagccaagcattatttgctgggggctcttgaaatctacttgtcgattgatagcaactattttgcgggcacagttgagcataataaaggtgttgatggtggtgcaccttataacagagaacttctcgagcaatttgttgaacacaaccgaaattatagtatcgctttactttgcaatattgctgattttaatggtgtcgacagagagttcttttttcaggcaacggaagagttatttaatgataagatgttatctgccatgccgcgttttatcagatatcgtcttaccgaatgttgctatgcgcttgaatatcctgatgctcctctctttttttatcgggagttggtgagtctgggtattgttttgtgtgggaaatactcacgtcatcgtgaccaatttgtgaagaagtctgattcagaattatcacttttgttcattcgtgcaggcttactttttgagtttaagatgctgcaaagagcagtgcaggtgataacctccctcaataaaaatggtactcttgttttacccactgcagatctccgaatgtcctttacagagcgcaagaacatagctgattactataaaagacttgttgatgtgtggttgctggaagataagcctggttcctttgtggtttttaagtgtaaaagcgatgtttcnnnnnnnnnnatgtttgatggtacacagggaagctggctgggaacacttggagcatttgatattgaggttagccgttggttagaaccagagttggcgatttattacgagggtaataatagtcttacaatttcagaaaaaattagatctaagtttatggggtttggttttagtgtatcagctagaaatttgtatttgcggcataaagcggtaagaaaaaatagttaccctaaaattcgatattattatacccatttattaaatcagccatgcatattcccttggtatcttaatgacaatagttgttacgacatggctctggagtttgatggttatcaagactttgctggataa

SEQ ID NO: 156445 - DNA, 207 bp, Enterobacter cloacae
atgttcaaatataaatccttcctgagagtgatcctcccccagcgccagaaggcgctgataagtaccagcagacacataaaacagttgttcgacggaacactgatgttgcatgactacgacggtaaggctgcagaggctttggccatgatgcgtgcgccgagcaaaatgacgaagacggggatgcctgaaggcttgtgtatcgcctga

SEQ ID NO: 156446 - DNA, 2310 bp, Enterobacter cloacae
atgtcagcagcagacgccactacatcattatctggacagatatcccttcggtttgttgagctttgccagttccgccgacttggtaaggtccagcttgagattgatcctaagactactattctcgtcggtgctaataatagcggcaaaacatcaattctggcagcgctgcgccacttcctcgcagatggctcgtcatttggtgctttcgacatcagtgtttctcaatggccaaaattgcgggaacttggaagagtttgggacgcattagaagaagacccgtctacgtctggcgcatccgaaggtgaatgggaagagcaacttggaaccttaatttcggcgatgccaacgctagatctatggttcgatgctaaggccggcatgttccactatgtctccccgttcttgtcaaaattcagttggaaggggggcggggtaggtgtccgattgcgtctggaacctgctacgaacattgaggatctgaagcagttggcttggaagtatcacctgacgagaatacctgtgaaggatatgggaaaggattcgcttgcgtggccgattgatcttcttgatttttggctgcgagaaccttctcaactcggccaagttcgggcctacaagttagatgccgataacaacccgttggacgggataaagacctacgttagccaggtactggatgctgactcaagcccaattgatcgtaagcatcttcagaaacttataaaagtagactttgtggctgcacagcgtggccttggtagtgaggaagctgattcccggtctgcttctggcacccatcgcataggtttattctccaatcagcttctcaaatttgctcgacagcatctaaatgtggcagcaacaggtcatgggcaccgagctgacctcataaaagctgttgctgatgcccagcaggaactagataaaaagattcatgaggctattggaccatcggtagaagaggttaaagagcttgggtaccccggcttgcatgacccccaagagattcgtttccgcacgcgcatacagacagccgaattactcgaccatgggacagctgttcaatacagcatgcagaaggattcactagaagagcttctcccggaatattccattggtctcggttatcagaatttacagtcccttagttaccaactagtttctttcaaagctgctcgcctaaatcctgaaaagggcgctcccgcacctgttcatctggttatgattgaggagcccgaggctcatttgcacgtacaggtacaacgtattttctcgggtaaggcacataagctcatcagtcctaacggtagcgatgagtcaggtcttaaaagccaactgattatcagtactcattctagccatttagctcatgctgagaattttgaccggctacgatatgttcgccgcgttgccaagagtgaagaacaaaacatgcctaccactgaggtggttaatcttgggcaagtttttggtgatgataaaacaacccgtcaattcgctgaacgttattttcgcgttcaacacacagatcttttatttgccaatgctgcaatctttgtcgagggggttgctgaacgaatgctgttacctcttttcattgaaagagattttgcaacactcaacagtcgctatctgtccttccttgatattggtggcagccatgctcatcggctaagagctctcgttgagagactccgtattccaactgtaattattactgatatcgatccagttgaagaaagaccaggtaagcctaaaaaaaatggggatccgactacaaccttagttgctgtggctaatacaggacaacccggactgcaatgtgggaacccgactcttcgcggatggcaccctaagttgcaacagcttgaggatttcaagaacccgaaaaatgagcatcttgtctggaaagaaattgccgagtgttctgtacgttttgcatggcagttgcctgtagtcgaagctgatggtcaatggccaagtacttttgaagactctctaattctgagaaatatcccttggtttaagcaacttattgatgaaaaagtcgatggcgatgggaagcaaatcaaaccgccgaagggagcactgggctcagtagcaagacaggtcgctgaaaatgataatgttccagaactgctcgcagctctgcataaattaatgcatggatcttttaataaaggagactttgccgcaagtatctttgaaatggttgctgcggatgagccgatagtttgtcctaaatatatcgaggatgcattggaatggctccagacacagcttgagccaagcaaggaggtgatgccatga

SEQ ID NO: 156447 - DNA, 1977 bp, Enterobacter cloacae
atgactaactcatcagcccttgacgacaatgatcgcgatgcaggggtagttgaagagatttgcggctaccttacagacataccaccccgtaactacttcctttttgcaggggctggttctggtaaaacacgaactttggtagaagttttgcgtcgccttactggtgtgactgagcatgagaaggggggacaattagcacggtccctgaagatgtatgggcgttcgattagagttgtgacctacaccaagaatgctgtctctgtaatcaacagacgtcttggggacaataatttagtcagtgtgtctaccatccattcgttttgctgggagttaattaatgggttcaacgatgacattcgggagtcccttatagcagtaaaagaagctcaactcgctaaagagactgcagaggcacaagcgaaaccgaggggtattactgcagcaaaacagcgtgaccttgacgaaatcacgaatgaaatcgaggttcttcggacaactgaagtattcaaataccatcccgatcgcaatacatatggacctggtgcactaccacacaattacgtactcgatgcgacagcttggttgcttcaaaataagccaacactccaatccattctcaaagatcgacatccaatcatactgattgatgagtcgcaggacacgatgaaaggtgtactggactccttgatggtgcttgccaaaaaaagtgagagagatttgactcttggtctgctgggagatcatcgacaacgaatttatatggatggtcatgccgatcttccaagcattgttccggaaagctgggcaacgcctgagttacaaatgaatcatcgcagtcaacgacggatagtcacactgattaataaaatctgggaaactgaatttgaaggcaggacacaaccaacaaagggttcagcacaacatccccgaacggaaaaagctggtggaacggttcggctcttcttgggggatacttcacgaagtccagaagataaagtgcttagtgaacgctggtgcgctgagcgaatgtttgaaattagtggtttagcagattggaatcaagggcaatatcagttgcttgcgcttgagcataagcttgtcgccactcgtggctcatttcttgatgtctatgaggcaatggttctgttagatcccaacgctgcagcaccatctggcagtggggacaataaggggccttcaacagtacaaattttgcttaatgagctggcgcatttagaagcctgcgtcagtgatgaaggaatcgttaatgagtttaaggccaccgaggtttttcgacgttatggcggtttagacaatatgcctgaggactcagaagcaagagttgaacgtactgatgaaatgctcgaggcgatagcgatatttgcaatggcttgcgccaactctgagtcaacgatcgctgaggtgttagcgccagtcttgagtgcaaacttattcgaggttgatcatcgactcctagaggcttatgtcgacaagtcaccagccccgcaagctcctggacgtggtgaggatgagtcaaagcaaaccagaatgcgccgtggatggtgtgcactgtttgcttctccatggaaacaacttaagtgctatcggaattaccttgctgggatttcagagctcgcaacacatcaggtagttaaaggctctgagttcaatcacgtcatggttgtaatggatgatgctcttgctggtgggactctcatcaagtacgacaaaatttttggtggtacgcagttaagtccaacagataaaaagaatgcagaggctggtaaggagacaacaattgaccggactttacgtttgctgtacgtgacttgtagcagggcgcaagaatcactcgccttagtgctttggtcgtccgatccaactgcagcaatggctcgaatcgaggagagcatgtggtttactaaagatgaaatacaggtcattccagagtgtctggtcaccggccttagtcgctga

SEQ ID NO: 156448 - DNA, 3375 bp, Enterobacter cloacae
  misc_feature (3322)..(3331): n is a, c, g, or t
atgaaaaacacagtgacagataacaccccgaaaaaaactaaacaatctgaacaagaaggtgaggggcaaaacaaaaaatccgcggtaggggggagtgccgctgagcgagggttagattttcaagctcgcgttattgcaatcacgatgatttatctgctgtcagaacgaaaaatcacctggttaagcgatatccttaacgatgttccatgcctagttgatgctgaaacagggggacctggtgacgacatttcattactcaccaaaaacggaaaaacagttgaaattcaggttaaacgtggcctgagaagcggcgctgatttgtgggaggcgcttaatgctttggtacaagcgatccataaagaagaaattaattcaggagtgttggttgtctgtcctaatagtagtgcaacgatacgtacaaatctcgcagagaacattatacgtattggtacaggaaggaaggatggactccataaaatcggccacgagttcgttgaaaaatctggactcaatattgaagagctaacccgtgtatgtaattctctgcgaattattacagttgctgcagtcgagggaaacaatagtgaagaaaccaatgctattaaccagcttcaacaactattctgtgagccttatcaagtatggggcatgcttgttgagcacgctcggaaactcatcaggatacggggtagggtaacaatatcttctttactgaatgaattcagacttaacagtttagacattaaaactaattccactgactgtggaattcagctaagagcaacaatctctaaatggtttgaggcaagctattcgcaattcagtattcctggccaagttaaacctgtttcactaaagtcctgttggatcccactaaaaaccgcagttattaaggatctggaaacgtttcctgatgacttatcacaggccttagttaattatcacagctattcagcgggtaaccgacactcaagtcaaaagttcgatgcctgtaccttgggaagatacattaaaaatgggataattattggtggtccagggataggcaaatcaatgctcctccgccgtattggaattgagtatgcatcagaatgctatctggtgttactagcttcccttacaagaatagcttctttaattaaacataaagggattccttttgaagaggcgttggttgacgtcgcacttagtgattcgggattgacctatcgaactgttgatttgcaggatgcggtcattttatgtgatgggcttgatgaatgtggttcaagtcaaaaaacaattaccgatgcattgcatagatttgctgtggcctatcccaaagcaagaatcttacttactagccgccctgtgggttatcagcctgggttacttgctgagtggagacattatgagcttcttcctctggaagactctcaggcagatgaagctattacacaagtaatggccgcacttaattttgaaagctccgaggctcgatcccaggcactcgttcacgcgaaagaacagatgaagtcccaacatctgaagggggttgctaccagaagtccactaattctgacgatgctggcatccttgtcttcaaaaggaattgaacccggtagctcccgtagttcgctgtacagacagttatttaaattacttgagtcatttccttcaacgcgttctgtcaattctctaccaacagcggctgatcgaaactggtttatcaatttgttaggatgggttttgctagagcatggaacagaaccttttgatacaacatccgagcgttgtgtttctgagtggcaaaatgaaactcaggggagccgactcgattgcatgaacaaggttgatgcctgctttaattactgggagtctgtgggagctatcgaacgagtacatactttagatcaagaagcggtgacttttgtgcataaaacgtttgctgagtatgctgctgcagttttcatcaaaggacagtcgcataatgcgcaacgtgatttactaataaaagttatacggcatgaatcaaaacgtgagacgctttcttttgcaagtcaccttggcttggttcaagagattcttgatgtatggagtgaattgatagtcaatggcgatactgcagcgacaaaaggattacgagaagcacacaaaattattattgaagcggggttaccagtaacgccagactcactaagtgtttttgctgattgttgctggaaagctgcgacatcatctataagtttgtttaacgcaggagattcgctttgccaaattgcagaacaaaactgggatgttgtgcgcgatcatgtgacttcaaacctcaagtcacaggatggctggctttggcttgtcgcttggggatgcctcctgacaggttctccggatgaggtcagctatcatgatgcggtaactgtattgaatagtataaagtcgaaatggccaaaacgactgcaaaaaggaaactctatctttgatttcatttctggtcagcacgtaaaaaactgcatcgttttaggcgcagcaaaggttatcctacgagatcctaaagaagcaggactagtcgttctcactgccataatagataaaggaagaggcgtttcagcaaactgccttctgcagcttctgaaactctatcatgaggcgggtattgagttagaaaatgaggtgtctcgttattcgttcctgaaccaggattttatgaatgcatacgaggtaattgatcgggagtgtttaaatttcctatctctattagccgatgagtatgaagtttcggatcagaatgatattttgccagagaagatgattgaacttggcgcatttatgacagtatctggttttcatcaactgtcgttaagtggattacatcgtttaggaagttttaatgaagatgtcgtttatctacgcatatttctgtatcaagttgccaggtcagtaggacttgagcctgaaaaaataaagtatcaagccgctatgctgaaaaaactcggtcttagtaaccaatcggtactcaattcctgttttttccggctacctgttgtcgatatagatttggctcctgaaaaagttgaaattgatgagtccgattttgatagtttgtgttcgttaattttactagaccatgagtactacagtgttttagcagcactcgttctacatgagcacatcagtcatccacgcgtcttggaatgtatagaaaaaatcattatgagaggtcatggactggccttgcatttagctgtcgagctcataaaagacatgtctgaatcgaaatggcaggaatttatcctctaccggctggaaacatctattcctgacaaaggttgttcatatctatacnnnnnnnnnntatctatacgatgcacttatttcccccttcgacttgcgtcatga

SEQ ID NO: 156449 - DNA, 168 bp, Enterobacter cloacae
atgcgaggtaagcgttatcctaaggtgtttaaaattatagcggccaaacagaaagttaataatggtcactctattccttgcttggtagcacgatctagtatttccacctactgctttttttcttggatcaaagtatatggttcggatttcttccttaacaaggtctag

SEQ ID NO: 156450 - DNA, 153 bp, Enterobacter cloacae; identical to SEQ ID NO: 83375

SEQ ID NO: 156451 - DNA, 159 bp, Enterobacter cloacae
atgtcaaaagccacgaatacagcagccactaagcgcaacaatcgtaagattcacgcccgtaaattcctggctacgccggagggtaaatcatggttagaacgcaagacaatcgaagaagctgaaatgaagctggtttcagaggcgaggaaatttatatga

SEQ ID NO: 156452 - DNA, 228 bp, Enterobacter cloacae; identical to SEQ ID NO: 105755

SEQ ID NO: 156453 - DNA, 498 bp, Enterobacter cloacae
gtgagcgccatagccgcttatagcggaatgcgcatcaatgaaatagccagtttgaaatctgacaatattcgtgaagttgagggggtgttatgtttcgaggtattggaaggaaagacagctaacgcttccaggctaatcccatgccatagtgcgattaaaacaatggtcctggaacgctgccagaagccgcacaacggctttttattttaccgtgcaagtgtgaccaagagagaggacggcaagcgctcctcatggcacgtaaaccgctttggacggcttaaacgcgatattctcccagggcagaaaaacaaggtgtttcactcgtaccgccatgccgtgatcagtaagctaaacgccgccggagtggatgaatctcgtattgccttgctcgcgggccactcatttggagaaactgaatctttcaagacgtattcgaaatccgttcctgagcgaatagtgaaggaactaaaagaatatatcgaattaatcaaatattaa

SEQ ID NO: 156454 - DNA, 279 bp, Enterobacter cloacae
atggctaacaatctttttgtaacctatgacttgattaaaactaaaaactatccagcagtttacgaagctattaaatcattgggcgtagcagtcaaagttacagaatcaaattggtatgttaattcacattacaattctgaacaggcagcgcaaatagttcacaaagcgatggatagtgatgataaattgatagttgtagatgcaacaaataattatgcatattggtataatatttcatctgaaacatcgcaatatatgcaaagtgtatggtataaataa

SEQ ID NO: 156455 - DNA, 129 bp, Enterobacter cloacae
atggctaagaaaacagtagttcgttctgcgataactggtcagtttgttaagcccattgaagctaaaagacatcctgacactacggtaactgaaactatcaaaatccctaccaagaaagctaagaaataa

SEQ ID NO: 156456 - DNA, 1887 bp, Enterobacter cloacae
atgcttgaaataaatgcctcacgtgtatcgaacgtaattacgttttctgtcgatcagaatagtcttagggcagcgaagcaggcggggaaggatttacagaagtatttccagtctctggctgagcctaagatcaaattcaaagcgatgaaagaaaggcagcgtaaagcggctgcaatggcagataatgccaaattcaatacagcgccaaaatctaccaatgatttaaaacagcaacgtattgcagagaaagcggcgaaggcgcaggccagggaagcggcgaagattgccaaacgtaatgaaatggcagacctgaaacggcgctcagccaaccttcaaatgaaaggtatagccggaaaatatggcattgatccactaaagcaactggaatttgcacgtttcgctaaggaacagacagagctattccgcaacggtcagatcagtagtcagaagatgaactatgaactacgtgaaagaatcgcccttatgcgccgtgaggcggctcttcaagcgaaagtgacggcatccacacaagcacaggcggcagcaatcagacatgctaagaaaaccgactatgcaggggctgcaaagggtattaaagaaaaagggctgaatgttataggtggcggtgctggctttgttggtgctactgctgcattagctggcggggcaggagtcttgtctcgtatcaagcagcaaggagatgaaaatcttgagcttgtccgtatgtcggaacgtaccaaactgaatcctaacgctgttaaggcgattgtatcttgggggcagcagcacggggtttcgagcgccagcgttgacaagatcacggatggcttcgggaaagatacccgcgagagaatcaacgaaacattattaaatagccagttcaaaggcggtaaatggtctggtggaaatagcgccgttgacgaagtgttaaataagtttggctggaacaaatcgcagctttcacagtatgcagataatccgcttgattacctacaatcggtggtaaatgaaggccagcgtcgcgggatgaaagacggtgagatcgggcatcttctcgaaaatacttttgatgatgggatgcactacctcgatcttttcaaaaataacggtgagcagtttatctccgtcctgaaaagccttgttgaaagtggtcaaactcttaacgatgagcaaataaggcaaactctggcatatggtgacctgagtgtagcaatgggtaatctgatgaatggcgttaataacagtctattcactggctttatgtccagttttgccgatagcggtgatgagttggtgaaaaatacacaggcaatcaatcagagtgcagggctattaggtgagggattaggcgaccttgctaaacaggtgacgggcttcgttggtgagatttccggcgttgtgagtgatatcaatgctgggcttcgctctcgtttccctgattggtttgctgataaagataagccagcggcccaggctctctacgatggtgctgtgggtggtagtgcgaatgcggcggctgattgggtgcaggacatgacagggtgggacagccgtagtgtaggtcattctgttaaaggctggttaggaattgatgatcagcctacagggacagcggtagaacaatacggcctgaatggtgattctctgcaagggggagcgcttcgtgattctgctatatcatccctaaccagcaccaatagtgcgccatcgtacaatcttgcacctgtattcaatctaaatcttgaagcgtctgttccgctcaccatcgccagcgatagctcaagattgagcgattacattgatttccaggcgagagcttctcaagcgagttttacacagtcgctcaccttgtcagccttgagcggtcagagcagcacaggcgggtga

SEQ ID NO: 156457 - DNA, 201 bp, Enterobacter cloacae
gtggaactcatacttaaatcaaatcgtggtttacatgttcgactgagtgcagacgatgcagaagggctgctcaaggtgagccagctttgcgagctattagagatttcgtatacgggcgttagagcgcgtattttccgtggtgaaaccgtcgacgaggccgtgcatcacttccttgataaacaaggcggtggcgatgcttga

SEQ ID NO: 156458 - DNA, 360 bp, Enterobacter cloacae
atgattgtagacctaaccgaacttttcccaattcgtaagagtttcactgacgtagtgagctacgccacggactcattcgcagtcgtagaaggtcgtgttttcgacctgccagcggatattcagtgcggcgatgttatcggcgctgatggcgctctatacacctccggcgataatgcctttgtggtggtgagtgaatttgtcactgctggcgacggtaaaaccgtgaatgtcctacgtgcgcccaatgttggtagcttcgtagcgcttaaagccgacaacctgaatgcagctaaccatgccgcagctatcgccacgctcgaatccaaaggattcgtatgccgtccattcttcacctcttaa

SEQ ID NO: 156459 - DNA, 216 bp, Enterobacter cloacae
atgtttctcttaaacaatcgcgaccgaatcctaaaatacaaatccgaagtgattcaagttaatcctgagttgatagctaaagtggctgaaatggcaggatgtaccattgaggaaatggaaaaagctgtagagcgttatttcccttctgaggacactcctcaacttagtatgcaggaacggatcgcaatcaaatcgaaggaaatcaaacaacaatga

SEQ ID NO: 156460 - DNA, 1326 bp, Enterobacter cloacae
atggaaaagaaattatccaagtatgagcctgatgagtatgtaaaagttaagcatccggaatggtcgaaaaatgccacaatctaccaggttaatataaggcaatttactaaaggtgggacatttaattcctttgaaaaacatcttgacaggattaaatcccttggtgttgatattatttggctgatgccaattcaccctgttgggatcgaagctcgtaagggctcgttggggagtagttattctgttcgcgactattatgatgtcaatgaggagtttggtactcatgaagatctcaaacagctagtaagaaaaattcatgacaaagggatgtatgtcattctcgactgggtggcaaaccattcttctcgagataatacattgaccattactcatcccgaatggtattcaaaagacagaaaaggtcattttacgcccacaccttggtatgactgggatgatattatcgagtttgattacggcaatgctgaattacgccagtacatgacggcagcattgaaatactgggttgatgaatttgatatcgacggataccggtgtgatgtcgccggttttgtcccgcttgatttctgggaaaatgcccgagcagagcttgaggcgataaaacccgtttttatgctggcagaatgggagtcccgggatttgctgaaaaaatcctttgacatggtctattcatggagcctgtgggacaaaatgctactggcggttaataccggaaagttatctccgctgatagaatggatggcgcaccaaacaaaagcatttccagctgacggaataagcatgtcatttattgaaaatcatgataagaatgcctgggaagggaatcaatttgataactttggctcgggtctggaagccgcgattgttatgaccgtaatggtaaaaggtatgccattaatttatggtgggcaggaagccggactgaagcgctctctgccattttttgaaaaagatgaaataatctggcagaaacaccacataggtgaattatacaaaaccctgtttcatcttaaacatgtgaatcatgccctgtggaatgctcataacggtggtgagatggtacgaattaaccataatcatgaagataaagttattgctttctccagagagaaagatgggcatgccattatttccatgattaacttcagtaaagaaaaattgacaataaaaatcaaggagaaggaatatagtggatattatattgattggttcacaaaagaagaaatagatgttaaaaatctcagccaggtggttcttcaaccctggggttataaaatattcagtagcatcccgaaaaacgcatag

SEQ ID NO: 156461 - DNA, 1107 bp, Enterobacter cloacae
atgaaaaaatcattcatgcttattgctgcctgcgctgcgtggtactctgcaaccccgtatgcggcgatacaggaaggtaaactgatcatttggggaggtagtcttggtaatggacgacaggctcttgagactgtcggaaaacgttttgaagccgataccggtattcctgtcacggtggaacaaccgaaaaatatagaggaaagattccccttggtggcaagcagtggtggtggtccggatattgttatatacgcgcatgaccgttttggcgggtatgcaaagtcaggtttattatacgaggttaatccttccccggcattcaaagagaaaatagtcccctttgcatgggacgccgtgaagtataacgggaagctgattggttatcctatgagtatagaagcgctgactctgatctggaataaaaagctgattaaatccccaccttccacgtgggaagaaatcccggcaatggatgatgaactaagaaaaaagggtaaaaaagcaattacatggaatatttctgagccctattttacatggccattaattgcctctgcgggggggtacgtatttaaaaagaccgataacggttacgatacaagtcatgtgggtattgataatgaaggcgcagttaaagggctggaatttattgtgaatatggtcaaaagcggacgtattagcccagatacggattatccgctagctgaagccagctttaataaaggtgaaacagcgatgattatcaatggcccgtggtcatgggaaaatattggtaccagcggtattgactacggtgttacggtactgcccacattccagggacaaaaggctagaccatttgtgggggtcgtcagcatcggcattaatgcagccagccctaataaagaactggctgtggaatttatagaaaactatctgatgacagatgaaggacttaccacgctgaatgatgccgttccattaggtgcagttacactgaagagctaccagaaaaaactggaaaaagatccgcgtatccaggcaaccatgcagagcgcagaaaatggcgagatcatgccaaacattcctgagctgagttcattctggtatgcggagaaaaccgggtaa

SEQ ID NO: 156462 - DNA, 294 bp, Enterobacter cloacae
atgcaggctcgtggtgttgagcagacctttaagcctaatgatatttactttgatccaaaaaatgacatggtctatgtctggggtaccaaaacgactcgacttgtaaatgttccggacaaaactgaatcatcgaaatggacttatgaatgggttctcgggatgaaaaatggtcgcccaagaattgcatatgtaaatcaatattccggaacaccgaatattaaaaaaattacgataaacggcaaagagcaactggcaacgctggataatccgccaccgtctacaggtaacaagtga

SEQ ID NO: 156463 - DNA, 2745 bp, Enterobacter cloacae
atggtcgcaggactggcatgcctgcagaacatggaatggtacagaaagaaagggtattcgagtattggtgatttgttcaaacgcaacagtactgacaggattgaagagacttggctagttaataaggaggtcggagctattgagctggctgaagctctgcagggatttacctccaaagaggtcatttcccatggagatcgcttcatccttatcattgataatctggaccgaatcagtgcagacaaagtgaaagagctctggagtgatatggagcttattgccggagccactcatgaacacttcaggatagtggtgccctattcggcaagacaggtttcagcctcactttctgtggcgggtttcagcgggcgtgagtttattgcaaagcggattcctgtaagttttcaggttcctcctcttatttcggcaggatggcaggaagcgttaaggcagtactggaaagaaacagtaaatgaggatgcagggatagcgtgccgggaagcaacggtgttgcttgagcgctggaaaccctctgagtatcctcgtatcacaccgcgattaatgaagaagtttgttaatgatattcatattctgaaccttaccgttcctgcaacagaagatcatcgccatattcttattgctctctacttactggtggtcagatacggggagcgagatattaaagtattacttcgcgatcccaaagctagtcagaccgaacccggtattgctccggatgattttgacgagatgctctcgctaacttatcaacaaatatcccgaatttttaataacgatacagaaagatggagcgaatttctgatgagcatccactatcagtccacggtggagcttgccaggagcgagttgcttgatacgcctcttaaagacgcgattggtgctataaatatcccacggcttgaagaactgacggccttgtggggtttcgctgaagcatggcagcgagtggcaccacatattcagatgcgagactggctggtttcttatagccggatggatgagaagtgtcaggctctcgccgaaccgcaactcaaagtcgcagtgcaaatgctgaatcagagttatgctgtttcactcagagaaaagaatgatgaaggtttcgtattgagtctgcagaaactgatggctgacgggcggataagcctagagcctttcgtcgaaaggcaaatatcgtttattgtgagtaaacttgatgaaattcaggattcagaaaaattggaggctgaatccacgcagacgttgctgcaggaagctgattcatactctgttctggccggtgaatcactactgaataaaatggagaattttgtagatggcgtattttatgtggaataccttgtcaataatgaagagaccttgtcaaacctgaaaattggcacactagatatcggaaatcacggtcgggaggagatgttacgctatggagctgagcaacctcagatagacctttttaatccgggaattatccggcatatcaatattgcatcgaaggcggtacagaacgtaattggaaagaatgatggtacaggtggggctcaggttagctctgcaataatgacgcttaaaaatcgtcaggttgttgaggacgttatccatttcagaaaaattgttctgagcccggactggaataataatgttttaaatcaatattatcttaataatacggcgacgaggaatctcttccctgcggaatttgctgcacaggctgttgctcacatggtgctccatggtaactatgccggtatcgagtcgtacagtgaacatattggtgaggaacggtttgacctggctttggctgcatatcttcgttatctacgtactgccgagagtatctttatagcacttaaggataaaaatgttctgccgtacatcaaaaatgctgttggcaggattgttgatttaggtcttctggtgaatatacctgtcctgagctttgttaaaggtcagtatgacgtcatcaaagaagctacaaatgcaacctctcttttaatatttgtgcgagagcgtcaaaaagcactgtcagagaaaataattgagtctgatgtgaatgctatgggtccagtatttctccatgacgtatatcagtcaggtgagcagtttgatattttgaagaaaaagctgaacgccctggcatgtggagtatttagttcttctgaaaggcttattgagtgttttacggttcttcctgtgaacatgcgctttatccttgaacaaatgcaacttcaggggcagcatatccggatggaaggtagtgtgggtatctttgcatcatggttccgtgatgcagagccagacgttgtcacaaatgccgagaacattcatttcctgtggtcttgcctcgacgatacccagagagagactgtacttgatgagttgcacgatgtcttacttgaaagacatattcgtattgacagccgtattgcgattattacccgttttcataatgagttgtcgtttattgaacctgagaaggccgttgaacgcagggctattgcggcgctgtttagcgcttctgttgataatgtattattgtctcaatggcttgaccgtcagacgttttcattttcatcatggtctccggaggacgcccgtacggcaacgagttgtataatgaataactcggagatttttcctctcatctgcaggaattcacagtatattaaaaacagaatgttaccagagaaagcggacgttacagaagatagtgatacgtttccggactga

SEQ ID NO: 156464 - DNA, 321 bp, Enterobacter cloacae
atgctaaagtatcttactgattcagcaaataaactgactttagacgaattaaacgcattcaatgcgtactttgatcatcatcttcccgcgtcatttcttgatttttatcttaaaaataatggcgggtatcttcataataatgaaaatagtaaaccttttatgcttggtggttttaaccctataaaatatggtgacctgccgattgagcaactcaatcgtgatcttgttgcgtcgtttggcgagttgagaaatatggttccctttgcctatgatgacggcgggaactatttctattatccctcaaatctgatgattcattag

SEQ ID NO: 156465 - DNA, 570 bp, Enterobacter cloacae
atgagccgcacttttgcatattgccgagtgtccactagcgagcagacaaccgaaaaccaaatcatggcgatacgtcaggctggctatgatgtaattgataaccgcgtagtgtcggaagttgtctccggtggagtgcaggcgatgaagcgtaaggctttctctgacctcgttaaccataaactggaagccggagataagttagttgtgctcaagttggatcgcttggggcgtgacaacatcgatgtgcagcaaacaatctcgatgcttgtagaaaaaggaattgatgttgtttctatggatctgcctgcgagcaatcttgccagtgctgaagggaagttgatgctgcaaatgttctcagcgtttgcggagtttgaaaaatcccgtattacagagcgcaccaaggaagggctagagcgagcgaagaaagaaggcaaaaagctgggtcgcccggttgctacagtgacgtacaaacgtgtacaagaggctaaaaatgatggtctgagccaggctaaagccgccgctgctttggggttagggattgccacagtaaaacgtcattggaacatctga

SEQ ID NO: 156466 - DNA, 606 bp, Enterobacter cloacae
atgactctgaggtgtctgttaaacccgtggcgattcacggagccgcttaagtcagtcgtagagtttgcgctttctactggcttaagacgttcgaacatcatcaatctggaatggcagcagatagacatgcagagaaaagttgcctggattcacccggagcagagcaagtctaatcaggccattggcgtggcgctgaatgatactgcttgccgagtgctgaaaaagcaaatcggaaatcaccacaagtgggttttcgtttacaaggaaagcagcactaagcctgacggaaccaaatcacctgtagtgaggaagatgcgctacgatgccaacactgcatggagggctgcactaaaaagagccgggattgaagatttccgttttcatgacctgagacatacgtgggcaagttggcttgttcaagctggagtgcctatttctgtgttgcaggagatgggaggctgggagtcaatagaaatggttcgtcgatatgctcacttggcacctaaccacctgacagaacatgcacgacaaattgactcgattttcggctcttctgtcccaaaaatgtcccatagtgaaaataaggaatgtacaaatgatgcgtaa

SEQ ID NO: 156467 - DNA, 486 bp, Enterobacter cloacae
gtgacggacataacctacatccgaacccacgaaggctggctgtatctggccgtggtggttgacctgttctcccgaaaagttatcggctggtcaatgcaaccccgcatgacaaaagagattgtcctgaacgcattacttatggcggtgtggaggcgtaatcctcaaaagcaggtactggttcactctgatcagggtagtcagtacacgagccatgagtggcagtcgttcctgaaatcacacggtctggaaggcagcatgagtcgtcgcggtaactgccacgacaacgcggttgcggaaagctttttccagctactgaaacgcgaacggattaagaaaaggatctacggaacgagagacgaagccagaagcgatatttttgattatgtcgaaatgttttataacagtaagcgtcggcatggttcgagcgagcagatgccaccggctgaatatgaaaacctatattatcaacggctcagaagtgtctag

SEQ ID NO: 156468 - DNA, 1008 bp, Enterobacter cloacae
atggatcatttccctcagattatagaacacagcagctataaaggagtttttcccggcttcagtaagcaaattgtatgggtaaagattaattgtccatacaattcaagtgtgagagacctttgtgaagagattttacaaaaattagatgatgcaattggtattgaacgaactacacctgagattagaaatggtgctctggctcgccagattgcacaaagaattaaatcatcatttttgggtatccttgttattgatgaaatgcagaggcttaaattttcaagaaccgggggtgagagtaagttgattgattttttacatgaaattgtagattccatgggggtatctatggttttttgtggaaatcatccttttgacgagacgctgacaaagaaaatgagaattgccaggcgggcagagtctggtggttacatgaaaattaagaatgttagatacgattcacaagactggcaatcgtttattcattatttatggccattacaatggacaaatgttgaaactccattaaatgatgagttaaacgaaaaattattcattttatctaaaggcaatattggattggctcagatgatttatcggggggcacaattaaaggttatcggtagcggcaatgaaatcatcactggcgcagtcttgtcggcctctgtaccggtactcgtgagtcatacggaggaatataaggatactccactcccgggggccgcgactgaagatgaggaagctaaatggctctctgcatctaatgagggtgatgcttcggctaaaatcatggcagagaagtccctaaagtctttgatccctggggatatagacaggccacagcacaaggaattcgtaggaaaaatagacgaggttttgcgcaatttcgacgagaaaatactgtctcttgaccacgatcttgttatcaacagaacagctgaaaagaaaaatacctacgatgctcttcagcgttgcgggcttataaatatagatccacttaataaattgtaa

SEQ ID NO: 156469 - DNA, 150 bp, Enterobacter cloacae
atgacggtaagcaacctcatcgctttcaatacccagggcaacgccttcggcggttggcgtgcggcggatacgggtaatctggccgctcagatcgcagacgtagcggtttgcataagacaatcatgctaccgccacaccctgataaattga

SEQ ID NO: 156470 - DNA, 600 bp, Enterobacter cloacae
atggcgcacctcgccaaagctgccgtactggccgctccagcgcaccgcgccgcgctcgtcggtcacttccagcggagcaccgttcagatcggtattgaaccagtaaatctcaccgctgctctggtcacgaaggtgatccacccgtgccagcgggctccaggcctcattcgggtcgtagatataggtgctgcacagcccgctctcctgctgctcctgcagcagacggtagccctgccacaggaagcgggtgtcggtggtgccgtgcgtcttggtgacgattttgcgcgtacggcggcccagcgcgtcgtagtggtagcgcgcctcaaaccgcccttccggcccggttccgcgggcggataccagacggttctcggcgtcatacgcataatgctgttcatacagcccgttgcggcggctgaccaggttgccccagtggtcgtatttcataaacagcgcctgccagtgctggaggcggttatccgtgaccggtaccggatcgtcactggcggcgaggttatccgcggcatcatagctgaactgcgcgcggctgtgcccctgccgggcctcgtagtgctcagcagacgcccggcggcgtcatga

SEQ ID NO: 156471 - DNA, 288 bp, Enterobacter cloacae
atgcagcaatctgtcttatccgtacaacaacctactgatgtactgacatctcaccgtgacaatggtcattacacactgatccattcctcaacctatctccacgatggtttgacctataagcttaaccataacccgttaaataagcgtagcagtccgatacgaaaagaaattatcgacaggtttattgaccagcttcgcgctatgttgtcgcactataacgaactgtatggattccgctttgacttgtctgtccctgaagggatgtctgtttactcgtctgcgaggtga

SEQ ID NO: 156472 - DNA, 141 bp, Enterobacter cloacae; identical to SEQ ID NO: 83376

SEQ ID NO: 156473 - DNA, 1128 bp, Enterobacter cloacae
gtgttgattacatctttaaatcgttctttcaaaggctttacattatctaattcaaaagcaatagagctaatgaagaggtttaaagatgcagaacatgtatattcagagttcagtatttttaatagaagttatggtcgtttgtattctgcactcggggctccaggattagcaaaggataagtttgagctagctataaaacaagatcctgatgatgtgaatgctcaaatttttctcgcaatgcatttgcattctgaacaggattaccctggagctaataaaatttataaacaactcatcgattgtgggtgggtgaatgaggacgaatattcatcagaatttactcagagaatatttaatggatactacctctcattattgtatgatcataaatacccagaaattttagaaaatagcaaagaatggaaaaagcttaagcagtccagaggtttggtaggagtgttcagagcaactgcttataaaagagaagccgagggcattgcgacatctgaacctacccgtgctatagatttgttatcaagatcaatgagtataatggatgatgttattagagaggatggttatataaaaccagcgtgcgatcaaaccaaaaatatatttaacgaaatagcacatgctttaaataataaagaatgtatctctaatgaaaaattcctatcacaatctatagatttcatttcacgtcatttaagtaatgttgtacagtctgtggatataagtagtgatgacgagatttcaaaacttttgaataaactatccactatgccagcgagggataatccattctctaaaataaacactagttacttatttagaaactcatcatcagataagtttgactcagatgaattaagtgagagggggtatattatcgcacctatttcaaatatcccgaggaaaaaggaaagaaactcaccatatatattctgtagcaaagatggtcaggattacttcttgcattttgagcatcttaaaaatggagattggagtgaatggtgctcattaagtattgggcaaaatgttgcttttaaacctgtggatggcgtcagtcgtcagaatggaaaagcaataagtgcaagcgagatcaatttaattaatcaacaaggctag

SEQ ID NO: 156474 - DNA, 552 bp, Enterobacter cloacae
atgcgccgcccgatccctgcgcagcttgctgctccagaaacactagaattttgtcaaaaagttgttcctgacgctcatcccgtattacttaacagtgaccctttcccggaagcggaagaaatggactgcttcggcaatgtcgaaaaggctatcgcgaagaatggcggcagggctgttaacggctgggctatctggctagttccaggcgtttatattgaagctgagtttcactgtgtttgggagaatgatgctggaacattgctggatgttaccccataccattatcgtatggataacattctctttctccctgatagcacaaggagttacaagggccggcaggtagataatatacgtcagggtctggtgaatgatcctgatgtgaccagatggttgtaccttgccagaaaacgttttgaaatattaaatacaggtgacttggcgaatcaacatggaagtattgaactgccacccaaattagccaaagagttcagcaaagtcatggaagaaaccgaaaggctgaattctagactaaaacgtaggtatccataa

SEQ ID NO: 156475 - DNA, 1479 bp, Enterobacter cloacae
atgggcaatgttagacttaaagtatcaactggcattttaaactctgtcgaaggactgcctagatttcaaaaagggctaattgctagtttgcaggaaattagagagcagcagcacatctggtcaaaccgtgcatatgaggctcgtaaagctcctgaaaattcagcagttatgttagaaaaagttactttaacattgacttttgagcatgaagatttcaagaatatattgattggattgaaacggtactttcctaaaaatgaaaaaattcaaaccttcataaactccttgaaaatatctattgataatttgaatgctagtagttggcatgagttaggctttattgcaaaagaaaaaggaagatatatacctgatgtcactgtagataaattattaccaaaaagtgttgataatatttctctatcttttcacagaatacttccgtcagtagcatgtctcatatttgaatttaacctagatgattcaattggtacagcgttaaatattcttcaagataaagtttaccttggtcctgttgaatttaaaaaattcttccctattcgtaatattcatgataggtattcaatgggaacttcatacgaaatccctgctgtaattattaataaccaaaaagatgtacttcgaaaggatatcgaggattggattcaaaaaggatttaaatggaatgttaaaaatagtcattcttttacatacattgatgtctaccgaatatcgggtaacccaacaaacgaaaatgagcgtagagaatggtggaagaaaaatagcacatggttaaatgaatatggcattaatatcaacgacttcgcaattctggaggggaatggtttcttgatatcaaaaccaaaaatcacttcctctaaatatactgttgcaaaagtaatggctaagtttgaaactgctgaggagttaaataaaagagatttctttagatataaaatcagggcggttgctatttcagaggcgatttttaatgttgtggagaaatactctgagaaaataaaatatttacgtggtaatggatttgaaaacctttacaaaggtacgaagcttacaagaagaaatcaaaagaacatacaagaaattaagagatctcttataatgctatcaagattcgaacaggaattagaaaaatccaatttttttattgctcattctcttgctgaagttggagagttgcagaatttatataaaaatattagcgaaaatctagcagtagaaacatttaaaaaagcagagttcagagttaagacaataaaagaggctatcttaatagtcgatactggcttaacaaattacctatcagtacaaagtatatatgtaatgtacaaattacaaaaatggatgtttatattgtctattgtcgtaacgatagccacaataataggcgttttatctggatgggaaaatataataaaaatctttgagatggctaaggcgttagtaatgccaacaaggcaataa

SEQ ID NO: 156476 - DNA, 363 bp, Enterobacter cloacae
atgaaatcacaaaaggaatttgatgggtacatctctgcggaaataagctctgttatcaacaagcaaaataatgactataaattcatttcaattgcaggaaagatgccagtctctgagcaatataggcttgccgtaagcaaatttcctttaatgaaagaattagttccaatctacatggacaatgggtggggttggggttctgctctaatggcacattacggagcggattataaatttaagcaaatcaatcaggagattaaatcaggcgtgtgtaaaaaaacacctgtattcgaatcaactaaatacgacctttatgatcttgatgacatgattattgtaatgtttaaggggtttaattgctaa

SEQ ID NO: 156477 - DNA, 474 bp, Enterobacter cloacae
atgttttggtggtgtggtggactggcactgagtcgccactctcacttacttcctgagcgccctatttctgtattggcaaacaactatctgcccagccggtttatcaggtcttatcacactgctagcgttgcacctcgcttgaggacaccaccaccacaccccaaaacattcctaattcggtgccgtctctccggctgtcacccttggcgcttcatccagttgcaggccttagccacttaccagatggacgtcactcgaacttcgtgttgcgggttacacctgtactacgcgtcgagtccgcgccccgcagttagcctctcatgcggggaaagctgtgtttatggcagttggttgccagccaggcagctaagctttgttctttcagcgccaactccctgccagtgttgcccgttctcacgccgttctcgctctcgcgcggggatactctctcaccgaccggatcgcacccggtga

SEQ ID NO: 156478 - DNA, 189 bp, Enterobacter cloacae
atgcataagaaaagaattattgagttagccaaaaggcctcaaggggtaacggtttctcagttatctgacgctggcattccagtgtgcgaagccaataagttattcaatattggacttctatccattgatatccctataacaaaaaaccccgtatttagaataatcagaacccacaaatatgccgcctaa

SEQ ID NO: 156479 - DNA, 153 bp, Enterobacter cloacae
atgttgaaactcattattgcacgcgatgtgctgacgtggattgatgcaaacaagggcgaggatagccgcccaacattcattataaaaactttacgaaatgctatgaacgagggcacgaatgcaccaaccgaacaaaatagaaaagctgattga

SEQ ID NO: 156480 - DNA, 1101 bp, Enterobacter cloacae
atggctaacgacgtttatcaaagccagaaatgcactttgcgcttctccaaaaaagctatcgatagatctgctcaagcaatcagacatggttgtgttaatgaggaacgtcaggctgctattgagatgatccaaaatttcagggaattacatctttacccgttaatgttaatgaaaaatcatttagcgagaacatccgctaaggtgaataagaaaataattgttgctcggcgtttaaaacgtcttccgactattatcgataaacttgaacgcccaacccttgatggaatacacgaaaactcgataaaattaacacgtatgcaggacattggtggctgtagagcaatcgtaaaaaatcttgaacatctaaaattattacaggaccgtctcgaaaagagccgttcaatacataccattgttcatactgcaaattatttgacacctaaagcaagtgggtacggtggcgttcatctaatttacagttgtttccatgaaggtgacgatcataacgcgtggaaaaaaacgaagatagaggttcaacttcgtacagaactacaacatgcttgggctacaagtctggagatcatcgatacactcgaaggttataagctgaaaacatcgcaggaagggcatgaagactggcgtagattattttatttagcagggtgcttagtcgcccatgatgagggtgcatgtattctttcagatgagaccttaaaatcacatagaacagagctatctgacctgcatcacgaacttcaattaattagcaaattagctcgttactctttagccttgcacttcacaaacaatgataaatcagggttaaaaacaccaaaacactttaaaggccattttttaattgaaataggaaagttttcaaaaaataaattccccattagagcgcgagctttcaaaatgagcctctcgggccaggctttagaagcattagcagaaagcgaggctaatgaagaaatagtgatttccgtactgctttcagctgaaaacgtaaaatcattaaaaaaagcctatcctaactattttggttccacggaattattttctaaattcttgcaaaaacacattgatgcagttcaagaataa

SEQ ID NO: 156481 - DNA, 327 bp, Enterobacter cloacae
atggaaaaagaacactttaaggctgctgtacagtacgatgattggaagggaagcgttgcagcggatagtgctgatcaagaggatttcagcgatttattgagagataagggaattttgaaggaaggagaagtggtgaaagctatttccttctattctggtcagcgttttttgaacattgaagcattcgttactgacgatgaatacggactcaaaagggaaagaatcgagatgacgtatgaagaatttttcaaaactttcaaaagattctcaatgaaaatctctcgtcacggagaatttgacgatcaagaaatcgagttcaaagaataa

SEQ ID NO: 156482 - DNA, 906 bp, Enterobacter cloacae
atgtctctttggcgatacatgaagaggcttaagcagagcggcaaccatagaaatatggttagtcaaattgaatacctattagcgcttacgaagtcgagtaaaagtggtttattaccgataacatatgtgcaaagtaatgggggacggttgtatgcagaaggccctgtaaatcttcaaaattgtaagagagagattcgtaaaactgcattgactggcatgttcgatgtggatatcgaaaattgtcactacaacttactagaacagatgtgcgatcggatcggtataaaaacgccctacataagccattatgtccgtaacaaaaaacaggtccgtaaagaaatagcctctacgttacaatgcgcagaagaacaagcaaaggtggttttgattgctcttatctatggctcaaatctcagtcctcgtggggtgctaaaaaaactgggtattgataccagtaaagtgactttcaaggatacttgggttagtaaactagctcaggagatcaccaatgtgagacgttatgtgattgaagattatacagcacggactagagggagttgcaaaatcaaaaacgacgcagggatgattgtaaaaaccagaacagaaaacggagaatgcgttaaggagtcaaaattattagcacatcttctccatggtgcggaatcactgatacttcaacacataattagctttctaggtgataatgttgttttgcttcagcatgatggtgtcacttgccccaatcctgtagatacagatgaactcagtgattatattgcagagaaaacaggctatcgtgttcaatttgatattgagcagctgaaaccagactttaatgtcgatgccactgatagaattcaacaaaatgaattggaagacatttttgaaagtgaaatggctgcatga

SEQ ID NO: 156483 - DNA, 513 bp, Enterobacter cloacae
gtgtatagcaaggcctccagcccatttcacggttttgtaaaacgagaatgtaatatgaacctgaaaccacgaaactttgatgaagtcattgaaactgtattagttgataaaggtgtttgcacatctgaggtattgaatagatattcaaaaaaagagaaatcttattatttcaatcaatttctgatcggagccgtcaacaggcgaaagcatcccaaagatgagtacgttttctcactttattcctatgaaagacgaaaacatataccgagcgcttctagatttgaggacatgataaaagatattcctttaatcacaaaaagttgtaattactgggcagatcattggcctaacggatatagagtgactagtgctgggtatgacattttttcggcatgttgcaatgcagttcctagcaaatgtggtctctataacgaaggaaaaccatacaacccacctcggaatggcatacgctcccaattaaaaacgtctcacattggtgatctcctgagctag

SEQ ID NO: 156484 - DNA, 846 bp, Enterobacter cloacae
atgaagccaagaaaactcattaatatcataatgttgaatgcattcttattttcaggcaccgctacagcaatccccgaaaaccgcatcaacttccataacatggatactgtagatggccttctggcgctcccggcaagtgagctttgtctgaatggtggccctacttcagaagacatagaactcatactgctaaatggccctctggcacgtccaatgtatcaaaatgatcctgctgtagctcatatggtcattaatgaacagtccgcaaacattaaagccaaaataaaagaaaagtgctcaaatccagataagccagtgcgtaagttaacaaaagaattgtttaaaaatgaagacgccatgtgcaaacgtggagcaccgacgatagaagaagttaaggtattcattaaagaatctgacgcccctgaacttaatattgataaacaattgcaagccatcccttatgagaatcgcttgataatggaagaaggtgcgaaattaaaaggatatacccttcgtgaaatgatgattgaagacatagctacgaaagtctcaaaaaaatggggaagagcgtgtgctgatagatcagattttcagaaaaaatcaaagaacatcacaaccgatcatgacaagctaaaaataccagtttcccctgatgaggagtatcgcgttgcagataaaaaacttaatgatatatggaaaagactaccatttgaaaatcgcaagtcgttgctaccatcacaacgaaaatggatcaaacaacaagcgatttgcaaccaagatactcattgcttaattgaaatgaccaataagcgtattactgaactggagtctaaaaatgagagatag

SEQ ID NO: 156485 - DNA, 342 bp, Enterobacter cloacae
atgagggcagacgcccgctactggtttgaaattgataacgaactgacattcaggatagcgatcgcacgaatggaaggtcttgccataacgagagcggcgctgcaccaattgaccacgctggcactgagggcaggcaattgccgtttcatctggtttatcaatttgttccgtatgttcacattccggatagcggctgcatccgataaacatcccgaaccgcccctgccgcagcgccagttcgccgccacagagtggacaaagctgtccctccagaattttgacgatatgtccgtccgcctggcttttcaggggacggacataatcacattccggatagtgtga

SEQ ID NO: 156486 - DNA, 267 bp, Enterobacter cloacae; identical to SEQ ID NO: 119602

SEQ ID NO: 156487 - DNA, 486 bp, Enterobacter cloacae
gtgggacgtgtaacagcaccagaaccattatccagctcccatcaactagcagagttcgtcagtggtgaggcagtacttgatgactggcttaaacagaggggattaaaaaaccaagctcttggtgcagcacgaacgttcgtcgtttgtaaaagagacactaaacaggttgtcggtttttactctctggccaccggcagcgttaaccacgtggaagcaatgggaagcctcaggcgcaatatgccagatccaattcccgtaatcatacttgctcgcctggcagttgatgtttcataccgtggccaagggctcggggccgatttactgcatgatgcagttctgcgctgttaccgtgtagctgagaatataggagtccgtgcgattatggttcatgcactgactgaagaagccaaaaacttttatcttcaccatggctttaaggcatcacaaactcaggaacggacattgtttttaaagttaccacagtga

SEQ ID NO: 156488 - DNA, 171 bp, Enterobacter cloacae; identical to SEQ ID NO: 149518

SEQ ID NO: 156489 - DNA, 384 bp, Enterobacter cloacae
atgtcaccaccacttcgcaagaacgacgatgcgaaggcatgggaagaagggcagacctacgaaaaaacactggtcgcactgtcccgcgccgtagtcaacggtcaggtgccggacgactaccaggagtatccggtcagccgcatgcctgcatacacacccgccagtgatgtacgcctgacaccggaacgccagtttgttggtaaccacctgcgcgttgtgcgcttccggatgagcaacccgggcagcatcacccgcagcctgcgcgagcgcgatttctggcgcaagggcgtccgggccgtgatgctgtcgcagaaccagctttatgccggtggcgaaggctacgcctggattgtgttttcagatgacggagacacccgcccatga

SEQ ID NO: 156490 - DNA, 537 bp, Enterobacter cloacae
atgaaagattcggctgtagtggtttttaccgcacgtggttttgaccgtttgttaagtgatggaggttctggctcatgggttctaagcgagaagcgcgcctctcgctgcaagtacgtagtctgtgtacagaacagagatcctgcagataatcataatgatgactggggaagtgtttctgcctctcataaaaacgcattttttatcggcaaaatctccgatgtggtcgtttcccccgaatgggatggttcgcgtccaacaaggtggctgattaaagttagtgagtatgcaaaggttgcatacccaaacatgtgggatggagcaagaaaccctgttgcttattcatcattaactgatttaggtattgatgaaaatgatttaaatttcaataaaatgccagatgttgatgtcaagagtccaaaaatagaccagaaaaaagaaccttatccagatggaatctccattcagcaagctaagatacttttatctaaaaagtatgaggtttctgaagaaagtatagagataattattcgggcgtaa

SEQ ID NO: 156491 - DNA, 342 bp, Enterobacter cloacae
atggataaagcatgggacggtaatttccgagatatcccgttggagcacttcgaaaaaatgaagtcaaaagcccgaacgctagctgaggtgaaaataagcccttccgatgtaaaagcgaatgataaaaatattttcatccgtatcgggatgtcaggcactggtgttaggcctaactatcaggttgaactcccaaatggcttggtcatagcaattaacgggataaaccacgaaaggtttggtgtagaagagttcgataaacaatgggtttctaaggcttatagcatcgagaaacttaacaatatgcgcatgtttggcggagttttagaaacagagaatgcttag

SEQ ID NO: 156492 - DNA, 834 bp, Enterobacter cloacae; identical to SEQ ID NO: 127362

SEQ ID NO: 156493 - DNA, 552 bp, Enterobacter cloacae
atgattaaagaagctcttaattccggaataccaatcgaaaaattaagcctggcactaaacatatctgtagatgctattagagggaaaataagagtgctaaatggtatatctcccgaggttattcatacattcgctaatcaccacgtccctaaagcaacattctatattctgaaaaaaatgaaaccaatgaggcagattgagtgttcaaaattaatgatgaatgttgaaaattttagtagtaattttgcactttctttgcttcataatacacctcctaatttgttaatgagacgagctggaaattcagatactgatactgctggtcgcagaaagatgttagacaggcttgaaagagaaatggctcaaattcacgttgatacccagaaactcaaggagacttatggtgtgaacatcctcaagttagtaattgtaaaaacacatattactagcctgctcgataacccaaaaatcctacagtggcttctaaagcataagccagattttttgacagagttgaacaaaatttctaatattaattctcttgatgattag

SEQ ID NO: 156494 - DNA, 477 bp, Enterobacter cloacae
atgaaaaaaatgacattaaattttaaagatggaagcattaaaattgatggctactcgattgaacttagttcttttgaaaattttacttcttctgaattttacaaagcccattctgaattcactaggataggtaaattttattttgcgaaagatgatattgaatgggaagggcagaactttattgtggagtttagaccagctgttttttcatttaattcatctctttttcttacaagtaaagatggggatttctatcaaacacttaaagattgggaacttagagcatcgttaaaaaaccttaaagatgaagaaagaagactgacagactggattcaaaataaactttccaaagagaaaatggtaaagataagtacccccccttatggagttacatggaactttgaatggggtgagctaacagtgcaatcaaatgaaagatcctttgattgcggtatatacatagaatggaaagattaa

SEQ ID NO: 156495 - DNA, 519 bp, Enterobacter cloacae
atgaatatcaataaagatgacgaactccttgtgatagttaagtatgaaggaagattttattggttcgttgcgttcaaggaaatgtgggtcttagacagagtaaaatgggtagaggattttgtgaaaagtggggtggaaataaacctacagaatacccataaggaaagatatgacataccagttgtaaatgaagaaaacgcgcagatattcattgatgatttaattaaagatggctattcatacgataaggatgacattgctgaggagttttataaaaggctttcgcaaaaaacaatttggtgggatatatatgaacttatgccggatttatttatagactttgataataaaagattatattcggaatatgttgagactatgcattatcaagaatatgttcctgatggttggcaaggtgaacttgttgatttttgcagtaatggatcgttacctcaagatgaaattttctggataaaaaatgaaactgatcatagaagcgttttgatcgctaaaggataa

SEQ ID NO: 156496 - DNA, 132 bp, Enterobacter cloacae
atggcccgcgcggatcacgcggttcagaccctgctcggccatgaaatcttcacgatcggcgtcgttcatttcagcgatatcggattcaaccgcgttccaaaacgctaccactacagaacctttatcgcttga

SEQ ID NO: 156497 - DNA, 693 bp, Enterobacter cloacae
atgtcccgttttattctgggtgactgcgtgcaggtgatgtcccgttttccggcgcgtgccgtcgattttattcttaccgatccgccgtatctggttggctataaggaccgtaacgggcgcaccctggccggggacaactctgccgaatggctccagcccgcctgtcatgaaatgtaccgcgtgctgaaaaacgacagccttatggtgagcttctatgcctggaaccgcgcggatctgtttctgaatgcgtggaaatcggccggtttccgggtggttggccatatcgtcttcgccaagtcctacgcctcaaaatcgacgttcgtgggttacacccatgagagcgcctacctgctggcgaaggggaggccgcaaaccccggaccgtcccattccggacgtgatcccctggaaatacacgggcaaccgacaccacccgacggagaagccggtgcagagcctgcgaccgctgattgaatcgctcacgtgtcccggggccattgtccttgacccgttcgccggcagcggctccacctgcgtggccgccgccgaagccagccgacgctatatcgggatcgagatgcttgaggagtaccacgccgctggcgttcgccgtctggcacaggttgagcgggcgagaaggatgccggcggccaatgacggcgcgttttaccctgactatccggaggcagcatga

SEQ ID NO: 156498 - DNA, 222 bp, Enterobacter cloacae
atgaattacccgggacttgaacacctgcgcgcggacgtggccgcgctcagcaatgccatgtgtgacgtgcggatgctgctgaaccgcctcgaatcgcagcaccggcacgacgcggcaacgcttaccgaacgtatggctgcgcagactctgcgccggatcaacaccctgcttcttgaagcctaccgcgaagccctggtgctggacgaaacctttcaggactga

SEQ ID NO: 156499 - DNA, 1005 bp, Enterobacter cloacae; identical to SEQ ID NO: 31749

SEQ ID NO: 156500 - DNA, 369 bp, Enterobacter cloacae
atggagtcgttcatctgccggcagcttaatcaggttgttggcacgtttacgctccgcgccttttttgcgccggtaaacgagtgcctcctgacgcttacggccagaccagcatttccgcgcagagtgggcctgaacatcatcatgttcgctcatcactccttcccggatcagctgctcacgctcggcgctctgacggagcttcttctcctgctctttaaacagcttgtccatatcgacgcccagcatctggaatcccacaggggtgatatagacatacgttggcagccaggtgcgggattcacgatcccaggcgcgttcttccgcgagacccagaacaccaaaccgtacctgttcctcaataagccgtga

SEQ ID NO: 156501 - DNA, 198 bp, Enterobacter cloacae
atgcaactgtcaccggaaacccgcagcatcctgcgccagtataaaacgctcatcaacgagcgacgtcgcgaatccggactcagccccgtaaccacagcgaaagtgctggacgagatctgcgaatcggctacccgccagtgtgccgtctatctttgcggccacttcattctccagggcggtcagggggatggaaagtaa

SEQ ID NO: 156502 - DNA, 1395 bp, Enterobacter cloacae
atgaatagtaatgaattaacatctgatattcgtgatttaaaagtaatgggggccagaacgcaatcaggaagtggctgggcgagtgcaacgcataaactcgttgccctggataaagaaacgctgcaaccggtgagcgttgactggtggtatgaagatgaaaccacacctcgctttaccgggcccgtttttacggatacccggccagatgtacggttgctggcaaactccgatgtttaccggctgggtgacgtgattaatatcagtaattttggtggttcgggttccgcgttagcggccatcaaaaatgacggtactgttgaagcgtggggcatgcccaaaaatggtggtacatcaccaacaagcgatcgaaatcataatgtcagagccgtttacggtggctgggatacgtctgctgcggttaatgccaatggtcaggtatttacctggtccgtcgatgatgataacgctttgccggataatgtggcggcattgaatgatattgtagatattaaagtggcccaatattttaccgatcagggtaattatacctatctggcgttgcgggctaatcatcaggtggtgcagtggacagatggtacttcacaccatgattttccagcagacattgccgagcgtaaagatttcatcgccatccagaccacggaatacgcttttgcgggaataacccaaaatggccatgcgctcgcctggggaaatacaacatacggaggagagttgccggaacatttaaaggaagttaatgatattgtcaccctttacagtaatagaggtgcatttgtggcactccgggcctcaggcagtgtgattgcatggggtaatgacaagcatggtgctgctatcccagataacattgccagcctaacggatattgtttccgtacattgtactgatgcgacttttattgccttaagacaaaatggcagcgtggttttttggggggaaacttactatttgaccgaactgccagcggagattgctagtctgacaaatattattgatgttcaggccgcagttaatggaagctatgcttttttaactacagagggcaaagtgtactgctggggacatattgcgaaatcaatgcccaaggatatatctgaagtagtcgccctcacaggtggaacctggaatgcttttgcagcacttcgtcgtgatggcactgttgttgcctggggggatgaatatgagggcggtgacaccacgcccgtcgcaaacgaactttatgacattcgtgccatctattcctgcggctatcgtttttgcgcgctgcgcaacgatgatcgtctctttgaatggggcgaggaagcaagaacagatatcacaaagatgccagcagacttgcagggaaatgttacctatagctttgttaaataa

SEQ ID NO: 156503 - DNA, 219 bp, Enterobacter cloacae
atggccgacatcatcgacaccgcagtagagattgaagagcttcagcgtaacgctgccctttccgctcaccgagtaaaccgcaacgccgtatcagctgagcgttgtgaagaatgcgacgagccaattcccgagccgcggcgcgctgccattcccggctgccagacctgcgcggattgccagagcgtcatcgaattgaggaataagcagagggggatttga

SEQ ID NO: 156504 - DNA, 735 bp, Enterobacter cloacae
gtgaatgagttggctcttttcgcaggcgctggcggaggaatactcggaggacacctccttggctggcggacagtatgcgcagttgaacgtgatgcctacgccgcacaagttctcgcgcaacgacaaaatgatggaatcctcaaacctttcccgatttggtctgacgtgtgcagttttgacggaaagccatggcgaggaattgttgacgtcgtttctggcgggtttccctgccaggacattagcgcaaatggtaatggcgccggcatcaacggaagtcgttccggactgtggacagaaatggcgagaatcgtcagtgaagtacgacctgcattcgtctgcgtggaaaattcgccgcgactcaggggaaaaggtcttgccgtggtcatcggtgaccttgccgagatggggtatggctgcgagtggtttcgtctttcagcatcgaactgcggagcgccccatgaaagagacaggatgtggattgtggcctacagcgaaggcaacgatccgcggcgactgtccaagcgagcggctgcgcagaactccagacttaccgagcgcgataaagatgcgtccattgccggatgggtcgcagccacaccaggatggacaactgaacccggaatgggtcgagtggttcatgggatggcccatcgggtggaccgaattaaagcccttggcaatggacaggttcctcgagtggctgcatcagcattctccatcctcaaaaattcatag

SEQ ID NO: 156505 - DNA, 2058 bp, Enterobacter cloacae
atggctacgacacctaccaacctgccagtaccgagcgagtccccgcgcgatctgaaatttaacgcgggaaaaattgatgagttcgttacttcgctggtaaacacttatattgaccggttcggtaatgagcattacaccatcgaaggtctgcggtggcttgcacagcaggcaattgcccagtatggatggatcctcattgactccttccagaacggcgctgatatcactctgccgaaccaggcgctgcgtgatgaagatactggcgaatattatcgctgggacgggtctttacctaagcatgttgatgccgggtcaacgccagcttcttctggtggtattggtattggtgcgtgggtaggcattggcgacgctgcgctcagaagcattctcgcgaacagttcaaacaccgcgtatggtgatgctcttgttgccgtgaagcagccttttaccgggtctgtcgcaagaaccgtgcatgacaagatggctgaaacagttactgtggcagacttcggccctgtcggcatagggaatgcagttgctgatatggcggctattaatgctgctctgaatagcggcgcaaaacgcattaattttggcagtttgagttacaaggttactggttggatcatcatccccaaccctgacatggtcctgatttctgataacgccagttttgaacaaacgctttggggttatcctgtattcgaaattcgtacaccgcgcgtgaaaatgctcgggcactggaatttcaaatacaatggtgacaggagcgtagtcatttccagtaatactctcgggtactcatacgtaacagagggtgactggaaagcatatggctcgccaatctggatgaactattacaataataacgatgttagtgatttcttcattgatactgttagggcatatggttttatcggtggtgtttggttttttggtaaaagatcacgtataaacagagccgagtttgacacgttggatttcggcgtatggggttggtgcgaggacgatcaaaacattggtgacatttttcataagaacatcactgtttcgcaagggcattcagggcacgctctctatcttacccaggcgggaaaaaacctacatgttaactccattgtaattgatggttcaccaaatggatgtggtgcagttaagattcataacgcaaagttcttctatataggagaggtatcaggttctgggatgggtgctgtagcacaattcagagatggagcaataggaagggttgatagtactaaatgtcaatgcacaacaaacgttgcttatgatggagtaaattatcagattctggcctttggcactgatacagatataagtgtaggaacacttgatctgtacaatgacataaatggaactaactataactccgttatacaagcgacagtaggaaatatatccattgataacgttaaaataacaaacgttaatgcaagccccgctcagccaaggttatatttaagcacggcgggtggagcttgctcttttggtcaaatagaaattaaccaccccaatagcttatgtacgaactatttctttgatttaattagttattcaaaatgcaatatcacgttgccacctatcatcaagattgcaggtccagaagtttttcttttgaaaaacacttatgccgctagtaacaactacgttcttgcttatgacccttcgctgatatcacctggagttggggcgaatcttgttgtttgtacgcaaaatacatactttggcgttatgtttaggggggatggcttcgccttcaataccataacaggtagcattccatcagttacgcacacggcgaacgcatcaattacccagacagcaactacgaacctccagagattaagatacgccacccctgggcaaacattgacgatcatgaataatggaggtgctactaatattgttcacaacggcgcagcgggttctgatggaaacatcattacccctacagcagcgactatccttgcagcaaactggcattgcgcaattttcaaaaaaataggcctgaatgtatatcttatagcgtactcataa

SEQ ID NO: 156506 - DNA, 1053 bp, Enterobacter cloacae
atgcaagcacttaatgccattgatgaaatagataaaatgattagaaatcttgctgcaattgcactgatatcggtgctcgtgactgccgggtgtgagcggggtggctcctctgacgaatcaataacgttaaggtcaggatcgtttcagcatattgaaactaacggtggaaaattgatttctgacaatccttcagttgttcaggttgtcagtggtggcttaaaggctgtaagtaaaggctcggccaatgttaaggtaattaatggagatagagagttacgaacaatatcgataaatgtaagaccattcaggctttacagcataggtaatagccacacatgggatttgaaacctgatagcgacttagtaacaatggctaaagccaatggaatcgccctagataatgactggcacatttactgcggtcataacatcgacaatataactcatcaccctgataatacatgcgtgccgtcaaagttctataaatataaaaaagcaataaatactgttgcgtatgatgctataactattgaacctttctttggcagcacaggaaaggcagaagttgatgcgattgagtctttgattgatgaaattaaaaatagcaagagtaaaagtgctaaaatatttatatattatacttggcctcagaatgactctaaaccgcttgatgccctggattatgataagatttggaattctgaatttccacctaaaaacattcaaagaaataacacatcagcatttatctcctatctaaaggaaaggttaaaaaatgataattaccctgtatctggcttcattcctgtaggggattatttatctgactttgatgctattgcaaagaaaggtggaattgaaggaattaatggtgcaggtaatgtctatcgtgattatctacacatgaacaatattggtaaattactgatagccaaaaaatatctttctacaatatttaacattgaaaaaatacagtatgcggatggaacatacatgcctggacaaacgcctggccgagacatgcctatacctgagacaataaagaatctataa

SEQ ID NO: 156507 - DNA, 309 bp, Enterobacter cloacae
atgtcacacacagcaaacattaatgcctcctttgttgcagtcgcagatctattccttacgccttctgccaacattgtcgaaacgcaggacggctacgatgttatagagctctcatcgctgtttaagcgcggagacaccttgctcatttggttttatggccgacagcagcacgcatattgggccggtgatgcgctaatcactgatgacggcgaggccatagagggcgaggcattagatgatgttcgctttgttggtgtggtgactcataccattagcacggtgtgggtagacgacaatccggtgatgtga

SEQ ID NO: 156508 - DNA, 999 bp, Enterobacter cloacae
gtgcaaggaatctgctatagaaacacacagactaatatacctgatcttccctcggattatcatgtaaaatatccgtatggttacgcatacgaatcaagcacgcattttatccactattatggtctccaagattcattttattacattgataaccttttctttgtatctgaaagaaaagcaggcagcttaaccgattgggttaagcgagttttcggtgcccaaaatatcagccctctaaaaaataatgtcggagaggtggttgaaagtgtttggaggccagggttttgcttctgggaggtaattccaacagcactaaatatcgatcgtcacgagcagatgtcatcaggccaagcgctgaggaatttgattaataaaactgatgagcttttactttttattgaaccttccgcacaagggctgcaatcttatggacataagtgcagagaactattgattcttgcttgtacagaggtggagaatcaatgggtgtctctagtaaaaaaatccaacctaaatcagcagaacaataaaagattcacaactaatgattatgtaaaactgctgtccacatgccattttgaagaatatcaggtggaatttaaaaactatgcaggcttgcgtatgtttacaccttttttaagatggagtatgtccgatcctactcaatcgttaacttggtatgacgcttataataaaactaaacatgaaagagctcaaggttttcaatttgcaacccttgagaatgctatggaatctgttgctgcatgtataataatgtattgtgcaaagtatggtcctcatgaactcctagaaaaaaacaaccaattatcagggctcataaatgagcattttaatatatccttacaaaatagcaatttggatagtcactatattccagaagtcactttacctttgaatgctggagatgaacttattgctcaaaatattcataatattaatcaaataggtgcgtgggtaactaaaaatttaatcatatag

SEQ ID NO: 156509 - DNA, 909 bp, Enterobacter cloacae
atgagcaacgacatcgcaatcacatcgcagcctggcgctaccgttggcaccgctgcggcaatattcagtcctgagggtatggaccgcctggtgcgtttcgcaaccctgatggctgacagtaaggccaccgttccggcgcaccttgcaggaaagcctgctgattgcctggcagtgacaatgcaggctgcgcagtggggaatgaacccgttcgctgtggcgcagaaaacgcatgtggtgaacggcactctaggctacgaagcgcagctggttaacgcggttgtgtcctcctccaatctgctggccacccgcctgaattatcgctgggatggcgactggtcgaaagttaacgggaaaaacgacaaatctccgagcctgaccgttaccgtatgggcgaccctcaaaggtgaatcagagccgcgggagctgacgatcagcatggcacaggccggtgtgcgcaactcccctctctgggagcaggatcctcgacagcagctcgcatacctgtgcgttaagcgctgggctcgcctgaatgctcctgacgtcctgcttggcgtgtatacccctgacgaattgcaggaaacagcaccgcgcgttgagcgcgatatcacgcctgcgccggccaccgcatcaggcatgaacaagctgatcaactctaaacctgagcagcaccaggaagagaaaccaaagggcagcgctgaccgcgaaccagatgaaatgctgaagtccttcaccgatgccgctggaaaggccgaaagcgtagaaaagctggatttgattttcaacggcggagtttggccagacggtaaaaagcgccagggcgccaaagatgcgctgtctggtaaatggcttgaaatggcggaagacgtttacaacgttcgccgcgatgagctgaacgaagtacctatgtaa

SEQ ID NO: 156510 - DNA, 444 bp, Enterobacter cloacae
atgaaaccgagttatgaagaacttgaagccataagcgcggcgctggctgcggagaatgcagggctgaaggaggctctgtggtggctatacgaaacagtctcatctgactgcgtatctatccctaatgagaaatacagttccgtgacaaatgcagcccaggtattgagcgaaaccactgccaccgacgctttcctggctgaagtacgggcgcaggcgcgtaacgagggcatcaactatgccgccagtcgtctcgctgccgcattcaatcacggtttcgttgataagcctctgacagaggtctgcgacgttgtgcgcatgattctagacaccaaagaagacctggcaaactccacgctaccagccgctgatggcttatctggcgaatatgcagagaagtttatcgaagagtacgccgcccagcttcgcaaaggagtgcagtcatga

SEQ ID NO: 156511 - DNA, 582 bp, Enterobacter cloacae
atgagcaacatcgacaaacaggcgctgcgtgaaatagcttcggcagcggttggcgcgcatgagcgccttagtgttgtgccgcctgatgacattttcgacatctcactggcagaaggaactcagcttgatgcagatatcaccgccctgaacgcactgaactccgccgccaaccccgcaaccgtgctggcgctgctggatgagctggaggccgccaagcaggattcagctaggtggttcaaggcgtttgagaaatctgtttccgttggtgctcggtatgaggaacggattgctgaacaacagcgcagtttagaccaccgtgaatttttgctgttaagcgccgatcaggttcagcgcgaatatgctgaggcgctgggatgtgctggtgataacgagtcgattctggaggctatcgacgacatgaagaagcgcgttgctgagctggaggcgcgggatatcaacatcaaacagcaagcacaggctttatttgaggcaatcgcaaacccgtctgaccattatgtacctgcatacgttaggtgtttaagagaagcgctgaatggcactggtacagctaaaggagagtga

SEQ ID NO: 156512 - DNA, 177 bp, Enterobacter cloacae
gtgaccttcaatcgctacgtgttcaccgtaatgcttccgaacctgattctctgctcactgctaggtaagcctgcactggcgatcgaaaaggctgcacgcaaagttcggctggcatgtggccgtcgcatggagcgtgtcatgctggatgcgccgccgaaggagaagagcgatgcctaa

SEQ ID NO: 156513 - DNA, 243 bp, Enterobacter cloacae
atggtcacggtaacccaggaatcactggccgcacgcatcacggaactggaatcaggcccgcgctcgctgaaagaggattttgccctggaagcgtaccggatgttgttgcctcatgtcgcggagctcgagcttgctgaacgcgaacgaaaggaatcatgcatccacgactggtggcattttccggtcggcaaagtgcgagaagaggtttgcctgaaatgcggggagaggaaactccatggctaa

SEQ ID NO: 156514 - DNA, 174 bp, Enterobacter cloacae
gtgaccagagaagaattcacagaaaagatgcgcagtattgcggagagcgggaagggcaaagacgcagccctgccacacattgaagctgatgagcttatcatgcagtggcttcgtgaaacgggatgcgaagaggctgctgatatattcgataacatggtcaagtggtacgagtga

SEQ ID NO: 156515 - DNA, 795 bp, Enterobacter cloacae
atgcttgaatctcttaaagaatatttttcttcaacaatcaataccgccgctcagagaataagcaatccagtatttggtgccttcgctctctcatggtgcgcatttaactggaaatcaattttatatctctttctcagcgactccggcatcatcgacaagatcacgtacatctcatataacagcaacttattaacagttgtactttacccttgcttgtctgtaatagctttgtgcggagggcttccatgggttaataacgcgattttaaagtggcaagccaagccactcgacaacaacgattcaattgagaacttcaggaaggcaaaacttatccttcgtgctacgcgccttcaacgccttaaggcaaagcatgatgtcacatacgataaagttaggactggagccgaaaagaacatacaggagatgaaggaagagattattcggtcaaaggctagcatgggtgaattaacagcagaattgaaagccaaagatgatgaactgagaactgcgagcactcaactggcagatctcaatcgttcaatacaagaaacaactgaaacacttggaagaatgaatgaagcatatataaagcttaaaagtgatttcgacgattacaaaattaagcatcccgagaaatctcaaataaaaagtctgacatttggcaacggcgatactgttagcggttttttagaaaaacataatatatcaggggtaacatccggcaaaccaaccacttccaatacctttggtatactgtcaggattatctaaccccaaggatgaaggtaagaactag

SEQ ID NO: 156516 - DNA, 270 bp, Enterobacter cloacae
atgcccggcgaaccgggcgaatggaagcaagggtctacggagtgccttccttggcgggtgatgcagggtttacagcgcaacgtcatcggaatggcgctctgctgtaaaaagggcggtggcaagtccatcatgggcgcaactgccaccgccaaaactacacgcattacctggtactgccgtatcacggtcctaaggcgtgattgggttgtggtgctgtgcgtcagcatttcctttcgtcgccttggtatccgccgcaaccgaaccaactag

SEQ ID NO: 156517 - DNA, 1803 bp, Enterobacter cloacae
atgagttacttcggtcttaaccaggtaaaccagaaccagcagcttgacgaggcagcgtcaaaccctgctggctttaacagtgatgtcgggttcttcgataactcggtcggcgcggcggcgtctgggctgtactccggcctggtggcgaaacctgaccagttgctgtgggccggtctggataaagtcgtttctccgatcgcgcagtttgttaacgaaaacacctcgatcaatgacacttcagcttcatacattgctgaacagcgaaaacttgcagagcagcaggttaagcggttgacgcctgacgcggcgaccaccggcaccgccgggcaggttctttatggtcttttcgatatgggatcgcaggcggttgtgagtatcctggccgctggtcctgtcggtgctgccgctacagtaaccagcctgcaaggtttttcagagtttgagcgtctgcgcggcgagggtgtcgattacagcactgcgcaggacgttgcgctggtgcacggccttacagcgggagcggggacagtaataccaatgagtatcggtcttcgtgccggtggagcgctggcggaaggtgttggtgctcagttatccagatcggctgtaggcaatgtcgctggaacagtagcgcgtgccgcgcctgatatcgcatacgccgctgggactaacgttgctttcggcatggcaatgcgcggaagcacagcgtcaatactgcgtgacaatggctatgaagacatggcggcgcagtacgatgtattcgataagcaggcgctggcgatcgatgctgtactgggcctggcgttcggtggccttggcaggttcgtaaactcacgaggcgaaaatgtccgaccacccgattttatgcctgcggatgtcgatgcagcgctggcagcaaatgccgctcatcatgccgaatttgatattgctcccggcgttccgatcaatgtcctgtcccgtgatgctcatgcgcaggcggtacagcaggcaatgcgcgatgtaagcgctggtcgatctgttgatgtagccagcattgtcgagcctgccgcgttcagtgatgtacctggtcgccgcagtctcattgcgcagtcgattgatgaagtactttatcaggcagatgaaggttcagcggcgcgcgccgtggagaccagagtgctggaagaacaggccgcacagattctaccccgcagtgatcgtcaggtttatcagtctgaaatagccaacagtcagcgtattgttgataacctcacagaacagcgtaaccagattctctcggaagaaccaaaaggaagcggaaaggcgctggcacaggcacgcgccgataagcaggccagactgcgggatcttgatcagagcattaccgaggcgcaggggcgtctggatttttcgcgtaatgccctggccccgcatgagcctggcggtaaattcttcgaagcccgtgcagagctcgcccgccgccagcaggctgagtccgatctgaatgcgcaggcgctttctttctaccgtaccgcagaagtgcgcaccgctgatgaagccgcgccattagatctgaatgccgcgttacgcgatgttgaacattccactacgtcaagacccacagaagggcagaaggatattgatgttgtggccgctgaagagtctctgagttcttcaccggacatgatgatcaccgtgcttgacgatgaaggtaatcctcagtcacgcagtgcgcgcgaggttctcgacgaagcagcccgcgaaaatgagcaggctattcaggattcaagcctgtttgacgtggctgttgcatgttttttaagaggataa

SEQ ID NO: 156518 - DNA, 1014 bp, Enterobacter cloacae
atgaataacagacataattgctttgatgtgatcaggcttatcgcttcacttgcagtacttgtaagccatcaatacccaataagcggtaggcctgaacctagctttttcggcctaacttcgataggtggtgttgctgtgatcgcctttttcgccatatctggctatctgatcacagcaagttggatgagttgcaaatcaactcttgcatatattaacaagaggtgcagaaggttattcccagggttgttcgtatgctccttgctaatggtttattttgccgcgccggtgttcggagtatacaatcagaaggcatttgtgctgtcatggtattccattgaatccctgtacagttatgcccttcttcagtttcaaatcccatttaccaatggattcaccagtggataccacctaccaaactcagtaaacggaagtctctggactctaaaatttgagtttttcgattacatactcattgcagctgttctgttcctgaaaaagaaacctctagcgtgtgtaattgggcttctcgtggtttcgctactgatttacacagtatgtgttatggcatttgataagagcccaagcgcctataacattcatgagctggagtactacatttatcgcggctcaatgcttaccgtatcattcgctattggctctgttttctattttaccagaaatacactaagcaccagttatatcacatggattatttctattggtctcgtggtggcttcagtggtgtatgatttcttccaggcattcatagttggcttctctgtgctaatattgcttattggtgtaacttttaacgaaaaaatcattgccggaaaattcgattattcttatgggatttacatctacgcatttcccgttcagcagatagtggttaacgagctgcactacggattctatgaatcaatggctctgtcggctctcatcacaattttgtttggtgctgcatcttggcatctggttgaaaggaaatttttaccatatcgagttgctaaatag

SEQ ID NO: 156519 - DNA, 903 bp, Enterobacter cloacae
atgccaagtgaaaagagtagttcgccgctgagtgttgagaaacttcatcgttctgagcccttggaattgaacggagctacgctttttgaaggtgatgctctgtcagtgttgaggagacttccgagcggctcagttcggtgcatcgtcacttctccgccatattgggggctacgtgattacggcatagatgaacaaatcggtttagaaagcagcatgactcagtttttaaatcgtcttgttacgatcttttctgaggcgaaacgtgtattgaccgatgatgggacgctatgggtcaacattggtgatggctatacaagcggaaatcgcggatatagagctcctgataagaaaaatccggcacgcgctatggctgttcgcccggatacgccagaaggactaaaacctaaggatcttattgggattccctggcggttggcgttcgctttgcaagaagatgggtggtacctacgaagcgacattgtttggaataaacctaatgcgatgcctgaaagtgtaaaagaccggcctactcgttctcatgagttcctttttatgctgaccaaatcagagaaatattattacgattgggaagcggtgagagaagaaaaagatagcggaggtttcagaaatcgacgcacagtatggaacgtaaatacgaaaccttttgcaggggctcattttgcaacattcccaacggagctaattcgtccatgcatcttggcatccacgaaacctggtgattacgtattagatccattcttcggctctggtactgtaggcgttgtatgccagcaggaagaccgccagtatgttggtatagaactcaatccagagtatgttgatatagctgtgaatcgtttgcagggtgaggacacaaatgtggtaaggattgcggcagcatga

SEQ ID NO: 156520 - DNA, 993 bp, Enterobacter cloacae
atgactaataaaatagttttccctgaaccaaaacagcaagttgatttcgctttttccttgaaacgatttcgtggtatctatctccagaatgcactgcttgaaacagttcgtgacatggatattgtggcgcttgatacccagcttgccgagtatgttaataaagcagatctggcaactctcgcaacatacggtttacgtgcagagcttctcttccctgtacctatattattggagaccaatccttttcttttaggctactatcgccttttgatggggtacagccagaaagagttttatgggaaggataaaggcttcaatgctggttgcttcaaatccatggaagtgaaagggaatattggcaaagttgcaaaacccaaaatatctgaactttgtcatgctttttgctcagtggcgtcttctcttttacaaggagttgggccgctgagggttagtcgggagcttcttgatgacttgacacttctcaccgttggtccacaactacgcgggggcgctaataatcaacgtggagctgatggcatcgtattagtgtttgaaataattaaagaaattgtttcgcatgcagtggctgaggttagggagaacgctattgaggttaatagtgcgactggtcgaaatgttctgatcgagtttgctccagatccagatatcatcattcgagaagagatgtcactcgataactatcgaaatgtggttgcaatcgaagttaaaagtggtactgatgtttcaaatattcacaatcgtattggtgaagctgagaaaagccatcaaaaagcacgaggccatggatatacggaatgttggacggtggttaatgtatcccgtttagatatggacaaggctcggaaagaatctccttctacgaatcgattttattcaataactgatttgtctcttagagaaggagaacaatatgaagattttagacggcgagttttatccttgactgcgatttctgcggctccaacgccataa

SEQ ID NO: 156521 - DNA, 555 bp, Enterobacter cloacae; identical to SEQ ID NO: 35237

SEQ ID NO: 156522 - DNA, 243 bp, Enterobacter cloacae; identical to SEQ ID NO: 35235

SEQ ID NO: 156523 - DNA, 1041 bp, Enterobacter cloacae; identical to SEQ ID NO: 35234

SEQ ID NO: 156524 - DNA, 429 bp, Enterobacter cloacae; identical to SEQ ID NO: 35233

SEQ ID NO: 156525 - DNA, 1614 bp, Enterobacter cloacae; identical to SEQ ID NO: 35232

SEQ ID NO: 156526 - DNA, 1278 bp, Enterobacter cloacae; identical to SEQ ID NO: 35231

SEQ ID NO: 156527 - DNA, 510 bp, Enterobacter cloacae; identical to SEQ ID NO: 35230

SEQ ID NO: 156528 - DNA, 1521 bp, Enterobacter cloacae; identical to SEQ ID NO: 35229

SEQ ID NO: 156529 - DNA, 1152 bp, Enterobacter cloacae; identical to SEQ ID NO: 35228

SEQ ID NO: 156530 - DNA, 582 bp, Enterobacter cloacae; identical to SEQ ID NO: 35227

SEQ ID NO: 156531 - DNA, 480 bp, Enterobacter cloacae; identical to SEQ ID NO: 35226

SEQ ID NO: 156532 - DNA, 645 bp, Enterobacter cloacae; identical to SEQ ID NO: 35225

SEQ ID NO: 156533 - DNA, 1356 bp, Enterobacter cloacae
atgaagaagaaaattcaccgtggcatggtgagcattgagattgctattgcgctggttatcgtcatgattgccggaatatacggaatgagcaggtacagccagtatttaacagagctcgaatggtctgttgaagcgcgccatatggatgctgtaaccgctgccgcaaaaagctacatccgtgacaaccgagaaactctacaaaatcaggttggcgcgggtggaagcgtaaaacttaccggcgcgcagctgcagcaggcaggttatttaccgcaggggtttacgctgactaacaccagtgctcaaacttttcaggtcgcgattgttcgcaatccttctgacaatacaaaactggttggttttgtcctcacacagggaggtcagccaatatcttataaggggctgcgatatatcgctcagtcgattaatggcgccggtggttatatacagactgctaatcaggccgaaggggcatatggctcctggaaaatgaacttatcaagttatggtttaactggtgaatcagggcgcctggccgtttggctttcctccgatgttctcggagctgaagatcaggaaagcgatcgtctttatcgttatgcattagctagccggcctgaactcaatcgcatgcacacagcgatagatatgaacaataataatttaaacaacgtcgcaacggtcaatgcgaaaacaggtgcttttactgaaaacgtcactgcaaaaaatggcaatttcagtgaaggggtaaccgctaaaaatgggacgttctcaggaaatattaatgcccaaaatggtgctttctctcagggtataacaactggctcagatattcgttctaacgatggttggttaattactcagaactccaaaggctggatgaacgcaacccatggtggtggatggtatatgtccgataacgactggatgcgtagtcttaataataaaaacgtgtataccgggggggagattcgtggtggtgcattgacctctgaaggtcgactcacgatcggcgagtattccttacaccaaaaagtggaagttgccggcacagcctgtccgcaaatcggtcttcaagcccgtgatgcttctggtggcgcacttttctgtcaatccggtgtgtggggtaagctgggtgcagacgagaaagtcaccacctacagctcaacttttcctaacaataagatagacatggggcagcattcgatgtgcgctttaagttacgttcgagtgatcaaaattggctatgacgacgatacttcaagctgcgaggtaacaaagtcgggcagcaactggttactgcaaagcactccccaacattactcaaattatcgttgcgatgcagtgtgcctcaactag

SEQ ID NO: 156534 - DNA, 1125 bp, Enterobacter cloacae; identical to SEQ ID NO: 35313

SEQ ID NO: 156535 - DNA, 462 bp, Enterobacter cloacae; identical to SEQ ID NO: 35312

SEQ ID NO: 156536 - DNA, 795 bp, Enterobacter cloacae; identical to SEQ ID NO: 35311

SEQ ID NO: 156537 - DNA, 1158 bp, Enterobacter cloacae; identical to SEQ ID NO: 35310

SEQ ID NO: 156538 - DNA, 261 bp, Enterobacter cloacae; identical to SEQ ID NO: 35309

SEQ ID NO: 156539 - DNA, 3300 bp, Enterobacter cloacae; identical to SEQ ID NO: 35308

SEQ ID NO: 156540 - DNA, 678 bp, Enterobacter cloacae; identical to SEQ ID NO: 35306

SEQ ID NO: 156541 - DNA, 1014 bp, Enterobacter cloacae; identical to SEQ ID NO: 35305

SEQ ID NO: 156542 - DNA, 1266 bp, Enterobacter cloacae; identical to SEQ ID NO: 35304

SEQ ID NO: 156543 - DNA, 816 bp, Enterobacter cloacae; identical to SEQ ID NO: 35303

SEQ ID NO: 156544 - DNA, 528 bp, Enterobacter cloacae; identical to SEQ ID NO: 35302

SEQ ID NO: 156545 - DNA, 384 bp, Enterobacter cloacae; identical to SEQ ID NO: 35301

SEQ ID NO: 156546 - DNA, 207 bp, Enterobacter cloacae; identical to SEQ ID NO: 35300

SEQ ID NO: 156547 - DNA, 954 bp, Enterobacter cloacae; identical to SEQ ID NO: 35299

SEQ ID NO: 156548 - DNA, 3078 bp, Enterobacter cloacae; identical to SEQ ID NO: 35298

SEQ ID NO: 156549 - DNA, 1197 bp, Enterobacter cloacae; identical to SEQ ID NO: 35297

SEQ ID NO: 156550 - DNA, 513 bp, Enterobacter cloacae; identical to SEQ ID NO: 35296

SEQ ID NO: 156551 - DNA, 2145 bp, Enterobacter cloacae; identical to SEQ ID NO: 35295

SEQ ID NO: 156552 - DNA, 252 bp, Enterobacter cloacae; identical to SEQ ID NO: 35294

SEQ ID NO: 156553 - DNA, 681 bp, Enterobacter cloacae; identical to SEQ ID NO: 35292

SEQ ID NO: 156554 - DNA, 1263 bp, Enterobacter cloacae
atggcacaacctgtccgtaaggacgtccagtccaataatgactggacgatggccgctgtcggcctgtttatcacactaatggtaatggctttattttttcggcagttaaccattgaatgtacaaccacccttctctactggctctggaacctggctgactttccgcaatttcatagtgcagctgcgtggcgaatcaacttgctggccaagacgcataacattgccgaaaacgtgtcatggagtgagtttttcactgtcatggatgccacggcaggtattttgctaatagctctggtaccactggtgatcgtcggcattgttgctgttcgtcggcaccaggcgagccgaaccagccgtgatatatccattaatacgctgccacgaatcatggcacagttctctcctgccatactgccggcactgagctatggggacaggaaaacgcagctattgaatgtagatccggctgaacatcgcagcgcgatgacgccagatgaatttgtcatcgagcacaagcttgttgttaacaaccggttgaggaaggaccaggcagaaaaactcttcatcgagcagctgggtacaccgctgcagcacgatataaaagactttgaccgcttcaacgatcatgaacgcgcaatgttcgcgatttttgggttgcagcatttccttgataaacgtggcgaagcggagcagctgttagatgcactgaaccgctccactcttaagtcagaccgcaaataccgcaacaagattggatatcccaacctctcgctggccacttcagcatatcgcaaagtcactgcaacgccggcagcgcaaaaatggattaagcaatacaactatgtgcgaaccgccatcgccgcactgcatgacaacgatctgcatctccctattagaaggtaccgctggcttaaggggcttgatcgtacgctctggtatgcccttgcttccacaggccggccctggccatttgtcgaaggtgcaggcgtggtcagccaggcacactgggagaagctggcttcacggtatcgggtccgattaaccaaaccgatcatgtcactggccatcgagggacttgaaacagatttgagaaatataggcgctgtcgtcgtagaacccgccccgacaaaaccctctcctgccgatgttgatgacgaagaggacgatgaagacgaagcaggacataaccagttagtgaattccgcagccgacgaacagcatgtccaccggcacgtacatacattccgccccaaaatgagataa

SEQ ID NO: 156555 - DNA, 1065 bp, Enterobacter cloacae; identical to SEQ ID NO: 35290

SEQ ID NO: 156556 - DNA, 726 bp, Enterobacter cloacae; identical to SEQ ID NO: 35273

SEQ ID NO: 156557 - DNA, 423 bp, Enterobacter cloacae; identical to SEQ ID NO: 35272

SEQ ID NO: 156558 - DNA, 1968 bp, Enterobacter cloacae; identical to SEQ ID NO: 35271

SEQ ID NO: 156559 - DNA, 330 bp, Enterobacter cloacae; identical to SEQ ID NO: 35270

SEQ ID NO: 156560 - DNA, 180 bp, Enterobacter cloacae; identical to SEQ ID NO: 35269

SEQ ID NO: 156561 - DNA, 501 bp, Enterobacter cloacae; identical to SEQ ID NO: 35268

SEQ ID NO: 156562 - DNA, 324 bp, Enterobacter cloacae; identical to SEQ ID NO: 35266

SEQ ID NO: 156563 - DNA, 1272 bp, Enterobacter cloacae
atgtttgccctggccgatgtgaacagcttttacgccagctgcgaacgtgttttccgcccggatttgaaaggaaagccgatcgtcgtcctgagcaacaacgacgggaatgtgatcgcaagaagtgccgaggcaaagccctggatcaaaatgggcacgccgtggttccagataaagaacgagccttacccggaacaaatatattttttttcaagtaattacgagctttacgcttcaatgtcggcgcgcgtgatgagttgtctggaggagctggcccccagggtggaacagtattcgattgacgagatgttcctcgatctgaccggtgtcgagcactgcatggacctggaggattttggccggcagctgcgccgacatgtgtatgactgtacccgtctgaccattggcgtgggcgccggaccgacgaaaacactcgcaaaatcagcccagtgggcctcaaaggagtggaaacagtttcgtggcgtgctcgccctgacccgggggaatccacagcgaacgcggaagctgctttcactgcagccggtcgaagagatctggggcgtgggaaaccgtattgcacgcaagctcaatgttctgggcatcaaaaccgcgctcgatctggccctgacgaacccggcctttatccgcaaaaatttctccgtcgttctcgagcgaacagtacgcgaactgaacggggaaagctgcatgtcgcttgaagaagccccgccaacaaagcagcagatcgtctgcagccgtagcttcggcgagaaggtcactgaatacgattcgctgcggcaggctgtctgtcagtacgcagagcgggcctcagaaaaactgcgtaaagagcgccagtattgccggcatatttccgttttcattaaaacgtccccgttcgccgttaaagagccttactatggcaacgtggccacggagaaactgcttacccccactcaggacacccgggacattattgcggccgctacagcggctctggagcgcatctggaaggatggccaccggtatgctaaagccggtgtgatgctaaatgacttcaccgactccggcgtttcgcagctgcagctgttcgacgaacgtccgccatgtcctcacagcgctgagctgatgaaggttcttgatggcattaatcattctggcctgggacaggtctggtttgcaggacgagggattgcaccatcctggcagatgaaacgcgatatgctctcccctgcttacactacccgctggaaagatatccccatagcgaggatcagctaa

SEQ ID NO: 156564 - DNA, 369 bp, Enterobacter cloacae
atgatgtttgagctgtatcccacggcaaggctagtccgcgaagttgacttgtttcccataacccaaacagcctgcaaagttgacctgtttcccatagcccagaccgcccgcaaagttgacctgtttcccatagcccggaccgcccgcaaagttgacctgtttcccatagcccggaccgcccgcaaagttgacctgtttcccatagcccggaccgtccgcaaagttaacctgtttcccatagcccgaaccgcccgcaaagttgacctgtttcccatagcccgaaccgcctacaaagttgacttgtttcccatagcccggaccgcccgcaaagttgacctgtttcccatagttctagcggtttatgtttag

SEQ ID NO: 156565 - DNA, 342 bp, Enterobacter cloacae; identical to SEQ ID NO: 35262

SEQ ID NO: 156566 - DNA, 642 bp, Enterobacter cloacae; identical to SEQ ID NO: 35261

SEQ ID NO: 156567 - DNA, 780 bp, Enterobacter cloacae
atgatgccggcaatcccaggccagggcgtttctttttcggccgcgcagctgccggtggccatcgactaccctgccgcactggccctgcgccagatggcgctcgttcaggacgaactgccgaaatatctgctggcgccggaagtgagtgccctgctccactatgtacccgatctccaccgcaagatgctgctggcaacactctggaataccggcgcgcgcattaacgaggcgctggcgctgacccggagtgatttttctctggcggcgccctacccgttcgttcagctggccacactcaagcagcgggcagagaaggcggcccgaacggccggccgctcgcctgccggcagtcaggcgcatcgcctggttccgctttccgatgctaactatgtcagccaactggagatgatggtggccacgctgaaaatacctcttgaacgacgtaacaagcgaagcggcagaaccgagaaggcgcgtatctgggagattaccgatcggacggtccgcacctggctcagcgaagcggttgaagcggccgcggccgacggggtgacgttctccgtgccggtgaccccacacacgttccgtcattcctacgccatgcacatgctgtatgccggtataccactcaaggtgctccagagtttaatggggcataagagcatcagctcgactgaggtgtatacgaaggtgtttgcgctggatgtcgcagcaaggcaccgggtacagtttcaaatgccaggtgctgaagcggtggctatgctcaagggagggctatag

SEQ ID NO: 156568 - DNA, 348 bp, Enterobacter cloacae; identical to SEQ ID NO: 35260

SEQ ID NO: 156569 - DNA, 354 bp, Enterobacter cloacae; identical to SEQ ID NO: 35258

SEQ ID NO: 156570 - DNA, 213 bp, Enterobacter cloacae
atgtcgaagatcgtaccggggaggcagggagcgctggaggacagcaatttcatttttttccagacctgcacgggaggctgctacatacgcatcatcttttacaacatcggtagaatacatttactgaaagtcgccgttagcattatcactgcgggatatgctatgggatttcaggagataagtcatctgccagtattcccggagctgcactga

SEQ ID NO: 156571 - DNA, 447 bp, Enterobacter cloacae; identical to SEQ ID NO: 35249

SEQ ID NO: 156572 - DNA, 258 bp, Enterobacter cloacae; identical to SEQ ID NO: 35243

SEQ ID NO: 156573 - DNA, 642 bp, Enterobacter cloacae; identical to SEQ ID NO: 35241

SEQ ID NO: 156574 - DNA, 444 bp, Enterobacter cloacae
atgcagttcggcgatgttacggtggttaaaacgcacggtgctcacggtactgacgaaatgtttgcctcgtcactcagcgagatcctcggcgaagccatgggcgtcgttttcacggcaaaaggtcataaaaccgtctatgttgccggcgataccctgtggaatgccgacgtgaacaaggcaatcgtgaaatacaaaccggatgtgttagtgctgaataccggtgatgcccgcaacctgaatttccctgacgcaggcattattatgggcacaaaagatgtccgtcacgcctatgagatgttgccgcaggcaaaaatcattacggtgcatatggatgctgtaaaccacacaaccgtcagccgcgcagatatgcgtgcctatatcaaagaaaacaagattgatgaccgtgtagttgttccgaatgatggcgagaccgtaaacctttaa

SEQ ID NO: 156575 - DNA, 939 bp, Enterobacter cloacae
atgaaaacgtttctaaattggtgcaatgttctacaaatgcgaataaatacagatgttagctataacggggaaaacatgagtaccgctacaatttcagaaccgattgcgggagataaagcatatcaaatcagagcccgaatggcattgccgctccttgtccgtcaagcggaggcttgtactccgatcttgtactctgaccttgctgaagaattagggatgtcgaacccgcgtaacttaaattatgtccttggaagtattgggcaatctcttgagcttctttctaaagcatgggaagataaagtcccatcaattcagtgtcttgtcgtaaataaaaacaccagacttccaggtgaagggattggttggtttcttgttaaaaaagaaaactttgcgaggcttccgcttcgtattaagagagatattgtcgaagcagaaatgcaacatatttttacatacccatactggcgggaagttttaaaggttcttgaacttgaaccaacaacttctgatttcacttcgtttgtaaagaaaggcacaagtgtttttggtggcggcgaaagcgagcgacataaagctttaaaagcatatgtcgcacgtaatcctgcaatcatcgggcttggcactagcacccctgtaggagctaccgaatattttttgccatctggagatagtcttgatgtttcattttacggcaaaaaaatatgggtggcagcagaggtcaaatcctccttatcaactgagtgtgatattgtccgcgggttatttcaatgcgttaagtatcgagcagtcatggaagccgtattacttgcaaaatcacggccgcagaatgcccgagttttgcttatattggaatctaaactacctcattcattgattcccttaaaaaatacattaggaatcgaagtagttgatggtatttcacctaaagaggaatattga

SEQ ID NO: 156576 - DNA, 693 bp, Enterobacter cloacae
atgaaaaaattgctgaatgtatcactttttcttgctgtgcttattctaggtctcgctctactagtttcaagattgatcgatggtactgcttttgtggcatttatcatttcaggatgtctgggcgtttctgtgtacacgctgttaccctcgatcaccgagttttcgataggaggtaactcagttaaatttcaggagaggctcaatgaagccgaaaggatcaccgatgagctcaaaaaactgaaatcgatagccatcaaaacaacgctaaaatcactaaagatacaacaaaaagcaaacctcatcgtttaccaaaatcttttagaatttagggaaatttatcagctgctctcggatactaaagaatatgagactgattaccagatgctggtgatggaaaccgcactttcacttagggagaatgtctttgattttgtggatcttgagatcgagagtccaaagccacagtggtctaattgtcgagataaatatatcagagaatacattgaagcgaatataaatcaggattcagtatcgtcacgagccagaatgagcattcgttttgcaaatcagtatgtttacctatctgattttattgatggtttgtctaaaggtggaacaccgatgttaaagattatcagcgaaggggatggctggcatatgattatgaaaggtacaaaattgaaggagagttaa

SEQ ID NO: 156577 - DNA, 783 bp, Enterobacter cloacae
atgaatcttaccgaagaagagttgttagaagttgcgtggtacttgtcaaaatatgggtacaagaagccaccactagcgctaggagttgagaaatggaaagacgcggttgcgctattttatcctcgatttggggcgggaaaatcattcacggagttttataatagtctgaaaaatcatcgtgatcactacgatgcctggatgagcaatgtacgtattggctggcgcaacgaagatggaacaccacgaggtctcccctcagcatcacaaagagttttgcagaggatgagcttgttgtctgatgctcagattgaacaaaatattctatctaagattacagatataactgatatccaagaaaagtacgatatagaattaatagttaaagatcaatcaattgatgaaaccacaaaagaacgcctgattgcagctagacttggccaagggttttttagacagaaatgcttaaaacttttccccgcttgtgctgtgacaggatatacattccctccattacttcgggcaagccatatcaagccttggtctgcatgtgaaagtgccaaggaacgtcttgatccgtacaatggcattgtactagctgcacatatcgatgctcttttcgataaaggttggatttcgttcagtaacgatggttacattttactcagtgaagaacttgatgaaactatcgtaaagcaactttctttagcaggccgtaaaattaaaaaattcccttcattttcacatggttaccttgagtggcatagagaacacctattaagataa

SEQ ID NO: 156578 - DNA, 1425 bp, Enterobacter cloacae
atgcttacagctaataaaatcattagagaaagtaatatagcatttggtacaagcggtgctcgaggcttagttgttgattttcattcggatgtttgcgctgcattttctcatgcctttttgagtgtcgtaaaaaatagttttgaatttacaaccgttgcgttagccattgataatagacccagcagttatgctatagcccaggcctgtgcagctgcgatagtacagcatgggttcagagtggaatatcatggtgttatccctacgcctgcacttgcttactattcaatgcaaaaaaatataccatgtattatggtaacgggcagtcacatcccttttgaccgcaatggcctcaaattttatcgaccggatggggaaatcactaaaagtgatgagctggcaatcatatctagtccaacggaatttactcccattgacgatttatttgagttaaatatcaattcaggcgcggctgatttatatttgtcgcgctatattgaccttttttcatttgatatcctgaaaggtaagcggattgggatttatgagcattcaagcgctgggcgcgacctctacaggccgttattcacctctcttggcgcagaagtgatctcattagggcgtagcgatgaatttgttccgatcgatacggaagcagttagttatgaagaccgtttgttagcaaagtcatgggctcgagaatacaatcttgatgctattttttctactgatggtgacggagatcgtccactagtatcagatgagaatggggaatggctgcgtggtgatattttaggtttgttaacttcaattcatttaggtattaatgctcttgccgtaccagtaagttgcaatacagctattgagttatccaatcgctttgaaaatataacccgaacaaaaattggttcgccttatgttattgctgctttcgaggagcttaaacaaacatatgactctgttgctggttttgaagctaatggcggataccttctcgcaagtgatcttaaaattaatggtagaaatttattagcacttccaacgcgagatgctgttttgcctgcaatcatgctcttggtcgcatcgtgtgatgtgaatatttcaaagttggttcatcaacttcctcaacgttttacttggtcggatcgattaaaagattttcctgcgctgaatagtcagcatattatcaatgcggcaataaagtctcccgaattgttcattcaagatttgggtttaatatcaagaacatgcataggcttagatctgaccgatggtgttcgtttcaaacttgataatggcgatgtttttcatctccgtccttccggcaatgcaccagaactccgctgttatacagaagcagcagatgagaaccttgcaagaatttatgttgagcaaattctaagtaaattagcagaactaaaaaaataa

SEQ ID NO: 156579 - DNA, 1407 bp, Enterobacter cloacae
atgtttctccccgtcgtcatggcaggaggttctggtaccagactatggcctctctcccgtacgctttaccccaaacaatttctttcactgaatagtagtttaactatgcttcaggagacattacggcgcctggaaccgttagaacatagccctgctcttatcatttgtaatgaagcccaccgatttattgttgcagaacaattgcgtaaagaaggcttgaagcatagcggcatcttgctcgaaccagttggtcgcaatacagcacctgctgttgcacttgctgccttgaaagcaatgatgtctggtgatgatccaatactcttggtattagcagctgatcacgatattctggataaagagcattttacgcaagcagtgatcgacgcaagcgtttttgctgctgaaggtaaattagttacgttcggtattgtacctactacccctgaaacgggttatggctatattcaaaccggtgagaaattagcagggaatggtttcaaggttgctgcatttgttgaaaagcctgaactattagtagccgagagttacctcaaaaatggtggctacctttggaacagcggaatgtttatgtttaaggcttctgcatttcttcaagaattgagaaaatgtcgtccggacattctttctgcatgcgaacaatcattatctaagtcgacgcacgacctagattttatccgtataagcaaagagattttcgaagtttgtcccgaagattccattgattatgcggtaatggaaaaaacgacagaagcagtcgtagttcctctcgatgcaaaatggagcgatgttggctcttggtcagctctttgggatatcagccagaaagatgaacaggggaatgcgacccgaggtgatgttcttttagaagattctgttgatagttatatttattcgcagcatcgcctgataggtgtcgtaggtgttaaagatcttgtagttgttgaaacaaaagatgcagtattggtcgcgcaaaaagatcaagttcaaaaagtaaaaaatattgttgctcaacttaaacaaaaaaataggtcggaatatttacagcatcgtgagattttccgaccatggggcagtcatgatactattgctgaggggcaaagataccaagttaaacatgtgattgttttacctggtcatgtaactgcgaaacaaattcattaccatcgaactgaacattggattgtagtttctggaacagcaaaagtacatttagaagataaaacttatttggtttcagaaaacgaatccacatacattcctgttggcatacctcatgcaatcgagaatcctggaaaaattccacttgagattattgaggttagatcaggtgtgtatctcgaagaagatgatgtgataagagtttcgtcttctggggtaggctattga

SEQ ID NO: 156580 - DNA, 450 bp, Enterobacter cloacae
atgagattagagatgtcgttatttaaaacaattgttgcgaatacgcccctaatctcgatagatctcatcatatttgacaaaacaggtaaggcgttgctaggtcaacgccataatagaccagcacaaaattgctggtttgtacctggtggtcgaatcttcaaggatgaatctttcgaggatgcatttaaacggataactgaggaagaattaggtgtcaaattatttttaagtgatgctgaattttatggcgtctatgaacatttctataatgataatttttctggtgaagaattttcaactcactatgttgtacatgcgtacaggcttacgcttaatcctgaaatgctgattttgccccaaattcagcatagtgattatcaatggttcaatcatgattcactattgagtaatcaagctgtacatcagtttaccaaaaattatttcttataa

SEQ ID NO: 156581 - DNA, 897 bp, Enterobacter cloacae
atgaaaaagaagcgtatatatgttgccggccatcgtggaatggtcggctctgctatttgccgtatcttggcagtacgtgacgatgttgacctaattgttcgtacccatgctgagctagatctcacatcccaacaggctgtgcatgagttttttctggcagaaaaaatcgatcaggtgtatttagctgctgctaaagttggtggcatacatgctaataatacttaccccgcagagtttatttatcaaaacctgatgattgaatgtaatattattcattcttctcaccttgcgggtatacaagatttattattccttgggtcaagttgcatttatccaaagtatgcttcacagccaatggaagagtctgctctgttaactggtattcttgaagcgacaaatgaaccctatgctatcgctaaaatcgctggtattaaattatgtgaatcttacaataggcagtatggtcgcaattaccgaagtgtaatgcctaccaatctttatggaatgaatgataattttcatccacaaaattcacatgtcattcctgctttgatgcgtcgtttccatgatgcaaaagaagctggtgagccagaagtagttgtctggggaactggcacaccgatgcgtgagttcctttatgttgatgatatggctgccgcttcagtatatgtcatggaattagaacaatctaaatatgaagaaaatacggagccaatgctttctcatattaacgtagggaccggtattgattgttctattcgcgaaatggctgaaacaatggcatcagttatcggctatcaggggaacatcatttttgatgctacaaaacctgatggaactccccgtaagttaagaagttgggatggcaatatcattttaacttacatgaaggattaa

SEQ ID NO: 156582 - DNA, 291 bp, Enterobacter cloacae
  misc_feature (240)..(249): n is a, c, g, or t
atgtgcatatcaataatcctacacttcccaaaaggctctacaaccatcacagacggcgtaatgtcaggctatgaatattcacgtgatgatgtactaatatcggctcacatagcgattgatgaagcctacagcctattcattgatgactattcaataacagccaaacataaatatatcagtattaactataagcacagctacacaataggccgctggtggtattactggaatagtattgannnnnnnnnnaaggtagtgaacgtacacatctggattacctacacgggctaa

SEQ ID NO: 156583 - DNA, 675 bp, Enterobacter cloacae
atgattaccacaactttcatagcagaaccaatcatgacaacttcaggccagctcgtaggctgtgaactattaacccgctttcatagtgaaggtatgcaagtactgaacagtaagtactacatcatggctatggatgctgaagggaagagggaactactgatacgacaactacaggccatagaagtacgtgcgtcatggttcagggataaccggctttactgcactgttaacgtagacatcatacaagcaaggttgtgtgtgtttgatagagaggtgatacagctactggataaacttgagtatgtccggttggagatctcagagaactttgaaggcttggagcaggggatcaatcatccagtactcaagaccctgttaaacgttggctatcgcttgttcctcgatgatcttggttcaggccgtgccaatgtcgcagcactcactactggatgctatgaagcagtaaagattgatagggcgttctaccgtcaggaaatccagaaacctaccttcagcttattgatgaagaacatcatgcagtattgcccctatgtaatcgtagaaggagtagagcaacagaaagagctatcggtactacgtgatagtggagtaatggcggtacaaggctatctctacagatcagttccattcgacaaggtaaacaccctgctttaa

SEQ ID NO: 156584 - DNA, 810 bp, Enterobacter cloacae
atgccacccaggaaatcaataagaacaatcggaatcatgaagttttataagtatgttggtgctgaaacagcaaaggtaatcatccaaaattcaactttaaaattcacttctcccgtgaattttaatgatccctttgactatttccctgcggttaaagaagagggattaaggaaatttacacgccgcattaacgatgaaattggtggtggggttaaacgttacaagaccaatcatcgtgagacttctaagcatctccagtctctacgcagtggtgcatttagagatctttatacccgcaacatgtccataagttgttttagtaagtcacctttcatactcccaatgtgggcacactatgcagataaccatgaaggttgtgtcattgagtttgaattcaaatcagacagccctctagtagtagagtattttagcttgggtattgatgagctatcgcaaatacttattccttttgatgttagctattctgaagatcgacctccgctttttgatgagaatggacgtactgatggccctaatactggtttccaagcttgtttaactaaagctaaagaatgggagtatgagcaagaaatgcgtgttgtaacaaaacagcctgaagggatctatccattcgaaaggtcacaaatgacaggcttatattttggcatgaaaattgataaacaacacaaagcagacttatcaagaataattgacggctcaaataactacactggcacaaatatacgtaagcatgatgtagttatggcttatgataaatttgcactctcaaaaatccaattccgcttatga

SEQ ID NO: 156585 - DNA, 315 bp, Enterobacter cloacae
atggcattaaccgttattgatatgattatgggtactcaatataaagatgagatttaccagaaatataaatctgcatcaggtggacgcaagtacgcaaaagataactgtacatatccaacgctaaagaaactatgtgaagcaaagggtgaattagtagatacaccacgtgatggtgatatccttctagctaatgatcactgtactgtattctggagagacaaagtaatagtaatgaatgatgaaaaggtattcaaagttcaacgctattcacaagaagaacaaaaatataaagtgtatagattcacggaggaataa

SEQ ID NO: 156586 - DNA, 642 bp, Enterobacter cloacae
atgtttgatttcatcgacgaaggtgctgattccccactagttgatgcaaactttgaaaaactagtacttaagcctaagactttctctggttctgtaccaattacccgtactctaattaagtctgctgataccgcagaacgttatgtacaggatgcaatggtacgtggtgctggtctaaaactcgaaaaagaaattcttgcacagatcgttaccgcagctccttctaaaactctaactgctgctattacacaagctgatgtacaagccgctctaggtcaactagccgctgcaaacgtacgtattgataacgtagttgctatcgtacacccgtctaccgcagccgttctacgtagtaccctagtcggttctaacaccgcagctaagtacatgatcgaaggctaccgctttgaagcatacttgtgtgattccgtacgcgttatcgaatctacccaagttgccgcaggcagtatcatctttggtgacttctctaacgtagttcttgcttcttggggtgggctaactgtagatcgcgatgatactactctacgtgcaagccaaggtattgtactacgtacatttgcttttattgaccattctattagtcatgaggaagcattcctagtagttaaactagcggcttaa

SEQ ID NO: 156587 - DNA, 555 bp, Enterobacter cloacae
atgtcgtttctaacaaactataccactgtatgggtgaataccaatacactaaacaccgatccaaaatctaaagcatttgaacaagtagaaaaacttgcatcatttccagttgttggaactacaacacaaattgcttcaatcgaaccatataacgattcatttatggcaaaggccgtaggtgataaagcatatgatgatgtgtctattactgttaactgggttccagcagatcaccaattcctagatgacttggtaaactctggtgatgagattcagttaaaaattgaaatgccagatgaaggaacaggtgatactaccgttccatatgcaatgtacaacggtacacttacttcaatgtcaactgctggtagttttgacaatgtagtaaccaaaacatatacctttgcaccaacagcactagtaagctctggtgtactagatgatacagtactaccaattaaccgtggtgattttggcgtaggctctaacggtactacgtacccaagctggcaagaacgcgacggtaacggattcattaagattattaatacctag

SEQ ID NO: 156588 - DNA, 2565 bp, Enterobacter cloacae
atggaatttttctattttattaaagcaacccagaaatcaggcaaagaggatgccgtgatttggttcaccgctaaatcagaagcccgcgccaatttgcagttggatgttgagctggaagatgcaggcattgaaaccggccgcggcaaggattatgtcaagcctgtccgcaccgattttccggtgtataacgacctgcctgaagaaagtgcagtagattacacatggtgcaaacgctacgaattgcaggacgatggacgcacctggctgccgaaggcaactgctgagtctgttggagccgtggacaatactaccgctccggaaacgaccgttaaagttgaaactatcgacgagagtgtgacgcttgaaaaccgcactccagcggtacgttttgccttccatctgaccagcgacaaatatcagacgcatatcagtaaagagcagcagctggctgccagcgaaatatcactggatgaaggcaacacctatctccagaatctgctactggcgaagaatgacacccctgaagttgccgaacttagcctgaacgctgagtggaaactgattcaggcgattaagcaggtattcgcgccagatgaagagcacgaagtaaagctacttgctactttcatggccgactggttgagagtagatgccggcgaccgcaatgagttagtgagagagtggaggagcggaaagcttactctgctcaaatcagaaagaaccagcgacgccggggttgaaactggtcatcatctcgcaactcatgatggtatccagatcggcgagcacgatgatgaaaacacccgttatccagtgtgcagaatgccgttccgtaagcagcttcttgctcagttcaccaccgacgaactgcgccaccacgtaacccgcgaagaatacgaagctatcagcgcgctggagatggacactgacaacagctatgttcagaacctgctgctggcggcagaaaactgcgaggaaattaagggttacgataccaaagacctctggcgctacaccgacgccattcgcaaggtgttcagccaggagaagcgtcacgaactcgctttggttctccgtttcaccagaatctgggcagagacagattacatagatcgtggcctgctgattaaagaatggggtaagggtaatcgggtgagcacgattaatcgaacaccttccggcgcgaatgctggcggcggtaataaaaccgaccgactgacaccattaactaaaacgggtcgagattacgaattagcaatggggctactggcgcgtcggtttgagtttgatatttacgctccatctcttgaaattgacgtaaaagccaatgccatcatgaatctcaactggcctggcgaagatgatgttctggacgagtttctggcgacatgcaaactgtttgaccaaatgccagggggtatggattattcccgcgcctgtaacgttgcaacagtaaaaaccaccccagaaaatctctggaaagatccggttaaacacctcgaatatcttaatcgtgtcatgactgaaaccgatcatgcgcaccctgatcaaacattggttgatatcgcctgtggccgctcctccttgcctgtaccaatggctgatgtggcgcaaccatcaacagatgatgttgatcgccagcttgctgtcggtcgtggcgagttcgtcccaggcatcagtgaccgagcagatccaaaatgggacagcgcccaccgccaactgaccgcaactcacgaagaaaatttacagcgggttcgtgaagaaggcgcccttcagcgggctaacgctgtaactaaaatatcagcagaagaaattcaggaagtggagaccaccagcaatgtgcagatggaagaaactggcaatgatgaaaccacgaacgacactccgttatcagagggccaggaagaagttatcgcaggcgaaagctctactgaaattgatagcaacgcaactgccctaaataataattccggtcatcataatgatgatgcggctgatatgctctttacgcaccttatggtagatgttgaaagcctgggcaaaaagcccgacgcgccaatagtttccatcggagcggtattcttcgacccagcatcgggccagacgggacctgagttttataaggtgatctctctcgaatcggctatggaatggggcggcgttcctgatgcctctacgatcctcttctggttgaaagcaactcctgaagctcgctcagagattgttatggatcatgccatcccactggatgatgccctcatccagttcaaggattttatcgccgagaatgcagcgaacggcaaggattcagtacaggtctggggaaatggatccagcttcgataacgtcctgcttgaaaattcatacgaccgaaccgggatccctcgcccctggaaattctggaacaatcgtgacgtaagaaccatcgtcgaactgggtaaagctgtgggttgtacgcctcgctacgagatcccttttgaaggagaaccgcataaggctatttcagacgcacttcaccaggtcaaatacgtgtcagcaatctggcaacgtctgatttcaaactga

SEQ ID NO: 156589 - DNA, 381 bp, Enterobacter cloacae
atgtctgaaatcatcggcgagagacttaaagctctacgcgaacacagaaagttaagccaggctcagctatctaagctgtgtggatgggctacaggttcacgcattggtaactacgagcttggtgcgcgaaacataggcgttgacgacgcaattattttagctagggtacttgacacgagtcctagttatatactgtttggtgatgagacgagtaaggggcaagagttacctgaaaagcagcggcgcatgcttaaattatttactcagcttcctgaaagcgaacaggataagatgatcgatctttttgaaatacggcttagagagattgatgaatatgttgagaagtaccttaagggacgctttaaaccagattccgaataa

SEQ ID NO: 156590 - DNA, 225 bp, Enterobacter cloacae
gtgaacaacattgcagttgagcgacaaaagttaggtctctcacaatcaaaactcgcccactcactgggttgggggcgctccagactctctaactatgaatccaatctaagagagccggggctgtcagaatgcaggttgattgttgaaacgttgaacagattaggcgctaagtgctctctcgacagcgtatttccttccaaaccagagaaactggaagggaattga

SEQ ID NO: 156591 - DNA, 555 bp, Enterobacter cloacae
atgcatccagtaactgtttgtcatcataaccagcggatcgctgctccgctgaaaacccaaaatcattatgaaccacgacgccgggattcaattcgctgccgtgtcatctttgacgccgttcgtgagtgggagtcaactttacccgggcaagctcaagaaaagatcgcgcaaatggttggtgaactatgggaaaagcaaggtgggcgcggtatcgcaattaataagcagaacctattccggtatctgaaaaacgaaagtggctctgaaaaatacaccgcttacgttatgcagctttcaggcgcaatcattgctgccatgcctgttcagattgctcgaaagtacgggctcagtattgcaaaaacagaagctgagctggtggcgagcgcaatcagagaatgcagcgaggcacaccaggcgaaacttgccggcgctccgttacagaagcttgagaaagaaatacgtgaagcggcaatcgccttattcaacatgctaccagctgagacggcgggaccactactggcgagtattagcgccgtagcgccgcaatttttttaa

SEQ ID NO: 156592 - DNA, 1110 bp, Enterobacter cloacae
atggccgttgataagaaaaaacctgttctgtccgacaaaacaaaaccatcaacaagggaagaaaaagaaaaggcgctcacagctgcaatgggacagatcgaaaaagcctttggcaagggagccattatgcgtcttggtgacggttcacatttaaatgttgaaatggttccaactggttccctcgggttggatattgccctgggtggtggttttccggttgggcgtatctctgaaatttacggcccagagtcatctggtaaaactacggtagcgctttctgcgattgccagcgcacagcgtgaaggccgacagtgtgctttcatcgatgctgagcatgctcttgatccccgatatgcacagcagttaggtgtggatattgataatttgctcatatcccagcctgacaccggcgaacaggcacttgaaattacagatgcgctggttcgttccggagccgttggcctgattgtcgtagattccgtggctgccctggtgcctaagtctgagcttgaaggtgaaataggggatgcgcagatgggacttcaggcgcgaatgatggggcaagccatgcgcaaacttgcgggagaggtcagtaaaacaaaaaccatcgttattttcatcaaccagttacgcatgaaaataggggtcatgttcggtaatcctgaaactactaccggcggaaacgcccttaaattttacgcctccgttcgcctcgacgtcagatcacgaaccattaaagaaggtgaccagatcaccggtaaagacaccacgataaaagtcgtcaaaaataaagtttcaccaccattcaaacaggcatcctaccgtctcatgttcggtcaagggatttctcgttccgatgaaattcttgagcttggcgtgaagcttaaattgataaataaaacaggtgcatggtacgactaccttggtgaaaagcttggtaatggccgtaataacgccgtcacctggcttaacgagcatcccgatatagctgctgaaattgaggggcagatccgggaaaaagcacttaacaacgatcctgatttaaccgcaattcagagcgcttcagtcgaggaaaccttagaagtgactgacacctttgaaaacgagtaa

SEQ ID NO: 156593 - DNA, 234 bp, Enterobacter cloacae
atggaggatctaccggataccggttttgcgttaattcgttgtgcggacagggcggttatagcttactttgaaaacttccctcggtgcgaccgcgccctgatgtatcgcaaaggggacatgttttcgttcatgcctctcagagaagatgagatagttggctctccgtccctcttcaccaaaatgctggagaaggctggctaccgtccttctccgccctctggtatactctcgtag

SEQ ID NO: 156594 - DNA, 402 bp, Enterobacter cloacae
atggcgcaaacaaccaagacaaaattgaactcaattcctgctggcgagctttcaggctgcgccggcttaactatatcccctgagacacaacttaccccgagacaacaggaagtgttggatctgctcgtggattttgtgaatacgcatggctaccctccaacctgtcaggaactggcgaatctgcttggtgttgcttcacctaacgcagcgctgacccacctccgtgcattagagcgaaaacgcattatcacactggcaccaggaacctctcgcgggatccgcattaacgggcgtaaagaaccggttatggccgttcagttactgcgtgagctgctcaacaacgaacccggcgcccgggctcgtgcaattgaatatctgaaattatccggggccatccaatga

SEQ ID NO: 156595 - DNA, 237 bp, Enterobacter cloacae
atgaaaaaaattattatcgcacttggtgtttctttattgattactgggtgtgcaggcgtgctccataagaagtctccagtgtgtactggaactgttctcattggtggacaagaatcagaagttcagatttacggtatccgtaaacaaaataaccaaaccatgtatcaggccggttacccatttaactggaagtgggttggaaaaaataattttatttctacgacgtgtgaaaaataa

SEQ ID NO: 156596 - DNA, 552 bp, Enterobacter cloacae
atgatttacggatatgcccgcgtttctactgcgcaccaggacaccgaacttcagctcatcgctcttcgcgctgtcggttgtgaggagatccatcaggaggttatttcaggacgcggaaaacgccgcccggttttgcaaaaattaatagataaattgcagcctggagatgaacttgttctctggaaaattgaccgcataggacgaaatgttctttacgcactgctgtggcttcaggaacttcagagcaaaggcgtaaatctgcgttcaataacggatgcagtggatatgcgtactgccagtggtcgctataatttccgcaacattcttaatgtcgcacagtatgaatcggatctgatcagcgaaagaacccttgcaggtttggctgctgccagggcaaaggggagaatcggtgggcgtcgtccgaaatttagcgaaaaagactgggatgagatggctgcaatgctgaataaagggatcgacagaaaagaaatagcatcacagttcaatgtggccatgtgtacgttatataaaatatttccagtaactaaataa

SEQ ID NO: 156597 - DNA, 552 bp, Enterobacter cloacae
atgaatactgagttaactttccgtagtcatactcttactccagctatccgcgataacaaattctggttaacgtcatcccagatcgcagaagctctcgaatactcaagcactaaatccataaccaacctatacaaccaaaatgaagacgagttcacatcagaaatgactcaggtcactgaatcagtgacctcaggaaattatcgaaaaaaagtccgcatcttctcccttcgcggagcccacctgatcgccatgtttgccagaacgccggtcgcaaaagaattccgtcgttgggtgctggatatcttggatcgtgaagttggcgagacggtgtctcaaccaataacttcgcctggcacatacgactcccgcaccctctgctacaaacgtaatggcgtaactatcaacgaaattcctttgcgagatgaagaacttgtgatcactctcgaatcatgggtgcagttggcccagagcaatggatggattgttatgcgacaagatgaactcattgatacgctggtcaggggaatcgaaagatcgctgatcacgcattaa

SEQ ID NO: 156598 - DNA, 432 bp, Enterobacter cloacae
atgagcagagaagatccgcagttaagaattaggcttcctattgaactgaaagagaaaattgaatcatctgccaaagaaaacaaccgatcaatgaatgccgaaattgtgcaaagactggagaggacatatcttactgagcttgcagaggatgaggttctgtcagctcaggacgtaatcaaaattgtcgcaagtgctaaagatgaattatctgatattatatttaagcgcacattcgcagaaatcaataagaaggccaggatgggacacaagggatttcatataccccttggcgatctcgagctagaagaattgagcgaagacgatttctattacgttcttaagcgtacctttgagcgactgaccgagttaggattctctgttcctgaaaaatccttagacaatgctggttttctgattgagataccagattaa

SEQ ID NO: 156599 - DNA, 744 bp, Enterobacter cloacae
atgggcttggtggagaaaaaaatgctcaagcctgaaaacagcgaagccctaactacttgcgatagtcagggcctcttatcgaacaaatcccgagaaggaattatcgacatgaatatagtagcaaaaacagattttaacttccacggcgtgaatatgattccggtagagagtgttccaggcatttggctgacgtcttcggatgttgccaaggctcttggttacaaaagcaccaagtcaatttctaaccttttcacgcaatacgaggatgagttttcgcccggaatgacaatggtcattgagtcgatgaccaatggaattaacggatcttctcgccgcctgaaggtgagagttttctctctgcgaggagctcatttgatcgccatgttcgctagaactccagtagctaaagaattccgccgttgggtgcttgatattcttgaccgtgagattcagcactcaccgatcgctaagcagttcactgaccaagaactttgtgatttggcctggttatggcgggccggggctgtcatgaatgaagcgtgtcgtgaggtctatccactcttgcgtgttgccgagcaccgggaggctgggcgcttctactctattggtcaggaatatcctcggacgctcaataaggctcgtgaaatcctgaagcgcgaaacagcacatatagaatttcagccatggagggatgataactggagcagggtattaccacatctgcgtcaggaaatgttgcagtga

SEQ ID NO: 156600 - DNA, 903 bp, Enterobacter cloacae
atggctaaagagagagcattgacgcttgaggcgcttcgcgtcatggacgcgattgacaggcgcggcagttttgccgcggcggcagatgaactggggcgcgttccgtctgcgctgagctataccatgcaaaagctggaggaggagctggatgttgtgctcttcgatcgctctggtcatcgaacaaaattcaccaacgttgggcggatgctgctggagcgcggccgcgtattgctggaagcggcggataaactgacgaccgatgccgaagcgctggcccgcggctgggaaacccatctgacgttagtgaccgaagcgctggtgcccaccgaggcgctgttcccgctggtggacagactggccgcgaaagccaatacccagctgtcgatcatcaccgaggtactggccggggcgtgggagcgtcttgagacgggcagggcggatatcgtcattgcgccggatatgcatttccgctcatcgtcagaaattaactcgcgcaaactgtacagcgtgatgaacgtctacgtcgctgcgccgggtcacccgatccatcaggagccggaaccgctctctgaggtcacgcgcgtgaaataccgcggcgtggcggtggcggataccgcgcgagagcgcccggtgttaacggtgcagttgctggataaacagccgcgtctgacggtgacgtcgctggaagataagcgtcaggcgctgctggcggggctgggcgtggcgaccatgccgtatccgttcgtcgaaaaggacattgcagagggacggctgcgcgttgtcagcccggaatacaccagcgaagtggatattattatggcgtggcgtcgtgacagcatgggcgaagccaaatcatggtgtttacgcgaaattccgaagcttttcacgcaatataataaataa

SEQ ID NO: 156601 - DNA, 354 bp, Enterobacter cloacae
gtgctggccccctttgagataaatggaatgaagagacgtaaactcgataaatggcttaaaaaattcgaagataaacacggcttaacaacaggcgatccaaatgtcgttggttatgccttgttcaacaaggataaacgtgcatttgtgagcctcactgatggcgattacgaacccaccgacatttacaccggtgatcttgacgacgccttcctgactgacaatatgggggaagccttcggtgtcatgatggcgttggaacattatgataacattagcattgttccggtgatctataacgagttgttcggtttgactgtgaaacccggttcactagatgcattcaaaccagactga

SEQ ID NO: 156602 - DNA, 486 bp, Enterobacter cloacae
atgacttccaaagatgacctgatgaatatgtttcaccagtctgcttctgatcaagaagctggtgtggcacgagaagccaatgacatcaaagagtttcaggaaagtgtacgtactcttttcatcgaattacgttcatggcttgaagacatgcctgtgaaaattgaaagaaattgtacgaatattcatgatgttacgacgcgaaatacaaattcttacccgatggatttcatgaagatctcaaacggaaataagcacctggaatttcgtccagaagcgctatatctgatggggtcgaaaggcgaagttgaggttcgatttactggcgttagtcgtaatttgaaattcaatctgtacatgcaggattcatttgggggcggtaagagtgaaccaggtgtatggtcactcgttgatggtaacaaccgggcaggaaatcgtcgcccgtttactaaagagctgttctattcattggtatcaaatctggtgtaa

SEQ ID NO: 156603 - DNA, 375 bp, Enterobacter cloacae
gtgctgggtggtttactgctcgtcggttttgcggtctggatcatgaagacgtttgatgtaccatttggcatagcaactgaaagtggcatcaaaattgttgtctgggcgctggcagtcactggtgcccttttctggagccaccactcagattttaacgtaatcaaattcacagcgccgtttatggttagcatgttctggtacagcctttttccggtgctggattataacgccggcattcgcgatgacttccctattcagatgaacattagttggtacggtaccgcgttctggcagttcgtaatcttcctggcaataaatgtgatcgggtacggaattatttactatttccacagacgtaacaattattactggtga

SEQ ID NO: 156604 - DNA, 1044 bp, Enterobacter cloacae
atgagtcttcaaaacaaatttaagaattttcatgatgctatcaagttaggaaggaaggacctggagtacacgacggcccgcctcaaggacgatagcattactgccgatatcgttgaacgattcaaagaagatggatatccggttgttgaggatttcattcaagggtctttggcgaccttcacagggatccgggaaaaagggcaggatttcgatattgaccgtgcaatcgtaatcgaagcggagctggctccggaaaacccaataacgcctaaactcgctgtacttgaagtgctggaaggccgaggttttaaaaatgctaagatcaaaaaaccttgtgtgactgctgattacaaggctgatgaccttcatatcgatatcccaatttaccgcaagtacaataacggcgaatacgaattggccgttggcaagagacattcaactgaggataatcgtgagtgggccagagcagcgccacgtgagcttatcgactgggtgaataattatgacgctgatgaaacttatggttcgaataagcatgaccagtttcggcgtattgtcagatacctcaagcgctggagaaattttacatttggcgatgatgtgcgtcgtaaagtctactcaattggtatcgcggtcatggtcaaggaatccttcgactcctccatcaacgatgaaggcttcccggatgacctcactgcactgagaaagacaatcaaccacatgcttaactatcgtagctatttcactcaggttggtgtagataaatatagtgttaatgttacgcttccagtgagcccctacagagatatttttcatagcagcagtatcgttacgggaacacagtttcgcaataagctgagcgcactgttgaaaaccctgaataaggttgctgatgaagagcaagagtccaaacagtgcgagttgctacgaagtgtattcggtgaagattttcctgagtgcgcagaaacatcatctgcatcgtcaactgctgttaaaactgttttcgcatctgccggagtagtggggacatcgcaaggcgcatga

SEQ ID NO: 156605 - DNA, 1620 bp, Enterobacter cloacae
atgccagttactctttggcatatcgctgttcctgaactcacaaaaatgcccagttttctcctggccgatccatctgcattgcccagacttgcgcacactgcgttctatcctgaaagcaaatttgcaagcatttgtgtgaatgtaccagacgcagtatcagtgaatttcgagtgccctgagctggccttcgaagaatcgctaaaacgccatgtctctttgttaagccaggctttaaccgatagtgaatggaatacaaaggaattacttcgggaatttgaagctggctggttgaatatcgtagagccggacacaaccccttttctctgtttaactgaaagcgaaacaccagaagaattgtgtgttctgaagccgagaaaaggcagcgtaggtctgggaaaatatcatttagggtatgctgagggggctgtccaggataatattttttcacctatcaatcagcttctaaaagatcgccaggctgcaaaaggtaacggattcgtcataccgttgagcgtgacaaaacctgcaccatggaaaaaagatgaacttactgattggtatctagacctgctgtcagatctaccgacgaatgttcaaatgaaattgactcaaaaatttgctcaaaagcgatcacatgaattttggttagtctttaatgcccaaaccccctctggaatcacatggtttggaatccatttttcccaaaagaactccagcaaaggtcgaaaaaccttgccttttaagcattcacatatggccgaatggacgcttgaaccggtcatcgtgttaacttttaataaagaaaggattatgccccggagtggagcggaacaatcccttactagcaaaaaagttatgcttgttggatgtggttccgtaggtggcgatgttgcagataaactcgcagcctctggcgttgggcatatagatttatatgatccagagacactttcactgaataacctttatcgccacattctgccacctcagtatgtctcattccataaaccgagtgcgttatggcacagtctcaccagcaagtacccatggctcgagattggaagctacactggtaagctacttgatttgaggcgtcgtgacttactaatgaagtatgatctaatcatcatagcgataggagcaccgacccaggaacgattgtttcatgattatttaattaaagaaaaaattaatgtcccagttattaacacatgggttgaagggtatggcataggggggcatgccgttctggcgatccctggaacaaaaggatgtttacgttgttcatatgttgacccagctgatttttcaagaggactagcctctaacttgaattttttggctccgaatcaagatttgactaaaaatcatgctgggtgtggcgatgcgttcctaccttactcatacatagcctcgactcaaactgctcttattaccgctaatctcggggtccaatatcttcttaataaaattagagaatcatccagagtgagctggaaggggagctctgaggatgcgatagcaaatggattcaaattaagcggaaggtattacgcatttacccgtatattagaagtgctacctttgtttaatgaagagtgtgatatctgcaatggataa

SEQ ID NO: 156606 - DNA, 492 bp, Enterobacter cloacae
atgaagagtgtgatatctgcaatggataatgctgatgcgctaattgtcgatactgaacattttagtctccacatttcaaagaaagtgattgggatctggcagggatttcgacagtttaaaccaatggattccgaggcatttggagtgctcgttggcgataaagaacttgagattgaacgttacggattagttgaaatcacggttccacagaaagaagatcgatattcaagaatgagttttactctcagagatcccgaacatcagcgtattgttgatcgcttgtataatgactctgaaggtcaattgatttactttggtacgtggcatacacatcctgaaaaaaatccccatgcttcatacatcgatataagggactggaaacaatgtcggttacgaaatcctgtacaaaggcttttttttataataattggaacagagaaaaacgcgctttactattttgaaggtgaaaatattttgcgacaggaattctga

SEQ ID NO: 156607 - DNA, 1068 bp, Enterobacter cloacae
atgaacaatgcaacactcatgtatctgataaaaattatttttaggcctaaagatcaattgtcccgactgacgtttggggtgcttaaaattggaatggcgggattggttggaggatggggagtaaatcttgttttctccgaagaatttcttaagaaacatgttaatattatcgatggattaacgtttacttatcaaaaatgctctgatcttgctcttttttttggtgtgatttttttggttgctgggttttgtctttggggaatttgtgcttacttcgctcttcgagatttgaataagcgagacattgctcttattcgtgcgtatgggttcgaaaatacggattcacaagctgcggagaaaatactctcttccagagaaaaagcaaaaatattaaatgtggactttaaagcatttgattcaagggacaaaaataacaatttatccaatgcaggttttattcggcagataattcaagaaagaatatatcacaccgatgcgacaattgcttatattgctgcacttggcagtgtgccatatctgtatatggttggtagcttcatgacggatgggcacttaccattaaagttgtttgattttgaccgggataaaagaacttttcaccctcttgacgcaccgccgacaaatgcaaagttagtaaaatgctacagcggtcagaatattcatgatagtaagtgtgtgccatcaaataatggaaaggttatcggtcttgcaatttcattcacgatggaaattttagaaaaagatcttcctgttgaatttattggccatactttacatgttcaactgaatacaggattccgatttgataatctccctgcggaggacgagcaagaaaaaatagtgaaggaaattagctatattatctctgaattaaaaaaacaggcagacgaagttcatctttttgtctctgcacaagcatcagtagtcgttcggcttggtactctttaccaggaaggcttgcatggtgttataaatatttggcactggaattctattgctaaccaatacgagtggcacctaaaagttaccagtaaacatataaattaa

SEQ ID NO: 156608 - DNA, 387 bp, Enterobacter cloacae
atgggacgaaaagaacgaaatccaattaaacggatagaacaagcaacacgcgccagcaaacgtaaatacacctcttctctacaagacctcgcacgagagtctattccaggagaatggatcaccgaaataatagaataccctgcaacggtgcccgtaggggctgagtttgaactattgcaggatgttttagcatcttcggataacgtcttctataaaccacgccgccgccgtgaataccaaattgatagcagtgatcttagatcctggcaggtgaaggggtgggaaaactacgccgattttgtcgggtattgccaaacgtggggattatcccatcacacgcaagacctcgattttatttttcacgatgaaaaggaaacacacgattaa

SEQ ID NO: 156609 - DNA, 225 bp, Enterobacter cloacae
atgcacctggaaacaactcaaacaaagcgattcgcccagcacgttaaatgctgtgaatggtatttcactgagatcgaagcaatcaacaatgacgcttatctgacggatgacgagaaaataactgcgcttgatgacctggaaaacagagtccttactctcgcagcgcctttcctggctgctgcaaataaaatcaaaatgacaatggaacaaataaaaaatgactaa

SEQ ID NO: 156610 - DNA, 318 bp, Enterobacter cloacae
atgactaaaaccgatattgacctaatgctacaggaatttcacgagcaactacacattccgcttcttgatgcgactacggaagcctaccgacagggaacccctgagagcgtttctgaggccgttaaacagcttcatctggcctcagttgttatgcaagggattataagcgtagtggagcagtcagagagtctgaacgaggatcaagacgtactacgcgaagtgtctcaggtggctcagtccctcgtgtcctgtatgcaggatttagacgggcttgcgcaggacatagccgagaaatacgcagcactcgaatttgaataa

SEQ ID NO: 156611 - DNA, 1677 bp, Enterobacter cloacae; identical to SEQ ID NO: 119228

SEQ ID NO: 156612 - DNA, 372 bp, Enterobacter cloacae
gtgctctacgcacacgcctcccgtattctgcaccatgaaaccaacccgggctgtgcccgcgcgttgatgcaaaagcacggcgagcgttatatctgggttaacccgccggcgatcccgctctctaccgaagagatggacagcgtttttgccctgccgtacaagcgtgtgccgcatccgtcatatggcaacagccgtattccggcgtacgagatgatccgcttctcggtcaacatcatgcgcggctgcttcggcgggtgctcctttactcttgtttttatgtatttagagttaaactctacttttctatttttagaattcaagctattcatcgtaattgagagatatccttttaatgttcagcaagcctgttaa

SEQ ID NO: 156613 - DNA, 1431 bp, Enterobacter cloacae
atgcctgtacgttatttaaacgtcggagatatgtttattgaggcaacacctgcctttagcctgtctaaagatagtgagctcttaacatcctggggccaggatggcatacatcttaaaaatatgtacctcctctttgattcacaagatcgcccaattaacgctgccaatgagtatttaattcattgtaaagcagttgataagcaccaggatctctcctgtattgccaaagcgttaacgctatttttttcctttttagaaagggaacaactttcctggagcgatatgccaagagcaagccacatgcgccctctctatcggttccgtgattatctccaggctcagcatgatgaagttgacccacagagcggtaaacgacgactcgcaagctctaccgcaaagagttatcggggagccgttgtcggcatgtatgtctactggatgggatatggtgatgtgtttcaacgaccaccatgccagttcagtgagattaatattgctgatgagcggatgctggggcatataaatcgttatataaaggttcaaacaactgacctgaaaattactgcacgtgacaaagtaaaacaatcccgactcccgaatcatttacgccctttgctgaaagaacaacgacctgagttacaatctttgctaggcgttcttaaagaagggagaagttatactaaaataaatgataaatatattccaaagactattgctcctgagattcgaatagccatatacctcgctttatatacaggaatgcgaagaatggaggtgcttacgtttagcagcacactgattcagccaacctctgtagatgaaaacacaataaccgtaatgattgggcctggtaatcattgccatactaaacgcggcgagtcaggtgaaataaaaataccggtctggttgatgaggcagttatacgcttataagcaaagcgcacgatacagaaaacgcttgtcaaaatacctccagttaaccccggattccttagctcgtcagtatccaccgttattattgaataaccggggagatccatacaacgaaaactcgctcaatgcccgctggggcgaaatccgcaatgctgttcgcatcgactttaagatgcccacattttcgcataaatttcataatcttcgttcaacctatgccacgtacctgacaattgctttaatgcaacttacttatcccggtagccatccaaggaatccaggtgaacccgtcatgaccagagaccaggttgagtcagaagttcaggctcgtttgcgtcattcatcacctcagacaacttcactctacgttaaattctgggaagataactacctggcgagacaatctgaccgtatccaccaggagggtctggatcggatatacggagacgacaacaccattggtgtatggagtcatttgcattcccctcacagaggctaa

SEQ ID NO: 156614 - DNA, 1758 bp, Enterobacter cloacae
atgaagaaattaacctcacgaacgttgcaaatctccccccaaattcattctggtacgccaggcgatgatgatttaatcctttctgtagcgcaccatgcatgtaaagacaatgcatgcaggccgatttacgtctttcgtttactttatgatggtgttccaagggcaagctacatcaacaatgcaaaaaagcataacgaacgtttacccctggtgttgctcatttacgaatggctggcggctcgcgttcatatattaagcggaagcaccatatttaccgatttcaatatggttatattttttttccgctactgcgacacaaccctgcgtatggcagagttgaccgagtcaactgtcagctcttacgcacaacatataagcaaccaggtgaataataatgctaaatctcatgcatgcattcgtgggatgagcgatcgattttcagcatttctgtcctgggcagggtacgaagcactggccaacctgatgccaaaagttgcccgccacaatgtgatggaaaagaagacgcaggcttactcagatgaagaacaaatcggcgtttcacgtgacctgttcagagtatttaatgtgctcgccagtcggctaaaaaaggggcaaccaattacctgtccttttgaccagcccaaaacaaactgggatatttccagttataacagtaccctctggtttaataaactcacgataactgcgttgttcctcaccgctaatttcaccggagataataattcacctcttagaaaattacgtcggagagacgttacagagcgggagttccatttcgataaaacaattaatctctatcgactggttagtaaaaaggatcggcagggagggcaagaaaatacatgggatatgggattcacccggcgaggaaaaaatttctttagtgtttatcttaactgccttgaatatttcaaccttccggaagaggcttacctttttcctcgctttgacaatggtcagtacgatggatttgtcttttcagcagatataaccagctacattaactggttcatggctcgcgctccccaccaggtcaggccagtaatcggtcgcttcaggcaaagtaagagcgacgggttgatggcggatactaattccattgctaccgttgctgaggggcttaacaaccttaaaggaactgcggcaaggcattatatgaatggcaacccgcataataatcgcaatcgactgggcagtgcagccgaggcgcttgagctcactgcccgcggagccagcattaatgaggcgagaaaagttgttgaggcaaaatatggaagacccctaagggcaatggaaatcattgccaaaggagatgcagagccagccccgaccaaaatggggagcaggtgcaggcaacctttcggggataaagcacaaagtctgaaacgggaactggtcgccagcggcctgctggcccaggacgagtccattgcctgtttcaaatttcttgattgctttgggtgtgagtttcaggcactggtagcggaagtagacgatatctggtgcatgctgagcttccgtgaaagtcttaccgaaagtcttcagcgtccggccattaatcaccaccttccggttacacggattaatgatgtcatgggcaaaattcagattatgctcgcagaagttgagcgcgactaccctgatgtatatgcaaaagccatcggcaaattaaacgttcaggcgcatcctctgtgggacgatgagaactctgtggcagacctgtacgatatctggtag

SEQ ID NO: 156615 - DNA, 2028 bp, Enterobacter cloacae
atgcaggcacgatttaaaccaggaaagaataacccaggtataacaaccccagaatgggtggagctccatcgcaataagtcgtttcctttaaacgaaattattgtgagtttcgatgttgataatcagcctcttagctactttacgagcgatatctgggacttcagagcctatgttaacacccgctcgggtaacagccagggaagcgccatctggaactggaaaaggatttcggaaggttttcgcaatgctgtcaggcacttaatgtacatccatctgtttgaaaaacggcgtaccgccagcgaaggtattgccggtgtatcgagaagattcggtgcatgggcagaactttcacaactttgtattcagtgtggaataccagagatgtcagcgcttacattgccgcacatgcaacaaaagttaatggcggaagtcagtacccggaaaatggctgtcgggcgggttgtacatctcctcgcctcgttatcactggcacatcgctacggttttatcaatttcccatatacaaacatagcattacttgccgataaactcgctgacaagagcaaaacatcacaacaaacactcgctattccacaacctgtggcagtacaaatttattctcatgcaatacaacgtatagaaatttggcaccattcacgccaggaactggtctcactttttagtcactacctgacgctacgagaacaacaaaaatcaaaagcgctgaagaatatcctgaccgatcgcaggccctttttgatggctctggcgaaagaagctgattatatctatgcccccacagatactcttaccgtcctctataacgatattctggcagcctgcggcactgttattggtgctgtcagcggcatgcgttacggtgaatggtttgagcttgatgctgattcttaccaggaacaaacacataaaggtatcactcacagtcttctggcaggaaaaaccagtaagctcaataagggcactccgatccgccacgcctgggttacagccccggtagcaaaaacagcgatcgacttactggcggcaataacggaaccacgcagagcccaactcaaaacgcaatctactacgttgagtgaggccgggcgatacaacgctgcaaacaaattgattgaacatgggcaatctcttttcctggctctgggagtcagaggaaaaaatattgttgtgacaaaatccagtatgaagaatgcactggacaggctcgtggcaacagctccgacaaaggatggttcgcagggagcccgcctgaggcaagaacacttagccgaatttaagacactaaacagccagtggaatactatcagcatccccctggataagctctggccaatcgcaactcatcagttcagacgcacttttgctatttttctgttgcgcaataattttggttcttttttacaggtgaaacagcagtttgcccatacaaacatcagtatgtcagcctggtatgggaacaatgctgaggttgccagaacatttgatatggaacaggatcccgaaattcaggccgaactcgctgaaatgaacatgttgctaatgactgatattgcagaaagactctatcttacagacgaacctgtttcgggaaaggccgggactcgaatccgggaacaaatagcccagggcaatatcatttttcatagccgggaggaaatcaatacggctatccgtaaaggtgaattaaccatagtagataacggacatagcctgtgccttaaccctcgttgtgaacggctggattgtacaattgaccctctaatcaatccggttttatgtagccatgatgtcatcatgactcagcatgcccggctacgggctgatttgcgcgaacgccttatcagacgccataagcaggcactcaatcaaaatctgaatcagccaaacttgcttgctaaaacactggtcgggatccgcgcctgtgaaaaaatcatggccgatcatgacatcgacttcgaaccgtataccccggcaaacagtattaatattcagtggagtgaaaaatga

SEQ ID NO: 156616 - DNA, 525 bp, Enterobacter cloacae
atgaataacaaattatgtaaaacagaaatccagttgcagctctttgaagaggcacttgctcgcctgctcagaaacgaaggtaagaatattacacccggaacaaaactatccatggccaggctggcaaaagaagctaaagtaggaagcggaacgttgtattacaaaccctactctgaatttcgcaagcgggccgctgaatgcatatcccggtataattctgggacaaccaaggtcagcacagccaatactcatcatcatgaagcgctggaatcattgcgaaatgagcgggacaatgagaagaggctaaaaatacaataccggaaatcctgtagtgaattgaaagcgcagcttcaacgtctttgtgctgaacgaggaacgactgaacatgctttatatcaggcaatgctgcgcattgctgaactggaacagaaatttgaaaaactaactggcacgcatcccgataattacgtaattggaagtctcaaaaacatagcctttttaccgcgaaaccttcaacaaaggtag

SEQ ID NO: 156617 - DNA, 357 bp, Enterobacter cloacae
atgcatctaataatgctcgatacatgtgtttggcttgatatttcctctaaaaaagctgaattgccaatgcttactgccatcgagcatctggtagaggatgggagtatcaaaatactactgcccgatctgatacgtgccgagtacgaacgaaataaagaaagggtgattgaggctacgcgaaaacgactctccagtgaatttcgagtaattaaaggggtagttgagtcttttggcggtgaaggtaaagatactgcgctcaggaccttagatgatgttaatcacagattgcctattctttccgaagttaatcaaaatacagtaaatcgtgttaccaaactttttgacatggcccactga

SEQ ID NO: 156618 - DNA, 4098 bp, Enterobacter cloacae; identical to SEQ ID NO: 119041

SEQ ID NO: 156619 - DNA, 963 bp, Enterobacter cloacae
atggtatctaaatccgcagaactattattccagaatcacattattgagcaactatcatccagtggttggttatttggaagctcatccggctatgatcgtgaaagggcgatttatccagaagatgcgcttgcttatgtacaggaaacccagccggaagtctgggacaagttttgcggaatttatccaaaagatacagatgtacattttctcaacgcggttgagagacatctttcggctaaaggaaccttgtggacgctgagacataccttagcggatcgcggtgctcgttttcagctttgcacctttaaacccgatcatgaccttaatccagacttgctggttcgctattgcgctaaccgtttacgagtagtacctgaactgatttattcgcccaatggttatgatggccgcattgatttgacattgttcctgaatgggttgcctgtcgccacacttgaactgaaatcggcgtttaaacaatcgcttgatgcggcaaaactacagtatatcaatgaccgccagccaaaaaccggaaataaaccagaaccactgttgaccttcaaacgcggtgcgctggtccattttgcggtcaatcagtatgaggtggcgatgaccaccaaactggatggaaagaaaacctttttcctgccttttaaccggggaaccgcagaaggcggggcgggtaacgatcaaccattagaggggtatgcgacagcctatctatggcaggaaatcctgcaaccggataactggctgcgtattttggggcgctacttacatctggagcaaaagcgcgttgatgatgcgcttggtcatcaggaaatcaaggaaaccctgattttcccgcgttaccaccaatgggtcgctgttcagtcattgctgaatgccgttcgcgtggagggaacagggcaaaagtaccttattcagcatagcgctggttccggtaaatccaactcaatatga

SEQ ID NO: 156620 - DNA, 1680 bp, Enterobacter cloacae
atggccgaattaacaaattcgcaaacgattatggagaaaataattcgtgaggaagctgcggaacaaaatataagttatccggattattttgagatatatactgccgctcaaattttaaaggattatgatgttacatattctgatatagaatatagtgtggttggcgatggaggggatggaggaattgattccatttacaccttccttaatggtgaattaataaaagaagatacggattatttaaagggcggaaaacataacaatattgagttagttgtcatacaatcaaaaacctctaaaggtttcaatgaggatgcggttgttaagtttaatgaggtggcaagggatttatttaatatctccacggatataacaacagaagagattactcggagatataataaagatcttcgtgataaagtatccatatttcgagatgtttatagttctttaatgaaaggttttccagatctaaccttttcttattattattccactcttggtgaagaggtgcatgtcaatgttctcaataaaggtatccctttaaaagaaactatttcaaaaatgtttactggatcgaagttctctctcgatttcgttggggcaagtaaacttgttgaattaaatcgtaaggttaaaagtacgtcaaggatgatggagttagctgaatcacctatcgctactgttaatggcagttatctttgcttagtaaacctaaagaagtaccatgagttcatttccgataatgattcgatttcaagaagtatctttgagtccaacgtaagagatcacaatggtgatgttgtagttaatgttgcaattcaagatacattaaataatggtaaagaggatttctggtttttaaataatggtgttaccgtcattacatctaaggctgttttatctggaaaaacacttactatcgaaaatcctcaggtagttaacggtctgcaaacatcacatgaaatatataatcatttttctaacttggtcgaggatgtcgctgatagtagaaatgtcttagtcagagtgatttgtgaaagtaatccagaatctagagataaaataattagggcaacaaatagccagacaagtatcccacctgcctcacttagaagtgctgatgtaatccatcgcgatattgaggattttttcaaggcgaatggctatttctatgataggcgcaagaatttttataaaaatgaagggaagcctgcatctcgaattgtttctattccatatctatctcaatgcgttatgacggtagtgttgttagagccaaataacgctcgcgctcgaccttccacacttattagtgataatgttaggtatgaacagatttttaataaaaaacatcaattatcgctatatttaaattcatatttaattctaaaaaggtgctctgaattattgaaagagtatcagtttgagagtaagcgtgatttcaataatgttgtttatcatatttctatggctgttgttttaaaaattgcaggttctggggtgcctaagaaaaatatgccagggtttgtaagtgattttgaattaagggatattactgagccattgtttgatgatgtgtttcatatagtatggaatgagtattcccgactgggtggggatgataatgtggcaaaaggtactgtttttgttgaaaatatcatcagtttaattcagtga

SEQ ID NO: 156621 - DNA, 204 bp, Enterobacter cloacae
atgaaagtgtatgcgctacagggcgacaccctcgacgcgatttgtgtgcggtactacgggcgcaccgagggcgtggtcgaaaccgtcttagaagctaatcccggtctgtctgagctcggcgtcatcctgccgcacggcacggcaattgaactgcccgagaccgacagtgcggccagaaccgaaacggtgaatctatgggactga

SEQ ID NO: 156622 - DNA, 126 bp, Enterobacter cloacae
atgaacgattttcatattttaaatatctgtattcagaataaggatgtggcaggtgcaatgcgcgtgctgtgtgataaatcagaatttgcggtgcgcaagattctggagaaactaaagatcaggtga

SEQ ID NO: 156623 - DNA, 165 bp, Enterobacter cloacae
atggtattcaaagtcgagtcaaacggtgatgtatgggtattgtatgcaagtagaaagaaaagcataaatgatcttttgcattatatcaatgtaatgatggttggcagagagccggaggtttttgcctatgttcttaacgaagatatgattgaatggatcgactaa

SEQ ID NO: 156624 - DNA, 846 bp, Enterobacter cloacae
atggcaaaagactggcttgagctgcgtcagcatgcagaaacaggtattgagacaattaaggcgcatttcgaaggacacgcctttgatccccactggcatgatagctatctggtcggaataaccctttccggtacgcagcagttccactgtcgccgtgaacgccaccgtagccagccgggcgatgcttttttacttgagcctggtgaaatacatgacggtgatgcaccggtagagggtggctttacttatctgaccttttatctggatgcacactggctcacccgtacgcttcaagggctgtatgactctacacccgggagttacaccctccactttgcccaaacgctgacgcgagagcctcagctggtgcgcgctatcggtgatacatttgcctcgctgcataacgatgagatgaagatcgtacaacagagcacaatggataacctgctcactaagattacagcccactgccactggcggaagaaactcccgtcgcagttacaaagctccgctgtggcgcatcgtgcccgcgactatctctatgcgcatatcggcgagaacgtggggctgtcagaccttgcgcgggagacggggacggatcgctttacgctcacccgctgctttaagcgcgaatttcaccttgcgccgcacgcctggcttatccagctgcgcctggcaaaggcccgacagatgctggcgtatggggaactgcctgttgatgtggcgacggcagtaggttttgccgatcaaagccatcttggtcgctggttccagcgggcgtaccgtatttctccggcacactaccgtcggttgtgcacaaaccttccagacgtttccagaaaataa

SEQ ID NO: 156625 - DNA, 435 bp, Enterobacter cloacae
gtggcgaagcatgcgggtagggtgggactgccatggctgagtgttgcgtttacactctcccatgtactcagtgacaatggtcgggtgcttacggtctttgcggtaaatcttgcaggtacacgcgccttcctccttgtcgtaagagaactccatgccgtcaaactgagggtgttcgttgataatgcgagcccatccatcaacgccgacgactgggacaatcccgcctttatctgggaatgcgtaaatctctttcgtccatgggttcagaccgtactggttggcgacgatcaacagggctgtaaactgctcgtccgtgacgttgccacctttgaacgctgtattcttcagcgtattcatcaggtctgtaccggcatccatgccgaggcgagcggccagtttcccggccatggtggaaagtgcagtactcattgttaa

SEQ ID NO: 156626 - DNA, 276 bp, Enterobacter cloacae
atgaaaacaagtagcggacaagagattttaaagggcttcaatgttcgggatatctctgctgattatgacgagccaaggtttgatgttttatttgtccacgatgatggcaaatgccggtattcaaacaatgtttttggttctgagcaagaagccatcagttacgcaaaaacatgtaacgccaacacagcggacagtgaatgctgggactactaccagcactcttcaaccagcaacgactggaagttgattcaacacattgaagctaaagccgcctaa

SEQ ID NO: 156627 - DNA, 201 bp, Enterobacter cloacae
atgactaatagagaaatagctcttgagcaagcccttatcgctgttatcggcgctatccgagaagaggatgctgatttggagcgcatagcggttagggcagacatgcttttgctggataattcaccttatcgaattgttgagcatccccatgtctcaaatgctttaactgaaattgaaaaagcacttaatttcaaaaagtaa

SEQ ID NO: 156628 - DNA, 285 bp, Enterobacter cloacae
gtgtgttgcttccagtcgttcagatgtctgattgaactgctcctggcttattttcttcgcagccagtgcggttttcagatcctgaacatcctgcttatagctggcgttttcacgcgcttctggcaggagtttctcggctgcggcctgcgctttgagtgcgttggccgtatcccattttgtagcggcgtactggcgggcctctgcgatctgggccagagtcgcgcccttcccaagagattgctcggcattaagcatggcctgctctctgctgagttcttgagttga

SEQ ID NO: 156629 - DNA, 402 bp, Enterobacter cloacae
atgatagacatccaaaaattgatttcctggcttggtgttgaaggcgctaaagctgggttagataaaagtgaaatgactaactctgagctactggagtcattcgctaatttactaccgaaaaactcaagtaaattaaaacgctctgagattatagaagaagttgtgttagcaactcgcaagatgactcataaatcggtcgaggaattaatggaaatgtcaaaagaagaattatcttcttatttccatgaccagaaatatagcagaaaagaacttttagatttgctttatactctggaaataaggccaggcagctccgcaaagaaaaacctaactgagtttaccataagtgaaataagcgagatagggatgtataagcgagttgctaaaggcaaccatgtataa

SEQ ID NO: 156630 - DNA, 219 bp, Enterobacter cloacae; identical to SEQ ID NO: 118987

SEQ ID NO: 156631 - DNA, 906 bp, Enterobacter cloacae
atgcaggatctcaatgatttcgtatggtttgtgaaggtggtggagcatggcggctttgcggcggcggggcgggcgctcgatcagccaaagtcgaaactgagccgtcggattgcgcagctggaagaacgcctgggtgttcggttgatacaacgtaccacgcggcagtttgcggtgactgaagtggggcagacgttctatcagcactgtaaagccatgctggtggaggctgaagctgcggaggaggcggtggctgctttgcaggctgagccgcgcggtatggtcaggatcacttgccccgtaaccctactgcacgttcacgtggggcccatgctggcgaggtttatggcgcgctatccgggaattaacctccagcttgaagccaccaaccgccgggtcgatctggtgggggaggggggggatgtggcgatccgcgttcgtccgcgcccgtttgatgacagcgatttggtattaagggtgctggcggacaggggacattgtctggttgccgggccgacactgattgaacggatgggcaacccggcgatgccctctgaactcagcgaatggccgggtttaagtatgggcgctggtaaacacctgcataaatgggagctgagcgggccggagggggcgaaagcagacattcacttcacgccgcgcctggtgactaccgatatgctggcgctgcgggaggcagcgatggcgggcgtgggcgtggtacagttgcccattttgatggtgaaggatcagctggcttcaggtgagcttgttcgggtgctgaatgcctgggaacccagaagggaagtgatccatgcggtgtatccttcccggcgcggcctgctgccatcggtcaggacgctggtggattttctcaccgaagaatatgcccggatggtggaggagtaa

SEQ ID NO: 156632 - DNA, 861 bp, Enterobacter cloacae
atgaaaaacgtaacaggcgtgtataccgcacctcgtccgcactgggtcggtgatggttttccggttcgttcgatgttttcttaccagacgcacggcgaaccgctgagcccgttcctgctgcttgactacgccggaccacataccttcccggcggatggcgcaaaacgcggcgtgggcgagcatcctcatcgcggttttgaaacggtgaccatcgtctactcaggcgaagttgagcaccgtgattccaccggcagaggcggcgttattggtccaggcgatgtgcagtggatgacggcaggcgcaggcattttgcacgaggagttccactccagcgcgttctcgcagaaaggcggtgaactgaaaatgatgcagctgtgggtcaacctgcccgctaaagacaaaatagcgacgcctggctaccagagcatcactcaggcggatatcccggtggtcaccctgccggataacagcggaacaatgcgcgtgattgctggccgctttggagaggtaaccggcccggcgcataccttctcaccgcttaacgtatgggatctcgcgctgcaccagggcagccacctgacgctcaatcagcccgaaggctggagcacggcgctggttgttgttgagggcagcgtgacggtgaacggcaccacgcctgcgggtgaggcgcagctggtcgtgctgagtcagagcggcgacaagctgcatctcgaagccagcagcgatgccaaagtgttgctgatggccggggagccactgaatgaacccatcgtgggctatggcccgtttgtgatgaacagtaaaaccgaaatcgccgaagctattcgcgatttcaactccggccgctttggccaaatctaa

SEQ ID NO: 156633 - DNA, 678 bp, Enterobacter cloacae
atgtctacccctgcaaacttcaacggtgcacgtcccgttattgacgtcaatgatgccgttatgctgcttatcgatcaccagagcggattgttccagactgttggagacatgccaatgcctgagctgcgcgctcgtgcagcagcgctggcaaagatcgcctcgctggcgaagatcccggtgatcaccacggcgtcggttccacagggaccgaacggcccgcttatcccggagatccacgccaatgcgccgcacgcacagtatgtggcacgcaagggtgagatcaacgcctgggataatccggagttcgtggcggcggtgaaagccaccggacgcaaaacgctgattatcgcggggacgattaccagcgtttgcatggccttcccgtccatcagcgcggtggcggacggatataaagtgtttgcggtgattgatgcctccggcacctacagcaaaatggcgcaagagatcaccctggcgcgcgtggtgcaggcaggcgtggtaccgatggacacagcggcagtggcctcagagatccagcgcacgtggaaccgtgaagatgcgggagaatgggcagaggtgtacacacacatcttccctgcctaccagctgctgatcgaaagttacagcaaagcgcaggacgtcgtgaaaaacagcgaagtgctcgattcgcagcgttga

SEQ ID NO: 156634 - DNA, 366 bp, Enterobacter cloacae
atgaaacatctaaaagatagcattgctttacttttgttgttcactgggtattcggaagtaagtgctgctgcattttccggggaagaaaatagccagcttgcgagtattaatcaaaagagcgcagaggaagtaaaagcggcattagagagtttgaataaatcggttgatgcacagattggtaacaacccagaatataaaccattgattctgggcctgaaaaaatcatggggagagatgattgataaaaaatgccaactggaaacgattgattcgaaaggaactgatgcagaaacggccgaagtcagcaactgtcttataaaaagctaccaggaagaaatgaagtatttcgatacgatgctacagtaa

SEQ ID NO: 156635 - DNA, 444 bp, Enterobacter cloacae
atgcatcattataagttctttgcgttggttgcaatgcttttgtgtggttcatcgtttgcgagtgatgcatattttgtatgcgacacagcaaaaggaacaatcaaactagatgaaaacaaaggtgtacttcggtacaccttatcgaaagaccgcaaaactgaatttaactatgaatcgaaaggtagtgattattcaggatttaaatacaaccattactcacgatttcaaaccgattatttcaatgtctcgtttgtaaatgcagagtataagtacacgatatttagtaattatgagaatgagagtgaaatccgtggagttagtgttacgaacctgaatagcaaaaaggaatctgtttatgattgtaagtccgttggcattgatcgtcttagtgatttgtcggcaaaaatagcttgtgataaagattccgctttggggtgtgagtaa

SEQ ID NO: 156636 - DNA, 252 bp, Enterobacter cloacae
atgaaaaagttaaaagtcgagaaaactggctgctggggaacgattgacggcgtattccagcaactgccggttggtcatgagtttgttgcggttgatgtgccgccagctttcgctggacgcgtttcagtagttggcgaagttgaagagcaggagcttgaagtctccacgccagccaccgacgataaacctgcagagcaggcagagcaggcagagcaggcagatacttccgctaaatcgaaaaaggcgaaataa

SEQ ID NO: 156637 - DNA, 294 bp, Enterobacter cloacae
gtggcgaagcatgcgggtagggtgggactgccatggctgtgtgttgcgtttgcactcgcccatgtactcggtgacgattgtcgggtgcttgcgatctttgcggtaaatcttgcaggtgcacgcgccttcctctttgtcgtaagagaattccatgccatcgaactgaggatgttcgttgataatgcgagcccatccatcaacgccaacgaccgggacaatcccgcctttatctgggaatgcgtaaatctctttggtccatgggttcaggccgtactggttggcgacgatcagtag

SEQ ID NO: 156638 - DNA, 240 bp, Enterobacter cloacae
atgcacgactttgagctaatggttgagcaaataaaaggtgaagttgagaagtatggggaggatatcgtcccggtcatgctggcgcgggttgcacggttttacgctccatactatttcgacaaagacgatgcctacaagcgaaggcttttaagccaattcgctgaattagaaaggcgaataggcttaacagaaaacttcgattggttatcttcactggaaaaatacaaaaacggcctctga

SEQ ID NO: 156639 - DNA, 546 bp, Enterobacter cloacae
gtgattacttttgctgatatcaaagcctcatggcgtctgatactgctggtggccgtcattgcggtaattgccggactgtgtattttgctggcaaacagccacgctgatgttgctacgctgaagagtgataacgacgttctgcgcagtgacaataaactgcaagggacggttatcgctgctcaggctttcaacttcaaccggtttaaccaggtagccgataacgccagtcgacttaactcactgattgatgccagctccgataaaactgttatcgagtaccgggagattctccgccgtgaaaaaacatgtgatctgcctgttcctactgatgttgctggtgggttgctcgaatacacgcaccgtctacgttccagcgcaatgcacaccgattccgggagcgctgacgcagccggtgatagcaccactaccgccagcgcgctgacgtattgccaagccgttctctggatcaagccactactggccgccatcgaaaaagcgaataaccaactggctggcatccgtcaaatcgagcaggacaggcaatag

SEQ ID NO: 156640 - DNA, 891 bp, Enterobacter cloacae
ttgactaacttagatgaagaaattgaaggttttattacttttaagatcgatgagcttaaaaacaatcacttccctaattcagacgtgattgtctattacggcggcataactgaatgggcaaaaaatatttaccaacccgtacttgaagaaattgggaaagaggctttaaagaaaaataaaaaatcccttgtaattattctttctacagccggcggatctgttgagtcagtagaaaaaatggttgaaattacaagacatttttatgaggaagtgagttttatcgttccagactatgcaatgtctgctggcacaatatggtgcatgtcaggcgataaaatatacatggattatgcctcttcacttggtccaatcgacccacaagtccaatcttctgaagggaaatgggttccagcgctaggatatcttgataaagttgaggagattattaacaaatctcgtatgggggctgtaacacaggctgaattgatgatgcttaacagcctggatttagctcaactccgtcgctatgagcaagccagagaattatcaaaagatttattaaagaaatggctcgttgagtataaattccgcaactggaatttgcgtgagacgactcaaagcgaagttacaatcgaagataagattgctcgcgcagaagatatagcaatagccttaagcgacaaccgtcgttggcactctcacggcaggtttatcggtgtagatactttgagaaaagatctcaacctgcaaatcgaggattatactgataatgaacgattgagcgaagacatcagagaagtagataagatgttaactgaatttaggttcagagttcagaaggagatcgtcgtgatatcatcatatcctgatgacaccttctctgatgagtga

SEQ ID NO: 156641 - DNA, 375 bp, Enterobacter cloacae
atggatactaaagaatgggttgatggccttcggtggcttagtgacgagcagatcgttgatttgcacttcaagctccaggaaaaaatcaaggagcactataagcagcgagacgttggcgataatcttgagcgggccatccagttctgcgagcaacatgtggctttagctgaactggcattcccagcgctgaaggcaaaacactacaagcaggcttctgagtacgaagctttgacgggtagcaaatacccagctgagttttacgcacctgcgcatcatgggtaccgacagctgataacgatcatgaagagaggtaagcagttagacagagtggctcaactggaagcaaagaggcgatcagaggggtggagagagtag

SEQ ID NO: 156642 - DNA, 537 bp, Enterobacter cloacae
gtgaaggtagaaaaaagcgatgttctggcgtttaccatttcagacgttgaacgcctcgaccctgtcagggtgatgattgaaaactatgagcctggcaagggtcgcatcaccatcacctgcttcggtaaagcgtggaccggagcatggtttgctatgggtggcgacactgtgcaagcgttcataaagcgcgtcagtaatgattaccttatcggctattttgacccgcaactgcaaagcacagttgatgatgacaatgacgccaacctagctttcgttaagggtgagattatccggctgcgtcgtgatcaggaaattggcggcaatgaggcccgctcaatgtgggatgaggctgaagatgctgaagatgtgaaggcgagctgctgcaattatctcgtcggcgacaagctgcttaacctgctaggcgatgatccatggtacgcaaaatggccgtcagtgccgaaccatcattatcagtaccttgaacgcatcatcgacgcagtgcgcggcgggatcgtagaactggagcgtgccgcatga

SEQ ID NO: 156643 - DNA, 123 bp, Enterobacter cloacae
atgcagtatgtgatagttcaaatgatggtggaattgacgcaatatacgtttcacatgttgaaaaaaaacttatttgtgttcaagctaagtataaccaaagcggaaataacacttggtcattaa

SEQ ID NO: 156644 - DNA, 2508 bp, Enterobacter cloacae
atgaataacccgaattcccgactgatgatcttcctgctggcactgttgctgattatggtgctgctattgggttatctgcgccatgcggaagctcgcgagaccttcaatacccacgcgctggagctggacagtccgggccaggcggttgctgacttatccgcctttgccgaagccgatggccagttacctggcacctaccgggtgacggtgtatgtgaacggcgagcagcagggcgaagcgcaggatattgcctttgttaccggggcagataaaaaactcaccgcgcagttaaccccgtcgatgctgaaagcctggggcgtgaacaccgccgcgtttcctgcgcttgccgcactgccagcggacaaaccgctggaggatattggccgctatatcacgatggcttccggcgaactgcgtttcagtaaactgcaactgaatctcagtatcccgcaggcggcgatgagcgccaccgcgcgcggctgggtggatccgtccgaatgggacgagggcgtacctgccgcactgctgaactataacctcagcggcagcaatacctggcgcgacggagaaaatggctccgatgataactattacgctaacctgcagagcgggctgaacctcggcgcgtggcggctgcgcaactattccacctggaattacgacgaggataacggcagccactgggattcagtgaacacgtatcttcagcgggatgtccagcgcctgcaggggcagctcacgctcggcgacagctatacgccttccgatatctttgacagcgtgcagtttcgcggcgcgcaactggcgtctgatgacaatatgctgccggacagcctgcgcggttttgccccgatcatccgcggtattgcgcagtcgaacgcccaggtcaccattaagcagaacggctacaccatctaccagagctacgtcgcgccgggggccttcgccatcagcgatctctacccgacctcgggcagcggtgacttggaggtgacgattaaagaggccgatggcagcgagcgaaccttcatccagccgttctcggcggtgccgattatgcagcgtgaaggccgtctgaaatatgccctcaccgccgggaaataccgcagcggcaacatcgacagcgatgagccgcagttcggccagatgacggcgatctacggcctgccgcatgccatcacgatttatggcggtacgttgtactcggaagactatcagtccggggcggcgggtctggggtttggtctcggcgagctggggtcggtttccgccgatatcaccgctgcacacaccacccttaataacgatgaaactcacgacggccagtcgtaccgggtgcagtactcaaaagattttcaggccaccgataccagcttcaccctggcggcgtaccgctattccacggaagggttctataccttccaggaagcgaacgacttacgctcggacagcgatgatggttggcggctgacatacaacaagcggcagaaactccagctcgatctcacccagagtatcggcagctacggttcgttctttgtttccggctaccagcaggattactggcatgaggacggttacgagcgcaccctcagcaccggctggaacggcaatatcaatggcgtcagctacagcgtttcctacagctacagtgattatccggacagcactcagcctgccgaccagcagctggcgttcagcatccaggtacctctcagccgctttatgccgaacgcatgggccagctacagcgtcaacaccgcgaagcgcggcgacacccgccagcaggtgggcctcaatgggacggcgcttgccgataacaacctcagctacagcctccagcagagctacaccaaccacggtgtgggcggctccggcaatatcaacgccgattacaaaggcgggcagggggaaatcaccggcggctacaactatgacgacgatatgcagcaggtgaactatggcctgaaaggggggattgtcgtccatccacatggcatcaccctttcccagccgcttggtgactcacttgccatcgtgaaagcgcccggggcggatgacgcgaaggtgcagaataataccggggtctataccgactggcgcggctatgcggtcgtgccatacgtcaacgcctaccgaaaaaaccgcatcgcactggacaccagtacgctcggcgatggagtcgatgtcgacaccgccgtgcagaccgtcacgccgacgcagggcgcagtggtaatggcggacttcaacacccgcgtcggacggcgcgtactgatgacgctgctttaccgtgggctgccggtgccgttcggcgctcaggcgaaaatgaaggaaggcgacagcggcatcgttggcgatgacggccaggtgtatctgacgggcgtcccggatgaaggtgatatcacggtgaactggaatgggaaacagcagtgcgtggtgcattacaggttgccggagaatgccgcaaacgcgccggtaatggaaactgagcaggagtgtcgggaatga

SEQ ID NO: 156645 - DNA, 276 bp, Enterobacter cloacae
atgactaaaaaagactggcaccccgccgacatcgtcgccgccttacacaaacgcggcaccagtctggcgaaactctcgcgggaagcgggactggcctcttcgacgctgtcgaataccctgacgcgcccgtggcctaaaggtgaatggctaattgccatcgcgctgaaagtacacccgtcagagatctggccgagccgttacctcaacactgggcacaaacgcgaacccagaaaaccgctttaccccatgacaacaacggaaaactccgggacataa

SEQ ID NO: 156646 - DNA, 279 bp, Enterobacter cloacae
atggttccgaagcgtcttaggattgcgagagagttagccgatatgtcgcaagaagaattggctattgcagcaggcatttctgaagaaacgggctattcgagaatgtcacattacgaaagtggcaggcataaacctaaattcgaactggtttgtcgatttgctgaagtgctcaatgtccctgaaggctacttctacactcgggatgacagcttcgctgatgcaatgctgaaactttacggtggaaaacgggttcagtggaaaaaggtgcgcttaagttaa

SEQ ID NO: 156647 - DNA, 288 bp, Enterobacter cloacae
atggatggatttgacttgaaagtaatccccaaggataaagatgatattaataactcatatttctttagacatcgggagatatatgagaatcataaatcagacgtagcgaaccttctcaaaaaacgtttaatcttcaccgatggatatagaaaatccatagaaaaaatcctatcgacaaaaatgacagaagacgaatttaggcatgtcatatttggggtaacgggaaacgaacaagattattctacgatacctttatcgaaattaaagaatgatattcttaaaagttga

SEQ ID NO: 156648 - DNA, 291 bp, Enterobacter cloacae
atggcagcgatcggcagcacgcctttcaaacgtggagatgaagcagagggatttctgattgtgacgtctgcagctgatcaaggactggtcgacattcacgaccgccgccccttggttctgtctgcagaagcggcacgtgagtggatgcgtcaggacctaggcggtaaagaagctgaagagatagcagccgacggcgctgtgccagccgacaagtttatctggcacgccgtgacgcgtgccatggggaatgtgcaaaaccagggtccggagctagtcaaggcatcaaaatag

SEQ ID NO: 156649 - DNA, 714 bp, Enterobacter cloacae
gtgtatccactaaagcagttggttatctcaggccgtaaaagacgatggatcctgatggacttggaaacctctctgccgttgctgtatccccttaggtaccatattgaccatttggctttccgctcattgtccacacagtcagcttcacttcaatctgtgaagtttttttacgaattctggaggcaaaagtatggtgtctcgttttgctacagcttctattcatctgaccacaatccagacattgctgtcggtgaaatgcccgcattttggatgtatctagaaaatggccacaacgtccagtcaaatgtgttgtctttaacgagagtcacaaaagccaatagcttaactcatacagtcagtgttcgtgctgtgatccatttcatttcttttttgattaacacctacatatcacctgcataccgggatgactctcccaaagcattatcacttttggcttcgcgtttacacacccgtttacagctttgccgggagaattatcgaacgcttacatcaaacaaattttcgcaacatagtcacagcagccaaggatttcagagtttgtctggggcaatggtgctcagcctgtatggaataataaccccctcttctgcccaaaagcataacccgctaaatcctttcccttccgcacatcttcagtttcgcaattttttgattattcgtctgttgttaaattatggtttacgaatgcattaa

SEQ ID NO: 156650 - DNA, 1041 bp, Enterobacter cloacae
atggataacgaatatatgtatcaggaagcaattggaaatatcaagtatcaagctcacaaaataacatatcttgctaatggtttcaatgcttcacttatagatgctattaatctttttttaaagtctggcaacaataacgttaatccagtcgataatgatgttttttttaaagctcaagtgaatgcagattcattgttaaatgcatatgcgtcattgattgattattattatatcgctattgcgattaagatgaatgcccctttagatgttattaatagtgttcaatacaagaaaatcactaacgagttaattgcaaagaaagagtcatggagtaaatatctacaacatttaaaaccaattcttgaggagaagtttgagcctgaaaacgacatatggaatgagttttattttatgtggggtggtgtttttaaacaagaactagttaaatggagagtgcttaagactgaagatcctgcattctcagaattgacgaaagaaaatgggaagattgacattcttcccaacgaagctgttctggaatattaccgccttacacatttcctttactgcaatagaacaggttccggtcataagtataatatttatttggaacttaacaactacttgaaacacaatagatatccattagttaagtatgagacacagaggcttaaagatggtgactatgcttatgcgttttatactatacatcaaaatgaatatcatttattaaaagctggcattatacgaactttcgctgagattgattttgatactctgaaagagggattgaagcattgttatgaaaacagaggagtaatctctagtctggagatggaaattggtttacccattatcaatgttgaccgggcgaatggttatgaatcgaattcatgtctttattttcaattggatggagttctgatgtcaaggagcgtggattctatatcggtcaatgcacatagccttttttcagtctcaggatcgttacttcgagaaataagcaatgctcttgactgcaagttgataccagatatatag

SEQ ID NO: 156651 - DNA, 762 bp, Enterobacter cloacae
atgcaattacaagttttaaatcctttctgcactccatgcccggctaaaatgcccgatggttttctaccggaacgctacagaattgcagaggctccgccagaggcagatagagttaaccgcttgtatcctggtttatatgaggatgaccaatatggattcattgatgccccctgcaaagcaggagcgcttaccgcatttgcgcattctcctgggctaaccagacatgttagcgattacttcaggagcaatcccatattcgagaactggcgacatcttatgcctgagccaacgcctgctgcacttgagcggtatcaggaaacttataatgtgctgaatcttagtaacgttgacactctcattaaacaatatggtgcaatccctcctgaaggacaggtacttttccacggcgggcaatttgctgatctgccttggcaatacacctctcaaagaccgctagctacatcattctgtccgggagctgcaattgcaaatggatggcacttgggtaaagcctttgaggcaggttacattgatctagtaatgctgaccgttacacagcccaaatctagggcttatttcttctcgcacgaagataacgaagagggattttcaaggaaaggccatgaacgggaggttttgtttgaaacaggtgcagaaatcacgattagcgaacgtattctaattcgcgaggatttccctgtgggcatgggatggcaatcaaaaatagttcctagctatttgcttatcgcaacgatttcgtga

SEQ ID NO: 156652 - DNA, 756 bp, Enterobacter cloacae
atgttgtacaaatatgtagggaatgttgacgacaataaagtcatcgagtatttagatgcttttgttgagaaaggtacagtatatgccagcagagccttaggatttaatgatccagccgagctaaagctaatttttgacttcaatgccgaatttgaggtgatcaaaaaacgatttcatcaggcccgtccagatagaacagaacaagaattttgggcatggtacaaatcatttgatgaaaactccaggtggggtattgagaatagtatgcgagagcatactttgacgacaaaaggtattgtgtgccttacgcgtgactatgataactatttgatgtggtcacattacgctagttcgcataccggattctgtataggctttgatgatgctttctctcatagtattgaagatcgtgggattgagggcgatgttctctatgttgattcatatccccattataactattacactgattctccgaaagactatttaaacgccacatatcttcataagggtaaaccgtgggcttatgaaaatgagtacagggtaattactgagggttctggtgttaaacaatttgataagtctcttatcaaagaaattactttaggttgcagggcttcagttaaacttcaagattacgccagtaagcaaatagacaaaggaatagatgtctacaaaatggcattagatcgtaattcatatagattaatacgaattcgtgtaaaagaaggccattatttccaaggtgacacatag

SEQ ID NO: 156653 - DNA, 255 bp, Enterobacter cloacae
atgaaatacctgcatacccgtactgccgatgaggtgcttaatacaattaaagcgtaccgtgattatctccacgagcatacgttacgaaagccacactggccgctgctggacaggcttatttcccgtgaaacagaaatgatgcaggtatgggaaaacattgcgcagcaacggctttgctggaagaagtgctacacgttgctggagcagatttttttgcgagggcttatggcactagggatcatagcagtcggttga

SEQ ID NO: 156654 - DNA, 732 bp, Enterobacter cloacae
atggagaagtacacgtttattgatcgatattttcacagccagcgcgagctgttggacatcaggcattctgaagagcgggacatcaacacgctgtttacctacctgaataacctccactctacggctgataagctgcttgagctattcaactgctgcattaaaactgctccagaattcaaagtccttcggcttatcagaaattattttcatcatgtcggggacgtcgacgaaattcgtctccatgtcaaaatcgaggaaaatgttctcgttagccattcgcaacaccttctaataccactagaagtgtttgcaaaaagcgtgaaatcatttatcgataacacgatacctgacgaaaaaaacaaaaattacaaatccaaattgcgattcgtacagagcgaaatgagtaatatcgctgagatcttcgactacaccgcaaatctcatgaaagacctcgagatgttctgtcaaaagcctagtctaaggcttgacggaagggtatacgaactcggatttgatatgtacaaatttgttttcaacatcacgaatattattgcagacaaatgccgagaaatcccagagctatgcgaaaagaaggtaatccgggacctcgattggtcatatcgtgctgaaaataacattggcaaacacgacgttttttgcagcccgtccaacgtaccaatcaccaccaccgaaggcttcgtatacgctaagagtattgatctggttcgttaa

SEQ ID NO: 156655 - DNA, 648 bp, Enterobacter cloacae
atggccgaagagttgctgaagcgaaactggttagtgactgccaccgtgcgtggtgatgggcgtacagcgctgcacgaactttcagtacgttaccctgaacagcttacgattgagcgtcttgatataacggataacactcagctgaatgacttacattcaaggctcagtggccagaaatttgaagttttattcattaatgccgggattgtaaacaaaaatcagggcgaaaccgttggcgaggtcagtgccgaagaatttatagatctaatgattacaaatgcactttcaccgattaaggtcgcggaagcgcttcaggacacgctcactcctgaaggtctggttggaataatgtcttctggacaggcaagtcttactaataacacgacaggcggcctggaagtttatcgcgccagtaaagctgcactgaatcagtttatgagaagctatgcgatcagacagtctacgctgtatccaaatcgcgcttttcttcttcttgctcctggctggatccgtacagatatgggagggagtaatggtgcttttagcctggaagaggccattccggatatcattaaaacaatcgagcagaaacaaggtaaaccgggcctggaatatttagatcgctttggaaagaccataccctggtga

SEQ ID NO: 156656 - DNA, 1176 bp, Enterobacter cloacae
gtgaatgcgaaaaaaaaggcggatgattcgagtgggcgttttaacactagccctgaagtgagaactctggtctggatccgtgctgcgggtcattgtgaactctgcggaaccgatctgacacatgattttcgtatcggtacgacgatgaaatggggagaagtggcccatattcttcctgccagcccgaaaggccccaggggaaatgccacacacagcgtagaagaggcattggcacggacgaatgacagcgagaatcttatgctgctgtgtccgggatgccatgaccgggttgatcgtgacggcgacaattatcccgaagacgatcttagcggacttcactctgcctgcctgaccagaattcgcctggcggcttccacgcccggggaggaacgcgccataccggttatcgttcaaagccagcatcatcagacactggttgcaattccggcgcaggcccttcttaccgccatgtctgcagaagggctgacggcacagtgccatccggttacggttgtgttccctgagcccagttcacggggaagggatgtgggttactggcaggcgattaaggatttaatcactgaaaaactcgaggccgggcttgcccgccgcggggggcaatttggcgacaagccggctctggccatggttgggcttgcggatattccggcgttgtttttcctcggccagaccattggcgaccgctataaacgctttcagtattcatttaacagagaacatatattgcgctggccggatacagatgccctgccgccggcgtttatctcttctgaacttccgcaaggtgaggggccagttgctctggtgctgtctctttccgcagcggtaccgcgaggcgatgttaccgccgcactgccgggtgcccggattgtagaattcactgtccctgaacccagctacgccatggtgacaaaccgcagggtcatccatgcgttcagggatgagctgcagaagctgctcagtcagttagaagccaccacgacccaggccattcatgtttttgccgcggtgcctgctgcgctggccattgaatttggggctttgctgacgacccagcatcagcatccctacatcatctttgaccgtgacaaaaataacgcaaaccagtttcgccccatgcttagcatcggatgtacagaggagcaacgtccatga

SEQ ID NO: 156657 - DNA, 1248 bp, Enterobacter cloacae
atgagtaacgaacagactaaacacagcagctgggagtattttcttctccgtgcagcccgaaaaatttcgttatcagcagctcagtacagcgtcattgatgctcgctactctcagctggaaaaaattctttctgctgccgatgatcccctgctggcggatgcccatatttttccccagggttctatgcgtcttcagacaacgattaatccggtgcctggggcgccagcagatctcgggacaattgatgcagatgcgattgtctggttaccccatgccagagggatcgatgcccggactgtattagaggttattgaacgtcgtttccaggaaggcagtagggttcaggaggatattcagcgacttcgtcgcggtgtcaggattgtttacgccgatgaaaatccgggtttccacattgatgtcacacctgcacgtccctgccatcacaatgagcaaagcgacggactgggcatgctcgaagtacccgacagggagcacggctggaaggcaagcagtcccattccttatgcagactggctgcatgatgcgtcaaagcaggacatcatgcttgaacatgttgttgagtttaataaaagtcatgcagcaatggactctgcgacccaggccccgctgcctgaatataaagaatatcaaaaagatgatccgctgcgtgcgagcattaaattgatgaaaaggcacagggatgaatgggcgatcaggacgaaaaatgaaggatatcggcctatttcggcagttatcaccacgcttgcgactcacgcttatctggatgttgtcgcgcagtcagtatataccgccttcaccccgcttcaggctatcctggcaatcgttaacaggatgcctgaccatattcaccgttacggtaatgagtattacgtctgcaatcctgaagataacggcgagaattttgcggaaaaatggaatcgtccggatgaaggttataaatacgttgatgcctttaataaatggcatgcgagtgcccgttcggcgctgacgctggggctcgacagccacgcgtcgacagaaacctttgcgaaggcggtccaggagcagttcggtattggtccgacattcgttcgcgaagttaacgagagcattccggcaaactggacgatgcccgggcggcaagacggtgtgacacgaaactctgtcgcaatggggtctctgttcgggagttcagtcagcagtacccagtctcaagcaaatgttgcacctgtcgggcgactcggctga

SEQ ID NO: 156658 - DNA, 1752 bp, Enterobacter cloacae
atgatacaacggggcatttccgcccttaaagactatctgggcgcggacaatgcttcggctcttctcaggcccgctgaactgcgggtcggtgaggcggtcgccttttattttcctttacccgttgattacaccggccttgagcggagactacggattggttttcccaacgatttcccgtctgaatcccctagccttcaggttgaaccttcaccgtggttagtctggccccatgccatgacgtccgggttgtgtctccatggattcagggaaaagcccgttacgggctcacctgagaaaattgttcaggacagcttatcccgttttgcgagcattgtgtctttttctctggaaaacgcagatcctgcacggcgggagacggagtttcagaatgaaatttccacttactggctctggcagcttaaacggtcggcacgtaacctgattcttttgggggagcctgaatcgggttcagttttgtatgttgtaagcgatccgaggtataccggtcatactggcctcaacccggtatgggtttcgtctgacaagaacgctatccgccagcatttcagacgtgccactggccgttcggttgtgataagaagcccccatgaagcaggtttctttgtcaaactgacgtctttccctggcattaaggtgcctgaacctcacgcgtttctcgaatggcttgctccccatatttctgaagaatccctgtccgcgatgtctaaatggtcagaaaagagtagtactttgctttcccgatgggttgtcatggcattaccgggtggggacggggcggcaagatttactgttaacctgtgcaccagaaagaaggaaacagaccgtacacatttttacggcctgagatcctcacgccgtcagtccgggttaaagaaagaaggacctccggccagtattctgtcatcgcgtgtgaacgttattgatcgtggggcatttttttcacgggatcgaagcaacacagcaaaaacacttgagaactcgcatgttgtctttgtcggtgtagggtcgctgggatctgctgtgagtattcaactcgccagggccggtctgggcaggctgacccttattgatcctgacagactggagtcacccaatctggggcggcatatgctgggtgctgaggatttaggcaaatttaagtctcaggccatgcgccatcgtctgcttcaggatctgcctgtgcttgatgtcaccgcgctggatacatacatcgaatgggttatgggtcaaaaacccgatattttcgaggatgttgatctggttattatcacgacagcggactgggaatcagagtctgccctctgggaaaagaaagcctccggagcgaaatgggggctgatacaggcctggagtgagccgcatacacttgtcgggcatgcactgatcgcacctgaaggccgctttgatgcaagatatctttttagcgacagaggtgacttcaggcaccggtttaccgactggccggatgggggcgttgtgcctcttcctgcctgtggtgaaagttttataccgggaggctcggcgggaatgaatggtgttgcaacaatggtcactcaggccgcaatacgttacctgactactgtaggggatgtcactcaatggcattccagtgtgtatcgccctgatgaggccggagtgttggggggacgctatacgggacctgtacttcctgaaggagttgtccatagtgtttttgaacgtaactggccgaaacccgggcaaaacgcatga

SEQ ID NO: 156659 - DNA, 498 bp, Enterobacter cloacae
atgaatgaaatagcatggtgctgggcctggccggatatgaatgcggagctgcaggttgggcggcaggtctctgagatgttcggtcactaccggcagtcacagggagaaaatgagcgaggcgggcagctgtttgtcgatcccgccaatcccggcggtattgtactgtgtcatgcttcagcgccacatcctgcggaccgcgctggcagaacgtggctcgaactgaacaacgatcgctgccgcactgaaatcgagaacgcaaacaggaagggattgcgcctggttggatactggcatacgcatccgcaggcagttcctcacatctcagggactgacattgccagttttgcgcgattcgcgaggcaaaatgcacgtgatcttccccatcccgtggcggtgattgtcggcacgtcaccatcgaccacaggcattaaagcctggatatttcgggagggcaggtatcaggaggcagtgtatacagcatccttgtcgcggccttaa

SEQ ID NO: 156660 - DNA, 543 bp, Enterobacter cloacae
atgaatgctagcgagattttcgtttcagtcgatattgaaacatccggcccggtcccgggattatttagtctgctttccattggggcctgtctggtgcatgcgcccgacgtgcgtttttatgccgagttgaagcctgactgcactggctttgatcctgaggcgctggcagtgacgggatttaaccttcaggcactggctaccaccggcatagcccccgcggacgccatgcttcagttatccacctggctcacatcccaccttcaaccgagccagaagccggtctttacgggactgaatgccccctttgactggtcattcatcaattactacttccataaatatacggggaacaacccatttggcttcagtgcattagatattaaagcttactttatgggggcaacaggctgtacgtggtctgagaccaaatcatcaatgatgacacagcgtttatctgccaaaggaagacccagccataatgctctggatgatgcattatttcaggcagagctttttgcgttgatgcaaaataaagggtcttga

SEQ ID NO: 156661 - DNA, 561 bp, Enterobacter cloacae
atgaatagtcgagtatccaaccctgagtcgtacatattttctgcaataatctatattggtaaagataacttcaccagtaacgatgtggctcaaattcttatcgagcgattttcacttccgaaaagttattttaaggcaaaagcttttgcttataaccaaattcagtgtttagttagaaaaggattattgagtaaagtcagaaaatcaggcgcgtatcaatatgtatactcagtcacatctgaattcaatgtcgtaaaggaaagcgtagagttaattgaggtacccaaaaaaaattcctgtcaacttgttttaagtgctaccagccatgaatacagaaatgtaaatattcaaataagaactcttattgaaaaatacagcagcgagttggaaaaagtatcaggagcaaaggagatttatgaagaattgataattgccgtgccgagcaggggaaatgaattcaggaagctttctctcgagcaagagaaaaagcaaattaagataaatgaaaaaataaacacattaattggaatttttaataaaactattgcaataaggcaatga

SEQ ID NO: 156662 - DNA, 531 bp, Enterobacter cloacae
ttgaaaataattgacaattctttattgatagatgtagctctaactgaagaagtatatgagcaagtcaagttgcttctaaccggtctggatgacataagtttaaaaattgaaagttctgttatctccgctaaagtaatagacctaccaattgctgtaagttctgtgttttttaaaaactgcacttttgtagtttcgacggtgatctctaaccttaaagatggacgtttttttaaaatcgaaaactgtaaaagagatttttttcttggcaatgttaaaattaagggggttaattgccgtaaccttgttattgaccaagatgaaatcgaaaactttgcagaacgcctttctccagatattgaaaagtgcattatcgagtatttcgaatgtacgtgtgaacaaccacccgtcttcgatgaggtagtttttatgaaaaaggttttcataaattctaatataaaaggcgagccctgcggtttatttttcaatagctgtaatttttttaaaaactctcggataaatgcggctttttga

SEQ ID NO: 156663 - DNA, 279 bp, Enterobacter cloacae
atgttcgattacctacagtcattgccattccggattcatgaccattttgctgcgatgacggcactggtcttctttgcaactatcttcaagatggtatttcctttccttgcgtacctgataaatcgtgtctttgagtacagaagttataaacgcctcagcaaaattgaaggggttagtgatgatcgcgcgagagagatagcaagagatatctggaggccaaaatctaaacctccaaaatggctattagccttaaagcgcaaattgttccccaaaaaataa

SEQ ID NO: 156664 - DNA, 189 bp, Enterobacter cloacae
atgctctcaggtttattttcgcactccgcggccaatgccgcggatttttcacgtctggaacaggccagcgttgagtttcgccatgtggacaaacgctacggcgaccatccggttttaaccgacattaatctcaccatcatgccgggtgaagtggttgccattctcggcccttcgggttccggaaaatag

SEQ ID NO: 156665 - DNA, 618 bp, Enterobacter cloacae
atgatttttaacggcgagatggtgcgcgccatcctcgacggccggaagacgcagacgcggcgcatcatgaaaaaccagcctgccggagattaccccgacaccccagccctaatcagaagcgtggacggtggttttcagtggtacggacattacggagaaagcagcattttcaattgccctttcggtgccgtcggcgatcgcatctgggtgcgggagacgtgggcagaggctggggccagctcgccggatctgaaactttatcgcgcgaattaccctgagcacgttccaactcattacgagaatgtgcctccggctgatgaaatacgctggacaccttcaattcacatgccgcgttgggccagtcgcctaactctggagattaccggcgtgcgagtggagcgcttagccagcgtcagcgatgaagacgcgggaaaagaaggttatccggcaaatcctgcgccttacggcgggaccatggataaatggctgtggttccgcggattatgggacagcatctatccggatcaaagcttcaaacacaacccttgggtctgggtaatcgaatttaaggtggtgccccatgttccagctaattcaacggggtcagatttacgctga

SEQ ID NO: 156666 - DNA, 165 bp, Enterobacter cloacae
atggccgccggagtccatgccgccgtagtagccgccgcagccgcggtagaagtggcagtcgtggtggcaatgcctgctgcctgtgccgtggtggatgctgcaaccgccgcggtagtggccgtctggcccataatggccgacttaacccactcaatgcccatctga

SEQ ID NO: 156667 - DNA, 147 bp, Enterobacter cloacae
atgaatgctgcggcgggcggtgtcccgccgttatggagactgaacatgatgaataaaagggtaatcgttgcgttgctgaccttcgggctggtggcatgcgcgcaggatcaggcgccgaaagaggactcccgtctgaaagaggcctaa

SEQ ID NO: 156668 - DNA, 1377 bp, Enterobacter cloacae
atggcagtttcaagaagagaatttattaaattagccgcggctatcggcgcactgtcaggctcagggcttcttttagcggattatgtggctggaaggaagaaccgcgtattcatagtctatgggcagtctaattccactggtaccgttgactattcacaaacttggagaacgccaagccgatggaatgtttatgaggatgcttacgaaggtgagagagacggtagtaaattcattacagcaaacaggtcaggcgcattaactttatctccagatggcgccggtttgtcaaatttacgcgagatggcttacggtgtagatgctggagaggggcccatttatggcattgcctcgcatctatcaaaggcattcccaaaagacaatataattatttttgggcatggaagaggatctcaatatattgagcaacttatcaagccaaccgaagagttaatcctcagtggagataaatacaataaacctctaacaaaagaatctcctgactataatgtagcttcaggcaataaaccattgctttattatcgcgagccaaaattccgctacccttatctgaacggtatgtggatgctcgaaaaaataaaagatattgtcaaaagtgatattcaagttgatggcatcttctggattcagggggaaaatgatgccatcgcccctaaaggatattctgaaaaaattctatcattcagaaatgattacgttaaagatattgtaaaaatcacagggcagggcaaagagccagagtttatttttgagcaaagtaactattgctggcatggatttaaaacagaagccaagagaataaactctcactttggtcttaacgtagagcaaatgcttgcgcatcaggcggctaaaagatcaggaattaatatgtatatctctggccctcgctaccacttgaccaatgagatacatatgtatcctcatgcccagcgtgcacatggcgaaaaaatggctcaggcatttttaacgagcacttatggagggcgccaatggagtccactttgctactcgtcacatcacattgatgatgggaagttgataataaaattcaatgtacccgtaaagccgttgcagttcaggaagacccttaatggcatgtacactttctcaaaagatggttgtcctatgggattccattttaccggcaagaagctgggaagcgttgatgtggaaattatatcatcagatacagtgagcattaacacgcatggcaagcgcggggttgttagctacctgaaggaatcaaggataggagagctctgtgacagcgacgactttccaagtcattttaaggataggtatcacgcggataacactatggtgaactattgccttccttttgaaatcgtaatttaa

SEQ ID NO: 156669 - DNA, 1455 bp, Enterobacter cloacae
atggccggtgcggttccagatggcgttacaccttgctcagcggcaattaacgctatgtttgctgctgcaaaaagaatgcagtttacaggtggtgactatctacttgatgccactataacattgcaagcaggtaggtctgtagactttggatcatcaaggttaattcagggtactacgctggcaaattatatattggcggtaaggggtgctgatacacatacctcgggtggttttatagttggcacaggtatcagggctggagcaaacagtgtagtgtctgctgtattagttgctgatacctcttatagttctgttaaaggaatgacagtaagaagggtccccggatctggtattcagatgatcaattgcacacgttgtaaaattcaggattgcatatctgaaaataactggggtatgggccttgaagaccgttacggaactttcaatgaaattatcaactctatcggtaactataatggttatcttagtgatgcggaaatatcagacggcggtcgcggatgcattgtctggaagagcactggcacaacctttaaaggaaaccagacattcggaaatagcgagtacggcattcgtgtgtactcacaatctggagatgatgcccctacacgttacatccacattttcgaccatctggctggcgataacaaaaaaatagacatctatatttacaatgatgccggaacattacttaacgttgagttgagtaactgccacatccatagatggagccagtcattcagcggaagctatatgatttctttacaaggaacgcgctgccatttcaatggagggagtattactaaatatggtgatatctatgatgccgcagcagttagtttcagtaatggcgataacatcacaatggagaacgttagcatttctaacgtatctgctgcgtttggtaatacagctaataatactaccgtgagaaattgctctgcttcttgtggtgttgttatgacaggtacaggcggaacaactggatatctgacatttgaaaattgtaactttagccacaccgggcctggaacttctgatattgcattcactgtaacctccgctacgaaacttgaaggcgtcaggttcaacggattcttcagaaacgtttcatggaataatgagcctctcatactaatcgactgtcagagcacaaatacaactggtgatgctattagaatgtatgccgatggtgttgggtcgttcttccactcaggatgccgttgggatgtgccaacagttccagcgtggcttggaagtttggtgaaacaagggtcatctctccctgtgctttacgataccgccgctccaaccactttgacctggccaaggggatcgcgatgcataaattcctctcctgctgtcgggagccctaaggagtgggtatgtgttaccgccggcactcctggcacttggcagtcaacaggaaatctatga

SEQ ID NO: 156670 - DNA, 588 bp, Enterobacter cloacae
gtggctaaagacattaggtttgtggtggtcggtcaccacacccggatagatcatgcacaacgtctcgctgcgatgctggatgccaatttgcttattgatgacggtaaccacggcgcgaactggaatcaccgacgcgcgcttgaatgggctgctgagcaagcttacagggtagtggtgctggaagacgacgcgatgcccgttcctttgtttgccgagctggtggtcgactggctgacccgcttccctgacgacatgctgagcttttatctcggtactggccgcccgccgcagtaccagatgcagatagccgaacggctgattattgctgataagactcaggctgactacatcacactcccgcggctgatacacggtgtctgctacagcgccccacagcatcacattgaacgtgtgctgtctcgatgggagagcaataagcctgccgattatgccgttggtgatgcctatggcggcgctgtggtttatccgtgttactcgctggtggaccatgcagatggtgaaccggttgaacgtcaccctgactcagcgccacgaacagaacgccgacgagcgtggaggctggcgtga

SEQ ID NO: 156671 - DNA, 153 bp, Enterobacter cloacae
atggtaagcaaaacactagctaaaggtaaaagcggcaacaaatctagttgccgcaaccatgaatttttcagcctgcctaccggtaagatatttatatcttctgcaaggattgaaaaattaatttgtttttacggagtcaagaatcttcagtaa

SEQ ID NO: 156672 - DNA, 276 bp, Enterobacter cloacae
gtgggtatcgaaacgattatcgggctggccgcactggtgatttccgctatcgccggtgcctttggcctgggccatattcgcggcaccagcaaagcggaagcgaaagccaaccagcagcgcaccgaagataacgcagcggcaacggtcgctgtggcagaacgccgggttgaagcaacgaaagaggccagcaatgtacagcagaatgttaaccgcatgcctgatgacgatgttgatcgcgagctgcgtgacacgtggaagcgtcccggtggtggttga

SEQ ID NO: 156673 - DNA, 222 bp, Enterobacter cloacae
atggcgctgacagcgatacgaattcctgagtgggttcactttcaggcagtgaaaattctcctgcaattccggcagcagcggatttcaccgcggcgaatgcgcaggactggatacctcagcctaaaagtgaacctgcgttggaggctgctttcacgagatggaggccagaactgggaagttatgagtcatgaacgatacaacaaagttaaggaccgcaaatga

SEQ ID NO: 156674 - DNA, 255 bp, Enterobacter cloacae
atgagaaaaaagccgctctttgtaaaaggccggaggaggtcgatcaaaattggctctatgcacacgtttggccaaaaattaatcggtattacaaagcatttggtgttaatgctgggtctcatcaagaactcgttgaacaatttggtctacttcgctatgggcatcgtccaaaagttgccgatacatttagcggcggtggttcaattccgtttgaagcagcaaggcttggttgtgatatatacgcctctgatctaa

SEQ ID NO: 156675 - DNA, 309 bp, Enterobacter cloacae
atggccgccggagtccatgccgccgtagtagccgcagccgcagccgtcgaagtcgctgtcgtggttgcgatgcctgccgcctgtgcggtggtggatgctgcaaccgccgcggtagtggccgtctggcccataatggccgacttaacccactcgacgcccatctgcacaaatgtgtttactaggctatttaaaacagttcttcctaaagatttagctgcctcttcagcgtccatgcttttggtgataagaccagtcagagtgttagaggcattattgccgaatgcggtaaatgccgccgctgctgcctga

SEQ ID NO: 156676 - DNA, 297 bp, Enterobacter cloacae; identical to SEQ ID NO: 5319

SEQ ID NO: 156677 - DNA, 420 bp, Enterobacter cloacae; identical to SEQ ID NO: 11035

SEQ ID NO: 156678 - DNA, 210 bp, Enterobacter cloacae; identical to SEQ ID NO: 7642

SEQ ID NO: 156679 - DNA, 150 bp, Enterobacter cloacae; identical to SEQ ID NO: 7711

SEQ ID NO: 156680 - DNA, 240 bp, Enterobacter cloacae
atgaatagtgaagagcatataattatttttaattgtgttgggtggcctgatttaggtggtggatcagcagtatcgcagtttgcaatgatggccagaaaatttggtaaacaacttattgtcgctgtaagtgaaaaggatgccataaaattaaaagacaactttaatattattggaacgttgtcatatggtaaagaaaattttattgccatgagccatacgaaaagcgagttctgtagttaa

SEQ ID NO: 156681 - DNA, 213 bp, Enterobacter cloacae; identical to SEQ ID NO: 7709

SEQ ID NO: 156682 - DNA, 462 bp, Enterobacter cloacae
atgaagaaatatataccagtggtattatttgttttttcatgtcaggtattttctgctgatattcatggacgggttgtgcgtgttctggatggtgataccattgacgtcatgttatctcagcatccggtgcgtgtccgtcttgttaatattgatgcacctgaaaagaaacaggactatggccggtggtctgaaaaaataatgaaatctctgattgcgggaaaaacggttactgtcacatattttcagcgagatcgttatggtcgtattctcgggcaggtttatgcaccagacggaatgaatgttaatcattttatggtccgtgcaggcgctgcatgggtttatgagcagtacaacaccgatcctgttcttcccgtcctgcagggagaagcacgacagcagaaacgtggtctgtgggcagacagcgctcctgttccgccctgggtatggcgctcacggaaataa

SEQ ID NO: 156683 - DNA, 690 bp, Enterobacter cloacae
atgtatccgatggatcgtattcaacaaaaacatgctcgtcaaatagatctgctggaaaatctgacggcagttattcaggattatccaaatccagcctgtatcagggacgaaactggaaaatttattttttgcaatacgctgtttcatgagtcatttcttacacaagatcaaagtgctgaaaaatggcttctgtcgcagagagatttttatgaattgatctctgtcacagagatggaagcatacaggaatgagcatacgcatcttaatcttgtagaggatgtttttattcagaacagattctggacaatatctgtccagtcatttcttaatggacacagaaatattattctgtggcaattttatgatgctgctcatgttcgtcataaagacagttataatcaaaaaacgattgtcagtgatgatatcagaaatataatcagaagaatgagtgatgattcttctgtatcatcatatgtaaatgatgtattttacttatatagcaccggaatcagtcataatgctatagcaagaatattaaacatatccatctccacatcaaagaaacacgcatctctgatatgcgactacttctctgtttctaataaagatgagttaatcatcttactctacaataaaaagtttattcattatttatacgagaaggctatgtgtatcataaatatgcgttaa

SEQ ID NO: 156684 - DNA, 384 bp, Enterobacter cloacae; identical to SEQ ID NO: 25272

SEQ ID NO: 156685 - DNA, 669 bp, Enterobacter cloacae
atgtttgagtttcagtttagttacttcaccaaagggcaatttattgataattccccagaaagtatatttcctttaattactgcatttgaaaacaagtttttaccaagctttgccgatgaaataactccaatgggggttcggaaagttatccgtattgttggcattaatgagtttgaaaatatttctgttttgtttgcatctgaagctgtaaatataaatatgctttacagagacactaaacctgaaaatgccgatgttatcaaaaggcttgattttataacaaatgcactttcaaaagttaaggcaggtgctaaggcttggcgtcttgcttcaattgttacttcaattgagcgtgtaacgcctgaaaataatgaaaaaatgtacgccaaattctttaatgatgattatcagggtaactttttcgaatggaataccagaagagccaaaagagaacagcatggcagtgaaatttttaatgtcgtcgctactaccagccgtggccctgtaatgaactcgaatagcccaagtgaaacttttgacgcaatagtcatccagttagatgttaacactgttcctgagaactctttagatcgattcgcaatctctagcgagcactttgggcaacttgttgatatagcaagagaaaatgtcgattatcttttaggttga

SEQ ID NO: 156686 - DNA, 636 bp, Enterobacter cloacae
atgactcatatcgacacaaaaaataattgggttcaagataaaagtgctaatgtaggttctacctataataaagtagtgctcaattattttaataaatattattttagcgaagatgataacaaaaacacatctacaaatttgagtacttatgtagagtacgcagatagtagtgctttagaatccaaagcaaaaaatgccgatgacttagaaaaaataatgtcatttgtgtataaaatgctgttgaccgaagattttggttatggggataatccacaactaaaatatgttgtggagaatatatttagaaaaagtaagtccgaagcacaaatgtcattcatcaatatggcaaccagaaaagtgtatgtttctgacagcgtgacaattgaaaagttttttgctcttttgatgtctcttgatgaatcagatattgaagatattgtgctgactatcatccaaatgtttttgtcacataaagatattagcgctgcggaaggtgcattatctttattagacaaatatggaaaggatagagatgctttggagatagcgaaacagataagaaaattcgattacggttttcttaatgaatataaagaaaaagttattagcaatcttaagcagcatataaaagagtga

SEQ ID NO: 156687 - DNA, 552 bp, Enterobacter cloacae
atggcaatttatattaggaaaattactaaatctaagtgggattggatgaatccaattagccacaatgttgccccccaagatcttggaactgatggtgtaacgaattgctgtaaaacctctggaaatactttatctatctggaaaattgatagtgaaagtttagtgagtgacgatgataaaaaagtcgtagccacgttggtgacaaatggcggaagcctatcatcaattgattgtatctttttgagtgatgaagactttaatgtctgcggtctttcagtagatcaaaaagacggcgactcactgatttctgatgtaaaatcaaggcattacaatattgtaaacctcaatatgagtagcgtcagtgctcttggtttattaataaaaaagaaagtttcaggtgttaaaactggagaggaaataacccaaaaaactcaacttaaaaaaattgatgtcggaagtataaaatcgtatattaaacaattcatccctcaaaatactgctgaagcagaaactctaaaacttaaaagtggttttagcaaaatatacgattag

SEQ ID NO: 156688 - DNA, 213 bp, Enterobacter cloacae; identical to SEQ ID NO: 5358

SEQ ID NO: 156689 - DNA, 528 bp, Enterobacter cloacae; identical to SEQ ID NO: 5333

SEQ ID NO: 156690 - DNA, 420 bp, Enterobacter cloacae
ttggccgtagatatccggcttggctttgtaaacgcgagcggtatttgtctgaccggtcaggctattgttgggcgagtcgacggtattgccgccgttgtttgctatagcgggcttcggcgccaggaacgaaaatacctggccaaccactttaaagatcgggctcaggatgtcgtcgacaatgccctttggctggtcgaatatctggatgtggtccagctcgctcagctcaaacgccagctcgtcatcgtcacccagcctcacaccattgcggacgatcagcaggtcgcggtggaaagtagcgtcattggccgccagccagtcataaaaaagggtgccgtttggcaccctgcaacgcagcttaggcgttcctggaaaattcgatatttcaaccagcgccatatacgaaaaactccactttag

SEQ ID NO: 156691 - DNA, 240 bp, Enterobacter cloacae
atgggggaactgggtgtagttgaggcagagcaaaccgaaaacggcggactgactatccgcctgtttaagcgaaaatacctgctgggcgataagggggagatcgtcaaaacgaaaggggaaccgatggacgtgccggtgaacagctggatcgatgttcgcctggatatgcctgatgattctgtctttaatcagcggatgagacaggagccacagcttgagcctctttctccagctctctga

SEQ ID NO: 156692 - DNA, 423 bp, Enterobacter cloacae
atgtgggtgactactggcgggaccgggtactgccgatttttgttaaactcgaatcctcaaactacaaaaacagatgcaccgtggacggtatttcagtcagcaggaacatcggacattaactttaagaaagtgaccggggatctggatttaaacgaatcgctgttaaacatcgcggcaatggattttaagaccttttactaccttgctgatgaagataaagtcatacgccgcggcgttattgctcaggaacttgaaaagatagatccccagtatgttcattcagctgagaaatcgggtaaaatgacacttgacctcaaccctctagtgctcgatgcgcttgctgccatcaaagccctgacaatccgtgtcagagagctggagaaagaggctcaagctgtggctcctgtctcatccgctgattaa

SEQ ID NO: 156693 - DNA, 513 bp, Enterobacter cloacae
  misc_feature (467)..(476): n is a, c, g, or t
atgagcatcaggagattttcgtcacgtacacatagacttgatcatagcttcctactcgagcacctcaaaggtgctcggagttacaaacgtatagctgggtactttacgagctcgctctttgaagtagccaatgagctacttgattctatcccggatgtaaaaattgtctgcaatgtagatatccaccctgatgacctgaaggtggctcagcttcgtgaatccaagatgatagggcgctggaatgatcgagatattgaagctgaaagtctgcttaaccgcgaccgctatcgccgacttgattgtttcctagccaagcatgggcaagtaatccgagttgctcctgatagtatttgcggtttcctgcatggtaaagcaggtgtcattgaacttgctgatgggcgaaaagttggcttcattggctctatgaacgaaactagcagtggctggcagcggcattacgaaattcnnnnnnnnnngctcgccccttaccagaagcggtcattcgtgaggtga

SEQ ID NO: 156694 - DNA, 198 bp, Enterobacter cloacae
atgaaacaattgatgttgctggcgctggcattcctcagcgtacaagcccacgcagggcgcattactttaactttgacggatgaacaggagacaggcaacgcgaagatctgcacctacagcaacgccaatttcacggagacagtgatgatcaagccgtcgcagcaatgccgcttcacaatgacctttgaaaaggagtaa

SEQ ID NO: 156695 - DNA, 582 bp, Enterobacter cloacae
ttgactactaaccaactgaaaaaaaataatctgtacttctatctctacatggcgatcccgctactgttcccggctacttactttctcaccatgaatgataaggctgctcttgctgttttttatgtaaccgccatcacctgtatgattttcgaccaaaaggagatggttaaggctggctacgaatccgaaccgcaatttgtcgggtcggctctggggattatggtttttccacctctttacgtttacggcagggttaaagctgctggcgaaaatttgagtaaacgatgggcgtggttcctcgcatatattgcaattgcgttgggttgctcctccattgccgttgtttgggataacagcgaagcactaaagacgagtgcgtgtgagattacgacttcaatattcaaagacaaggggagtgaggtgaagtgtctggttgtggaggacgtgaagaaggtttcagacaaaaactatcgagcgaaagcggtgttgagtaatggcattgatatgcccatcaccattgaagaacgcgatgacaattacatttacgtgacgttaacgccgttgagtggtttgcttgagtag

SEQ ID NO: 156696 - DNA, 579 bp, Enterobacter cloacae
atgagccgtacttttgcatattgtcgtgtgtccaccagcgagcaagcgaccgaaaaccaaatcatagcgatccgtcaggcgggttatgatgtactcgataaccgtgtagtgtcggaagttgtttccggtggggtacaggcaatgaagcgtaaagcttttgccgatatggtaaatcacaagctggagtcaggtgatcggcttatcgtgctcaaactagaccgtttgggccgtgataacatagacgtacaacaaactattgatatgcttgttaagcgtggcattgaagttgtttcattggatctgcccgttcgtaatctcacgagtgcagaaggaaagttaatgctacaaatgttctctgctttcgctgagttcgaaaaatcccgaataatagaacgaaccaaagaagggcttgatcgtgcaaaacaggaaggaaaacggttaggccgtcctgttgctacagacacacgagaacgtgttcaaagagccaaagctaaaggtttgagccagtccaaagcagctcttgaattaggtgtaagccttccaaccataaagcggaactggaacatcgtagcggaataa

SEQ ID NO: 156697 - DNA, 1119 bp, Enterobacter cloacae
atggttctccaagatgctttggcaattttaagaaataagctcgtagtcagggaacactacctaccatgcgtactcttcggcgatgatgctcccacagagtttaccgttggtccagtcacattcactcaaaacgccatgttcttcagggacaaaaagtcagtgttcaaacatagcgttgatataaacacgaatgctcatattaagagtgtaactgctgcgatcactcaaggattctttcgagagaatgtgcccaccccagatgaatcaagaaaatttgttggagaatttcagaaacgcgctatcaagatatataaagactatccgtgggttgcaagtattaaagtcactgattgtgacgaagtgacctctcaagaacgggccatccaagcaactgaattggcaattcatattatccgtatcctcttgggagctgaaccaactcggaaaatcagactagcatggtctcgaagtaatgccttaaatacagctcatttatactctgacgcggatggtgtaattcacgcaagtgtcggcgctaattctttaggacctgtcgggataatcaattggtataaggcattgatgaaatgcgatttagagttagcaatccttggttctgccttgttaccaatagtcaatcccatagaaaccagtcatctccatcaacgtctcattgatgccattaattggtttggagacgcggcaacggattcaaacccgtcttcgagtattgttaagtacgtatctgcaattgagcgattgttcttcggaaaatttgagtcgggacgcactaaagtatttgcaggaagaatcaagaatattctggacgcattcggttgtgacgacgatcatcaagtctacgatcaggccctcaaagtatacagagcccgttctattttggttcatggagagatatatcagaccgaagatgaagcaaatgaaagtatttgccttgcttcatcactgagcaggatgtgccttctctgttctgctcagctgtattcaatgatgcaaaatgcgtttgataatccagatgctctcgccttagaagaaataatgaaacgtattagtgctgagggtttagattggctggtaaatgctgcgggatttcataagtga

SEQ ID NO: 156698 - DNA, 1521 bp, Enterobacter cloacae
atgtctctgggttgcgattcagccagtagggcaaggtttatatcttcccgtctcactatgttcatttctcttgtaaaatcgtccaggatggagccagcccaactattggacatagtgcataaaatgaagaaattagaacaaaaagacattgatgattatttgctcagtattcaggccgctttttattccgccgcaaaaaaaattccaacaactgtacgtaagagactacgtagctcgacttcattaacttatgaaaaaagtaacgtcaccctcttaggggaggtgcttggtgatactttcacaactgatggtccagctttgtcggaagactctgttattgaacgtcttagcaggcagtatgacattacaggcatggcggaggagatcgattatatagcctcggaatacgacctcatgtggaaacattattgtgatgcacatgtagcctttcttgattcccgacattctgaatatcggcagatccttagctctttgcgaccagagaatgactacgctcccgctgtggtcgataaacctgaaaaaccattggcctccgaactgacagtatctcaggcatggaagggatttcttgagttcaagtcagactggaaacctaagattcggcaaggcaatgaaaaatatttcgaagtaattgaggctgttctgggggctaaaacactagttacgagcattacccgtcgtgatattaaaaatttgcttgaagtggtcgaaggccttcctcgacaaaacaagaaaccatacaacaggatgggtgcccagcagtgtttggacttggatgaagtaccagaagatgatctggtatcctcaaaaaccgtcaaagattacctgaaactctgtcaaggattgttctctacgtacttgactggtgaacttgatgttcttgaatcatcgccgacaaataatgttaagtatgaatcaaagagtaaaggttacggcgtatacagccaaactgaaatgcgaaagttggttacacatttcgaaacgttggacggctggaaaaaatgggggttcctgctgctggcatatactggcgctcgtagaagtgaaatcgctaacctgaaggtatcggatgttcgcttagacgatgatagccagcgatactacattatgattgaggacagcaaaacggaagctggtattcggcaggttcctatttcgcttcgcctaatcgatatgggatttttgaattacctagagggcaaacatcgtagcgacaaactattccctgaaatttcgtatagcaatcaggtaacacggatcttccacgcgataagagacaacttggaaattgattatctcaatgatttcaaagaaaggcgcattgtacatagctttcggcatacctttattactgaagccttatcaaaaaataatgcccttactcttgttcagcaaaccgttgggcatgaacattcaggtcataaggaaactcagacttatacgggcagaatgaggatttccgacttgatttcggtgatagatagtattgactggatttaa

SEQ ID NO: 156699 - DNA, 1638 bp, Enterobacter cloacae
atgaattacaagacaacaagtattctatcttttttaattgtttttactttgattttaataccttcattgctaacccctatgcaatcagatgattacctatatagcctaatgggtttatcttatgagaagcatctttggcattatatgaactggtcaggcagggtagtacctgactacattagctcgtcaatgttatcccttttgcctaaatgggcctatgcagcattgaactcactggctttcacagtgctaatactttgcatctccttgcttccaggcatcgcaatgagagataaaaatccatttaagccggttgtgttcctgctaatatttgtttgctactggattgccaacccagcgttaggccaaacctctttttggatagtgggatcagcaaactatctatggacaaacatgttcatagcaatatatttatgcttattgacatacgtttcaaatttagagagtgcaaataaacaatggtatccggcgatagctatttctggacttcttgctggctgcgccaatgagaatacttcattggtaacggtgcttatagggatttcgtatttatttattttcaataaaagagataacaaaaaactaattattacaggcattgcattcagcgcagtcggggcagctataatgcttttgtcgcctgggaacgccataagagcagaaaagtttagtgagtggtactccttatctatattttcaagggctatcacccatttttatgaacgcattcctgaactggcttctagcttctggcagatatatctagttattatagtattgctattgataggaagcactaataacatcattaatagcaaatataaagccatatcagtcgttttattttttgcttttatcattgccgacagcgtgctaatgttcgcgcccggtacgccgcctcgttcaaacaacggcgcattctgctttcttctatctgtcctgtcttttactgcgtactcttgctttaaatctaatgaaaggcaagatctcttagggataggcctagcatacattttttctctgttttatttcaccccatcttatttgctttttgtgaatgcaatgcattcaacaagcattcaagaaacggtaagaaatagtattatttctaaagctaaagaaaatggcataaaggatgtaacaattcctcagttttcttttcctgctttattaaaggaaacagatcagtttgatttataccatagcataaagtttgcagcttatgagggtgtgagcgcgataagaatgaagaatgttggctttgattattcgtctgtcttcttcaataaaggcatgggtaaatctgggtgcttaaaagatttctgtgttgttaatatttataatggcagcatgggatttggccttaagccatatttagtgatagaagtaaattcaaacagtaatttcaaaaatggaatttattttgcgaatatctatgatgaatcaaacaataagctaaatgctacactagagaatccttcagaaatcgatggaagatatttctaccctataagaatcaaaggtattgctcacaagaatatcaaaacaataaatataggagcttatgatttaaagcatgaaaagattgtgcaacaatttgcgctgcatattgattag

SEQ ID NO: 156700 - DNA, 2457 bp, Enterobacter cloacae
atggctacgacacctaccaacctgtcagtaccgagcgagtccccgcgcgatctgaaatttaacgcagggaaaattgatgaatttgtgacatcgctggaacttcagtacattgatcgctttggtgatgcgcattacacaattgaaggcctgaaggctttagtacttcagcagatatataatcttggctggaatccggttggaagcttccagggtggcgctacagtttcttccgctggcgatatcatccgggatgaaacgacgggtgtatggtatcgctgggatgacctctccaccttacctaaggttgttccagcaggttccacacccagttccactggtggtattggtgaggggaaatggctcgctgtcgatgtaagtgatgtcctgcgtaaagaatatgaaaatacccagtggaacaacttcgtttacagcttcggaggagtccctgactacactggcacgccactttatgatggaaacgatgcaactcgcatcacagccacagataactcaccaatgctgcaaaatgcattgaataatggtgaggtaaggaatggcgtcctgcacatttatttccctgctggtcattacgggtttaaaaccgatggcgtagcaaaggtcgcaagtagcaacgtacacacggtaatcttccatggagaaagcttcgaaagcacaacgctagactttatttttgaaagatccgatacaattggcacaaatgttcagccttcaaatgcgtcgatgattgctcggctaactggatttaagcatgttatctgggaaaatgtgaactgtaagtgcacaacgaagagcggaactatagacggaagtacagatccttcagcagataacccaagcgtctattatggggctgtctggttcgcgcatatgcaggactgtgaaaacgtccgttttgaaaaaacgaagatgcagcgcggaaattatcgcggtttcagtgttgatgctcagaacttaccaattggttacagaacgaaagtttccatagtcaactgcgaagggtttgataatacaagtactggatactggctatctttctgcaacagcttatacgttcaaggtgggcgtttttatcacaacggaacgaaaggtttccttgctactggttatggcatcgcagcgtctcaatatgttgatgatatcctcattgtcggcggagcatctttctatgaaaactaccggaagggcttcgacaggcatggtggtgtcggtagtcttgttatttcaggcgcgctatttgccgataacgttttaagggatgttgaggataataagcagtataatgcgcaatatgatccagcaaaacttaactataaccattattcaaactgccagtttttaataaacagaaatccatcatggctatctgaagcgttatcggcagttaattataatgcatcatgtataaaggcttttgtaagcatactcgatcgtgtaatagcaggcactattgcaggaaaacagagagaagtatcatttagtaactgcaattttaaagtcataggtaatgttcctgatggatatgttggttttaatggattctctcttgaagcacctatatcaacatatgacaactgtgttattgacaccaccggattcaggttggcatcaactgtttcaggtaatgtctacagcagctttatgtttggctcagtccatgacaatgcagttattagattcaggggtactagtgttaaaacacaccccggtgcaattgttcacccgtcaagtggggagctaagcaatagcgtattattcacagttcagccaactacagttattgaggcagacagtgcaacatcgtttgatcttaacaactttatctttgctggcgtaactggtgctggaaacgttagccaatggcttgggcagaggaagtttaacggttgtgaattcaagttccgtgatgcaaaaatgagaactcagaatcagactgtgactaacgcgttttcatggatcaacaatggttttggcttgaagggcagcaatgggaacaactatgtaaataattgctcaattgggtttggcgactgcaagaacatgtcgcctatcaacggggcgggtggttatggagcaattcagcggttcactattccagcccagagcaaagcatctggaaatacaggtaagattcttactggtaaggttgactcgaatttgcaaattgaactgaaaggagggatggagctcgctgctgaaacatttaaagccacttggagatactctgcctggacaaaaaacctcatcactgccagccctactatcaacattgataggccgggtacattagaggctattacttacaacggaattgctacaaactttcttgcgcaaccattgacaatttcatggacagctagcacgggggatacagcctggtatgatggtacagccagtgccgcagaatcatatcttccattaataataagcattagttga

SEQ ID NO: 156701 - DNA, 204 bp, Enterobacter cloacae
atgtcattcagcctttacagcttcgatgctgaatctgtgaatgatgctgaggggtacaccgtgggtgtccaggccatttttaataatcagcaccccatcgcgaatgtctggctcattggtactttgccatccgacctgctctggtgcctttccagaatcgtgaccatccttagtgaggagcattactttccagcccttgattaa

SEQ ID NO: 156702 - DNA, 234 bp, Enterobacter cloacae
atgatcgacaattactaccacggaatgacctgggttccggtagcaaagcgtatgcctgagccacttttcccagaaaaatatctgaccttattgctgtgcttgaacaataggaccttcgtttgcggagggtttgatgaaggtaagttttggctcgatggtcaagagattgataacgttacgcactggcagtatgttcccctgactccggatcgcggtggattggtagagcagtaa

SEQ ID NO: 156703 - DNA, 690 bp, Enterobacter cloacae
atgaatactcaatatctgcaatacgtccgtgagcagctcattgtggcaactgccgatctgagtggtgccaccaaaggtcagttgttggcctggctggaaaatgcccagttcgataccaagacctttaagcgcaaaaagccgcgcgtgatggatgaggtgaccggggaaatgattaccctggataatccacctatcccgggcaagcagtcacgcgcaaagggctcccacattcctctggttaatcatgttgagttttgtaccgcttcatggcgccgggccctgatgtcacttgatgagcaccagaaagcatggctgctgtggaactacagcgaaaatatccgctttgagtaccaggtggcgatcacccaatgggcctggtcagagttccgggaacagctcggcacgaagaaagtggccggcaagactatggaccgcctgaagaaactgatttggctggcggcgcaggacgtcagggctgagctgtcagggcgtgagacgtacgaatatcaggcgctggcggagctggcgggcgtagcgaaatctacctggacggaaacgtatctggctcactggctggctatgcgtaacggctttaagcggctcgatagcggcgcgcttatttcagtaacgcgatcacgttcacaacaaaaggcgacaaatttagatgcaagtcttgcaaaaccgaactga

SEQ ID NO: 156704 - DNA, 576 bp, Enterobacter cloacae
atgcaagagcagcaggaaactaaatctcaggctatcgatttttcaaaggaatttgacactctgttaaatggaaagggaaaaattactaattcaatgctatcggcggttaatcgctactttttgtacttttctttcttcgagtctttgcttcttggatgctcaggagggcaaaagaaaagttctgactatgcaaaggctcttaaggatagaggtttttttgatgaaagtgtaattagatcaacatttagcgtgtttgctgatagatacattactgaacggcaaaggtatgaaagtctttgtggtgaagatagacatacgaaccctaagactaaagaaaaatattatgaggttatgcacgccaaagcagatgatcttgttactcagtttgaattatgtttatttgtctgtttcaggctgaggaacaatcttttccatgggccaaagtggagatatttcctcgatgggcaagaagagctgctcttgactgccggaacttttatacattcgattcttgaaaaagtaccaagaagtgaagatggttgggattttcaggatattttgtctccaacagaatag

SEQ ID NO: 156705 - DNA, 258 bp, Enterobacter cloacae
atgtctgactggaatatttctgcaaagccgcaggaagagcgcgacaaggttaatgttgaccttgcagcctccggcgtggcgtacaaagagcgcctcaacatgccagtgattgcagagcaggttgccagagagcagcctgagcacctcagggaatatttcatggaacgagtacgcttctaccgtgagcagagcgttaatcttccaaaagcatccgattcactttacacagaaatggcagacttaaatgcaagaaaatga

SEQ ID NO: 156706 - DNA, 375 bp, Enterobacter cloacae
atgagcaacatcgacaaacgcgcacagaaggaactctatgcgaaagttgagcagcaggctcattcgcttcgtgggagtcctcgcgaatatcaggcgttaactggcttgtgtccggtaaacgttatcgaaatgcacgcacagaaaattctggcgctgctggatgagctggaaaccaaagacaagcggatttatgagcaaagggagattatgcgtcaggccgccagtgatatctcttatgcaatctttaacctgacgggctctgacttgagccgtttgcaaccgggcgtcgttgaaaccaccgacccgactgatacagctttaattgcagagcgcaacttacgcgccgccgcagccggtaaaggagatgcatcatga

SEQ ID NO: 156707 - DNA, 192 bp, Enterobacter cloacae
atgagcaaagtaacacgtgaattagtagcaaatgccatgctcagtagccttgaaaactacctgtttgagattctcgattccgttcagcatgaagttggcgatctgcttacggctgaagatcactataccatcaacgcagtggtaagaagcgccgtggaaaaagccgcaacagaagtggaggccgccaaatga

SEQ ID NO: 156708 - DNA, 288 bp, Enterobacter cloacae
atgaacagttcccggattaacaaggctaccgatgcggtacagcagctgctgggcctgtcacgttaccgggttgatgtgcatggatgcggcgatttcctggatgttctgcgttacagcgcggtggaatccctcagccagccatggcggtatgatgtgacagtcacctgttcttctgcggatattgcctgcgacacgttactgctgaaaacggcgtcatttaccttccagaccccgatgtttgacggggcaccggcgctgccggtccggacggttttcggcgtggtgtag

SEQ ID NO: 156709 - DNA, 1533 bp, Enterobacter cloacae
gtgctggagccgcagggcgatgtcattacggccctgaaggaaggcgttatcctcaccctggtgacctaccggggggcccgtgattcccgcctgcacgtgtcggtgtggggcatgccctacacagagcgctactgtttccgcccggcggaagtttcgcgcccggaaatccacggcagcctgcccgcccgcattgagagccgggaaaagaacgatatctacgcccacctggacgaccagggacgctaccgcgtcaggatggactttgaccgggacgatgctgaacagggcttcgcatacctgtggctgcggatggcgaaaccgtatgccggagagacgtacggctggcatacgccactgaccgacgggaccgaagtggcgattgcgtacagcaacggcgacatcgacctgccgtacatcgcgtatgcgctgcacgactcggaacatcctgaccccgtgacccgcgacaaccacacccgcaacgtgctgcgcactccggcgaacaacaagctgcggatggaggataagcgcggtgaggagcatatcaagctcgcgacggaatatggcaaaacgcagcttaacactggtcacctggtgcacgctcagggaaaagcccgcggtcagggaacggagctgcgcaccgatgagtggggaaccctgagagcagggaaggggttgtttgtcagtgcggatgcgcaggcgaaagcgcagggtgctgcactggacatggatgccgcactgaaggaaatcggccggcttaaccagcaactgcaacagctggaaatggcggcagaacaggcgcaggcgctgaaggcggatgtcgacagccagatacagatgtttgagccgcggttgaagcctctcaatgaggtgctgctgatgtccgctccggaagggatggcgctgaccagcggggagcatctgcaaatgacagccacaaaaaacgttgccgttaacgccgggggcgatatcagcgccggaacaatgggcaatctgacgctgcttaccggggagaagctgggactgtttgcccggacaggtcaactgagcgtcaagtcaggggaagggccggtggaggtgcaggcgcagaacgccagcctgcggctgtttgcggagaagaagctaacgatgagctcggcgggtgacatctccctagccgggaaaaaacgtatcacgctgattggtggcggcagttacctgaaacttgaggcggggaaggttgaatacggcacgacagcaatatacctgcgaaaggtgaaaaggacgatggcggcgggaagcattaccctggagcagcgtccgactgaaatgcccgctccattaccaaatttatcatgtggtccaaatacagcgtatttcagggtcctggattccttaacaggatctgaaaatattgagtttgcatatcaattacagacatctaccggtacagcggcaggaagaacggattcagccctgacgcatgtagtaaattcagatacagaagaaaacgtaaacctggtctatgttttccagatcagagcggggacaaggtaa

SEQ ID NO: 156710 - DNA, 453 bp, Enterobacter cloacae
atgaatacagaaaaacagtttttcaaggcgttcgacgaagccagttgggaatttacatatggccatctggataatatggactataacgtcttacaggtaggtctgacagccacgctgtatattaacgaaggctggcgtccggaaaatcgggaagcaatggcgaacgcgattgaacgttatgttgatgaattcggcgataaattaaaatggggttttctgggggatgtaaacaagccagaaccttttgttctagccgacaatttctcaagaaaacaacgcctttcagatcttgaggatgatacggcagatgtccagtggggctcagaatattataaggattatgtcagcgattatcagataaatatatactcaccggcaggatggtttgaacatatccaccgtcgtatatcatgcataacctttctttttaccagtgtcggaattaaaaaataa

SEQ ID NO: 156711 - DNA, 897 bp, Enterobacter cloacae
gtgttagttatctttggctatcttgttgttattgctaccgtatttggtgggttcgtactgtctggtggtaatctgctcgcgctgttccagcctttggagttgttaattatcggcggtgccggggtcggcgcttttattgttggtaataacatgaaatcccttaaggcgacgggtaaagctatcgtgaagctgttcgtggggaaacgctacaacaaaacggtttatatggacctgatggcgcttatgtttttgctgctgtcaaaaagtcgtgttcagggactcatgtcacttgagaaagacattgaagatccggcgggcagcgaaattttcagcgcttatcctcgtctgatgagcgatccgatgttaagcaactttatcctcgattacttccgcctgatgattggcggaagtatgaactcgcatgaaatcgaagcgttaatggatgaggaaattgaaacctgcgaagaggagcttgaggttccggcccacagtctgaataccgtcggcgatgcctttccggcctttggtattgtggctgccgtcatgggggtagtgaacgcgctcggtgccgcggaccgacccgcagccgagctcggaatgttgattggccacgcgctggtgggcacgttcctcggaattttgattgcctacgggtttgtattaccgctcgcaaccctgctgcgtcagatgagttccgatcaggtcaaaatccttcagtgtataaaagtcacgctgctctccagtctaaacggctatgcgccacaaattgccgtggagtttggccgaaaaaccatttttaccagcgaacggccttcctttgaggagcttgaagagcatgtgcgggaagtgaaatccagcgccagccttaagtctaagtctgcggatgccacggcatga

SEQ ID NO: 156712 - DNA, 642 bp, Enterobacter cloacae
atgcatgttgttggcatagtgttaagtttggaagaaaataatgacattagtttaacctcaggtgaagatattaaggattttttctataactatattgatgagataaaaaaacgaaaattgcttctgccgaagatttctttttttagcgatagttatagttcagtttatggcttaggctttatttcgtcggaaaaaaatactttcaaagagattagatgctatctgaagggggctgttcattatcgtttaaatgattcactaaaaaagacatacccagatctgttacattctttttctttaagcactaataaatattcatctttatatgaatatggtatagatgatggcaactatggtggagtagctttcttacacttaataccacccggatatttttcttatattattattgatgactggaagtgtaataataaactaatgtcttctttgcttgctcgatatactagagacaaatataacaagcatttagaaagcgagtatagttggcttgagaaagttgaaaagttaacttatcagattgctaataaagctctggaacctcataaaactcaattagaacaaaacttaaaatactactttgaattaataaaaggtgagatttctttcacaagaaataattag

SEQ ID NO: 156713 - DNA, 591 bp, Enterobacter cloacae
atgtcgagataccagaacgtacttggcatgctacagatcgcgccaacaacgggacgtgcagcagtcaggggaagaaatggtgacaatttctcctcctggaatgagctctacaccactggcaataccaccaaatccagcgatggaaccctgaaggctgcctctccggttgcccgtattgtcgcgagccaggaagcgtgccagcgtgctgatatagcagaggcgggttttgaatggtgcggctgtggtacggcgaacgccgaggcggagggaataaccctttcccgcctcgatgttggggtttacatgctgaccggttcggcaggcttggcgtcagagggatggcaactgctgccgccaatggacccgggcggaatgggagaactgggtgtagctgaagctgagcaaacctctgacggtgagctgactattcgcctgtttaagcgaaaatacctgctgggtgatgacggggagattgtcaaaacgaaaggggaaccgatggacgtgccggtgaacagctggatcgatgttcgcgtggatatgcctgatgattctgcctttaatcagcggatgagtcaggaacttcagccatag

SEQ ID NO: 156714 - DNA, 1140 bp, Enterobacter cloacae
atgtccacaatgaaacccgctatattttcattcttttcaggatcaggttttcttgacctaggcttcgaaaatgccgggtatgaggtggttttcgtcaatgaattccatcctcccttcatggacgcgtataaacactcaagaaaaaaacttggcaaacagccgccacgctttgggtatgcccaagaaagcattgaaactattgagcattcagtgattaagcatagcatgaaaacactgaaaggtgaaaaccgcctggtgggcttcattggcggaccaccatgccctgacttttctgttgctggcaaaaacaaaggcaaagatggtgaaaatggcaaattatcgcaaagttacattgacctgataattgaaatgatgcctgatttcttcctttttgaaaacgttaaaggcttataccggactcttaaacatagagaatttttcgaacaaattaagaatgaactagcttcagtaggatatatcctgcatgaaagattgattaattcaattgaatacggtgcgcctcaagatcgagaaaggattattttagttggttttcttgataagtctttagccaaaaactttgaatggagtggccaaatataccccaataaggaagctttccagttcccttggccaacaacaaacaaatacgaagaagactcaagtatggaatgcccacaaggtcttccagaagaacttactatagaatactggtttgagaaaaacgatgttatcaatcatccaaacgctaaacatgtatttacggcccgagccggtttagcaagattccagtcagtagaagaaggcgacgatagtaaaaaatcatataaaaggcttcatcgctggagatactctccaacagcagcatatggtaataatgaagttcaccttcacccatacaaacctcgtcgtattacggtcgctgaagcattggcaatccagtctttgccaaaaaattttgagctaccaggggatatgactttgtcgaatatgtttaaaacagtcggcaacggagttccctatatcgccgcgctcggtattgcccaatcaattttgcaacatttaggatacagtaatgaggataacagcatcgaatctggttcaggcgatttcgagcttacccaaaaatacgctgtttaa

SEQ ID NO: 156715 - DNA, 159 bp, Enterobacter cloacae
atgaatagcgacagatttttacgcttacgccaggtggaagataaaatcggcttcggtaaatcgtggatttaccggcaaatccagctgtggtgttgtcccctcgggttgaggcgctgtttcgggtggtgccgccagcgctgtatctggctctggcgatga

SEQ ID NO: 156716 - DNA, 702 bp, Enterobacter cloacae
atgcttgctgaaaaacaattgaagcccgaactgcaatcaggaaaaattttcaatttaactgaaactaacataaataatgttaaaatccaaccttcaagtattgatttgacagttaagtttatacacatcccaggcaaaaaaaatacaaagaaatctcatacaattgaacctggagaaactgtaattctagaattaaacgaagtgttttcattatcaaatgaaatatcagggattgtattccctaaaaatactctatcaaaaaatggaattataatgacaaaccctgggcatgttgatcctggctacaaaggcatattaacattatatttagtaaatatgtctaaagaaaatttcaatctcagggaaaaagatgctgttgcaagacttttattatttaagacttcgtctccaacaaatggataccaaggaccatcgccaattcaggtagaccaaagccagttagaaagaatgggtaaagatttcgctggattagacacacgtattccagtcgcaattggtaaggtattatctaaatggtctgtgggactttttgtcttagttgccttaatgctttctatagtaggtttagctgttcctgtggcatttacaattacatcatcatatttagacaatactaaagatttaaaacaaaatatcaaagatctggaacaaaaaataggaaaattaaataaagatcaataa

SEQ ID NO: 156717 - DNA, 711 bp, Enterobacter cloacae
ttggattttctcaatgaaaacggtcttacttggatccagaaaggcaatgccacggaagcagaacatcttgttgaggcatcgggacggttgtgttacatgtcttttggtgagcaaaatcaatccccgcgaaacactaacgaatatataatgaatttaattgttcaaggccatgaaagtgttcttgaacatttaaattggacatttttaattactggtgtttccagagctttcactcaccagttagtacgacatcgcgcaggtttctcttatagtcaattatctcaacagtatcatgatgaatcagaagctgaatttgttgttcctatagaagtaagaaataatcctgtactctttgatgcatggaaaaaacagattgaaagcagccttgaattttataaagcctctctcacaaacatcggtgcttatcaacaacaggataattattcaaaaaaagagaatatgagagctttaagaagtgcatcaagatcgatactgccaaatgccacggaaacaaaaatcattgttacagctaatgcacgtgctattcgtcactttttcgatatgagaggttctattgaaggtgactacgagatgagaatggtttcagaaaagatataccaaatagttaataaagatgcacctgcaatatttcaagattttaaaatagaaaatgaaaacacatatgatgcaaaaataataaaaacatcatga

SEQ ID NO: 156718 - DNA, 225 bp, Enterobacter cloacae; identical to SEQ ID NO: 76301

SEQ ID NO: 156719 - DNA, 1017 bp, Enterobacter cloacae
atgaacaaaatcagagccgccgtggtcggcgcaggtatctacggcaaacaccatatgaacgcgtaccgccataacccggacactgtactggtcgccatctgcgaaacagatgaggaacgctgtgatgatcttgccatggcgtacgggatccagggctacacacgactggatcggttactacagcaggaggctattgatatcgtctcggtggcgacacctgacccgtaccacaccgaatccatcctcaccgccctgcgctacggcaaacatgtgctggcggagaaaccgctcgccacctcagtacgcgagtgcgagcttatcgtggagatggcgcagcagcgggacctgctggtcggcgtcgatttccataaacgctgggacccggtggtgatgcgcatcaaaaccgaactggagaaaccggagaccaggcagatcctgcgcggccatatcagcatggacgacgtgattagcgtgccgacggagtggctggactgggcgggcgcaagctctccggtatggtttctcggttcccactgctttgacctggtgcgctacctatccggtcaggaggttgcatcggtgtacgcggtaggacaaaaacaactgctggacatatgggggatagacacttatgacagtgtacagagcctgctgacaatggccgacggcagttcatgggtggtcgagaattcgtgggtattgccggaggggttcccaaaggataatgacggacgcattgagatcctctgcgggacgacctggatccgaagctcttcacagcatcgggggctggaaatcaccaccccggataagacactcacacccaacagctacttcatcaactaccgcaacggtgtcgccagcggtttcgggatcgaccccatcaatgactttgtgcggacggtcatacataaagcgccttacccggtcaccgcggtggacggactggcggtcagccgtatttgcgaggcggtacaccagagtctcgaaagtcaaaaaccagtgacattaaaatag

SEQ ID NO: 156720 - DNA, 948 bp, Enterobacter cloacae
atggaattgatgtttacctatcgaaaaaatgataatcacacccatcaggtacgtttattatctccgcttggggtttatcccattaaaacatttattatggatgattccgctctatttattagcgaggatatttgtttttcggttacacctttagtgactttcgttgactctgaatttgaagatgaagggtattataccgagatggaatgggcctctataaatgaaataaagttatactcgtcgataatgctaagccttgatagaatgtatggttattcagtcatttatcctttttcaacctgccattatgtgaaaatgagtggtgatgtatctaactatctatctgaaataaaaaaagaattaatcaaagcaataattatgcctgcaggagttaatggatggcatccatttataggacaaatcaatagaggtctgtctcttcctccagtgacaagtgatggggaaaaatatgatttaagagatcaaggattcgatgtcaatatacaggaaaaagtgtttgagaaaattgatgtgaataattttattctaattagaggcctatctaccttactgagaagtagaatgttattagttcatgggtattttatggaggaagccatttattctctattcatatcacttgatgcttcatttaatatgatattagataagctaaaagaagttggaatatctaacccaacctcgaaagatgcagctatgtttatctctaagacatttaatgctccagaaacagaaaaatattttggtgagtattacgaaggtagaataaaaacatttcatccaaaatctagatttggtgcatatcctcatgccccactgacaatagatgactatttttttctttctgaggatcttagtactgtttatttgtatcttacatctgtctcttatacacatctgacgctgccgacgatatgcagtgtgtag

SEQ ID NO: 156721 - DNA, 249 bp, Enterobacter cloacae
atgtacagcgcatattttgatctcgcggattacgctgaggcagagaaatggggagagacgacattacggacacgtggatcggatatagacactgcacccttaatcgatctcggcatggtctgttatgagttgaatcaattcgaggaagcgtataaatattttaacgatgcttataactacagcaaagagcgtgcgtttcaggatagacctaaaaaatatctggagttctatctgcgcaaaaggggataa

SEQ ID NO: 156722 - DNA, 216 bp, Enterobacter cloacae
atgttaatggcgacctacagacaaattgccgatgatgttaaatcccggacggggaaagcagtcaaaacatgctggatcgctcatgttaagtcattgcatgggctaacccgtagcgtgtcaccgaaccggattagcaccgaaagccgggtttatccttgccctgataaatgggttgcggagatcgagcaatcaatgagaaatctgggcgagctttag

SEQ ID NO: 156723 - DNA, 663 bp, Enterobacter cloacae
gtggtgctggacgatgcggatctggagaaagccgtgaagattggcgttaacgcgcggcttaataacgccgggcaggtctgtaccgctgcgaaacgctttatcctgcatgaaaagattgcagacgccttcctgagcaaattcaccgaggcgtttaagcaggtgaaaattggcgatccgctggacgaaagcaccacgctggggcctttgtcatccaaagacgcgctggagacgctaactaaacaggttaacgaggcggtgaaaaatggcgcgaagctgcactatggcggcaagcccgtacagcgtgacgggagcttctttgagccgaccatcctgaccaatatctcgcgcgataacccggcgtatttcgaagagttttttggcccggtagcgcagatttatgtggtgaaaaacgacgacgaggcggttgccctggcgaacgactcccactacggactgggcggagcggtgttcagccagaacatcgagcgtgcgaagaaaatggcgtcgcgcattgagaccgggatggtgtacatcaactggctcaccgacactgcggcagagctgccgttcggcggcgtaaaacgttcgggttacggacgcgagctgtcggacctggggatcaaagagtttgtgaaccagaagctggtggtcgttcgcaagtaa

SEQ ID NO: 156724 - DNA, 375 bp, Enterobacter cloacae
atggattacagcaagctaggcgattttgagataaacaaactgatcggcgatgtcgttttcaaaggactatggtcatgcaggccgggcactgcgggaaataaaagtgactcatggtattacggtaacgcggatgcttcgctcaacccgctatcaccgcttcccgactactgcaacgatgcggctgccgcatggccgataatcaccgcaaataaaatcagcatttacgcaatgagcgacgcggacaaaagaggcggttggggggctgaggcttttcatcccaacgatgcatatagctttaacgataacccacttcgtgccgcaatgattgtcttcctcatgatgcaggagtcagccaatgttcaggatggcgtctga

SEQ ID NO: 156725 - DNA, 645 bp, Enterobacter cloacae
atgaagaaggtttttgggaatgttgtgtttgcgctggcgttgtcaggttgtgcatctcatgagcagccagtcgattatcgagcgggtgattatgttattatttatcaagcttttggcaacccaaataacgtagtatcgcgcgctgctgctatgtgtaacaccaagccttacaggatggcttcttatccgcagactatcagaccagtaagaagcacttatttctatccaaatgttttctcatgcgctaaggaagccgccttagaatatggtagtgcagaagctcaagcagatttgattgaggagacaaaaagagcaagtcaggaagaaatgaaaatggtggagaaactttctccaacagatgcgaaaaccttcttcatgaaagaaaaacatgccttcacaactaattgcttagtattcggtgatgtcacaatgataactggtgagtctccggccatgattatagctgggggcgttagtatgggagcaaaacctaaatggaatggcgaagagtattcatttgtcttcaatggagactcaatgaaggcatcattcaagccatataggggagagcataagttctttattatcggtggtgataaagtatacggatgtggtccatctatattagatcacagatatgactaa

SEQ ID NO: 156726 - DNA, 819 bp, Enterobacter cloacae
gtgactgctccagaccggatggagcgacgcaaacggggtaaaagtgacacaattgatgctgaatgtgccgctcatgcagcattctcaggcatcaggacagttactcccaaaacgcgtgatggcatgattgagtccctgcgggtattaaaaacttgccgaaaaacagcaatatcagcccgcagagtcgctctccagattatccattcaaatattatctctgccccggatgaattacgtgaacagctcagaaatatgacgcgcatgcagctcatcaggaccctgggttcctggagacctgatgccagtgaataccgcaatgtaaccaacgtttatcgcatttcattaaagtcccttgcccgacgctatctcgagttacatgacgaaatcgctgatctggatgtcatgattgcggcaattgtcgacgagttggcacctgagctgattaaacgtaatgctatcggatacgaaagcgcttcacagttgctgatcactgccggagacaatcctcaacggttaagatcagaatcaggatttgcggcactgtgtggtgtcagcccggtccccgtttcttctggaaaaacgaaccgttaccgacttaatcgtggtggagatcgtgctgcaaatagtgcacttcacatcatcgccatcggacgcttacgaactgacgcaaaaacaaaggaatatgtcgccaggcgtgtagccgaaggacatacaaaaatggaagcgatacgctgtctaaagcgatatatctcccgcgaagtttacacgttactgcgcaatcaaaacaggcggatcaacagtatcccgataacagcttga

SEQ ID NO: 156727 - DNA, 180 bp, Enterobacter cloacae
atggttgataaagttaccgaagctgccgttgtgggtggcgtggatacacataaagatttgcacgttgccgctgtcgtagatcagaacaataaagtccttgggactcagtatttctccacaacacgacaaggttaccggcagatgctggcatggatgacctcgtttgggacattaaagtga

SEQ ID NO: 156728 - DNA, 168 bp, Enterobacter cloacae
ttgctggccgctcttaattttgctgtcgacctgaggctgtggtttgctgaaaagatatccctgcacaagctcgcaacccagagcctgaagccgctcaagctgctcttcggtctcaacgccctcggctatgacgcccatattaaggctttgagccataccggtaattag

SEQ ID NO: 156729 - DNA, 147 bp, Enterobacter cloacae
atgccaaaaaaacctcggttgtaccaggcggcagtacacaaaaatattgctcgtgaccggttcatcaaatcctgtaacccggctgttggtgtaaagctgagagccatcatcgaagaactaaagcggaaggagaacggtcatgagtag

SEQ ID NO: 156730 - DNA, 507 bp, Enterobacter cloacae
atggataattttatagcctctattcaagcatcattagaaactgaaaattggctatccgctttatttatggcttttgcaatgccggacatttgccgtagcgttgagagaccagttatcggtcgaggggaaattggtcactggtataaggactgggtaacccgatacattgaacacaagtacattggttcgaaattcgaagaatgtaacttttatgcagaagatttttggctctacagatgttcatgtttgcatgccgggatggatgccgaaagcaaaaaaaggatgatgaagtttaacttcacacccccaatacctggcaggggcccaatccataagaatttccttggcgacaggctacagttgcaagtagatattttctgccatgatatgttagatgcagtaagaaggtggctgggtgaaaatgaggcagatcaagttatccaggacagaatgaaagaactcatacaaatcaacccgaccatatttaatccatacattaggtattaa

SEQ ID NO: 156731 - DNA, 441 bp, Enterobacter cloacae
atgaaatacaccctccaggaaggttcctttaccctttttcctgctgcctggcaggacaacagcatgaacatcattcgcgatgacgaaagcgggctgtccgtggtagtcagccgcggcgttattcccgatggcagcgactacgaacaagagtttcaccgccagtgggacgtgctgcgtcctcagatgggtgagatcgcccagagcgaatttcagcacgtaaaagccgggcctgccggcaacattgatggggtagaagttgagaccacctttgaccgtaacggccagcgcctgtggcaaaaacagctggccgtgcagacgccaggcaaaccggtactgatgatttttaccctctcggccttaaaagcctttacggaagaggacgaggcgcgctggagcgcactgaagcaaagtctgacgctaaacgacaaccggaatgtgtaa

SEQ ID NO: 156732 - DNA, 672 bp, Enterobacter cloacae
atggcggagtatggcgttttactgacgaccacgagcggggaagtatgggtgaccgcgaacagctcgccaatcgctcttcaggcgcgaaagacagcggcacttcagggaacatcggggttcaataccaaagtgacgcacacattccccgcaggccagcctgttgtcgccttcgttcattgcacggttgaggtcgaaatcactcagacgataagcgggaacaccatcacgattgaatttctcagaccgaatgcaaccggcacagcgtacgtttattttttctctattttcccgcagacaaagccagactacgggctggctgtgtgggatgcatcagggacgctgattttaacaaacgaaacgcgcacgttgagcgatgttgtcaccctcggtaccgccggggtggatgccagctcaggatacaacatcaatacaactctggcggggaagtgggcctgcatgcctgccatgctgggactaattaccggggttgtatcggctggcggtcaaccgcagccctactcggccatatacaagagcatggcaaagcttgagggaggcaatacgcggatattcgccaggccgcagacaaccccaggcggcaaccttcagaacgttgcttattcgaatctgaggaacgtgattatggccattaactgcgccaattatgattga

SEQ ID NO: 156733 - DNA, 195 bp, Enterobacter cloacae
atggtcaatcggaatggcgtgggtgttttccgggtactgcgcagcgtatggctgactgttgtcgataatcaccggaagattcaggtgatgccacttctcaccactaccgccccgcagcaggtaaccactcaggtcgtggtagtgaatgcgctgcatgatgacaatcatcggcgtcgtctcgatcgccagtcgtga

SEQ ID NO: 156734 - DNA, 219 bp, Enterobacter cloacae
atgtcaaataatacccgcacaccaaagtttaatattggtgataccgtatacctagtagttggcagtcctgctatggcagttgccgagcatgtaaaagaatatattgatggaacaatgaagttcaacggtacttaccgctgccaatggtttgccgggcgtaaagaagcagatgcaaaattccctgaagagtcactcaccaaaactaacccaaagccataa

SEQ ID NO: 156735 - DNA, 261 bp, Enterobacter cloacae
atgagtgagttttcatcagaacaaatactgacagaggctcaggtgatttatgacgcagtttgtgactctgcgatggaaaacggtagagatttaccgtggtggagcgaactagatgaaggtgttgtgcagacatatctagagcaagccaaacgcaagctggagcgaaaagcaaaagccgcagaggttctctcaactttgagagtaagtgacattgttgagtggttacaagataaaggctatgacgtttatcaatacgaatag

SEQ ID NO: 156736 - DNA, 612 bp, Enterobacter cloacae; identical to SEQ ID NO: 61245

SEQ ID NO: 156737 - DNA, 267 bp, Enterobacter cloacae; identical to SEQ ID NO: 126402

SEQ ID NO: 156738 - DNA, 219 bp, Enterobacter cloacae
atgataaagcaaatgcgccagcagggtgcgtatattgttgatattgccactcaggttggttgctctgagcggactgtcagacggtacctgaaatacccggaacctccggccagaaaaacacgccacaaaatggccaaactcaggccgttcatggactatatggggtcgtctcagaaaacggatctatggtcactcccgtttttgcaacaccgattttga

SEQ ID NO: 156739 - DNA, 816 bp, Enterobacter cloacae
gtgaaagtgttcataagttggtcaggccaacggagcaaagtcgttgctgaaatatttagtgactggttgaagtgtgtaatccaagcatcacaaccatggatatcaacaagagatattgaccgtggtgcaatttggttttcagaaattaatgacaaattgaaggatgtttcagttggagtagtttgtcttacacaagaaaacaaaaataaaccttggattctttttgaaaccggcgcattagcgaaaggtcttactactaatagagtttgtacttttttgatagaccttaatcctgaagacttacaagacccccttgcacagttcaatcatacgacaccgaacaatcatagcgtttgggaactaacaagaactataaatgcctgccttgtggacaaggctttagatgaaaggatattacgacaagtatttgatacatactggcctcagttcgaggaaagtttcaatgtggccttgaaggataacccaccacaagaagttgttcctccgcgtacagagcaggatattctgaccgaaatactgaataacactcgcactttaaatcagcgagttagagcactcgaagccaactccaacgaatttaacaataacaaaatcaataaagcaaacattactaagaaagaggtttggagattacaaaatcaattagaaagtataattcaatctggtccttacaatgaagatgaaatcatggcttctttagacaattacaatctcccagaagattacattagagaccagattaaatataacattagtaaatttcgtaacaaaaccctcaaagtaagcattgaataa

SEQ ID NO: 156740 - DNA, 306 bp, Enterobacter cloacae
atggtagcgcgtctgcccctccggcgtggtgcgggcgaccagctggccgctcgcgctccaggcaaaggcatgggtgatggcctccggatgaccggcggcaaaggtgcgcgctatcgtgcgtccgcaggcgtcgtagcgatactgcgaggccacgccatcaagccctacctcttccagcagcagcgagtcagcgccccagcggaactgatacgcttcgccgttctcgttttccagggcaatcagacgcccgcggctgtcccagcggcgacggacctcttcaccctgggcattacgagtggcggttaa

SEQ ID NO: 156741 - DNA, 642 bp, Enterobacter cloacae
atgccgcctcgcgcgaaaacaaagttgccccccccgtccaccgcccatagcagcaccgatgcgcagcccgttctccagcaaggagcccagctaactcgcgagcgcatcctgcaggccgctcgcgaactggtgctggaggaaggcgccagtcgtctgacgctggacgccgtcgtcgtgcgggccgggttgagcaaaggggcgtttctctatcatttcaagaccaaacgcgatttgttcgtgacactgatcgacgagatgatccgggcgttcgacgcggtacaagccaatcacgagcgcaggtttgccggagacccggacccctggctgtcgagccaggtggaagcgatacccgacgacgagatgcagaagatgggcgcagcgctgctcgcggcagctgcggaagatccaacacttctcgacccactgcgcgagtggtatcgcgtgcagtacgaacgcgtgcgtcgatccccgcgtggcaccgagaccgcggcactcatcatgctggcattggatggcgccctgttcgccgatctcctgggtctgccgatactcgcacccgcagagcggcggcatttctttcgggcgctccaggatctcgcctcgggccatctcgaactgatccctgcgaaaggacacccatga

SEQ ID NO: 156742 - DNA, 546 bp, Enterobacter cloacae
atggataccgatgatatatgtgtacaaaatcgattttcattacaattaaataaatttcgtgaatgtgatgatttgcaattattaggtggggccattgaggaatatgacgaatcaatgagatttcttaaaggaataaggaaaactccggaaaatcatgatgatatattaatatacgctaaaaaaagaaatccctttaatcatatgaccgttatgtttaaaaaaacagtaatacaagaagtcggcggttatcagcatcatttgtatatggaagactacaatctttggttaagggtattagctagaggaggaatagtacataacttacctgatattctagttaaagcccgtggtggagatggaatgattagaaggcgtaagggtattgcctatataaaaagtgagattcaactttttcatttgaaaaataatttaaagatatctctttggtataacaatttgatgatcttgatgttaagggtttttgttcgagctatgccgttaagtatactgaaaaatatttattcatatatgcgtacaactaaataa

SEQ ID NO: 156743 - DNA, 183 bp, Enterobacter cloacae
atgaactcctacaaattcagaaataatgatgagattggcaagttagaagctgaaactgattcttatcttgactcatgcttttatgaatcaaatgtgtttaaagggataattaactttgattcttcagaaaaaaaatccagacttcacaagaagaataattgtaggtcgtacgggaagtggtaa

SEQ ID NO: 156744 - DNA, 1602 bp, Enterobacter cloacae
atgaatataaaacactttaatgctataggtctttgtggtgttgtaattattgccttcgctttgaccatgctagtagctgtgcatactccgatgcactccgatgattattcctatgcgctaaaaggattgagccttgatggggttttgaaaaactatttttcctggagcggcaggctagtagcagattatgtgagcccatcccttctttctctccctttcatagccaaggctgccattaactcaggcgcattgattatactgctgcttattatttcttttctgccgcaggggtctgtttataacaggataatttcattcgccacttgctttttgttatactggcttggaaactcttctttgggtcagaccacgttctggatagttggctcagccaactacctttggacgaatctatttttaatgttatatatctttcttctgataaagaaagctcctgcctactttttattgcctctagctttaattgctggctgctctaatgaaaatacaggttttgtacctatggctataacattaatagagatgatacggcacaaaggagacggtagatttaagttaaggatggcttcactttcccttcttatagtgggctaccttacaatgataatgtcgccaggtaatgaggtcagatctcattactttggttggtggtactctaaggatatttcagtccgtttagcagagcatttatcaataagaatacctgaagttgcctctgttttctggattgttttgctatgcatggtgattacacttttttcactgctgagagatgaaaggtctcatgatgacaaacaaaacatcaaactaaagtattctttcgcatatttaattctatcagtagccaccatgttaattatggttgcatctcccacctatccacttcgctctgggaatggaacacttatttttcttttagtaagtatctcatatttgataaatttctcagacttgaggaaatcatccttattccttttgccaatgcttatagcgcttatcatcctgtttgttccaaaatacaagtggatgtacgtagcttatgaggccgcaagcaagcaaaacgaatttaggatagggttaataaatgagcagaaagaaaaaggaatgcaggaattgacaatccctgatttcttcttctcgcgaatgagcaatgttcatgatagatttgatgagtaccataattccgcgagctatggtcggtattacggtgttaaaagggtgtataaaacaccgtctacttttgattactctgttctatctgatgcggaaagaaaggatgttaaaaagccagtagaaggcattggtttcctggataagatatacctaaccaaagattacagcattgtccttttcactgacaaacctatcagtataaaaaaagacagcggatgctctttggatgttaagtttagaagatcttacagaaaagaagatgaatcatataagtactatcctgagtcaatgcctatgggtgataaattcgcaagcatgattaaggtaaatccttcatcgttagcttacatttccttcaggaaaagttgtgagaacgatgaaggctcatggactgaagtgaatttctaa

SEQ ID NO: 156745 - DNA, 384 bp, Enterobacter cloacae
atgttcacagtaaaaaccatcatcaatggcgtaacccatatctgcgagcaggcaagcgtaaccattgtccgcgcggattcggagcgctttgaagatatcctgaaggaaacgaatacccattcaaatccggattttgccatctggctacccgctgtttactccgatccggaatgcaaaaacgcaatccaggaagaagaaattaccgtcagcgagcgggaaggggttttggatgaagatgccattgccatcctgattgatgacttcgaaagccctgagcacgctaaaaagcaggcattcgacgggttgcgctaccagttcatttaccctggcgaccaggtatacgtgatgaactcgcatggctcgaccatcgaaacagtaaagtag

SEQ ID NO: 156746 - DNA, 282 bp, Enterobacter cloacae
atgacatggcaaaccatcgttcttgatgtaaacgccattatctgcgcgcttatcgctatcaggctgatgttcttcagtaagagcggaaagcgacaccgtcctgccgtggcatggatggcgtacatgatgatcctcgccgccggttttacggcattccgtatcctctacggcaaatacctgcaggttgacccgggcgagctgatgctgaacatcgctatctgcatcgccgtgtggcgctcccgtggcaatctcgccaaagtattccagaaggccgggcaatga

SEQ ID NO: 156747 - DNA, 399 bp, Enterobacter cloacae
atgtctgaacctctaaccattgctggcggtgtaacgtccgcaacaatcggagtgacgttcgcatctctgttccccgaggcaacgcccggcgtaatgctgtgcgcgctggctggcgcagcaatgtacgttctgacatccgatccacaccaactgtggaagcagttcctgttcgccgtcatcagctttgtcggcggggtgttcttctcggtaccgatggcgaagatactggccggggtgattaacaccgcccttggcctgttacagcctccggtgagtatcgaagtatccccgaacattggcgcgctggtttccgcttccatctctgtcgcagtcctgcttcgcatcctcgcaaaatcaaaacgggggaaaatgccgggactggaggaggaaggtaaatga

SEQ ID NO: 156748 - DNA, 303 bp, Enterobacter cloacae
atgcccgcaaagcttaaactgacggatgcgcaaatttacacgctgcgccgtttgaaatctggcactcgctacgtgatgacaggtgacggaagaaacgcggatgaaaatagacgcgaacctggaagtaggcttggatatcggccagtcagtgccccgtccatccgtgttttatatcgcctcgggctggtgaattttactaaccctaaagcagctgattctcaaccaagacacttgcacccggttcagctcaccttagctggtcgtgataccgcagaaaccatgaaagtcagcagcgaggactaa

SEQ ID NO: 156749 - DNA, 552 bp, Enterobacter cloacae
atgagcaacaaatacgaagatctgattaaaaacgccaggatgaatgccgactgcggtgagcacatgtcgcccgcggaagttacgaccctgcttaatgtggttgaaaccacattcgcggcgctggctggggaagtgtacgacctgaaacatcctggcacatacctgccatcgaaacgcgaaacgcctgctacggacgctttcctggctgaagtgcgggcgcagggtgtgaaatcgctatccaatgcagttcagtcagtaattgcagagcgtcaacgccagcaatcagctgagggctggacgtctaagcatgacgacaagcatgacaataatgaattggcctttgctgcatcgtgttatgcgttccattctgccgctgcatcctgggattttgaagatgatggaacgccttatgacatccatccagcacctaaaaactggccgtgggcaccagaatggtggaagccgacaaatccacgccgtgacctggtgaaagctggcgcacttattctggccgaaattgaacgcatagaccgccaggaggccgcccaatga

SEQ ID NO: 156750 - DNA, 249 bp, Enterobacter cloacae
atgaggaagaataatggcggcccagcattcccttactcaggggttcataagggtgaaaaagaaaacctgatagtcgacagccatggcatgacgctgcgcgattacttcgcggcgaaggctatgcagtcggctttgttagcgccgaagccagagaacccggtggaacgcatggatatttatgctcaatcagtagctgaaatctcttacgagattgctgacgcaatgctccgcgcccgggaggcatcatga

SEQ ID NO: 156751 - DNA, 159 bp, Enterobacter cloacae
atgacagtcacccacaacggcaagcagtacaccgccaaaaagctcaacgataacgagtggcagctgacgtcggtatcggcaccgcgcgacaagctgacgcttaaccgctggcagatgcatatcgctggcctcctgaaacaggttgaggtgaaggcatga

SEQ ID NO: 156752 - DNA, 2208 bp, Enterobacter cloacae
atgaaatacggaagcgtgtgcagcggtatcgaagctgccagcaaagcgtgggaacctctcggctggaaacctgcctggttctctgaaatcgaaccattcccatccgcagtcctcgcccatcactggccggaagtaaccaatctcggcgacatgacccaaatctccgatgcggtgcgcactggtaatgtcgaagcgcctgatgttctggtcggtggtacgccttgccaggcattcagcatcgccggcttacgtgaaggcctgtctgacgaccgaggccagttaaccctctcttacgtggaattagccaatgcaatcgacgcaaagcgcctcgaacgcggtgagccagaagcaatcatcgtctgggaaaacgtccccggcgtgctcagcagcaaagacaatgccttcgggtgctttctggcaggacttgccggagaaagcagtgagttgcagccagcaggggcaaaatggacgcacgcaggttgtgtgtctggaccagaaagggctattgcctggcgcgtccttgatgctcaatttttcggagtggcccaacgacgccgccgtgtgttcgttgtcgcaagtgctcgaaaaggattcgatccctcagcggtactttttgagttcgacagcgtgcgccgggattctgtgccgcgccgagaatcgcaaccggaaattgccagaaatgctggagagcgcactaaagtcggtagtcactgggataacccagcaaaccctcacccaaccctaaatcagtccaacaatattggcggaatcggcgccagtaatcaggaattgttcagccagcgcggttccgggctcgtatcagattcttactctgatgtttcccgaactcttcttgcaaaagaaaacgacagcactgccgaggatttggaaacttatgtcgttcatggaactcaagatcctgataccaacatcgacctcgcacatacacttggaagaaataacggtcaggaaaacgcctgcattgcatttagctacaaagataatggagctgatgtgacgtcagatctgtcaccaacgattcgcgcaggcaaccacgataaaagccatgctaacagcggtcaaccccctgccatctgcatccaacatgcttctatcggtcgtcacgatgcagctggccatcagggcaaaggttatcaggaagatgtggctttcactcaggattctcgctcatccgctgacgtcgttcagtacggaatgcaggttcgccgcctaacaccgattgagtgcgagcgccttcagggctttcctgataatcacactctgatcggctggcgcgggaaggatgctgatgaatgccctgatggcccacgctataaagccattggcaatagcatggcagtaccggttatgcgctggatcggagagcgcatcggcgatgcgctgccagcagagaagttgaatggtgattatggcggaagtaaaaccccgcttgatcagcgcgacctctggcgcactccaccagccctatttgcttcccttgattctgagttctgcttccagttggatgccgccgcggcgccgcataacgcgctgtgcaggaagttcatcactgccgagcagaacacgctggaaacgccatgggctgattacctgaatgttccaggctacgtctggctgaacccgccctacagcgacatcacaccgttcgttaagaaggccgctaccgaaagcgcaaatcagatcggcacggtcatgctggttccggcagacacatcggttggctggtttaaggaggctatccagaccgccagcgaggttcgcttaatcaccgccggacggctcgcatttatcaacccggtcaccggtaagccggtaagcggcaacaacaaagggtcgatgctcatcatctggcgaccgtatccgcgtacacactgccacttcgcaactgtggaccgggacgagctgatggctttcggggcgaaacttctcgccagcagggaggccgcatgtcgccagcaaatcaaaacgccatccgcgcggcctgccgccgctgcaccgaggaaatccagcaggccatgcgcaagaagccaaagcctaactggaacgaaacggtgcctcccatcatcaacaagcatcacaagaaaattgaagctctgggagttagcctccttgagttcgtcgtatacacagggcggcttaatcgccgcttcggagttgaatcgtgaccaaatacgcgaaactggatag

SEQ ID NO: 156753 - DNA, 291 bp, Enterobacter cloacae
atgttggcacaaaaagctcatgcccataccatgcaaaacacagcggtaaatttcactcatttgctctcttcccagcctgtcgttgtagtaaattcgtttaccaccctctccacgcccgacacatacagcatcaaggcgatggaatgcgactgtgtagatcatgtcccctttaacccaagtgtcgcgccccatgaaatgcttggttttaggcatggatcgtgctggcaatttgtaatggtaatttcgtacaacatccggctctacagtgctacaagccactaccgtgactaa

SEQ ID NO: 156754 - DNA, 186 bp, Enterobacter cloacae
atgactccgcgcgagatagctttattagccgttgccaatctggagcacgaaggccaccagcttaccccggtagaggttcgggaaatggagcgcatgattaaggccgatacagcgcggcgtaagcggttcggggaaatgatgcaagcacctgcctaccagtggaagaagcaagcgccgcgcagatag

SEQ ID NO: 156755 - DNA, 3003 bp, Enterobacter cloacae
atggaagtcggatcagttgtctatatcatcaaagcagaaacagaccaactgctaaaagccaataagcaggtcgataaattcctttcacaattacagtcaaatttcgacggagcggacaaagctgctgacaaccttggtggaacgctcaagcagacaagctccgctatcgatgataccaatgtcgctgcgggggctatgtcccggaatgtcgccgcagtagagggggcggtaggaaagcttaataccaatattaactctctaacacgggctattctcgaatccagatccggagtcagcagcgccagctctgaatttagccgggcagaatcaatcatagaatcgctgggcaaccagctcgctatccttgaagaacagcaagagggtagcaccagaagcgccgctattctggctgctcagctccgggccgggagtaatgccactgaggaagagaaaaagtccatagccgatttgactggccggctgtacgacatgaagaacggcacggaggcaggggcaaagggaactaaaaactggaaatccaccatgcagcaggcgggttatcaggtaaatgacttcatcgtacaggtgcagggcggacagtcggcattgttagcgtttagccagcagggttctcaactggctggcgcatttggtccgggcggggcggtagtaggtgctgtaatagcattgagctcagtgattggtggcgtactaatttcatccctcaaaggtggcaagagtgccactgatgctttatccgaagccgtcgaaacaatggataaagtgataacagtttctcaaaatggcgtggctgcgtattcagataagtatgcagagctggctaaaattaacgcctctatagccacattaatgagaaaacaagccgagctagagcttcagtcagccttatctaaggtatccaaagaggtacagaacgcatcaagcgactttattacatttggcgattctttagtctcctcacttggtaatggatatgccagcgttaagttatttgatggctacttgtccactctcaatatcacaacaaataatttcagcgatgctctgaagcaggccgccgctagcggacaagcggggcaaactgcgatgaattctatgattgcgacagtaggggtcctttccagtaaattcgatattagtgatcagcaggcttaccagttcgcaaagcaattatcagacatcagcaaaaatccatcagacgaaaaactaaactccttagtcagaacattacaggagtttggtagcggtgcttctaaaggggctgatacagcacaggagtatgcggataagcttctgaaaatagtaaccagtagcgctgatgccactcgtaggttgaagttactaaaagagatgacagactctctgacatccagccaggatagagcgctacagctggcaaggcaggagctgttcattaccaagcagactggcgacgaaaagttaaaagctcaggcatggcgtgacgccgaaacacaggggcttaaggaaggtactcaggcattccgagactattacaatgtcaggctccagacataccagcagcaacaagctaatttaaaatcagcaaaggatgagcgtaacgagcaaagcgcagcagtgtcagcagccaagaaagctgagtctcaggcggagcgtaatgcaagagtcctcaatgaatatcggcagaaagcagatatatcagcagattcaaccagcgatctgtccagggagcaggcgattcttgccgctcgccagaagttagctaaccctactcctcagcaaattgcccaagtagaaaaggatgccgcagctgcatgggataaagccgcagctctcaaagctcaaaatgctgtccctgaacttaaagagaacgccaattacaatgtccagcgcaaagctctggagagtctgaaagaccagagggacgcgaacggtcagctcatcctttcgcagcagcaatattaccaggcgagtgagcagcttgagcagcagcaccaggttaatttagccaaaatcagagcagagcaggcatctgttaaccccattgccgaggctagaggacaggttgacccggttcaacaactggctaatgagaatactcaaaaactgaagctcatgcagcagtaccagcagcaggagcaggccgtgctaagccagtcgtataaaaacggccaaattacttatgcggaatatatcgctgccaaacagacaacagacgctcagtatctcgcgctcagaaccgcacaggaaacacagtacgaacagcagcgaattgaagctcaatgggaaatattccgcaatcagagccaggctaacgaattgctggccgcatcgctggaaggcctgcagagcagcacgtcaagcgctcttactggcttaataaatgggactcaaagcctgcaagaatcattcgcaaatattggctcgacaatcctcaacagtgttgtaagcgccattgtggatatgggtgttcagtatgttaagagcctgattattggtaaggccatgtcatctgccgcaactgccgcgcagatagctgaggcaagtgctcttgccactgcctgggctcctgcagctatggcggcatctattgcgacccagggcaaagcatctgctattggtctagctgcttatagttcatctatggctgcaggacaggcgctttctattgccggcgctcgttataacggcgggccggtttccgctaactcaatgtatcgtgtaggtgagcacggaaagcctgagatattccaggcggccaatggcagccagtacatgataccgggcgacaacggacgggtgataagtaacaaggatatgcagggaggcggtggcgcagtcattcaccagcagatgaatgtgactattcacacgacaaatggcattacagaggaaaatttacggcagattgaatcccgaatgtataaagttgggagaaaagcggccctggatgagatgtttaaccaacagaggccgaaagggatattgcctccaaggagatag

SEQ ID NO: 156756 - DNA, 474 bp, Enterobacter cloacae
atgaaggttgtctgggctatatgcgccatcgctctgacgcttaccggctgcggtgagaagactgacgaacaattaatagggagtgcgcaagaagctgtaagtaaagagctggcgagtaactataagccaggcgaatgtgataactggaaagttatggcctccggcggagtgacctcgaacagtgcggcggtagctgtctgcgataatgatttcaatgtcagcaagggccttacattttccgacgttaagatttatcgccatgataaacgtgctgccatctgtggcgttgtatctggacatacagacgtaagccgtataggtgcgcgatttatttatactgtcggcgataagaaaattgtcaccataaaacaatcaaaatatccgctgctaagccgatataaagatccggcaaatattgatcttatgaagctacaaagagatcaatatgatttgagggaaaaaaattgccagtaa

SEQ ID NO: 156757 - DNA, 348 bp, Enterobacter cloacae
atgataaccaaaaacttccgactgaatgcgctggcaaatcagtacgcagcggcgctgtatagccacgtcaccgccaccagcggcgacgagtatttcgtgattgatgcggccggcgagtccgtccgtgtgaacattctgggcggcgcaaagggaatgcgcgaccttgtggacggctacgcgctggaagcaatcaaagagcattacccggcggctcagtgggaaagtatcgggatagcgtacctgtcacgatgcgttaatgctggcgggctgactgatgtgggattagaggcgtggggcaatatgaccgccgacatgggcgtgaccgtggcaggaggcaaccatgcgtaa

SEQ ID NO: 156758 - DNA, 498 bp, Enterobacter cloacae
atgaccgccgcccagagtaagggctttcccgtggctggcagcaaagagccggacgtcaacgggctgccgttgtcgatggtagaccagtggcaggagtacctgactaaacgctcgtttgccgtttccgtaccaacggggctacgccgccagtattacccggatgatgccacttttggtaaggcgatgcgtgaagcgggttataccccagtgcgcacccgcaaattaaccgggaagctggcgagttactggctgtaccgcgtaacgggcaatgataaaggggtatgcacagcagaacccgcgccgcgcaaggcttccacggcagttgtccagaccatgacaaagccgcacccgtggtttaaacgtgtggcgctcgatggtaaatggcagtacgtctacgccgatcacattcgccttctgacgaaaaagcgtcaccgtgtcgatggcgtgcgtgtccaaggttataccgctgccgggttaaccgtggaggtgattgcatga

SEQ ID NO: 156759 - DNA, 174 bp, Enterobacter cloacae
atgactaaacccaccccacgcccacagcagcgatacaaagacagccatggcgcactagtgaccgttgaacgcgtcgagtttaaccgcgtgacgttctaccgcgagggctacgcgccaccatgcgtacaaccgattgaacgattctcaaaagaatttgcggaggtgaagcaatga

SEQ ID NO: 156760 - DNA, 810 bp, Enterobacter cloacae
atgaataatgaaaaaagccgattcacttcggaggccgcccctcaacccaatgccaaccacagcgtaattactggcaatgatttcgctgccattgtcccggttattcccggccagattggcgggcatgaaaccaatattgcgagcgcaaaagcattacacaaagtactaggtgtgggccgtgactttaccaactggattaaaggccggattagccagtacggttttgtagaaggctctgactatgtgcgtgttgaaaatttgagctcaccaaaacgggcgagcgcaaaatctcgccaacaaatcgagcacgattatctgctttcgctggatatggctaaagaagtggcaatggttgagcgcaacgaacaaggccgcgcagttcgccgttacttcatccagtgcgaggaagaactacagcgcagtgtgccagagattgctgccagctatcgccgccagctcaaggcgcggatcggtgctgccagtctgttcaaaccgatgtgcgttgccttacaaagcgcccgtgcggaacagggcaagcagacccaagcccgccattacacgaatgagagcaacatgatcgcccgtattgtgttgggtggcatgacggcgaagcaatgggcgcttgcgaatggcgttactggcgaaccacgggacagcatgaacgccggacaactggatcaccacgcctatctggaaagcaccaacatcacgctgattgatatgggcatggaatatgaccagcgtaaaggtgaattaacccggctgtctcagcgctggctggctaagcgtctggaggcaacccatgactaa

SEQ ID NO: 156761 - DNA, 447 bp, Enterobacter cloacae
atgcaaacaaaaaacgcccgtgctaccgagcgtcattccgagccatctaaaggggatgcgcaattcaatattgctggtggtcatgatagccaacccaaatgctcaaatccagtgccaaagaagcataaagcccgtctgcttatccttcgctccggggctgctggcatcacagaaaatgaaatcctgcgcaactgcagtctgtcatctggccgaaattatatttctgaccttgaacgccgccttgatattcagttcgagcgcaccgatgaagctaatccagatggtatcggtagccattttcgttaccgctttaataaacgtgctgacgtgctcaaagttattgacctcgtaaattcacacgctgtcgttaacgggcacatgccgcttaatcaactggacgtagaagacattttgaaactgtatccggacaaattcaccgccgaataa

SEQ ID NO: 156762 - DNA, 303 bp, Enterobacter cloacae
atggaaacgataaacgttaaccaaggtcgggttaatgacgatcaactgatagatatgaagtttattacctccgactctggcatgggtgataagtggttctaccggctgatgtctgagggacggttccctaggcccattaagcttggtcgtttaagtcgctggctggcaagggattactatgcctggaaagacgctcagatttttaattcagctgaggagtttaaaaaaagacagcgtgaagcattagagagagcggaggcaaggcgtaacaaaaatcaaagtcgtgcagtgggggtgacctga

SEQ ID NO: 156763 - DNA, 1083 bp, Enterobacter cloacae
atgactattcattatgaagaagggcaatcccttaaaaagtgcttaaaaattattagattgattgagtccataactttttgggctatcgaggaaatcgacaccgctaaaatttgtactttggagcaggcggtagaagttgctaagtcgtgccaaaagttcgtgacaagcgagataaatcactatgagccaattaacgccccagttaatttagccttgtacaataaggttataagagatgacaggaatgttaagaaatttatggagcttgttaaattcaatcgatctccattagattgtgtatacgatgccgccatcgatagcatcataaggtgcaagctgcgtgagtttagacattgcgacaaagaacatatacatgatgtcttcggcccccctgtagagagttatctttactggtttaagcatgctcagaaaatgacatatgcctattatccaatgattgggcagtcattttactcacggctgcttattctagtcttaaggtatcaaacaaaaaaaggcaacgcagtcattctggatgagctgcgctttttgaatgagtataaaaacaagttgactgaagtctgcaaaatggcgcaagaccccatctttgatagtttacataagccacgtcgtcgagagcgagatgactatatgggggatggagtcttcaatctttatgaaattgaatatctcataaaaaagacagagtcacttattatcacaaaaaggcaagatgatactctccatgaaagggtgttggcatcttggttaatgatgcttcttcagtcatgtgaggtgaagaatgtattaagtgctacaaacgtttttatgggggctgaatttatcgaaaatattgtcgagcataggacgctcgcacggctgtggaattctgttaaaaagcgccgtgagattgaaaaaaaaaccaaggctgagcgcgaagagttctttaaggaaaggctggagaaaaataaagccagaagaaatgctatgagggattacaccttaaatcgggaaatttccagcagatttcatgagtatgcaaaacacctaggggtgacaaaaaataggtataacccaacctga

SEQ ID NO: 156764 - DNA, 1215 bp, Enterobacter cloacae
atgaaacttaatgcccgtcaggtcgatacagccaagccaaaggataagccctataagctcgctgatggtggtggcctctacctccttgtgaatccaaatggtgcccgctactggaggctcaagtatcggatttcaggaaaggagaaactgcttgctttgggcgtgtatccagacgttaccttagcagatgctcgcgctaaacgtgatcaggcaaaaaggggtatcgctgggggtgtagatcctaacgaagcaaagcgggaagaaaaggccaaccgcgaagctcaggtaaagaatacatttcatgacatcgctacagaatggcattcgagtaagttaaagaagtggtcacccggatatgcctccgacattatagaagcattcaaaaaagacgtgttcccctacattggcaaaaggccaattgcggagattaagccgcttgaactgctgaatgtacttcgtcgaatggagggtagaggggctacagagaaagccaaaaaagtgcggcagcgttgcggagaggttttccgttatgccatcgttactggccgggctgaatataaccccgcaccagatctcactagcgccatgcaggggcatgaatccaaccactaccctttcctgaatgtgccagagcttcccgcattttttgagtcgctatcacgctactcaggcagcgagttggttgtactggctgcgcgcttgctcattatcaccggcctcaggcctggagagttgcgcggggcatcctggcgagaagtcgatgaacaggccgcagtatgggaaatccccgctgaacgcatgaagatgcgccgtcctcacatggtccctttatcccagcaggcgctatctatcattgcgtgcattcgtgaaatcactggtagatacccgctaatgttcccagggcgtaacgatccaaggaagactatgagtgaggccagcattaaccaggtgtttaagcggattggatatgccgggaaagtaacgggccatggcttccgccacaccatgagcaccattctccacgaacaaggatacaacacagcttggattgaaacccagttggcgcatatcgataagaacactgttcggggaacgtacaaccatgcccaatatctggatggccgccgcgagatgctccagtggtatgccgactatattgacactctacagcatggagagaacgtggtttatggcacatttggcgcaacacgataa

SEQ ID NO: 156765 - DNA, 303 bp, Enterobacter cloacae
atgacaacaacacactcccatcatgacaacgtcgaaaaacagtttggttcgcaggcaagtgcctacctgagcagcgccgtgcacgcctctggccgcgacctggtgcgtctcggcgagcggctcgccgcgtttcctgacgcgcacgtgctggacttaggctgcggggcagggcatgccagttttaccgccgcagagcaggttgctcaggtgacggcgtatgacttatcgagccagatgctcgatgtggtcgctgaagcggcgaaagcgaaaggactgaataacgtcacgacgcgccagggctaa

SEQ ID NO: 156766 - DNA, 294 bp, Enterobacter cloacae
atgagaattactaaagccagaattaacacaatgcgttttattatctctgaatccataagaattgatgatgagatttttaaagcattgaaaaataaaaattacaatgaatttcttcaaaaagagtatggggaagggttggctggattaggcatgtctataagctcaccgaatgatttcactgaagaatataaacatgacccaagaagagaaataaaactttctaacaaatctaaatctgccatacttcatatgctaaatgaactcatcaaagaagtaaacttagagagaatttaa

SEQ ID NO: 156767 - DNA, 141 bp, Enterobacter cloacae
atgacccaggtaaacgacgttcgcgacgcacacgtcgagacgacgcccgccccggcggtttcaccctggcagccgctgagccagccggtgttccgcatgctgtggatcgccacggtggtctctaacgtcgctcatggatga

SEQ ID NO: 156768 - DNA, 519 bp, Enterobacter cloacae
atgactggtcaaaacatccatactacaatcgtatcatcgacttacggtctgctgacggaaaccaactcagcccttctgcgattgtgtgaccaagctagctcgctagtgctaatcgtcaactcaactgaagaagccatagagccttctcagcattcagaagagataacgttgctcgagctatctgaaaagctatgtgaacacttgctaccgctatcacgcgatgatcgatcccgcaaggcaccagatatcctcgcaaaaatgctaaattgcatagcgtctgaagtagtatggattgacaggattcaagctctatttgaaccatctttggaactagatcctttgcgccagctacaagagctagcgcgtatcaagcctatcatcgctatttggccaggccggcttacagaacaatttttaaccttttcagttccgggaagggccgattatcaatcttacacagtgaatgagctggcaaatctgccgatcattcattttgttgagcagagggaatataaatga

SEQ ID NO: 156769 - DNA, 231 bp, Enterobacter cloacae
atgaaaaagtacggagagctcattcaatttgagcccgtcacaactatcatcaaactcaaggagtctgctgaacagcacaaagctcagcagttggtggcgtcttatgttatctcggacaagatgtcactaaagctagctgacattataattcacagctgcagtttgaagaatcacttgataacaaatccctctgggtcgtcggtaactacggttcaggtaaatcacacctga

SEQ ID NO: 156770 - DNA, 3495 bp, Enterobacter cloacae
atgtcagtgatctcggcagttgctgagtttccagaacttgcacaatttattacaaacgacaaagttcgtcacgctgcgggcaaaattgccggaaaatttaaagtcattcgttttgaagtcggggctagcaaaaaagcgttcgctgatatcgtaacagacaatctgacatccagcttggcggagttggggattgattatcaattcccatcaatggatgaaatttcatccaatcacaaaccctactttgaagagatgatggcgctatttcatcaacgctatccagatcaaggtttgcttttgatttgtgatgaaatcctcgattacctgcgctcacggaaccagcaacaattaccactggatatagcgatgatgcgcgtcatgggagaagtaattgatggcacacgcttccgatttatttgtggcgttcaggaagccattttcgacagtactcagctcgcttttgctacgcaggaagtcaaacgcattcgtgaccgtgcagagcaggtattgatcacacgcgacgatatcaaatatgtggtcgctgaacgtttgctcaaaaaggatgcccagcagttgcactggatccgtgagtatctgcaacgattcacctcttgttttgatcgtatgaacgaacggctcgatgaatttgttcgtatgttccctgttcatcctgactacataaatactttcgagcgagttcatggtgcaggcatcgaacaacgacaggtattgcgtagcctctcgcgtcagatgcaagctttaatggagcaacaagtcccccttgataagcctggagtattctcttatgacacctactgggatgaacttagaagtgaccccagcgccaaaaccaatcctgatgtaggccaggtcattgatgtcggtgaaaccctgtttactcgtattgatcaagcctatccaaccgcaactgaaatagactttgccaaacgcctggtagccggtttggcaatccatcgtttgactgttggtgatgtttataacgagatgggagcaaccgctgccgagttgcgtgactcactctgcctctatctgccaggtatcgaacaactgcctggtgaaaagagtaagaatctagaaactcagattgttgctgtactgactaagattcgaaaaaccgttaatggtcagttcttttcaaagaacaaggcaaacgatcagttctttttggatttgaaaaagactgaagattttgatgcttacatcgaaaataagattcccttacttacggatgatagtcgtaacggtgcctatcgtgaagctatgctgcagatcctggaagaaacggatatgcagcaacccaatattcagatgtggcggcacgaactgaaatggttggatcgaaatgttaatcgtccaggatggatgttcttaggctcccctaatgagcgagaaacagccaagccgccgctcgattattacatgtactttatacagccatacaacccgccaaaacagaaaaaagagcacattcgcagcgatgaagtgctctttatactgcaaaatgctgacggagattttgatcgcagcctgaactactatgcagccgctatcgatttgcacgcttctgctacaggtaacgccaagaatgtctacaaacttaaggcggatggttatctgagagagatgcagacttggctaaaaagccatttcaaagatgcctacattgcccaatacaatgggcaaagcaagccgatgatggactggctcaaaggtacctccgtccgcaacatttctgggatcggcgatagccaaattggcagcctcaaggatatttttgaatccgttgccagtcatatcttggctaatcactttgtttcattagcacccgagtatcctacttttagtcagtggatcacctatgaaaacatagaaagcgcagcaaaagatgcgttaagtgttgtctcaggtggcgcagcgaccaagcgagctaatgccgtccttgacgcacttgaattactggatggcgataaaatttctccgctacaatcacgctatgcccaagcggttttagctgttttgcaaagcaagccacaaggccaggtggtcaatcaggcagaactattggagcccatcaagtctcggttctattttaagccagaaagcttccgactggagccggaatggctgttagtcctaatcgcctgtttggtttatagcggcgagcttgaattagtagtaatcggccacacccttacagccagtgatgccgtcaaattcaaatccattgcttttgatgttctgaaagactttaaacatatccaagcgcccaaggattttaatgtcaccgcattaaaatccctgctcaccctattggacatgaatgacggtttagctacctcgatccaacaaggagatgaaagcatagtgcgcgaaatgttaaagcgcacagacttgctgattaatgaactcgtcaagggacaacagagtgtcaaggaacgcttgccgttatggggacaatcggttctcgaagaaagtgaagagcaaacactgtcaacacaactgactgagctaaaaaattttttggaaactatccatcgctatgacaaaccaggtaaactgaaaaacctcaaggtgacggctacagaaattgccggtttccaacacatgcttcagacatggcgaaatttcgtgcaactcaaggcggcagtcaacgatctgaccccattatgcacttacttaaaagaggcccaattagtactgcctgagcagcacatttggcaagaacaagttaaattggcccgggatgagctaagacaaggtttctcagatccatcattacgatgtgatgaaaacttcaaagcaacgcagatcgctgttttaacagggctaaaaacggagtatgccaagcactatattgaactctatattcggacgcatcttgacagtaaagaagagaaaactaaatccaaactgctaagcgacgaacgtcttgcagaactggatatattgagtggcatcaccttgctccctgctcaacagctggctgattggcgtaaagatgcggcacaattacaaacggctaagcccatagatcctaaacagctggcaatgaatgccaatccggtagaattcaatgctcgtcaagagagcagcaaggctccggccagtgaacaattaaataacctagaacaacggctagatagtttacaaagcgattggcttaacaaccttaagagtctgctcgatgatccgtttattaatctcgggctgctcaaacccaatcaggcacagttaattcatgactttatccagcaaggccagttacccgaattattggactccacctttgtgcaagcggtaaatctagtgctagcagggttagaagagctacggattaactcagaagaacttattaatgccctcggccaaggccttcctcagagtcgtgacgaaatagcggagcgctttaatcgactactcgacaagcttttccagggtaaagatatcaataaagttcgtatcattatcgattaa

SEQ ID NO: 156771 - DNA, 228 bp, Enterobacter cloacae
atgctaaaaaatattcgcggcgtgcctgatcgttcgcgaaagtttttcctaaacaagttactggacatgatgtttgtgtctgctgtgagttattgctggaaaataagctgttttgttgcatggtgcttcctattggggtacgacttaaatcgtacccgcccgtataaattaatcgataatgatacgaactttattgatatctttaccctggaaaagcttgtcgagtag

SEQ ID NO: 156772 - DNA, 189 bp, Enterobacter cloacae
atgtcagacgataagaaagatccaaagggtaaagctaagggcgggattgctagggcgaagtctcttactaaagagcagcgttctgacattgccaaaaaagcagcggcagcaagatggaaagacaagccgttgaaagcaacccacaagggaagctttatggaagagtttggcattgatactgagtgttga

SEQ ID NO: 156773 - DNA, 393 bp, Enterobacter cloacae
gtggtgaaccgcggcgtgtggcggcacggtgaattcaacggttttatggtcgatgggcttatgcgtcgggtcggcaacgatgatggttaccttgtgtttcccggcgggcagcccgaccaggatcaccggctcgccgctggtatcagcccagtgccagggcgcgtcatccaccacaacgtgaatatggccgatacgcggagtgactttcagcgcgtcgggtccaaatacaggttcaatgcgcaggttttcgacgcggtactgaataaagactgcacctttactcagcggtcccgccagcggtgggtcgacgatcagttttgctggcggctggggtttttcctgcggcgatacggcggccgggccattaacatcagcagcgctcaggccatctaa

SEQ ID NO: 156774 - DNA, 948 bp, Enterobacter cloacae
atgccccgctacaaaaaaggtatccgtaataattgctttcatcaaaattatactcatgacgtattgtttcccggtgcaacattcagaacccgacataatggagaatgcgccattcttggtcgctctgatgataaatcaaggcgaggctattatgtcgtggaattcaaagacagtggcatcatcaaggaagcctatggctcgcatattaaaactggttctgtatcagacgaagcttttccatcatcggaggaagaacgacgaaagttactgatgacaccaaaatattacggcgtcggatatattggtaatggatgtcattcaactattgaaaacacccgaacacaccaaagaacgagagcattcatactctggcataacatgctggcaaggtgctacatgacaaccaaaggaaagcagtattttaaaggctacaaaggtgtcactgtatgcgagcgatggcataactttcagaacttctgcaatgaccttccaaaattgcatggctacaacaaatggaaggataatccgggagagtttgagctggataaagattattcacatcggcgcatttattctgctgacacggtggcatttatcagcacagaagaaaatgccagggaagccggattacgacgcgttgccatgaagattccttccgggcattatcatgaaataaataaaattcgagatgagatattaatggaggctgaagatgagttaaaaaacaatcaaattaattatgaagttgttcttaacgggaatatgaaagtaatcctgtctgaaaccccttatggcacagtgttgttctggcctctcacgaaaaagattcagcgtaattgctacatgattgatggtgatgtacaggtttatgttcattacctgcgctggctcatacttcagtgggaaaacagaaattccgacataaactgtgttgctacaacctgttga

SEQ ID NO: 156775 - DNA, 648 bp, Enterobacter cloacae
atgaacctaacgcaaatttttagtcgtcttgcgccgcgctttattcctcgtcagtttggcctgctgaccggcatcttttgtatcattggccttttctccgccctgcaactctcttcctccttcctgctcaccgcctccctgaatgaagcccagcgtaacgaacagcgcaatcagctggcctggcagcagcagagcaggctggatcaggcccgtatttctctgctggccgcaagcgatctgctcaaccgctccggcgtgtactttatgcaggataaagagaccggctcggaagggagctggcatagcctgatggacgaggcgcaaaaatccctggcggcgtctaaacaggcatggcaagcatggctcgcacttaatcctccgcaggacgaggggcttgttaacagctatcagctgttcttcggtgccattagcgagcaggcggaaggactggtgaaaaccaacagcatcgacctctttttgccgtacccgcccaggcctttcagaccgattttaatgacaactttgcacgctatcagcaacggagtgagaagcaggcgatacaggggcgtcagtcgctcatggaacaactctcaggcctgcaacggctgttcctgtttgcgccgctggtgctgctggccattgccatag

SEQ ID NO: 156776 - DNA, 264 bp, Enterobacter cloacae
atggagaagaacatcctgatgtccgctcacaacttagagaaaaactctctcgagatagcgaagggcgtcttttcgtcaatctttttatttggacgcatcctgattcagatcattgtgatggagtatctgatcactttcacttggggaaacctgaaaattggagtgaaaagagcgataaaatttttatcaatgaaatttggtcaagcccaattgtatttagacgccatcatgctcaaaatcatccattatgtgatgatgcaatag

SEQ ID NO: 156777 - DNA, 243 bp, Enterobacter cloacae
atgccatctccgctgcgtatggcgtttctaggtaatacgtcaaaaactgtttggatggtagttggcacgtatggtatctgtcgagggctatgggttaagtatgtgttttcttggtttctctatttcttgactagtttcaaaatgttaaatccatcacaaaaatgcggtagtagaaactatgagcatatgatttgccattttttgagggttgaatgtaaacaagcctgttggcaaaattgttga

SEQ ID NO: 156778 - DNA, 303 bp, Enterobacter cloacae
atgaaacttctaaatacatacgaagataaagatgaagccgaggaggccttgactaaaatatctggagagaaaagattagcgagcgagcgcgatagtactgtcgttatttacaatctctttggtactccatcatgggggaatttttataaactaggtatgtttaatcttcctgagttgcagaaaatactggaattgcgcaggtcgggccaacctattgatttggataagtataatgaatacatcaaaacgcttagctatgctgctcgcttatttgatttagccattccaaagcattggttgtaa

SEQ ID NO: 156779 - DNA, 690 bp, Enterobacter cloacae
atgggaatttataggagtagtttgaggcaagatgaaaaagatcaatctctaatatattctatttcatggaataaaacagaaataagagagattattgatgctagaattaattacttagtaaaaaatagatatcaagcctcgaagcttgtaacaatgaaagatatatttggatttcacgtcaatggaataggggcggatgattatatcctagacagaactatgttgaggccacgtgatgctataaattttgtaaatatatgtctttcggagtgcgatggtttagttaatttaaatgaggatataattctggttgccgaagaaaaatattattcatcaaggaaaagagctttggtaaccgaatggaaaagtatttacccgtttatagaggaatatttggatgctttatcgttgttatcaatatcagagtttgatttacccatacttcctcaagtagataaagagaaaatatcacagcatatctttgatagactggcaaacaatcaagaagatgaacatcatatgaagataataatgaactttgaggagctacttaaggtttggttcactgttggagtcatcggaatcaaaaaaacaagctcgctgattatatactcatcttttgataagccaaacttagatataaccgatatgaaaaggacatttatcattcatccactgtttaatagataa

SEQ ID NO: 156780 - DNA, 600 bp, Enterobacter cloacae
atggctacagcaaaattaaaccaacacatgattgccacggtagccggtgatattaccgtgtttaactatgatggtgagacgcgcgaatacctttcttcatccgttgaatatctaccggttggcgtcggcattcctgctaattccagcattgacgcgccgggagagagtaaaaccggctttgccatttgccgtactactgacttttcatcatgggaatatatcaccgaccacagaggtcaaatcgtttataacatagagacaatgcaacaagttgaagtgacggcactgggggattatcccgaaggtacaacccccacagcccctgcatcaccgtatgataaatgggacggagataaatggatcatggattctgccgcaaaacatcaaggtgatattgctgatgcagaacaacaccgacaaatgctcctcgctcaggtagatgaactatcctccgactggcgagtggagctgatgctcggtgatatcagcgaagaaaacaaaaagaaactatcgtcgtggatggcttataaaacggcggttaaagccgtcaatgtttcggcggctcctgatattaactggcctgttcaaccggaggcatag

SEQ ID NO: 156781 - DNA, 933 bp, Enterobacter cloacae
atgagcgaaaagaataattttatttctctgaagggcagaattcgattcgctcaggaaaaaatcgacgctatctcgagcctaaaagaacccactttcgctgacagaatcctgtttaataacatggattcttacttaagtgatctcttatccgagcaaaggacaagcgagaataaacaccctcttcaggattatatggaacttcggctgaagggagtgttagttgattttggtacaattccattggaaattttatcgactatctccggcaaccttgcttcattggtgcaaaaagctgctcatagaattggttctgggaaagattctcgccgggttccgattgatgtgaaaaatgctttgaatttaagattggctgacctatcacctggttctacaagacttggtgtaaccttttccactggatcatgtgaacttgtcgaaactgtatccagtcaagcagtcaaagaaattttttcacttcttgatgcacccgatgaagaaacatttatggcaaaagttgctgaaatcggcaaacaatcaaccatcaatttaaaaaatatcattaacgagtgtgaaaacaacaacttaaactttgatcttacttgggttggaccatttagtgatgggatgcgctctgtatcaataagctctgatgacattagacgcctcactaatcgtttatctatgacgcgggttacaaagctgccagatgagcatattgccggagaacttgcagttttatctatgtacggaaaactcgaaatagcaactgacactggtaaagtcagggcttcatacccgattgatatgcttgccgacatccaaaataaacacaaagttggagagcgagtaacagtgatcgctgatgttactgaaattcacaacgagaggataggttcctcgcgtcgtaactatatgataaaacatattagttaa

SEQ ID NO: 156782 - DNA, 474 bp, Enterobacter cloacae
atggataagctgtgcttccctcccctactttctccaggatttcatgaccttgatgatggacaaatcaagtcacttttcgtggatgctttcccgaaatccttgagaaggggtatgctatactgtaattacatccagttaatgtcagatcttaggatgattaataggcagtttccatgctttattgaggtttgggttgatggctcatttaccaccgagaagccggagcctgatgacattgatatactactggtgattgattacgtacagttgaactctattccgccaatgtttcatccgcagatagagcgcatcctgaataggaactttatcaaacataactatcacattgatcttttgcttctttataaaaacaatcccgcgagcaattacgatgaagatagaatgcattggcgaggtgttttttgccacgatagagaggacacacccaaggggatagtgaggttgccgttatga

SEQ ID NO: 156783 - DNA, 387 bp, Enterobacter cloacae
atgaaagagaaaactgtacttaatccgttacttgttgaacgcctttctgagctcaacaaacgcggcatgactaaatcagatatggccagggttgctggagtaactcctcaatccgttaatggctggtttaagaaaggcgtaatcagcaaaaaatccgctcttgcagtagctgactctgctggcgtatctgtgccgtggttactgggcgagaatgttgacgaaaatgatgggttaaagcctgacgagcagcgcctactcgaactctatcgtcagttgcccgaagaagagcaacagaacatgctccgcattttcgcaatccgtctcaaggaactagacgagttgtatgagaagtacatgaaaggacggattcggtcgcagggggaataa

SEQ ID NO: 156784 - DNA, 228 bp, Enterobacter cloacae
atgaacggattaacaaaagcaattaagtcagccggaacggcaacaaatctcgcagccatgcttggcattaaacccatgtcggtcagtcgatggaagaaccgctatcagggggtagttccggcagaccgtgtcctgtcaatttacgctgctactggtgtaactccccacgagctacgccccgatctctacccaaacccaacagatggtttaccaaaacaggagccttaa

SEQ ID NO: 156785 - DNA, 870 bp, Enterobacter cloacae
atgacagaaagaataaagataaggcagaataaattgtttgcattattactaattccaattcttgtaagcggctatatacttgtagtcgctaatttatatcattattaccaactgcatcgttatgatggtcaattattatatctaaaagttgcggctcacggaacggtcagtgtcgtcgctgtcgttgctttagcaggcattacgaagtttttgtttcccgactttcatcctatagcgctagtttctgaatctcttaatatcaaaaaaacaatcgatagtcataagactgagacttggttggcgttaatttcatttttttctatcgttgcatcattgatatgggttgcattagtttgggctaaaaatatgtttttagggttcctctgtgagaaagagcaccataaagattccttccatgcaaaaaaactcagggtccttaggcaaacaatttccaattcaacacttgatagcatgcttcttgacgcgatggatagtaaccctaaaaaacccatactattaactttatcatcaagaaaagtttacgttggtattgttaatggaattcaggaaccgacagagagtgaagcgccgaacaattatatatctattttcccaataatgtctggttaccgacataaagatacattatcaataacttttacaaattcctatccatcggaaatctcagttatatcagcagccactaaagattcaaaaaaacttcataaagttttagatatggatatattattaaaatctgatgagatatctcacctttcatggttcgattttgaagtttatgaaaaagtaaatggttcggtcgataatgatactattgatctgagaacagcaaatgaaggtaatgactga

SEQ ID NO: 156786 - DNA, 429 bp, Enterobacter cloacae
atggggaataagaaaactatctatttggctgcaccattgtttaatgaggcggaattatcctacaaccgaacattgaagaagtgcttagaacctgtatttaatgtttacttacctcaagaagatggactattgttaagggatattgtttcagaaagcatttcacctgaaattgctgaggggaaaattttcgaagcagacataatggcaatgaataactctgacattattttagtcgtacttaatggagcacatattgatgaaggtgtagcttttgaattaggatattgctttgccaatggtaaacgctgcgttggtttaaaagaagatgtacgacaggcgttacctactggaaacaatccaatgattagtcgaagttgtgaacgaatcttcgataacaaagactcattattatcttggcttatgccatag

SEQ ID NO: 156787 - DNA, 672 bp, Enterobacter cloacae
atgcctgaaactgattttctgcgcatatcagacattttaggactacccacaaaatataattattatctcgtaggggcaattggcaccggaaaatctacaatagtcagccagtttggtaacttaattacacttgatgaatggttcgatgagagaccaagtgatatggctctttccccagaccatctttcttctacaaaaacaatgacaatagactcgtggactaatgaacagtttggtaagaaaaacaactacttgcaaaataaaaaaataggaatataccttatagatagatcacctttagatcctcttacatttgtggtaaatgttagtgaaaaagaaagagccaagcttatgttagagcaaggaattaggcctggaaaatcacaaatgaaaattgtatctggggaaatcatacatatggttggtgattctaatgagatttggtcacgtttaataacaaaaagaaaagaaagtgactggccccaagaaaaaattcatgaattacaacaaaaaagcttgaagatttacgaacctctcaatccgagaaaaatatactcaacgaacagaaaagaaaatgatgtaattcgtgatgttgcgagaataatattctcatcttcatattcaccatccgacctaaacagacatatggaggatattgcacatggggaataa

SEQ ID NO: 156788 - DNA, 204 bp, Enterobacter cloacae
atgtcaacagaaaaagagattattgtccgtgatagccagcctcgcggtgcgggtaaatctccacctttccatatgcgcattagccctgaactaaaagcgcagcttgaagcagaagcggatcgagatggcaccagccttgctaattggttgaaagaacttgcccgccgtgagctcatcacaagaggcatcgagccaaaaggctga

SEQ ID NO: 156789 - DNA, 483 bp, Enterobacter cloacae
atgcaaaaagacttattcgctggctcatgggttagcgtattctataattctgatatctctaatgttgatatgaattcacaagatttcgttgaaattcctgaaactggtgcattccctcaaactggtatcgagcgtgaagtaattactgttcctaacttcactcacaaatacagtcgcaaactgatcggtcgtggttctgttcctgatatcgacctaactgttaactatattcctggttctattcatgatcagttgttccagttagcagaagacggtaaacgtggtcagttcaaaatcgtttactggatggacgcaactcgtgaagttggtgtggcaactgtatacaacggtttcttgtctactgcgaaccgtaacggtggtgaatctgaacaagtaagtcagacaatgactctgagtgttgatggtggtcctattgcttctgggattatcgataaaacttcctcaggcaccgatacagaataa

SEQ ID NO: 156790 - DNA, 789 bp, Enterobacter cloacae
atggcagtagttaatgctcctggttggattggtgaatctgctgctcaggaaactgggcagcgttggatgaaagaagctggtgctgcattacgcatcggtgttcctttctggatgtcacagatggcaggacaatcaaaagaaatcacgattacactcggacaaaatcatagttatgaccgaaatgatttaattaataaactgcgtgctattggtgcaacaccagcagtcgtggtgatttccggtgatttagtagcacagaacacaggagttccttgtttagagtttcctgcgaatcttcctaacgcatacgttacgcttcgtgttaacgcgacaatctacggtcgtggaggtcaaggtggaactggtggacatggtgatggatatccgggtggtccttgtattctgattagtataggaacaaaacttcgcatcgaaaacaacggagcaatctgtggtggaggtggtggaggtgcgggcgttcgtgttggcggttcaaacgttgtttctgctggttctggtggtcgtcctttcggtcccggaggtatcgctcaaggtcgtgattcgattaacggtaatgctgccacgttagctgctccgggcgctcaacctgctaaaactcgttacggctcgcaaggcggtgctggcggtcaagtcggttctgctggaggaactggtttattcccaggcggtcaaggtcaactttattctcctggtgcagctggtgcagcgttatacggatctgcaccaacttggacgaaactcggtaatatctacgggtcacgtttataa

SEQ ID NO: 156791 - DNA, 960 bp, Enterobacter cloacae
atgattggtgttacagctgtgaaacaagatcttgtcattacagcatataaaccgagcggcgattttgagaataccattatttccgactctggcgacactaactctgtatggaaattcatttcaatgcaccttaatcatattcctataacaagggtcaatggaaatagtcttgagtttatcacagagagagatccaagaattctttttgatagaatggttgcgttgtttgttcaaaaaaacatggcgataccgatgtcgtcgcaagaatttcatttatatttgaattcaaaatttattgaacgagatggtatgtattttctacccgagcaagcagctgaatatgatagaaaaaaatcatccattgggaaattaactcaagcgtcattatttgttaaagacgaagcatcagcaattgattggttacggcaacaattaaaagataaaccgcttattttttcagatataaacccacaatttatgcaacagctaagtagctggagtaaaaatgaggtagtattagatcttcgtgaattgttaaaccaaaacttcttatgctatgacggccaggataaggttccagatcagatccatagttatctatccagcaactggaaagagctgcgcaatctagagaaaaatgatcccaatttaattgccaaggctaaggatcgttggtatgtacctgatcctaataaagctggagacttggaaaaattacgtgaaaaatccttgcttaaagaatttgaagattacaaagataccaagaagaagctgaaagttttccgcatcgaggcagtacgtatcggttttaagaagctatgggaactacaggagtttgcaaccttgatcgctgtcgctgataaattgccaaataacgttttggaggaggacccaatattgctgatgtattatgaccaagcgattacattgagccaacccgatactaatgacgagtggtga

SEQ ID NO: 156792 - DNA, 2799 bp, Enterobacter cloacae
atgtggcagataggagactgggcctggagtcaggcccatcagcaatatgtcaaagtgattgatgttgctggcctatggggtcagcagttttaccgtgtctggttgcagcaacaagatgtagtactcaaggtattagacaccgacctctacaaccaaccagtacagaccatcgtaacggctgatgctttatgctacttggccactgcagccaaaattgccaacgtccagcaggaagatactttactggcaccaatagaatcgaatgtcattcctttgccgcaccagctgaaggcgctcaccaaggcaatgagccaaaaacatgtgcgctatctgtttgctgatgaagtaggtctgggtaaaaccatcgaggctggactggtcatgcgtgaattgaagttgcgcggcctggcaaagcgaattctagtttgtgcacctaaagggttggttagtcagtgggtaagtgaaatgcagacccacttcaacgagtcattccaattgatgctgcccggcgtacaaaaaccgcagaatgaacatgacaatatctggtcacgttatgatcaagttgtctgccctgtcgacagtatcaagcccattgaaagccgcaagggatggtcactcaaacaacttaatgagtacaacaagcttcgttttgatgacctgctggctgcgggttgggaccttatcatcattgatgaagcccatcgtctcggtggtagtaccgaccaggtcgcccgttacaagttaggtcaaggtttggccgaagcaactccctatttattgttattatccgctactccacatcaaggcaaaagtgatgctttccaccgtttgatggcactgctcgatgccgaagcttttccagatgtaagctcgatctcacaagagcgggtccagccatttgtggtacgtactgaaaaacggatcgccatcgatggcgaaggtaagccacttttttgtcctcggcaaacagaaatggttgccgttgcctggcaagcccagcatggattacagcgtcacctctatgaagaggtgactgagtacattaaagaaggctacaaccaagcgcaagccaaacaacaaaatgctattggctttttgatgatactaatgcagcgtttggtgagttctagtagtgcggccatctcacaaacccttgcccgtcggctaaaagtactagaaaataagcgggtagaagaagaattacctttggcgtttgccgatgagtgggcggatctggatggtcaaacccagctagacgaattattagctcagtgccaaacatcgttggagaatgaaaaaaacgaagtgcgccgtttgctagcgttagcggagcaatgtgtaagtgccgaaaatgatgccaaagccgaagccttactcgattggctctaccgcctacagcaagaagagggatatccgtacctgaagatgctagtgtttacagagtttgtgccgacccaagaaatgttggcgcagttctttgttgaacgaggcatcagtgtcgtcagtctcaacggctcaatggatctgtcagagcgtaaaaaagtacaagctgctttcgccagtgatactcgcattctgatttcaactgatgccggcggagaaggtctaaaccttcagttctgccatgtgattgttaattacgatatgccatggaatccgatgcgcatggaacagcgtattggccgcgtcgatcgtatcggccaacagcatatcgttcgcgcactgaactttgtgctcgaagataccgttgagcacagagttcgcgaagtgctcgaagcgaagctacagattatcctcgacgagttcggcgttgataagaccagcgatgtattggattcctctgctgctaatcatctgtttgatgagttgtttatcacatctatcactgatcctgctttaatggatcaggaattagctaaagccctggccaccttaagagacggtgcagtggacaagcggaaacaggatgcactgtttggtggcggagatcccttatctgctgaggactatcgtcaagccttgaaccacccattaccctattgggtacagagcatggttgctagttacttgcgctggcaacgtagtatgcagcatacagctgattttactgacgaaattgatgggagccatactctaacatggccagatggtgaaacatggagtggaataacctttattgggaaaatcgcccagcaacagccaagtttcacgcatcttacgctcgaaaaccccaagataaaaggactgtgtagtcaattacctgtctggagtgaagcacaacctatccccagagttgctgttaagtcactaccagccggagcaaatggttattgggcattatggagtatccgccttgtggctggccatgagcgacgctgccaatatatgccagtctacatcaagcccaacggtcaatattacgcaacagcatctcaaagaatctgggatgcagtctgtagtaatcaattcgaaattttacctcaaaatctcgcaatcgaaccttcttcatgtcagtctatctatacacttatgcataaggtggcgcaagaggaaggaaaaagtatcttcgaaagcatgttgacaaccaatcaaaccgaattagatagtcagtttgaaaaaggtgaatactcatttaatgcaagaagaaaagcaatagaacgagtaggattacctgaggtctgtcaatttcgcttgcgtcaattaagtagtgaatatgctctgtggctccaggacatagataaaagacgtatggtgattcctgacatggttttacacgttattattgaaatcaaaggatga

SEQ ID NO: 156793 - DNA, 294 bp, Enterobacter cloacae
atgttaaacttatatattgattcattactgaacttatcaacagtgttctacggtattccgttgttagtcctttcggcgttaactacggttgttttaggtttcgtggtgttttatccgcttggtaaaatgatgaacactaacgcttataaaagctttccagtgtttcatatgatgcctgtaaacaactatgcctttaagttgattgtaggttttcccgtgagtatggttgtattcttaacgttgggtatcactattctttctttcgtcaacgttctgattaaaatcttcatgtaa

SEQ ID NO: 156794 - DNA, 1149 bp, Enterobacter cloacae
atgaatgaacaatttttagataagtttgatagagctttcattgctgatccaacagaagcattaaaggccgttgacgacatggccacatctctaatgtcagagatagaacagaagaggaaagccggtgttaaagagttagatcccgttatggtaaagctacaggaagaccatgcttatctctccgggctacatgaagaaaagagcgaagagctggcattacatcagcgcctacataagcaagctggcatcgagatagataacccctttaaacagctcacagaagaggctccagccgtctttaatgagtttgatatacaagaagacgttgccccggctccagctcctgtagctccctctcttatgacgaacgacgacatagcaaagttggctaaggcagtaagtgataagcaggctcctgcagctccagtagaaccggaaggtatggacatatcaaagttcaagccagaacctaagccactggatctttcaggacttgatacgttcaccatgcgtaaagcagaagaggcaaaacagaaagctaaaccaaaagtggatactgacgaactggatcgctttagtaatcgctatgcggggaatagttttattgaaaaagtgacaaaaaaactacaggagacattttcagcatcttctcatgctcctgttaactttgtaccagaacatgaaataaaaaccatgtttgggaattcactttcaaaaatagttaataacaccaatagcagaagcatacattttgttgataaatctgttcttaaagaagatgcgcagggattatcaattgctacaaaggatagaaccttagccgcaagaagattaactctaatggctaaagctaaaggatggagcagcattagttttgatggtaatcagcttttccttgaagaagcatatgaagaagcaacaagagcgggtttggtagtaaagccatcatcagaagaacaagccagatttttcaaagaagttcatgaagcgaaaaagttagatagttttatgccttttggcggtatgaaggaaagcaaaaaaaaggatatagataaagatattgaaaatcccggacatagccatgaacaagcccctgttcctgttcaagcccctgtctacaacgcaagaataccaacaagaatgaaataa

SEQ ID NO: 156795 - DNA, 624 bp, Enterobacter cloacae
atgtttgctatgagtgtgtggtgcaggaaaggtggtgtaggcaaaacaaccattagccttaacctttgtggctattttgcttccaaaggccagtcaacaacgttagtagactttgacccacaggggggagctatcacctgtgcggcttttgcggagaagaacggtaaacctctgccgtttgaagtgacccggaaaccaaaggtagcaaccgactttatgatctttgaccatgcacccggagtggatagcggcggtcagttagcgccgttggtattagtaccgactattctcgatgcttccagctattcggctaccctgaaaagcattgatgagctgaaagagatgaacaagccttttatccttgttccgaaccgtgtggaagtccagaaccgggaacagatggagctgttgaagaagctggaagggtattcagagaagttaggctatgaacagccatacatccgtaagcgtgttgcttatcctcgtgcctatggcaacgggatcaccatctttgatgagaaggccgcattaccgaacatcactgatgcccggaacgagtttgctcacctgatcgaaatcatcaaactgaaaatcaaagaacaggctgaagccaaaaagaaatga

SEQ ID NO: 156796 - DNA, 396 bp, Enterobacter cloacae
atgacagatactaagaaagacaaaacagaaaaaaacgctaaaaagggtgcggcgtggctcgataactttgatgattttcagaatgtctcgctggaaacctcttttgctaaagataatggcacatactggagctaccgtacagaaagcttaggtgatattcaggccgggactacgccctatgtccgttctacggtcaaagtcactaagcatgatgatgctcgtttgattaacgtccgtattcctgctgcgcttgaagaaaaactaaaagaagtttcttttgatattccaatccccactcttcttttaatttgtgctgattatttaactgatgaactcattaaagaaaacaaacaaatattagcacttccaaaagaaagcgatgaacggaagatataa

SEQ ID NO: 156797 - DNA, 1977 bp, Enterobacter cloacae
atgttagataaagaaccattgctttctttcaggaaagcacatttaaatgatgaaatacaaatagactttaaaacagcaacaacaaatatagccgtgtttggtggaacaggaacaggtaagacaacgggcgtatgtttccctgctgtttacaatctgattaaaaatcactgttcaggattgatactggacgtgaaaggggattacaccaaattagcacgtcagattaatgaggaaatgaaaagcgataaaatatatattcttggtgttaaagaagattgttccagatttaatttaatatctggtattgaaccggaaaagctaaaagcatttttaaactatggtgttagttcagttcgtggaaacttagataaatattggggttcaaacgggatagaagacaccgttttagtgtatgagttagttaaagagtttgatattaatcctacccttgcagatctctattacctaataactaacccggatgatttacaggcaatgaaaaacaactgttcagaacagatgtcagaaaagataaaaaggcgtatagcttcggatgggttcagtattttcaataacaaaaaagataccgatgaagctaccaaaagagaacaaagatcatggcagttttcagcattaaacagcgttctaagacctttttatgaagacccgtatctaaaccatcatttttgtaataatgatcatacagtttcttatgctgacattatttataaagaaagaaaatcgttagtgctggaagtgcctttttctaaatatgctgtttcatcattgttcattttaaaggtggttaaagcaacattcatagacagtataaaacagcaggatataaaccagcttacagcaaggggatatggtgaagataagtttactttcatgctggtagatgagtatcagcagttccttacagatgataccgatccgtcagtagacgataacaactggttcgacatatcgaggggctacggtcatatcaacattatttcctctcagtctgtggattcactcgatgctaaagcagggcaagcatacacaaatcagctgattggcaactgtatgaacatagttcatcttgctactcatgcggtcaggagtctggagaacatcgctacccttgccggaagtccagaaagggctatacaggctcaggatacgttatcaggacagtcagaggacattgcctttgtctacatcaacaaaagccagcagagccgcacaggggcgcgcgtattggtacatacaggcaaatcacaacataccttcatgaacagattcatctatgcgcctaaaccccatctgcaggagctacccggtatgggctatgtagtgcctgaaaagctaagtgcgttaagcgtcatactggaagcgttaaaagaagataaaaaagaagagaaaacagaaacacaccttttagaagagttaataaatatgaatgatgaacaaaataaatggatttataatctttgtcctacctatacagttcaaaaaagattatgcgtgataacaacaaaaagcttttcagacgggtttaatgatttcaatgtagtattgaataatttaaatataggatttgaagaggttgtggtacatccaattatatataacaacaaaatagatttggatttacttaaagagatactgattgaggataaagaaagtctgtatgttatcgtcagaggtggaggtgatttagaacacttcattcttaatgattttaaggtacaggcattgataagtgaatgtatgtataacattagatactcagaaagtgagttattaatagcagtaggacatgccaccgataaatttgaagatttctttgaaatggttccagatgcgtatgaagcattaacaccgactgatttagcttacaagataaaaggcgatgttattttaaatataagaaaaagaaaatgcggtattatgaccaatgcctgtatcagttataacgctaaaatctaa

SEQ ID NO: 156798 - DNA, 435 bp, Enterobacter cloacae
atgagtctttcaacactgaacaacattcgtaccattagaaaagaagcgcgtgaaatcagctttgagatctttgaagagattttagagaagatgaaacaggttcatgaagaactgttagctgaccagcttgaaatcgaagaaaaacgcgctaagaagctggcactcatggaacagttcagagagatgttagctgccgagggcattgaaggtatcagcatttccgagatcgctgatggtgttgccgctcctgctgccaagaaggggaaaggcgctaaaggtgataagcgtggcgctgttgagcgcaagtatgcttataaagatgaaaacggaaaagaagtgttatggtcgggtcgtggtcgtctgccgaagcctgtcgaagaagctatgaagaaaggcgctaaaaaagaagacttcttgatcaagaaagaagattaa

SEQ ID NO: 156799 - DNA, 243 bp, Enterobacter cloacae
atgactattcaaaaaagtatcagacaaatgaaaaaagaagcatggacattaatagcaatattatatttatcaagtatctcattattaatgttaacagtgaatgtattaccaaaaacaggattaaatagcttttacataattggcggtggtttaatggctttaacttcattgttatcatggaaagaagcatataagttagttaactgtataaatgaagcaaaaggaactaaaaagcctgaataa

SEQ ID NO: 156800 - DNA, 543 bp, Enterobacter cloacae
atgttcaacatgacaaagagaaagaaaaaagggttttcattattagagttattattggttttcgggattatcgcagcgttgatagttggtgtctttatgatctatccaaaaattagttctggtcagaagatagatagcgacataaaaatattaggaactttaaacgcagggataaaaaatctctacgcggggcaagcagattacaccgggttatcagttgacgctgtaatcaaatcaaagattgttccagaagatattgttgatgataacttaatttgggatagctggggcgctaacgttcaaatagaaccatactatgatggtagtttttatatcggttttgaaaacgtttcagttgattcttgtcctaagtttgtgtcgcaagctggagcaagttttttcaaaatagtagtaggttcaagagaagtaaagaacacagaagcaaatcaggatcttgatatggcaactttagcaaatgcgtgtatcagtaatgacgatgggtacggtggcagaccaataacagtatatttttacgacaaataa

SEQ ID NO: 156801 - DNA, 558 bp, Enterobacter cloacae
atgataaacagctttagattattaaaaaaaagaaagagtaaaaaagggttttcacttttagaaatattattagttcttggtgctatcgcagcattgatagtagcggcttttatgatattccctaaagttcaggcttcacagcgtatcgacagagagagcaggaacctaacagctatacaagctggggttaaatcgctttacggtggcagagctaagatctcaagcataaacactgatagcttcattgcgtctaagaacgccccggagaacatgattcaggacggaaagcttatcaatgaatggaaaggcaacgtacaggttgagtattcagggaaccacggcaaatacaacattatctatgatgctgttcccgcttctgactgttcaaagttgatagcggctgtatcgggtaatttcgtaagcatagacgtttacaacgggaacggcggtacgcaggtcaagaaccttgaggaagggaagaacattgatatagcggcaacatcagcagcgtgtttttcagaagataactccaccattatttttgcgtcaataatataa

SEQ ID NO: 156802 - DNA, 312 bp, Enterobacter cloacae
atgataaacaaaatcaaaaaaagcttaaataaaataacagtaggtgaaatatttatagcaggtttattaatgctacctatgacactgatattccctgaaaacattctatgtggatacatgtcggcattaggtgcagcaattacattcgcaacaataacttttaaattagcattgttcttcatttggtttattcatctcacatttttaatgagcatgagaggaacaacagagagagcagaaaaatatatatctgacttgaaatctgaacacttaaaaagtggaaaggaaatttttttagggaggtcgaaatga

SEQ ID NO: 156803 - DNA, 159 bp, Enterobacter cloacae
atgataaataaagtaaaaacacaaaataaaattctaacaagagcggatttaataccagatcccgcattgattaagccactaaagaaacttacagataaagatgtgaaggaagctttaagcaaaaaggtttcagaaatgaaaaatatatatgatttttaa

SEQ ID NO: 156804 - DNA, 294 bp, Enterobacter cloacae
atgaaaaaagacataacaagagagttgaaacgtttgggtttacacaacggctatgagttcatagcaaaagcagcattgatagaagggcagagagcagaggcaatattagcactgatagaacgtttaggaagacgcaaaatcattcctgatgctgttcagcatggttttaatcaggttaaggctacatatcgcttatcgggctacatcaatcaggcactgactgttatagcgtttaaagcttatgtgaacgaaccaaaagagaactttaaagcagatatacactggagtatttaa

SEQ ID NO: 156805 - DNA, 1752 bp, Enterobacter cloacae
gtgaaaaacgcgcctaatgtgaaaaccctcccgcgcgacaaaatggaggaggccatcatctttgctggaacgggagcatggaaagccgctcaggattaccagaaagggaagggcgagcatggagacgatgttccgcctgtggttctggatcacacccaactggcggaattgccccacctgcgcattgttgataaaggccgtcggtttgcccgtgtctgtcaggccggacttatcgagcaaaaccaaatcagcatgattgcaaataagctgtgtgaggctggcgttaccaatgctgagtttatcaacgaaaaaggtgagaaagaggactggacgccattaatgaagcgtttggaagacgagcccctaatggtgactacgaggggtagtgctacgccagcgcttaaccagatgggagccagccagcgcggggaggttctgcttgctcattacgatggcaatctggcgatccatgctgattctgacacggttcatcattacaacggcgtggtgtgggttccgctttcggataaagagctacagcgggaaatggcgcaaatttttattgatgccgaagtcgcctattcgcagaacgcgattaaatccgctgtcgatacaatgaagctgggcctcccggtaatgggtaacacagcccgtaacctgattggtttcagcaacggggtttttgatacccggttaggccaatttcgaccgcatgataaaaaggactggcttatcgttgcgagcgaattgccattcagcgaaccagcagaaggtgaaactctggcaacccatgcgcctaacttctggaaatggctccgccgctctgtggcggataatgaccgaaaagcagaccgcgtactgtctgcgctgtttatggtgctggcgaaccggtacgactggcagctgtttcttgaggtaacggggccgggcggaagtggtaaaagtgttatggctgagatctgcacgatgctggcgggcaaggccaacaccgtatcggcgagcatggcggcgctggagaacccaagggaaagggcgctggtagtgggctattcgctgattatcatgccggatatgacccggtacgctggcgacggcgcagggattaaagctatcactggcggggataaggtggctatcgacccaaaacacaaagcgccatattcaacccgtatcccggcggtggtgcttgccgtcaataacaatgccatgtcgttcagcgacagaagcggggggatttccagacggcgggtgattttcaacttctccgaagtggtaccggaaaacgaacgcgatcctatgctggcagagaagattgaaggtgagctggctgtaatcattcgccacctgctcactcgcttttccaggcaggacgaagccaaacagcttttgcatgagcagcagaaatcagaagaagcgctggccatcaaacgtgaaggggattcactggtggacttttgcggctacctgatggcttcggtggtttgtgatggaatgctgattggtaatgccgagatcgtgccattcagcccgcgccgttatctgtatcacgcttatctggcttacatgcgggccaatggtcttagcaagcctgtatcgttaatgcggttcggtacggatatgccaggcgcaatggctgaatatggcaaggagtaccagaagcgcaaaactaaacatggcataagatcgaacgtcaccctgcatgatgattcagaagactggatgccaatgtgtaccgatacaacaaaagaataa

SEQ ID NO: 156806 - DNA, 603 bp, Enterobacter cloacae
atggcaaaggtaagagctttattagacgacacagaagaagaaaagatcaaatcagcaatggaagttgatgatttgaatgaagtaaatatcaacatcacgaagaagaaaaaaacagggtttttagggacttactcaatagttttccatgattcagtaatcgctttatcaaaaatgaatctaaaaccaaatgcttataaaatcgttatttatttgtttggtattattgagatgggaaatattttagttggtttttcacaaaagaagatcgcaactgatttgggtttacagcaatctaacgtatccagagcttttaaagaactttttgaaaaaggtattttgatcaaagatggagaggatggtcatatttatttgaactccaatctttgtacgatgggcgttccgaaaaactttgataagaaaagaatggaaagcttaaagaagtctaatgttgctaatgaacattttgaaaatcaaataaacttattccaaccgacaaatacaacaaagatcgcagcatctaataaaactaaaaataataagaaagaaaatattttagatttcccactcgaaaaacaagattgggttgatgttgacgacaactaa

SEQ ID NO: 156807 - DNA, 1074 bp, Enterobacter cloacae
atggctcaggagtgggctgataactctgtggatgcgtctggaaggaaattgcggaaagatggctcctgcctcttggccggagtcatatctttccctgatggccgttctgaggacgaatggagagcgtttagagacgattccgtggattatttgaaggataagtatggagacagcttaaaatcggttgtagagcatcgagacgaaagccatctccatatacatttttacgctgtcccggaaatcggccaaaagtttgatgaaatacacgacggcaaaaaagctattatggaagctaaagaggaaaaccctaaaatacttaaaggagaacaaaataaagtttatattgaagccatgaaagactttcagaaagacttttatgaagaggtggcgatcaatcatggaatgacaaagaccgggcctaaacgcgagcgtttaacccgtgatgagtggaaagagagaaaagaatacgctttacagcaatctgaagagattaaaaatatttcattgctgaaagaagaagctattcagcaagggaaaaaggaaggttttgatttctctgtggagcaatcaaaaggttggggatttgttgataaagtagctgcaaaatatacatatcacaaagatggtttccaaaaaaaaatagatcagaaagatgaagattttcaggctctgaaagaagatcgagataatattaacaaaaaatataagacttataaaaaagagtattacgaacaaaaaaggcaaacggatttagctctggaagagaaaaaagaaaaatccaaagagatctactccctgactaatgaaaatagagatttgcaaataaaaaacgatcaacttgacgttgaaaatatggctctcaaagaagatataagagagctaaataaatataaaataacaagtgagaaaatgcaggcgcgttttcctgacgaatatcagaaaatggaatctgcggtaaacaagccgaggcctaaaggggaaagtagtctcgatcatgaaaaccaaacgcaacagcaaacacagcaaccagagctgcaggaagaacaacacaacagaccaagaccaagattctaa

SEQ ID NO: 156808 - DNA, 258 bp, Enterobacter cloacae
atgaaactgaacaactacctaagcaagttctttgatgttgtagcggatgaagtggagaacgatgaaggtgaaaaaatcccttctctgtggctctatgagaaaggggaagactctgaacctgtagttatcctgaaacagacagaaaagcccggagaatggcgcgtaggagatatttactcagctctaacgaatgatgcccggctatccgaagaacagatcaagaaactggcaaaagctggaatgatcaccaaaaactaa

SEQ ID NO: 156809 - DNA, 258 bp, Enterobacter cloacae; identical to SEQ ID NO: 156808

SEQ ID NO: 156810 - DNA, 327 bp, Enterobacter cloacae
atgagtatattagagtttttatcaacagctatagttttcggtattgttgctttatttataacattcgtagtaaaaaacataaggagaagcattaagtttaaattatatttcaaatccttaataaaggttggtattacattgatagcactgatgttcgtttccggtgtaatatccaaagacattaacatatttattagtttgatgtttgtttattatttaaaggttttatatttctcaacattgctttcctttgtttattttgttggaagaaatatattcacgagtataagaacaaataaaaagaatatgaaaccaaatgcaatataa

SEQ ID NO: 156811 - DNA, 294 bp, Enterobacter cloacae
atgaaaaagcttctggcggtatgcgtgatcgggctggcctccttccttgctggctgtggtgatgatgggatttatggtagctacgtgaacaaacagtatggggtaaggctcgacgttcagaaggatgttatcaagtttcgggatggcgttttcaccgttaaagaatgggatgaaagcaaaaagcctgtatacattgcgagaacacagaacaaagatttgggatcatggacatttaaaatcgagaaggtaaaacagggcgttgtttatcagggcgcagtatttgaaaaagattaa

SEQ ID NO: 156812 - DNA, 303 bp, Enterobacter cloacae
atgttttttccatattctgaaaaacagaaacaagcctttctgactcgtttcggtcagaaagtaaaaattaatcaaactgaaagattagctatcgttgaaacaaagattatcaacgagaacagtcaagtaagcgaaacaatctatatcacgaccgatgcgctctggatcaatcaggacgacactgtagaactttttgataatttctatcgtgttgcttatatcgtaagggatgactctggtctcgttgatggatatctgtcattaacaagcgataacgaaagacgagaaggtaaatatgtctaa

SEQ ID NO: 156813 - DNA, 363 bp, Enterobacter cloacae
atgaaaaaaataagttttaaaaatacattaaaagaaatagtagctaagaagtatgaatatgaaacagaggcaatgcattatcttatcagaaaaatgaagtctcttggttataacatgaatgctaaagaccctgttattgctgcctttatattagatatgaaaaacattgagcttaacagaatcagaacatcagataaaaggtttagagcacatcaaataaaaaatgaacttgggttattatacaatcatataaaaatactaaataaaacattaccaacaagaactattgaaatagatgaagagtatataaatgatactgaacgcaaaagatcaatatcgttatggaatctaaccaaagtataa

SEQ ID NO: 156814 - DNA, 291 bp, Enterobacter cloacae
atgcgtaaagagctttttgatgatctgattgcttctgctaaagaagctgtagaaatccataagggtttacgtgagccagcgcgggttacccgttttgaacgtccagatgtgaaagctattcgggctaaggttcatatgaaacaagatgattttgccagtctgatcggggttagctcttctcttgttcagtcatgggaacaggggttaagaactccagcaggtgcagcgttaaagctgttgcgtgtcatcgagcgtaaacctgaatttgttcaggaactacgtgaagcataa

SEQ ID NO: 156815 - DNA, 654 bp, Enterobacter cloacae
atgttatcgttaaatttagcgtttgaacgtttggataaaataagtaaatactttgtccttaactcccaaaaagatttgatttttcgagatgcttatacatttataatggagactgtttatcactctgttaaaagcaaaataacaaatttagatgctgttagtaatggtggtcaactcattgaaatgaaagcaccttttaacttcatcctatgtagaacagggcgtttcattgttttggataactattatacaatcttaccaaaaaaagatcgggatgattgggaaaggcatatacataatataagcatagaagaattcatttatagcttcgacaataatacaacaaggtatttattacttgattgtaaatattactttgaccagttcaatattacacgtctggattttaatgttatttcaatggtatataacactttttatgaggttttccagttagacagattttatgatccagtagtaaacagaataacagccgatgagattgaaaagcatataaacggcctacagtttgataaatcatcttatgatgaagttatcaggaagaaaacatatacctactttctcaggcttctcaggttcattgaggggcatgaagagacatggtatttaccaatgaagttagaatacaaataa

SEQ ID NO: 156816 - DNA, 1023 bp, Enterobacter cloacae
atgaagacttttttaaagctcatagctttactttctttaatgtgttgccattatctatatgcatcgtgtcagctattatcaggtaacacggttgaatactctgtaaatcttagtagcaacaatttcacactggatgtgactaattctccagtaggtactttgctttatacatatggtggaatgactatttccaataatgctacatgggacatcaattgcattgggaatgaaccaagtggatataaaagcattggtggatcacgaattggaccggcatataatagtaagcctggtgatgtttttagcatctcaggtctcccaggtataggctatagtttccaaatgggtgagcaagatggaattgattttgattctttcttttatgcatatcctaatgcatctccatttagtggtgaaaggacatttagcgcagaaagcaaaaaacctacactctatttttggagaatccctgattcatcaggacttccaccaccgggaaaatactgccttaatagttatcttggcgatatttatctagatagtgtaaacgcagtcaggtttatcgttagtggattatgtataactgttaaggcaccaacttgtactgtaatggatattagtaaaaacattaccgtaaacttggggtctcataataaatcctcatttactggagtaggtactacaaccactgaagttcctttcacaattaatttatcaaattgtcagagcgtaggatccgttattatgcaattcaatgccacggctgacaccaatgctacaagcggcaatcaaattatccagcttgacaattcgccaagttcagcaactggaattggcattcaaatattagatggtaataatactccagtaacattaaataattcttctcaaatctggtcgggcagtaaaggtagtcaaaactcttacagttttcaatattatgccagatatattcaaactctctcttccgtaagtgctggagaagccaatgctgtagctacatatgtattaacttataactaa

SEQ ID NO: 156817 - DNA, 621 bp, Enterobacter cloacae
atgaggcatgactattcttatctgaattcgagtgttagtaccggagatcatcagcaacagttttcaattggtgcttcaggtgcttttatagcgactaacgatggattctttgccacccctgaattaggagatacttttgcaattatcgaagcaccacatgcaggcggtgcaacaatttcaaatcaggctggacaaccagttagtgctaatggttatgctgtagttccttatcttaatccctatacacagaactggatagatcttgatcctaacggtgcaggtgataatgttgaaatagtttcaagcagtacgactgtagtacctgatgcaggtgccgcggtcaaggttaaatttaaaaccaaacaaggttatccattatttctaaatgtaattatgaaaaaaggatatgcacctcctttaggttctgaagtatttgatgaacataatgaattgattggttacatcgggcagggcggtctattgtatgccagagtttcaggtagagaaggagtgctaaaagtaatgtacgatgtcaacaaaacaaaagaatgcaaactgcattatacagtcaataacaaaatgtcaaccctgaacgctctcaaaaacactaaatgtatttag

SEQ ID NO: 156818 - DNA, 246 bp, Enterobacter cloacae
atgcttatttgcatttccgactgtatatatttcgacatggggttgcgttatgcaattattcaaaacaattattgtgggaatgaaattaataaaatcgtaagttataccaataatgtaataattagtgattttcctaaatattttcattctacaaaaaattttggacaccatcttagttatatattaatttattattcacagagccactttgaggttttgggtaatggtgccaacttactgatttag

SEQ ID NO: 156819 - DNA, 567 bp, Enterobacter cloacae
  misc_feature (98)..(107): n is a, c, g, or t
atgtataaatcaatcatggggatggttacgattggaaccgtcattttaatgagttcagttgcagcgcatgcagcggatggtcaagtttcttttaatgnnnnnnnnnnagaaaactcatgtcaggtagttcaaaagaataaagtggttactttaccaacagttcaacgctcagctttggatgccgctggggctacagcaggtgtcgtaccattcacaatcgatctcactggttgtactgctggttcgaacgtttcagtctactttgaaaaagatagcgttgtctcaagtgatggtagattgctcaacaatgtagatacaagtgggggcgatacagcagcaggcaatgtagaagttgagttgatgaataataacttcggttttatcaatctagcaacacagccagcaattaacactgatggtaccgttagcggaagtgccgtaccagtatctactgcagatagcagtggggatgcaagcttaccattttatgcacgttattacgctaccggagcatcgaccgcaggtaaagttaatacttacgttaacttcacagtagtgtatccataa

SEQ ID NO: 156820 - DNA, 489 bp, Enterobacter cloacae
atgaatagcattaatgaattattattaatttacggttcaaatataacaaaaatcaaagaacttgttttagcaggggctaatgttaactacgtttcgcccgaaggtttaacgcctttatcctgtgctgaatctgttgaagtagctcagtttcttcttagccgtggcgctgatgtgaacgctaccaatgaagacgggaaaacagccttgttcagcgttagcaacgttgatacatgccgcttcctgatagaaaacggcgcaagggtaaatcatgttaacaacaaacatgaaacagccttgttctatacaacggatatgaaaaaaatcagattacttgttgaagcaggatgtgatccactggtaagaagttatgatggtaagcgccattatgatttgttagcgcataatcagaaagtgagttttattaacttcttggctaaccgaaaaaagaaaatggaaactgttaactcacctttagctcttgcattttaa

SEQ ID NO: 156821 - DNA, 303 bp, Enterobacter cloacae
atgaaaaagaaaaccatgattgaagaaatgagagaaagagcaaataaactttcaaatggtgaagccctcattttattagaccatattttaaaaagagaagggcaagaggcaatgatgagtatcttcatgaatgaaatgcctcaaatcaaaaacaggataatttatggcaacttcaatcttgaaggttgtagaaatatcaacactcagttagctaatgagctgatagcttatatagagcgtgaaaaactcatggtaatactggaatctaatctaaaagaaagtgccataaagaaacgtttataa

SEQ ID NO: 156822 - DNA, 252 bp, Enterobacter cloacae
atgaaaatttctttcatgggatatcctctctgtaatattctttatttagttaagccatccacgcttagttttattctgacgacgaacaggaggacgagccttaacacgctgtggcttgttttcttgttcttctttatgttcgtattcaacatcgtcaataacttcagtagcatcgtcctgttcgtttttggctatctcttttgcttgcatcttgcgccattcatgccatttgattttttcaagcacttgtaa

SEQ ID NO: 156823 - DNA, 141 bp, Enterobacter cloacae
atgtaccgggtaaaacagctgttcgggggttcactgacgctgcgtgactacgatggtcaggttgcggaggctatggccctggtacgagcgctgaacaaaatgacgaaagcaggtatgcctgaaatcgtgcgtattgcctga

SEQ ID NO: 156824 - DNA, 357 bp, Enterobacter cloacae; identical to SEQ ID NO: 129519

SEQ ID NO: 156825 - DNA, 213 bp, Enterobacter cloacae
atgattaacgcccgcagcggtacggtaatcccaaatacgaatcttatgcaggagatacttagcgagccaccctttcagacctttgttcaggccggattcccgcagatactggtgctggaaatcccacgcgtaacggataggagaatggacatacgacacatgaatctggtcagggccagtgatcacccctttggaaacagcatgactgcttga

SEQ ID NO: 156826 - DNA, 450 bp, Enterobacter cloacae
atgactattctgtccactctctctgacgcatcccacgcgagctttaccgaacagcttatcgccttacccctcccggcctctgccgatctttttgacgtggtggatctctgcgctgcgtttgccagcgcgttggtggaaaccgatgaaatgagcgagcgtaacgcactttgcgggcgtttgctgcatgcccttggtgagctggagcgactgtgcgatgacgatttgccgccgcagctgattgagcaactcattgtccgtgacgccacgccgtcgtgcatgccggacggctggcaggacacgcttacgccggttcactatgcacaggcactggcacaggcaattctgggaaataccctgccgcaggaggtgaacaacatgttgacgggattactgcacgacctggtgttcctgctggctgagttcgtgaaggaaccttacctgcacgcttaa

SEQ ID NO: 156827 - DNA, 1503 bp, Enterobacter cloacae
atggcacaggtcattaataccaacgcactgagcctgatggctcagaataacctgaacaaatcccagaccgatctcggcaccgccattcagcgtctctcttccggtaagcgtattaacagcgcaaaagacgatgcagcaggtctggcgatctctaaccgcttcacctcttctattcgcggtatgacccaagcggcgcgtaacgccaacgacggtatctccctggcgcagaccaccgaaggtgcgctggaagaagtgaccgaaaacatgcagcgtatccgcgaactgaccgtacaggcaaaaaacggcaccaactcccagagcgatctggactccatcaagaaagaaatcggcacccgtctggaagagatcggtcgtgtggcagaagtgactaatttcaacggcgtgaacgtgtttgacggctcccgtgaagagatcaccatccagatcggtgataaagattcagacaccatcaacatcaaactgaacaagctggacctggaaactttgggcctggataccttcatggatgactttgcctctatcggcgttaaagtgggcagcaccagtcagtatgatcaggctgcagttgtgaaaggtgacggcgatagcacaggcattgaagcgactgttggtgccgacacgctgacgtgggaaattaaccaggcaggggattcagcagtcgttaagacggcaatcggcgcggccaatgctgccgatgttgaattccgtctgaatgaaaaaacgggtgaagtctttgcttatgatacggttaaggacaaactcttcaagattgacaccgataaggtaaccttcaaaaaagccggtacggcgccagatgtccacgcagaaatcagtaagatcacggcggctgcagttactgaggttaacgaggccgataaagatatgctgctgaacggtaaaactgatgtggcaaacatgaagcgcctcgacgtgggcgataccgtaacgggtgccactacggatatccctctcaccaaagaaattatggaagacatctccacctcgctgttcggtggagacatggcaacttcgaaaatgaaaattttcgccgctgacagttctgcgcctgccggtacctactatgcgatggataaagatggtgcggttaaaaccttcacgctggctgccgatggttcagtagccacccaagcagaggctcgtttcggcgacgctgaagctatccagcagggagcgggacagctggctgcggagaagctgctggacaataccgataaagcaatgactgtcgtttctgacttccgtgccgacctgggtgccgttcagaaccgcttcagctccatcattgcgaacctgaacaccaacatcatcaacaccaccgaagcgcgctcccgtattcaggacgccgacttctccgttgaagtgtccgccatgagccgcgcgaacatcctgcagcaggcaggtgtgtccgtactggcccaggccaaccaggttccgcagaacgtgctgtctctgctgcgttaa

SEQ ID NO: 156828 - DNA, 1485 bp, Enterobacter cloacae
atggcttcaaccaatttcttaggtatcggctccgggatgccgttcgatcagtggctggcggacgagcgtaaggggctgtccatgcagctcaacccttatctgcaaaagcagagcagctacaacggacaaatctccgcctgggggtctatctcgagctcgctgagcacgctgaaagataatctcagtaagctggaagacgagggatttaatggcgtaagcgtgagcgacaacaaaacgttcaaggcgacggcggggaaaggggcgtttcctaacagctactccattgcagtcaaacagctggcgaaagcgcatcagcttgccattgagaatgactcccgtgataaacccattggcagtggtggtgcggaaataaccattacgctgaaagagggtgaaaagccgctggagctgcggttagcaaatggtgaaacctcgctcgatcagattgccaaaaagatcaacgaggcgaaaggtgatgtggttgcggaagtcatgaccattgaggacgggaagcataagctggtgctcacctccaaaaaaacaggcgatgacggggaaatgaccgttaacgtgtcgaagaatagcgaactggaaaagaggtttactaccgctgcagctaatccagaaacggagccgcaacaggccatcatttcactgaacgggaaggacgacgttaagcgcagttcgaataccatcacggatttaatccccaatgtgacgcttgaattgaaggaagtgtcggagagcgaacctgatccctctgggaaacccatctataaagaagaatccctcaccatcaccgaagatacctcaaaggtaaaaacgttgattgaggagttcgttaagaactacaacagctacctcagcaccgtggccagcgcaaccaaatataccccaccggatcgcgacagcaattctgatcaactggctcagcccgatcccacgaacggcgcgctgttttctgatggctcactgcgccgtctgaccacccagcttaaggccaccgtcaccggcagctacccggaggtaggagacgtcattcagacgttgggcaaaatcggtatcaccgtaacgtttgatggcaaaacgggggatgagcgcaccggcacgctgggaacgctcactatcgataacaaaaaactcgatgccgcactgaaggataatctcaaagaggttgaagccctgtttctcggtaaaggggaggccgagggaataaaagatcgcatggaggggattttcgatacctatctcggcgataaagacagcataaagaaaacggaaggggtgattgaaacctcccttgaatctctgcgtgagcaggaaaagcggattaagaaacaaattacggcggtcgaaaaacgtatcgaagagaccatgctacgccgggaaaaagagtatcagcgcatcgataagtacctgagcgacatgaaacagattgagaaccggctgacgacgtcgctgagtcagcttgccgcgagtatgtaa

SEQ ID NO: 156829 - DNA, 321 bp, Enterobacter cloacae
atggataacaacgtgattgcgctgattgaagaactgctgcttagcaacaccaaactgcaaaagcaggccgatgctggcgagtgggatgtgtttcttgatgaatctgtggcctacagtatgggaatgcgcacgttgtgcgacatcgatttgacccagttggcacagcacaacaaaccgcaggtgagaacccagctggctgcgctgctggagaacgatgctatcctgacacgcgtcatccaggggcgtatggccaccatccgcaccgaactctccgccatgcgcaaatccaatacgatgcaaaaagcctacacggcggtttaa

SEQ ID NO: 156830 - DNA, 705 bp, Enterobacter cloacae
atggcggtctcttcgattaacaacaacagcggtacgggcggtaccggtacgggcaacagcgcggcggacttgtcgaatcagtttatgacgatgctggtggcgcagatgaaaaaccaggatcccaccaacccgatggacaacaaccagctcaccacgcagctggcgcagttcaacatggcggcaggggtcgagaacctcaacaaatcggtagcgggcgtgcaggcgatgatgatcaatctcagcagcatgagcgcctcctcctggatagggcgcagcgtgctgattgagggagatccgaaagtctccttcggtaattctgaaatcggtatccatcaggtcggtgtagagcctgaggcctcggacgacttccagttcgcgctggtaggcgatgccgcgaccgtcaccgtgacgctggaagattctgagggcaatgcgtacaccgcagagattaagaacgtgaagtcggggatgaacaaattcaatctcgacgatctggaaaacttcaagccggagccgggcccgccgcgcgatcgcgaatacaccctctcttttgacgccagcaacccggaaggtgagaagccgcaaatcttcgggctggttcaggagcaggtgcaaggggtcaccatgagcgaaaccgggccgatcctgcatctgctcaatcacgatccgattgacctgagtcaggtgtttgttgttcaaaaatag

SEQ ID NO: 156831 - DNA, 1197 bp, Enterobacter cloacae
atgggtttttcacaaggtcttagcggcctcagcgccgcggcaaaagcacttgatgtggtgggtaacaacatcgccaactcgcagacagtcggttttaaagcgggttccgtctccttctccgatatttttgccggttcggtggggatgggggtgcaggtggggggcgtgagccagaactttactcagggtggtcctgggatgggcggttctgctctggatatgatgatcaatggccggggctttttccgcatgacggatgaagcgggcagcgttttctacgggcgtaatggcgagttcaccgagaacgaaaacggcgccattattaataaagtgaacggcatgtttttaaccggctatcaggccattaacggggtcattaacccgggttcccaggtggggccgatccgcattccgaaggacgatatgccgccagtggcctcgactacagggtcggtgaatggcaacctgaagtcggatgacaagatcattcctgggacgcctggttttgaccctaccgataaagagacctataaccatatcagtgaagtgacggctaccgacagcctgggtaataagcacacgattaagatgtactacgtgcataccggtgaaggtaagtgggacgtgtatgcggaagactccactgcgccagacggagcaatgactcctgtgccaattgagttcaaccccgatggctcgatgaaaacgccgacaacattgaccgttaaaggtaaggagtacaacggttctaacgcgcttgaagtggatatcgatcttagcgccctcacccaaaacgccggcgatactcaggtgatgctgggtgaaattgacggccaggcaccgggcaaattcaacagctaccaggtcagcgacaccggtgaagtcatcgccatctacagcaacggcaaacgtcagaccgtggcgcaggtagtactggcagactttgccaacgtgggtggtctggcgcagcagggtaacaacctgtgggcggagaccgtgcagtccggccagccgtttttcggcacctcgggttctggcagcttcggtagcatgaagggcggtatgctggaatcctccaacgtcaacctcggggacgagatggtcaacatgatcgtctaccagcgcaactaccagtccaactcacaaaccatcaaaacccagtctgaagttctgcagacgctggttaacctgcgttaa

SEQ ID NO: 156832 - DNA, 1635 bp, Enterobacter cloacae
atgaataatctttataacttagcgagaaacggcctgagcgtcgcgcaggccgcattacgggtgacaggtgacaacctgaccaacggcatgtccgcgggctacagccgccgtaatttgatcattggtgaaagtggcggcatgtcgacggggcagggctttttcggctatggggcaaaagctgtcggcgttgaacgtgcgtacgatgccttcgccaataaccagctgcgcggctcgctgtcgagctggtctgcgttaaacgggcgcatggagcagctgtcggatatcgacaacatgcttgccgatgaatccgataacgtgtcggtatccatgaacgatatgttcaaagccatggcgacactaagtggggacccgtctgacggccccgctcgtgcggcggtgtataactcgctcggcacgctgagcaaccgttataacgccagcgccaagcgtctgaccgggctggaaaagagcaccaacacgcagattgagcgcagtgcgaaagatatcaacaccgcgactcagcagctagccgagatcaacaggcagctggaacgcgcccagggtaacggcgcgccgcctgccgaccttctcgatcagcgcgacatgctgctggaagagctgagcgcgcaaatggggatcaccgttaacgaggaccccaattccggacgcgttgatgtgacgctgtcggatggacgtccgctggtttcgggtaccaccgcctctaaactgcaaacctctccatcggatgccgatcccaataaaattatcgtctcctacgtggatgccagcggtaacgccacgccgcttgatgaaagcagcataacgaaagggcgtttgggcgggctgttcaaattccgtaatgaagacctgacggtagcgcgccaggagctggatcagatcgcctttatgatggcgcatcgtatgaatgagcagaaccgcgcgggctttaagccggatggaacgccgggtgaagatctcttctcactgccggatatcaaagccattgcgaatgcgaaaaaccagggccaggatcgcttagagcagataacggtaactgactataaaaaggtgaaatcggaagattacaccatcacctttaaggctcccgattgggaagtgaccggggcagacgggcgaagtgtggtgactgggcctggtcccacactcaattttgacggcattgaaattacgctgccgaatccctctactgccgttgctggggacacattcaccttgaaccccatggcaggtgccgcagaaggcctggcacgtaagattaccagtgcggaagaatttgccgctgctggtgataaattggcagagcctggcgataacgacaaccttcaaaagatgctggagattcagaacgaaaagctgatcggcaaaaacaccctgagtgaagcttatgccagcctggtcggtaccatcggcgatcgcgcacgagtggcgaaatctgacgcggccagcgcggaaaccgatttaagaagcaaatatgaaataaagcaagagatctcgggcgtgacgatggacgaggagtacatcaacctcgatatgtttaagcagtattacaatgccaatgcgcagctcttacaaaccgcgaacgccatgtttgacgcgctgttgtcgatcagataa

SEQ ID NO: 156833 - DNA, 894 bp, Enterobacter cloacae
atgcgattaagtacgctttatatgtacaagcaaagcgctgagtcgatggcaaagcgcatgagccagagtaatgatgcttacatgcggatgtctgccgggaaaaccttattaaaggcctctgacgatccggctgcggcgaccgaagcggtcaaacaacaggatgcgctggcacaactggagctttatagcggtgtgcgtactcgcgtacgtaattcactggaatatcaggatcatattttgagtggtgcaggcgacctgttaaccaccactctgaaagagaaacttgttgctgcaaatagtgatgcctactcggacgaagaccgccgggcgcttggcgaagagatcaaaggtatccgtgaaaatctgctggatttagcgaacagccgtgacagcagtggccgctatattttctccggctataaaacagataccccagcctttgatgaggttggcaactaccggggtgggaatgaggtgcgtaagcagaccgttgcggatggcgcggaaatgcaaaccagccatctcggtgatgaagtcttcggtgatattttcatggtgttaaatgatgcagtggcggcactaatcgcggaccctatcgataaaaacgcactggacgccgcgcttaaagctgccagtcaggcggtggatgaaggcattgaccgtctgggcaaggtgcaggccgagctggggaccaacatgcagcaaattgccgccctggactcaaccggtgccgtgctgattaacgacaccatcattaaagtccaggatgcgattgggtctgataccggcatgctggtctccatggtagctgaatcgcagatgtctgagcttgcctttaatgcctcaatgtacgtctacaaaaatatgcagaagatgagtctgtttaatatgtga

SEQ ID NO: 156834 - DNA, 1626 bp, Enterobacter cloacae
atgttaaagaaacttaaaatctacagcacagtcacgcttattatcggactgtttgccgtcatgctgttcggcgttacggcctattccgtttataacgccgtggcgaacaacagcaattttaaaagtattgtcgtcgccgctgaaaataacgatcagatgcgcgatgccgcctataacatcagcgcagtcatggcgaatacgaacggcctgatgctgcaggcggcgctgggtaatccggtatcggagaacgtggcgaagcacaccctgaacgtggtgaaaatggcccgccgcaatatggatgactttatgtcctcgccgtttaataccccggaagaggagcgtctggccgccgaggttaatgcggcgtttaacgcggtctataacgtcgcggaagtgaagctgggttatctgcataatccgacgggctataccggttctctggaacaggatatggagctgcgtaccaccctgcgtaataaggttgagcaatataccgatgccagcgcccgcgtcagcgaagggtatattcttgcttccgaacgcggctacaagattatggtgggcgtgggtcttgtggtcgtgttgctggccattggactgctgttcgtgatccgcttctggctgcgccagactctggttcagcgcatggcaatgacggtgggcgtactgaagcgtatttccggcggtgacctgagtaaagcgattgaggccggcagtgagaatgaaatcggcaacatgcttaacgagatggagaagatgcgtacttccctggcggaaaccgtgtccgggattcgtgagagcgtgttacgcatccacaccaacgcccaggagattgcccacggcaataacgatctctcctcccgtacggaagagcaggcggccgcgttgcaggagacggcggccagcatggagcagatcaaaaccaccgtacgtcagaatgctgacaacgcccatgcggcgcgtgaactggcggaaagcgccagcaccaatgcccataacggcggggaagtgatgcagagcctggaacagatcatggctcagatcaccaccagctcgcgccagattgccgatatcaacggtgtgatcgacagcattgccaatcagaccaacatcctggccctgaacgcggctgtagaagcggcgcgtgccggagagcagggacgtggctttgcggttgttgccgaagaagtgcgtaacctggcaaaacgcagcgccgatgcggccaaagagatcaaccagctgatcaataccagcgtgaacaatatcgatatcggttcacgtcaggtggggcaggccagcacggtgatgcaggagattgtgacctcggtttcgcaggtgacgcagatcatgggggaaattacctctgcatcggacgagcagagtgcgggtattaatcagatttcgcaggctgttaacgaaatggatctggtgacccagcagaatgcggcgatggtggaagaggcggcgctggcggcgagcgaactggaagcccagtctgatgccctggaaaaactggtcgcgcaattccagcttaatcaggaaagcgccagggtgaaaactgccgctgagccgaataacgttaagcgtcagaaagagccggacctggcccagtgggaaaccttttaa

SEQ ID NO: 156835 - DNA, 444 bp, Enterobacter cloacae
atggcaattaacacgatcacagtttcaggaaatgtcggtagagacgcggtactgcgcgtcacgccaaacgggaaacacatcgcctcgttttcactcccggcaaaatctgggtttggggagaatgagaagacatcatggctgaattgcaagatgttcggggcaatggccgagaagctctctggcgcgattgttaagggagcaaaggttgccgttactggcgagtttgtaattgaggagtggactaagcaggacggttctcaggtacagacaccgaccatcctggtacgggatatcgatctcccaccacgcggcacgcaagggaatgatcatcaccgtcaacaggcatcatcgcagccacaacgccagcaacatcaacgctcatcggccacccagcagcaaccaagcgaaccaccgatggacttcgacgacgatatacccttttga

SEQ ID NO: 156836 - DNA, 630 bp, Enterobacter cloacae
atgacagataaaaaagtatacgccgccattagcggcgttgcttcagcgcttgctgagaagggtatcagcaaagaaaggaagcaagggagtcaggtcaattacgcgtttcgtggtatcgacgacatttacaacgcgctggccccggagttggtaaaaaacaaactcctgatcctaccccgctacaccgaacgcaccagcgtcgagcgaaccagcaaaaatggcggtgcgctgttctatatcacggttcgtggtgacttcgattttgtcagcaccgaggacggaagcattcacactgtcaccacctacggcgaagccatggatagcggcgacaaagccacgaataaggccatgtcgatagcatacaaatacgcggcgtttcaggcgttctgcataccaactgaagagacagcactcgatgctgatgctgaggtgcatcaggtagcgccccaagacgctgaggctgcactgagagagtttggcgacaaagcacagctagctcagtcagtagaggaattgcagggagcatacaaagaggtatggcctaagttaggcggcgttaaatcatacgaagaacgcgcagcagagacgtacaaaacgcgcggtcgagaacttcacaaacaggcggcttaa

SEQ ID NO: 156837 - DNA, 189 bp, Enterobacter cloacae
atgagcaaagaaatgttgctgcaaattatcaacgatgcccaactcagggccgacagtaaaaccctaccgcttgaagtacgcattcgctcaagagtaacagtcaacgattgtatcgtgagagcagataaagaaggctggccgcttgtttataagggaaaaggccgctgggctatgggaagtgcatcatga

SEQ ID NO: 156838 - DNA, 153 bp, Enterobacter cloacae
atgaagcgaggcgggttactgaaaagcagccgactttatcgtgttggcgaggtggtcatggactcttgcatcccaccgggcgccattaaacgcagtgagagattcaaaggccatggtggaaatgtaacggttgcgctgcgctggaaggagtga

SEQ ID NO: 156839 - DNA, 234 bp, Enterobacter cloacae
atggcaactatcaggggcaggaagattaaaggaattgcttacgatgttaaatgctgtatcgctgggaaggatgagcagtttaccggggagacaagcaatcctaattacatcgaactgtttttgagtatcaccaatggcaacccatcctcggtatttattcctgtcggaaacgaccgctttataagcgtcaaaaccatcgaatcaatattcatcacgaaattgcttgaggactga

SEQ ID NO: 156840 - DNA, 189 bp, Enterobacter cloacae
atggatatcgacctgctcaccatgtctatctcagtgctggcggtggctatttctgtttacgccgccgcgccggtacgcatgaagaaatttaatccgccagagcgtaaacctctcaaccagcttcctcccgaggtgagaaagctcattgagaacgttgatgagcttgagcggataacaaaaagtctctga

SEQ ID NO: 156841 - DNA, 390 bp, Enterobacter cloacae
atggggtttccatcgccagcagcagactacgttgaagaacgcatatcgctcgacaagcgccttatcgcgcatccttcagccacgtacatgatgatagccggctctacatacctgcgcgcaggaattatagagggtgctatgctaatcgttgatgctgcattgcagccaagggatggttcgttgcttgtgtgttctgtggatggagaattcaagtttaagcgatatagaactcatcctgagccctatcttgagaatctggagaacggtaagcgtgagaggctgcgcaaggttggtgagatatcagacgacgacaagccgatattcggagtcatcacgtacatcatcaatgatgcgcgttcgggtgagttcgacgattgcccagtgatgtaa

SEQ ID NO: 156842 - DNA, 2316 bp, Enterobacter cloacae
atgaaagtaaagctatcgataattgctttagcggtttcgtcatgtttgttttccgccagtacgctggctgaattgaaagcaaatgatgatactaaccggctggaaggtacctataacaatgcgcttatgcgttcaacggataatggagaaagctggcttgagcttgaggcgagtaacggtaatagtacaggagtcaataacgacttcccgggcaccgagaaagtcgttgtagccaataagcttgctgatgtcatggcgacaccgctttatgacagtacacggacctacagcacccccaatactaaagtccgttacaatggatattattggaccaatcagtggtgggctaaccctggtgaaatgccgggaagtaacggggtatggttaaaaggggcggcgacccatctcgaagagaatgtgataggtacctacaattttaccccatggaccgggcaaatggctgaggattatcagtccacgcagaaagaaaaagtatctaagcagattaaagtctatggttattttcctgagtggggtgtttacgaggcgcataactactttactcctgataaaattgcgtgggatcaattaacacacctgacctatgcatttggtgtggtcaaaaatggtgtggttgttatgaatgacaccgagaaaggtccacagttgatgaaagatattgccagtgccagtaaacaggcaggggtgaaaaatattttgtccgttggtggctggagtaattccgaagagggctcttttgaatcggctacggcgaccgaccagggcgtcgaaaaacttgcacagagcattgtggattatgttgttacgtggaaattcgatggggtagatattgactgggaataccctgataccagtgttgaaaaaacgcagttcaccaacctcatcactagtctgcgcaataaactggatgcgctaggtaaacaaaacgatatttattaccaactctctgctgcagtaacgattaaccataacaatatgggttatatcaacccagcggtaacggccacattgctggattctgttaacgttatggcttatgacattcacggtgcatttgatgccattaccggacataatgcaccactgtatgcgaatagtaaggatcaggatgctaagctcaacgtcgctgctgcgatgaatgaatatgcgacgacctggagtgtaccgaagaataaactgacgatgggggttcctttttatggtcgcggctggggggatgtggaaccaacagagattgtgaaagggcttccaggtctgtttgctcctggcagtgcaacagtacacggggcctgggatgataaagatcagtacaccggcactaatccgttctatgtactgcaacagaagctagccagtggtgattacacccgttactgggattcagaatcgcatgttccctatctgtacaatgcgaagaccaaagaattcctgacgtatgatgatgaagcgtctattacggacaaagtcaattacatcaaaaaccaaggttttggtggcgcgattatatgggatatcagtggtgattccagcgaccataagttgggtcaaattgtggggacgttgatccagaaggacagtgatgatggtgatggcggtgatgatggtgatcaaactcacgtcgtttcctatctaaatctgaatcgtagtgccaaaggggggctgagttatgatggtgactccgctcgcttcattatgaacccaggcattgaaattgaaatgcctttgagtgatttccagaatggcgtcttcgatattcgcctcaatgacatttctgttgggaccattgacaagggaaaagtcatgaatggtgtggtcagtattgaggggcaaactgcttctgtcattactaacaccctgacaattaaagtgggggatcttatcgccgtcactcgtcaggatgcggataaggaatacgtcgatgcttccaaaactgtcacaagagaaatgcttgggcacgctgtttttgatgagagcggtcagttgaaagatgtttatattgccaacaatcaacaggtcgaaaacgcaattcagctgatgatggatggctatgctgactctcagtacgatgtgtatgtaaatgatcggtctgttgcaacagcgtatgcccaaaaaacggggaaatgtgtgacgaaaaacatgacctgtggttacctaggcggagaaaaaatctattactacactgattccagtgttgtcgttcgccaggatgacaccattaagatttaccaggtcaatgagggtagcaaaacgttagtcgcttcactgaccgtcccgcatggcatcacctattattga

SEQ ID NO: 156843 - DNA, 171 bp, Enterobacter cloacae
atgggggggcaacatcaggataaagaggaatatgactcgcatcgtaccgagtttttaaataccaacggatgggaagtcgtacggttctggaataatgagtttcgcgttaacgaagaggaagtgttgcatatcattcttcaacgactgcagagcctgatgccctcaccctaa

SEQ ID NO: 156844 - DNA, 543 bp, Enterobacter cloacae
atgattttcggtgatccttatcgttttgctgtttgggttgaacctgtctcacaatggagtggttcttacacaaatggactgttccatttaattataaatgggaatatgtatccaagtgatattagaacatccacgctctcttcagacctcagagaaatttctgataatgattgtgctttagtctctcaaccattaaatagggacgtttttacactgtctacacaagaggcgtttagtagattatttaacttggcttatccggagtcttctgaattagatgaatatcctgctcaagtttttgattattgtataacatcctctaatgttagtgattccggcgcttgtttttttgctgttgcagatgaggatagcgtgagaatcatcggaggaaaaaccgaacagttagttaaagttgaaaatgatgaaagaaacgtgtggcgaaaaatagataatcccatcattgaggatgtaataatttctaaagttgatatgaatgaaataatatcatctattagaaatttctcggaaaaaattattaagtaa

SEQ ID NO: 156845 - DNA, 5058 bp, Enterobacter cloacae
atgaataaatcctgtgcgttgcaaaacgatggttttcacttttctcgtctggctatcgccattcgaaatgcaatccctgctttagtcctggcttcactgccggtttacgccgataccattattgatagtcaaacctcgtcctatatattgtctggcccaggtccgtttataatgcctgcacctaacgatattactgttagctcgggtagcgcaatcagcggcgataattcacaaaactggctggtaaccattgatgatggggcgacggtcaacggtggctcatatggcctgaatctggggtccgcatcgcaaggtacggtgttgaatctcagtggtgatgtcaccacatccggcggtggttccggcgggaatgccgccggggttaagttgaataatggcggtacgctgaatattttgtctaccggttctatcgacagcaacagcgacgggatatttttgacatcgggcggtacggttaataacagtggtgtagtgagcggtgccgatggcggaacgtcagtctatttcagtaatggtactggtagctatgtgggggacagtacttcatccattggcggcgggtacggtattattgtcgactcgggcacctcaacaattagcaacgccggtaaaattgacttactgcataatggcgtttggttccggggtagttcctctggctctgtcgataaccaggcgggtggcataattaattcaaccagcaccagtaattatgggattgatataagcgcatcaggaacggttactatttccaacgaaggttctattactggtaataccgggatcctgttagggaccagcgggcatactctgacaaacagtggcattattatcggttccgggggaaccgctatttcgctgacggggaataataacgccgtcaccctcgacacagggagtaatatcaccggcaatatcacggcaaccggaaccggtaataccctgacgttgaacggacagggaacgcttagcagtaacgtcacgggtgtacaaagcattactgtcgcggcagatgtcggccaaagctggatccttagcggctcctcgactacgacgggaatcacgaaccaggcgctgtatgtgcaaagcggcactctgatccttaatggcgcagtggacaacggtagtactggcgggggaaccaccatcaacggcgacgcggtcctccagcttggtaataattccgccagcggcagcgtaacggggaatattgttgataacggcacgctgcgcttctcccgcaccgatgacattagttttgccaatctcatcagcggcagcgggcgcgtcaaccaggccggaagcggccagaccacgctgaccagcgccaatacctacaccggcggcaccgttgtagatgcgggaaccctgaacgcgtctgatgtcgacgctctcggaaccggaaatgtcaccatcaataatgcaggaacgctggacctctctttcaccggtgatgttttcaccaacaccatcaccaataacggtgtgctggatgtgattgccgcggataactcactcgacggaaacatctccgggacgggggagaaccgcgtcagcgcactcaatacgaccttcaatggcgataacagcggcttctccggtctctggaatatcctcagcagtggctcgatgtttgccaaagcgacgcaaaatctgggtgagggcgcggttcaactggccgggatattgaacgtagtcccggtgacaggcggttttctttttagcaatgccctcaccggagccgggatactcaaagtcgaattgacgagcggcaacgcctttaattttgccagcagcgtgggaaacctttttacaggcacgctggaaatgggctctggcaccttcaaccttgatggtgataacaccctggcgctaaccaacgccacgctgcagcttgatttgggcgggaccaccaccgtgggggcagcccagcaaaatgtaggtaacctgacgctaaacggcggcattttacgcttcccggacctgcctgcgggcacaatcaataccggagagctgaacatgctttccggcaccatccgggttgatcctgacgccattgtcgatatcagtaatttgttgaaggcagacgatggcgcgggcgtgcagctggtgacatcaaccagcaacaccggtgcggcgtcagcgctgtcgcttcaggatttaaccggaaataccttaaccacgtctcaggcgaacgtcacgcagggaggcaataccgtggcggtggcgacctacggtgatttcggcctgaccgagagcggtgggctggccgtcgggtacaccttaagccagctggatatccaggcagggcaaaccttaaccctctctggcgacgcggccaccccttccggcgcggcagatatgaaagcgttgctgagcggcagcggtaatctggcggtcaatgcgaccgacgccattaccctgacaaacgcgggcaatacctataccggcaccacgaccgtgaccggtggcaccctgcgtgcgggtgcgttaaacgtgattgacgacagcagccaggtcaccttaaacagcggaactgcgttcgatctgaacggtttcgatcagagcgttaataacctcagcggtgccggaaacgtgaccctgggggcaaatatcctgacggagaataccgcaggcaccgtgacctatggcggcgtaatcagcggcaccggggcagtgacggccgccggaacaggaacctggatcctgacgggggataataactggaccggtggcacaaccattgattctggcgtattacagctgggggccggtggtaccacgggggggattaccggcgatatcaccaacaacggtgcgctggtggtcaaccgttccagtgccctgacgctgggcggagccattgacgggacggggacgctaacccaaagcggaacgggagagaccacgctgagcggggcaaacagctacagcggcgggacaacggtcagcgctggcaccctgaatgccgccagtgcgacggcgctgggcacaggcgacgcgacggtcggcagcggtgcgacgctggatctctccttcaccggtggaaccctgacgaacaatatcgccaacgcaggtctgctggcggtcaccggcgcgaatgcgacgctcagcggcagcatcaccggggcgggcgagaaccgcatcagctccctgaataccacgctgagcggcgataacaccctctttaccggcaactggaatatcactaacggcgcttcggcgaacgtgaccggcgggcaaaacctgggggatgccgccgttaatctggacggcacgctgaatattgctccggctagcgggggatatacctttaccaacgccctgaccggcgggggcctgatgaccgccaccgtgacaggcggcaacgcctttgcctttgatggcaccgtcggcagcgcctttaccggtacgctgcagctcgggcaaggcacgtttgctctctcgggcgttaacaccaccactctgaccaacgctacccttcagcttgatggcggcaacaccacaacggtggggagcggcacgcaaacacccggcaacctgacgctgaacggcggaaccctgcgctttgcgaatctcgcctccggggtgatcgctactggccagctggggctgacgtccgggacagtgcaaatcgatcccacccaggtcgccagcagcgggggctcgctgttaaccgaggatgatggttccgggctgcagttgattaccgccaccggcaccagcggtgccgcatcgaacctgaccctgacagatctctccggggccgcgctgagcagctcgctggttaatattgaccagaacggcgcgacggtcgccattggtacctacggctacagcctgaacaataccaatgggctgggcgtcggttacacccttaaccagctcgatctgcagtccggccagacgcttacgctttctggtgacaccgccaccccggccggcgcgtcggacatgaaggcgttaatcagcggcagtggcaatctggcgatcgacgcgaccaacgcgctcaccctcaccaatgccggtaacacctataccggtaccaccacggtaacgggcggtacgctgcgcgcaggcgcgcttaatgtgattgatgacagcagtcaggtcacgctgaacaacggcaccactttcgatctgaacggcttcaatcagagcgtgaataatctgaccggcacgggcaacgtcacgctgggtgccagcaccctgacggagaacaccaccggcagcgtcacctacgggggcgcgatcggcggcaccggctcggtcaccaccgcaggcaccgggacgtggatcctcaccgggaataacgcctggaccggcggtacgacgctgggcggtggggtattacagctgggcgcgggcggcaccagcgggtcgattgtcggcaatgtggtgaacaatgctggactggttattaaccgttcagatgatgtcaccctggcgggggcaataagcggttcagggacactgacccagaacagctctgcgaccgggacgacgacgttaaccggaacgaatagctacaccggggcgaccaccgtgcagcagggcaccctgcagttgggcaacggcgggaccaccggctcgcttgccggcaccagcgcgattacgctcgacagcggggcggcgctggcctttaaccgcagcaacgccatgacggtcgccaacgcgattaccggcgatggtcgggtcacgcaggtcggcagcggaacgaccgtgatgagcggcaccagtgcctataccggcgggaccacggtggcggcaggaacgttaaacgccgcgaacagcagagctctgggtagcggggcggcaaccgttgacagcggtgccagcctgctgctctcgttcagtaacggtacgtttaccaatgctgttgccaatggcggattactgaacgtcacaggcgcggggaatacgctcaacagcaccttcaccggggcgggcgagaaccgtatcagtgcgctcaatactacgcttggcggggataataccctctttaccggcaactggaacattatcagcagcggttag

SEQ ID NO: 156846 - DNA, 1185 bp, Enterobacter cloacae
atgtccgcactaagccaaaccacgcaatcgaaccgtgaacatacgtactggggcggcatttttgccctgaccctgtgcgtatttgttttgatcgcctctgaatttatgcccgttagcctgcttaccccgctcgcccgagatttaagtgtcaccgaggggctggcgggccaggggattgctgtctccggcgcactggccgtcctgaccagcctgacgctttctcaactggctggcatcatgaacagaaaatatctcctgctgggaatgacgctactgatggccctgtcgggaacgattattgcctttgcaccgaactatccggtctatataaccggccgcgccctgatcggtattgccatcggcggattctggtccatgtctgcggcaacggctattcgcctggtgccacaacatcaggtatcgcgcgcgctggctattttcaacgggggcaacgcgctggcgacggtggttgccgctccacttggcagttatctcggcgcgactattggctggcgtggcgccttcctgtgtctggtgcccgtggcaatagtcgcgttcatttggcaatgctatagcctgcctgatatgaaggggaatgaccgggcaacgtcgcgtgggacggtctttcggttgtttcgtcagacggccgttattgcaggcatgcttgcctgcggcctgttctttatgggtcagtttgcgttatttacctatgtgcgtccgttccttgaaaccgttacccacgttagcgactccgggttgtcgttgatattgttaaccatcggcgtttcaggttttgtaggtacgctcgtgattgccatggcgctcaacgcgtcattttacctgacgttaatggccattcccctgctgatggccaccattgcgggcgggttgattctgaccgggcacaacgtatgggccgttgccgcgctgttagggctctggggaatgctggcgacggcggcacctgccgggtggtggacgtggatcgcccgtacgcttccggaagatgcagaggcgggcggtgggttaatggttgcggtgatccagcttgccattgcgctgggatcaactaccggaggcatgatgtttgactatttgggctggcagagcacctttctcatgagcggcctgctgcttctcagtgcggctggagtgacatggcgactcgcacgtctgaacagataa

SEQ ID NO: 156847 - DNA, 831 bp, Enterobacter cloacae
atgaacgtatcaatgccctggagtttagttggacgtctttttaagtggatatgggacaaaatcactcgattatggttacttaaaacttatcaaaaatcccacgactataaagcgagtcgccttcggttaggagctcgttgggaaccacttggtgagcacttggagtactcgttgcggctttctagtcctgccgaccatgaaacggtaaaatcccgtgtagcttttcgggcaaaagaaaatttggtagagaaggccacactttattttgaagcatctggacatggtatccgctaccagcagaaaattgagttggtaaatctggaccaatctgtcctgattgtttacttagatcaaattcctcgacaggaacttttggaggcttctgagcgcggtatattcttttcgattaccgaaacgcagtttattcaatgtgtcattacgttacccggaggccaacaacagcaaccctttgattccagaaggtcccacctaacatataactggttgcttaatgacaaatgggtgcgacgttggggagagttatggaactgtaatgccattgagcatgcgaaaactgaaatgaagttttattggcgttggcgattgggcgaatttaaacatttttccctttacagtgctgggctcgggtcttacccctggaaaggaatattacgtaaaagcctgtgcaagtttttgatcaaccatcatattatcacagtgcagttctggctagcggtacactctgggcggtatgttcttggagatggaaaactgaagctaaataagcgaagaattcgaaaagtaaaatccagcaaagcttctaacctttga

SEQ ID NO: 156848 - DNA, 804 bp, Enterobacter cloacae
ttgtttacactaaaacgtattttgaatatgaccgttgcaaaaaacacatatttatgccttactggttctggggtggttgtttttatattctattgcatgcgaataggattccttccaacgggattaactatatctgacgcgatatttttcctgatggtaataacatcattttcaatatttctcaccttcttcctggtgttatggtattcaatgtctgttctggtgtcgtatttattcataagaagcgctgccttatttttcagaatgacacgtaaacgcccgccctattccttcaaaggaacctatagaatggcgaggcgaatgaaaattcacgaacctattttagtacacattacaacatcaataattggaataattgtaatttatctggcattaaaatcagggagaaatgatatcacatcgatacttctttcaatcgctgtaactgcaacctttattacattgataccaaacgtttattttgacaaaagaattaaaaaagaggacaaaaagaaacactcagcatcactagctgctgttgcattatttttgtttttcgccgtatcaggaatgccatcaattctgagcgatgcggggatgggtgtcattggtgtaagaaaacacgatgtaacattttttctgcaaggtaatgatttggaaatggccagaaacataacgggagattcaaaacagacattcttcaagggtgatgcactttttattggggtaggaaccacctctctgctagttataaatcacaaaaaaatgatagtgaataatgaaaaccttgctctttcattctaa

SEQ ID NO: 156849 - DNA, 378 bp, Enterobacter cloacae
atgcttaccggagatctgctcttggccctcatgatttggccactgcagccggcaagctacgggctggcaggaattacgctggccatcagtatgataaccttatcagacagcggtataaccgaagtgaagcgactggcagtcgctagcgtcgtgttatcactgatttgtttaaacgggttatcgcatctcctggatctgcccgcagaaacattattactggccacgctgcctactctggcattccccctggcagtggttcccttctgcaggaaaatctgtcctgagggccgcaagcgtttcatgccgcgtaatttcttttattatgcttccgccggtcacctggggataattggtctgatacagtatactttcgcctaa

SEQ ID NO: 156850 - DNA, 357 bp, Enterobacter cloacae
atgtctacaaacaacttgaaagaagcagtaaatcacaatacctacaacgcgccagtcaccatcaacaactactacggctgtcccgtccccccccctgaagaaccaccggttgttcctgcgaaaaagaaacgcggctgggtttttgaaaccaccagtattttacttggaacaggtattaccttatggcagtcaatgtacaacggggtaatgatgtcaggcttgacggctatcctaatctggttgggggtgtcttcaggggtagcgccagtattggctactggtatcattgcttttggcgtctgcgccgcccctacattgttgttaggtttggttcgttgggtcgtaaaccagaagtag

SEQ ID NO: 156851 - DNA, 951 bp, Enterobacter cloacae
atggcctacaaaattttacttccacaagaaatcatgaaggaagggagagagtatcttgagagccgtggttatgaactgattaccggttcaggaatggaagaagatatcatccgtgatatcccggattgcgacggtattattgttcgcctctcaaaaatgtccgatcgtgtattcgaagcggcgaaaaaattaaaagtagtggcccgccatggcgcaggttatgacaccgttgatttagattccgcgaaacgccacggtgtaaccgtattaaatgcgccgattgctaatagcatgtctgttgccgaactgaccattttttacatgctgcactgctcacgtaacttcaagctggttgagcagaaaatgcttgaggattattactgggcaaaactgcgcaccccaaaagtcgagctggatggaaaaaccttaggtcttgtgggcgtggggaacatcggatcgcgtgttgccatcaaagcgctgcatggcttcaacatgaaagtcatcgcctacgacccgtacaaaactcaggaccagataccggaaggtgtggagttaaccaacgacttcgatcgcatcttcaaagagagcgatttcgtctccctgcactgcccaaccactgcggaaactaccgatttcgtcggcgaaaaacagttcgccctgatgaaacccagcgcctacttcatcaataccgcacgcggcaagctggtcgatgaaaaagccctctaccatgcgctttctactcacgccattgccggtgccggtgtcgacgtgctgaaaaaagagcctttcgatccggcagatccgatttttgctctgagcaatgttgtgattgccccgcacattggtgctgccaccaaagaagctactgaccgcgcctcgctgcactccgctatcggtatcgatgaagtgttatcaggtaaaaaaccgtcctggccggtgccgggtttttaa

SEQ ID NO: 156852 - DNA, 699 bp, Enterobacter cloacae
atgtctattggaaaccgtatctacacgaaacgcccggcattcgacgttgagttgttaaaacattatgaacagcttcccgcagcaaacatcgccgacaccatgaaccgcattgctgtgctgggtaacggcatcaagcgcatctcttcaccgaagaaaccgattatggcgggttacgccattacggtgaaagcacgcgcaggtgacaacctgatgctgcatgccgcactggatatggcaacggaaaatgatgtcatcgtggtctctaacgaaggcgaccgttcccgggcgctgatgggtgaaatcatggtggcttacgcccacagcaccaaaaaaatcgccggtatcgtgctggatggcccgatccgcgacattgatgcactgtcggtgctggatttccctctcttcgccacgggttcaaacccggcaggcccgtttaaagaaggcccgggtgaagtgaacacgccgattgccgttggcggcgtagcggtgtgtccgggcgacctgattgtgggtgatgcagatggcgtgatcgtggtaccgctgaacgatgccgccgccctgctcgacaaagccacagactacgccaaatttgatgcgggcaaagtggaagccgcaaagaacggtacggccaaccgtgcatgggtaagaaaatcattagacgaaaaaggcgttgagttcatcgacgatatctatcgctaa

SEQ ID NO: 156853 - DNA, 1395 bp, Enterobacter cloacae
atgctttatctaaaactcttacccattatctttttccccgttcttttttgggtcatccctcaccctgaaggcgtttctgcccagacctgggaaatggtcggtatctatctggcgatgctgtgcgggttagtcctgcgcccgtttaccgacgccataattatgctcatcatcctcggtttcgcctcgctggtagttgaaccgggtccgctgtttgctggattcggtagcccgatggtgtggtttatcatcagcgcctttattatctgcaaagcttttgttatcaccggtctgggcaaacgtatcgcctatctgctgctgcaacgttacggcaaaaataccctgacgttgggctatttgatgatgatcacggatactgttctggcaccggcaactggctcaaacatgtcacgctctggcggcattacttacccgattttccgtaatattgccgaagcgttgggttcaaagccggatgaaggcagccgcaaaatcggcgcgtatctcacgatcctgatgtacgtggtgtcgatgggcacttccagcctgttcctgacagggatggcgaccaactctattaccgtctcgctcgccaacgagatcatgaacgtaaatctcgaatggatggtgtggttaaaagccgccgttgtgcccgctggcattgtgctgctggctgcgccgtggatcctctacaagctctacgcgcctgagctgaaaaccattaccaacgttaacgaaatcgccactaaagggttgcaggaactgggcccagtgaagcgtgaagagaagctgctgattgtcttctttgtgttgggaattatcggctggatgacgggttctatcaccggtattgagtttattccggtcggcctcgcgttccttgcctgcttgttgctgttcggcgtattgagctggaacgatgtggtcagcgaaaaatcagcctggcagaccttcgtctggtatggtgcattttacggatgtgcggtcgcgctctccaaaggaggcttctatgtctacctggtggatgtgatcaaaaactacctcgacctgtcacaactgagtgaaatcagtgccctcggcgtgttggtgtttatcagcctcgcggtgcgttatttcttcgtatcgaacagtgcgtttgtggtttcgttctacccggtgctctttacccttgggatgaccacgcaggcgcacccgatgtacatcgccctgtcgctggccttctcagccggttacggcgcattgctcacccactacgggaatggcgccggggtattcaccttctccagcggttatgtgccgcaaaaaaccttctggctgcttggcaccatcatggtgctggtcaacgtgctggtctacttcctgatcggcattccctactggaaaatgatcggtatttga

SEQ ID NO: 156854 - DNA, 1164 bp, Enterobacter cloacae
atgaaactcgacatactcattaaaaatggtctggtggccgatctcgacaacgcagactatgtaaaccagaacatcggtattgtcggcaaccgcattgtggatttgcaggacgttgaaaacgcgcaagcggaaaccattatcgacgcggcaggctgcattgtcctgccggggctaattgattttcatgctcacgtttttcacggcggcaccgccatcagcgtaaaccccgatgtgctctgtctgcctaacggggtcacaagcgtagtggatgccgggagcagcggttgggtgaactacaaactgttccgtaatagcgtgatgaatacagcccagacgcgcattaaaagttatcttaatgtggtcaacgtggggttatccacgctgggtggcgggccgacggggtatctggaaaacaccaacccggctaactttaacgtggagaaaatcagccagacgctggacgaaaaccgcgacaacatccttgggctgaagctgcgctatagccaggatattgccaccgggcgcaacttcagtggtgatccgttctacgccaccgtggaactggcccgagcgctgaaaaccacactgtgcgtacatgtaaccgattcacgtctgcctgctgatgaactgattggtcactttcaggcggatgacatctacgcccactgtttccacggtactggcaacgccattctgagggagagtggcgaactgtttccggcaatccgcgatgcgaaaggtcgcggggtaatattcgactgttctaacggtgtggcgcactttgatttcaatgtagcccgcaacgccatggaacagggctttaacccggatatcatcagcaccgacctgacgctgcgtaacagtctgcgcaccgacaaagtgttcagcctgctgtttatcatgtcgaagtacctcaacatgggcatgtccttcttcgaggtggttcgtgctgtcacccgcacgccagcacgactgatgaaaatgcaggggcagattggcactctggcgcccggtgcacttgcggatattgccatcgtgaaattgcgtaaagacaagatagtgtttgaagacaccaaaggagcggtgcttgagggggaccgttatatcgataactgcgccaccatcatcaacgggcaaattgtctatcgtcgccaacgtttttaa

SEQ ID NO: 156855 - DNA, 1881 bp, Enterobacter cloacae
atgaaaaacaatggaatagctattttctcggtgtcaaaaaccatcacgcaacgcatatccaatgtgcttatcgaaagaaaaatcgacatccccgtttacgaatatcacttctctgacgtggtggaaaaagcccaacagctcattcagggcggcacaaaaatttttattagccggggtgggacagcggcactgctgcgtaacaacctgaacattccggtcgttgaaattgcccatgacctgcacgggatctatcgcatcctgcaggaagcccgtaagaagtcacagaaaattgcggcggtagggtttccccagttctgcaacgtactacgccactatcagaacatgaccgacgatgcgtttaaaatctgccaggtctataaccataacgacatcgaaaatgtggtgaaaaatcttgcggacaatgactatcaattggttatcggcggcctgacggtggccgagatggcgaaaaagtacgatctgaacgttatcatgggcgatacggacaacatctccatcgaacaggcgcttgatgtcgctacaagcatgttgaaatacatcaacagcgagagcgtgaagctggctatgtcctggtcagcactcaaccaatcgcgcgagggggtgatgtgcctcgaccagtccggagaaatcatcaacattaacgcccgaggcttctcactgttccagtgcagtattggcgagaagatcttcaaaaaagaggcctataaggagattttcggcagcatcatcaatgaacaggacgtcaaagagcatgcgcttgagattaacggtgagacggtgtatctgtcggtgaagcacttttccaataagaacagtttttacaccatcattaccggcatcagaccagagcaaacaggctggtctgcttctcgtagtgtcaggaagagcgataacaaaggttttatcaccacttattccttcgccgatatcattggcgattctccggttatggcgtcggtaatttcacaggccaaaatctatgctgctcatgacctgccagtacatattttgggcgataccggcaccggcaaagagctgtttgcccagagcatccatcacgccagcccacgcagcgccgggccctttatcgccatcaactgtgccgctattccagaaaccctactagagagtgagcttttcggctatgccgatggtgccttcactaacgcgcgtcggggcggcaaacctggcatttttgagatggcgatgaacggcaccgtgtttatcgatgaaatcagtgaagcaccgcctgcggtgcagattaaattgctgcgtattttacaagagaagcagttctgccgggtgggaggcgaaacgctgattagcgctaattttcgcctgattaccgccagcaacaaagatcttagcgtgcaggtggcggcgggtaagttccgtcaggacctgtggtaccgtgtcaatattcttgagctacggttgcccacactcagagaacgtacaggggatgtaatgttgattattgcctctctgctggcaaggcaagggaagttattaactttcaccgatgaggctgtgaattaccttaatagctatccgtggcctgggaatatccgggagcttcaggctgctcttttccgcctgatagttctgcataataagagcgtggtggatgtggatgtattgaagtccctgtgtcacctttcgacttcttcctcagctagcgaagaaactgtaatcccactgacggatgaggttgatttactaaaaaaacaggaacagaaactgattgcttccgtgatgaaacagaccgacaacgatcgcgccagagcagcgttgattctggggatcagtccgaccacgctgtggcgaaagatgagaatgtatggagtagaaaatgtctaa

SEQ ID NO: 156856 - DNA, 1551 bp, Enterobacter cloacae
atggatgagattgatttttcttgtgaaatggattttcacgttgaacttagaattcatgataagaacttattcggaaagttgatttttccaaaagaaacaccagcttatcttgagttgattgtaaatgatatttttctatcactaaataatgaatgtaatgaaactatcgagtgtaagtgtggatatgatatctacacattaatgggatgtaataaaattggaacaaaaatattccctaaattcattattaaaaacaaacctgccgatttaacgactttcgatgaaatagaaataagcatcaaccaattaaatataattcttcacgatggtcattttagtaacaaatttgaagaagatactttcattagtccaataaatcaatctaacttcgaggtggatgtagccgataacgattcaataaaatcagtatcggatgattgggtctgctggtcaagcatttcccacgagaaagatgttataacaagacttactcagagacatattataagcataaaggctaaacacagtttaaattatgaggaagtgataaaagagtctcgccacatatgcttgttatttacacttttaactttgatacagcttcacataaatttcgcgtggattgtccataagaacaaacgttattgtatctactttccatcgataaaacaatgctcaatcaaaaaaattgaatggcatcattcaatgattaacttgaaacagatcaattcggatacttggtttaatatcattaacaactcatataaaaacataaactttgataagatatgggcgagattttatgggatgttatcctataatagttactgggaatatgatttcctagggtttataagtatatttgattattaccttagcttgaaatttaataaaaaacatttaaatagctttaaaaaaagatatatcgcgcaaatgaatgatgtatcacataatattaatagatttatatcattatctttagcccagtttgaacggttactaactatacgtaatggtgttgcgcacagcgatccagataagctagatgtccttgatgatatttcggttttgataatactaaaaaaaagattaataatactattaaattatcttgcgttaaaagatttaggcatcagtgataacacttatgctgattcagcattgcgttcgttcaatcctattttattaaattcagtgccaagcaaaaagtggcttcataaaataataggtgatacacaaacactgatattatccgaagagaattttgaacaactaaaaaacacttcaaaaaaatcaaacgatttaataataattagtaaaaaaacaggtgagtttatttatgatgaaagattaacaaacgaacttaataaacaaatacatacctcatacgagaaatatgataacacttgtgattatatcgataatgaaattacaaaatacgttgatggggaatacatgtcaaaatatgctggtagattacatatacatactattgagcaagatgattttatagaagctacttctgtttatattttgcatgaaattaattaa

SEQ ID NO: 156857 - DNA, 1212 bp, Enterobacter cloacae
atggaaaaagtaaaactgcggctctatcagctgacgctgattttgagtcttatttcgcttgcgttggcgttgctcagttcaggtaagcaacgagagtttttctatattgcgatttatgccagcattattggcttagcttgtgaatataaaaagatcacactgcgtcctttttccatcgcattgccgattttattagttgggttgcttaattttggctggtatatgacgtacgaataccatagcgaaggcctgaacgtttatagcgattatcttggtgcaagtaaaaaattgattctggcgagtatccttattttctaccttgacagatttaagtcgtacattgatgaagaatccttccagaactatttcttttatgcctcaggtgcagggtttattcttgccactggttatggcttgtggcaggtaacacagggtatggatagaatcgaaatggctattaatcgcgccactgtgtcagcttatgtctactctgttttgtcactcgcttttgtatacagcctttatctgcagaaaaaaataaaactgtattttatcgctgctattacgattttaatttcttggttaatcatattgttgactggtacacgtgcggcgatgggattatatttacttcaggcaattgtactcacactttatcattttagaaggattcattttaaatcgacgctgatcatcttatgtattttagcaggtattgttatcattagttacaagccattgattgagccgaagataaatcaaactcaagttgaattaggtaattatcaaaaaggttatggcgcatcgtcactcggtgcgcgttttgccatgtggggtgctggtattcaaaatggacttgcccacccattggggcagtcagtcgaagagagagaagtatggacacagcagtatgtgaaaaatggacatccgcatctcgcagcagccctcggttttgttcgggtgcatctgcacaatgagtttattgaaaaatattctctgcaaggtatccccgggctggcaatattattatttttctatatatcgatgctcgcttacgcgctcaaaaacagaaatggtctactgctaacgaccatgcttcttttattattctatggtctgacggacgtcatattacttagttcagaagccttaatcttctttgttaccctgtttgcgttgagcacacctttttcgcaaacaaggcaacgttaa

SEQ ID NO: 156858 - DNA, 975 bp, Enterobacter cloacae
atgaaattacagcagcttcgttatattgttgaggtggtaaaccacaaccttaacgtctcttctaccgctgaggggctatatacctctcagccgggtatcagcaagcaggtccgcatgctggaagatgagttaggtattcagatttttgctcgtagcggtaaacacctcacccaggtgacgccagcagggcaggagattatccgcatcgcgcgggaggttctctctaaagtcgacgccattaaatcggtggcgggtgagcatacctggccggataaagggtcgctgtatattgccaccacccatacccaggcacgctatgcgctgccgggcgttattaagggctttattgagcgctatccacgcgtctctctccatatgcatcagggctcgccgacgcaaatcgctgaggcggtttcgaagggtaatgcggactttgctatcgcaaccgaagcgctgcatctgtatgacgatctggttatgctgccgtgctatcactggaaccgttctattgtcgtcacgcccgatcacccgttagccggtaaagggtcggtcactattgaagagctggcgcaataccccttagtgacgtataccttcggctttaccgggcgctccgagcttgatactgcattcaatcgtgcaggattaacgccgcgtatcgtcttcaccgcaaccgatgctgacgtaattaagacctacgtgcggcttggactgggggtaggggtgattgccagcatggcggttgatcccgtatctgaccctgacctcgtgcgtcttgatgcgcatgatattttcagccatagcaccactaagattggtttccgtcgcagtaccttcctgcgtagctatatgtatgattttattcagcgctttgccccacatttaacgcgcgacgtggtcgatacggccgtggcattacgttcaaatgaagatatcgaagagatgtttaaagacatcaaacttccggcaaaataa

SEQ ID NO: 156859 - DNA, 183 bp, Enterobacter cloacae
atgtttgcggacgtgtacctgctgactaccaaagtcgatattttgggagtctatctctacaaaacggcgtttgcctttaacgatttgggtaaagctgcggctatctcagtggtgctgtttgtgatcatcttcgccgtcattctgctgaccagaaaaagggtaaatctcaatggcaacaaataa

SEQ ID NO: 156860 - DNA, 2490 bp, Enterobacter cloacae
atgaaattaaatatattcaccaaaacgataattggaatgggcgctatatgcattgcggcaccagtatttgcgcttgaggcctggagtggacaagaaggcaatggtcctttcgaagttatttacgatagtggcgtctatactaatgcatggtgggttggtgcgactgactgcccgggcaatgcatcggctgacgcagcgaataacccctggcgttttgagcgcgatgccactgctgcggagattgctgaatatggtaacccaaccacttgtgactcaggtggtggtaccgtaacgtatccggattacaatagtgcaaatgcatataatgccaatgatattgtgacctataatggtgcgacctggcaaacctcaacggcgcaaagtgcgtatggttttacgccgggcgaaggtaacccatgggaacgttatgccgaagtaccgcagtggatggcgaccaccacttataataaaggtgataaagttcagaaagagggccaggaatatgaggccatgttctatactgtcggggatgatccatctaatccagcgaaccaaaacccaacaggcacgaacggacgtccatggaaaccactgggcgcggtcgtaagttatacaacagatgaattaaacaatgcgcctgtatttaattcatcaacgctttatgagagcgggacgttgattcgctataatggtgagaattatatttcccaggcaaaagtgcagaaagtttcgccttccgacacgaatccatggaaagtatatattgactggtcaggcaccaaggctatggttggcacaccttctgcaccgtggccagcacatgtctacgcgccgtacgtcgattataccctgaattcgctcccggatttggcggggcttgcgaaaaatcagggtgtaacgcacttcactatggcctttgttgttgctaaggatggtgatacctgtctgccaacgtggggcacagcgtataacattaacgactatgcacagtacagcaagatcaaggcgctgcgtgaggcgggtggggatgttatggtctctatcggtggtgccaataattcgccactggcagcagcctgtaaaaatgtttccgatcttcagaaacattattacgacattgtggataacctgaatctgaacgtgctggattttgacattgaaggaacctgggttgccgatcatgattccattaaccgtcgtaacgaagctgtcaaggccgtgcaggatcagtggaaagcagatggtcgcagcgtaggcatctggtataccctgccgattttgccgacgggtctgaccgctgatggcctgtacgtgttgaacgatgctaaggcgaaaggagtcaatctggcaggcgtgaacgtgatggcgatggactacggtagcagcatctgccagtctgatggaacggaaggacaaaacatacacggaaaatgcgcgacctctgccatcgaaaacctgttcagtcagctgaagcaaatttttacagataagagcgatgatgagatcaacgccatgatgggcgtcacgccgatgaacggctataacgacgtacagggcgaagtgttctatctctctgatgcgaatctagtattggaagatgctaaagaccgcgatatgggcatgattggcatgtggtcaatgatgcgcgatcagccaggtgtaccgggtcaggtatcgccggaacacagcggtttaactgaatcgcaggcaccgcagtatgctttcagtgaagtgtttgcgccatttacgcataatgatgcggcaccggtagcgcctgagattaaagacatcactgttaataaatcgtcgttttacccacagcttgagtggatacaaaatacggccagccttaagagttcgaattacaatgtgttagtacagcatgaaggctggaaaaacagtgagttctattcagttggatcttacggagttgatggtgataaaaactatacgtacagtaccgatcttgggaatgggtacacaaagattacttttaatgccagtggcattcgggacggacatactctaaaggtggtggatgaaaataataatattcttttaacccattattttacaatagaggattttgctactggaaaaccggagtacatcaactggtctaaagttgcgatggagaatggtcgactgagatattctcttaccatcccaattgatttgtatataacatatcaatatttaaatttgtatattgatacccatgatgcaagtggaaaggtaatcaccaatttctgtagctcctctttccagggggattattataccaaaaattcccctaattgttcgtccggaaataaatatgagcaacccggaaaaccggatcgtctcttttattcagaatatgagggtgacctcaaagtaggggacaaattctacttcgctgttgccgatgggaaatctagtgatgcaaaaatcattacagtcctggacagcataaccgtaacggatgatatgctgaagtcctcaaactaa

SEQ ID NO: 156861 - DNA, 777 bp, Enterobacter cloacae
atggatttcgtttctccgtggatggacaaaatcagaacaacctgccagcgtgccgagatagactatgttgatgtgataatcgatcagtgtgctgttaatttctctgtcctgcctgcatttaccactttcagtgaccctatgatgtggcagtcgctatatcaagggctacctgaggatatttatcctgaggatgcgcctgtactggttcgggtgaatctatcggacgctgaacatgttcagtggctacataaccttgcagcagaaatgatggaatcggctcccctgctgatatgcggttcttgctggtcgtttgaacagcttgctgattggctcagggtttgtgttgatgcgcaacatgagggtcgggaggggattttccgtttctgggatacccgtatttttcctttcttgttcagccacattctcgatgctgagcagcaaaagcaactgctgataccggtcttattctggacatggctcgactgtgactatcaaccttccatccggttggggagtggtgaaatcccagaatctgacaagtctgtggtgcaaatcgaatttaccgatagccagtttgagaaactcatgtgtgtcagtgatacaagccagtttctgagctacgaaagtgtgccagaagggttgttcactaaccggcaagccgaatttacagcctgttatgaggcgatgctgaccgcaatagagcagagaattttttttgatgataagcgcaatgactgggttatggcgcaggttatttcaaataactctgttacctga

SEQ ID NO: 156862 - DNA, 336 bp, Enterobacter cloacae
atgaaatctccctttctctctttagttgcagcggtattgctgttaacgggctgtaatcagcctgctgaatctgattccgtcagcggcggtggcggaaccattgaggcaatcaaccatacccactgggccatcaaccactttagtgtcaacgggcagtccggtgtcgatattatcggcccgtggcagggaggaggcggtgctggttatttcggtgtgccttcaaaatgggaaccgggaatgacggtaaaaatagactgggaaacaggagaggcatctacagatgacttccctggatttgaaaatagagcaaagtatttagaatgggaaaaaaaataa

SEQ ID NO: 156863 - DNA, 2391 bp, Enterobacter cloacae
atgtccaaaataaatccagacttaacatggtatccacctcactttccaaaacaagggcgtttaccaacagatacagcagcaacgaagcgaaactgtaaacagcaggacagccatgagctggcataccggaatgagctttgtcaagctgcgggtaaaatcgtagagccgccctgctgtaaaactctgcatatcagtttattttttgatggcacaggaaataatcttaataacgatctgtatatttccagtcctaaacatccaacaaatattgctcgtttgtttcgtgcaactatcggtcagggttatgctggtggggttcagggacatactgaagagctggttgatttagcaggaacgtcaggcaacaaatattataaatattatattcctggggtaggcacaccttttcctgaagttaatgaccttgattacagtatgccaggtttggcttttgcctcttttggtgaagagcgcgtcaactgggggctgctacggattattgacgcactcagaagaacatcgggtttaaccgagatttctgacgccgagtgttatgccgccgtcaacagaatgacatcaaatctgggatcggacgggccagacaggcgttataccgtttttaatgaacttttaaaggcagcagatcttgcacctaaactgaaacaggcagttacacaaccagaaccagggaaacctaagctattaggcattaagttatatgtctatggtttctcccgcggtgcagcaagtgcgcgagcatttgtgaactggctatctgagttgctgccagggggcaggagaaagggaagtaaacctgagctttgtctgaagtcgggtgacgtaaaaatccccttaagtattgaatttcttggcctgctcgacactgtggcatccgttggcatagcaaatattgcgccattcgcagaagggcatatgggctgggctgatgacaccatggaattaccggataatgggctgatcaaaaaatgcactcacctcgtttcatcccacgaacaaaggctttgtttcccgctggattcaatttgccgcagcgacggaacttacccaagttatgctacggaagtggtttatcctggaatgcactccgatattggtggaggttatccaccaggagatcaaggtaaagctgttggtagtaacgatagttatttattatcacaaattgctttgcatgatatgtattcatctgcctttcagggaggggcaccactaaaagtcacaaaaaattcgttgcctgatgagctcaaaaaagatgtctggagatctttatctgcagaccaagtattagagtttgatattgatactgatttggtaaatagattcaatgcttggcgtgaagttactctaaacttaagttctgatagtaatcatattcaatataatcctattcgagcaagttcaaatgtaattagtgcccttgaaaatcaaatcggctggattacggcctggcgtatcgggcgatatgcaaatggtgcttataaatctcaggggttttacaaatcgtcaggtgctgagtggcaaaataaagactcagacccggccgctctggctgcatctaaggctgagcaagaacggaaacaaaaagatgtggatgatgcgcgcctgagagcaatcgtggataataggttcaaaaataaaaagttcataccattacccccagggccaaaagattttgacccggctatcgctcaggttcagctaagacaggcggcagaagaattcaatgccgattatcagtctaaaccacgccctgtcacgggaaactggaaatatacggtgtctcagcaattatctaatgtgatgtatgccttcagtgagaatgatttctctgttgagtatgatcgcatcaaaagttcaggtgacagtaaatttaataaactgtttcctaaacaatctgctggagaacctgctcaatcgccagacagtctggtcagatcattatttgacgatcaggttcatgactcacgcgcctggtttatgcaggcaacctttggtgacagagaaccctggggaagttatttcctttatcggatgatttattttggtgagttgatgagtaaaaatgtctcaatgattgcaaaatatggccggtttgttgaaggccaacttaaatcagcgataaaaggagccagtctcatttttgataacacgactatcaccaataatatttcggatgaaattacatctgatattaaacaaatgatttctatcacccctgctgcggcaagtgcgcctgaaattattaatgcagattctactattcaacctgcaatgacaaatggaattgcgccattgggtagccagacacgtaaagccctggatgctgcgaaactggccgaaaccaaagctgatattctcaaaatatggtga

SEQ ID NO: 156864 - DNA, 258 bp, Enterobacter cloacae
atgaaacatattatcaggcagggtgactcgcttaaagagtatggtggttcagttattggcggtcactatctttattttggtaaaggtattgccgtaaaaggtgatgcggtgaaatgtaataagcatgggatgacaacgattgtcgaaggcagctctctgacaaaagttgacggtcaaccagtagcattacatggtcatcgctgcgcatgtggttgtacgctggtgagttccaacccagattgcagggttgcgcagtga

SEQ ID NO: 156865 - DNA, 1137 bp, Enterobacter cloacae
gtgagagctattcctgtatttcctcgttatcgtcttgcgaaaccgccgattgcaaagcgctggttagggggaggtgccgctctggttttgctctctggtatcatcgcggcaatggcaagaaaatccgatgccaataccagtatcattcttatctgcatggttggaatggtattactcggcggtgttgtctggtttgtacgcacgatcttttttcgcctttcagttcatcattcacatacctgggagcgcgaagcagaaaatgagcgcaggcattggtgggaaatacatcagcgtcagtttgccctgaaagatattgtcctgattgggccggcaggcgttgagctttctgactggctgcgtgtgattaagcgagagcatcaggctccattagtcaggcaggaatccctgggtaaatcgttgcgtattgccagaagtttctcttctgctcttattgaacgtgaaaaacaactggctcaaatgctggtattgcaatggaaaaggcagcgaggtaaggaattattagtttctccggagaagtatttctggcaggggagccctgaagcctggcaagcctttgtggcacagctcattgagagttttcctggaattaaacctcctgaattacctgagttatggcaaggggagaaaacattatccttactggctaatgttcttgcggacaataaacagcaggctaattttttgattgccgggtgccagtctttatctcctgtttctgactctactcgtcctgccggtgaatgcgcagttctgtggctggctggaaaccagggggacgtcacattatcccgtggtgaattttttgagccttctgatagtgaatccctgcagcacgtcgccttgcgagccgaaaaacagagcgaacttaatgagtcgcccgaacggtgcattctcttctcacacccggagcaacctcaactcgccgcttgtggctggaatgtgacccacaatatccaggatgactactggggcgatcctggaaagcttgatgcgctggttgtgatatcgctcgctgcaattaccgctaagagtgaagcaaaaccctgcggctggatagcgtcagaccccctccacaccttagcacttgggatcgtaaaaccacatggaaacagataa

SEQ ID NO: 156866 - DNA, 249 bp, Enterobacter cloacae
atgcccgtcactgattcacttcttgcttatatcctcgctgcaactcttctgaccttaacgccgggtcttgataccgcgctagtcctacgtaccgcaacagttgaaggtggtcgcaaagctttccacgcagcaatgtgttttcacggctatcaacaactaaggggaatgacggccatgaaaacctggattcgtcctgattcaaccttggtgcgcataatgtatattatgttaaatacgataaatccttaa

SEQ ID NO: 156867 - DNA, 945 bp, Enterobacter cloacae
atgaaagtattggtgacgggcggaaccgggtttcttggtactgctttagtccgggcgttgaaatcatcgggacacgaggtactagtaacaactcgcaagcaggagaaccctgaacagggaatttacaacctgggtgatatctcagccgataccaactgggtaaatcttcttcagggatgcgacacagtcattcatactgcaggaagggcacatattcttaatgatgatgcacaggatgctttggcggaatttcgtcgggttaatcacgacgcgaccatgaaattagcgacagatgccgcgaccagtggtgttaaacattttatttttgtaagctcgatcggtgtcaacggtaatgctactgcgggaatccctttttctgaagcgtcggagccccggccaacctctgattacgcaatttcgaagctagaagctgagcagagtttacttaaaagcttcgcagagagtgatatggcaatcactattgtccgtccggcattaatttgtggtgaaaatgctccgggtaatatacagcgtcttttaaaactggtgtcgaagaacttgccgttgccatttaaaaatgtcgggaacaagcgggcacttgtatcattaggtaatgtcgttagctttatcaatgaatgcgtcgttaatgaaaaatccaaaaatcaactctatcttctcgctgatatggaacaaccttcaaccgaagatatgattaacgcttttgcttcaggtatggggattaacgcgaaaaatatctattttcctaaattcatcctgaaggtattgctatccgcaattggtaaaggtggaattttcgaacagttatttggcaatctggaagtcgatgccacaaaatcgcgggaacatttgcactggacacccccgataacacttcatgaaactatgaaaaaaacggcgaaatattatatcgaaggtaataaataa

SEQ ID NO: 156868 - DNA, 561 bp, Enterobacter cloacae
atgcataaattggtgattttgggggcgggtggtcatgggcgtacgctctgcgagatggcgagactcctgggatatacggatatcgtttttcttgacgataatgcatctcctttccatgacataaagaaactcattattggaaaaatttcagaactacagttacatatcgaaaaggccagtaaagtagctattggtattggaaataataaaataagagaacagctctaccagcaacttgtcagcttaggtattcaccccgtaacacttatacatccctttgcattcattagtccatcagcgacaattgctgacggctctgttgtattagcgggggcagtggttggtgccaacgtgaaattaggtgcgggtacgatcgtaaatagccattcgacagtagatcatgattctactttaggtgattttgcccacttaggagttggtgttcatcttgctggcggcgctgttattgggaaatcagcgtttctgcaggcgggtacagtgggtggttataatgcaatagtagatgattactcagtgtgttcagctggtactattttataa

SEQ ID NO: 156869 - DNA, 840 bp, Enterobacter cloacae
atgagtaaaccagtacggctgtgcggggataatatgcgttttagtgtgttgatgtcgctttatgacaaggagaaatctgcctacctggatgaatgtttagaaagtttggcctctcaaacgctacaggcagatgagattgtgcttgtctatgatggtccaattaataaggctttaaaagcagtagtagataagtggttatcgtccttaccaattaaaatagttgctttaaaaaataatgtaggattaggagaggcgcttaatgaaggaatgaagcattgttctttcgattatattatgcgaatggatacagatgatatatgtaaaagcaatcgttttgaactacaaacaaagtttatggaaatgaatcctgatattgatatatcaggaagttgcacttatgaattcatcggaaataaaaataatattgtctctgaaaggaaagtacccctcataaacgatgagataaaaaaattcgcaagacttaaaaatccgtttaatcatatgacggttatttttaagaaatcgagtattcaggctgttggcggatatcagcaccattatcttatggaagattataatttatggcttaggctactggggaatggatttaaggcaggtaatcttgacgtgccattagtattggtcagagttggagccgatatgctggttcgacgacgaggtataaagtatattgcaagtgaatataagcttgcgcagctcaaaagaaagacgcactttcagaatatatttacgtcatactattatttcattttaagaagcattcctagattattgccgctttgggctctgaagcgaatttacgatgttacgcgaaaatag

SEQ ID NO: 156870 - DNA, 549 bp, Enterobacter cloacae
atgaaaattactaatacttcactccatggtgtcatgattatcgaacctcgagtatttaatgatgaaagaggttatttctttgaaagcttcaatgagaaaaatttcaaagagaaaataaattctgatgtaagcttcaaacaagataatcaatcccgctcagttaaaggagtgttacgcggattacattatcaggaggctcctttcgcacaaggaaaattggtcagatgtgtatccggagaagtttttgatgtggctgtcgatattcgtaaaggttctcttacctatggacagtgggttggtgttgtattatccgaggaaaataataaacagctttggatcccgcctggatttgcgcatggctttcttaccttaagtcaatatgctgaatttctctataaaactactgattattactcgccaactcatgagcgttgtattaaatggaatgataaagacttgaatatagaatggccacaaatggaatatattatttctgagaaagatcaaaatggctcagcatttgcttcactaaatattcaaggtaaataa

SEQ ID NO: 156871 - DNA, 1110 bp, Enterobacter cloacae
atgattaattttttaaatttaaaagaactcaatagtaagtatgaagaggaattaaaggaagcatgctcacgagtgatccaatctggttggtatataatgggtgatgagctcagcaattttgagtcagaattcgcacgttatgtaggatcaaagtattgcctgggtgttgccaacggtctggacgccttgactctctcgctcaaagcctggattttaatgggcaaattaaaagaaggtgacgaggttattgttcaggcaaatacgtatatcgcatccatattgtcaattaccgctaataacctcattcctgtcctggttgagccttctgagaaaagttataacctttctgtcgagaatattaaaaaagctatttcaccgaaaacgaaagcgattctacctgtacacctttatggccaattgagcccgatgcaggaaataatggatatcgcacatgaacatggactgctggttcttgaggactgtgctcagtcacatggtgcttccatgtgtgaccgcaatgcaggcaactggggaaatgcagcgggctttagtttttatccaggcaagaatcttggcgctctgggagatgcaggtgctattactactagtgataatgaattttttgaggtagtaaaggcattaagaaattatggctctcataagaaatatcagaatatctacgaaggtgtaaatagccgtctggatgagattcaggcagcaatgttaagagtaaaattgcggcatttgaatgatgagactatttctcgccaaaaaatttcacaaaaatatcgtaaatctattataaatcctcacattactttaccggaaattgcgtctggtgatgaaaaaagccatgtatggcatttatttgttatccgtacaaataatcgtgataaattgcagggatatttgtcccagaacaacatccagactcttattcattatccaattccaccgcataagcaacaagcttattcctcctggaatcatttaagcttaccaatatcagaagccatgcataatgaagtgttatcaataccgttagactcaacgcttaacgatgataatgtaaattatattataaaaatattgaatggctataccggatga

SEQ ID NO: 156872 - DNA, 1074 bp, Enterobacter cloacae
atggcacagcgtcctgggataactgtttccccatatttttacggttttattattttatttatgtgcttaaccatgagcgccttttacgcccatgcagccgaggagtgtcaggttggtagtgctaagccacgttcggttggcgatttcacaggcggaaaaccaacgctgagagccgttgatgccgtcaccactcccacaaaaatcagctcactctatcccttaagcctaaccccccggttaatgagcatatgctcaggtggagatgatggagaaaacatcttcaccgcaacacgggctaacctgcaggttggcagcattgacggaaaagccttattcaaaaccaatgtgaccggcattgcttatgcactggcgtttcgcacaaaaggtacgggagttacggcctattttgcccccagcacaacctggtatctgacgttgcatatggaagatcaagatgaattattgcgataccaaacctgggaggccgcggtcgagttttatcagcttcccagctttgccggggttcccgcagaggtggtctccgttggccctgtcggagggactatcggagactttggtatcggcgatccctatgcgcctaatgatgaccatccaggcacaaccatcagcatcgccgacatggcatttaaaacccctatagaaataccgacctgcacccttacggctcctaaaaccgttgacctgggggattatggtgtatccgatatcgagaacgataaaaccataaacaccaattttggggtgacagggaattgcaccaacacccgtaaagtcaccgtgaagttgaccaccagtaaaacaaccggaactgatggctcattactcgccaacaccgcatcgtcgaacgcggcaaaaggcgtgggcgtgttactgaagtggccgaacaacaggcagatagtgcctaattcaactagcagctttaccgcacaagagaacactacccttgccctattcagcttgttacttacggcccggttagttaagtctgatacagaaaaagtcacttcaggcacgttcagcgccatcggcaccctgcagtttacctacgaatag

SEQ ID NO: 156873 - DNA, 588 bp, Enterobacter cloacae
atggatattattaggaattcagtctggctctctcaaggcactgatttgcttgcagagggactttaccgtgttttggattttgacagaaaggtcgatttgttaattttgtttaaaataaaatcagaaagaacgggtaagccaatccctttctcattttcaatgtttaaatattatattgaatcaaatagcataacttgtaaagattatatatatccttcatatatgttagtagatgagaaagaattaacagataaagacagaggaaggcgagatgaaaattacaatatcattaaagatcttgtagatgacagaatgtttctgttcgactatgcattacataaaaagtcgcaccttttaatggattactcaagaaataaaaaaatatcacaatatactatcagaacgcttctggcgttgtattggcgacatgggcaggatatttatgcattgctacccgcattctcgaactgtggcgccgctgggaaaagtagaatcaaacatgaaattaaacttgggaattccaaaaaaaaaacagagcattacctaatgaacgatcacgtgttttcattcttaatgaaagagatataa

SEQ ID NO: 156874 - DNA, 177 bp, Enterobacter cloacae
atgcgtcacgccgtcgtgaccggagccagctccggaattggtgaggccatcgttaagcgtttactggcggaaggctggcaggtcaccggactcagccgccgcgccgtgatgccggatacccctatacccctggctttacggggttacgcgtggatatcaccgaccctgaggcgctga

SEQ ID NO: 156875 - DNA, 537 bp, Enterobacter cloacae
gtggatatcaccgaccctgaggcgctgaacagcgccctgcacgccatcgcgacaccgcaggcggtgatccacgccgccgggatgatggccgccgccccactggggcaactggaaagcagggttggcgcgtcactgtggcaactgcacgttcaggcctgcgaagccctgtttaaccatttcgcgcccgctatggccgccggtggacgatttgtggcgattggcagcagaacctcccgcggggcggcaggtcgttcgcagtatgttgccaccaaggcggcgatgacagggatggtcagaagctgggcggcggaactggccccgcgtgggatcaccgcgaacgtggtcgcgccgggcgccacccaaacgccgatgctcaacgcaccggggcgagaaagctcaccgcctacctgtccgcccatcggccgtcttatcacgccagaagaggtcgcggggctggtgaatttcttgctcagcgatgaagccgccgccatcaccggccaggagatggtgatatgcggcggcgcctcgctcagctag

SEQ ID NO: 156876 - DNA, 1101 bp, Enterobacter cloacae
atgttgggatgtcaggttatgaccaaaccagccagctcacgttgtaatcttgattgtcagtattgcttttatattgctaaaccaccgcgtccagtaatgagtgaagcgacgttagaatgctttattaaacagtacatcagtgcgcagaccgggcctgatgttcattttgcctggcagggaggggagccaaccctgtgtggtctggatttctttcgcttggtggtggaattacagcgacgttatggtgaaggcaaacgtattacaaatgcctttcaaaccaacgggatgttgcttaccgataactggtgtcgtttctttcagcagcatcactggctggtgggaatctcgctggatggacctgaggatttacataatgcgttgcgggtaaatcgtcagggtaaagggacgtatcataaggtgatggcggcaatcaaaaggctgcgttgccaccgtgtttcattcaatattctgaccgtggtcaatcgatgtaactgtcgacacccggagcgggtgtacagatccttgcgcagtctggggacgccgtttctccagtttattccactggttgataaagagaacccgcaggccatttccggccctgaatgggggcattttttgaagcgggtttttgatatctgggttcaggaagatattggccaggtttttgtacaactttttgattcaacactgggggtctggagagggtatccatcccagctgtgtgcactttcacaaacgtgtggacatgcttttgctctggaagcgaatggcgatgtttaccagtgcgatcactttgttgaacctgcccatctgttgggcaatattcatcgtaagccgctgtctgcgcttaatagccataaggatgctgtcgcttttggcagacaaaagttaaccaccctggcagaagaatgtcatcgttgttcggtgcgtgctttttgtcacggtgactgcccacggcatcgcgaggaggggaaaagcgtgctatgcagcggttatcaggattttttccgttattcagccccttatatgcaggcgatgcgcaatttgatccaacagcaacgctcaccctcagagctaatgcgccatctgaagcgacaataa

SEQ ID NO: 156877 - DNA, 1410 bp, Enterobacter cloacae
atggaatatgagataatagtaaacccttatgggcaaaatatgctgagtgcattactgaagaccgatatttcaactgctgttcgctataactatactgtttttggaaaaacggctaatgcagattttagctacagcaatgaagaatattgtgtttcacctgaaattatcattgtcggtttatatgcagactatattaacaatgtaaaattaacggtcactaccgaaacgggtgagagcgaaacgatctcgttaacgattgatacaagcgaaatggattatggtaatgttccactgaaactgacggtaaatatttttgatgaggtaatggcgaaaaatactcttggttcggggtggtttgttacaagttcctggaatggctatgatattaatggcgatttgcgtattacaggattgtttccctggatgtatggaaatttaaaaatcattgatggttcgctctggtctgcgcgcgccagtgaaacatatgatcctgataagcatgcatttgcgcctaatctgtatcgcattaatcttgcgggaaaaataagtcagacgcttgttgcccctgaaggttatggcttccatcatgatatcacgacggataacaagggtaatctctttatccttgggtcaattctggataactgggatgatgagcataagctagagtctaaaatatttaaatatgaccttgccagtggaacattactctggcaacgagattattctaaggagtttgccggagcgacggtactcgataacacagacaccaacgatgttcattttaatagccttgagtatgttcctgaaactaatcagttgattgttaattctcgttcaagttgtacgatactgggacttaatattgagtcgggcgatctcgaatggattatcgataaccccgcctttccggtcctcgacagcgaaattaacctcaaggtcattaatgaagaacagtttaaatacacaaatggagaacacgctgtgtttttgacagctaataagaaatatgaggcttttcgaggagataataagttcgtaatttccatgttcaacaataactcatgtgctgatgcgcaaggcaatgaactggtcagaatcattgaatcagagcccgttacctacacctctgcggcactcgattctctgcctactgtttttgcagttgatctaaacgaatttagcgttcaaagattagaccagttctcatttgaggggcaacgcagcgaattaacatcctcggttttcgataccggtaatgattactacaacgtttattttggtgctgagcagtcattttttgtttttgatacggataacaataccggcgtttcgatttataacattgatacaggtttaggctatcgtggcaggatatttagccacgaagaattatgctcgcttatctga

SEQ ID NO: 156878 - DNA, 1344 bp, Enterobacter cloacae
atggaggctaacccgactatgttttcagacgtgattaacgtaatacaatcttttcttactgaacctgctattttgatcgggctccttgtgggtctcggctatattttagataaaaagccgccgatcaaaatcattaccggcatgatcagtgccatggtggggttgatgatggtgctttttggcggatttcagttttccgcaacgtttaaacccgtcgcagaagccgtgagtcaatcgtatggcattcatggctatttaatggattcctatgccatgaaagcggcaacccaaattgcccttggggataattttggctttgtggggtatgttttcgtactggctttttttacaaaccttcttctcgttttatttggccgttacacccgtgttaaggggatattcttaaccggaaataccggggtttcacactctcaggcggtactctggcttatcgtattttggctcggtctgggctgggtaccctccatcataatcgctggtgtgttgacgggtttgttctgggcttttgcgacgaccctgattgtgaaaccggtggcaaaaataactaacaatgccggttttaccattgcccacaaccagatgcttggtatttggtttttctcgttatttgcacataagtttggcgatccagaaaaacatgacgccgagaatctcaaacttccgggctggctggctatttttaaccataacgtgactgcaattgcgattgtcatgaccctttttgttggcggtttcctgctgtcaacgggtattgagaacgtacagatcatggcgaaaggtaaaccctggtatatttatattatcaaccttggccttcagttctctatgtatatggtgatcctgctgcaaggcgtgagaatgatggtcggtgagatcaatgcctcctttaaaggttggcaggatcgttttataccgaatgcaatccccgccgtggatgttgctgcattgcttcctttctctccgaatgctgcaacattgggttttatattttgtacctttggcacaattttcgcgatgggcgttttgctgttcacgcagagtcccatcatggtactaccgggttttgttccgctctttttctcaggcggccctattggtgtattagcaaaccgcatggggggataccgctccgtaataatcagcaccttcctgcttggcataattcaaacatttggcaccgtatgggctattccgctgacgggtttagcagcggaaggcgttggctggacaggtattttcgactgggcaaccttatggccagctatctgtgaaattctgaaatatatcgcactcacattcaaccttggcccctatgcggcctaa

SEQ ID NO: 156879 - DNA, 324 bp, Enterobacter cloacae
atgaaaagtaaaatcaacattctgttcgtgtgtggctatggcgttggcagtagtgtcatgttgcaaatcgtcgttaaaaaagctctggctaactgtcattttgaatacgaaatgaaacatacagcggcgggtgaggtcggcggctatgcagaatgggcagatatttatgctatttccaaaaaactggtggatgttgtaagtcttgatccatcagaaggccaatatcttattccgattgaaaatattatggatggtgaaaccataggtaaacaaattaccgaagtcattgaaaagcactttccccatctcatcaaggccagttaa

SEQ ID NO: 156880 - DNA, 1497 bp, Enterobacter cloacae
atgaaagcgatcattctgcttttcgatagtcttaacaaacattatcttcccccttatggcgatccggtaacccaggcacctaattttcagcgtctggctgagcactgcgcaatgttcaacaacagctacgttggcagtatgccctgtatgcctgctcgccgtgagttgcataccggacgttataattttctccaccgggagtggggaccgcttgagccctttgacgattctctgcctgaactgcttaaagaagcgggaatttatacacacttaatcagcgatcatcttcattactgggaagacggtggcggtaactatcacaatcgttacagctcatgggagattgttcgcggtcaggaaggcgatcactggaaaggctgtgtcggcgaccccgccatacctgacgttttgcgcgttcctcagaaacagaccggcggtggtgtttcaggcctgtggcgtcacgactgggctaatcgggagtatattcagcaggaagcagatttcccgcaaacacgggtctttgatgcgggctgcgatttcatcgagaaaaaccaacatcaggataactggttacttcaaatcgaaaccttcgatcctcacgaaccgtttcatagccccgatgagtacctggcactttatcaggatgaatggactggtccgcattacgactggccgcggggtaaagttgaggagagtccagaagccgttcagcatatcagatgccagtaccgtgccctgctttctatgtgcgaccgcaacctggggcgcctgcttgatatgatggataaatgcgatctctggcatgacacactgttgattgtgggtaccgatcacggtttcctgctgggagaacacggctggtgggcgaagaatcagatgccgtattataacgaagtggcaaacaatcctctgtttatctgggatccacgcatccggcaacaggccgttgaacgcgatgcgctggtacagatgatcgactgggcacccactgtgctggattatttcaatctccccatccctgaagatatgcagggtttacctcttgctgagacagtcgatactgataaaccagtgcgagaagccgcgttgtttggcgtctttagcggtcatgtgaacgtaactgatggccgctatgtgtatatgcgagcggccgtgcctggccttgaagatcgaattgccaactacaccctgatgccagctaagatgaacacccgttacaatatagaagaactcaagcacctttctcttgccgcccccttcagcttcacgaagggattgcaaacgctgcggatcccggcaaaagaaaaatacaaaggtgttaaccaaagcggaaatttgttgttcgatctacagaccgacccgcagcaagagtcacccctggacgatcccacgacggaagcgcgaatgatagccttgctcattcgtctgcttattgaaaacgacgcgcctgctgagcagtttgagcggcttggtctaccctatcctgcagacgtataa

SEQ ID NO: 156881 - DNA, 369 bp, Enterobacter cloacae
atggaaaataatgcactgactttggttttaaaaaacgattgggtagtttcgtcttctggtaatacctataccggaaaatacacggttggaaggtttcacctgacagatgcgttcatcgttgtgtatatgaagctgatacatggaattgaaatacccgatttatgggtcagtagcagcttcactaacataccagataccgatacccgaagggttatgtatatggaaggctgcgatatgttatcgaaagatacaattaacgaaatccgtaatgcagtgaagtccccgcctgacaagctgaaaatatatcgtaatggagagcgtattgttaagacagaagttatggagaaacaaaatgacctcaaaatttaa

SEQ ID NO: 156882 - DNA, 1935 bp, Enterobacter cloacae
atgactgagcaatctgctgttagaggtggtgaagttaaaggggcattattaaatctacgaaggggtataaagaggcttcaaaatggtcacccttatcaggcaatcaagtatttagggaaatcttttattccactctataaagaggaatcacgagataaatttatattaacattaaaagctattgcttatgcttacgagtccattggattgctatggagttcacgttcatgcttgcttctatccgcttctttgattacagataacttctggaagtatgatgagatatcgttaaagcaggctgagatttattatagtttatgcctaacagaaataaaactagggaaattagcacatgcccttttatggtatgaactgtttttaataattaacgagaatatcaatgatagctcgttcggcgataaagaaaatcagcaagtcgatttttacataagtcaactcattttgaacactgacctaaagggaatcaatcgacaaaggaatatccccgatgaactcgatagattaggcctttttgtatcatcgggatgtcttaaatatgctttaggttatattgaagattttgaacgtgagtacgaagttactgtcgataaagatcataatgatttcttgcaaaagatacgtgactttgatgcaggatttaatagtcagggcataaaagataaccatgacaaacgaggagtacatacatcttttatttttggatgcaccatagaaattaattttccgaatcggtcaccatttatagagttttcaactaatgtcttatcgcttttagagagtgcatttgcaacctgtacgattgacaacatccatcttaaagaagcatttttaattattgaagtaatagcagatgacgatgatgactttttcttatcacatgaaataaatagcaatagtggaaagctaaatcttacaataaattgcgctggttttgatgtaagtgattttagaatcgagactcaacaaaaaatcactaatgaattcaagaggttggtgtttgatcttctccctgaattattttttataaaaaatacagaatacattgaaaaaatgatcttcgaagatgctgcattcgacagggcaattagttttggtgcttgtatcaaatctattgaaaatgttcttggaaatgatattgatcaacaaattaagaaaatttattccacttgtgctgaaaagaaaacttaccctcttttaagagataaatcttgggatagtgaatttccgaaagtgttggagaaagaggatataaaatctccaacacctggtaaaggaagaatgcctgaagaggaacttaattccgaaaatataacacataaagattattccatacagagtctaatcaaacctcgtctatgggatagaacacgctggcaaggagtaggcttcgctcaattaaaatcgtgttacccagggttatatctattatttaaacaccccgatataggtgaagatatttttaaagatcttatatcatcagtaggcttggtagatagtaaagccagattacgggtatgtattgtcaagggtatttcagttaaaaacccaactcattatagagtactaatatctgaaaatatgatgacgactccgttaactaaaagaatgacaatgatcagtagaattaatacgatgactcctgatagcaatgtcaatctagaaaggtttcttgctgcatatcagacctgtggaaaattctatcttggatgtgatgcgatgttaaaaaatattgttcctgagcatccacaaagagatagtttagggatagaaatgggtacgttagatgttaggtgggcttgggaaattgggttaaatgatgttgattgtattggggttaatttaaaagaagatgacccctatattcctgatgatgtagctgagatcccattattgcaatttataaacagtaaataa

SEQ ID NO: 156883 - DNA, 267 bp, Enterobacter cloacae
atgggaggccggagttctgctgaaaaaaaacagaatttcggccttacgcaaaatgcaatgttgtttgttgaatgtctgttaagagcgaggagcggaagttcggtatgcatacttacttcgatgcgttttcagcaatggggagcgggtcagcaatttattatgaaagcgataacactaatagcattagtgacgaggctaaagatttgtttaaaacccgcccccttaagaggcggtattcttggcaaacattttatttactgtttataa

SEQ ID NO: 156884 - DNA, 123 bp, Enterobacter cloacae
atgttaacgaaaccccatgacaaacaggaaaaagttgtcacgccacttgaacgccgcgccgtcataggctcgctcatttttatattcataatctatgcagtgttactgatgactcaattttaa

SEQ ID NO: 156885 - DNA, 759 bp, Enterobacter cloacae
atgaagaagggattatcggtatggccaccgctttcaggcgtggcttgcggggtgatttctgcgctgtttttctcttccggcgttcaggctgacgatgacatacagtttgacagtaattttttgcgcatctcacatccggaaaaagtcgacctgtcggcgtatatgaaaaacggactgccggcgggccggtaccgggcggatatttacctgaataataagctggtcatgatcgaagatattcgcattagcggaaaagagactgactcgcagagaattctgttgtcgccagcgaccgtcgcaggattacagttaaaacagaacagactgtgtgtaaataacgacggccaatggtgcgatctgcaggctgtcctgccagaaagccatctggaatttaacggcggcagacagcggcttgatgtcagtattccccaggccatgctgcagcatgccgcgcgcggccaggtaagcccggcgctctgggatgccgggatccctgcgctgttactgggttataacgtgaatggctaccgtagcgagaatagcggcggagaatataacaacctctatgcggcgctgaacggtgggctgaatatcggctcttggtattctcgccataacgggacgttaagctggcagcagcagaatggcacgcagcagaaaaaatatacggtgctcaacagctacgtgcaacatccactggcgggtattgagggaaacctgacgttaggggagttcgaacacctccgggcagctatttga

SEQ ID NO: 156886 - DNA, 1107 bp, Enterobacter cloacae
atgtatagacttgtattaactgtaatacttttatttccattttcagcttttgcaacatgcgtgctaaatacaactgataagaatatgttacagcaggagaaaactgttaatatccccttaaatcatcagataatatctgtggggggagatatgtcagtgggtgctgaaatatatagacaaacataccgctcgggattgagtgcttataaggtaacctgcgcaagtagcaatggttatttcagaattaaccgacaggttgtgtttactccaatgccagtatcaggatattctgatggagtatatacaaaagtttatgaaacagggattcctggaataggcataagcatatggaatggctctaggactatgtggccgaatgaaacaatattatgcactggtctcgatggtattaattgttcagtaactgacccttacagcactaacgctttcgacatcacattgataaaaacgggtgagattgccgcgggacttcttgatgcttctaattttccaacgataacaataagccttggtaagcaaaccgagaattatgttaagattgcaacttactctttcaccggtagcattcagataaatacatcaacctgcactacacccgattatactgtcctattggggaactggccgcaaacaagatttcaacgtaaaggctctgccagtccatgggtgccctcgagcatagtattaactaactgtacgaaggccccaggaaataaaccaacaggtggaaatgtatggtcagaaaagacttctctcatcgtttcagggtccttaacaccgaacccctggactgtttctttttcctccgtcagcggcgtgattgatgctgataacggcatcatctccacggacacgtcagcaagcgatgcggcacagggcgtcgggatacaactcagccaggggcggcccgacagcgcaggaacaaaccttttaaaaatcggggatagcgcaatgaccggaacgttgcccacaacgggtgagacgtcatatgtcattcccttatcagcacgtattatccagacggaggattctgtggtagcggggaacgtaacaggaaaagtggtgtatacgctcaattatctttag

SEQ ID NO: 156887 - DNA, 222 bp, Enterobacter cloacae
atgctggaggaagatttgcttttgaaatactcaataaggtggatattttctaaacgtgatggcattcacgaaattaaaagcctccccaaaggggaggcccgccttagcctggattacatcacctgcgtaaacgtccttgaaatcacatcctgctgctgctcgcgcgtcagggcattaaaccgcaccgcataccccgaaacgcggatcgtcaggttcgggtaa

SEQ ID NO: 156888 - DNA, 198 bp, Enterobacter cloacae
atgaaagatagaccgcatgacgtggcgatggccgagcacttccgcgcccatccgacgtatgcagcggagttgcttgctgaagcctgccgcgaaggcaaccctgctgagctagccattctgttgcggcagatggccacggcctcggaaggttgcgcgaggtcggatgacgccgatacagggcgcgctttatttcgctga

SEQ ID NO: 156889 - DNA, 126 bp, Enterobacter cloacae
atgctagtggaagtccgcgaacgactgggcgaagccaagaagatgatcgcctcagggaaatctccagccgaagagaagacactggacaaagcccgcgttgaggacgctgaaaactttggcgactga

SEQ ID NO: 156890 - DNA, 216 bp, Enterobacter cloacae
atggtacgatttgaacctgatgccatgttcaacactcgataccatgttgctcctgatggggtggtcatagtattgaattcatataatgcattgttctgtaatttttttatgggaaatgcgagggtttttgagcatgatatttttgagaggaaactcaacccgaccatgctgactgatactaagctgcgcaacctcaagccaaaggacaaactctga

SEQ ID NO: 156891 - DNA, 768 bp, Enterobacter cloacae
atgacgttacgaactgaaaatctgtccctccgctacggcacgcaaacggtgctcgacgggctatctcttacgctgcctgcgggaaagatcaccgcgctgctcggcccgaacggctgtggaaaatcgacgctattgaactgcttttcccggctgttaacccctgagtccgggacaatactgcttgatgaacagcctgtcgcaggtatgacggcccgccagctggctcgtcgtctggccttgctgccgcaacaccatttaacgcccgaggggatcaccgttcgggaactggtctcttatggccgcagcccgtggctaccgctatgggggcgcttatccgttgaagacaacgcccgcattaacgtggccatgagccagacccagacccacgttctagctgaccggcggttaaccgaactttctggcggacagcgccaacgcgcgttcctggcaatggtgctggcgcaggatacccccgtcgtactgcttgatgagccaacgacgtatctggacattaatcatcaggttgagctgatgcgtctgatgggtgacctcaggacgcagggaaaaacggtggtcgcggtgctgcacgatttaaatcaggcaagccgctactgcgattatctggtggtgctggcaagcggacgtgtgatggcgcagggtgcgccagaagaggtgatgacgcccgcgttgctgaaagccgtgtttaacgtggaggcggaaatccatccggagccggtatcgggcaggccgatgtgtgtggtggtgtag

SEQ ID NO: 156892 - DNA, 996 bp, Enterobacter cloacae
atgcttatcagacatccggtgctacggtggggcctccccactgtcgcgctcttgcttcttttctggctgagtctgttttgctactcggccattcccgtttccggggctgacgcttttcgcgccctgctgcctggccacgcgccgacgctccccgaggcgctggtgcaaaacctcaggctaccgcgtagcctggtcgcgatcctgaccggtgcaagcctggccctggcaggctcgctcctgcaaaccctgacgcataaccccatggcctctccttccctgctcggcattaacagcggggcagcgctggccatggcgctcaccagcgcgctgagcacaacgtcggtggccggtttttccctctctttcatcgccgcatgcggtggcggcgcgagctggctgctggtaatgaccgctggcggcggatttcgccatacgcaggacagaaacaggctgatcctcgcgggtatcgccctgtcggccttttgcatggccctgacccgcattacgctgctgctggcggaagatcacgcttacggcattttctactggcttgcaggaggcgtttcacacgcccgctggcaggagttctggcagctcctgccggtggtggcctttgccgcgccggtcgtgctgctgctggcgaagcagctgaatctgcttaatgtcagcgacagcaccgcccatacgctgggggtggatctgccgaggctgcgcctcatcatcaacgtactggttctgcttctggttggagcctgcgtcagcgtggcgggtccggtggcctttatcgggctgctgatgccgcatctggcacgctactggacaggattcgatcagcgcagcgtcttaccgatgagcatgctgctgggtgcgatgtttatgctgctggctgatgtactcgcccgcgcgctggctttccccggcgatcttcccgccggcgcggtactggcgctggccggtgccccttgttttgtctggctggtcaggaggcggggatga

SEQ ID NO: 156893 - DNA, 903 bp, Enterobacter cloacae
atgttcatacccttacgcacccttttcgccgctctgctgctgattgccggccacgcctttgccgttacggttcaggacgaacgtggcacgtttacgctggataaaacgccgcaacggatcgtggtactggaactgtcgttcgcggacgcgctggccgccgtagacgtcagcccggtcggtattgccgacgataacgatacccaccgcatcctgcccgaggtgcgcgcgcgcctgaaaccctggcagtccgtcggcacgcgtgcgcagccgagcctggaggcgatcggcgccctgaagccggacctgattattgccgacagcagccgtcattcaggcatttatggcgcattgcagaatattgccccggtattattactcaagtcacgtaacgaaacgtacgcggaaaatctgcagtctgccgccatcatcggcgatgttgtggggaaatcagcacagatgaaggccaggcttgcgcgtcataaacagctaatggcgcagtgggccagccagctgccaaagggaacgctggcaatcttcggtacctcccgggaacagcagttcaacctgcacacccgggagacctataccggcagcgtcctgaccgcccttgggctaaaagtgccgacggcgatggccggggcatccatgccgtctgttgggctggagcagcttctggcgctcaatccggcctggctgctggttgcgcattatcgcgaagagagcatcgttaagcgctggcagcaggatccgctctggcagatgttaaccgcggcgcaaaaacagcaggttgtttcggtcgacagcaacgcctgggcgcggatgcgcggtattttcgccgccgaacgcatcgccagcgatacggtaaaaatcgttcatcaccagcctttatccgatgtgaaataa

SEQ ID NO: 156894 - DNA, 954 bp, Enterobacter cloacae
gtgagtccttccgtaaccgactcccgccgcagggcgctgcgctcggcatcgcactggtatgcggtattaagcggcgaacgcgttagcccgcagcaggaagcacgctggcagcaatggtatgaagaggaccaggataatcagtgggcctggcagcaggtcgaaaacctgcgcagccagctcggcagcgtgccgggtaaggttgccagccgggcgctgcaggacacccatcttacccgtcgccacgtcatgaaaggtctgctgctgttgctcggcatcggcggcggctggcagctctggcactctgaagccggggaaggcctgcgtgccgactaccgtaccgccagaggcacggtcagccatcagcggctgaaggatggttccctgctcgcgctcaacacgcagagcgcagcggatgttcgttttgacaggcatcagcgtaccgtccggctctggtacggcgaaattgccgtcgctaccgctaaagatgagcaccagcggcctttccgcgttctgactcgccagggccagctcaccgcgttaggcacgcggttctccgtgctgcatctggataacaccacgctgctcacggtccagcagcatgcggttgaggtttcactggcacgccatccgcaggaaaaacgcatcgtaaatgctggcgaaagcctgcggttcagcgactctgagtttggcgagacgatgccagcggaggaggaaagcgccagctggacgcagggggtcctgagttttagcgataaaccgctgggtgaggttattgccacgctgagccgctaccgcagcggcgtactgcgctgcgatccagcggtggcgcaattacggctaagcggcaccttcccgctgaaagataccgatgcggttctgaacgttatagcacagacgctgccggtgaaaattcagtcagttacgcgctattggatcaccctttctccagcgtaa

SEQ ID NO: 156895 - DNA, 522 bp, Enterobacter cloacae
atgtctgaccgcgccgccaatacagcttctctgacccttgaatcgctttacggcgcgcatcacggctggctgaaaaactggcttacccgcaaactgcaatccacctttgatgccgatgatatcgcgcaggacaccttcctgcgggtgatgggcagtgacgccctggccacaattcgcgatccgcgcgccttcctgtgcacggttgctaaacgggtgatggtcgatctcttccgccgaaacgcgctggaaaaagcctacctggagatgctggcgcttatgccagaggcgctggcaccctcaccggaagcgcgcgaaagccaactggaaaccctacagcttatcgacgccatgcttgacggactcagcggcaaaacgcgcgaggcttttttgctgtcacagctcgagggcctttcctacagcgaaattgcccaaaggcagtccgtctccgtcagctcggtaaaaaaatacgtggcaaaggccgttgagcactgcctgctgtttcgcctggagcacggcctgtga

SEQ ID NO: 156896 - DNA, 585 bp, Enterobacter cloacae
atggacatgaacgcgggctatataagagcagcgcgtatccacttacccagtgcggttgagaaaatcgcctttgaccgcttccatgtggcgaagcaactgggcgaggtagttgataaaacccgtcagaatgaacatccgcacctccctgttgaaagccgacaccaggcaaaaggaacccgcttcctgtggcagtacagcgataagtggatgaccgaatcccggcaggaaaagctgatgtggctgcgtgcacagatgaagctgacgagccagtgctgggcgctgaaagagctggcaaaggatatctggaacaggccatggagcgaggaaagacggagtgactggcagagatggttggcgctggcggctaacagtgacgttcccatgatgaaaaatgccgcgaaaacgataggaaaaaggctgtacgggatcctgaatgcgatgcgacacagtgtctcaaacggaaatgcggaggcacttaacagcaagatcaggctgctgaggataaaagccaggggataccgaaaccgggagcgctttaaactgggggtgatgttccactacggaaagctgaatatggcgttctga

SEQ ID NO: 156897 - DNA, 1824 bp, Enterobacter cloacae
atgttgctaaagaaaagtcgtggtcatcagctgtcagcgttgagtttgtgtctggcggtgatgtttgctccactgttaagcgctcaggccgatgagcctgaagttgtaccgtcagacagttccgcgacgatgggtgcgcagccgacgtcgctgtcacaaccgctggatcaatctccggcgacggccattttagcgggtatcagaccgctacccgaaggtatcgacaccggcgcgctccgccagcagcttcttaccgggcttcctgcaggttacacgcctgcttacattaaccagcttacgctgctttatgccgcgcgtgatatgaagccgatgtgggaaaaccgggacgccgtgcgcgcttttcagcagcagctggcggaagtcgccattgcaggttttcagccgcaattcaccacctgggttgaactcttgaccgatccggccgttaccggtcaggcgcgtgatgtggtgctgtctgatgccatgatgggctacctccagttcgtggcgggcattccggtcaatggcaaccgctggttatacagtcaaaaaccgtacaagctggcgacgccggcgctgtcggtcattaaccagtggcaactggcgctggataacggtgacctgccgcgctttatcgcaagcctggcaccggcccatccgcagtatgccaccatgcatcagtcgctgcttgagctggttgcggattcccgcccgtggcctcaggtgcgtggcacaaccacgcttcgtccgggacagtggagcagcgatgtcccggcgatccgcgaaattatgaaacgctccggcattctcgaaagcggtcctaagattgcgctgcccggcgacgatacgcaaagcgcggtcgtcagcccgtcggccccggtaaaagagaaacaggccgttgcgcagagcaacaaacccgccgcctacgatcgcgaactggtcgcggcggttaagcagttccaggccgcgcaggggctgggcgcagacggggtgatcggtccatcaacccgcgactggctgaacgtctcgcctgcccagcgtgctggggtgctggcgctgaatattcagcgtttacgtctgctgccgggaacactgtcgaccgggattatggtgaatataccagcgtattcgctggtttattatcagaacggtagcgaggtgctggcgtcgcgtgtgattgtcggacgtcctgaccgtaaaacgccgatgatgagcagtgccctgaataacgtggtggtaaacccgccgtggaacgtgccaccgacgctggcgcgcaaggatatactgcctaaggtctggaacgatcctggctatctggagcgtcataactatacggtgatccgcggctggaacagcaaagagacgatcgatccgtggatggttgactggtcaacgattacgccgtcaaacctgccattccgtttccagcaggcaccgggtgcgcataactcgcttgggcgctataaattcaacatgccaagttcggacgctatctatctgcatgatacgccgaaccataacctgttccagaaagatgcccgcgcgctcagctcaggctgcgtccgtgtgaataaggcatcggaactggcgaatatgctgttgcaggatgcgggctggaacgacacgcggatctccgatgccctcaagcagggggacacccgttacgttaacattcgacacaatataccggttaatctttactatctgacggcgtttgttggtgaagatggacgtacccagtatcgtacagatatttacaattatgatctcacagcgcgatccggcgcacaaattttgccaaaagctgaacaattaatcaggtaa

SEQ ID NO: 156898 - DNA, 5436 bp, Enterobacter cloacae
atgaagccaagaacaaggaagttgcttgctgtaatgcaaattatattacagcttcttcccccctcatcgttactctatttatctccaatatttaacgctactgcacaagaaataaaatcctcttctgaaaaacagcaacctgcaaataatggcgaagaaagcgcgaacagcgtggctcaggcagccgttcaggcaggctccctgctcagcagtgacaatgcctctgatgcccttggcagtgcagtagtctccgccgcaaccggcaaggccgcctccagtgtacaggagtggctgagccagtttggtaccgcccgggtcaatatcagtactgacgaacatttcaccctcagtgattccgatctcgatttactggttcctctatataacggaaaggaaaatctgctattcacccagctgggcggccgtcgccacgatgaccggaatattgtgaatggcgggtttggctaccgccattttaatgatggctggatgtggggtaccaatattttttacgaccggcagatttcaggtaatcagcatcagcgtctcggcctgggtaccgaactgggatgggattatctgaaagtttccgctaatggttatttacgtctgagtgactggatgtcctcatcccgctatgaagattacgacgagcgcgcggcgaacgggtttgatattcgtgccaccggctatttaccggcgtacccgcagttaggggccaatattatttacgagcagtactttggcgacagcgtcggcctgttcggggatgatgaagacgatcgtcagaaagacccttatgccgtcacgctcggcgtcaactacacgcctgttccactggtgacgatgggcctgaaccagaagatgggcaagagcggtgaaaacgatacccaggtgaacctggccctgacctggacgccgggcgtgccgctgagtgcccagcttgacccgtcgcaggtggcgctgcgccgtacgctgcagggcgggcggatggatctggtcgatcgcaacaacaacattgttctggagtaccgtaagcaggagctgatttccctctcactgccaccgaaactggaaggggctgagcagtcaaaacagtccgtgacggcgaaggtgaaagcgaagcacggtcttgaccgcattgcgtggcagggtgacagcttcttcagccacggcgggaaaattaccgcaggtggcagtccggagcagtttgtgatgacgctgccggtatggcagggcagcggcagtaacagctacaccctgagcgccaccgcatgggataaaaacggtaatgcctcgaaacctgcgcagatgaacgttacggtgaacgggattgacgtcaacaccctgcagtccaccacgacggtttcgccggcgaaggtaccggcagacggcaaaagcactgccgtggtgagcgtgacgctcaaaaccggtgcgggtgaggcggcaacgggtctggcttctcgcctgacggcgacgctgagctcttcggtcaccgctgccgcgaaaacggcggatgcgacgtccgacagggtgccggcgatggggggctttacggaatccggcagcggcgtctatacggccacgctgaccagcggcaccacgccggataccctaactatccagccgctgattgacggtaccatcaaactggccaccgcgaagctgattgaagaggcaacggtggtgataccgcaactgaccacgctcgatgcctcggccaccagtgcactggcgagcggcagcgcgccggttacgctgacggcacatgtgacggaccagtacggtaaggcgctgaaagacgccgtggtgaactggtctgcagacagtacgcaggcggtactttccgcgtcacagaccagcaccgatgagaccggagccgcacaaatcgaagtgaccagtcaggatgtcatcaccacggtggtgacggcacagctggaaggtggcaatgccctgaattcgccgtctctgacgtttactgcagacatgtcgacggcaaaagtggtggcagttgacagtgaaaaagcgcaggtggtggcgaataataccgataccgacacggtcacggcgcaggtcacggacggcttcagccatccgctcgcaggcgtgaccgtgaactggacggtcgagaaaacggacgatacgccggttgccacgaaaacctcggtctcagacagcagcggtaatgcggtgctttcactgaaatccgccaaaaccggtaccgtcacggtgaatgctgaagtgaatggcacaactcaggaaacggacccgatcacctttgtggccgatgccagctcggcagccgtcagccagattacgcctgacaaaaagcaggcgctggcgaacggtacggacagcattacctatgtagcgacggtgacggacgcgaaagggaacgccgttgcgggcgtgacggtaaactggtcatccgataatgccgacgcgaagctgagtgccgcgcagaccaccagcgacagcagcggcaaatcgcacatcaccgtgacctcgcagaaggcgggtgcggtggtggtgagcgccggcaccagcagcagtacgctgaaacaggcagacagcgtctcgttcacggctgacagcagcagcgcgacggtcacgacaatcgaaagcaaccgccagtcggcgctcgcaaacggtacggacggtattgtgctcagcgcaaccgttaaggatgccaacggtaacccgctgcagaatgcggatgtcagctggacgagctcgccggcaactggaaaactctccgccgacaccacgaaaaccagtgctgacggtatcgcgaaggtgaccctgacctctgccgatgtcgcgacctacagcgtgacggcaggtattaatgcctcgacgaaaacggcgtccggcctgtcctttatcgccgacaccagtaccgcgcatctggataaactgacgacctcagccacccgcgtactggcggacggtaaaaccgccatcaccctgacggcgaacgttgtcgatcagaccggccacccggtgaaagacgagcaaatcaactggagcgcggataacgccagcgcgaagctgtctgccacgcagtcggtgacggacgaccaggggcaggctcaaatccaggtcaccagcgctgatgtgatcaccacggtggtgatggctcagcacaaccaggctgaggcgctgaaaaccgacccgcttagttttatcgccgatacggcgtcggcgaaggtgatgagcatcagcagtgaaaaggaccaggttgtcgccaacaacatcgataccgatacggttacggcacaggtgcttgacagctacagccacccgctgagtggcatcacggtgaactggcatgcgaaacaaacggacggcacctcagtgaaaagcaccacctcggtgaccgacagcagcggaaatgccacctggacgctgaagtcagcgaaaaccggcgcggtaatcgtatcggcggatgtcagcggcacggcggcgaaagagaccgggcagattacctttgtggcagacagcagcacgcaaagcgtaagcgtcctgacggcggataaaccgcaggccacggcgaacggcacggataaaattacctataccgcgacggtaacggatgcgcaggggaacgtggtgccggggtcaacggtcacctggtctgcagacagtgctgacgcgaagctgagcgccacccggaccaccagcggtgctgacggtacgtcgcagattaccgtgacgtccgttaaggcaggcgatgtggtggtgacggcgcagaccagcgaggcgacggcgaaagcggcggataaggtcacctttgtggcggataccacgacggcgcaggtcgcttccattaccagcgataaaccgtccgcgctggccaacggaacggatgccatcaccgtcagcgccacggtcaccgataaaaatggtaacctgttggccggcgtggatgtggactggtcggaaacctggcaggtgacgccagcgaccggaaaactgtcggccgacaccacgaaaacggataacagtggcgtggcgaaggtgcagctcacctcagaagacgtggcgaagtataccgtggtggccggtattaacgggaccagccagtcactggaaaacctgagctttacggcggacagcagcacggcacaggtctcctccctgacggcggacaaaaccacggatattgtggcggagaaagacacggtgaccctgacggcgctggtcgtggatgcacaaaatcatccggtgccggatgcgacggtgaactggagcagcagcgagccggacagcaacttcagcgcgaattcgacggtgaccgggagtgatggcaaaacgtcagtcaccttcagcagcctgaaggcgggcagtatcgatgtgacggcaacaaccggcagcagcagtaaggtgcagacgctgcaggtcatcgggaaccaggccacggcgaaggtgaccggcattacggcggacaaaccgcaggcggtggcggacggcacggaaaccatcacctggacggcatccgtaacggacgccaacggtaacgtgctgacgggcgccaccctgaactggagcaccagcctggacggcgtgacgttaacacctgccagcagcgatacggatgcggggggtaaggcgaccaccgcagggacatcgctgaaagccggaacggtgaaggtgacggcgacgcctgtcagtcacaccagcggccagaaaacaagcggtgatgcgaaatttgtgggtgatccgaaaacggcgaagctgatctccctcacgccgtcttccacccgcgtggtcatcaacggtatgggggtgacctacactgcattagtgaaggatgtaaatgataatccagtaacgggtacaactgtttcatggacgactaacattaacacgctttcagcaaccgaaagcgtaacggatagtgtggggcaagccaccgtgaatttacatgggggaacacgtggtctggctacggttactgctgttgcaaacggtacaacattgaagaacagcagcgtaacatttaccgacgttgtgctatatgactggaatattagcgggtcttcaggaacgtataagggcgataaaattcgtgacaatccttctattggattcgtcgtcacagggaaaacacaggggccaacaacgcttcaatgggggggatcacaaccttcaacactgattgtccctatggctgatgacgatggcgttatacacaacgtaacgtttacaggtgtaagacaggaggcttgtggtacacattcttttaataatgctgtggtatgtagtgatggcggcgataacgctagttaccctcaaataacgtatgcggctgatgctaatgaagatcttcctgttgggcattataccgggcatattacatttaacggtgtcgagtggcataccatgagtccgttactggcctacgatatcaccacatccctgaccgtagagtaa

SEQ ID NO: 156899 - DNA, 585 bp, Enterobacter cloacae; identical to SEQ ID NO: 156896

SEQ ID NO: 156900 - DNA, 1815 bp, Enterobacter cloacae
atgttaaacgcctggcaccttccggttgccccatttgttaagcaaaacaaagacaaccttgtgattacgctctggctggcgggggaaaatcagcctgaacgcgtgacgctacgcgctgaagtcgataatgaagaaaccacgctgaaaatgcacaagcagcgcagccagccgcagcctggcgtaacggcatggcgggcaaacatcgacttgcgcagcggccagccgcgccgacgctatagctttaagctgctctggaataaccgccagctgtggtttaccccgcagggatttagccgttttcctccggcgcggctggagcagtttgccgtcgattacccggacgctggcccgcagtgggttaacgatcaggtcttttatcagatcttcccggatcgctttgcgcgcagcgaaacgcgcaccgccgggcaggataaagtttattaccaccacgctgcaggacacgacattatcctgaaagaatgggatgagccgttaaccgcgcaggcgggcggctcgacgttctacggcggcgatcttgacggcatcagcgaaaagctaccgtatctgaagaagctgggcgtgacggcgctgtaccttaacccggtgtttaaagcaccgagcgtgcataaatacgataccgccgattatcgccacgttgacccgcagtttggcggtgatgacgcgctgcttcgtctgcgtaaaaatacgcaaaaagagggcatgcgtctgattctggatggcgtgtttaaccacagcggcgactcacacgcgtggtttgaccgtcataaccagtcgatgggcggggcgtgccataacccggattcaccccagcgcgactggtacagcttcaacgaggaggggcgcgcgctggactggctgggctatccgagcctgccgaagctggatttccagtccgcaacgctggtgaacgagatttacggcggtgaaaacagcattgtgcgccactggttgagtgagccatggaatatggatggctggcgtcttgacgtggtgcatatgctcggtgaagcgggcggggcgcgtaataatcttcagcacgtcgccgggatcacccgtgcagcaaaagccgcgcagcccgaggcgttcgtgtttggcgaacattttggcgacgcgcgccagtggctgcaggcggacgcggaagatgcggcaatgaactatcgcggttttaccttcccgctgtggggattccttgctaacaccgatatttcctacgatccgcagcatattgatgcggaaacctgcatggcatggatggataactaccgcgccagtctttcgcatcagcagcagttacggatgtttaaccagctggacagccatgacaccgcgcgatttaaatccctgctcggtaaggatgtcgcgcgcctgccgctggcggtgacctggctctttacctggccgggcgtgccgtgcatctattacggcgatgaggtggggctggacgggaacaacgatccgttctgccgcaaaaccttcccatgggatccggcgaagcaggacaaagcgctgttcagtctgtaccagcgtctggcgaagctgcgtaagcagagccaggcgctgcgctacggcggttgtcaggtggtttatgcccacgacaacgtggtggtgtttgtccgcgtctataaccagcagcgcgtgctggtagccatgaaccggggcgaggcgtgcgaagtggtgctggatgactctccgctgcttaacgtgagcgcgtggcagctaaaagaggggaaagggagcgtgcaggaggggatcctctccctgccggcgatttctgcttccgtctggtttggctga

SEQ ID NO: 156901 - DNA, 4974 bp, Enterobacter cloacae
atggaaataaaaaaagtgggtggagctggtctccatgcaagtgaactcagagcaatcagtaaaatggaacagcacttccaaagtagctggcatggctttgcgggtctagttgcatctgatgcgcaagggcctatggaaattgactgtcttataattacccatgaccgactgcttttagttgagctcaaagagtggaatgggacaatcgaatatgataacgggatgtggatccagaatggtcaaaaccgtgggaaaagtcctttcgctattaaacgagaacacgccctgcgactgcaaaagttacttgatagtgagttgtctcacaatctcggttattggctcagtgtagaggctcacgtagtactctgcggaagcgctactccagagaatctcccccaaattgaaagaccatttgtacacaccctcgatgaatttttagcaattcgttctcctgaaaagtatgacgatttagtcgcgaataaaagactggccggattcttcagctccacgggaaaagcaagaccaaactccgaaaagtctttgcagatcatctacagatttattgaaggaccaaaaattcaaaaaaaagagctcgttgttggcaactttcaagcgcatacgaacaaatcttggttcgctcatagaaactcaatctacaaagagtatctggctcaagataaaacattaccatcagcgaaaggattgatccgccgttgggactttaatcaattgggtaccatacatgccttacaatcgacttggtcagatattgctctgcgtgaaaatcggataggtaaattcattcgtgataacagcaatatgcgagattacctgcttaggtatgtaaacgatgtttcagctgatgacatcacagaggatttttgtgagttatatgagttacctcgaaatactgaacgtttggatgaggttatagcaagtgatgctgcatcatggtcaaaagagcagcggattgatagggttcgagcccttctagctccttttggtgacttacattcattgaatattgctcaccgcgatgtagatccacacaacctctggtatgccaataaccacgggagtattttggcatctggtttcggtgcagcatttttccctgaaacaggaacagtggcagaacatcgaaaattactacaaagctcaccagttgcactacctgaagatgctatgtgtgaaggcgaaatcattgacgcttttcgtatagatgtgttcctactagcttctgtcgcttatcagatttgttttaatcagaagcttgagcaagtagatggtgttcctgaatggactcctcctgtaaacgatcctttcgatggactattggactcttggtttgaaaaagccctatcttgggatgccttagaacgcttcgacggagcccatagcatgttgggagaattcaactcccttactggaacatgtcccgaagaagatacagaatcacaacaaatctttgagcagttacttcatagccctcaccgacgacaagaactaacaccatatttaatactacaaaacttcccaccatccgcagagcaactacaaaatgcctttgcagctctagctagtacaagcagtaagaaatcatttttagcttataaagataatagggaaattctagtaaagttatgggataacgttcaggtctctcaataccagccaggctccaatcgccgagtattgcagtttctaaaacgactggaaaagttccaagaagcgactctagccacgccaaaggttttagactttggtttaatgaatcctcaaggtttgtttgtagtgactgaatatgtggagggtgaaacctggccacattacttgcatgatttaagtttgtctcaagaggagaagagggatcttgcaattaatcttattagtactgtgatggatttccatgaaaaaagatttgcacatggggatttgcatccaaacaatattcttgtgaaagactgcaatgctgaccaaatcatgcttttagatgtagttgattacggtagtgaaacagaggtatttaatacagattatggaccagcaaacccagccattactgatgcatatgggagagatcgttatgcagtattcaagattgttgaggaacttttctcaggggacttgccattacaggttcaagaagaattaattagagcccgggacaatcaaacacaaattccggtggcccttgctccattactcaattcgttgcatgcagtcctagaaccagaagaaccgaaagttgaagaagttgaagaagttgaagaaaaagagccgatattgttaagttggagaggcaatctcccggcaactcccacacttttggccccaatcgacggcggttattattttaactgcaaatggattagtagccgagtcagcggtacgagtaatgaacttgcttgttttattaccggtaataacgcttatctgaaaataaacgtggatgttgaagcacgtgtaattactaaagtccggtatacagcttcaatcccactaagtgatgttgttagcgcccaaagacgttctgctgggcggctatcacagctaattgctctgaagaatggtccagtcgatgaaaaatgctctgtggtggatgcaatattaagtatggaagcagtaatcgatgcgattattgagcgactaaatctaactgtagacgcttctgaccatcctttaactgatgaagagcgcaaggaattatctccagagaaattatggaagacattagctgattctgaaggtcaacttcgacaaaccttccaaattgaatcgaacactgaggaaaaagtgagcgacagtgggtatccaatgtacccatattcgtgccttgagggaagagacctgcagatagatgcagaagagacctactacatctatcaacctaagtccgatgaaaagctcggagaactcgttgtcaacgagacgaacagcagttttgtgactatacaacctgtcaacaattgggccagtaaacagttcattccaggcaagacgtttcaactcgaatccgttcgtagcaaatcctcaagagatcttagacttaaggctttgaatcgggttatggctaaaaaatctgtcatacctaacttggtggactactttgatgtcagacaacctcctacacttagggaaatgactgagcgtccatctgtccagaagctacgagaactatatgatgtacccggccaagaaacaaatagcagacaactcgaagcatttcaatttctgataggacaaggtcctgttggcgtgcttcaaggccctccaggtactgggaagactactttcgttagtaaatttattcactatctctttgagcatgctggtgcgaacaacatattactggtagggcagcagcactctgcggtcgataacgtcgcaataaaagcccgtgaactttgcgctgacaagggtctggaattggatactattcgaattggtagtgaatcgctaatcgatgatcgtatgctgccgacacatagccgagctttacaacaaaagatccgccacaaatttcatagggaatatgacatacgagttaatgctttgtcctcaagactacagctaccacacgaacttattcaagatgcaacacgattgcaccgtagcctggctcctttgctagcacaattagggcagttccaacgtcagcgagaacggcttgtacttattggtggagatgccactgagcgtcaagcagaccagttaacagaattgatgcatcagcgaagtcagacgttagaaacagttgaaactataatccgacaacagttcaacagcgcaatcggcgagttaccaacagatagtgagcttctactagacaagctgcttcaggttttagctcaaagtcatggagtgaacaatcctgttaaggtagaccgtctgcatcgattactttccttaagccaagaatggcttgatgtcttgcgctccggagaagctggttatgaacgttttatgttaaaaacaaaacaattagcttgtggcactctagtaggagttggacgtcgaagtttggagctggagcagacccaattcgattgggtcattgtggatgaagctggacgcgcccaagccagtgaactgatggtagcattgcaaagtgcaaaacgcgtcttattagtgggtgatcacaagcagttgccaccgttttatcagaatgggcatataaaacacgcaagcaaactacttgaagtaagccaagaagcctttagagaatctgatttcgaacgagcattcaaggcatgtggtggtgtaactctggatacacaatatcggatgattgaacccattggggatctagtctcagcgtgtttttatgccgatgacattggcaaactacatactggacgcgggcccgctaaatactggtacgatgaattaccttctccctggaataaaggtgtgagctggatagataccacatctgagcagggagaaaaagaggcaaaacctggctataccaaccaacatgaaatagatctgttattacagtcactacgcgttctcgttgaagcagatgctgttgaacagctccaaagaaccatcaccaatgaacagccttatccaatcggaattattaccatgtacagagctcaaaaaaatgaaattgagactcagctcaaccaagctgagtggatgggcccactgcgccatttgatccgaattgatactgttgattcttatcagggtcaagaaaacaagatcataattcttagtttagttcgtgataattctgatgctctacaaggtttcttaagagacaccccccgaatcaacgtagctatatctcgtgctcaggagcgcttagtaatacttggcgctagcaaaatgtggcgtaaagataacaatgactctgcattgggctctgtgtatgaatacatctcagagcaagcaatacacgacaagaaccattaccagatgattacgactcttgaactcaacaaggaagccacaccaatatga

SEQ ID NO: 156902 - DNA, 1503 bp, Enterobacter cloacae
atgatcccgctttctacagaaactaaagctcgtgcagggaatcgcattactatccttattcctgctagaaaatacatcatgaacttagcttggactgaagaaaagccaatgcctgccattgagctatttgcttgccgactgctcatactctttgaaagaatgctgcctttagagctgcgcgattttttcggactatctgaaagagaagaggaagaattactaaactcactcgaagataaacggctagctacattggatcaccaaggttatttagtaccaagcccactgttaaaaggccaagtgggcgatggggatggtgtaccaatgttagtcaaatacagcgagcagactgagcatgtagtgcttgatgctcttgctttgaccgtacgtaaggaacaacgactgagtcgattgatgtttggtttaccagaacttgctatgcctgaatccctaaaaggattaggaatggataaaattatcgaagagttcggtcgacaattccgaagctatctggaaataacccgcaacaacgagcatgagcgtcagcgaactcaactttataaagtgatgggttgcaatgcaagcgaagtccttcagctagcagttgatattgaattcaactatttgcaagctaatggtgaaccaaaacaattgattcgttctgttgaacggcttggatctaatcaaagtcgcccccttaacagtaagctagaagcccatatcgcagattttcttggctcgaattacatagaagaaaaaggtactgatgcggaaacatactgccagatagccgatgaccatatacttaagcctttcgtaaacggttaccatatagattattcgagttggatgcatgccagggacgaaagaaagacaggttatggctcgccagatactcgaggcgtttttggaccaatatatctgattgaaaatagacgtgatgcattacaatggatacgcaaaacgatacacgaaaaaaatgatgttagagagttaaaagcactctggatgccgagtagtgtaccattttggggggctaattcggatgacattgaccgttttgtgcaggatctaaaaaatatccttgagcaaaaagacagctatgcaaaaatagctctaatacatcaatgtaaaaaatgggaagtaaggtcatacctaaaaaatatattcccatacggattatctactccactagagttggatcgagttgagttatttttaatccctggaatattcggacttatacagtaccatgggcaacctaatacggatagtgggattagtttgccaattggttatatgacaaaagatccggatagaatcaagtcaatagaattattatttaaatccagaataggtgaattaaataatttggattgttcgtggggcacttgcggagagtccaaatctccagcaacaagaatagatcttctcccacaaaactggttaacgaatcctacgattcaatgtgcaaccaggcctatacttagcctgaatcgctga

SEQ ID NO: 156903 - DNA, 693 bp, Enterobacter cloacae
atgagcaaagaacgcggaatgatttttaacggtgagatggttcgcgccatcctcgacggcaggaagacgcagacgcgcagggtcatccagtcagcagccagaactatgcaggcacgcgggctcgaggttatctctcaccgtgcgccaggcgacaaatggtatgaggactacgtcttttctatgcgcgatcgcaatggcgtatggcatgacttcactaacgagcagttcctagctaaatgcccgttcggccagccaggcgatcgtatctgggtgagggagacgtgggcggaggcaggtgccggagcaccggatctgaaactttatcgggctaattaccctgcgcatgttccaactcattacgagaacgtgccgccggctgaggatgtccgctggacacccagcatccacatgccgcgctgggcatcccgcatcacgctggagatcaccggcgttcgggtcgagcagttaaagagcatcagcgaagatgaggcccgatcagagggggttgcccgattgcgtgaaggtttttggaaacattaccagccaggctggacgcagcaccagctaagcgccaggggggctttcgctacgctctgggattccatttacggctctggtgaatgggatagaaatccttgggtctgggtgatcgagtttaaacgtatcgaaggagatctccatgcgactgattaa

SEQ ID NO: 156904 - DNA, 414 bp, Enterobacter cloacae
atgaatgagatgaccaactcggtttttgccaaaagaattcaacaagtcatgactgaaaagggctggaataaatccgaccttgcgaaaaaagtcatgctttcgcatacggctgtgcagaattgggctaaaggtaaaagcgttgccagcggagatagattaaaacgcctcgcagctgctaccggaaagccagagcattggttcttcttgccttctgatgtttacgaagggggtgtctctggagagcagccagctcaaagacagctggatgagacagaattggttatgctctcattgtttaaccagttgcctgaggctgaaaagttaaggctaatccttcatacccaaggagttctgcgcgacatagagcttctgaagagtgatgtttttgaccttataaacaacgctaaaaagtaa

SEQ ID NO: 156905 - DNA, 231 bp, Enterobacter cloacae
atgaacaaagatatccaagaaaaaatcagcaaagccgcttctcgtgcatgtatcggaaagcactttggtatcagcgggcaggcagttggaaaatggattcacgagaatggggttccccaaaagcgaattatccaactttgtgagtttctcaactgggctgtaactccacatgagatcgatccaaaggcttacccaaacccaaccgacggactaccaaagcaaggagcgtaa

SEQ ID NO: 156906 - DNA, 546 bp, Enterobacter cloacae
atgcaagctctaaacactcatcaagataccgcttttctcggtaaccaactgataaaccgttatcaggaacgagaaaaggaaattagcccggaaaaaattcgtgatgctgtccgcgcttgggcctcatccatcaacaaccaggatgtggttgccgggctcattgtcgcagaatgggagcgacagggcggtcatgagttggattttccggccgaccttagccgccagcgtcaaaagctatttcgctggctcgatggcgccaccccgacggcaaaggcgaatgttcgcttacttaccccggcaattatggctgttctgccgctggaatttcgcggtcgtctcgtttctcaggattgtttcatgacccgattcgccgcaatggagaaggaaatcagcgaagcgaaacgcgcggtaattctgaaggcgccacagcaccagctggtgaaagaggtgagagagggcattgaacacctgctggcgcttctgccaggggaggctgttgttcaggttctgagtggtctcgcggtcatgggtccaggagtcatgtga

SEQ ID NO: 156907 - DNA, 993 bp, Enterobacter cloacae
atggagaaccagaagaccggattcatcccgttgtaccggagcgtactgaagaagccttgggcgaaagatgtgttcctgcgcacgctgtgggaaaaccttcttttgggggctgcgcgccagccctacacggcgaactttaaaggccgtcagtggccattacaaaccggacaactggtaaccacctcggctgatttggggctgaaattatgcgacagggacgggaagccatgtagtcgtcacgccgtggatagaatgctggatattttcgagcgtgaaggaatgatttctcgctctggagagaagcgaaaaggcactgtgataaccatcacaaattatgagcaatacgctcaaaaagcgaacgatttacccgcgcaattccccgcgcatattgccgagcattacaccgcgcatgaagaagccagcagtggtgcggctcgcgcagggtatgccgcgcatttacccgagaataaggccgcgcatttcaccgagaatcatgaacaacaatgtaataacaacaatataaataataagatctcttcgtctcggaattctgaagaatcccgaaacgagacaactcaaaaattcctctctcgtcaccctgaagctgctgacggcatctacacgcctgcaggtaagtcatggggaactgctgacgatctcaaagccgctcgctggattcattccctgcgcctgacggtcaattccagccttagcgagccgaagtgggtcgaatgggctaacacaatccgtctgatgcgcgtgcaggacaaccgtactcacttcgagatttgcgacctgttcaagtgggccaacaaggatgatttctggaaagacaacatcctgagtccttccagcctgcgcagaaagtgggacgacctgacaaccaagcgcctgcgcagcggtggacaggcaacgaaggccactgcgaagggcaagatcgatttcaacaacacagactggataaacggggtgttcgatgaaaagtctttctga

SEQ ID NO: 156908 - DNA, 723 bp, Enterobacter cloacae
atggaaaccgtaattcaagcactggaaaaaatgggccgggcgacataccgcgaagtggcagcccgtctggatgtcgagcctgtcgaagctctgaacatgctgcgcgaacagcgcgagcaaggtctttgtgatttctccgacggtggctggttcattggctcggctaaagatgctaagcgtgttgctttcgttccccagcctaagcctgcactacatggcgaagcgcctgaaccagttgacccggctgttattcgtagtctcctggcaaagaatggcgccatggataccccttcactggcaacagcggtgaaccgtaacgctcgcggcatgacctccgtaatgcgcgcgctggagcgccagggcgttgtggtgaagaacgggcagggcaaaggcgtaacctggtcgctgccagcgtcctcgaccgagccggagccagaacctgctgctgaatctgtaactgcagtcagtgctgagcctgaattggccgctaccgcgcagtcgaaggatatcgcgcagattatcagggagatcccctcgttcaccgaagggcgagcaactgcccagtccattccgaccgctcgggtgatctcccgcgaaatccgccgcgccagaaacaagctggcgagcctggagaaactgcgcgatgcggtgcgcgttgttggtcggcataaacatctcgtgcagcagctggtaagcgtggaggtggataatggcaaggcctaa

SEQ ID NO: 156909 - DNA, 399 bp, Enterobacter cloacae
atgcacctcaagcttaaagataacaaagttgatgagctgttaatcactaaaactcaagaagagactgagcttgtcaatcgcatcaattttacctactccagccatcctgtagctgagtgtgatacagatttttttgtgaagtttgatttcactttaacttccgatagagggtttaaatttaagttattacatgactttatctttgaatgcgatgaacctcttgacgagtctttttggaaagggtctttccataaaatcaatgcccctgctattgcatacccctatctacgggccttcgtcagtactgtacttctgaacgccgggcttgaatctgttaacttaccatcgatcaacttcgttgagatggcaaagaaaatggatagtgaaagcgaagattaa

SEQ ID NO: 156910 - DNA, 891 bp, Enterobacter cloacae
atgaaaggaatcgatatcaagttgttacgggcgttcgtaacacttgcagagcaggggagttatcatcgtgcttcgcagttgttgtttttgacgcaacctgcgttatcaaagcagataaaaatgttagagattctgattggtggtccactttttactcgcggtcgacatggcgcaatgttaactgagcctggtcgtcagctttttttaaaggcaaatgagttacttaagacttatgctgattttttgaatgatgctaaaaagctatttaacgatagccatgaaaaacttatgcttggttttggtatttcaacttttcatacagtaccattatggataaataccttccgtaataaatttacggagtgtgaggtaaatataagtaatctgccctcaagtgtgcagcgtaagatgctacttgaaggagctcttgatataggtttctttcggatgccagctggtaatgagttagcctcaagggtgttgtacaaagaaaagttgatactggctataccatcatcttataaaaacgacattacacatatccgcgatgtgctatctcagtatcctttactacaattgacgcctgctgtaggtccatgtcttgcagaacaaactactcagtttctctttaccaaccaattaattgctgaccctgtctcggtgacagaggatatgccaactctattggcattgatcgcgggtggaaatggagtcgcttttttgcctgaaagcgtgaggcatttttcaccagaaggagtaagactatttgctcctgacctggaatcactttactgggaaatttgtgtggcgtgggatcctaaaataatcagtccatatagggatgagtttttacgcattgttgaagcgcatacgggaaaaaatttgatgtga

SEQ ID NO: 156911 - DNA, 597 bp, Enterobacter cloacae
atgccaaatgttgctgtactgactaacgatctacagtatgaattcacttataagattactgattctgaagaagaactcgcgcaaaagttgaaagctttcaatgcctttttagagggtgtgagaaaacaaaatcaaacggtcattcatctgcaactcataaatgaccccaaagatccggctgttcaacgtcgctataaaaaccgcgctgcgggcattcctgctttagcaggaagacctgagaatcaaattattagtagcatatgccattcatcagacctcatcgttgtaaaagggcgagatagtggtttcttcaacaataaccttgatgagacgctacaggagctcggaatcaaaacggtcatcgttacgggtttgcaaacccatgtttgcgtacaaaccactgcagcagatgcattttttcgcggatacaacgtttgggtcccggaagactgtgtcttcgccccttcctcagaagatactgcccgtgctctggaatggctttctaattattgcgctactgtcgcctcctcctctgagattctttctttgttagaaaaacatggcgatcttccggaacgtagtgaaaggagaagctaa

SEQ ID NO: 156912 - DNA, 1038 bp, Enterobacter cloacae
atgagcaacttattaaaaactgaaggtaatacaacagagaccgtcgtgctggatcatggtactggagctcgcttaagtcgtgaattggttgagttgattgcgcatattctgggagacacttaccttggaacaatggaagatagcgcgctgctggaacttccttcccgcaagctcgcattcactacagactcttttgtcgtaacgccaatcatctatggtaatggcgacataggaaaaattgcagtatgtggtaccgtcaacgatctcgctgtgagcggagcaaaaccgctttatctgacgctaagtttgatcattgaagctggcatgttaatgtcagacttgatcaagattattgaatcagttcgtgaaacagctaaagcagctgatattaagattgtagcaggggatacaaaagtcgtaggtaaaggtgaagccgatcagttatttatcaataccgcgggcattggtgtattcgaaaatccgtcggtctcaatcaaaaatgtacgtccaggacaaaaaatcattcttagcggatatattggaaaccactccattcacctgttatctctcagagaaggtctgggatttgaaagaaatattatgagcgattgcgcacctctcaaccatatgattcgatccctgctcaataatcttcccgcaggaaaaatagcatccatgagagacgtcacgcgtggcggattatctgccgttctccatgagcatgcccgtgcttccggtagtgagattcgttgcgagaagcaatccttgccgatacagcctgaagcagcaatggctgccaatatgctaggagtggatgtaataaaccttgctaacgaaggttgtctttgcttgttcgtggagccagacatcgcagatgacgcgcttgctcttttacgggcccatccgctcggccaaaatgcggctattgtcggcgaagttcttccaaccattgaatcaaaagtcaccatgcttgaaccagatggaacactatcaacaattgaggaactttatggtgctgaactcccacgactctgttaa

SEQ ID NO: 156913 - DNA, 2379 bp, Enterobacter cloacae
atggtgctgaactcccacgactctgttaatcaattcgatgctcttttaatacggcgttatcgcgtatgtggcatcgtccagggggtcggattcaggccctttgtccatcgcctggcacagttatttgatgctacaggctgggtccttaatgattcggaaggcgtattaattgaaatacaagcaacacaaggcaatcttacccgtttccttgacgaactgatattaagccctcctcctatggccaaaattatcagtattcaggaagtacagagagaaaaaagcgaacagcggtataaagagttcagcattcgtcaaagtcatcttcttagcaacatgaatactattatccccccagattcaaatgtgtgtagtgactgtctggaagaaatgaacacatcaaacaatagacgctataaatacgcgtttataaattgtacgaattgtggaccgcggtatagtatcattaaagggatgccttacgatcgggaaaaaaccacgatgcgtgccttttctatgtgtagcgcatgtaagcatgaatatgataatattgaagatcgacgctatcatgctcaaccaaatgcctgtcccgaatgtggtccacaattacaattaacccaacgcgacggctcaataatcgttaccgatgatattatcgattacaccctcacacggttacaagaaggagccatagttgccgtaaaaagcttaggtggattccatctcgtcaccgatgcaagtaacgaaaaagctgttcaggaattaagaaaacgtaaacgcagagactcaaaacctttcgcggtaatgctcttaaatagtgatactgcatcacgtattgcttatataaatgtgcaggagcaagaagtacttgaaagttcacagcgaccaatcgtattgctacgcaagcgacacaatatgctcgcaaactctgttgcgcctcataatcccaatattggcgtaatgctaccctcaaccccgcttcaatacctcttacttagcgaccccaaaataccagcactggtgatgacgagcgggaatcgctctggccatcctattgtttgtgataatgctagcgcaatagaacaattaagagatattgctgattattttatccttaataatcgtgacatatatacacgtgttgatgactctgtcgttcgtgttatgtcgttaccagagggaaggcatagtcacctttctttcattcgacgctcgcgcgggtatgctccttaccccgttcatctgccgtttgacgtaggtaaaactattgcgctaggtgctgaattaaagaccacggtgagtaacgctaagggtaaagaggttttcatcagccaacacattggcgatttaaaaaatgaccaaactttcaattctcatatcgaatgtgtaaaccatttgcagaaattgcttggcacaagtgctgacgcaatagcctgcgatctacatccttcttttcgatctacacgtaatgcactaaaacaatcaaaattacaagttattcaggtacagcatcatcatgcacacatggtgtcatgcatggcagaaaatgggctttctggtaaaactatcggcgttattttcgatggtacgggatatggaacagacggcaccatatggggtggagaattccttaccggtaatgaaaaaagctttgtaagggctgcacaccttagtacattcgctcttccgggtggagacagagctgttaaagagcctatcagggttgctatatcgttgctaacagcaatatacggagaacatttagagggcttaaaccttcctgcgcttgacgcgctgtcggttcagcagattagcgtgtacgctaaaatggctgccagacatttcaactcccctcaaaccagtagtatgggcaggttattcgacggcatatcagcgttgataggtatttgctcgtatgtggaatatgaagcacaagctgctattgagcttgaagccttactgaaccgcgatctccacatgtcacaaccattttcatattacattcatgaaagaaatggtcatctggaagtggattatcgtccaatgataagggaattagtttctgaacttgcaacgacggtacctaatctcacccttttgagcagacgttttcattccacgattgtggacatgatcatctccgtctgtaagcgcttatcaaaagtggcagcaacaagacagattgtattaagcggaggcgtatttttaaatgaatttattctacttaatgctgtggacggtttaaatgccgctggcctgaaaccttacttccaccagtgtgttcccaccaatgatggtggtatatcactagggcaaattgtcgtagcgatggggaaattacatacaaaagatattaatgtcagggagagtgagcatgtgtga

SEQ ID NO: 156914 - DNA, 714 bp, Enterobacter cloacae
atgtgtgaatacgtaaataatttttcagccgtattatttgacatggatggtgtgcttattgattcaaactcagtcattgaaaaaggctggcgagaggctgcggaaatatttggcaagacaatttctcaagacgacattatcaagcacatacacggacagccgggacctcatactatccaggcactttttagtgacctgcctggtgaagcgcagaaaaaaattcaggctcacattattcacgttgagaacacagccgaatatgatcctattccgggcgtggcagagctaatcacttcacttgatttagcagggatccatattggcatagtgactagcggttggaaagcgaaaattgatcgtgtgactgccatgctaggggtgcaacattgtgtttcagttatcgttgagcgtgatgatgtcaaaaaagggaaaccctaccctgatccctacctacttgcagcagaacgactttcaactccacctgataaaatcattgtttttgaagattcaaggagtggagtgacttctgcagtgagtgctggcacctgttgcgttggaataggtgggattgatctgattgctaatggagccaggtgcgctatccctgattttacaggagtagaggtattaactcgcatggataataacgtcgcaatttcattgtgcccagggcacgtattagttgcagaaagatttattgagtctgacgagtag

SEQ ID NO: 156915 - DNA, 315 bp, Enterobacter cloacae
gtggcgagcgccgggatcaccatcttcctggcggcgaaaaaagagcatcgctactcgctgccaaacacccgctttatgatccaccagccgctgggcggcgtgcgcggtcaggcgacggatattgagattgaagcgcgcgagatcatccgcatgctggaccgggtaaacaaactgatcgccgacgccaccggccagccgctggaaaaagtgaaaaaagacaccgaccgcaacttctggatgtctccggccgaagcgctggattacggcattgtgggtaaactgattacccattatgacgatctgaagctggattaa

SEQ ID NO: 156916 - DNA, 1464 bp, Enterobacter cloacae
atgagactagaaaaaatatcattcggtgaacgagttgctgaacaggaatcagagaaattatctaattactttgtaaggacgcagcaatgggaatccttatacagtggcgatatagatatcatttttggtgcgaaaggttcaggcaaaagtgcgctttatacgctattgcttaagcgaattgatgattttaagaagagaaatgtggttttattatctgctgaaaagcctactggtcaaacggtattttctgatgtaagtgatgaaccaccaactgctgagaaggagtttgttacattatggaaggtatatttcttacaaattacatgtgattggcttttaaataatggacaccataaagatggtgcaaagctagtaatagataaactaatcgcttcaggattgattgagcaaaagaactcgttaaaggcttttgttaatagcgcaatgaaatttgcacggcaattagttaattttgaatctattgaggctggtgctagcttggaaggaggaataagtggaaaaatcacctttagaactccgactgaaacgcagcgaagagctggatatagttctgttgatgagctttttgagactctgaatacatacttgggctcagttggtgttaatttttggatattgtgcgatcgtcttgatgtcgcatttgaacagagcttggagctagaaaaaaatgctctgcgtgcattattcaaagtatatttagatttggaagagtatgaaaatatttccttgaaaatatttttaaggaatgacatttggaacagaataacaaaagaagggtttagagaggcgagccatataacaagaactacaaatattgaatggtctactaataaccttttaaatcttatagttgttagatcattagaaaatcaagagataatagactcgctaggtattgatccagacgatataaaatctgattttgataagcaaaaaagttattactatacattattccctggtcaggtagatgttggggaaaaacaatcagatacatttgattggattatcagtcgagtgagggatggattagggtatgtagctcctcgtgaattaatccatttttataatcaggcgatattagaagagcgtagagaacaagatattagcagcgataaggcagagccacctaatattgtaagtcgacaagccataaaaaaatcaacacttgaaatatccaaggtaaaattagagcaaacaatattcgctgagtatcctgcgctcagagagcatattatggcttttgaaaatcaaaaagctgagcatactcttgaaacagctggtcaagtgtggaaggttgatgcggggcaagctagagtcttagctgcgcagttatctgaaattggatttatagatcagaagatctttaaaaacgactctcagcttaaaattccgtttttatatcgtccatatctaaatattattcaaggaaaggctttctaa

SEQ ID NO: 156917 - DNA, 162 bp, Enterobacter cloacae
atgcctctactcgactacatcaaaaaatactacaacggcaatcaggcctctttcgcccggttgaccggagtccagcccgcacaggtgacacagtggctggataaaaagtttatcgttgtggatcacacgctctacagcccacggcgaaaactgggcatatga

SEQ ID NO: 156918 - DNA, 1704 bp, Enterobacter cloacae
atgatgaaaccagttaaacgcctgcacctgtccacggatgaggtgcatcttgttgatgtgaatatggtgcttgagctgaacagctgcgggcgcggatttatcacggcagagaccgacaccgactacaccggcaaactggtgcggctggatgtgggctacaccgatctggtgttgcgctggtttaccggctacgtggagcgctcgcagcctgccgaacggggattccagaggctctttgtgcgtgagctgtccggggtgtttgagcgaagctggccctgttcgtttcagcaccccacgcttcgcgagatcgccagctggctgacggagcacagcggtatcacggtaacggtgccggatgcagcctacagcgacaggcccatcccgcactttacccattccggtacgggcttccagatgctggataatctgggccgggcgttcggcgtgaatgattatgtgtggtatcagctgccggatggctccctgtacatgggtggcgcagagcaggcgctgtttgcgggacgtcccgttgacattccggcagattttaatcagggcgcagcgggtggccacaccatgaccattcccctggtgcagagcctgcggcccggtgttgaggtgaacggcgagcggttaacgaaggttaatctgcaaaatgacaacatggcgatcacctggacgccacgcaataaagccaccggtaagccgctgcagaaaaccccggcgcagcgccagattgaggcacattacccggagctggcgtctggcctgcacctgccgaaattcgcgagggtggtggcacacagcgagccggtgacgagcggcaatttttccgatccgttccggccacggtatgccgtggatgtgcagctgctcgatgcggacggaaagccggataacagcacgccggtctattccgccgtgccgctgccggttccgatggccggtaacgactcgggcatgttccagtttccgccggagggaacgctggttgaagtgggctttaccggcggccgggcagataagccgtttatccgccagaccgtggcagacggcacaagcctgccggatgtgaagcccggcgagcagctgcagcagcagcgcgaagaggtttcccagcgggtaacccaggccggggactgggagcgcaagaccgaccaggccatccgcgaaacgtccatgacccgcgaagtgaccgcagacagtgagcgccgcgagctggtcagccgtgaaaccacggttcaggccactgacaagactacagtgctgggtacggccacgctgatggccggagccgttcagcatgttgtcaccggcgactatgcgatcgcggcaggcggtaaatatctggcccgtattgatggtgacgccgacacggagattgacggccagcagacaacgcatgttaagggcagtatcgagacgcagaccgatggcgggctggttgagaaaatcgcccggctgcgcaagagcgtggcggcgggtggccagcaaatcatggggccaaccgtgcatatcggtagcgagggggtgaacacgttacagatgatgctggacactatcgacctgctggcacagctggccagtcagtgcgccagtcacactcaccccggcaccggcgcaccgaccagtgcagccgcgttcacccagacggcggcgcaggccagccagacccgcagcaggtatcaaagcttgatcgcctga

SEQ ID NO: 156919 - DNA, 549 bp, Enterobacter cloacae
atgaacccgacaataatgctggcgcttaacggcgaagcaatcccgatgaaaaatatgcgcgtcacgttaagccagcagtttgccgacaaagaccagagcgggcagaccagcgcaacgagcaaggcagagcagggtgcgaaaggcaaggaactgcgcgttaacggtgaagtcccgtttaagcaggttgacacgctggcgcgcatttttgccctggcgaatgccactgatgcaggcggaaagcggcaggtttaccgggtggccaatgaggtggcgcgcgccgtcaatctgagggaagccaccttcaccggcacggttgacgccccgcagcaggatggccgcatgtcctggctggttacgttcactctgaccgaacacctcagcgttcaggaaaagcgtgaggcgagggcgacggccagaacatccagtaaagcccagaaggcgggagccggtgggggtgccggtggtcaggcggatgccggggaagatgcagaaaagctgtcatggtttgaaaaaacggtgctgaaacctgttaatgatgcgctggggtaa

SEQ ID NO: 156920 - DNA, 726 bp, Enterobacter cloacae
atgtggcgtgaagcaaagctggcgttttctgatgcgtttgccgcgctggattgcgctatcgttccggctcatccgtggctttacggtgtgggtcagcagacggataacggcgcgtatctgagtccggccaatgccgtggcgtatctggccggaaagctggccagcgcgccgggtgtgcaggatgtggtgattatgctcgttaccgggcagacccatgatgactttatcagtcgccttgacgcgctgacgcaggttttcccggctccggcgtttacccaggtcagccgtctggcccgttcggcggccgagctggccacggtcagaatgcagctccctgccagaggggtcagcggcctggcctcagcgctgccgctttcggtgccaaccacccgcgccgtaatgaatgccagggcggtggccagcgcgcagcagcaggccagtgccgggatcggcatggcagatatgaaagctgcgctggccggtttcaccacccggcgtgccagcctgctttctgatctggcagacgggttgacgcagcttaccgggaaaagcgcccgcgcctgggtgttcacggccagcggggacgcggcaaccctcacgcgggatctgctgcagaacatcccgcagccgtctgccgtacacagcgcggccattatgctgaccggtgataatctcgacggaataaaaggaatgatccatgaacccgacaataatgctggcgcttaa

SEQ ID NO: 156921 - DNA, 483 bp, Enterobacter cloacae
atgcaggtttataatggcgacaccggaacatatgtcatcagtggtaataatacctatgcttggtcagcccaaaaaaatagtttttatcttatctctgacctgctggcgtatatccggaatgacaactggccacaggatgctgttgaagtatctgatgacgttttcacagaatttgcgccgtttcagcgtggcgacgggaaaatccgtggtgcgggtgacgacggattgcccgcgtgggttaatgccccggagccagcaaaagaagatttgttacgcagcgcagaagccaggcgtagcacgctgattgcaaaagcctctctggaaatagagatgctggcagacgcggaagctgatagttcaataacggatcaggagcgggaagtgctggcgcagtggaaagcgtaccgcctggcgttacgacgcctcgatttaagttcggtgccggatatcacatggccggaggcgccgggcgatgtggcgtga

SEQ ID NO: 156922 - DNA, 2481 bp, Enterobacter cloacae
atgtcacagacggctatcacttacgcttttgagcaatggaaggcacagcaggccgcgaatggcgttgatgttgtgcttgatgagtttgttttcgctaacgtaccggggctggacgtcagcgcgccggtgggacgtgcggaagcgctgccggatgcggcgatgattgttcaccgccaggcggtaaccaaaaccggaatggttaacgaaaaaggcgtggtttattcggtggtgctgggtgccggcaccggtgactttgagtttaactggattgggctgatcaaccgcgcatccggcacgctggccatgattgttcatgctcccacgcagcagaaaatcaaaaccgcagccgggcagcagggcaacgtacttacccgctcgtttctgatggagtacaacggggcggcgaacgaaacggccatcagtacgcctgcggatacgtggcagatcgactttaccgcccgccttgatggtgttgacgagcggatccgtattgaaaatatcgacgtttacgggcctgcggcgtttttcggggacggattcctggttacgcgcagcggggcgcagtaccacgttactggcggcgtggggtatgtcgccgggctgcgcacggagctgccgcaggcgctggatatcaccgttacaaccaagccggtaaatgtctggctggatgtggcatggcgcggatcgctgaccagcgtctggagcgtggaaagcaaaatcaccgtggcggcgagcctggcggattacgtgcagaacggcgtcacgcaccacgtctttgccgtggcccgtattgaggcagacggcagcattactgatttgcggcctaaaggttcgttgaatgagcagaacgccgagcagaaatacttacgcaaggacaaagatttatctgacgtcagcgacgtaaccgccgcccgcaaaagtctcgggctgggcagtgcggcaacctgtgatacaggaacgggccaggggaacgtgctgttacagggatcctgggggctgggtggtgctgaacgaaaaagcgccgcgggcgatgagcatgtcagccgctttttctatgaaaactacctgcctgccgcgctgtatccggaaagcgtggtggttgtgcagtccggtggcccaacgcccggcgaatggggccagctcgcggtttcgtatggtgaagcattccgggtttttgcggcgcataagtcgttttccgggcagccagaggtcacagagctttttcacgacaagcgcaagcccacaaatgctgatgtcggatcgtatcctgccacgggcggcaccctcaatggcaatatggccgccaccggcaccgtaacatcaggccccggcaaggatatgtcggccggtcaggatttatgggccgggcgtgatctgtacgctaacaggcatttacaggtcaccggtgctgccacgttaggctcactgacagttaatggcgatacggcaaccacaggaaatattgatgccggtggttatgtccgctcggctgccgggaaagatgttgtctcgcaaaatgatatctgggctgcgcgggatatttatgcccagagaaacattattgtcacgtatgacgtgtcggtggggcgtgatctcaaggtcgcgggaaataccgttgtcacaggaaatattgatgccggtgggtatgtccgttcgggcgcggggaaagatattgtctcgcaaaatgatatctgggcgacacgcaatgtatcagttggccgcgatctgacggttgagggaagtgcgggtgttgctggcaattttgatgccgggggttatgttcgttcgggcgcgggggaggatattgtttcacagaatgatatctgggcaacccgcaatgtatcagttggccgcgatctgacggttgaaggaaatgcgggcgtaacagggaatgttgaagtcgccgggaatgtccgtgctaaagatattgccgcgcaaaatgacgtctgggcaacgcgggatatccatgcccagcgaaatataaatatttctgctgccgctactgtgggccttgatctgacggtgagaggcaatgcaggcgtaacagggaatattgatgccggtgggtatgttcgttcgggggcgggaaaagatattgtttctcaaaatgatatctgggcatcgcgttatatttatgaaagcggcctgcgtgtctacagccctaataatcccccaccggctaagttttccagagcactgaacacaatttcctgggaaaagaaccttgaaacaggcgtgatcaggcagtggggatttatagatgtgggggacaatgcctatatcacagtgacattaccgctggcattcccgtcgtcatttctggcgttgcatattacgccgagggttcccggagccataaccggcgtcaatgtggcatccgcaggcgggcagattttcagtaataactcattcggggtgggaatgtcgattaacttcgagcctcagtggacaggcgtttattttgaagcaataggagtttga

SEQ ID NO: 156923 - DNA, 585 bp, Enterobacter cloacae
atgcctgagtttatgaaaaagctggccggtctgagcctgcctttctggatgaacgaaggggagccggggaagctgctgcgcgccgcccgtaaattctgggcgctggtttatggctggataacgtggccggtcagccagtttgatccgctgacctgtaccgaggccctgttaaacctgctcgcttatgatcgcgacgtgacgcgcttcaacggtgagccgctcgacctgttccgcaggcgtgtggcctatgcgttcgtcaatgcccgggatgccggttcggtagaggggtttatcagcatttttgagcgcctgggcattggttatgtggagctggtagagcgccagcccggcattgactgggatgtgatcaccgtgcgggtgaccgacagccagttagccgataacccggatttaatgttgcagattatccggcagtacgggcgcacctgtcggcgttatcagtttgaagttatcacggcgcaaaaattctttatccgtgcagggtgggatcagggggattacgcctggtttacggcaagcctgccggacgagcacgattcaatgacattcggggccagactgtag

SEQ ID NO: 156924 - DNA, 1185 bp, Enterobacter cloacae
atgacggaaaagccgcaggtagattttgaggcggtggtgaaagccagcggaatgcccaccacaaaagaggcgttgcgcgagcagtttaacagcatcgttgaggcggaggggttaatcaccaatacctccactatgtcaccgttctggcggttggttaccgccatcgtcacgacgccggtgctgtggctgaaggatgtgctggtcggtacggtgctggccaatatgttcgttgccactgcttccgggcagctgctgcgcctgctggcctgggcggtgaacgtcacggcgaagcccgcgacggcggcggaaggggtggttcgctttttcaagactgacgccagggctgtggtcacggtgaaagcaggcacgattatccagactgaacgtattaacggcacggtgtacgggctggccactacggcggatttcaccatttccgccggtgcggccagcgctcttatcccggttaaagccacggcaaccggcggcgcgtacaaccttgcgccaggctattaccgcattttgcccgtggcggtggcaggtatcagccatgtcgccaacgaaaccgactggctgatcgtgccgggtgccgatgaggaaagcgacgacgaattacgcgagcgctgccgcaaccagtttaacctggtcggaaattaccataccgatgcagtttaccgctccatgattgcgggggtggccgggttgagcgtcgatcgcattttctttgagcatgacgcgccacgcgggccgggtacggcgaacgcctatttactgctggatacaggcgtcacgtctgagccgtttattgatgccgtgaacgattacatcaccacgcagggccaccacggccacggtgatgatatgcagtgttttgccatgccggaaacccggcacagcctggaggtgacggtatacgtccaaagcctggctaacctgaccgacgacgaacagcgcacgctgcgcaccggggctgaaaacctgatccgctgcgcctttcgtgaaaacaacgatttcgacgtgaagaaaacgtggccctttgcccgcttctctttttccagcctggggcgcgagctgcaccgcgagtttgtcgtgattgattcgctggccttttcgctgaccgatattgtcagcgggctgaatgtgccgcgcctggacagcctgaccgtgaggctcgctgatgcctga

SEQ ID NO: 156925 - DNA, 327 bp, Enterobacter cloacae
atgagtgatttatatatcgatttattaattgagggccggaattttacccttaatcccggtagtgagccggtactgtgtaataacagccagagcataggccaggacattgttcattccatcctggagagcgggctggccacagagttggttgcggagcgcagtcccacgctgcgtgctgatgtgctcacccggctggagctgctgatcgaaagcgatgagcgtatcgaacccggcacggtagtggttaatgaagaaagcatgacgcgcctgtggatcacggccagtacgtgggatttcgggccggtttcggtgagggctgatttatga

SEQ ID NO: 156926 - DNA, 2325 bp, Enterobacter cloacae
atgagaacgctcgattttacattaagccttatcgacaaattaacgcgcccgttaaaacaggcgcagaattctgtcacgggctttgctgataaatcaaaagaagcctttaagcgcatcggcggcggggcgctggccatgtggggcgtggcggaaacggtaaaaggggcgctggggcctgcgatcgagatgtacgacgcccttaacgaggcatcggcgcggggggtggacagcagcgcccttaaaactgtagagcgtgatgccctgcggttcagtatgtcctacggagccagtgccgtggattttgtgaactccacggcggaaatcagcgccgctattgacgggctgaccggaaccgatctgccgaaggtaacgaacgtcgccaacacgctggcctttgcgctgaaagccacgtctgccgacacggcggagtttatgggccagatgtttgccagcttccgcagcgatgcggagcgcctaggtaaggtgcagtttgccgagcagctggccgggaaaatgacctacatgcgccagacgttcggcgttgagatgggggccattaaagacctcatggaaggtgcgcgtggcgtcggcacgaacttcggtatcggccttgatgagcagctggccgtgctgggccagctaaaccgcacgctgggcagcgaggcgagtggcgcgtatgagggcttcatgaccggtgctattgatggcgctaaaaagctggggctgtcatttcaggacgttaacggtcatatcctctcaatgccggaaatgctggctaaattgcagggcaagtatggcaaaagcctggaaggcaacctgaaagcccaggcagagcttgacgaggcattcggtgacagctcggcagtggtcaagcagctttacggcaatgtggcgctgttgcagcgcaatatcaacgagctgggtggcgctgacggcctgaaacgcacgcaggagatggcagcaaaaatggtgaagccgtgggatcgctttgtgcaaatcctgaaggcgatccagacggtgatcggcctgacgctgatcccggtgctttatccgtttctgacccgcctggcggatatgggtcagacctttgtgcgctggatgcagattttcccgaacatcgcgcgcgtggtcggctatgtcgcactggctgtgctgggttttgcggcagtcggggcggcggcgaatatcgtgctgggtgtgtcctcgttcatgctgatggggctgaaggcgctgtggtatggcgtcacgctgccggtgcgtctgtttactgccgccatctggctggggaataaagccgttgctgcgtggaatatcatgctgaccgcattgcgcggcgtgcttctggccgtgcgcatggcagcaatttcggcaggtatcgggattaacctggtgagctggccggtgctgctgatcatcgtcgcgatcggcctgctggttgccgggtgctggatgctggttaaacactgggattcggtcaaagccgccgtcatggatacggcagcgtttcaggtggtggcacaggcggttgcctgggtgtccggattattcggccaggcatggcagtttatcgctgacggctggaacagctttacggccatgctggccggtttctctcctgccggtgcgctggccgggatggcttccggcattgtggcagtctttgacaatatctggacgacgattaaaaacagtttcttgaaatcgtggaactggatcgtcgaaaagttaaataaaatccccggcgtggatattccggtaacggccgaaattaagcaggctaacgtgccgcttatacccggtaacgcaggcgctgttaaaaaccctgcggcaaaccttcctgcggtaactgaaatacaacaggtggagaaactaccgggggcaggcggaaatgcggagttaaacaggctggcaggtgggcggaatgataatgaagccgcaaatatccggttgcctgaaactatccagatgcctgccggagccattccgccgactgtcacgaatatttacccgccgcccggaaatatgccgctggataaattaccgggcctgaccgggagcatgtcgccggaaaatatggggattaaaagcgttgcgggtatggctgcgccgatctccgttcaggtcgagccgccgccagtaacggctaatacgctgtcaacgggtggccgggttaaaggaattgataaaggcggtatcagcaggacaattaacaataatgctaaatcggtgacggataacagccgcaaaattgacacggtaaacatttatccgaaagaaacactgtcgccgggacaattaatggaatggcaggaactgagcgcatga

SEQ ID NO: 156927 - DNA, 258 bp, Enterobacter cloacae
atggaaaaaattaaactcgttgttgcaggtgttgagattactttcgaacctaatcaggcggcttataacaagctgattaatgaaatgtcgatggataataaagtcgctccggcaaataactatcttaaccgcattgttgcggcagacagtaaagaggcgctggcaggtattatcacgcgtccgggagcggcgttgcagctggtcggtaagattaacgagatttacgcgcctgagctggaaatcgaagtaaaaaactga

SEQ ID NO: 156928 - DNA, 333 bp, Enterobacter cloacae
atgaaccggggcgcgctggcggtgattattgccctggtgctggcgttcgccgggggatggaaagcggcaggctggcagcgtgacagtatcgatctgaccattcagcgtaccgcagcggccaccggcaaacagctgggcgatgtgtccagcaaatcggcccgggatctggaggataaactggaggctttacgcaatgcaccaccgcgtgagatccgcacggaactggttaagccggtatttaccaatgtttgtgtgtctgatgagtttgtcagcatgtacaacgaggccgccgccagtaccgaacgtgcgttatcaggaaaacctgaaaactaa

SEQ ID NO: 156929 - DNA, 342 bp, Enterobacter cloacae
gtgaccttaagcgaaaaacagcagctgtttaccgttatggtggccagcctgatccactgggcgcaggaaaagggttatcgcctgacctttggcgaggcttaccgcacgccggaacaggcagcgcttaatgccagaaagggcagcgggatcgccaacagcctgcacacacagcgcctggccgtggattttaacctgttcattaacggtaaatacgccacccgatcggaagactacctgccgctgggtgaatactgggagtcgctgggcggcagctggggcgggcgtttcaaaactaacccggacggcaaccacttcagccttgagcataacggggtgcgctga

SEQ ID NO: 156930 - DNA, 294 bp, Enterobacter cloacae
atgcaggattacgaaaaaaccttctggggtttgatcatcatgggcgggcttatcgccctgggcaagatgcttaacagcaacgaacccatcacggcgcgtctggtactggggcgcgtgatcgtcggcagcgcattatcgcttatggcaggcgtggcactgtacctggtaccggatattcacccgctggcggtagccggtattggttcgggactgggtattctgggcctgaacggtgttgaagcctggctgcgtaaaaaaggtatcggtggttttctgagtaaaggaggcaattaa

SEQ ID NO: 156931 - DNA, 456 bp, Enterobacter cloacae
atgagtaagcgtatctcgggaatgtctttcgatacctacattgacagctcgctgatccatgtggagaaggcaacgctcgatattactgacaacaccacggcagcccagacccgtggcgtgccggatgggtttgttgacggcgatgtttctgccgaaggggagctggagctgagcgtaaaggctgtcgcggtgcttaaggcgctggcgcagcagaacggatcatggcgcggtatcccgcctgtggatttgcttttctacgcgaaagcgggggatgaggagatcaaggttgaggcgttcggctgcaagctgaacctgagcaacctgctggatatcgatccaaaaggcggggcgctttccacgcgcaagtttaagtttctggtgactgacccgcgctttatcaacattgacggcattccgtatctggaagccgaagccactgaaaaccttatcgggtaa

SEQ ID NO: 156932 - DNA, 1128 bp, Enterobacter cloacae
atgacctggccatctgtggacgtgaatcaggtaaaccagttactgggcgaaaccagtgaggttgaacgcgcagtgctgtttatcggcacgggaaaaacgaataccggcaggacgctggccgtcaacgcgcagacggattttgatgcgcttctgggatcggctgacagtccgctgaaaaatgacctgaaggcagcgcaggcgaacgcgggccagaactggtgggcattcgtgcatcctctgggagcggacagcgagccggaagcctgggttaatgccgtacaggccgcgcaggtgtcgtgttcggtggagggcgtggtgctgtcggacgatatcgctgataaggctaccattaaccaggccgcaaccctgcgatcgacgctgattgcgaaatatggccgctgggtgtggttcgtgctggctgtacagggtatgcagcctgacgagagccaggcggattacgtggcgcggttgtccacgctgcaggccggtattgctgaaaaggcggtgcagctggttccccgcctgtggggcaatgagccgggcgtgctggcggggcggctgtgtaaccgcgccgtaacggtcgctgacagcccggcacgtacaaagaccggcgcgctgctgagcctgggcagtgacgggatgccggtagacggcaccggggcggtggtggagctggcaaccctgcgggcgctggaagcgcagcgctacagcgtgccgatgtggtatccggattttgacggtatctactgggcggacgggcggacgctggatgtggaaggcggtgattatcagtccattgaaacgttgcgcatagcggacaaggccgcccgccgcgtgcgtctgctggctatcggcaagattgcggatcgctcgctgaacagctcgccgggcagcattgcggcgcaccagtcgctgtttgccaggccgctgcgggaaatgtcaaaggctgcggaaatcaacggcgtgacgtttccgggtgaggtgaagccgccgcaggatggcgatgtgtccatcgtctggaaaacaaaaaagcaggtcgaaatttatatcgtggtgcgcacgtatgaagtgccgctgcaaatctcgatcagcctgttactcgatcagagcctggaggccagcgcatga

SEQ ID NO: 156933 - DNA, 699 bp, Enterobacter cloacae
atgatcatcggcggtgagcttaataaaaagcagctggcagagctgcgcgccgcgctggcaagtctggagctgcctcagaaaaagcggcagcgcctcttatggcggctggcgaagtacggactgatagccgcggctaaacgcaacgtgcgcaatcagcaaaccccggatggccaggcatggccggtccgcaaagcaaagcgcagggggaaaatgctgcgcaacctgccgaaactgctgcacatccgggagctgccggaaatcgacgcggtcagggtgtatttgcagggtggcggataccgcaacggggaaacgcctgtaccggctggcgtggtgggctatgcccagcagaacggcatgaaaacgcgggtaagccgtcgcgcagtgccacgcgaggcggaaccgggcaagctggccacgatcgcccaggccaaaaaactgcgggcgctgggttaccgggtgaagcgcgggaagcgctggaaaaagcctacatacagggaaatcaccgacgcgatgccgtatgcgcaggccgggttactgatccgcaagctgagcggcaaagcggtgaagacaagctggacaatcgaccttcccgcccgcgcctttctgggtatgagcgacgaagattttaataaggcgctggagcgccagctacaggctattggctttggctgggatgtgaacgcgcaggacagaaactga

SEQ ID NO: 156934 - DNA, 501 bp, Enterobacter cloacae
atgaaaacgcagctggagtccctgacagagttcttttgccggaacgtacctgagcgcgcacagcagggctttgacagcattattgatgaaatgcaggtggtaccggcggccaaggatttagggctgaaccagtaccggcaggcagtgatccgctacagcgcggtgctgagctgggagcgtttcccgtaccgcctgtgcgcgccgcagctgcttgtttcgctgctgcttgcctggacagacgagtatggcagcgacgtgatggaggatatcggcattacagatgccgatcctgagtgggatgtgtcagttgaagatgcagagaccgctacggtggtgctgaccatgccgctggctgaagagctggtgatccgccaggacgataagggggatatcccctggaacggtgcgcgctggtcactggtcgacccggaaatatggacggcactgagcgccagggttatcggcacagatgaaaccggtgcgccgataggtgacgcatga

SEQ ID NO: 156935 - DNA, 453 bp, Enterobacter cloacae
atgtttaacggtaagccgctggattatcaggatgtgccgctgacaaataacggcttctggccggatttgaacctgaaggattttcaggcacagcgatcgctgccgcctgacattgaagcggacaccatcgcccaggcactgatcgccgctgtaacagaggtgaatgctgagctggccagcgtggaagcgaagcataaagggcagggccatgccaccgccgccgatgtgccgggggtagagatggcagggattaatggactgtgtgcgcagtacataaaggcggtttttgcccgcgctaaggccgatctgttgggcgagttcgcgacggtaggcaggcgtgaaacccatccggggcaggagagcgcagaaacgcgggccggattgctggctgaagcgtctgtggttatccggcgcatgaaagggctgaagcgggtcacggtggcaaaggtatga

SEQ ID NO: 156936 - DNA, 699 bp, Enterobacter cloacae
atggcactttcacccgcgcagcgtcacagccagcgcattcacatggagcagcagctgaaacgccgcgaagccgtggagcgcgctgatagcctgcatttacaaatccaggcactgaataacgacgtcgagtatgtgcgtagcctgccgaccattgcagaccgcgagacgtacaagcgcgatgtgctgctgccgcgctggcgtccgactgttgaaagctatctggaaggcggcagcgtctacgcaaacccggtgtttgcctggtgcgtggtgtggctgtttgacgcgggtgatatcgatcaggcgctggcctgggcagatattgctattgagcagcagcagccgaccccggaaaacattcgcagccacttcccggcctttgtggcggataccgtcatgaactgggccgagtcggcagcggcagcgggtgaaagtgttgagccgtatttctcgcagacctttgagaaggttacgcagcgctggcggctgcacgaggaaatcacggctaaatggttcaagtttgccgggctgctgctgttgcgcgatgacgaagggctgccacgcgccaccgctgtagaagatgtggaaacgctgcaaaaggctgacgcactgctggcgtcggcggaaaagctttataagcgcgttggggtcggaacgatgcgtaaccagattggggcgcgtatccggagcctgacgaagtaa

SEQ ID NO: 156937 - DNA, 1023 bp, Enterobacter cloacae
atgcaacttaatcaacgagcgcgggggcttattcacgcgttttcatctggcctggcgcatgcgcatgacgtagaaagcgcagcccagtatttttctctgaccgacccgaacgaaaccgcgctgcgtctggcactgctggaatcggttgagtttctcgacctgatttactgtgcagacgtcgatcagctttccggccaggtggtatctgtgggcgcgtctgcgctgcataccggacgtaaggcagacgggcgttttatgcgccgtgtgggtgtggatggcaacgactacaagctggttgaaactgactcctgcgccgcacttaagtgggatctgttgtctgtctgggctaactccggcaagtctgaagaggagttctttaaccttgtgcagaccttctctaaccaggcgtttgcgctggatatgctgcgcattggtttcaacggtaaaaccgtagaagcaaccaccaacccggaagacaacccgaacggtgaagatgtgaatattggctggcatcagcgcatgaaaggctttgatggtggcaaacagatcatcactgattccgtcacgctggatgataagggcgattaccgttcgctggatgcgatggcatcagaccttattaacgacaaaatcccgcagcagtaccgcaacgatccgcgcctggtcgtactggttggcgctgacctggtggctgctgaacagtaccgcctctatcagtccgccgatcgtcctagcgaaaaaattgccgcgcagatgctgggcaataccattgcgggccgtccggccatcgtgccgccgttcatgccgggcaagcgcatggtggtaacgccgctcagtaacctgcacatctacacccagcgcggaacccgccagcgcaaggcggagtttgtggatgaccgcaagcagtttgagaacaaatacctgcgcaacgagggttacgctgttgaggtgccggagctgtatgcagcgattgatgaaaacgccgtgacgatcggcaacgttacagagccggtggagggctaa

SEQ ID NO: 156938 - DNA, 813 bp, Enterobacter cloacae
atgactcacttaacaactgactggctgtgtattgccactgaaggggatacggtagacgaaaggcagatttaccgggaatggatagttgatatgggggaaacctacgatatcaaccattacggcgcattaatctggcctgagcatagtcgcgactggggtaattttggtgcggtgcgtgaagtcatgtggcaggaaggtgaggacaagctggccaggctgtacgcgaaaataagcccgaacatgaaccttatctactcgaaccgggaaggacagctggtctatttctccattgaggcggaagagaactggcgcggtacggggcggacgtatcttaaagggctggcagtcacagacagcccggccagcgttggcactacaaggctgcgcttttcacagcgcaatttatcgaaacagggttattacgcctgcgtaatgaccgatgacgggaaaataacccaggaaaaaaacatgaataaaccgtggcagcaattttttggtattaaacccaaaagccagaagtttgaagaggtgccggaagaggaaaaaccttctgacgaagacaaattaaccgttattgctaacgcgcttaatgaccttgaagcccgcgtggaagctatcgaaactcagctggagcaaaccacgggcgaagtggaaaccattaaagacgtggtggacacagaagactttgctgatctgcgtgccaatattggcaatatcgtaaaaaatttcagcaagctggataccaaagtcacgcagctgccgaaacgtcagtttggcgaaaagcagaaaaaaggcggctttaaattcctgtaa

SEQ ID NO: 156939 - DNA, 147 bp, Enterobacter cloacae
atgcctgtctgttttaaagaaaacggcggctgtatttcgtggatgttcgggaaagttttgatatccgaactgataagaataaagcagcgtgcggcggcgggtttatttcgcaataatcattttcgtaataacacggcgggaatatga

SEQ ID NO: 156940 - DNA, 1776 bp, Enterobacter cloacae
atggctaaatactcagacgaactaagaggcgtggtgcgctcgctttatttgcgccgatatacgccaaaagagattgcttcagaattaaatctgccgaatgcgcggatcgtgtactactgggccgaaaaatacagctgggcggatatgctcagcatcgaaagcacagaggatgcgattgagcgtcgttaccagctgcttgccgggcgggataataaatccgatctcgacctgaaagagatggacatgctgatcgcacatgccacgaagctgcgggcgcaaagcaacaagcataaggagaagatggcaaccggccagaatgccgggcgtgcagctgcgccagcagacggcgatgatgatcagccagcacgcaagcgcaagtacaagaaaaacgacgtctccgggctgacagaggacgattttaacgcctgggctgatgagcatcttttcgggtaccagaagcacctgcgcgagaaccttgcccggcaggtacgcaacatccttaaaagccgccagatcggcgcgacctggtattttgcctttgaggcgttcgaaaatgccgtactgaccggcgatccgcaaatcttcctgtcagcatcgaaagcccaggcggaggtgttccgctcctacatcgttaatatcgcagagcagtattttggcatcacgctcaccggcaacccgatccgtttaagtaacggtgcagagctgcgcttcctctccaccaacaaaaacacggcgcagtcctacagcggacacctgtactgtgacgagtatttctgggtaccgaactttgcgcggcttaatgaagtggcctccgcgatggccacccatgacaaatggcgcaccacctacttctcaaccccctccgccaaaacgcaccaggcgtacccgttctggacaggcgaggagtggaaacagggcagcaagaaacgcgccgccgtgcaattcccgtcctttaatgaaatgcgcgacggcgggcggctctgcccggatggccagtggcgttacgtcattacgatggaagacgcgatcgcgggcggctttaaccttgccagcatcgaaaagctgcgtaaccgctacaacaccaccaccttcaacatgctctatatgtgtgtttttgtggacagtaaggactctgtttttaactacgccgaccttgaggcctgcgctgtagaaaccgacacctggcaggatcacaaacccaacgacccgcgcccgttcggcgatcgggaggtctggggcggcttcgacccggcccgcagcggtgatttttcctgtttcgtcatcgtagcgccgccgctgtatgccgtggagaaattcagggtgctgaaggtgtttaactggaaggggatgaacttccgctggcaggcaaagcagatcgagcagctctttaaaaaatataacttcaggtacctgggcgtcgacgtgaccggcatcggacagggcgtctttgacaacatccagcactttgcgctgcgcgttgccgtcccaatccgctatgaccgcaacacgaaaaatcagctggtactgaaagcggcggatgtggtggagagcaagcgtattgagtgggaccaggatttaaaagagatcgccgccagctttatggccattcgccgcaccaccactcaggccggtggcgctatgacgtttgttgcagaccgcagcacagatacaggacacgcagaggcgttctgggcgattgctcacgcactgcataacgaaccgcttaactacgaaaataaaccgaagtcgcgttggaggctgaagaaagcagcatga

SEQ ID NO: 156941 - DNA, 1038 bp, Enterobacter cloacae
atgaataagaataaccgcgccgcaaagcgccagagtgataacgataaggcgcgcaagatgagtattttacgcttcggcaagcctgagccggtgctgaccaccggcacggattaccgcgacgtgtggtacgacaacgacgcgcagcattacacgctgccgattgaccggcttgcgctggcgcagctgattaacctgaatggccagcacggcggcatcatccatgcccgtaaaaatatggtgctgtctgattatgttggcggcgggctgtcacgcgatgaactggaggccggcacgtttgattttctgacgttcggtgacgtggctatcctgaaagtccgtaacggctggggtgatgtagtagccctggctccgcttccgggcctgtacacgcgacgccggaaaacaggtgaatttgtcgtcctgcaggacggtcagccttttgtgtaccagccggaggatatcatttttatcaagatgtacgatccgcagcagcacatctacggcctgccggactatatcggcggcatccactccgcgttacttaacagcgaagcggtgattttccgccgccgttactaccataacggcgcgcatacagggggcattctgtacacccgtgacgccagcatgaccgacgaagtggaggaagagattgaacgccagctgcgtgacagtaaagggatcggcaacttttccacgattctggtgaacatccccggcggcgacaaggaaggtgtgcagtttatccagatgggcgacatttctgcaaaagatgagtttgccagcgtgaagaacatcagcgcccaggacatcctcaacgctcaccgcttccctgccggactggccgggattatcccacagcaggcggcaggcctgggggatgttgagaaggcagagcggatttacaaaaaaagcgaagtggccccgctccagcgccgctttatgcaggctgtcagtgacgatcctgaagtaccggcgcggctgcaccttaattttgatttaagctacaccgaagcggcgcgggagagtgcatcttga

SEQ ID NO: 156942 - DNA, 270 bp, Enterobacter cloacae
atgcgcgttttaaaaatcgaatgcccggagtgtggctctaaggctgttatccgcaaaacaaaccggaagcaccggaagattgcagatatctactgcgcctgtgctgacgtggagtgcggtcatacgtttgttatgaatctgaccttttcccacacgctcagcccaagcgctaaaaccggcgacataatggtgcaaaaaatcctaagcgctttatcgccggatcaaaaacaaatggcgctggatttattaaaagccgcgcctgccatgtga

SEQ ID NO: 156943 - DNA, 183 bp, Enterobacter cloacae
gtgcaagatttgttagtggaaactgtcgaattgcagcggattgttttgttcgcaaaactgatggctagtagtgattgttctgacggtgaaaaagagttggctttgcagtggctgggtgaactggcgggcgagttagatagaaaattaataagctatagctctgaaataaaaacccccatgtag

SEQ ID NO: 156944 - DNA, 1686 bp, Enterobacter cloacae
atgaaaaataatataaagcaccacataaaaaagacagtaacatctataaactggttgaatttcgtttttctttttctgagcttttcatattcaatttatttactattattctttggtgcaattgcccaaggttatataagctcattcggcatctattcatgtgaaaactgctttactgaagttgaggatttcacaaagatcatcagcaataaacctgatatttattacctcgtaatgtcgatgattatttttatattttcactggcatttaaacaaagaattaaaatactaatcaccacttggttggcggcagcattcactattacatcatttgacgtcgccttagcaaaggaaaatatcagtttaattccttacgctattgaaaacttaatgtttaatagctttggtggattttttctttccctattcattttattaaaccttgcgagcattaattatttattgaaaaataccaagactagcattggtgttgccacgatcattccactatcctccgccttcttacttagctttatgatttatgggtttttatatctcatttatgaaagaagccctgttcatatagatgcacttttcaatgacaaactcttaggttcgatacatactgcgaatgatgaaagttttggttttctcacggcctcaaaaactataaatgatgagatatccatacagtcttatttaaataacaattttacatggaagtctggcgatcaaaattatgatatcgaggcttacctattctctgattgcattttaaactcaacatcacttgataagtacaaacaaaaaccaataaaattaattgatgtaaaaacattagagttttcatctgacagacctgtaatctatttcatcaagggagaaaagctttcaacatcaattcaaaactcaaaagaagtcaactatagcaacaaagacaaaataataagtcaaattgaagatggttcagctaaatttaaaagtacttatttgccatttactttaatggttaacatagcaccatttgatgaaaaatcatttttaaaaaaaacagattacaaattaaccatcaacaagcaagaaaatttaatcactaatacagtacgacagtatgacataatacatcaaaaagaactaaaatgtcgtcaaatagttccatcagataatagaatccctactgagaataacattaccggtgttgcatcaattgcttttagattcattcctaaaggtcacctcactttatcaaatgacccacttttgacaattaatataaaaaatggtgacttcacgaaaacaaaggacagtaaagcccctctttcggatattagtaatggctacctaaaacacattaatttgatcggacttgaagaactaaaggttaacaataaaaagatagatgtttctgactctgacctcttatatgcaaccggaaataaccttgttggatttgtcaccaaaaataacaaaattaaaattttcggcactgctgaaaaactagccctcaacacaaagataatgaatttaaaacccatatccactttaaacagcaaactatcttattttaacacatctttaatagatattttaaaaatgatatttggaatgggggttattatattcatctccaactaccttattaagttcataaaaagaaaggaagaaattacagtgttacgaaagtag

SEQ ID NO: 156945 - DNA, 300 bp, Enterobacter cloacae
atgcaggcgcacggcgcggagtacgccgccgcccttgtccccgagctgatgaattattccgggcagcattccgccattcagcgctgtgccatgcagcactcagtcgactatcttcgtgaggcgttacaggtctggctggccaccggtgaaaaaattaattattcggcgcaggataatgacattttaacggccatcggattcaggcctgacgcggcttcgcgcgatgataatcgtgaaaaattcacacccgcacagaacctgaattacacccgccgacgcgcagagctggccgcgcagtag

SEQ ID NO: 156946 - DNA, 4020 bp, Enterobacter cloacae
gtgctggctgacggtaccggcgcatggagctttactccatcagcgccactggtcgccggcagccacacctggaccgccacggtcaccgatgcagcagggaacatcagccccgcctcgccaggcttcacgctgattgtcgataccacggcacccaccgcgccggttatcggccaggcgattgacgatgtggggaccattactggtccaatcacatccgggcagacgaccgacgacaccgtaccgcggttggttggcaccagcgaaccgtttgccaccgtgaatatctatgagggaaccacgctggtcggaacgggcaccgcagacggcagcggcagctggagtatcttactcaataccacgctgacagagggtacgcacagcttcaccgcgcaggccacggatgccgcaggtaacaccagcgcgtcgtcagccagcttcagcctgacgattgataccacgccgccagcgctgccggtgctcaccagcatcctcgatgatgtcggcaatgcggcaacgccgatagcagacggtggaacaaccaacgacgcgcagccaactctcagcggtacggcggaagcgggttctacggtgaaaatcttcgataacggcgtgcagattggcagcgtaacggccaccggcggggcatggagctttacgccttccccggcgctgagcaacggcccacatacgttgacgtttaccgccaccgatgccgcaggcaatgccagcgcgccaaccgccggatatacgattaacgttgatacccttgccccggccgcgccggttatcagctcggtaattgatgatgtcggcagcgtcatcggcccggtgaccggcaccaacccgaccaacgacacgcgtccagcgctgagcgggaccgccgaagcgaatgcaacggtacggatctacgatggcatcacgctggtgggcaccgtcaccgccgacgccagcggcaactggacgttgccagaaaccaccacgctgacgcaaggtacccataacttcaccgccaccgccaccgatgccgcgggtaacaccagtccggcgtctgtggtgacgacaattattgtcgatctcactgcgccaaacgcgcctgccgggacctttaacgctgacggcagcgtattgaccggtacggcggaagcgggcagcaccgtcaccatccgcctcgcggacgggtcaacggtgaccaccaccgcagacagcaatggcgcctacagctacaccttcctcaacaagcagaccgaaggccagacgctgcagatcacggccaccgatgcggcgggtaacacctcgcagccgggctcggtccttgcgccggtggtgccgctctctgccagtaataacgttgaagagctggatctcagtaccaccgccaccgtcaccaacagccagtacagcgactatggcttcctgctggtgggcgccgtaggcaacgtgctgaccctgctgggcaacgatacagcccaggttgagttcaacgtgggcagcggcggcagtgcggatattgtggtcaatgccaacgccacgggggcggtgctttcgctgctcaacaccctggagctggtggtgcagcgtttcgataccgtcaacaacacctggaccaccgtcgtggataccggacaaccgcagttcgccgacctgctgacccttggggccaccggcgtgtcgctgaacctgaccgggctcgctgatggccagtatcgcgtgctgagctacaacaccaacctgctggcaaccggctcgtacaccagcctggatgtggcggtgaaagagaccagcgccgggaccgtaacgggcgacaccagcctggacggtaacgtgatcctggataccgatcctaccgcaggcagcgataacgctccggcaggtacgaccgtctccgccgtgaccaacgcgctgggggtcaccaccagcgttaacgccgacggcacggtgattcaggggcagtacggtacgctgacaattaaccgcgacggcagctacacctacaacctcaccgacaccagtgccgcggtgattggccgcacggagagcttcacctacaccattacccataacggtgtcagcgcgtcggcaaatctcgtgctgtcgctcggttcgggcagcgtggcgaatggcattgtcgccgtagacgacgcggcttccctgaccttcgacaccaccgtcctggccatcgataacggcacatcgtcgcaaagcggctttaccctggtggggatcaatctcggcaacacgctggggctgaacctgctggacgatatgaccaacccgatcatctacaccgtggaggaaggtacaacccgcaccatgacgattcaggcctccgtggggggcgtagctctggcatcggtgttcgacctgtacgtctataagttcaacaacgcgacccagaccttcgagcagatgcgcgttgagccgggctggctgcgtgcgccgctgctgggcggcacctcctcgcagctgacgctgaacctgcctgccggggagtatctgttcctgctcaatacggcggcagggatcaccgcgctgacggcctacaccctgagcgtgctgcaggatcatgtctacagcgtctccagcatcggggagagcaccacgggggatgtgctggcgaacgatccggtgccggatggcacggtggtgacggaagtgaacggtgtggcggttaacagcagtggaacaaccgacattcagggagaatacggcacgctgaccattgattcgtccggccagtacacctacaccctgaatagcggcgtgggtgcggaccatatcagcacgccggacaccttcgtctataccattacggcaccaaacggcgcgaaagatacgggctcgctcaacattaccccaaccgcgcgggcaatggatgcggtgaacgatgtcagcaccgagatgagtgtcacatcggtacaccatacctcggcttactctgacaccaccgtcggcagcgccagctggaccacctcgttgctaggtaccaccacgggcagcggaagcgggacctttgtggtggatccgaacaccgccctgcatagcgcgtcgctgcactttgacgtcgcgtcgctgctggcgctgggcgggctgacggtgaactggacgatcagtgatgccaacggtgttatccgcaccggctccttcagcggcggctcgctgctgggcggcagtatcgacgtgcccctgaccgggctggatctgaacgccgggacctatacgctgagctataccggcagcgtaccggggctgagcgtgggcaatatcaccatcaccccgagcgtgaacggtaccacctactcgctgacccagttcgactccaccagcggccacaccgttgacggcaatatcttcgacggtacggattccgccggggcgatggatcagctgcagtcggtcgatacccgcgtgaccattaccggcttcgacggcaccaccaccacgctggatccttacaccggcagcacgctggtcaacgtcacgggtcattacggcacgctgtcgattggcgcagacggccactacacctacaccctcaacagcggcgtgtcgctctcaaccatcacgtcgaaggaggttttcaactacaccctcaccgatgccaacggcaatacggacactgccacgctgaccatcaatatggcgccgcagttcgtcagttctgagcataacgatgtcattaccggcaccgcgtacggcgatacgctgatttatcaggtgctgaacagcaccgcaggcaacgccaccgcgggtaacgtcagcagtaccgccggcgatcactggaccaacttctcgctggcccagggagacaaaattgacatcggcgatctgctggtgggctggaacggcagtgcgtcaacgctcggtaattacctgcatgtgacgaacagcaatggcagtaccgtgatctccatcgaccgtgacggtacaggaagcacctataccaataccacgctcgtgacgcttgataacgtccagaccacctacgacgagttagttaaccagcaacacatcgtgacctga

SEQ ID NO: 156947 - DNA, 1974 bp, Enterobacter cloacae
atggtggcgtttgaccaactgattagccagcttgagcgcaccggccagcgtcggctggtggtgctcagcggtgatgcgcagtggtccctggcgcaggccggggcgctgcgtgatacgctttccggggattgggtgtggctggatgaaaacccttctcgggagataagcgggctgctggggcgcgagttccggcatgctgtttttgatgcccgcgccgggtttgatgtctcagcctttgccgccctgagcggaacgctgcgtgccgggagcctgctggtgctgttggctcccccgcttgcggtgtgggcaggcacgcccgacagtgattccctgcgctggagcgacagcgcggaacccattcccacgccgaatttcattcgccacttttgtcagacgattacccgcgatcccgatgcaatcgtctggcagcaaaaccagccgttaacccttcctccgtttcctgatgcccctgactggcaacccgctaacggcgcaccccagcgcgagcaggcggagatcctgcaggcacttcgtgcaatgccgaaaggcgttgcggccgttaccgccccgcgcgggcggggaaagtcggcgcttgccggcatgctgttgaacagcattgagggcagagcagttgtcaccgcaccggcaaagggagcaacggaggtcatcgcacggtttgcgggtgaacattttcactttatggcaccggatgcgctgctggcctcctcacaccatgccgactggctgattgtcgatgaggcggcggccatacccggccctgtgctggcgaagctggttgcgcgctttccaagggtactgttaaccacgacggtacaagggtatgaaggaaccggaagagggtttttgcttaaattctgcgcgcagttcagcgccctgcagcgttataccttatccacccccgttcgctgggctgcgggatgtccgcttgagcgggtggtcgccagcgcgctgctgtttgacgacacgctcatcgaccagcagccgaaaggagaggtgcaactgacctctctggcccccgacgcatgggagcacacgcctgcactcgccgcgagtgtctacgagctgctttgtgcggcccattaccgtacctcgccgctggatctgcgccgtatgatggacgcccccggtcagcacgttgccgtcgcgcaaacggacccggtcattgcgggcgcgctgtggctggtagacgaaggcgggttaagcccggcgctaagtcgcgcagtatgggcgggttttcgtcgacctcgcggcaaccttgtcgcgcagtctctggccgcgcatggcggcacgcctctggcagcaacgctgaaaggtcgacggatcacgcgcatcgctgttcaccctcaccggcaacgggaagggatcggccgggcgctcatccgcgaggcctgcggggaggattatctctcggtgagctttggctttaccaacgcgctgtggcatttctggcagcagtgcggctttgtgctggtacggatgggcagccaccgcgaagccagcagcggctgctataccgcaatggcattattgccgcaaagtgaggcggggcatcgtctgtgtgaacaggcccggctgcgcctgcatcgcgatgcgcgcgtcttatcattgtggaatggcgaaaagatcccggtggcagatgagtgggaagctacccttaatagtgacgactggctggagctggcaggctttgcctttgcacaccggccctttgctacgtccgttgccgcattgacgcgtttgctgctcgccgtcgatctgccgcttccggccctgcgcggtaaaattgaggcacgaagagaggacgctgcgctcagtgctgaactgtcgctcaccgggcgaaaagcggtgctggcaagattacgcgctgaaacggcgcaggcccttgaatgtcttgataaatcacgcagtcagcagctcaaaagcgacattttgcaatggcaattttttcaatga

SEQ ID NO: 156948 - DNA, 1119 bp, Enterobacter cloacae
gtggctaaaaaacggacaattaaactggctgatgcactagatagatatgtcgatactgtgtcaacagaaaaaaaaggatggcaacaagaaagttatcgcagaaatgttataaagaaatatttcatttcagataaatttatgcatgaaattactgcgatagatattgctgaatatcgtgacatgcgactgtcaatgattaatgaacgaacagggttaaatattagtggtaatacagtgaggttggaattagcgctattatccgcattgtttaatttagctatcgcggaatggggaacctgttcttttaatccagtgaaattggtaagaaaaccaaaatgtaacccagggagagatagacgaatacatgctcatgaggagcgaaaaattagaaagtatctgaaagaaagaaataatgagctttatgtaattttcttattcgcaatagaaacagcaatgagacagggagagatattgtcattaagctgggagaacataaatctacaagcaggggtggcgcatttgcctaaaacaaagaatggtacttcacgcgatgttcctttgagtttgaaagctaggcagctacttacacaaatgtctatcaaaccatcaggtagggtttttacatatacgtcctctggtttaaagagtgcttggaggcattgtttagaatctttaaaaatagagaacctgcatttccatgatttacgacatgaagcaataagcagattctttgagttaggtacgttaaatgttatggaagttgcttctatatcaggccacaaatctctgacaatgctgaaaagatacacccatttacgtgcgtatcagctagtcaagaaacttgatgcaaagaaaaagacaatcagcaagatagcatcttactttgtgccttatcctgccattcatcacgaaagcaatgatggacagcattatgttgaattaattgatttttcagaaataaaagttgagagaaatagcttagatgaagcaatttctgacgctagcgttttactactaaaacagctagcgcttgctgctcaaaatggaaaaagaataccagttccaggtgaatttagtgcaataacaaaagacatggtaataataaatcctctacagtaa

SEQ ID NO: 156949 - DNA, 621 bp, Enterobacter cloacae
atgatcattatatggctcatgatttcttgcttcatggcaatcattttaaatttcacatctgcaaaagttattaatgccgttgaagttgatgttttagaaacagcaaaatccattgagaatggtgttactagaagagttttaccactatggctaataattatttatatggtaactactacatatatagcttatctaataaacaacgagtatattttcttgctaactatgattataatatcaattgcatctataatcgatattatacggaactggattcctgatttattaatattcgttaccgttgcgctttcatttatgggaaccagcaacgaacattctgttatcattatctcctgcacttttgctttatcgcctctcttcatcattaatttaatatcatttaaaaaaaataatacaaccgctattgccgcaggtgatctttatataatagccaccttgtcgttatggctaaccccgttaacatccttgacgttatcagcacttataattatttcgactacttttttttcatttgtatcaaaagttataaacattcctctagtgccattcatacacatttcgttcttgttaacattcgcggtacagcataatttactgtag

SEQ ID NO: 156950 - DNA, 429 bp, Enterobacter cloacae
atgaatgcaagctatttaggtttcgtgattatgctcattgtctcttattttatttttggcgcagtatcagataaggaaaaaaaatcatacgatgaatcactgattcagcagcaagttacctcctatttaaattatgtagattcaacgcaaacttatctaaacagtaatccgggtgcaagtggcaacatcacacagatgattacgctcccaaattggctaccaaagaacacaaacataactgtctatgcgcaagctggagcgacttatgtttttatggctaacaaacctggctttatggaattgctcaaagattctactggtgactctatctccttcggcttagccaaatcgggtagtattttcaccacttatgggacgaaagcaaaacctaactttatacccgacaattcagtggtgtttattttatga

SEQ ID NO: 156951 - DNA, 522 bp, Enterobacter cloacae
atgttttattttcgcgtgagtgcattgttacctattttctatttgtctgtttttttgttttcaactcaagttcatgctttttgtttcaaagaggctggagaacgatatggcgtagatccgctactgttgattgccatagctcaaacagagagcggtctagttcctaccgctactaatattaataaaaaaggaacaccaaaagaaagtatcgacataggacttatgcagatcaatagcatctggtttggtcagctttcaaacgaatggggtattactcggaaagatctgcttaataacccctgtcaaaatgtttatgttggagcatatatattggctcttaatataaagaaaaatggagttaactggaaatcaattggtgcatataatgcgggcttttcggacaagacagaagcagcaagaattaaatatgccaaaaaggtgtataatttctacattcaactattatctaaaaatagagatattgtaattgcaaatgcctcaaggggagtgttagtcaaatga

SEQ ID NO: 156952 - DNA, 201 bp, Enterobacter cloacae
atgaaaagcaaaattgtaatgtgcgtaaccttttttatgcttatcgggtgtaattcagaagatgttaaatccgtaagctactacaaagagcataaaaatgaacgtattgataagctgaaatcatgtaataaagaaacacgtccgacagaagaatgtaagaatgcagcggaagctcagcatcaggtttatttccaaaaatag

SEQ ID NO: 156953 - DNA, 573 bp, Enterobacter cloacae
atgaaagcatatctcagtacattgatagcagcatcctccctgttcattggggcaaacagctatgctacggttgtggacggtgttgatgttggggacgttctaacgggagacacaaagctagcgtgtgaagcgacactatgcttagctggatcaactcgaccaggtgaatgtgtgccatcgcttaccaaatatttcaatataactaagaaaaaatggaaagatacgttaaaggcaagacgaaactttttaaagttatgccctgcgtcagatgaacagggaatgcctgaacttacagatgccattgtggggggggcggggcgctgtgaagccgatacgttgaacagggagctattggaacaaaaaacatttatggtttgtagatctggacgaaatgatcttgatggttgccaggctataacaaaatatcgcatatctccaaacatgccttcatactgcaaagtatattttagcaatgaatacactgactttaatattaagtattcgggtgtttcggaatggcaaacaaaaaatgaatttagcaagaatcctaaaggtcagtgggtgactcaatga

SEQ ID NO: 156954 - DNA, 417 bp, Enterobacter cloacae
atgatgactatatcaatgcttttaaatttgaatgaactaaaaaagattgccaaaatgcatggttgtattgatgttcttctctcaataaaagaaaagctagaattgataattgaacaaaagagagaggaggagtcagttagtataaagaagatggctgagaaacagaaaagaattaaaatgtacagagaattactacagcaagatggtatttctcctagtgagcttttaccaaataagccgatattaaagaccactcaaattatgaagccaaagaaaggaacttatacttattatgatggtgataagcaaaagttttggagtggaagaggtcgtatgcccggtaaaattaagcgtgcaattgaatgtgggaagtcgttggatagtttcatttatttaggggatgaaattgataggtaa

SEQ ID NO: 156955 - DNA, 519 bp, Enterobacter cloacae
atgcggctcagatgtattctaaatcaaataagattggattgtgggcaactattaatcaggttgctccgtgggtattcagaagggaacagcatggtattaataaatagtagacaccaattttataggactaagttgggtttttctctaaatgttgatgatatgagttgtggggtggtgtttgtaattaactcagatcaggatctaatatgttcgttggatgggggggattcaatcacattgcattttgaagatgttgagtcatggcctgtaatttacaggaattataccccgaaattttttaagctcattggttttaattcaaataaattatggaatcctgaaattatcaatcgcatatgggatatgctttctttaggccgtaatgttttgttgatcttacaggagtgtaactgtaaagccgtattacggcgtatgaatattctttttgaaatgtcaaagctaaggaactcatacttcaacagagcaggctctttgccgcctgcaccgcagaatcattaa

SEQ ID NO: 156956 - DNA, 288 bp, Enterobacter cloacae
atgaatatttctgatgttgcaaccataaagactaacttcccggatgcagatttctggattgttcgtcgaggctctttaaattccgtgggtgaaccgtcctactctttcaacaaagagagtataggtgtgaaggtaactaggagcgatctggtgcttcctagatacctttattattgcttccttcatcttcatatatctggagtctggaagccgttagcgacgggtacattgagcctggttaacatcacaactcatgacgttaaaaacatcgtcctgaatccgcaataa

SEQ ID NO: 156957 - DNA, 240 bp, Enterobacter cloacae
atgtctgatattctcaatgttcttggtattgcggaaaagtggcgtgaagatcatccagagcatgcaacaaagggcattgttatgatttggaatgggcaagcttatggatggaaggattctttaagagatgctcatagcgagcgtcctggtgttattgctgttgacgtgagagaacacatctttgttgccgaaggtggcaatgattatgatggcgctaaatgttgggttgttaaaaactaa

SEQ ID NO: 156958 - DNA, 573 bp, Enterobacter cloacae
atgaaaactatgaagaaaaaaactgtaattatcactaatatatatacaatattcatgttgctattgggagtggtaggtggtggttgtttcgtagtgttttcgttcttggatgggtataatccccttgcaatagtttcttctgcggctggtaatgcaatttttaaagaagagatattttccgatagcatatctggctttattcgtatctggaatgggaaggaactattctcaagtgacttatttctaattctgtctgggatttcatttataattgtagtttctttattgacatttttcctatgcctcgaattggctgtaagaatgaataattggttatgctatttttatataaaaagtcaatatggggataagtttagtaaacgttggatctgtattcataagaaaaatattgcaaatttcagagataaattattaaatactagtttaaatgatataaatagaaagtctgaactcgaaagcgctagctatgaacattacataaaatggaagcagcactatgaaagttctatgtcatatgacgactggaagaggaaagtgttgaaaggaacttaa

SEQ ID NO: 156959 - DNA, 324 bp, Enterobacter cloacae
atgttagaaaccaacaatagcatcgctattgataaatacataaacactttagtaacttcatataaaaatgatatttggattgagcaagccactaaactaattagagcggctttgtatgccagagaatataatggaaacaatatttatgaaaaactgtatacatcaaatcatgaagaacttacctctctattacaaaaagcgatcttgagtaaagcagccgatcctgaatctgtctcgcattttaaaagttatttaacattatcaagcaaagcacaacaaaccattcttgtaaccatcaggatggtgccattatttaatctataa

SEQ ID NO: 156960 - DNA, 2169 bp, Enterobacter cloacae
atgagactgtttattgcagaaaaacctgcggtggctaatgatattgtaaaagcgttgggaggtgactttacaagaaaggatggatattttgaaagtggtacagatattgtcaccaactgctttggtcatatcattgaatcgcaaccacctgaaaactataatccagcttataaactatggtcgctgcaaacgttgcctctgaaactttttcctgtgaagtatcaaccaaaagaaagttcagcacatcaggttaaaactattctagaactactaaaacgtggtgatgtgactgaaatagttcatgctggcgatccagatgatgaaggtcaacttttagttgatgaagtattagaatacgctcgtaatacaaagccagtaaaacgtgtattaattaacgataatacattaccggcggtgaaaaaggcgctggctaatctcaaagataatcgtgattttaaaggaatgtctttaaaagcactggcgcgttctgtagctgatgctgtgtatggttttagcatgactcgtgcctataccattcctgctaaggccagaggctaccaaggtgtcttatctgttggacgtgtacaaactcccgttcttggcttgatcgttaaacgcacacgcgcccatcaatcacatgacgcaagtgtttattacactatgacaggccattttgtacgtggtaacgatgtttttaccgcaagctggaagcctggtgagtttgcaccgctaatcgataagcggctgattgatagagcttgggcttacggaactgcttcaaatttggaagggaaacgtgctactgtagaagctgccgcagtagatgataaagaaacagccgcaccattaccgtttaacctacttaggttacagcgatgggtaattaaaaaatataaacttaccgctcaaaaagtccaagacattactcagactctcaaagatactcataaggcgataacttacaataggtcagattgctcttatctgtcagacgaacaatttaatagcgccccggcaacgttggcagcattaaaaggaatacttaatccaaattttgatattgacgcaactcgtaaaagtaaggctttcgataattcaaaagtgaccgcgcatacggcaataatccctacgaataatgttcctgatcttaatcgtcttagtaacgatgaacgaaatgtttatatggagattgttaacctatacgctgctcaatttatgcctagaaagacatacaaagaagcatctatagcaattaaaagcggtgatgaatcttttgtaattcgtgctaagaaaactactaataatggctttgaggcgcttattggttcagatggtgaagatgatttcgatgaagatagcgcgaatgacggtgataactcggtatttgagcttttgagtaagatccgaactggtgaacagttaactactaataaagttattgttaacgagaaaaaaacaacaccaccgccactattcaccgaatctagtttgctgggggcattggttcgcgttgctgattatgtaaccaatcctgaaattaaaaaattacttaaagagaaagacaaagataaaaaagatgaacatggaggtattggtacgccagcaacacgcgcggctatactggaaactctcaagaaaaggaattacataaccgttgaaaagggtaagctaattccaactgagacaggttatgcattatttgattcattgcctgataatgcagtcaatcccgatatgactgcgctttggtcagagaaacaaactgcgattgagaacggtgaattgtcagtcgaacagtttattaatgagctatacagcgagcttgaggggcttgtcgcagaagctaacgttgataatctaaaagtggaaccaagggctgttgcaggtcaagcgcaacgtcttgagtctccttgcccgaactgcggaaaggatatagtgatccgtcctaaagtgtgtgtctgtactggatgcgaatttaagatttacaaaacattatctagtaaagtattaactgataaacaaattgatactttgattaataaaggtattacatctgaattaaaagggttcgtgagcaacaaaaacaataaagaattttcagccaaagttaaattagttgataaggttacgggcaagctgggttttgagtttgtagctaaaaaagcataa

SEQ ID NO: 156961 - DNA, 180 bp, Enterobacter cloacae
atgacaaaaaatcaacataataaaaagctaaatcccggtttcgttgtgggttcgattgttacattacttattgcagcaagctatttagtcgatggcctttttttaaaaccagagtacccgacatacattcaagttttaagcggattgatctttaacaaagaaaaatataaggaaaagtaa

SEQ ID NO: 156962 - DNA, 525 bp, Enterobacter cloacae
atggatgcgttgactatgcttgtcgtttttcttgtgtttgtcctgatttttctggtgttcctgatattaaggcaaccagattcgactgatggaggtgataaaaagaaaaccattgcaaataaacaattaagtgcggtcgtaaaaagtgatttttccagatcaagcctgatgaatgccagcgaatcaatactatacaaagctatctgtgatcatattaatgataaggcatttcctgttttgatttttccgcaagtctctttaggtgaagtcttaaagtcaaaagacagaacggcgttcttctctgttaacagcaagcgcgttgattttgttgtgactgatttaaactatatgcctgtcgctgttattgaatatcagggaagtggtcactataaaggaaatgcaaaggtcagggatgaaataaaaaaaattgcctgtgaaaaagccgggattaagtaccttcccgtgcaggaaaagtatacgctgcgggatattgatgctgtgttacttgcttctgtgggttgttag

SEQ ID NO: 156963 - DNA, 318 bp, Enterobacter cloacae
atgtcaattcatgaagctgaaaaatatattgaaagacttaatccagaaattaaacgtagattcggtaatgggtttgtagtcgctcatatcgaaattgaaccgccaatacttgctgccaatggtgaaggtgattcatgtctagtggcttgtgatttatggtgtgaaaatccgtctgctgcttatgacattaatattcttgtagaggataaaacaaatttcgatgtcttagatacgccaattgtaaccagtttggaagatgctaaaaatcttgcgctgctcatagcaaaacaggttggcgattttaaatttcacccataa

SEQ ID NO: 156964 - DNA, 294 bp, Enterobacter cloacae
atgccaaaatttccaaaagaaatattagaaccaaagggttatgccgtaaataccacgactctctttgctgcattaggactcttcttctttggcttttcaggcttcattttagttatcaatgccgctgtaaggctttttgcatcagtatggatgtattcattcggaggcagtgaggcgatcagggctgggatggtttttgttcttgccaccatttgttttgccctcgcagtcttttgtcgtaaaggtttccgttactgcttgttcaaactgaaacagcaccagttaccgaactaa

SEQ ID NO: 156965 - DNA, 168 bp, Enterobacter cloacae
atgagcatcaagaaaaaagcatttgatattccttgttttcatgattcagtaaagaaagactttgaagctggtttgattactcttaaacaagctgccactgaattttacaaaggtaactggacgccttttatagatattgaatatacaaaaaaacaacttggtatttaa

SEQ ID NO: 156966 - DNA, 201 bp, Enterobacter cloacae
atggcaacaatcatctctgtaatttgcatagagccaggcgaagcggttaatttctttacggcaggtaaatcctatccggtcacggctagccgggaacatctgacattaccgggtgtagacgttatagatgatgagggtgattctgtttttattcgactggcatcatccagtcatggtgtatttgaggtggtttatggttaa

SEQ ID NO: 156967 - DNA, 579 bp, Enterobacter cloacae
atggttaataacgagcctgaaaagctgattgctgatgaaaatgcactggagccagagtcagtggcgcatgggattgttaatctgaacagtaaatttacccctgatgctgaggataagaaacgttatcaatgtgctgacattgttcaaagtattattgaatttgaatcgtcaattcaatggtcagttaattctattcttaatggtgtaaaaaaggctgaaagcagcggttattcatcaaccgaactatctgagttaaaagaactgacagtacactacattaatgcgttaaaagaaattcaggaacgcgcaacccgtcaatgtttagaactggcacatatgacgctacttgctcatggcattaagttagatacagagagccattttgatgttgatggttatcagtttaaagcaacacctgttactgatgaaattaattatatagtatctgatttattttcttatagtgacattgctaatattaatatgagtcttagtaatgtggttgttacaggagaaaaaaagataagaaaaccacaattaccagcgcgtttaataatgaatctctggcttaatgattag

SEQ ID NO: 156968 - DNA, 438 bp, Enterobacter cloacae
atgaagattaacacagaagataaccttgagaactgcccggactgcggcgaggatatgcctggcgggaacgttcggtgtacacgctgtcagcgccagtacgaaattgaaaatatgaccgaggacgattaccgcgcacatgaagccctgttcccgtcagccagcattgcgccacaactgcccctcattacgtataccgtgggcgtgaaatcagtatcagatatgctgactcaacaggaacaacagcggtataaaaacgccatacgcgaggcgataaaggctgcatatcctgcctatgacgttgtggtaacactggacagcaccatcggcggcgcagactgtcaggtgagtaatgatccgtatggtgaaacggatatagcggaacatacgcattctatcgcccacagtgtctggataggggcagcgtggctggataaataa

SEQ ID NO: 156969 - DNA, 486 bp, Enterobacter cloacae
atgaaaccacaacgctatccctccagtatcatcaaagtcggtgcggtgctgtataaagcttttggctgggtagctgatgaaggaaagtgtcatgttgatgttgatgaatggcatgttcgctcaatacaaaaccggacggtatcaaaatattttggcactaaaaaggttgtgatcagcctggtacaaaagctggatgatattacctggcaaaaagggaaatggcttacaaacgttccggtgcattatcgccagaaattttatgaaaacgaaccattacccaatggcttttataccacacaaaatatggctctacgttacgcgctggaatccacctatatgagtattaagtggtatgaagaagagaaagcagcggggttatggagcgcagagcatgaagaagaatataatggagagctaaagctcgtaaaaatcattaaatccagaattacgcgactgaaaaacatcaaatcaggaggcaaggtatga

SEQ ID NO: 156970 - DNA, 624 bp, Enterobacter cloacae
atgaataaaattaccctaggcgtattgctggcgttatctttttctggctatgccgcaacggagcaggtcacatcaacgctgattgatagctttaaaatcgaaagtaacttccactttcccagagggacaaatacacttaacgtacatcaaaatgtcactgtatacagctttagcgcaaagagtatcgccgccattaaaaagacactagcggagattgaacagaaaggattttcaacagcaaccgcaagcctgagcggtctggaggaaaaccagaacagcacaattatggtattccgggcaaataaagaaggacagccactttcgccgtcagtgctgtcagaagcattacaaaaaaacgtcagcattgagagtaagtcagggctggaaggtattatgccggaacgcctttacactcagattgataacgtcagcctgtctgtagtcaataccgcgctgggtaaatttgatgatggcaggattgtactcactcagtttattaacgcgaacaataacggcaaggaaatcgccacgcataataaattagggctgccggaaaaaggcgcgatcctcaacattatcagagtcaggccagatgcttatatgattgtattaaccacgatttaa

SEQ ID NO: 156971 - DNA, 210 bp, Enterobacter cloacae
atgaatattctgaatattaaatatatcgccgctttcaacgtagcactcagtgttattatgacagctttacttattggcttcgcatcgcgtggcacaggcaactcagatttcgggattttaatgatactcgtcgctgctgattttattaccatattcacggcaacacatatgatcctttccatattaacccaaaataaacagaaccagtaa

SEQ ID NO: 156972 - DNA, 537 bp, Enterobacter cloacae
atggcaacggtcaacgtgaacgtgcgtattgacgcagaactcaagcaaagcgccgatgaagcgatgcagatcgccggagccacaccgacacaggctattaccctgctgtatcagtacatcgctgagaacaagcgtctgccctttgtggtcactaccagcgtgaaaacgccggacgatctcaccagtgaagcgacagagctattagctaccgcgctggcggtggcgctcaacatggaagccggacttaaagacgaaggacgtatgcccggtaaaaccatgctggagtattacaagcgccttgattttctgtttaccagcgccaaagaaaagacggtacagccacaggaacggcgtgaactgacactcgcgatgaacaatttaaataaactgttaaccgtcattgtcgattttacggattttggctacggctatgatcttgtcagattacttccatcagaaaagaacaaatttaatattgcaatttcgacgtttgagcgcagcatgtttgaactggtaaacaaagaggcagaagaatga

SEQ ID NO: 156973 - DNA, 252 bp, Enterobacter cloacae
atgaaacaatcagtgtctgaaaagttaattgctttctattatacattagccttgtacggcattttcaatatatccagatttacgaaagaggatgcaatgagaatgaaagataacatgggtgaaaccgtcgccatgatttacgctgtatatgccaaaatggtgctgccatttattactgtctttgcgggttacatggctgtatatctgacattctgcttcattcgccagatcacagcgaaagggggtaaataa

SEQ ID NO: 156974 - DNA, 447 bp, Enterobacter cloacae
atgacaaaaaatcaacataataaaaagctaaatcccggtttcgttgtgggttcgattgttacattacttattgcagcaagctatttagtcgatggcctttttttaaaaccagagtacccgacatacattcaagttttaagcggattgatcttcctgtatatattcccattgattttatgtttttcatgggttcgattatttgaaaatgaattttgtgcattgggtaaacatcgaaatcaactcacatctcttttgttgaaatcattttttctattatctactgttttttttgttggtagattcactcctgattatgataacaaccagattttatttattgctttcgaagtgacgataattttcgttgaaattgttttactttatatgttaatgaggcggtttattatattgtctaaaaaaatacgtcgcagcaatcatattatatag

SEQ ID NO: 156975 - DNA, 201 bp, Enterobacter cloacae
atggataagacgaatcatggatttattgtctacagtgattttcgtgagggatatgtgatggggggtggggatttttgtaagtttcctgaaagcgctaaagtttttgataaagaagcaaatgctagacgttcggcgtggcactatgatgctcaggtgttagagatagatattgtcacgggaaaggtcatacgaattttatag

SEQ ID NO: 156976 - DNA, 546 bp, Enterobacter cloacae
atgccaactaaacacatcgacgcagcacaatgggaacagattgaagaactcaccttagaacttacaagacagaggaaccagatagtaaaagaatctgaagttatgaagattatcattgatagcggcctcagtaagacaactaaagaagaaattagcagacaacttgattataaaccaagctgtagcgtcattataatgtacaaaataaatggcacaccagttatcgagagtatgactaaaccaacagtcatggacgtgattaacagaagcccaggcatcccacgtatgatatttatttatggcaaaacatgttctggcagaagcacgtttattgagaaattaaaagaacaatgggatatcatcacttatgataacttaccagatcctgagccggacataataagtcatgccaaatgtaattatgaaaatggtaattctgtagccgtggtcattcatgcgacgaatcagatggcggcaatgaaaaaaatattccaggaagaagaaaaaatattaaaactcggagaggtttttgagcataaaatttaa

SEQ ID NO: 156977 - DNA, 219 bp, Enterobacter cloacae
atgacatcttttcttattattgcgtttgctctgatagttgtcggtaggattctactgcgaaagagcctgaatagactccacaatgagtattaccgccgcgctgacgagcggggatgcgcggaacgttatgaatctatcgttcgcctttacaactcaagagatccccgtgatttagaatctgcatatcgggaagccatttcctgtactaaggccgcttga

SEQ ID NO: 156978 - DNA, 819 bp, Enterobacter cloacae
ttgagtcacttacctgccggaaattttcagatttcacgtagcgttaccgttccgggcaacgtcgccgggtcgtggtcgctagatgccgcccggacaatgcgggactacgccgcgcacctcggcgcgggtctgccgaaatacctgctcgcgccggaagtgggtctgttgctttcttatatagatgatctcaccgcccggatgtattttgaaacgctgtggaataccggggcgcgactcaatgaagcgctggcgctgacacctgcctgttttacgctggagccgtcacgccgccacccgcaagccgtggtgatgctgaaaaccctgaaacaacgcaaccgcgaagccgtccgggggcgtggtcgtccggctgctgacgctgacacccagcaccccgatccgcgctaccggaaaccgcccgaacccggcataagaatagtcccgctgctcgatgccgcttacgtgcgccggatgcgggaatacctcgccacctggcgaaagcgggttaagcatgttccggtgtgggaagtgaagtcacggcaaacgccgctgaactggctgaacgctgcggtagcccgcgcacaaagtgacggggtaacgtttccgataacggtcacgccgcataccttccggcactcgttcgccatgcatttattaatgagtggtgtaccggagaaaacgattcaggggctgctggggcatcgttatgcccggagtaccgaagtctatacgcgcgtgttctcgctcgatgtgctgaccggaaacggactgtcattcagctatgacgcgcagacggcgcgggatctgctgaccagatcatag

SEQ ID NO: 156979 - DNA, 189 bp, Enterobacter cloacae
gtgtccggtactctggcaggaggagaacgctctgcatctaacagtaaagagagctacggtgacaggcagtgtaagagtaagccgtggtgttctcgctccagtgaactggagaaacgcatgattgataaaatcatcatggttctgaaagcgattatcgtccttttagaattgatccgcatgttcttctga

SEQ ID NO: 156980 - DNA, 237 bp, Enterobacter cloacae
atgtaccagaacaaaaaagagaacttaatggaaagtaaaaagcaaaaatatctgatgcagttcaggcgttgttccagcatcgacacgctggaaaaagtgtatgaaaggttggtagaaaaacttactggtgaagagcttgatgccgtgcttagcgcatcagaccatcgacgtgctgagttaatgcatggcaagttgtgggataaagtaccagcatcagcctggcgaaacgtcaggtga

SEQ ID NO: 156981 - DNA, 2817 bp, Enterobacter cloacae
atgcttaacgtcacgatcttaaccgcagagaaaagtgttgatgatgttacccgttactttatggacggaattgacgattattatcagaaggaaggtgattcaaaaacgtggcaaggtgatggtgcggaacgtttagggcttgggagtgatgttgatgaaaaaacatttcgcgatctgttaaaaggaaagctgcctgacggccagcaaatggcgagaacccaacggaacgacagtaaaaaccgtattgcaatagacttcacatttcaggctcctaaatcagtctctatacaggcacttatcgggggtgattcacaaattattgctgcccatgatcgcgcggttgctgcggcagtgaaggagcttgaaaagagagctaagacccgtcagaaaatgaacggtaagagttatgttcaaagtaccggtaatctgatcgtggcaaagttcaggcatgagacaaatcgtgaaaaggaacctcatcttcatacccatgccgttgcattgaatgctacacaacgagcagatggagagtggcgagctttagttaatgatgaattggtaaagaatccaatttactacgatatggtttacaagtcggcttttgcgaaagaacttgaagatctcggctataacctacgcttggaaaagcacggctttgaactagctcatatctcccgagaccaaattgaaggaatgtcaactcgactacagcaggttgacgaaaaactcagagaaatgggattaagccgggaaaattctaccgccgcacaaagaacgttagctgcaagaacaacacggaagaaaaaggatacctcaatagagcgcgaggatttattcaaacagtgggacaagaatgctaaagagctgggcattcaatttgacagcagaaaactcaaccttgatgggatcgggtattccgataaagtttcggaagtatcaaaaaatattgaggtggtttcttctcaggaaatgacgaaacgtgctgttcagtttgctatcaatcatcacacggaacgccataccataatcacatatgaagaactggctactacggcgctgaatcatggtatggggaaatccgccgccgaatctgtagatcttgagattgagcgactcaaggccagtggaaaattgatcactgaaaagccactttacacggcaattaatacttcctcagtaaattccctcacccgtgaagagtggattaaggaaatgattgaattaggccgctcaaaacaggatgcccggcgacaagtcgatttagccattgctcatggtcgtttagtcaagcaagccgaacgtttcactacccaaaaagcgctagagcaagagaggaaaatacttaccagtgaacttaccgggcgtggcgcgagtaaacccgtattgtccaatgaagatgctcacgcatttatggacaccaccacgttacgaaaagaccagagagaagccgctgagctaattttatgctcagacagtagagtacttggggttcaaggtcaggcaggtgtaggaaagagttttatgtctacgtccgtgacggaaagacttaaagaagctggctatacggtacacatccttgcaccttatggatcacaggtaaagtcattacaaaaagacggtatgactgaggcgcgtaccgtcgcatctttccttcacacgttgagccgcgagcatacgcttgatagtaaaacttttatctatgtagatgaagccggggtactgccaaaccgcttaatggcgaagcttgctgatatttcagcaagttcaggtgctcgccttgttttaatgggcgacacagaacaaaccaaggcagtcgaagctggtattccgttctctcttctgcaacggaatggcatggaaacagcggtgatgaatgaaattcagcgccagaaagaaaatccaacattgcttaaagctgttgaactggcagccgttggaagaagccttgagtctcttgcattaataactcaggttgcagaaacaaaagaatcagttatccgctataaacaaattgctgatgaatacgtgagcctggataaagatgaacgtgataagacactggtactgacaggtacaaacgaaagcagggaacagattaatgagttaattcgtaacggattgaacattcgaaatgatattgaaatcactgcgttatcgcgttttgattctactcaagctgagcgccgttatagccggaactataacgcagatagcacagctatccgtccagaacgagactaccctcatgctgggttagtaaggggagaagtctatatagtcaggggacagggcgaaaataataccctgattattgagaacaaagggggcgatcgtttttctattaacccggcacaccacaagcatatttcagtttataaactgaccaaacagcaatatggtgtcggtgataaattggtcatcacacgaaatgatgctggccttgatgttgccaatggcgatagggtgacagttgcagcaataaaaaacgatcagcttcatctaaaaattgacgacagagagatagtactaaatacaaaggaaaaactacaccttgactatgcctatgtgtcaaccgtacattctgctcaggggttaacgtctaatcgagtgattgccaacatcgaagctaaatcaaggacggtaagcaaagattggtactatgtagcaatctcccgcgcaaagcatgtggttaaagtatataccgacaatatcaaaaaattgccatcttccgttgccagagccagcactaagcaagcagcaatggaattaaatcataaggttatggagaaaacccaacaaaaaagcaaagagaaagcctga

SEQ ID NO: 156982 - DNA, 1542 bp, Enterobacter cloacae
atgggaagaaattctgatttacataaacttggcttttttatgactgcatttgctcctgcaattggttggctagcagcagcgaaaaaaaatgggttggcacaagttactcaaccaaaaattacagggtttataaatcttttttctcatacatttgaacatccaattctctacatttcttctggtggtgcatttattgcagctataattttgtggattttgatggttaaaattaatagtcctgattttatggggtataaatttgattatcggttaaggggtagtgatattgttagtgcagaggctcttaataggcttacgacgaaaagaaaagaaaagcaggttgtattcggcactataaaaatgccaactgacatagaaaatcttcaaacattaatagttggtgcaacaggttctgcgaaaacattgattttaactcaggccatgtactcaattttattacgtggagaccgacaagttattgttgatcctgatggatattttacttcgcttttctataagccgggtgatgtaattttaaatccacatgatgaacgaactcctggctgggttatctttaatgaaatgaaagaaacctacgactatgaaacatattcattctctcttgttcctctcggcaaaagctctacagaagaagaatggaatgggtatgggcgattattggtaacagaagtttttaagaaactccattcacaaggaataaatgatttcacacagctttattattggtgcgttaatgctcccgaggaggatttagaggaattttgcaaaggaacgcttgctcaatctctctttgttggtacagaccgtactttgggttctgctcgtttcgtattaacgaacaagctatctgcgcatatgattatgcctggcggttctttctctattcgtgattatttggctgataaaaatggcgggaatatatttataacatggcgtgaagatcaaattgccactttaaaaccattaatatctacatgggttgatgttatttgtaatgcaattctttcattacctgagtcagaggcaaaaaacatttggttgcataccgacgaattagcatcacttgaaaaaataaaagcattagaaccagctttgactaaaggacgaaagaaaaaacttagaatagtttcttgtgtacaggctatttcacagttagaagaaatctggggggaaaaaggttccattaccttacgtagttgctatcgtaatttgatagcgctgggtggtgctcgttctgatgatagaacaccagaagttctatctagagcgctgggtgattttgatgttgtccgtaagaaagaaacaaacagccggaactccggtggaggaagtagcagcagcaatgccgagggcaaagacaaagattttgtggtcacggccagcgaaatttctaacctgcctgacagggagggatatgttgcatttactcgtggttatccaattgccagggtaaaagtacctattgttagatttaaggctcgaaatgctgcctatatcccccgctctgcattgggaggctaa

SEQ ID NO: 156983 - DNA, 339 bp, Enterobacter cloacae
atggcgggtaaaaacttcaactcgcggctcagtttgttggtttctggtgagttggaaagcaccctacgagaacgctcaaaagggtttgaatctttctctgactacttgcgttatttattagagaaaaatagtgatgatgaacaatttaaagatacagtaattaatagcatactagatattggtgagaaaattgattcaatgtctagtgctggtaaaaatgattccaatgctactctcaccgaaattcttttattgttaagattcctagcaaaaccggaggttcttaataaagttaaagctgaaatgtcccgtctaggtatttctcaaacggagttataa

SEQ ID NO: 156984 - DNA, 366 bp, Enterobacter cloacae
atggctaagcaaaagctgtcagtgttaataaagaatgcaatgccggaaataatgagaaagagaagtgaggggtatacaatcaagagtatcgctgaggatatgaagattaatcccctgacatttaaacattacttccataagtataaagaagattttgaagatattgagtgtaatgctgaatcaactgttaagcctgaatatgttttgcatgcaaaagatattcagggaggtgaagttaaagacactaactcagatacagtacctgatgtaagttttgaaacaatgcttgacgctgaaaaacgctcaggattaaataccaaatatctccagcagcatagacctctcggtaaagggaagaataaatga

SEQ ID NO: 156985 - DNA, 696 bp, Enterobacter cloacae
atgaaagtagctattatcaatttttcgggtaacaacggtaaaacaacgcttggtgataatctttttgttccccgcattcctgatgctctttatcttactgtcgaaagtatcaacgcaggtagtgatgcagaaaaggttcgtggtaaagactttggggttatccttgaagaaatgatgatgtctgaaaaggcgattatcgacgttggcgcgagtaatgttgaggatttgatgaaattaatgcgccagtataaaggttctcacgaagaatttgatttatttgttgtcccggcagtaaaagaatcaaaacagattgatgataccatgtctactattcgcgccctgagtgctcttggtgttccagcgaaaaaaatcaaagtagtgatgaacaaggttgaagtagacgatgttgttgaggatgtattctatcctctttttgcaatgcacaaagaagagaagttattcacgctttctccttcggccaaagtcgaaacttcagagatttatccactcctgaaaacatatggcactaccatcgacaaactactcaatgatcctaccgattggcgtttgaagatgcgcgaagcaaaaacagatgaggagaagcgtaccgctgttcgtatgatttcaatgacacgtcttgctcgttctgctaaagataatctggataatgtatttaaaaccattaccggaaaataa

SEQ ID NO: 156986 - DNA, 360 bp, Enterobacter cloacae
atgaaatcacaaacactgattgaatcattagccgcaactgttcttgaagatattcatgagttagttggtagactcagtgagattgaattaaaggttaatgatacgagtaaacagactcaggcaagcagtgctaaattttcaattgatgcatcttctataactaaacgattagaagatgcaagcagggaaataagtgttgcgttgaaagataaaaacggcattgaaatggatgcgttactttcaattcgctttcatttaattaaacaaagcaaattaattaagattttgcttgttttgagttccctgctcgtcgtagcggtcttgttgctttccggtgcaatgatccatttaatattctaa

SEQ ID NO: 156987 - DNA, 801 bp, Enterobacter cloacae
atgagtgttagtctccctacaactgaaacatatgcagaactccagcttgcatatgagcacttcaacaaaactttgttcgataaccgtttacccgcttgcctgattaccctgcaacgcgagaaaagaacctatgggtacttttcgagtaaccgctttgtagcgcgaggaagcaaagtttacacggatgaaattgcgcttaacccatcttattttggcattcgctctgtagaagaaacactaagtactctcgtccatgaaatggttcatcttgaccaacaacacaacggtaaacctggtcgaggtcggtatcataatcgccaatgggcagactggatgataaatgttggtttatacccatccagtaccggaaaagaaggtggtgcgatcaccggcgattgtatgtctcattacattgttaaaaatggggcatatgaaaaagcttgccgttccctgctaactaaagagttcacattatcctgggttgatcgcttccctcctgtaaggcagagcacgatggccggattgcttggcggcattagcttgccattctcacttgatggtgacgatgatggtgacgatgatggtgatggtgatggtgatggtgataatactggcagcgagttcatcgacacgcttgtttttcgtccaacagatgaaaaacaaacacggttcaaattcacttgcccgaattgccatgcaaatgcctggggaaaaaacagcttaaagattctttgtggggattgtagcgaccatccccttatgacaataaacactgacaataacaggtacggtaatgactaa

SEQ ID NO: 156988 - DNA, 216 bp, Enterobacter cloacae
atgactaataaaataatcaccaaaatgctcatttccctgagtgatgaagaacatgagcggttaactacactgatcgagtctgcgtcattcaaaataagcaagagcaacgtggttagagccgccctacttgcactggaggctgcgagcaatgaggatagagagatatattacctgcaagctgaggctaaagcagttaaagccgggaggccgtggtaa

SEQ ID NO: 156989 - DNA, 441 bp, Enterobacter cloacae
atgatctccatttttgccagtaaaggaaagtacgccatttctactctgcttgttcattctgtatgggggaagccggaggatttttgtagcatgcatgcctccatgaaacgcaaccctgagcatgtcgccaatgaaatcaaacgaaggcttttgcctggctatgatgctgctattagtgaaagtaaaataaatttaaagaagtatcagtgcgaacgcgagaaaggcgaccttatagtttctgcgctaaagcgtctttttaagatgcatcaaaatggattaaattcttcgcatttgttttatagtcgcgggaatgacaaacctgatcttgatgtgactcgttacgtatcaagcggtgatcggtttgacctgaaaatcaaacacattgatggtgagcttttggtgaaaatcgcagcactgataaaagaacatgagggagcttga

SEQ ID NO: 156990 - DNA, 195 bp, Enterobacter cloacae
atggcttctcagattatcttaaattcttgctctatttctcaaccctccgaatttttatccgcggattcccttggcgaattttgccagcgtctaattaagaatatgaatgctggcgtaccaacaagaatgcctcggttacatggttggcagcttggctatatgctcaatgctattaaggccagtgcaatcaactaa

SEQ ID NO: 156991 - DNA, 339 bp, Enterobacter cloacae
atgtgtaatacgattgaatttgaaggtaatcagatctctttaggtgatatttttgtttctatttggggctacgaacagacaaatgttcacttttatcaggtagtaggcgttgcaggtaaatccactgttaaacttcgtgaagttgaatccagagaggttcccgatcacaaagacgcatattcaggggaaaaatacgcaaaacctgactatttcaaaaacaatgacattctaactcgccgcctggtaaaaggatgcactaagccaacagtgaaggatgatcatgcaagaatgcgtaaaatcgatcccttgaagggctatagttattcaacaggtgcatga

SEQ ID NO: 156992 - DNA, 300 bp, Enterobacter cloacae
atgaaaaagtacgaagttcgttgcgctgtaattcacctggtatgctctttaggccatgcgttcattaagcttgaacgtcgcaatggccgcttagttattttgcataaagaaaataagcatggccgctgggatgttcgttatcttcccaagttcaggaaagaagctacgccagaattatttgataaagtttctggctgggtagattcagctttagctgaggcgttgaaaattggtgttgggtattacaaaaaagcgaaagtaatcaatatctggacaggtgaagtagtagaacgttggtaa

SEQ ID NO: 156993 - DNA, 414 bp, Enterobacter cloacae
atgattaagttacttaaaagccagcttctggactcaacctggtttatcagtgatattaatgtcgattctgattttctaagccctggttttttttatgaagatgaaaaaacgattgatcgttatatggatggatttattacattaaaatgtaatttggataataatgtagacgaagataagcaagcccgtcttgttctgtattgggagtgtgattcatttgtcgatggttcttttaatactcgcattgcattgaatgaaacagtattaattgaacacgttaatttcataaatgaatttggggaattaattatattatcaccgttagagattattaaaatcatcgaaagcaatatcgataagtttagatttggtggttttgattcatgggatgtttatatttgtagtaagttttaa

SEQ ID NO: 156994 - DNA, 432 bp, Enterobacter cloacae
atgttagatattgaaactatttccgttcgtgaagtttcacatagcaagcgtacctgtttttatcctgctgcattttccggcgcttttatcctcggtgaaactatgattctcaatttcatgagaaatcactctgataattatgatggtggctgctggaaatattattcttgtactaatggcgcgtttttttcagcgccagaaaatgaaacatatcgtttgtctcttcctaattattttcaggaatcagtatctggtaaagttgctggtattatcgcaatgatctacgcactttcaaatcttagcggcgtggcagatgataaaggattccataacctgacagaatatttagtgcataaatataatctgctttggcagtacgtgaacacgctgagcagcgaagaatacggacagattaaacgcgcttgtgattga

SEQ ID NO: 156995 - DNA, 228 bp, Enterobacter cloacae
atgtctaaagaaattaaaaacatcctagatgttaaaaatgcggccagcaaattgttgcttaaatttcagactggtaaaatcacaaaagatgttttatatgcagaaggtgctactttaacaattatatttaacgaggtaatgaataatgcatgtgatgatgatactttttgtcatgtaaaagatgccgccggattattaaacgcaattaaacatttttcgacaatatag

SEQ ID NO: 156996 - DNA, 228 bp, Enterobacter cloacae
atgataaataccgcaaccccgcaggaactaaaagaattgcagatcaaaacggggttaaacaaggcagaattggccgcaaggctgggtatgacggccgctgcctgggataatttgatttccgtgaatagtcagcgaaatttgccagcgattaaatacgagtttttgctgttactagctggcgaacatcctgaatatgttcttcaaaaacgcaaaaacgtgatggtttaa

SEQ ID NO: 156997 - DNA, 285 bp, Enterobacter cloacae
atgaatataatcgaaaagaaaaaatctaaaggcagtaaaagtatatctctgactattacaatgccaaatgaaagcgataaattaatcgcaaaactcaaaatactaggccgcactaaccctccgaacggaggcgagcgcatgcgttatattatgtttgaaaaggatgttgagatcagcaacgtttctgaactgcattcattgttgtggcctgaaattaacggcaatagggcattgcaaggtattgatgttattcttgatgaattatgtgctgaggcaaaaaaatga

SEQ ID NO: 156998 - DNA, 564 bp, Enterobacter cloacae
atggaacgtaattttttctcgaagtatgaatctatattcaatcgtgtatgcgtttttttgggtgaaggatggaagattgatcgtagaatccaggatgattacagaattcatcttattcaccctgattaccggaattactctatttcggcaaggttagaaaataataaaatcaagttgctggggtgtgtccatctaaccagaagaggaaatcaattttcctcttgttctgtttctcctttgcgtgatgctattggaatcgctagggatataaaaagaaagatattgtgtaatgcccgcgaacaaatttcattttatgaagcagacacgaaaggagaacgtcttttgcgggaagaacgagaatataccattaacctgctttctcggcttgttgatgctaaaagatatgagggttattacggtggcctttgtcaaataaaaaccaatcatggaataactggaaaggtagatgataccaagggggtaatatacaggttggaattggacgacctgaataaagaccaattaataaaactcatagggttcatatctactcttgagcggtag

SEQ ID NO: 156999 - DNA, 525 bp, Enterobacter cloacae
atgactattcaagaagcattaaacatttttggtttatccggtcagttaaccaaagaagatattaaaaaagcttacagaaaagcttctttaaaacatcacccggatcgcaacaaagataatcccatcgcagcggaaattatgaaagctatcaatgcggctttcgatttcctgagcgctaatttcgataaaattaatgattaccaggcatctgatgaaaaatctcattataactacggtgaagaacttgaacgtgtactgagtgagttaacagcattagccggaattgtttttgaagttatcgggaactgggtatggatttcaggagacaccaagacacataaagatgtcctaaaagtgatgggttgcaaatgggcatcacagaaaaaacaatggttttatcgccccgaggaacataaatcccgccgtaaccgtaaagaacatactctcgatgaaattagagagatgtacggtacgaacggccagcgtaaatcatatggccgcaaaacggtagaaaaccgcgcataa

SEQ ID NO: 157000 - DNA, 327 bp, Enterobacter cloacae
atgacacttacaaacttgctctcagctatagaacagaacagcaaaaggccgctgctctgcatacaggtactgttcttctgtttagaaaagcagtcagaagggcagcgtgtaattttcaaaaatgaaattgatgggtttctttgtaaagacgaaagtaagatgaaagcgttctccaaaaatacaagcgccgttattacagacatggaagccgcaggtattctagtaaaatactctctgatctccggtgaagtctcagagtatcgcggtcagccttaccccttggcagtcagcgtcactaatgaggtaacagcatcatttggcagatag

SEQ ID NO: 157001 - DNA, 474 bp, Enterobacter cloacae
ttgtgcgaatcagttactaaccctagtgcgcatggcgcacaggggtttaagtggctaactcgggatagtaaatcaaaagccattaatcaatggctttttttttctaagaagccgccagcagtggcggctcaaatcttgaacgattatgccaatgaacataaattacgggataatctatctccacctaaaggcacaacgctacaggattgggtggctaaaaatactgcacctttgtgggcatgtcaggcagcgcttgaactttgtcttgcaaatggttggcggcctgaaactgctacggagtgggctgtatatgcctattttttaattcgtaaaaaaaagggtgaatacagattacaggtattttctgaattgattcaccctggtttagatagaatgtgtgcgttgggttggattgttgctgcactagaggcaacaggaaaagtcccagcaccacccgaaagaaaaggtaaataa

SEQ ID NO: 157002 - DNA, 1062 bp, Enterobacter cloacae
atgagcaaatcagcaagcaacaaagtaactctggaaagtgtatttgatgaaaatgaatacatcatggactttccaatgagcaatatcattattaatccgcaggtacgccgtaataagaacccggaaaaaatcaatgaaattgcaaaatcaattgaagcacacggccagcaacaaccagtaatcattggtttccctgatgatgatgggaactgccctttgtattttggttttacacgttattttgctcaagaacagcgtggttcagaaaccatcaaagctgttcagcgtgaaaaaccagaaaacattttggttactcaatttgttgagaacctgcatcgtgaaaacttaaatattgtagatattgccctgggcattaatgacctgaaagaaaaagacggtctaaaggctaaagatatttgcgagaaattacaattaagcagttctcaagtcagcaagtataccagtattggtagcatgccgactgacctgcttgatcgtgtagcaccgttaagcaatgatattgacacgttttactatctttcgcagatctacaaacgttctccggctgatgttgaacaacttattgctcagggtgaaaaggacggcgaactaaaccgtgtaactgtccgttctgcgtctgataacctgaaaaatgcaaatggcaatgccgataattccagtgataactctggtgctaatgacggcaacagtgacgaaggtacaaaaactaaaggtaaaaaaggtaaaaacaaaactgaagatgatgatgatcagactaacggtgataatcactcaccggacgatagttctgactctaatgactctaagactggcgatgattcagaagcaaattcccagcgcacgacgggaacacaagctaccacaaagaacgtcgcccgaatttgggtaagcttccaggaagaaggccaagcaattgaaggtgaattaattgtttcaccagataagaaaccttctgataaaaactctgcaattgttctaattgatgggcttctaaatgagttgccgcttgaggagttaacatttgtgcgaatcagttactaa

SEQ ID NO: 157003 - DNA, 744 bp, Enterobacter cloacae
atggcgcgtgtaattacagtagctggtcaaaaaggtggtatcggtaaaacgtttacttctttgactattgcaatctacatttctcaggtcttgaagaaaaagacactctatatccctctcgataaccaagggaaagcttcaaagcgtgtcttaaacctcaaagacggattagtagtaaatggaatgttctataacgaaccttatgatattcaaaaggtcgatgaacatcttgattctctctgttctgaccgcaccattcataaccttgaccgtgctgattttgcagaagcgaaagcttttgcagatgaagttaatcgcatcaaaagtaattacgaatttgtcgttgttgatacgcctcccggtttagggacgcgcattactgctgccattctcgcggcggataaaatcgtatgcccggttgaagctgagatcacgtctatcgacggcctcatagaactgagagataccgttagaaaactagtccgttttaatccaaaagcacgaattaattctataattgttaacaagtacaaagatgttgatgatcagaaagacattcgtgatcaattaatagctatgtttccaaatgaggtacatccaactccaataaaagatttacaacctatcaaaactgccatgtcacaaggccgcatggtttggcagaacgcaaaaaacggcaaccaacgtgttgccgctaaattagttaagtcggtcatttctgaaattatcgaaggaaaactgtaa

SEQ ID NO: 157004 - DNA, 375 bp, Enterobacter cloacae
atgagtgacaaaaatgaagcgtatcagggcggtggtgatctctttatccgttcggctaggccagttaccttttggcgctgcgtttgggtcgtctttatatggctaatgtacagcactggctgtgttctgactggctattgtacaaaaagcgagttttctctgtcgtcacgcctggataccgcccctcaacactattctctgtcagacgcacactatgtctataagaaacgccccttgccggtactaaaagaagaggaggagggcgtttctgaagagagtattgatgaacaaccagcaacgccagaggaaccagaaattaacgctgatctcagggcacgggtaaagcaggcgatggctgacattgatcgtcaataa

SEQ ID NO: 157005 - DNA, 1467 bp, Enterobacter cloacae
atggataagctcaatattttttatactacccggcatcgcctgatatggcactctcttatttcagcgttaattaatgagccgtggctggtattgcatggtgcaaaggggtcgggaaaaagtttacttgcacgcggtattatcgatgcgtgggcacatcgtaccctgacgataggatcgctcgcgcgtaaaggatatcagcttgaatggatcgtactggcggatagccaaactgagggcagtttaaccgggagggtattctcctctggcactctctggagtggactgcttggcttaatgggggaaagaaaagacagcataccgctgtttgtgctggaggatggccagcgaataggtaacaggctggtttcaacggttcaggactttgtcgcgataatgcctaaagcccgcttgttattaaccgggacatttcatcgccgtcagcagcgccacctgcggaaattgcatccgttatggtttgagatacccaacccggacgaggtggattgcctggaggtcatagctgctcatgctgacgtagagcctgaagaatcgggggtactggcggagcatttcgtcagaaaaattatgcgccgctgtcgcggtaatctccatcttgttgcccgaacaggagagtttatccgtcgtaataaagaaggaaagcagaaggctgttgtcgggatggcattgcaacaagccgccttgcgctctatacccgtaacgcaccatcctggcgggacatgtctggcattaatcgtcgtggcggcgctgtgtgggactgcgggcaggtatttttctcaacctttatcccgctggcttccgcagccagagagtctgttgtcagttgctacaacccggccaatctctcctcctctgacattaacgtcaaagattatgtctaccaatgaatcgctcgctttactttataacgtgtgggggtttgacgtagacaaaggtgaagcatggtgtgatcaggcctaccgggcaggaatggcctgtatctcgggtaatgacgcgctggaggctctgctatttcagggcctcccctggatagccacgctgaaggtggagaatatccttttgccggtagtcgttatcggggggggggataagacgcttaccgtactttccggcagtaacacgtggatcgttgataagtcatggtttggcacagtatggacagggagttctacgcggatgtggaaaccgtcgcctgagggtaacgcgagcataacgaggaaaagtactcccgacgatattatctggctcgatacgatgctgagccggctgttgagtgttgaagccgagggtacaggagagtggagtcctctgttaactgaaaaagtccgacagttccagacccaacataagattaaagcggatggagtgatgggacagctctcacttatccgactctggcaggcgctgggagaaagtccgaagctcaaccaggatggggatacgatatga

SEQ ID NO: 157006 - DNA, 816 bp, Enterobacter cloacae
atgacagctatattcagagcagtaaataacaactctctttatcgcatattgtgcatcattattatattcatgtgtattatggcgtcattaatttgcataaatatcggatatcttcgctggtccaataactccttagcattacaaggcgtaagaattatagatttaacaactacatcaaccaagaaacataaatggaatttatcatcaaccgcatcagacaatattgagatgagacgtttaacgaagaaagaagcgttccgactacctgatatccgtttacgcggtattattcatagctcagacgagtcaacctccagagcgatcctgcaggaagcaggagagcagaatgcctattcggttaatgatgttttgaaatcagcgaatacaattcatatcaaagatatctctcaaaatcaggtcatcctctcattcgaggggcacgaacagcaactcacgttgccttctgaactgagtatgtctgacgcgtcccccgaacagatttcgggtaacgagcccccgtcaaagatcgctttgtcagaatatatccaggccagtcctgtggaagataaccacgccttgcgcggattacgtctgttaccccggaagaatgccgcatcattcgcacataccgcccttgaacctggcgatatcgccattcagttgaataatatttcactcacaaagcgggaaaacatgacgaaagcgctggatgcgcttaaaaagcttcaaagagttcaatttactctgttacgaaattcatcgcctctggtgattaatgttgccgttcagcaattccaggaaggtaaggaaaattaa

SEQ ID NO: 157007 - DNA, 1986 bp, Enterobacter cloacae
atggtaaagatacctcctgtccggagaatgaaagccctatcgctgctagttctcttttctatcgcagcgcaacccggatataccgctgattacaccgcgaatttcaatgatgcagatattcgaacctttgtcagtattgtgggccaaaacatggggaaaaccattctgattgaccccgatgtaaaagcgtctatttccgtcagaagtgcagatacgtttaatgaagaggagtattaccagtttttcctgagcgtactgaacctgtacgggttttcacttataagtcttgataatggtttgctgaaagttgttcgttctgaaaaagtgaagaccctgccgggaaaacttactaatgggtcgaggcccggaaaaggggatgaactggtgacgcgtatcgtttcgctggacaatgttcccgcacgtgcattatccccactgctgcgccaaatgttggatggcgggaacgtgggtaacgttgtgcattatgaaccctcaaatacactgatcattaccggcaaggcatcaaccgttaatcgtctgcttgaagtcgttaaacgtgtggatgtgatgggagataaaaaagagcaggtaatctccctcaaatacgcgtcggctagcgatctggcggatgttctcaatgacctgtcgcgtgagagcggaaaagaggcccagcctgccacactccagacgcgaatcgttgctgacaaaagaacgaatgccctcattatcagcggatcagatcgtgcccgcgcgcggattcaacagctcgtctcacgtctcgacacgcaagagcaggggcaaggcaatactcgtgtctggtatttgaaatatgccaaagcggacaaacttgtcgaagtcctgacaggtgttacgcaaaaattgactgaggagaaaaacggcgcatctaaaccaacgagcagcagcggcaacgggatatcaattactgccgatgaacagactaactccctcgtggttaccgctgaccagggtattcttcaacaactggatgaggttatcgcgaaactggacatccggcgggctcaggttctggtcgaagctatcatcgtcgaagtacaggacggtaaaggcctgaatcttggcgtacagtgggctaacaaaaatgtgggtggacagcagtttaccaaaaccggcctgcctatctttaatgccgcgcaaggcatcaatgaatttaaagcaaaaggcggcatgaccagcgacaatccggcatacgatctttttagcaattataacggcctcgcggcaggcttcttcaatggcgactggggcgttctcctgacagccctgaataccgacaacaaaaacgatatcctctccacgccaagcatcgtcacgctcgataacaaagaagcggcgttcaacgtaggccaggatgttcctgtgctttccggctcccagactacctctggcgataatatttacagcaccgtcgaacgtaaaaccgtcggcaccaagctaaaagttaccccccagattaatgagggcgactcggtgctgatggagatcgagcaagaggtgtccagcgttgacacctcggcgacctcatcatcgcttgggccgacattcaatacgcgcacgatccagaatgcggttctggtgaagagcggtgaaactgttgtacttggcggtttgatggatgatgcaagtaaacaggaagtgtcaaaagttcctctgttgggcgatatcccattgattgggcaacttttccgctatacctcgaatgaaaaaagcaaacgaaacctgatggtttttatccgcccgaccatcatcagagatgatgaggtgtatcactcgctctcacgggataaatacaccggtttcaaagagatgcagaaggaaaggagcgacaagcgcagcggcaaactcattaatgtcgatgaaatagaatcactggatgaccggacgtttaataacacgctggcagcgcctgccgccaaaaatccctttagcggggaggctgtgaagtga

SEQ ID NO: 157008 - DNA, 1476 bp, Enterobacter cloacae
gtgaacccgttagcctggaaaaaagcgcaacgctatggcatagctattcagcagcaggaactgtactacacgtccagtaccacgcttgagcatatgcttgaggttgcctccatggcccgcgactgcatgcattttacccggttctcttcgcagcaatttacagaaaagctggagcagctatatcaaccctctggcggttcagctcagcttattgccgaagatattaataattccgacgatctgattgcgctctccgatgaaatccctacgaatgaagatctgctcaacgagcagtcggacgcgccggttatcaggctcattaatgcggtccttggcgaagcgcttaaggagcacgcgtcagatattcatattgaagtgtttgaaaaaacgatgagcattcgctttcgtgtggatggtgtattgcgcccggtggttcaacccaataaaaaactggccgcgttgctcatctcacgcatcaaaattatggccaaactggatattgccgaaaaaagactgcctcaggacggccgtatcaccttaaaaattggtcaccgcaacgtggatgtccgtgtttccacgctgccttcacagcacggcgaacgggttgttttacgtctgctggataaaagcagtctgcggctatccattgacaggctggatatgtcagaggaggacatgcgcgctctcaggcaccttatcgccctgccacacggaattattctggtcactggccccaccggctcagggaaaagtaccacgctgtatgccctcctctcagcccttaacagtccagagcgtaacgtactgaccgtagaagaccctattgagtatgaactggagggcattggccagacacaggtgaatagccgcgtggatatgtcttttgcgcgcgggctacgcgcaattttacgtcaggatcctgacgtggtgatggtgggtgaaattcgcgatgctgaaacggctcagatagcagtccaggcctccttgaccgggcatcttgtcctttcaaccctccatactaacagtgccagcggcgcggttacccgcttgcgggacatgggcacggaatctttcctgctctcctcatctcttgtcggggtgatcgcgcaacgccttgtcaggcgtctgtgcaaccagtgcaaaacatcgcatcctctcacggctcgacaacatcaactgctgaacactgagggtgtcaccgcgacgcaactctggcagtccaatgggtgccaggcctgtcgccaaagcggctatcagggccgcctggctattcacgaactgttagtgatgacgcctgagatacgtcaggccatacatgcagaggtcaatgagcagcatcttgaacagctccagcgccagagccatcgtagcttactggcaaacggactgcatgccgccacgctagggttgacctcattgcaggaggtgctgcgtgtcacatccgaagggcagatatcgacggagcacggtgaatga

SEQ ID NO: 157009 - DNA, 1200 bp, Enterobacter cloacae
atgaaatttcgctggatagccacggattccagagggaatcgccatactggtgtgagcgatgcagattccgagcgggagataattacccagcttcgaaacaagtccctgttgccgcagtccatcaaacagcagcggcgaaagctgacgttacggtggtttccggcgcgggtgagtcatggtgaactgacgctttttacgcgtcaacttgccacgcttatggctgcggcgctgccactggatgaggcactcgccgcgattcagcagcaaaaagagagtaagaatcttatcggcgtgatcggctcgcttcgtcaggcagtgcttgaaggacaatcgctttccgccgcgatgcaactacatcccagggtgtttgatacggtttattgtacgctggtaaaagcaggagaagctgtaggccaggctggggcagtgttggaaaggctggccgattttaatgaagcccgccagcggatgcatagcaagcttatgcaggcgcttatctacccctcccttctgacaatcgtcgctattctggtggtggtgattctaatgactgctgtcgtgcccaaagttgcggcacagtttattcatctcaagcatgagttgccgctcacgacccgaatattgctcgctatcagcgactttttttcgatttacggcccctggttattgggtctctttcttgttggtggcggtctgttttcatactggctaaagcggggggacaaccgccaccgctttcaccgtctgctgcttcattttcggggtactgcacaactggtttgcgctatcgacagtgcccgctacttacgagccctcagtatcctcaacattagcggcattccgttgcttcaggggatgtcactttcagcgcaaggcgtgggtaaccaggagatacgtcagaggctgagtgaagccgccgagaacgtgcgccagggaaacagtatcagcctgtctcttgagaaaacagagattttcccgcccatgatgctgtacatgatcgcttccggggaaaaaagcggccaactcggagaactcatgcaacgggcagcagataaccaggacgtccggttacagaaccgcatcacgatgacactggcgatttttgaaccgtcactgattatcgtcatggccgccatcgttctctttatcgtggtggcggttatgcagccaattttacaactcaactcattgatgaactga

SEQ ID NO: 157010 - DNA, 444 bp, Enterobacter cloacae
atggaaaaacaaacgctaaaaacacaacgtggttttaccctgatggagctcatggtggtgatcgtcattttgggtgttctggcaagcctggtggtaccgaatctgatgggcaataaagatcgcgctgaccggcaaaaagcggtcagcgacattgtcgcgctcgaaaatgctctggacatgtacaagctcgataaccatcgctatcccacgacagagcagggtctggacgcactggttgatgccccgacactctcgccgctggctgagaattacaatcccgagggctatatccgccgtctgcctgcagatccctggggcaatgagtatgttctgataagcccgggtgaacatagtgcaatcgatatcagttcaaccggccctgatggtgaaatcggtacggctgatgacatcaacaactggaataacgacaaaaaatcgcactga

SEQ ID NO: 157011 - DNA, 501 bp, Enterobacter cloacae
atgcctcgggaaaaaggattcaccttgttggaggtgatgctggtgattgtcattctcgcggcggccgcggcgggcgttatagccatgcaaaatgaacgtttaagcgtgagcggaaaactgcgtcagcgtgtcgacatgttcagacaaaccgttgattatgcagccgatctggcgctgctggaaaaacatgcggttgccctgctggtgaccgaaaaagggtggttactttacgccccacaaaaaagtgcgagtactggctggcaatggaaggttattcaacgtgacgataacgtatcacttcagggggaatggaacgggccgactggacccgaacttatcccctcgccacaaggcgatacgccgcagattatcatactacctgatgggcagataacgcccttcacactgttattcagaaatgcaaacggtgaaaaaattctgcatgtgcgctgcgctggctttctgccgctggatatcactcagctaaaggtggcgcaatga

SEQ ID NO: 157012 - DNA, 357 bp, Enterobacter cloacae
atgaaacagcaaagtggaatgctcctgcttgaagtgttattagccatggtcatctttgccacggcggtcatggggttagttaccagcatgcaatggcaactctccgctctggagaccctgaagcagaatacgctggcactatgggtcgcggataatcagttaatcaaagctcacacttctctttccaccacggtgaagagccagtcatatctggagggtatatcattcacctggcagctcgaaggttttccctccgcttctctgaaccaaattaccgtgacatcctccgggggaaaaacggtacagctttatgcctggctcccggaatcagagaagcaaggggctagccatgaataa

SEQ ID NO: 157013 - DNA, 582 bp, Enterobacter cloacae
atgaataatcatcagagaggctttacgcttctggaagtcatgctggcgattgcgattttctcggcgctcagcttcctggcctcgatggtcttttctcaggcttctgagcaacatcagcgcgcccaaaaactggccaatgattttcacgccctgcaatacaccctgctgctgctggaaaatgatctgatgcaatatgtcccacgcaaaaatcgccagactcaccagccccttacgagcgagaccgatgagttactcttcagcacccaaatgcgcgatgcgacaacccctttcgaagcctccttcgtacttacgaccatacactggtatgtcaaggacgggaccttataccgcgcagtgcggtactcccctgacgggaaagaagacaaacccgcacgtgccctgctgacaaacatcatccatttttcatctgtactgtcaggtgttgaggggaatatggcatcaaccacggtagccattacgctggagcgggaaaacaaggaaagtgttcttcgtcgttttatcttgcctggatggatcccagagaagcaacaaaccgaccagcatcgtgaggataaaaaatga

SEQ ID NO: 157014 - DNA, 963 bp, Enterobacter cloacae
atgaatccgcagaaaggcgctgcgctgctgattgtgttaatgattctggcgctgatggcagcactcgcggctgaaatgactattagcttccaggcccaactcctgcgtagccgacgtacaaatgccagcgtgcaggcaaaatacgccctgctttatgcggaagggaaggccaccgccggtgtgttaaatcatgatgctgtaaggttaaccggcaaggcagaactggatacgaatactagcgtaagctggcgtacggaggatcgacaacagtgcttcaatctcaacgcgctggagaaggatcccgttgaaggcatgactacgccgcccccctatgaaatcagcgtatttcaggcacttctggataagctgggcgcagacaaaagccgcactgaagagataatccagtccgctgctgattatatcgatgccgacacgtcaccacggctgaaaggggccgaagatgagtattatctgcaaaacggcgttcacttcctgacggcgaatcaaatgatctttttacccactgagattcgcactctaaaggggatgacggaacctctctttaagaaacttgcaccttttgtttgtactgaattcagcagcgacgtaaacattaatattaatacccttaccgaagagcaggcccctctgctggcagccctttttctgaatgatatcagcacgtcggatgcaaaagccttgctaaaaaaacgccccagggaaggctggaaaacgatcgatgcctttctttatcaggcccagaaggattacagcgcggccaaagaacatgtagacacactcaaaaaatacctgaccgttaccagtcattattttgtgactacgtcgagcgcaagagaaggcgagctgagtacagggatgaaaacttacttttattatgacgataaaaagaaatctatcgggatctatctccgccagcttacggatggcgaacatgacgagtaa

SEQ ID NO: 157015 - DNA, 1149 bp, Enterobacter cloacae
atgacgagtaaaacatcatttaatactgcgcggctactcatacgcctgaacagcgagccaacgttgccggtggaatggaccatttttgacgacagcggctgtggagaaattcagtccctgccacgcgaaaaactccctgagctttccgggcttcctgccgccagggaaacatgtctgctcattcctgttgaaaaagcaaccttccgcacatttgctgttctggatgaaaaggatgaactgtccgatcagcaactgcactggctagccgatgagacgctcgacgaggatgcccccaccttccactggacgttgctctcacgcatgggaacgacgctcgcagttgtcggggttgataaagtatggctgcaagaggaacttgcagtgctcagtgccaacgggtttaacgtgacgcaggcatcgctggatgtgctctgtttaccaaacatagaaaacggttggtcgatactgaaagaggaagatacctggcttatcaggactcacgaaggttacgtctcgcgcctgactggagcctggcttactcatctcctgctgcactttcctccccgacaacttatacactacggcgaattacccggtccatatgcagacgccgctgaaaaaccggcatgccatatcatgttgctttatccagatgcggagatcatcaatttattgcatgacagcgtgcgtccccctgccgcgttttcgcccgggacatcacgcctgcaacgtatcgccctctgctgtgttgttctggccgcggcgattgcactactgactcagctattctcctggtggcaacttcatcaggtggaagtgcagctcaggaataacctgacccagcaatggcaacgctatattcccgaaaaccgacacagtaataatctgcgatcctacctgccagcacagttacggcagcgttcacccgcaccgttaacgcttctgtttcgtctgcagtccagtctggctcgtttccctgacatcgcacttgaaggagtgagctataacccgcagcaaaaatccctgcaactttttctttatgcctctgatgaaaaccacgtacggcaatttatcaaagagagcgcattggggttttctttaacgatagacaaacatgaacaaggaaagtggacgttacgcaatgattaa

SEQ ID NO: 157016 - DNA, 483 bp, Enterobacter cloacae
atgattaaacatgcgatgaacaacttcaggcaaaaacctgttaatgaacaacggctcatcatgatactggcaatatgtagcctgatgatacttttctggtttggcctctatcagccacttgatcagtcaattaataccctgcagtcgcgttgtgaacgcctccgcgacgatgcggaatggttccgcaaacaggttaccacagcgggtcttttgccggaaaacaaaccggccggtaaaacgggcgatctcatcaggaatagcctaaaaaaagcgaagctggtcgcaacggtacagcagggtaacggaggcgaaacgagcgtctccgccactaacatgaaaatggaaagcttcgtgctctggctcgaagagatacaaatcagttacgggctacacgtcatggacctggaatttcatgccaacccccaaggggccgactcgattaccctcacacgtctcaccatcgggatgaagcggaatggatag

SEQ ID NO: 157017 - DNA, 780 bp, Enterobacter cloacae
atggatagtatgcttgccctgctctttctgattattgggttactggcaggcagcaccatggggatggtcacctggcggctacccataatgatcgtgcaacagcctaacgctgacgaagcattttcccgctttaatttatggctaccagcgtcacactgctgtcactgccgcatacctctgatgtggcatgacaatatcccactctttagttggctgcggctaaagggaaaatgccgtcactgtggacagtctgtctcatggcgttatcccttgctcgaagccagctgtgcgcttatggctcctctctgctacgcccttcaccctaacaatctaatgctggtttccggtctgttactttacttctggttcgcactggcactcagtgtcattgatttacaacactttttattgcccgataaactgaccctgcccttattgtggcttgggttgctgtttaacctgatgacgggagtcgttccctgtaaagatgccattcttggggcggtggcgggctacctcaccctgtggctgctttactggatagtctggctgatatggcgcaaagagggtctcggctacggggatttcaaattgctggcagcaatgggagcctggaccggttggcagaatctaccaacgatcctctatatagcatccatcgcaggggtcctcggagggctggcgtggtggatgaaaaaaaggcagtttactggcgctctcccgttcggacctgcgctggcattaagtggctggggctacttctgctgggctaccttgtga

SEQ ID NO: 157018 - DNA, 519 bp, Enterobacter cloacae
  misc_feature (453)..(462): n is a, c, g, or t
atggctgaactattaaaatctgaaagtcctgtttcacaattagtgcaggatatcactgaagctttaaaaatcgttgtcgatgatggaagtaaagctgcaaaactggtttgtcttaatgaaagaaacgaattagttcccttgctcacacaaaatagttttgttccagatttccgtgttcgccatgagggtctcaatccttttaactatcttattgatgggctggaaaggttttcgcatcacagcgaatctagtaactcactggaatcgactgatgtatctcaccaatacgatgaaattagccggttaaatgttcaccatgcacttcatgcttctggtttagttcctcaggatgttcacctctttgttactttacctcttagccagttctatactgctttaggggaaacgaatattgaaaatattcagagaaaaaaagataacctgatgaaaccnnnnnnnnnnaaccagttgagcgttatcttgacggtaaacgctattcttttaacgttttgtctgtga

SEQ ID NO: 157019 - DNA, 153 bp, Enterobacter cloacae
atgcagctgaataacgactattctttattgttttatcatgatggtaaaataaatatggaaggtctgattaaacaaatggaattaaaaggttatatgtatcagggagcaatggcaatgatgatgttgcagctgagtttcccggttttcttttaa

SEQ ID NO: 157020 - DNA, 1950 bp, Enterobacter cloacae
atgcaaaagaatcttccagaagaatcactacttgagaaactaacaaaagaagaacttcttaagctggttaaagagatgcatgaagataaaaaaatgcatgctattttctctacggacgcagatttgtatgctaatgatgcaactctaatgtggcagggtcggaacagattcttggctgaaacagtaacacctgtcacgataaaaagcgatgcgaaaaagagctatcctgaaaaggtcgggggaaatcatcgcatcattgatggtgataatttagctgttatgcgctcattaattaatgaattccgtggcggcccgaacactggattcgatgtggtatatatggacccgccatataacacaggaagtgatgcatttatttataatgacaattatagattttcaaaggctgaagtagataaattaaaagatgctattggaagagttgaaaagggtgtttcacttgatgatccatcccgacatactaagtggataaatcatattgctcctcgtctttgggcagcaagaaaattactaaagcatactggtgtactcataatatctatcgatgaacatgaattaccaagactgtggatgcttctagaagaaatgtatggtgaaaaaaaccgtattgccacacttatttgggaaagatcgaggaaaaatgatgcaaattatatttctgaaggtcatgagtatctattagtttgggcccgtgacaaatctgctctcgattcaaaaatgaaagaacttgctaaaaataagaaatgggagagatacaaaggaaaatggagaaagcccaaagaaggtgcagaagatatactgacagcatactctgatgctaaaaaaatatttttggatgacattcctaaaatccaaaaatatatgaatgatttttttaaaaatctgccagaagaccatcctgcaaagaaaattcgttatcgaaaagtagacaaaaatggcgtctataatgacgacggtaatctaaactggccaggcggtggtggtcctcgatatgatgtagtacacccaattacacataaaccatgtaaagtcccagcatctggctggaggattgctaatcctgaggtaatgcaggctttaattgatgccgataagattgctttcaaaagcgatcataatggtattccaagaatgaaaacctatttacatgaaatggaatcagaagtcgcaacttcagtgattagaagaatgggtcaaagagcggtagaaaccgtaacaaatattcttggaaaaaactcattcgataatcccaaagatcatgaaatgttggcagaactcttcaaccttgttacctggagagatcccaatgcaattattttcgatccttatgcaggaagtggaactactggtcatgctgttttgactatgaactctgaggataatggtcagagaaaatttattttagtagaaaatggtgatccttctaataaaaaaatcaaccgcgatcactatgtgaataatataacggctgaacgaattagaagagtcctttccggtaattgggctgacaaatctcagcatcccaaaatcaatgaaggattcaatttctatgaagctaaaaagactgtcagcaaaacagtcatcatggaatctaatagagaaaatttggctgatattattttacaggttgttgaagatgattctaaccgtttagattgtcgcatggatggctataaatatctaattggaaagacaaaacttggctttggaatcgcgttggtgtgggaagcaggtaaagccaatggacatcagcccttaacaagagaaatccgttcagtaattatggatgaggctaagaaagcgaatgtaaacagacctgtttatatttatgctgtagccaatgtatctccgttgaatgatcagctttatcgcttccagcagattcctgattcaattctggcgagattaaatttactggaagaagagtaa

SEQ ID NO: 157021 - DNA, 1338 bp, Enterobacter cloacae
atgaaaaatatgaaaaaaggcgtttggcaaattggtgatggggtagggggatgggcattaggtattgcaggtttagctatgttagttatccctacacttttttatttttcaaacgaccagtcatattctaatgcggcgcagcatgcaacaagagtttcaaatgctgctgagaaatttatttctgataatgcggctactatatctgcgggggctacacctacagcaccttatgtttttaatacgcaaactttgattgataatggttatttaccaaccgggtttgctcctaaaaatacctttagtcaagattatcaaataagagttttagagcctactgctaacaagtttcaaacattagttgtgactattaatggtcaagcccttagtgattcagcagcgcgtaaaattgctacacgaattggagccgatggaggctttgttgataaaggtatcgctaaaggttctttaggcgcttggactcaagatttggctgcgttcggtgtatctcctggtaatggacatattgctatcgctcagttttataaaaacaccgttagttcaaatgattacctgtatcgaaagtctgtgcctggtcatcctgaactaaacactatgagtacagccttgaacatgggggggaatgatgtttcgcatgcaaaaaatatagatgcatcaggaaacgtcatttcaagcgctacggtacagggcgcggcagttaactctaccggaaacatgactgcaacaggtactgtaaccgcgcaaacgacgaatacggctggagaaacgtatacggggggatggttccgtactcgcggtgatactggttggtatagtgagaaatggggtggcggttttcatatgacggattcttcatggattcgcgcttatcaagacaagggtatttatacaggtggtcaagtccaagctggtactgttcagtccaatggtcgtatgactgcaaatgagtttttgcagatcaatggagttgccactgcggggtggggatgttccccaaatgggcttgtaggtcgcgatgcagcaggtggcatactttcctgtcaatccggtgtgtggtctggaggagggaaaatgcgcgttcaaacagtgaatggagcatcatcatgtactaacaagggcacgatgatagcttcttgccctacgggtacatttgttgtttctggttcatatgctcttacggcatggggtaaaaattcaaaccataactcacctgatgcaatgtacactgatccagacaacaatcgctttgtgatagtcgctccaaacaacaacagtacaacttgcttccgcgctatagcgacgtgcgcaagcctccagtga

SEQ ID NO: 157022 - DNA, 969 bp, Enterobacter cloacae
atgaaaagaaagcttaacgaaactttgttcaccgatatttatattggtgaacattatatggaggtcaaggggttgtttggtgcgggcgttctgctcgcacctgcgcctgatgatattcttgacgatattcatgaactcaaggatgtttgttattcaaaacataatgaaagtgggagaacagagttttctgttcgacatgatggtgtcatttatcgtgtaactctatcaaaaaatactattggtgaaattaattatgtaattcgccaaactcaaaataaaattattccggcttcggaagtaggcattcctccttttgtcttagatttaattgttaatccttcaactgttggacttgttttagtgtcaggtaaaatgggggtaggtaaaacaacaacggcagcctctgttcttagttacagaacttcccaagctggaagtctttcagttgctattgaagatcctattgaaactttgctcgatggccgtcatggtgatggtcggtgcatacagcttgaaatcggtgagcacgaagggtattcctctgctttaaagaaagctatgcgaatgggggttagtaatctgttaatcggtgaaattcgtgatgctgatactgcgcatgaagcactgaaagcatctattaatgggatgttcgtaattgctactattcatgcaaatagtattattgatgctatagagcgatttgatattctatgttcagaaaagaatactaactctaaatctattatttcacgttctctttgtgctgttatgcaccagacgatggattatgtggaacgtaacggtgcggtagtggatagaaatgttaacatcactgcatttcatgcgcagaatgaaaatgagaggcaaaaaataagaactaaaatttcatctggtgattttttagggttaaatgaaattattaaaaacctcaatcaacaaagaacaaacaatacgcgagggaattactaa

SEQ ID NO: 157023 - DNA, 504 bp, Enterobacter cloacae
atgaaaagtatgaagaaaggtgtttggcaaattggtgatggtgtcggcggttgggcaatgggtatcgcagggcttgtagctgtagcctctatcatcggttgggcaatgctcaagcctaatacagcatctgaaattcagggtattaccacgatcatgcaggagatgcgtcagctacgaaactccactggttatggcacatctgactatgtaccagctcttgcaggatcacttggtaaatccgttactgttacttctggtaagctttataataaatccggtggcgatattacagttgtcggtgcgggagtcgggtttacggttactacaacaaaattaagtcaatctgactgcatcaaacttgctacaacgcttagcggggctgatgttaccacaacaaaaatcaataatggttcttctttcactggtgaagttcctactgtaagtgctcaaacagcatgtacagcgggtaatactaacagccttgctttcactactagctcataa

SEQ ID NO: 157024 - DNA, 1065 bp, Enterobacter cloacae
atgaacggatttaataggtttataactagagctacattcaatgcaagtgatcgcattgaattatacgacaactttagacaataccttcttgatggtgttgaagttgatgttgtctactcacgtttaattgaaagttatactaggcgaggtaaaaaacctaatcaccccattgcggagatcctgcgtgaatgttcttctcatttagctacaggtagcaccctggctgaatctttagcagagtggattccagaatctgagcgaagtgtcatagaggctagtgatgctgttaatgctacagccgatgggttctatcgtgctgaaaaaatggctaaagatttaaagagaatgaaatcatctatgtttggtgctgttgcgatgcttttattcatgtttctatgtttctttactttgttggcaatgatatgttcaatgctaattccttatatattacaaaccacccctttatatatgtgggggagcgctcaaaaagttatttattatttctatgtttttatttctgaattttggtatattgcaatagcagcagtgctggcaacgatttatttagttgtttattctcttccacgatggacgggaaatggtcgttaccatgcagataagtttttaccatattcaatttatagaactctaaatggagctatatttgtatcaaacgttgatgctatgctttcatccggtattccattgcgtgatgcgctattgaaaattaaaggtagctctcgtagtaaatggttgattgaacgtattgatggtgctttgattggattatctcatggtgagggtaatctaggggctgcactcgattcaagtggatatgacttccctagtgaagatgcaataattaaattatgcagtgttttcgacacatctaataagagtggatcgttaaccagttttagtgaccgttggcaagagtcaactatttcggccttagaaaaggccagtaaatcaattcaggttatggggatgttggggtgtgcattcggtattataggtgtttgctttattctctctccattaattacagcgatgtttaatgtttag

SEQ ID NO: 157025 - DNA, 1554 bp, Enterobacter cloacae
atggaagaatatttctctatttccagtcagtatgggttgtctgatattaaccctagtccttttttggtcgagaacatgcttattgctacaaatggagaaaatcgaactctttatgtagttaaagaccataagcttcatccagaagttatggactatcgccagcttttctttaagcaatggcctcagactatatgggaacctatagcgaaatctaagcttatagagttacagcagcgtaatgatgtgtttacttctaaagaagagcactcagatttacaagctgatattgttcatactttcgaagttgcagcaaagcgtcgtgcttctgatattcacattcgcgtaggaaataaatacactaaaattttcttccgaattgatcagaaacttgttttttatactgaccttgtagacgataaaggcgttcgcttcgtgcaagccctttatcagactatgtgtgaagggcgcaccgcgcctacatttactttttctgaaccagttgatgcaaaggtcaaagagtcacacgtcgaaagcttaggcttgaatggtgggcgtctggcaacccgcccgacagatgaaaaaggactcattgtaattcgtctgttacgtaaaaataataaatctctaactcttcgtgagttaggtgttactgacgaacaggagcgaatcttacagcgcgtaattagtaaaccctctggtgttgttttcatgagtggcccgactaactcaggtaaaagtactcttgcaaaatgtatggctgaaattgttacttcacgcgatcctgggattcatctactgaccgttgaagatcctatagagtctacaattgccggtgctgttcagacacctttgatttgcattgataggggcactccgggcgcactatccaaagcgtggggtgatgcaattgcgaatctcatgcgtttagatccagaccaaatttatattggtgaggtgagggatttcacttctgccactggcgctatctctgctgcccaaacggggcagaaagtgtataccactattcacacgcataatccaatcgacattatccctcgactgaaaagctttaatgtggatatggatttaattacggattcttcattgctcacatgtttgataggtcaacgtctggctcctttattatgtgaacattgtaaacaggcttatgtaaaacattcgcataaagttgatccagtttatcgtgagttaattgaaacgcattgtattccgagtggtgtgtatatagccaatgaagaagggtgtgaacactgtaatcatacaggctataaaggtatgacaggcatttatgaaattatcgaaactaacgctaatttcatgcaaattttccagactaaaggtaagctcgcggcgtatgaatattggtatcagcaaggaggccaaacattagcagctaatgccattagtcttattaatcagggtaagattgatcctgtttactctcatagtaatgtgagtagcctcgatcgtgatattcaaatgtttactgatgaaattcgcaactctgtaacctcaaaacttaaagtggcttga

SEQ ID NO: 157026 - DNA, 510 bp, Enterobacter cloacae
atgcggaaggtgaaaccaattacagtgtggaaggtacagtatatggcaaaaaataacagttttgcatgcaaaaaaatcatcggttttattttatcttttcttttttcattaccgtcctttgctcaggatgtaaagactttaggcgaccttgatgttattaatgccgatacaactatttacaaggctattgcggcgcgtaaaaaggctcaattagaagctgagaatcccgagattcaagcatcgcaagtatctcaatcgccttcaatggggatgcctggatattctcagccgccagcgacaactgttgttagaactgattcattgccaacagtacttcgtattatgaataagctagttcaattaaaatatccagatggtacaactgattggaaaagagcaggtgaaatgcttccgggtggttatcaattatcgactgtctctgttacaggggtttgggttaactcgataaaagataataaaaaatctctattaaaagatgaggctaattaa

SEQ ID NO: 157027 - DNA, 1365 bp, Enterobacter cloacae
atgaatgatgaatcgcaaatccagcataaaaaaatcaaagtcattacagtaaatggaaacaactttgctgtaggacttgattggaaggcgcttaacaatgcccgtaagcatatgaaggaggcaaaagaatacgggaaaaaaaatgggcttgatgtagtagctataaaaaaaggtgattttattcaagctgggtttgcgccgaaacaagctaaaagcattaaagggatgtattctctagcactgagcctcgtttctataattcctggtgcgtggataggggtatttcctatccacggtaatgatgaagattctgaccagtatattcttgtcgcgtctggagataacggcgctgtcattccttggactgatgttgtagtagataaagctgatattaagaagcttgttgatgggttgaagaatgaccttcatgatccagaacgcaatgagcaggtaagcgttatcggtgatatttctttcccctgggtgactcaagaagcaaaccttagtgatgttttaacttctgatgttttgaagaaagattataagttaaaacctctcacatttgggctgacgcgcaaacaaattgtttatatatttatcttgttagctgtagcaattgcagcacttcttgcaatcaattattatttagaacagcaagctattgaggctgagagacttagacaagctgaaatagctaggcaagaagaaataaataagcaagcaaaatataagatgatgatggaaagtttaaagcatccttggattgaaaaaccaagtgtttatgatttcattgtcgcatgcgatattgcaataaaatctattccattatcaatagaagggtggagacctgttttggttgactgtgaaaataaccaaaattcatcttcaaaagataacgctgtaatgcagcttgttcctgtttataatcgtgggggcgaaagtactgccaactctgatagttttgcaaaaaaagtgcgggaactatttaatacagagccagtctttaatataaaggatagtacagtagcttctttcatcttacctgtacaatctaaaaagaacggtgatgatccgcttgaacctatgtcagagcggataattatgttatcaactgttcttcaaaaacatggtattgggtataattatgtagaaaatgtccaaaaagtagaaactactgatgaaactattcctcctcctgattggagcgagattaagtttagctatgactcgtctattacaccgcgtcttatttttaaaactttagccttggacgggattaggctgaacagaattacttataagattaataatgcggaaggtgaaaccaattacagtgtggaaggtacagtatatggcaaaaaataa

SEQ ID NO: 157028 - DNA, 1686 bp, Enterobacter cloacae
atgaaatataatcttttagctaaatgtatagctttatcctttgttttgtctggatgcagcatcagcagaattaatgacactatggataaagctgaatcaaataatcaaattgccacaaaagcaatgactgattttaccgtaaatcgcccttcggtagtttacaaagatgaacagtggattaatccacaacctttaaaattcaatccagaggatgtaccaccgcctgagctaacttgtaaggttgcgtataaaccagtacgccctgttgatatttatcagttcgcgcaggatgttaccacgctgtgtcatgttcctgttcgtatcactccagatgttgccatgttgctttctggtcaaggtggtggcaatggcagcactcagcaattgtctgctgttcctcccccggttcttgacagtaacaacatggtttctttgcaatcactcaattccccttcatccactgctacatctggccgtagcatgggaacgcgcttcatcaccgactttgtttatgaagggaatgggaaaggcttgatggatgctggggcttctcgcttcggtgtctcatggaaatatgagaataatgcaatcaccattttctatctcgaaacgaaacgttttcagattgatgcaactgatgcgaaaactaagctctattcattagttaaaagcgggatttcaacgcagtcaggtacgtcaaattcttcttctggaagttcggggtctggcggtgtgagtggcgattctggctcaaactcaaatacggaagttcagttagagaacgatctttatggtgatattaaaaccactgcacaaagcatgctaacacccggtgttggtcgattaagcatgaataatacttctggtgcgattgttgttactgacgtaccagatgttgtgcgtaatatcgggaactatcttaatagcgaaaactcttcgcttagtaaacaagtaaaattgagtgttaaaatctacaccattaatctcaatagaaatgatgaattgggggttaattggaatcttgtctggaatagcttatcaggtaagtacggcatttcactggctaactctttcccttcaagcactgatgcgatcagtggaggttttcaggtattagatactgctactggttcggcaaagcagtttgcgggatctgatgtgctgtttaaagcactttctgagcaggttaaagtatctgatgttaaaaccaacaatatcatgacaactaaccttgctgccgtgccagttcaggtggctagccaagttacatatttacaaagtgtaacgtcagagcaaacaagtaacgtgggtacttctggttcattaaatccggggtcggtaactacgggtactaatattacaattttacctaaaatagccccggacagtagcaagatcatgctgactatgtttatggatatatccaaccttaaacagattcgacagattaataatgctgataaaactaatcttattgaagcaccggatgtagattctaactctattaaccaaagggtttggctgaaacctaaccagaccattgttatgagtggttttgaacaagaagttagtgatgcaactaaacaaggggtaggagatccgaataatattattttcggtggcggtatgaacggtaaaaacagcaaacgtatgtttgtcatttctataaccccggttatctcgtaa

SEQ ID NO: 157029 - DNA, 840 bp, Enterobacter cloacae
atgacctataaaaagctagtgttgttaactgcatctgccattaccttaatgggttgcagcagtaaaccacctgaacttcctaagccagagggtgagcgtattgcgttaaatcagatgggtattcctgcggaactggctattgaaattaatagacagtcctataaggcggcagaatcaaataaaacagccgttaagccagtggtatctacattaacgcctgtagccacaaatgctaatggttttttgcatgcaaaaaatacgcaggatgtagcaaaaactacgtcaaagcccgttgttaatacaggttctactaaagtagctggtactgtaattacaaccgcaaatagtaatggtggtaaaaatccatttaccggggcttctaaagctgttgaacaaaaaactaatagcatcgtatcaccgaaaatgtcagcacctattgttgtaacggcaaacacacctgcttctactgctgttaataccaataagagtgttagtgttgctagtgcagcgcctaagccagctaatatcattaatcctgttcccattaagttacaaccaataggtaaacaatggggtgctaaatcaggggaaacattgaagggggtggttaatcgctggacagaaggtgagttttgttcaggggctaataaatggcaagttgtttggcctgttttgattgactatcgaatagattccccattgagttttaatggtagttattttgaggttctgaataaattatttgatttatacagaaaagcagatactccattgtttgtcgatgtatataaatctcagtgcataatttccgtatctgataagcctaatcagacaaaatag

SEQ ID NO: 157030 - DNA, 1065 bp, Enterobacter cloacae
atgtctgataacgacagtatatatgatcaggatgaggccgagttgctcttgtctcttattaaacctttcgagagtgcaatgtctgatcctgatgtaactgaaattatgtttaatgtacctggtgagtattggactaaaggtaaagacggaactgttaaagttgaatgccctgatataacaactaagaaaatgatttcgatcaatcgttcaattgctgtttataacaaatcaaaagagcaagcattgagttactttcagatgccgggaggcgagcggtgtacaattatacaaccacccgcttgcttaaatggttacatgggactaatcatccgtaagttcattgaaaaatcatttacattacaacagatagttgaacaaggtgcatttgaatccgttcaaaacacttcgtttaatttgcttacggatgatgaaattttagagagaaaagaccgtagagatttcaatagaattgaagcagtggacgcccaactgcttatgtacctcaatcatggtcaatataaagatttttttgagtacgcaattaagcataagaagaatatcgttatttctggggcgacgggttcaggtaaaactacgttcatgcgtgcgttaatagagtcagttgaccgcagtgaacgaatcataacgatggaggatgttaacgagcttaaacttgaatcctttccaaataagctaccgcttatttttggacgtggagaggggcgaattaatcctcagcagttgcttgaagcatgtatgagggcgacacctgatagaatattcttggcagaattacgcggatatgaaacgtggcactatctaatgtctttgaatactggacatccagggtcaattacgtcagttcattctggtactgcataccgtgcatttcaacgaattgcgacactagctatgcaatcagaagatgcgcggtcgctcggttttgaagtaattagaaacgaagtgtatacaacgattgatattgttgttcaaatgcataatagaaaagttacagagatatttttcgatcctatttatgttgctaatcttaaaaatcaaaattga

SEQ ID NO: 157031 - DNA, 1125 bp, Enterobacter cloacae
atgagcaataaagaaattgatccattagctgaacttgaaaaagaaaactctaatattgatggttcagttgcacggcgaaaaattaaaggcggaggtaacaaactatttagtgctttagcattaattcttgctgtgatctgtgctggttcatactttcttttcgcgaactttaagaaggccgagccggaactaaaaagtacagatgttgttccacaaagagagaagcttaggcgtaagtttgaggtcgaaaagcctgttcctgaaacccctgctcctgttgaggtgaaggtagatcaacctgctgcgggggattccgggaaagatgaaagtaagccggatgttgttttggacaaagacgggctaacccctgaacaagcagcacaaaagcggcgtttgggatctgcttttggaggtggtgaagaagcggataatagccagtcggagagtaagtcagatagtaaagacttgggtgatagtgacaacgcgctttctaagtctcttagtgctatcaaaacggtatctgttaaagcaacggcacgtaagagccttgatttaatcctgacgcgaggaaacacaattccttgtgctttggataggaacattgattctaatgtaccaggccagcttacatgtcacacaatacaggacgtatattcatcgtctggaaaggtgctactgatggagcgtaacactcaatttacaggcagttttcaggggggtgtagcgcaagggcagactcgtattttcgcaacatgggatcggatagaaacaccgaagggtgtctttatggaaatcagcgccccagcggtaggtgctatgggtgaagctggtattgatggtgtgctagatactcagtttgggacgcgtttttataacactatcttactaagtactatccaggacgttattggtaatgcgtcaacgcatctggcgaaatccaataccaatagtaatagtgtaaatgtagataataccactcaagcaaccaatgatattgctgtggaaacactcaagaataatatcaatataccaaatattatcaggaaaaattcaggggaaattgttggtattgatgtaatgcaggatatggattttagctctgtatataagcttgagaaaaactga

SEQ ID NO: 157032 - DNA, 843 bp, Enterobacter cloacae
atgaaattcaaaaagttataccttgtttgtctcttatttatctcgccattatcttcctatgcgttggacgttccggttggttctgcttatgattcgagaatcaagacggtgatgtataattctgatgatgtaacaaaggttgatagtgtgattggcgttgcaacccatattattcttgatgctaatgaaacttatcttacgcatgctttcggtgatagtgatgcctggcagtttagttataagaaaaatcattattttatcaagcctaaagcagaaaatggcgatacaaatcttacgattgtcactgacaagcgtgtttacaactttgatataagataccacttcgaggagtacttgaagggttctaaagggaaaagaacgtttgataataaaatgactttccagatccagtttaaatatccagaggtagaggccaaaaagaaaaaagatgctgatgatgaagttcagcgtaaaaatgaatttaataagcttcttgcaaaaggggtaaatcttaaatacacgattaatggggagaagaaacttgccccgatgaatgtatgggacactcaagggtttacatattttaagttcgctccaggtcaagatattccgacaataagcgctgttgattctttaggtaatgagtccaaagtaactaagcaccaagagggtttgaatagtgagattgttgttgttcataggataagtcgtgagttccgtttgagattggggacttctgttgctggcgtctataacgaaaatgatggccgtcaaccagtttacgaaaactatacaggaacagtatctgacaaatacaagagggtgattatcaatgagcaataa

SEQ ID NO: 157033 - DNA, 684 bp, Enterobacter cloacae
atgcgtaaaactgaaagtacaaaagaagctgtaaaagaatttgtgaaagaagccaatgatgctgaaattgatgttgtattacttttgcaaaaatcaaataaacggcatcgtatggctagtgttggtttctttgttttagccgcattaagtcttgttgctttagcttcattagttcctctcaaggataaagaaccatatcttttagagcttgataaaagtaccggaagcgttaattctctgagcgttttaacacctgaccaaataactggcaatgaagctgttatggattactttatccgtaagtacgttactggccgtgagggttataattattcgcttattcaaatagcttatgatcaaactatggcaatgtcagatgatagtgttggcggggagtatgataatcaattcggcaaaaaagattctattgataaacgctatcaagggaatctcgaaattgtagttgataatttaacaacaagcgttgaccttcaaaaccaaaaggcggttattcgcttttctaagacatttaaagaaaataatcgtgagccaattactcaatattggtcggcagagctttcttatcatattagtactgatgttatgaaaggaagtaaacgagggattaaccctatgggaataattgtagatggttatcgttcatctcaggaatttagccgatga

SEQ ID NO: 157034 - DNA, 963 bp, Enterobacter cloacae
atggctcaatttactttttttactgaccttgaaaaaaacattgatgatatggtggtgacaatcgtcaattctatatctgataacgctctgacatattttttgccagttgttcaaactggattgtcaatatcacttctgtggttttccttaatgatatttttagggaactatgataatccagttaatgattggatcaaaaaattgaccgtaatcgccatagttgtttttgttgccggagcgggggggttatatcaacgggagttggtaagtactatcttaggcttaccatcagagttagcatctgcactgattgattctaatagtccaggaatgaacgtactggacattgcagcagagcaatcagtgaataaggctggggaaatatttagcttaattgggtactctcctgagtcgtggctgaatgcgttagttggtgtagcgcttatcataagctctatgttcctgattgctacaacagctattttcttttttatctcaaaggttgttgttgctgttcttgcggggcttggttttattttcatatttacgcttctgtgggaaccgttgagaaattttttcaacaattgggcaaaccaaattatccactattcattaatgctggttttaagtgctctgtttttcagtttcttaatgggtatgtacacaaggttggtaaatcaatttacagttggtgaagctaatatgctttatacaacatttgctatcgtttgttttagttatattggctatcgactcttaaatgaaatacctaagctgtgtcaggcactatcaaatgggatagcaattgcttcgttagctaaagccgggagtagtaatgcaccctctagtaataccccctcaaatacaccgagcaagaatagtggcggcggcggcggtggtggaagtcctggggaattaaaaaatccagtatcttctgcatcagcaccattcagaggtaaataa

SEQ ID NO: 157035 - DNA, 657 bp, Enterobacter cloacae
atgaaactgtctaaatgctcaatatttctttgtgtagctcttacatgtggtagtgcaaatgccggaggtattccggtgtttgatgctgccggactcgctcaagcgttgcaaacggttgttcaattaaaacaacagatagatgaaataaaagggcttcgttctcagttagagggcattcgtaatatgggggatttattaaaccaacctgaattacgtaattatcttcctactgattggaaaggcgtttatgaccaggttaaaaatggaggttataaagggcttgatggttcatttaatgcaatagaggatgcagaaagcgttgctggtaagtcctctgaaatggcagcattgaaaaaaagacaatgggaaaattctgttgctaacaagtcaatgggggaagctgcttatagtgctgcgttaaaacgccttgataatattgaatcattaggtcggcagattaacgctactcaggatgctaaagcgtctatggatctccaggcaagaatccaacaggaacaagcgctgattcaaaatgaaacttcaagattgcaacttataagtatgctacagcaagctgagcataatattacgattgagaaggagaggcagatacagaagaatatctggtcgagcgataaacccatgccaaggttttaa

SEQ ID NO: 157036 - DNA, 2466 bp, Enterobacter cloacae
atgatagagaatttgatggcgtttcggaagaaaacgccgggttcatcacatctgccttttgcttatcatttaactgataagatagtaaccttgaaacaatgtgaatttatgactcttatcaaaattcaaggtcgctctcataagactacagatgctgaagatatctttagctggttagaaaaccttaatacggtatcaaggtcttttgtttctccacacgtcgatatgctttcttatgttattcgacgtagcgaagcagaatatccagagagtaaatttgataattacttcaccactgaatttgatagaaaatataaaacaaaattcaccgatactaaaaacaacacattgatggtgaatgatttatatttagcgcttgtatataagccatatggtagtgattttctctctggtataaggaagcagggggctaaaggcagggaggcaattgccgtattgcatgaggaatcggctaaagaacttgaggctataactgaaaaaatggtttcggcattaagttcgtataattgccgggtgtgtggagtttatcaggaagatggagttggcggtgcggaagcaatttcgaagccagttttatattctgaacctctagaagttatgggctatattttcaatggtcgtaaggttcgcgttccgctcactaaagagcggttaagtaataccatcgtacagtctcaggttaagtttagcttgaacgctgatcttggtattcgccgcagtacagaaggtcatgaatatatcggtatctgtggtatatctgactatgatcctgatacatggccggggcagtttgatctccttttggaaagtgagtttccttatgtaatggtaaacagttttgtgcccgttactgaccgtagcgctaaatcatttctgagtaatcacaaaaagtttttgcgcgaatctaatgatgtaggtgaaacccaaattaaagagattgatgaagctcttgaccagatcaccagtggcaggttcggaatggggcatcatcatttatctatcatggtggccgacagcgatgttaaagaagttaaaaagcgcatggagtcggttgcaaaagacctctccagtcatgggatcatcgtaaaaccacatacacaagcccttgaagcagcattttgggcgcagtttccatctaaccggaagtatcgtcctaagcctaagcctgcaacaacgcttaatttttggtgcttctcgtcgttccataactttatgcgcggtaagttaaatggaaatccttggggtgatgcggttgctgtatttaaaacggaatcaaaaacccctattaatttcaacttccatgaatcaccacttaatcaagactcgtttggtgatcggcctgtcggccatacaggaatatttggtaaaacaggtgcaggtaaaacaacacttttctgtttcttgttggcaatggcgactaagtatagaccgaacggtgtgatttttgacaaagacaggggtatggaagtcctgattcgttctatcaatggtgtatataactcggttacatggggtgtacctactggatggaaccccttccaaatggagcctacagagaaaaacatctatttcttaaaggagctaactaaggatttagccgtcaaagcttctggcgcagtgctgacaaaaaaagataatgatgaagtagatttggctgtagatacaataatgcgagaagaaaagcacctccgttctttgcggcatctgaaacaaatgcttccagatggtgatgaagatagggtgtctgtggggggcatgctggaaaaatggattacaggcgatttgaaatgggtctttaataatgcaactgataacctctcattgagtcgtggtatttatggttttgacacaaccagtttcctcgataatgacattgtacgagaacctattcttaaatatctaatgcatagaggtaatgcattgattgatggagttacaccattcattttaggatttgaagagtgctggaagcttactaaagataagttctttattgatttaattcaggacaaacttaaaacaatccgtaaggaaaatggcatcgttatctttagtactcaagagccaaatgatgttcttagttctgaaattggtgcaacgtttgctgcttcattatctacgatactctgtttgcgtaacgataaggcaaatgaagaacattataaattattgaagctgtctgatgtggaaatctcgatccttaaaagatgggctgaggatgattataagtttataattaagcaaggggctatatcttccatagctgaatttgatttctcagaatataagaatgaagaaatgcaggttctatcatccgataaagctaaggccgatgttgcgttagaagcaatagcagaaacgtcaagtgatcctaaagactggctttctgtttactatcagaaaattaaaaaaattcgcgagggtaaaagatatgaaactgtctaa

SEQ ID NO: 157037 - DNA, 306 bp, Enterobacter cloacae
atgaataaaccttatagtttctacaaaggagcggctcgtgccgctctcgtctacggtatacctcgaaatgttttcttggtcactttcggtctattaatttgcctcggtttagctatttggaaaggattgtggtttctagcccctgtaatttatgttttccttttcaaagtatacagaaaagatcctgatggattgcagttactaatgctaagcctacaaacgacattcatacacgcattaaaagatggtaaagaacagggttatgaaactgaggactttaccgaacataaagaacatttgaagtag

SEQ ID NO: 157038 - DNA, 285 bp, Enterobacter cloacae
atgaaagctaaaagtaaacaagttgctgtgaatgttttagtacttgcggttgctattgcactaccggagttagctatggcggcaggagtcaataaatcagattcaggcctaaattcacttaacacatggttgagttcgattttcccaatcattgctggtctcggcggtgttattacatttattttgtatatgttcggtcagatagggaagcagatcttccagcagttattaactggtctgatcggcgcgggtagtatttcatggattattagcctcttcttataa

SEQ ID NO: 157039 - DNA, 279 bp, Enterobacter cloacae
atggggcgtaaaggtattcaattaaagcatgcagaagtggtcattacaaatgagtctatctcgtcagtaagtgctgagcagcagcagaatggcgaatggacatgctttattaccttttataattctgattcgatgcaaatcgaggaagtgtatatcgaaaagcagcgggacggaatgagaacctgggcagatccgaggaagatgtttgatttcatgtatacgaaatttggcataacagacggacaatttaaaatttgcgaacatagagagaaaagttaa

SEQ ID NO: 157040 - DNA, 765 bp, Enterobacter cloacae
atgaaaattcacttggctatattggctttgcccttgtgttatacattttctgtaagtgcatcaatgattgattcagataatctacatgcgcttataaaagaatgtgcaccaaaaataaaagcggaatcaaaagtagcttatggtatagttaaaactgaatccgcaggtaatccatttgcgattggaatcaatacaaaaaacattagattaaaacgtcaacctagagatattgttgaggctattgaagtatcaacttggcttgcgaagaatagatataatttcgatgccggaatagctcagataaatagtgtcaatattaataagtttgttgagggggatataaattttcgcatgcaaaaagtttttaacccatgcgataacttaaagctagctgaaaaaatatacaattcttgcttcgaaatgaccgggtcaatggtcggtgcgttaagttgctacaacactggaacagcaactaaaggcattaaaaacgggtatgttgcgaaagttttagctaatattcctgatctgcttgaggtgaagggtggcggtggccaaccttacatagctaagagcagggagaagaggctagaggcttctaagtcggactctgatacaggttctgtaggtgatggtggtgttgcccctgtgactacaaaaaaacctaaagatgatggcgtagaggatgtgttcgcagcaagtgggactggagatgtttttagtagcgaatgtgaagagggtgaaaatcaaaaatgcgagaatgattaa

SEQ ID NO: 157041 - DNA, 336 bp, Enterobacter cloacae
atggcacaatctatcgcactacaaaagcagccaaagatcgttatgactgacggtaatgatgtaagcaacaatcaaaaggcgcagccacaaaagagaaccatcctatctatggctggtaaggctgttgtgtatctacttatgagcatcataggtatgttgtggtcgataagccgccctatcattgataagttacttggtgtgatgattttaggtagtgccgcaggtgcttatctttttcatcattcaggtaacgacaaagctttcttcatcacgctaggcgctttggtagtgtcagttgtaatcaaagcactgatgtacggacgctaccaccgctaa

SEQ ID NO: 157042 - DNA, 834 bp, Enterobacter cloacae
ttgaaatacattttaacggtgatgtgttccccccccttgtggaagttagaaaccaataatctaagtgtggctgaaatgacgactagaagaaaaggaagcgggtcagttgttgttaagactgacaaccgggtgttgatgcaagcgaatgcgcttacacaagctaagaatgacctttcgcgtgatcagcaacgagtactcgttatgtgcttagataacatcgcccgtagcgggtggccgaaagatggagtgtttcgtattgatcacgaagaatatatgcatgtttttaatattggtgagcaagaagctagggaagatattctgcgtgctatgaaaaacttccggggtaaagaacttactctttatgaaacttgggatcaggtagatgaaccggttgttagagatatggtctgggtcacttcgcgatggactagcgagaaaagaggtatttatcaaattaagctaaatagtgatttgagagagttcatggagccattagctcatgatcatcagttcactgcatacagattaggtcaaatttctaaaacgccatcaaaatactcaatgcgattattgcaagctttatcacaatttagagatacgggtatgtttgcgataagaattgatgtattaaaagaaagatggtcgctaccagactcatatgagaagttctcattattaaaatcgcgtgtgttggaaccttcaatgagggatgtaagaaaaataccagagttttctactttaacgatggaaaccaggaaagaaaaaacaacaggtaaaataactagtgttcttttccagttcacaccattcacccatgataagagaaatgattga

SEQ ID NO: 157043 - DNA, 981 bp, Enterobacter cloacae
atgacgcaaaacaactatagccaggtcaaccgaaacaatgacccggagcaaattgatttacttgatttagtgttgcagctgtggcgtggaaagtggaccgtagttgctttcattgtcgtttttatcgttgttgctgttggctatttatctgtcgcaaaagaaaaatggatttcaactgccattattgcgcagcctgatgcagcgcaaattgcaagttattcaaatgccttgaatattctctatggtagcgcagcgccctcaatgttagatattcaaacgcgcgcaattggtcgttttaattcctcattttctgctttatctcaggcacttgagaatcaggagagccctgaaaagctgactattgcaccgactgtcaacggccagccgttaccattaagtgttacctataccggtgaatcagcgcaggccgcacaaaagcaactggcgcagttcattcagttggttgatgagcagacggcgaaggagctttccgttgaccttaaggacaacattaagcagcagataaaaaccctgaacgattctctggaaaaccaggtgaagatatcacaggaacaaaaagatctacgtgtcaagcagattactgaagccctcaagaatgctgaagccgctaaaattaacgcgccgcagattcagcaaacccaggacgtaacacaggaaactatgtttcttttgggaagcgaagcgcttaaatctatgattgaaaacgaggcttctcgtccgctggtctttccaccggcgtattaccagaccagacaaaatttgttggacattcagaacctgaacgttaaccctgacactattcatgtctatcgttacgtgatgaaaccggatctccctgttcgacgcgacagcccgaaaaaggcagttattcttatcctggctgtgttactcggtgggattatcggatcgggtgtggtattggggcgtcaggcactccgcaactatcagcgaaaagactaa

SEQ ID NO: 157044 - DNA, 570 bp, Enterobacter cloacae
atgaaaggcaaatcgcacgaagttaccatcactcaagcagaaagcattaccggaaagaacatccggttaaggaatgtcgcaccttctgatgctgaatttatcgtcaaaatcagaacaaatgaaaaaaaagggcgttttattagcgctacatctagtgacgttagtaagcaaagaaattggcttgaaaattatttgaccagtgaagggcaggcctacttcctgattaccgatcttgataataagccactaggaacagttcgaatgtatgatcagcaaggagactcgttctgttggggatcatgggtagtcgctgaagatgccccttcatactgtgcaatagaatcggcgcttttactctatacatacgccctcgatttaggatttaaaaaagcacacttcgatgtcaggaaaggcaatctctcagtaatcaagtttcacgaacgatttggggcagaacgcacgggggagaccgaggaggattatctttacagaatttcgaaagagaaaattctggcaacattagataaatataagaaatatcttccaaagaaaattgagattgttcgttag

SEQ ID NO: 157045 - DNA, 861 bp, Enterobacter cloacae
atgcttaccggcatcgtgatcgtaacttataactcagatatagaacgcctgggcttaattttaacctccttagaggggcatgggttaaaatattttgtctccgataattcaactgattttgaaaagaagtcagctatacaaaatatttgtaatacactaaatgcgtcattcattgatatgtatggtaatgtgggtattgccaaagctcaaaacgaaggaattcttttggctttaagagaggggtgtgatgatgttctgctattagatgatgatagccttccatcttctgatatgttaaaaaaattattagatgcaaggaatttacttgtacataaaacgggcacaatacctgttgtttgtgctaatgccatcgctgaaaatggtcaaactttatcgtattttcaaaagccagtaatcgatggtattttcgcttatcgtgatatgatcagttcaggtacacttataaataaaagtatcttcgatcttgtcggtctgcatgaagagaaattattcattgactgtgtcgattacgaatggggttggcgtgcggcaagtttaggtgtcaatatttttatcgtaaaaaatgcagttttgaatcatagattaggtaacggtcgggttaaagctattaatgcaggttatggtgcacctattcgacattattaccagtatcgtaatatattatacatgatgaacaggcattatgtccctttggcatggcgagtatcccagttttttaaactactcataaagccaatagtaattattgtgttttttgacaaaaaaatcacccggcttaaatatgtctttaaaggtattacaggttttatcagaaaagaatatggtaatattgttagttga

SEQ ID NO: 157046 - DNA, 927 bp, Enterobacter cloacae
atgttttttacctctcgctttgaagcgaatagaggacttggaattattgtgcgtttaatggatgcactgcgagtagttctagctggttggtatttctattattatcttcgcggtcgtaaaaaacgttttttaattatcgccttacttatatctgcgattggagctcttatttcaggcgcgaagtttgctttcctggagcaaatttacgtactttgtgttgtcgggttcattacaacaagaaaaacatttaaatttaacctcagatcgctttttttaatactaataattgcatcatgttttttattgttttctctttatttcatttctaaattgtcagtgatgattggttatacgtcatcgcagtatatccccggagcccccgttgcattggaactcctcttgttacgtatattggcaaatggagatgcttactatttatctttaactgaacatgttatcgatacggttattgttgaacatccatggctacagttgctgtctaatacctttggtaactcagtaatggctaaacttttcgatatagatttttcgaatttggatgtcggcagacagatatggttatactggtatcccgatgatccggtaatgcgaggaccgaccaaccattttgaccttgcaggttatgcatattttgggtatgtaggagggctgcttttctctgctgttattggttatgttattggggtggtcaatagctggaaattatattgcgataactcttctgctgtagttgttgcatttgttgcagcactgtattgccgctcattgcctctaatccttaatccttctgttggtattgcctacatggttgatatctatatcatacttttcgtatctcttgtattgataactatttctaaaggtgcaacaaagaatgcttaccggcatcgtgatcgtaacttataa

SEQ ID NO: 157047 - DNA, 585 bp, Enterobacter cloacae; identical to SEQ ID NO: 156896

SEQ ID NO: 157048 - DNA, 2457 bp, Enterobacter cloacae
atgcgtaaaactctaattggctgcatggttgcaactgcccttgctactgtatcttcggcacatgctcaggtatttagctactcatttactgataccaataaggctgttcggaatatcaagccagcagcacaaacatatcttaatcctgctggtgttttgactctgaacctgatatcgggtcttgatcggtacgagcgagtgacggtcacacgagacagcgataaaaaggttatgtattcctccgtctcgaccaaaacaagcgttgcagatcgtatcgttgctgccgatggaacagaatactatggaaaggatatggctctaccggcgctcggagaagggacctttactgtagtcaatgagactctggatattcgccagactgtagtgagcacatctacttatcatttcatcgttgatacaactcctccacgctataagagtatttatccgagtcaaaacgcaggttacgacatggtactttctgggccactttgggagttgggccgaggcggtagtggccagttttctatatttgcagacggtattgaagatgctagtggaattgacaagatccgtcttgttattaaacgaagtaatggctcagtggtctccgacaataacctgagttatgacacagccaataaacgtgcgttctatccgtggattaaagatatgaacacccaggctggcatgccctcaagtgatcttgatgaagaattcaccttcaatttcatcgttacggacctggcaggaaatacgcttaacattcctccccagcgttttttatatgacgatcaaatgggagaatttacgccatttgcagttcatgactcacgtgtaagcaccagtgttgtacccggtatttcttcgggatacgtcccgtttaaacgaggccttacagtgctggaaaacccctacaagttggttatacgtatcccaagaactaactggaagccatatcgaaatggtggcatgagcattaccaataactatggcggagtacaggtcctttccgaagatgccacctatgtctacgtggaagttaagctgccacagggtgccttggatggaaactactatagacctgtgaatacatatcaatggtctggaggagatcttggtcagtatgccagctggctcaactgggatcctgcctcggtaaagagtccggcgtggggaagttcacccatagaacgacaaaaggctgatggaacatggttcaacagcgtaaactggaacctgttcaaggcatctgatatgcctataaaacttactaatatccgattcaatgtacaggccaggccatatgatcaaaaaatcactggcggagcaacatgcagtattccagctggctcatcatcctgtaccgtctctttgccccaggatattataaatggcaccaccggctatcttcatagtggctatgaagtaaggtcaaccaccgaagcaaccttctttgctcctatatgggagaatatagcctggcatacactggggccctccgtcactggattcgattacaatgaaaccaccaacattctccaggtttacgtgaatcaacctggagatggttcatatttcgaccatgtttatgtaaatcgagtttggttgtcagataaaaaccgtaacaacgcagaaataagcgtaaccggtaaacaaacaggtagaaatatggcgtctgggaactacacatatgagttcaacatgaaagaggtaccagaaggcagttataacgtggtgattaatgcccaagatacattcaacaataccggtaacctcccttatcaaacggttgtcgttgataatacagcaccatctgtaagtattagctacgaaggaaaaccgatcagcaaaaacgtaacagtatatgggctggagaacgtccgtatacagctcaccgatgctctaactaaaccatccttaagccgtatgactcttcgcggtggccctgtttctgatgcggtggaattgtcttgggtgaatctgggaaacaacctgtatgcacctaattatcccaagatctttccgtctcttaatgaaggcgaaacatacactctcacagtccaggccaaagatgagatgaacaacgttaaagaaagctcagtcgaatttaactaccttccaaacaatctcgtcagactagagaatctgaaaaccttagctgtcaatgcttctctcaaaacatctgacaatactcctctggctgttctgtatgccagccagctgcgtaaaaaggatggttcaatcgctacagggcttcaggacgctgtgcttactgtccgtaaggatgcggcattcggcgtgactgtaaatggcgtttctgcgatgccaggtgaaagcaaagagcttcaactggatttggggctcggggacagccgtagctttcctattttccctgctgtttccggccttactggcagatctgagttcatgattaacattgaagaattaaaataa

SEQ ID NO: 157049 - DNA, 324 bp, Enterobacter cloacae
atgctcaccatgtgggtgacggaggacgagcaccggcggctgctcgagcgctgtgacggcaggcagctggcggcgtggatgcggcagatctgcctggacgaaaagccggcacgttccggaaagctcccctcgatctcgccggcgctgctgcgccagcttgccggcatgggcaataacctgaaccagatagcccgccgtgttaacgccggcggcggcaccggccatgacagggtacagattgtggcggcgctgatggccatcgatgccggccttgagcggctgcggcacgccgttcttgagaaaggaacggacgatgatcgttaa

SEQ ID NO: 157050 - DNA, 1146 bp, Enterobacter cloacae
  misc_feature (229)..(270): n is a, c, g, or t
atgaccaaagtttcatttgaaaataacacattacttattggcagataccatataattcgctatttagccgcaggcggtatgcaagaagtatatttatgtcatgatactgttctaaatagagaagtagttttaaaaacaccaaaagcagggactaaggatagaagatttaaacgaggcgctgaaatgggtgccagaataaatcattccaatgttgcatctactttagatnnnnnnnnnnnnnnnnnnnnnnnnnnnnnnnnnnnnnnnnnngaagatgagaatttaacatttttgatagaggaattcatttctgggcaagatctttccaaaagaatgtctgctgaatttcattatttagacccacatacatgtgcccatgtaataaaaaatcttgcaaaagcactacatgaagctcataaagtaggaatctgtcatagagatttaaaacccagcaatataatggtatcaaatgattttaatttatctatggtcaagttaacagattttggtattgctaaactagctgaaagcgaaatcgaatctgaaatagaactttttgagaaagatgaaagtaccttaacaacatctcaaacactattaggggcagtaccttacatggcccctgaatgttgggatgactggaaaggtgcaggtcaggaaatggatatttggtcattagggtgtattgcttaccatttattatcaggtcaacttccttttggctctggtcgaagagcaattagagaagtcgctagattccaggataataatacaaaacttgtaaaaccgcaaaatattgggctccacgcatcttctgcaattttagaaaaagaattatgggctttgattacaaattgtattgtcgctgaccctcaaaaacggcctaccgctgcgaatattctagatgcattcgactctatttgttattcgaatgagccacgtcgtttcggtacaatttatgattttggtgtgccttatcgagaaacaggccatataattgacaacggtagacaagcggggatgttattctttcactcttcagaattttacggtaactcgttacctcagcaggggaaaaatgttacctattcagtatatcccggattaccacacgatagatgctctacaattctattattgaaataa

SEQ ID NO: 157051 - DNA, 498 bp, Enterobacter cloacae
atgatgcatttgacaatcaaaataaatgatatatatctatgttgtatattttataaaagggaatttatgagaatatcaagaaaacattctaaatcatatattttttcaaaagatagtgatactacaacacctttaaatatttcattcaacaatcgtacatattgcgtgagtgtccgtttcaatgaaaaagaactgaaaataattaattctaaaagaggagagataagtaaaggtaagtggctccgtttacttgcacttgaaaaaaatacacaagccatacccaccataaatttgaatgcttggaattcactgacaatcatagtacaaaatttaaatagaattgctgcacatatcgacaccaaaagcaaagacagcaaacttacttacacagagcttttcgctgtaaagcgacaactgaaagagcttcgccagcacctgctaaatgctgacatatggagcaaacccgatgaagggtatgcagaagatcaaaaggggtaa

SEQ ID NO: 157052 - DNA, 1125 bp, Enterobacter cloacae
atggattttaaaataaaaaaaatgactgtgaaagattctagagaaataaaaaatgagattgaactgttagcaaaaaaagcaaatgctgaaagccagaacttgggagtagtccttgatcgagaaatcaaagaagggttgaaagaaattaatttaaatgtgaaaaaagaaacagcagaacaatataggaaactgtttagtcacaagttgagtttaaacaacaatgacattgtttcacatttacttgagtgtaataccaggaacacttttgacaaaacaagatctgcttttaggttctgcattgctgaaaaaatacaagaattgaggaaagagtctgaacaagcaagaagagaaaaaaactatgatttaatgcagaaaaaaactattgaagcatatcaaatgttttttttctttcagagggattttttgagcgaaaatcgcgtaacttggaatgatatttcttacagaaaaatagaatctaaaagcaaaaaaaagactatgaatagtgtttccagtattaaagcaatttttgaagatttgaagcaaaagccagagctttttgataagtattcaatgattttagcaatttcaagtttgaccggctgtagaccagcagagatccagaaagggatagggctggaactaagcccaccactattaaatatatgtattagcggggcgaaagtaggcgaagatcgagggcaggaaaaaagaatattgaaattcaatataaatgattttgcagaaaatgagcagttcaaattgattatgtcaaaaataaagcaaaataataagtttgaatataaatgctcaaagcaagaatatgattcattgagacaatatttatatattaatcatcctggtttttctttatatacattaagacatagagcagcaagtgaattaaaaaaagagggttttacagaagaaacaatagctgcttttttgggtcatagagtaaccaggagtttagaaaattatggatatgcaagatcgggcaaaggtggtccggctgtggcaggtgttgagcactcaaacgcgattaaaagcaatacaaagcgatatgagagcaaaacaacccctggagggggaaacccttctcgtactcgtaaacgagccttaaaatga

SEQ ID NO: 157053 - DNA, 702 bp, Enterobacter cloacae
atgacaatatcaaaaaaaaatagcgaattgagagagcgatttaaagaatacgccagtaataaaaacatatttgatcttgctgatttgagatatgaaatattaaaaatatattgtgatttcaaattaaaaagcgatatgaatgagaaagaaagaaaatctcaagactccagaagaaaagcacatttaacagcattaaaaaaaagaattaaaagagaaattgtttcgaaaatagttattgatttagtgaagtattacaatatagaaaaaacgacttttcattttttttctcatatatgtactgagattttagaaagaaatgtagataacagatacattctaaataatttttcaaatatgactttagacgaaaaaaaagagttaacgaaattaagtgaaagcagaaatgcttcaaacaaaatgagtttagaaaactcttattccgaacttgtttctatgtcacatattaaagacaaattatttaggaatgacaatttcaaaactgcatatttaaaatgttatggttgtgcaaatgaggaattttcaagatttaaagtttttgcttttccagacaattttgagacattagattttttatttgaagaagaaagaataaaaaaagaagaaaaagagatatctaaaataatgattgaacaagttgaagaagaacaaaaaatacagccaattaaaaagagaaggctataa

SEQ ID NO: 157054 - DNA, 249 bp, Enterobacter cloacae
atggaaatagaaaaattgatagatagatattttttagcattagaaagaaaagtgatccgtgaaatttataataaacatacacgagaagaattagaaaaatttatttttaagtgtaatagtgagtttagagagtttgaacaccgatttaatacaatctgctctactgaatattatgaacaacaaagccttatcttttatattaattatataaatgcagagtttgagcagagggagaagttaaattattaa

SEQ ID NO: 157055 - DNA, 435 bp, Enterobacter cloacae
atggaaaataatttggagaacctgaccattggcgtttttgccaaggcagccggcgtcaacgtggagaccatccggttctatcagcgcaagggcttgttgcccgagccggacaagccctatggcagcattcgccgctatggcgcggcggacgtgacacgggtgcgattcgtgaaatcggcccagcggttgggcttcagcctggatgaaatcgccgagttgctgcggctcgacgatggcacccactgcgaggaggccagcagcctggccgagcacaagctccaagacgtgcgcgagaagatggccgatttggcgcgcatggaggctgtgctgtctgacctggtgtgcgcctgccattcgcggcaggggaatgtttcgtgtccgctgattgcgtcgttgcaaggtggaacgagcttggcaggggcttccacagcttag

SEQ ID NO: 157056 - DNA, 837 bp, Enterobacter cloacae
gtgtcgagtctattcacctcagcccgtcggcggctttatcattttttattcgatcctaaaacgatatccggacgccgcttcgaagggatctgcgggctgtttgcactcatcagtgtggtagttattttctttgaatcgggagccgggacgcagtatcacctgacctatgatgaatggcatatttttgtctggatcgaactgattattaccctggtctttactgccgaatatctgctgcgggtcgtctgctggcccaacccggcgagatatgttttcagcttctggggatttatcgatttagccaccgtcctgccgctctatgtcatgtggttgtggccggagattagcctgagctatgtctttgcatggcgggcgatgcgcgttattcgtgtattacgtattctgaaattgctgcgttttatgccgtctctgcgggtcttctggagcgcaatagtcagtgcccggcatcagctcattctgttttactcgtttatcgcgatcgtcatgattgttttcggtgcgttgatgtacctgatagaagggccaaaatatggcttcacaacgctgaatgcctctgtgtattgggccattgtcaccgtcacaaccgttggctacggggatatcacgccgcatacgccgcttggacgtatcgtcgcatcggtgctgattctgattgggtattcggtgattgccattccgacaggtcttatcacaacccatatgagcagcgcatttcagagccgcaaacagcagcgaaaatgtccgggttgtcaccaggctgaacatgagcttaacgcccgcttctgtaaccgttgcgggagtgcgctaccggattaa

SEQ ID NO: 157057 - DNA, 183 bp, Enterobacter cloacae
atgtacagtttgtcaactctcggacagcgaccttcgctgaatacctcccagaggctgattaacaggtggacgatgctcataacggtctccatgatactgattacattatacagtgtttctaacatttgcggtgaaatgcacttagcctacttgcagtgctatgtgtatgagaaggttggataa

SEQ ID NO: 157058 - DNA, 123 bp, Enterobacter cloacae
atgacgatattactctggatcacaggcggtctgacagcatggtggatttttggtttttgctggctcaaattttttgttggcgatgagaccgaaaaagactatgaagaatgcccctacgattaa

SEQ ID NO: 157059 - DNA, 516 bp, Enterobacter cloacae
atggatactttcatcaatcctgtaatttataaatatgaacatgtcgaaattaacggcgtcatgcgcacggggctttattttcaggatatccacgggcgcgactggtacgaaaccctccgcgactggaaaggcgcaattgccaccgatgccgcagggattgtgattgcctgcgagaccgatgtcactcttatgggaatgatggaggggcgaagcgtttatgaggttgaccccgagaacatcccggacaatgtcataggaaactatacatttcaggatgggggttttaccgatattcgtcctgatgcgatcgagcttgctgagcaaaaaaggaaagagcttctcgacgaggcaaaaattgcgatggcacccctacaggatgcgtcagatttagggattgaaactgacgaggagagggcgctgttaaacgagtggaaaaaatacagggtcagcctgaaccggattactgtcagtgatgccactaaaattgtctggcctgagccaccggcaacccgataa

SEQ ID NO: 157060 - DNA, 1224 bp, Enterobacter cloacae
atgacaaacagtacaacaatcggtggactgcttgagagcacgttgaaaatcgatgtatctttttatgacaaaaaacataaaaaactattgactgaaggtgagtaccccaaggcagcagttgatagaatgaaccatattgtaaaccatgggctaacgatatccggcgcagagtttcttctatattattttttccattacaggaaaatctcgccagatgattataaatcacgatcagacattattgaactatccaaagaattgtctggcgtcttgcgtaatgttctaagcacgactaacggaagcattcatactaaaaacatcaatacaaacctctcgacagaaatggcagaacatattggtgaatcaatcgggatgcttgtgacagctagcatttacaatcttatcgaggtcgactgggaaataattcctgttaaaaaaacaaaagatttcgatttcaaatatgcatataccgatcacgcaagcatcttactcgaaactaaaggaagtcaaactcaggacaacttaaaaaagtcctcatcaatttcacaacttaaaaaagatatcattgaaaaaaaagatgttatcagacaacctaatgcagccgatcatttccatggcacgattacagctatagactgtaaccctcaacacaatataaaatgctggctacttgatccaccctcaaaaaaaagcgataaaaatatattcaaggcaaaacttcttacacgcttttccaatatcacatcattcctatcaatcatatctccaaagtcgagactcatcgaagcattatccctaagagaatccataatcaaaacatccgaaaacatacaaaaaataaatcgacgcgacctcacggacaaaaatggaaatagttacaaccacaatacagctaaatcacctttttttcatcacaagacatacatcaccgacaaagaactcgatggtggaggtatattcttagaggaaagcagaggtcattttatattccttggggcgaaaaaatccttaatacgcttagttgaagatcaagactttgaagaaataaataattataaattcgatcaattcaaaaaaaacattgaaataacatggcatatagatcaatcaattaaaagagaaagaaatatagctaaagattatcgtagtgacaaaataaaactcattgggcaaatttattcttctgcaagtggatttatggttggatacttcagagctgattaa

SEQ ID NO: 157061 - DNA, 954 bp, Enterobacter cloacae
atgaaaaaaaataacatcaatttaatactaatggctggtaatgctgaaattaatgaaagggatgttttttacaaaggatatttgactcccccagtccagtcaacaaccacacttttaccacaatcagtgccatttgtccccccgcctccagttgatattagaacgaatgcgcatattatagagggggagttggagtttgaatttattttggaaggtgatagctcgtttttttctgttaatctttggggggctagcgatcatttattaattagaataaatgagtttccctatttttgttccgttaagagatatcaaaataatacttatgagcttgtgaattatgttgggacatcatctgcggtgacgaagaatgaaaaatctgcgctaatgataaaaattaattcttcattcattacagttttgattaatgagatcattgtgcttactcagtattttttaaatactggcgttggaattggttttaacgtttatggtccttcaccgctaaaattactaaatattgctgttgttgataaaaagcctaaagtttttgtggtgatgcaatttaaagattcatataatgaaatttatgaggaggttattaaacctatatgttatgagtatggattagaggtcacaagatcagatgattcatatagaaatggctcgatcattcgcgagattttaactgaattggctgagtcaacattaataatcgcagatataacgccggataaccctaacgtatactatgaagttggttatgcgcacgctcttaaaaaagaggttgttttgctttgtaatgatgcaagaacaaacttaccatttgatttggccgattatagaactgttttttataaagatagcattgctggtcattcacaaattaaaatcaaattaaggaagcatttagaagaaatattaaggagggatcagcgaagccaacaccagtga

SEQ ID NO: 157062 - DNA, 2451 bp, Enterobacter cloacae
atgagcaatgcaattgaagatatcataatgatatcaagaagacttgatttagccgatgcaaatgaagctgaaacacgacttaaggtcattgacaaaatcctttttgatgttctcaaatgggaattagatgatgttactgttgaggagagagtaagtgaagatggaagcactacatattcagattacgttgtaagaacagcaagtacagcttttatcattgaagcaaaaaagattggtatacctttcgctactcagcaatacgacagaaggttaaaactaactaataatgcccttattggtccattcggtgatgctatcgttcaagctagggattactgcaggaagctaagtattcaatttgctgtagtaaccaatggggtgcagtggattattttccctgcaaacaggacggatcaagttgcatttaattcatcatatgccagagtattcaatagcttgcaaagtgcgttaagagatgactttactgagttctatgatcttttatcacggaaagcagtaataaactcgagtttagagctgtacttattgggtaatatcgaagatcaaatagaagaaagaaggcttaaaaatgtcattcgaaaaaataatacttacgatggccgaaatcctatataccccttaattgaacaagcgatcacaacagcattttctgattctatcactgatattgaaccatctcttttcgaaaaatgttacgttaactctcctgatcgtatgaagttcgatagacgaattaatatgaacatatcaaaaagtcagcatctttttaatgctcagcctgtaagaccaatgcaaaaaagagatgtaaatgttttccgagatgctttatcaaaagctcacaagaattctaacccactagcaattgttattcttggcacggttggtgcgggcaagacaacatttttacattataccagaaacatttcggcagcagacgtattcgaaaagagaactgggagtccatatcctcattggataagagtagattttttagcccatacaaatgatgaaacccctatcgatttcatctataaaacaatgaaagaatatgtaattgaagatccatacttttctgattttaaagtatgtgtagaacatgcttataaaaaggaaattgacgcaattaaaaagggacctgcttttttattagcaagcaataaagaggcgattgataaagtaataacggaaaaactacaagacgattataacaagacgaaaccatacattgataacttattctcctatgcaacacagcacgcacctgtttttttagttgtagataatgtggaccaactagatgagaaaactcaatctcaaatcttcactgattgtgtagcattctcaaaaagattaaagattaacctcgtaatatctttaagaaattcaacatacgttgaacatagaaactctgccgcatttaatgcttatgattttgatcctattttaattgaaccacctcaagttgaggctgttttatctaaaagattctttttggcaaaaaatatggttcaaggccaaagtggagatttcgaggcagaaaatggcatgagagttcacgtaagtaataacgcagatataatttcacttgttcaaagctctgtattaggcacagaagttggaagtttgttagaagtacttgctgccggtgatattcgtaatgctttaaggatgacacgagaatttcttgagcatggttacaccaacgtaggcaaagcatggcaaacctataaaagcacaggcaattatgtgttaccccggcacgaagcccttagagctatcctactgggtaatcaagcactttactccgaagactattctttagttggcaacccttttgatgcgagaaaaggcaaaactaacttgcagctccttagattgttcatactttcagctcttgttcaatatagcagtgaggcatctttccaatatattgatggttctgaaatgaaaaagcaccttagaagtgttggagtaggtgatgacacttcaattgctgttttaagggacttgtgcagactgagattcgtaaatacagcctcacatgaccaagccgcatttagttcaagtttttacccaactagactaggtggttatattactagagacctcatttctaacttcatgttcgttgaatcagtgatggttgacacattcatcgcagacgacacaacttgggaagaattaaaaagacttgaaagggctatagctaatagttcaagtgatgttgtgaaccgcataaaattaagaattgaaagagcaacacttttctttgattacatgcttaaattatatgctccgttacaagaagaagcaaacagaagatcattacctaaagaatggagaacaaatcctttgacagcagtaaggaatacttttgtagagaatttaaataaagcattagcatcagcagaaagaaattacgggcgctaa

SEQ ID NO: 157063 - DNA, 1194 bp, Enterobacter cloacae
atggctaagtataaggcgtatccggaatataaggattctggggttgagtgggtaatgtctatcccttcccactggaatgtcaaaccaacgttctcttgttgcgatgcatccacgacaaagaatacagatggtttggaatataatgttctttcacttagctatggtaaaatagtgtcccgagacattgatagtaactatggtttgttacctgaatcctttaatacttatcaacttgtagataaaggtgacacaatactccgcctaacagatttgcaaaatgataagaaaagtttacgcgtaggtttggttactcagaaaggaataatcacatccgcctaccttaaactagccgtaaaaaaatatttaactcctgttttcctatatcagatacttcattcgtacgacacaatgaaagttttttatagcatgggtaatgggttacgtcagtcaatgaaatttgaagatttccgtcgccttccacttctcattccgacgattcccgaacaatatagcataataacattcctaaatcacaaaataacaaaaattgatcaattaataaaaaaacaatataaactcatcgaattgctaaaagaaaaacgtcaggcagtaataagccatgccgtaaccaaagggttaaaccctgatgtaccgatgaaggattctggggttgagtggttgggcaatataccagaacattggatacttaaaagagcaaaatttatatttcgtaaaatgcaaaggccgatatcaaaacatgctggaataattacggcatttcgtgacggccatgttacacttcgacaaaacagaagaacagatgggtttactttcgctattaaagaaattgggtatcaaggggttttaaaaggggatcttgtgatacatgctatggatggctttgctggtgcaattggggttagtgattctaatggaaagtgctctcctgtttgctctgtttgtatccctcataaaaagacacaagtttatactagctattatggttatctcgtacgtcaattagcggttactaattttatccaatcgttatctaaaggaatcagggagcgctcaacagaatttcgttttaatgaattttctgaattaactatccctattcctaattatgaagaacaaatattcattttcaaatatataaagagacagggtgatgctgccaacttactgatttag

SEQ ID NO: 157064 - DNA, 846 bp, Enterobacter cloacae
atggatttaaatcaattatttaattcaatagaagctacaatgttggctcgattcaaagaatccggctttatacatcatagtggcgataaaggtgagaatcgagaggagtttttaatggattttctcaaaactcatttgccaaaaagatatggtgtgaccaaaggagaggtaattacaaaagaaggtttacgctcccatgctattgatatcataatttatgatgccgttaattgcccagtactttatgcggggaaaacatcaatccttcctgttgaaggggtatatggtattatcgaagttaaatcaactctatcaaaaagtgagtttgatgatgcagccaataaaataacctcattcaaaaaactagcgccgagagatttaggggtgattgctactagagaatacgcaacagttcatagggcatctaggccatttggtattgtttttggatttaatatttctggtaattctctggattctctaaaagaaaattggatggcgcacagcaaggctgtacatgatgtaaattatttttgtaatctaatatgtgttcttggcaaaggtgtgcttcgttatgaaaaagttaatctaacaaaaggggaaaaagatttactcctagatacagatgagtttgttaatttggttttaacggcgcataaggggcaggtaaatagtgaggaaaatgatgagattgttttacgtatagttaaagagggtatggaagaccaatcttttggccgtttttttacttatctactaattatgcttactcgaatgaaattgaatgttcctgatatcgggcgatatatcgatccaaatttaccattggccattgtgagagagtaa

SEQ ID NO: 157065 - DNA, 288 bp, Enterobacter cloacae
atggcagtcgacgagtcggaggcgctattaatccttgcctcgttaaacctggataaaatcctggacgaccgagcattgaaaagatatctcgattcttatctgcatgaagcaggcctgaactatcctgatgaacgggccagtgcgttaacctgcctgaaaattcaactctggaatctggttcattgcgaagatgcaaggaaagcagagactcttttatatggttttgcagcagcttttctggactctcctcccgggttctttgccagagtctgtcgttatctgagttag

SEQ ID NO: 157066 - DNA, 126 bp, Enterobacter cloacae
atggctgcgatggattttaagccagagtttactgttttcaaaaaagaatcagacgcttttacaactataactgaaaaccgcgatctgatacgcaaaaacgatactcgccgacttcacggcaactga

SEQ ID NO: 157067 - DNA, 2271 bp, Enterobacter cloacae
atggctacgcaacctactcaagacgcagtaccaagtgaatcgcctcgcgacctgaaatttaacgcggggaaaattgacgaatttgttacgtctgaaaaccatgtttatgttgacaggtttggcgaagagcatcgtacaattgagggaataaattacgatgcgaatcaggcaattctgaattatggctatatcacgaaggattcttttgaagatggcagcaccattagccttgctaacgagtgcttacgctgggagagcaacggcgagtactacagatgggatgggccgctccccaaagtagttccccctggatctacgcctgatagcactggtgggattggtaaggggaaatgggtaggtgttggtgatgcatctttaagggctgcgctggcggcgccgggcggcgtgagtctcgttaatggagctctttctcagcaaagtctggttctgcagtcaattactaagatcccaagctatgttaactcgaacgtagtgcaggcatggcgtgatagtgttgcttcatatgggtatgtttacttctcgaatcattcaaaatctcagatggtttacactgtgccgtctacagctgcgaatgcttctttcctggctaacagcaaagttatcatcgacaaaaatgtaactctgcggttcgatagtgatttgtactccctcttcaaatcacttcagtacgaaggcgagggaacatttgaattcaccaacctgaactttaaaacaaccggaggggaaacgagatatcttgcaaagcaggccattctaaatcgtaatccggttagaatgaagcgcgtcgagtgggctgattgcaaggtatattctgtaaatggagatacattcacagcaggcgggatcaataattcttctgatagtgcagccattttttcattagcagcgaatctgacaacagggctttttgcccctattgcggttggtgaacacatttcagcacatatccgtatggagtctcaggttgcaactgaaatagggctgttgcttcgttgttctgcaggatggatgatgttctacggtgctccaggggcaacgcagtggagttatagacaaaaaccggttggaggtgcagtagcaaacggaactccattttccatccctggcaaccttctttcctatgcgccaggaaaggccactataggtgtgtctttacaggcaaaaaacattgctttgattaccatgaatggcgtcggtatccgtgttccattcgatacttcagaggtaggtgatgtttatgaggtgggatttgttgcgctaacagcgtcatcatcaggcgttgctcgtgtaactgggctatgcagctatatttcgaacaatggcgtgcatggtaagccgccactacatattctgattcatggagatagtacggctgaggatttcatttccgcgttcagctcgtacattccgcaattaatggatggagcgaacggccaccgttcatatagcattgtaaacaaggcaattgccgggcagacaatgaggcaacagctagatctcctgaaggctcaggggccgggtgatgcttacattgttattatggttgccggaactaacgaagggcaggcaaatcagagcggagattatatggctgcgctggttgaggagtttgtactttattgcaatggccttggtcgtatccctgtttgggttgagccttggatgtggtatagccagtcatttattggcggcgctggtcaaccatcagctaattacgatggtgtggcggagttgcgcgaggcaggaaagcggaaaatgatgaaatatggcaacaatgttatttgtgtaagcaccacacaccaattaccagctccactgcctgaatatttcggtacacagtatgatccattgttacgtgatgatatccatcagagccagcttggttatcgtctttatgcggaaattatttgctcagcaattattgactggtggtcaagggttgatttcacaccgaggtctgccgttcagtggtgggctgggacgaacgtaaccgtacagacaccatcaagcttaactggtaattcaataaatgttaaacttgccgctacgtcatttgcaaatggcaatacagtattgacgttgccaagatggtgcagaccacctgttaacaaaaacattcctgtgccatttacagctgacggaacatcattcggaatggctatggcaacgataaacgcttcaacaggggcgataacgattgttgggtccactacaacatccccaacattctacattgatgcttcatggtaa

SEQ ID NO: 157068 - DNA, 174 bp, Enterobacter cloacae
atgacctggacatccgtacgcgtccggctgccgcgcccattcgttcgcgtctgggtgctgaccgacaccgggcgggagactactggctacgtcaaatcggacgggaaatggttcattctttgcgagcggattcgcgctacgggcgcggtggtgctgcgctggagggaagactaa

SEQ ID NO: 157069 - DNA, 582 bp, Enterobacter cloacae
atgaattcgaaaccagcgccaagcgcagagtttttacgtgaatgcttttcttacaatccagatactggagagttgttttggaatgcaaggccagtcagtcactttaaatcagagaacgcatgttcagcatggaatgggcgatatgcaaataagccctgtgggtgcattaggccagatggctatgtaaaaatctccgttaacaaagtgagctatttggctcatagagttatatggaagatgattaccggtactgatagcgaattcaccgaccatatcaatggcattaaaagtgataacagattggcaaacctccgtgatgtaaccatgactgaaaacaacagaaacatgattggagggttggcatctgggaataactttatcggcgtgtattggcatcaacagcgaagcaaatggatggctagaattcgctgcgatgactcagagcggtatattggaatttacgatgatataaaaattgccgtccttgcctataacgccgaatgtgaaagggttcatggcgaatacggtaagcgcaagatagaacataatctaagtaagctccgagagatggggctgatataa

SEQ ID NO: 157070 - DNA, 900 bp, Enterobacter cloacae
atgttccgggatatcgaagagcgatatctcggtatcaagcgcgcgctgaaagttcttctcgaccagcgccttaccgggcgagagcgtgaggttaacagccataactggcatttcctgtgccacgacaacggcgctgatgtgcgactctaccaggttaacgccggcaagttcatctacgacatgtcggcgcgggaactggctgacctgctggaagcggtgcagggcattctcgacgattacctgctggagggtggcgagcaaaacctctgggcgatggattacgtcgtcgcagaagcgcagcgcggcacgctggaggccttcaacaacctctcacagcagtcgcaggtgtatgccagtcagacgacgctacagcagcttttaaacagccccggttatcttaaccagatatcggcggccaggctgacaacgttcagcgactggaaagtcatcagtgacaccgctcgaggcgacctgaccaacatcatcaccgatgcagtagcgcgcggggtgtcaccaagagataccgcccaggttattagtaaacgcctggacgtaagtatgtacaaagccaaaacgatagctcaaacggagcaagttggagccttaaggcaggcgcagcgcaatgaggttgattgggcaaaagaacgcctggggctgaacactgcgatattgtggatttccgcacttaaaccgaccaccaggatgactcatggggcaaggcacgggaaaacgtacaccactgatgaggttgcagagttctattcgaaggatggcaactcctataactgttactgtgccaatatcccttgcctgcttgacgatgaaggcaaactttacaatgaaggtcttgccgagaaattaagtaaagagcggagtaattggaagtcatccgaaaagtaa

SEQ ID NO: 157071 - DNA, 1122 bp, Enterobacter cloacae
atgacaataactccacaacaactgatcgcgctgctaccgctgctgatcgtcggattgacggtggtggttgtgatgctctccattgcgtggcgacgcaatcacttcctgaatgccacgctgtcggtcatcggcctgaacgccgcgttagtctctctctggtttgttggccagggtggggcgatggacgtcaccccgctgatgcgcgttgacggttacgccatgctgtataccggtctggtgctgctggcgagcctggcaacctgtacctttgcgtacccgtggctcgaaggctacaacgacaacaaagaagagttttacctgctggttctgattgccgcgctgggcggcattctgctggcgaatgcgaaccacctggccgcgctgttcctcggtattgagctgatctctctgccgctgttcggcctgattggttacgccttccgtcagaagcggtccctggaagcaagcatcaagtacaccattctgtctgctgctgcgtcctcgttcctgctgtttggtattgcgctactgtacgcacagtccggtaacctctcctttatggcgctcggcaagagcctcggcgacggcatgctgcatgagccgctgctgctggcaggtctgggcatgatgattgttggcctcggcttcaaactctctctggtgccgttccacctgtggacgccagacgtataccagggcgccccggctccggtgtcgaccttcctggcgacggcgagcaagatcgctatcttcggtgtggtcatgcgtctgttcctgtacgcgcctgtgggtgacagcgaagcggttcgcgtggtgctgggcattatcgcgttcgtctccatcatcttcggtaacctgatggcgctgagccagaccaatatcaagcgtctactgggctactcgtctatctctcatctgggctacctgatggtggcgctgattgcgctgcagagcggcgagatgtcgatggaaaccgtgggcgtgtatctggccggttacctgttcagcagtctcggcgccttcggcgtggtgagcctgatgtccagcccgtaccgtggcccggatgccgattcactgttctcctaccgtggtctgggtgatgctgccaacttactgatttag

SEQ ID NO: 157072 - DNA, 411 bp, Enterobacter cloacae
atgactaccgctgtatcctcactctgccgtaaaaatccccatgctccatgtgacgagcaaatgccctactgggtcgaatttcaactggttgatgagcagggcgatgctgtagcgtatatgccatggactgttgaaagtgctcatcctgtttccgggccggtggagggattcacttattctggtcagagcgatgctgacgggctaatcagggtcgacatgccgcacggtctggagctgaggctgacgtttgatggcaatcagctggctacggaaatggaaaaacgtgctttacgcgttagtcgcgatgcggaaaatgattctattgttcgccctgaagctgaagagaaaggtatatttggcattatactgttatcggtgaactttgtcagagtgcaccagacctggaattaa

SEQ ID NO: 157073 - DNA, 852 bp, Enterobacter cloacae
atgcttactgcagatgctcagcctgacgtcggcagtaaaatgctggaaatggacagggctgtagaacaactggagcaggcactcacgctggcaagaagcctccaggcagctgcgaaaggagcgaaggcaacggtatcagatatcgacagccaaaagacgcttaacagttcactgaaatatctgaaaatgccaggaatgctggccagtgcacctgctggtataggcatcctcagtccagaagctgtccggcttgcttcaggcggggcaagtattggcctcatgtcaggtaaaaacacggatatcagcaccgggcaatcgttcactgtagcggcaagcgaggctgtaagtttgtttgcacaggctgcaggaatgaagatgtatgctggggcagggaaggttgatattcaggcacaagctgatgccatgaatgtctcagcattacaggacattactgtcgccagcggtcaggggagcgtgaaggtaaatgccagcaaggaactgattttaagttgtggtggtgcttatataaagcttagcggcgggaatattgaactgggatgtccggggaatattttgctgaaagcggccaatgttaatcagacaggtcctgccagtttagatacaccgcctgtaacttttcctaaagggtacagtgaagggtttatcacaacctcatcgaccagcggagcagtcaagcctttcaccacatataaaattacgacggctgaaggggatgtttatgagggcatttcaggtgcagaaggagagacttctccaatatttacgtctatgccatcgcagttaaaaatcgaatatccgcgaaatattgctgataaccaggagggcgaataa

SEQ ID NO: 157074 - DNA, 546 bp, Enterobacter cloacae
atgaacatacgactcgtgaaggcgacaagccggggaatagcggcattacttgtcgcatccggcctgaccatcacgcccgctctggcgattgaggataacctgcactttagcgggacattgaccagcgcgccctgcgggctggacccactgaccaccgatctgagcgtcgattttgacatgatcatggaaccggatttgtatgcctatgcccgaaccaaaggcgtaccgttcaccattaccctgacggactgtgatttatcgatagccagtaaagcctcgatcacatttaaaggcacagagagcacggaactgcccgggctgttagcggtgacaggggaagcggcggggatcgcaattggtgtggagaccgaagacggcatcgcggtaccgtttaataaaccgacaccggaacatgtactgaacagcggtgacaataccttcaccctgatggcctatattcagggggaaccgacccatctgcggcaggaaaccattacaccggggaattttaccgcggtgtctacctttatgctggcctatccttaa

SEQ ID NO: 157075 - DNA, 879 bp, Enterobacter cloacae
atgaaacttcccaaagatagcattatcaataagtttccggacctacatatccatcaaactattgacgaaattagagatctattgattaacggatttgatgattcccaaaaaacaatctttttatgtgggaaagataaatctgacaaaaaaagtcttcgatataaattctcgacatttctttctcaagagaaaggtatcactctaacttatccagaggatttgtttgaagatctcctcgaaggtcagggaaagaacagtttgctatcgctagaaactcagcttgcaaactctgtcgatcttatagttcttatacctgaaagtccgggttctttcgctgaactaggtgcattttccatggataaagccctagctaacaaaatgcttgtgatgagaatgggggaatttaaatcagggaaaagcttcataaatcatggacctatacgccttgtcagaacccatggtggggaaatatatgatattccaaagaacttcgatgaaaagaaccccgaacatgtaaaattagtacttggaaaaattaaagaaactcttccgagtggtagaaagaagaaaaaattggacaatatcttattatattcacaacacgtccttcttttaatctatctatttgatgatttaaatttacgctcggtgtataaaaccatggagctgatcatggagagaaagtttgacaatcgagataatgttgcctgtaaagctgctacacactccctcataagggcaggaatgattaaccaacaagagggattattcagtataactcaaattggttataactcgataattaatagtttctatttgaaatcatcacttgctgaattaagggcgaaaatcatgaataaacaatatgctagacaatga

SEQ ID NO: 157076 - DNA, 975 bp, Enterobacter cloacae
gtggcaggcttgtcccctttctccgggacggtctatcagattatgcagttacagaaattagtcaatatgtttggtggggatcttttgcagcggtacgggcaaaaggttcataagctgtcgctgcacggcgggtttagctgcccgaatcgcgatggcaccatcgggcgaggcggctgcaccttctgtaacgttgcgtcctttgctgacgaagcccagcagcataaatctatcgctgaacagcttgtccatcaggcaagccaggtgaaccgcgcgaagcagtatctggcctattttcaggcctacaccagcacgtgggcggaggtgcaggtgctgcgctctatgtatcagcaggccgtcagccaggctaacatcgttgggctgtgcgtgggcacgcgcccggactgcgtaccggacgcggtgctggacctgctcagcgaatacaaagagcaaggctacgagatctggctggagctgggcctgcagaccgcgcacgacaaaaccctgcaccgtattaaccgtggccatgatttcgcctgctaccagcgcaccactcgcctggcccgcgagcgcgggctgaaggtctgctcgcacctgattgtcggcttgccgggtgaagggcagcagcacggcctggagacgctggaaaaggtggttgagaccggcgtggacggcattaagctgcacccgctgcatatcgttacgggaagcattatggcgaaagcctgggaagccgggcggttaagcggtattgagcttgaggactatacggtgacggcgggggagatgattcgccacaccccgccggaaattgtctaccaccgcatctcggccagcgcccgccgtccaacgcttctggcaccgctatggtgtgagaaccgctggacggggatggtggaaatcgaccgctacctgcaggagaatggcgtgcaggggacggcgctgggaatgccttgggttccaatttctgaccgttag

SEQ ID NO: 157077 - DNA, 210 bp, Enterobacter cloacae
atgcattacgggagcgagcaactggacacattcaaagctttccttgattatttcaccccgcagcagtgggttttcattggcatctttgggggcctggttataaaggttgctgagtggttcactgaccgatactttgcccgtcggcatcagaagcgtcagtctgctaaccccgataagccgacaaccaaagaaaacgatcctcagcgataa

SEQ ID NO: 157078 - DNA, 234 bp, Enterobacter cloacae
atggaaagaaaagaaggtatgtctactgactggcacagaattgacattgtcgccgcgcttcataaacgcggtgtgacgatgcgaggtctctccgagaatgccggactcaagcccgacacactcaaaaacgctttgcatcgctcttatccaaaaggtgagcgcatcattgctgacgcgctggatatggaaccggccaccatctggccaagtcgctatatgcgtaaggcatcatag

SEQ ID NO: 157079 - DNA, 567 bp, Enterobacter cloacae
atgagcacagagaaagaaaccgttcttactatttccccggatgggaaagaaagtatgcatgaccggataaaatcccttttcagggggcgctcgatgcggaaagtggcttctgactggggacttgcgtattcaactctgaataactactttgcgcgttcaggctctcctaacatagaggttttaatacttattgctatgaaagagggggtttctcttgaatggctggccacaggaagaaagccgtctaaccatgaagagtcaagtgcgacaaccccaactgagagcagatcgaacccaaatgcgctaattgcaacttggcaaacactgtttgattcgcttaaagaagaggaagttaagtcattactgtcccttatcatgcggatgggggttaatggcttgctggaattagctgaaatgaagacaacaatcgacagcgcctttttacgcttggatgaaggcgagaaagagcgtttgtgggccttgcacgaagctaaaaaggggtcatctgagcttgatcagatgtcatccgaatcagccctgacgagtaatgacaagaaggccggataa

SEQ ID NO: 157080 - DNA, 1491 bp, Enterobacter cloacae
gtgacaaaaaaagttattgattttgatatatttggtggttttgaatctgatttcgatttaattttcaaaattggctctcaacatgattcaaatcttgtctatgtttcaagtaaatcacaatgtgtaaataaagcattggaattttcaagtttcctgatttcaaagggtatagttgctgaggaagatgaagagttacttaccgaatcgaaattaatttctgagtgcattcataaagatttttcattaccacatctattaaaatatggtatcgcgtatcatcacggaaacttgccagcatttattcggaaaagaatagagtctctttattcaagtaaaaagattaagtacatattttgtacctcgactttactggaaggtgtcaatttaccaactaagaatgtttttatttatccatttggtaaagcaagtaacagcaatggattttctcttgatttttggaaccttgctggcagagcaggtcgatataagagcgagttgacagggaatatcatttgtattgggaatgaaacaaattcttggggtgaatttgagagttctgtttctaataaagacataataaaaattgataacgagatttcgccactgcttcaatctcctcagcaaatactcaattatcttaatgaaagtgtaaaatctcacaaacctaaagtggttgaaatttcaacaatgattttatctgagattttaacatatctgaatgaaggtaagattggtgggttactaagggcattcgattcagaaattagacaagaaataatttcatctggacgtaaacatttagctaagaaaaaccttcttgacattgatatctccactttttctgaaaatcatcggtttaactcagatatacaatcctcagcatataagttagcttctaataaaaataacatcctaatgacatttcaaagagatgatgtgtttaaatatttacagaaaataaatgatgtttataaaatagtgaagtcaacagcaatctacccttttagtatcatgacctattcttggttaagaggtgaatccattaactcaattataaataacggtattaagtacagtaaaaaagtctgtgagcttgctccttatggttgggttgattttgacagtagcaatacataccacgtaaatttaaaaatattagaggtgataaattctattgagacagatatcacttttaaattggaaagttctttggctcattattatcagttatgtaaatctctacatggtgagaacgcatcaggtataaacttatctaaatttgttgattatggaacaattaatgctaaagaaatgtctttgcaggaatacggtttctcaagggctgctgcatccgaattattaaaaaaacacagagttttcattgagtttgatagcaatgacagtttaaagaaaatcaatgttaaagggctgataaattctgttgatagtggtgggctacttaaaaaagaaattgaatggcttaatatttaa

SEQ ID NO: 157081 - DNA, 582 bp, Enterobacter cloacae
atgaatatattcgcccagtatggaaaagagatttttgcgtttatcgttcctgtctttacgttgattatcaataaatacttcaaaaatagcgcaaaaattagctatggcgagctgcatcagttcacctatttactcaatgaacctctcttggacaaggaaggtgaggtgctccaggctacgcaaactgttcatactcagtcatatattttcaggaatgatggaaaagagcctgctacgaatgtagaacttatctttaactatgcgccaatgtacctcaatgtttggccatcacgcctttttgcagaaaaaaatgactcatctcgtaggtatgtcatggtatttgattaccttgcgcctaaagaaaccatacgctgcgaggtgttggccatcaatgcgcaaataccagtgctcttatctgtaaggtgtaaagaaggtgttgctcagaacatggtgctgatgccgcaaagagtctttcatcccgcttttatcaattcccttaggttcctgattttccttggttcagtaagcttcgtgtacatctttgttgttcttctccagtggttactcttgaaaacaggttaa

SEQ ID NO: 157082 - DNA, 621 bp, Enterobacter cloacae
atggcagtagcagcagttgccgtagctattatcgcaggggcatcagcggcggcagcagcatacgcagcaggtttagctttagcagcagtagtagctataggtattggtacagcagcactatcttacattagttcatcacagatgatgaatgtaggccaaaagggggtaacgtatccgagtacgggtagtaacaatgcccgatcaacatcaccaagtactggtattccaatttcatacggtggttctaaccgtaacgcaacagaagtagcctataacaaattaggttctattgtggtttggcagaatgtttacaatggtacatcaaatcagttatgtactattcacgctattagtattggtgaaattggtcaggttccaggagaacaatcacaaggcgtaattaagcaaatctattttgataatgctccggtactgcttgatggtgcgtatatcaccacagaaggccaagtacctacatcaatgatgatagagaagtaccgcaaatacctacagattgaagtacgttttggtaaaccgtcatacggtggttctatgacgcttgcccgtcaatatggcggcagtcaatggaaggctttgttgaataaatcgaacttttgctga

SEQ ID NO: 157083 - DNA, 237 bp, Enterobacter cloacae; identical to SEQ ID NO: 101703

SEQ ID NO: 157084 - DNA, 708 bp, Enterobacter cloacae
atgccattaagcgcacaacagctggccgcccaaaaaaacctgtcgtacgtgctggcagaaaagctggctcagcggattttagcgggtaaatatgccccgggcagcatcctgccgggtgagatggagctgggtgagcagtttggggtgagccgtaccgccgttcgcgaagcggtgaaaaccctgacggcaaaaggcatggtgcttccacgccctcgcattggcacacgcgtgatgccacagagtaactggaattttctcgatcaggaactgctctcctggtggatgacggaagataactttcaccaggtcgtcgatcactttctggtgatgcgcagcagccttgaacctcaggcatgtctgcttgccgccacgctaggaactgcagagcagaaagcacagcttaacgcgctgatggaagagatggtgttcctgaaaaagcacttcaaccgcgaacgctgggttgaggttgatatggcctggcatgaacacatctatatgatgagcgccaatccgtttctcacctcttttgcctctttatttcattcggtgtatcacacctactttacctctattacacaaaacgaagtggtaaaactggatttgcaccaggcgatagtagatgccatccaggaaagcgacgggcagcgagccctgagtgcgtgccaggcactgctggccgcgccaacccaccagcaggtaaataaatga

SEQ ID NO: 157085 - DNA, 600 bp, Enterobacter cloacae
atgtctcaggcagaattaaacagcgaactgattgccatcgtagccggtgatgtcatcgtatttaactatgacggcgaaacgcgagaatacctgtcttcgtcagttgagtatctggcggcaggtgttggcatcccagccaattcatgcgtggatgcgccaggcaaaatcaaagacggctttactgtttgcagaaaggcagatggcaaagcttgggaatacgtcgcagaccatcgcggtgaggttgtttacagcacaaagacaggtgagaaaatttccattaccgtaccgggtgattatccgaaagacaccaccacgcacccccctggcacaccatacgataagtggaacggcagcaaatgggagaccgacacaaatgcacagcacgctgcgaatgtagcagaggccgaacagcggaaaactgcgttgctggctgaggcagcagcgattattgctccactggcagatgctaaatctggaggctatatcgacgatgcagacgtaccgcgcctgacggaatggcagcggtaccgatacaaactaaccaaggtcgataccagtaccgcgccagaaatcatttggcccgaaccaccggcggtgtag

SEQ ID NO: 157086 - DNA, 435 bp, Enterobacter cloacae
atgacaattgaatatgtatggagcccgtcaactgcgggtttttatccaatagttgagaaagagcgcctgatagctgccgggacatggcctaacgatggcgttgacgttacaggcgaagagtactctgcgttgtttcctgcgcctccaggaaagtttattgatacgctcgatggtcgtccgcaatgggttgatatgccaccaccttctaaagagcagatgattgctgtggctgaaaatgcgagatcggcaaagcgctctgttgctgataatgaaattagctggcgccaggatgcagttgatgcagggatcgcaacagaggaggaaaccgctgaccttacagcatggaaaaaatatcgggtgctgctgatgcgtattgatacatcaaaagcacccaacgttgaatggcctacaccgccggtggttcgggccaaatga

SEQ ID NO: 157087 - DNA, 294 bp, Enterobacter cloacae
atgaacataacctcccaaccaaacccagcaaggcaggaatttgatatccacgccaagctcaaagcagccaatacgcactggtcttattgttatgcagtacagccttgcgagaaagaatttaattaccaatttaatacaacatttgttggagagatagagttcgccgtttacgaacgcatcgataattattttgtattagttgatttcttcaagtcatatgatgaggcatgtgatgatgctaaaaaaatcattgatgaccatcctgacattaagaaaatgttcgctgctatttaa

SEQ ID NO: 157088 - DNA, 201 bp, Enterobacter cloacae
atgggcgcgactgaattttacaaaacaatgggcatcacacccgaagagttacacaagggcgaatctgtggagcattatgctatgcgtgtatttgctcaacaaaacgatcaatctgtgaggactggagtcctgtattcatatagtactgtgagcactttggagcagactaacccgcaatctcaccaactgtatacatactga

SEQ ID NO: 157089 - DNA, 900 bp, Enterobacter cloacae
atgccaaattggatagacgtattgggtgagatgggtactatcgctcagcgtacaccagcggatgaggttcgccataagtacttacgtgagttatcacagcatacaggccgaaatgtaatatcttactactcaggcttccttcagaaaggtgggcctgggcatcaacatctgattcaaatgtcggatgatgataagaatggccttatgtcagctatcaatggactggatacaaagctagggctggatatcttgctccacacacctggtggagatattgcagcccttgaatcgattggtcattatcttcgttcgaaatttggaacgaatattagggctattgtgcctatgatttcgatgagctgcggaacgatgttggcctgttgtgcagagcagatcgtattgggtaagcaatcgaatttaggacctattgatcctcagtttaacggtctgtcatcacatgcaattattgaagaatatgaaagggctaaagcagagatccttgctaacccggcagcgcttcaatggtggcagtttaccttgcaaaaggtacatccaacgctaatcggcgagtgtgaaaaggccatcctttgggcaaacgaaatcgttcagaaatggctctgtaccgggatgtttgctggtcaggatgacgctgaagaaaaagctaaacgcatttgtgatgagttgaataaccatcacaccacctatgcacatgcgagacatattcatcttgataaagccaaaagtattggtttgaatatcgttgagcttgagagtgatcagacattgcaggatttagttctcactatacatcactgctatatgcattcttttggtactagcccagcagcaaaaatcatcgaaaatcataatggtagtacgatgatgtggaacatctgttaa

SEQ ID NO: 157090 - DNA, 390 bp, Enterobacter cloacae
atgtccgatccattaaccggcactggtgcagttctcggcggtggcctgctgggttcagtcctgtacggtgtctttactcatacagatttcggcgtggtgtttggagcgtttggtggtgcggtgttttacgtcgcgacagctgcaaaccttacgcgtgctcgcctggctgcatattttctgacttcattcattgttggagtgcttggcgccgggtttgttggctcttggctaaatgctgcatcgaattatgaaaaaccactggatgcactcggtgcagtgattctgtctgcactgtgtataaaaatcctaacttttcttaataaccaggacctgaacaccctgttcggttttttctcacggttacgcggaggagggggaaatggtaattga

SEQ ID NO: 157091 - DNA, 522 bp, Enterobacter cloacae
atgaggaatattttaatttttacgtttgtcacatttttgattggctgcagtgaaagatcgcgaccagcagatgaaatcgatcatgaaagtggactggttaaaatattcagcactaaaaatttaaatactgcgcaagataggggggatattctttgcggcaaaaaatcatattatgtgaaagcacttcatgaaagtaatctggtgctcttaagaaacaacccttcagacgtatatttgttcgattacattccttttcagtgtgatctgaaatccgctgcaaacgcgggaaattctgaagctaaagcgctctatgacaaaaatcttactgatgcatatcgtaagcttgaagagtctaaaagaaatcaatacgaagcgcataaagcttatgccaaaaagcatgggattgattcatatagcatagttaaccctgatggcagcatagaggctcacacaatagattccagcggtaatgcttgtcatagcaccgtcggtatatatggaggggaaacagtctgtgactaa

SEQ ID NO: 157092 - DNA, 1830 bp, Enterobacter cloacae
gtggacccaattacaagtgcagcgcttaaaccgataatagatgaaaccgcaaaaaaaacaatcggtggagcatttgattttctagcaaaaaaatatcatttattagaaatcttgaaatttaagaaaaattatcttgaatactgtgaaaagatattacaagttaaaacgctagtctcatcggatcgggtgtttcacattgacgacatttatgtaaatgttgatcttttgccatcaggttcgcagttaagaataccaatcactgattcaacgactttggataatgataaagctctattaattaaaggattagcaggccaaggaaaatcaactcttttaagaaaattattatctaataacgctaaacgttttcacagacttccaatattttacgaattaaaaaactatacaggtggtaggattgaacaagaaatcacaatatcacttaataatgcaggagtgaaaatcaaagaacatgctttatctaaattattacttgatagtaatgtcaaagtgtatcttgatgcttttgacgaaactaaaccagaatttagaaaccaattattagatcaaatcagaagattagttaattcctttaaatgtcatgttatttgtacaagtcgtcctgatacagaaattgatactctttctgagtttgaaacctattcagtttgtgagctaactgaacagcaaatattcggcattataaaaaatacagcttctgacaatgagaaatcgagcgagctttgtgaagctctaacacatagcccattgcattcgaagcaagactcaatattaaaatcaccgatacttgtcgttcttttttgcatcagttacaatttgggggagcagataccaaccacactatcacaattttattctaatatatttgatactgttttccataggcacgataacattaaaggaaaagtaaacagacaacgtcactggaatgataatagacgtatatacagagatttattcaactgtctttgttttatctcacttcgctcaggcgcaataagcttcaaaaaagatatattaacaggtttcgtgtctcactcattaactcacgtaggtgaagataataacattgctgataagatagcgatggaactatccacaattacgaatttaattatcgaagacggattcaatgaataccgttatgtccataaatccatccaagaattttttgcggcttcgttcattttgtcattagaacatcataagaaaattggtttttataataaatgttttaatgaacattcattttacattattttccataacgttctttttttcctagaagaattagactatcatgattatttcaactacggctttattcccgcagtgaaagatatgttctcacttgggcatgaactcaacattgaagaaatttcaatacctcaaaaaatagaagatactttcttggataatacatttatgaaagcaagaatctccatattcaaaacaaaaggaaatgaaagttttgatgttgaaataaataattttgcttttgaatcagaactctctccgccaagcctttatgtaacagtatttaacttttgtctagaacaactaaaaatagagttttctgacaaagaacttgcagatttaatattgaacacagggaaaaaaaccgatgatggttggcataaattctccttgcgaaccgtactcatgaaaaaaagaataccattatcaagaatacaggaattattattacttagttttgatgtactaatacgtcgcaaactagctttagctaatgaaaaaataaaaagccgaaaagtctctcttgatgataccgagttttttgacttttaa

SEQ ID NO: 157093 - DNA, 708 bp, Enterobacter cloacae
atggcagccagaccacgtaatcatagggttgatataccaaatctctactgcaagcttgataagcgtaacagcaaaacctactggcaatatcggcaccctttaaccggtcagtttatcggttttggtaccgatcaagaggcggccagactggccgcctctgaactgaatcgtcttctggcgctgcaggaaactgcccagtcgtttgccctgatagatatggtcagccataaaaagattaattctaagaaatcgatacggatgcgcgtatggattgaacggtatctggaaattcaggaggagcgactcagcaataaagagataaaaattaatacgcttaaatcaagaaggacatgcacaaacgtactggttgaaaggatgcctgacattggcattcaggacgtcaccaccaaaatgctggcagctattacagacgaatataaagccagaggcaaagcacgaatggcgcaaacgctccgcagcgtctggattgacctgttcaaagaggcgcagcacgcaggcgaagttgagccgggatataacccggcgctagccacaagaaaagtcgttgtccgggtaagtcgttcgtgcctgaaccttgagatgtggaaggcgatatttgaagctgcctccactatggcgccctacgtccaaaactccatgcttctggcagttgtcaccgggcgcggcgcggcgatatcgccaaaatga

SEQ ID NO: 157094 - DNA, 2538 bp, Enterobacter cloacae
atgagcctgacggataccctgaacacgatggtggccaccgtcaccggaaaagccctgaatcgctaccgcctcgatatcccttcctgtacggccgatatcgacgtggaggacttcagtggttcagaagcgatgagcgagctgtacagctacaccatcaacttcaccagtgccgacaagaacattgatgcccgccagattctgagcaagccggcgaccctgaccatgggggcgggcaatttgctttccctgacggagcgcaaggtggttcacggggtggtgacccgtttcgagcgtaccggtggttccgcggatgaagcgaagtactgcatcgtgctggagccgtttctggcattgttggggaatcagttccgcactcaccgctttttcgtcaataagtcggtaccggaagtggttgccgaggtgctcacggaacatggcctgaaaggctgggagtatgactttactctcaaagctgattatccaaagcgtgagcagattaaccagtatcaggaaaacgacctcgccttcattgaacgcctgctggcagaggtggggattttttacttcttcaccctgcagcctgacacccagaccgaagtggtgcactttgcggacaagcagagcgcgtggacgtttggtaagaaactgccgctgaacagcccgtcaggggcgaatgacaatgcggtcgactcggtgtgggatgtgcacgtctggcataacgtcgtggaacgctctgttacggccagcgactataaccaccgtgaggcccagaacgtcctgacgtccgtgccggcggacatgacccgcggggacggggaagggaacacctacggcgatgtgtaccattatcgcccgcgtcaccttgaacgtggcgacaaaattaaccccgcagcggaaacaggtaactactgggcgcgcctggagcatgaacgttacctttccacccagaccactgtaactggcagcagcaccgaccataccctgggcccggctcaggtattgactatcaccgagacggctatcccgccgacgctgccgcgtgaaaccgaaaacggtctcgtcatcatcagcgccggttactctgccagccgtcagaacgcgctgaaggtggaatgggcggctatgccgtactacgagaaccgatgctggcgtccaaccgcgaaaaagcgtccggtggtcagcgggaccctgatggcacgcgtgaccagcgccaaagataacgatatctacgcctggcaggatgcgtcgggcatgtaccgggtgaaattcgatgcggaccgcgacgacaaacgccagggaatggaaagtatgccggtacgctttgccaaaccctacggcggcgacaagtatggctttcacttcccgctgatacaggggactgaggttgccattgcgttccatgaaggtgaccccgaccgtccatacattgctcatgccctccacgactcccgccacgttgaccatgtcactgaggccaacagtacgcgcaatgttgtccgcacagctggcctgaacaagcttcggatggaggacaagcgcggcgaagagcacgtcaagctcagtacggagtatggcggcaaaacccaactcaatttaggtcacaatgtagacgcttccaggaagcttcgtggcgaaggtgcggagttacgcaccgataaatgggtggccgttcgtggcggagccggtgtattcattagtgcggacaaacaaccattcgccagtgacaaaatgctttccatgaaagaggctgtggcacagcttgaaaatgctttaagtatcgccagaagcctttccgatgcggcagaaagtgctcaggcgtatccggcggatatccagagccagaaaatgctgacggatgcactgacggaactggcacagccggggatggtattgaatgcaccgcaaggcgttagcatcagcagcccggaaggtgtacgcatttcctcgggaagtgccagcgtggggatcgtcgcgcaaaataatgcagacatcagcgctatgaagcgtttcacggttgcggcaggtgaagctatcagtatgctggcccgtcaggcgggtatgaagctgtttgctgcgaaggggaaagtcgaaattcaggcacaggatgatacactggacgctatcgccaagaaagatattacggtaacgagtgccgaaggcaaaattgaaattacagcagcaacggaactggtcgttaactgtggtggggcctatatcaagttaagtggcgggaatattgaattgggttgtcctggaaatattcttctgaaatgtgccaatgctcagaaaatgggagcagcttcgctgaacacgccagcccctgaatttccaaaaggttatggtggtgtttactctctgaatgacgaagaagggaaaatcatccctcaaactgaatataaagtgacgacagctgacgggcaggtgtttcatggtatttcagatgataatggcaaaacactgccgatttataccacaatgcccggcaaattaaaagttgagatccttggaaccggcaattcaacaacagggagtgaataa

SEQ ID NO: 157095 - DNA, 1584 bp, Enterobacter cloacae
atgagtgattaccatgcatgggaagccagtgattgcgagcatttcactgatgttaatatttccgagaaaacagttgtctgcaaacgaaaacccgttccggggataaccatcacgatcgggatgttttttgatggtacagggaataatgcgtttaatacccagaatcgcatcctggagtcctgctctcatcttgacgttggaatgaagtcagaagacgctgaagcctgtgctaaaaaactgggaaaaaaaattgataacgcagggagttatattggctattattcaaatattcactggctcaatacactttatgctaccaatgatgaagtaattgaagggcaatcagattatcaacgcgctatctatgtacaggggatcggtaccgataaggggaatagtgatagcacgataagtatggggacgggcggttggttttatggtgtggttgataaatctgatgaaggcgttggtctaattgctgaacagatttcacgatttctggctcttaaccaggggataaattttgcaatcgaaaaaattcagttcgatgtttttggatttagtcgcggagcggcggcagctcgccactttgttaaccgtgtaagaaacaacgataaagccatacagcaggccataacgaaagggcttggtggtcgaaatcagcatgggaaacctgcaggtgaaacccgctttctggggttatttgataccgtctgcgcggtaggtacagtaagtaatctatttgatgttcatagtggtgtgaaccccggcgttgagctggacctgcctccagatattgcacagaaagtctttcagattacggcaatgcatgagtgtcgctacaactttagcctgaacagcatcaaggaatcgtggccggaactggctctgccgggagcacattccgatatcggcggtggctataatccgaaggaaaaggaatatctttttctgactcagccccaaaacgaaactgtcagtgaaagtattccttctgaagtgactgatatctaccggcgttcaacggctgaaatacctgacttaaagagcctgccagcgttaagtgcgataattccgagcggtgaagtaaagacagaaacctggtacgactaccttgttaacgaggataaaaaacgtggtggcatcacacaaaagcgtgttggggcggcagtcactattgagagggtagtaactaacgactggagcaaagttagtttacgggtgatgctggatgcggctcaggaggcgggggtagcgatgaaagaaattgaacctacgaatgaatatttgaatttacctgaggatcttaaatccttatgcaaaaaagcaattgaccagggaaagactgtaagaagtggtggtgtgccgacgccttttatctcaccagaattacagttaattggcaaatatattcactgctccgctcactggaaccctgtggttgtaaaagatgtctggctggacgggaataaagtgaaaaccatctacggggcagtgaaatcatctgatttgtttttttatatcaatcgtccaaatccgggttggcttcgagctgtctggaatatgcagggagggaaatcatga

SEQ ID NO: 157096 - DNA, 648 bp, Enterobacter cloacae
atgaaatcaattgccagaattatctcgaccttatttcttttgggctctgttagtgcctgcgctaatgagaaatctaacagcctcaaaactccctgggacaagtggtatttcgcttttaccacaccaaaagctctaccagcacaggttacattgttaaaactgttggatgttgatggttatgcatcgacatatcggactatcgatcagccacaagggatcagtgttgataaatggagtgaacgtaactctgcggggaacacccagtttaataaagccgatagattgccacagataatgatattttgttgggactcaatcattgataaaaaggtttatcagtccactttattctttactcaggatacttggaataagatgacaaccccttatcctgatgtcttagaacctggaaaaaatgcatatcggcaaacgatgttaataggattagcgccggaaggaaaagtacgggtctggttgagacaatatggccattcggatatcccattaaatgatacaaaaataacgacagtttccggtaaagaccttgatatgtgtaaaggggtaacgggaagtgatttttcctatgggtatagtaatacaaccaaagagttcatcaagggtaaaaaatatccttatggttcatggtga

SEQ ID NO: 157097 - DNA, 648 bp, Enterobacter cloacae
atgaaatcaaatgccagaattatctcgatcttatttcttttgggctctgttagtgcctgtgctagtgaacaacccaatagtcttaaaatcccttgggacaaatggtactttgcctttactaccccaaaagctttgccagcacaggttacactgttgaagttgttagatgttgatggatatgcatcgacatatcggactatcgatcagccgcgtggaatcagtgtcggaaaatggagtgataggaactccgcggggagtacgcagtttaacaaagccgatagattgcctaagataatgattttttgctgggactcgattattgatagaaaaacatatcaatcaactttatttttctctcagaatacatgggataaaatgatcactccttatcctgatgtattagagcctgggaagaatgcatatcgacaaacgatgttaataggattggcgccggaaggaaaagtacgggtctggttgaggcaatatggccattcggacatctcactcaatgatacaaaaataacgactgtttcaggcaaaaaccttgatatgtgcaaaggagtgacagggcaccctaatgagtatgtttactatggagatactcctgattttatcaaagataagacatacccttatggtaattggtaa

SEQ ID NO: 157098 - DNA, 567 bp, Enterobacter cloacae
atgaaaccattttacgtattaatgttgttttttatctccgctttgtgtttttctgaaactatcactatagacccaacatcaactactaaagcagacgatgcaaattcaatggctaatgtttatcgtttgggcatgggtgttcctaaggatatgaaaaaagcatttgaactctatcaggttgctgctgaactgggaaatacggatgctcaggtcgatttaggtgacatgtattattctggtgaagaaacccctcagagttacgaaaaggccaattattggtatgagaaggctgcgaaaaacaacaacgctaaagctcagatgtatttaggttacgcatatcttaatggtaagggcgtcgttgtggattatgctaaggccaaaaattttcttgaacttgccgttaaacaaggcgaaccttcagccatgaatcatttgggaacgatgtactttgatggtaaaggggtaactaaagatcaaaataaggctattccgctattccaaaaaagttgctctgcaggtgattctaatgcgtgtgataagttaaaagaaattaaaactgagaagtaa

SEQ ID NO: 157099 - DNA, 1155 bp, Enterobacter cloacae
atgagctgggagcgtcagaaatcaacaatatcggctaagcccgaagaaccttcattcatcctgtggatgatgctgggtcttcttgcactggtcgggtgcgtgctgttgtttgtcctgcatgccaatcaactggctgggccacttcaaacatttaatttttggattgttaccgcatcccctgcagttgtctggtttttctttctctgtctgcgtggctggttctataacaatgcatttgacagacacgaatttgaagccggtgaggcagaatatgcgaaacaacagtggatggaatggtctggacgcaatgtcgctgtattacacagcggtgtattgctgcctgcaaatctgacccttcacaattttttagcagccccgccagcgctggagcagagcacatctctgacccgacgcatttgtctgcaagatcatgagacccatttttctgttctgctgacaggattaagccaagttctggcaaagttgcattcagatttagtcccagccgttacgctgctgacagattctcacgatgacattctggtactacaggaggcatttgcgcagtcttggcagacagccatagtggatcgccttgttccacagttgacgatccttacgtcaaggtccttcctttcactggatgagcgaattaaatcaccgacgctggatgtggatttgatcctgattcaccagacacaggggcgggatacgtacagtgatgtgctggcagccctgttgctgacctccgatgatgtcgccacaaaatataatctctcctttaacgcccgtattttgcgtccaatggcacttgacatggcgatttcagaaaagtcactggatacatttttctcgacccagactcaagcttgtgccaccgccagtattgtcggcgacagcgtggggtggggtgatgcattttctgatttacttgcagcggcacaagattatgacggttactggaaacctgaacagctccactggctggagaaatatgccgggcttagcggccctttttctccatggatactggctgcagtagccagcgatatcgtgaatatacaaaaagccgactgtctgatgctctctacagatggtgagcagaaatttattaataccgtgcaaacagggaacggaaacgatgacaacgggtga

SEQ ID NO: 157100 - DNA, 204 bp, Enterobacter cloacae
atgatgttggtagaatttatagttaactccatcaaaaggaatctcaccaacaaattggccttctgttgggaccttaattttatgcgcaacatcattatcccatctatcaccgaatgcgatagattttttatttatcgcaatagaaaaatccaactctctcaaagcaggtggcacagtatgagccactacctcagaagaatatag

SEQ ID NO: 157101 - DNA, 1305 bp, Enterobacter cloacae
atgactgctgaaattgttgtaataaataacactggaattgcacttgctgctgactcagcagtaacgacggagcataatagacttgttaaaatcaataatagcgcagaaaaactattcgagttatcaaaacatcatcctgttggcattatgatttataataatgcaacgttaggcggggcgccgtgggaacttataataaaatcatatcgaaagcagttaggaacccagagctttgctacaattaaagagtatgtaagtaattttgttgattatattaataacaatataaatctcattactgatgatatgcgccaagcatgtgtcataaatcttgttgttgacaatcttaaaggtttaatgagatacatcaatgaaaacaacgtagttaattatttaacaatgaacccgggcatcgaacttaacaatgcaatttttcaaactataacaaagcaagcttttgatcgagaaatcagcatcttgcaagaaaatgattattttgaaggcttcgatactgagaatttccgcgatgcccaacaatacgttaatgatgccatatcaccatatattgaatctatcattactcttgataactttgaaagcttagaacctgaacttcttgaaaaagtcatactctactcgacttatttaattttcaaaattcacgctagccgcacctactctggcattgtaattactggttttggtgacaatgaatattacccttcaatttgcactcttcatatttacggaatcttcaaaaataagttaatgacgcatcatattggtaacaaatcctacactgatgtctcaaacaaaggttttgtaataccttttgctcaagaagatgaagtattgacatttataaaaggttgcaatcccaatattattgactttaacaatagcttgacacatgaggttttcgataaacttagaaattatgttgttaataacgtatttcctgcgttaaacaatcctctattgacgtcacattttgaaaacgagatacagcaactgaaacattcagtgcttaatgattttgaaacaaaattagaaagttacataactaattatcatactgacaaaatgatttctatgcttcagtcgcttggtaaggcagatttggcctacatggcagaatctttagtaaacatcacagcattcaaaagaaaagtttctcatgattatgaaactgttggtgggcctgtagatgttgcagtgatatccaaagtcgatgggtttgtttgggtaaaacgtaaacactactttcctaaagaactaaactctaattatttcaaccgtcaataa

SEQ ID NO: 157102 - DNA, 2217 bp, Enterobacter cloacae
atgaatattaagagatttgaacttactctagaacgaattcagccttcagactggagggaattcgaaaaattagccagtacttttttagcatcagaatttgaggtatttgtcagtacggcttcgaattcaggtgatgggggcagagatggtgagctttataggacggatgaacccacggtagtagctcaattctcagtgacagaagattggaataaaaaaatatacgatacagttaaaagattaaatgttacctttcctgatgccttagtcttaatctacatgactaacagagaaataggagcactaggggactctataaaaaaaaatttaagaaagaatcatggtatatctcttgatattcgtgataagaactggttctgcgaacgattgaatttgagtcaagcgaatcaaattaaggctgaggaattagctaaaggacttgttgatcctattctatcaacatatgaaattattccgaaagttagcgctgaattaagcactccagagtctatagctgcattgacctatttaaacttacaatggcaagatgatataagagataaaggtctaactaaaactgcatttgaagcgatggttcgttctgcgctggtaggaactgatggaaacaatagaataacaaaggatgaactttgctctagaatttttaaaatatttcccaaacactcaactcaagagttatctatacacattgaaaaagccataaaaaagcttggtaaaactgtaataaaatcccacccaaatgatgaatatagcctatcctatgaagatactcttaagttcaatgaattcaaggcggcaaaaataattgctgaaaaacaattaaaactcgctgtagaaaaaataatcctgcaaataacatctaattttctagatcaaaaagaaattcaggatgtatatcagtgcctgcgtaatgttaccgaaaaggttctatttgagagaagccagtcttttgcaatggccgtcgaatcaggtaacctttcggcacttgcagataatgattttaagtcgacaatcatgcaagaaatatctatttccaaacttaaaaagaaaaaggatgttgattggctttcaatattgaaggttggaatcagagaaattcttctaagtgataatccatctattcaacaacatctaagatctttagctgattcatatacgctaatggcatttcttcagataacgcctgacgtacagaaagccgtcgaaaaaatgttttcaaatgggaacctttggttagatacgacaataatattacccttgatttctgaaacattgcttaacgatgaagagaaagttggaaggttcaccaggatgatagcagctgcaactggtgctggcttgaggttatacgtaacggacggcgtaattgaagaagtggaaagacacatgaatcgctgcttaacctgctcacgaatgccaaacagagattggaacggaagtatcccgtacttacttgagcgttacatcttttcaggaagaagtttacattctttctctaattggcttgaaaattttcgtggcccatctcgtccaatggacgatatttttgactatcttcttcaagaattcagcatacataaaagaagcctccaggatgaatatccaaaaacatcagaagagctgagaagagcgctacttctgatttggaacgaaagatatatccgtcgtcgagaaaaatacaatgtagatattgatgaaatgactataacgcgccttataaaccatgacatcgaatgttatgcaggagtattagcattacgaaaccaagagcggacttcaccatttggatatagctcatggtggctgactttggataaacaaactttcgaccttaagcgtaagttgcaagatatgatggtagagactccacctgactctccggttatgagtgcggactttcttgtcaattaccttgcgattggtcctttaagaaggaaagtaagcaagcacgaggaggcaaacttaccccttctgatgatgatagataatgctactaaattaacacctgagctcgttgtagaggctgaaagcataaggaaacaattcctagatttaccagagaggatgataagaagaaatgttagggacagtttggataaagcaaagtcatacattggccctatttccaaggctggaatggaatcggggctagatgattttgccgatttaaggcttacccaaactagtgatgtttga

SEQ ID NO: 157103 - DNA, 225 bp, Enterobacter cloacae
atgaaaatcgagctaaccattgatcgcatgaagaaacttcctgatggagctatacctgcgctcgagtcaaaactgctcaacagactctgcaagcagttcgatgattgccagctaacgctcgagcgcgccagtaatgatggtttgactgttttcggaggcgacaagaaagtggtcgaatatatcgtgcaggaggcttgggaaagcgcggacgagtggttttattaa

SEQ ID NO: 157104 - DNA, 1290 bp, Enterobacter cloacae
atggaaatcgaaaatgagttgagtagagggtttcatgagtctgtaatattcgagttaaaaaaagatctcttgaaactcgaggaggaaccgtcaaatacatcattactattgtcatttcagtataaaataattaaacatataatcaagtgcgaaagcatgattaaacgattaaagtctcatttaatagagttaaagaaaacaaaaagaaaaggtggcttgcaaaaagaagaatcaatactcatcaaagagagaataagaaatgtagatgaatgtgtagagaatcttaagtttaagatttacattttcaaaatgtttggtgatggcgtcgcttttttgtatcttgataagtttgatgttaagcatttttattataatgttgtagattataaccctaaggaattggctggtgcgctgggagggaagaatggtctaaaagaggaatggaatattgttaaggaagcttgtaacaagggatttcgagcattgcttaatgatattacaatgagtatgagacatggggatgtctgtttagttagtgaaggcgttccaatgctaatagaagtgaaatcaagtcaaaataaaaacagtcgcgttgagcgtcagataataaatttacaaaagctaggtgaatttctttcagaggataaggcggagaactttagaggttttcctttgattgctagaatggagttatgcattccagaaattatatataaaaaggaagtaaatgaacagtttgttatttgtcgaagtgaaggtagttcgtgggttaagttggaagaaggtttctatgtaatatcgattcgcgaaggtaatgttggagatgttttgtccaaactaaatgtaagtggagagcagatagcgccattttttttgaatgaatataaaaacaatcaaggttgggttccattaaccccttttgttaatctaataaatcacccaagagatttgtgtgattttataaatggtgacctaacaattatatgcattttggatttggattgtttcaaagagattgctcgcaatgaaggctttgaactcattttcattgagggtgacaattactcaatgttatttaaggaatttgatagttcgctaatttggggggtgtcatggcagatgatgctcagagtccctttagaaatgatgtcaatgtcttggttaatcagggattcaattacaagatttaaactagtgcaagagcaacatagcgacacatttttctcatccgaaattaataacttggagccctcaccgttagaaaagtaccgacatctttttctaaaatga

SEQ ID NO: 157105 - DNA, 1488 bp, Enterobacter cloacae
atggacataaaagactggcttcccgaatttcaagtttcagcagaaacagatcgagatttacagacatatttttttaagctaccggcaatcaaggatgtaattgaaagcagggcttggttagttcttgggcgaaaaggcactggaaaaacagcgatttatgaacaccttagacgaggaaatcctaccaatctaaatgggtttaactccgtatgtctgaactttagtgactacccatggccagcccatcaactctacaaggatgcaatggcaggggaactatcagcttatcagaagagttggatgtatcttttttatattaaagcactttctaagcttatagaaataaaaaacagtaaaggtgaatctttaaataaagaacttaagtgggctgataaatatattaaaaccatttttggtagcccagatccttcactgcgggaagttttattttcaaaaattactaggttaaaagttataaagggtcctagtgcagaactcgatgagatcactctggattctggtgagatttccttagaggaagtagctgaaaacgcccagttaaaacagaagctcagagcaaatgcattcaccctgcttacacattttgaaaaagtgtttaaagataatgtcgggaataataaaatactcatcgctcttgaccagttagatgaaaattggctggaaggacaaattgaggagtatagtaaagttctgataaatcttcttaatgtctgtagaaatatagcgtcagacgaacgtcttaatgataaattgaaagtgattccatttttacgaacggatatttatcattccttgaggtttaatgataaaaataaattattacaagatagtgctatcataatttcatgggatgaaaataatctcaatgatatgtattacgagagaataaaaaaatacaagcctgcggatattcatttaggcgaagagaaggatagaactggtaaagtgtttgaggtgtcgttcgtgaggcagggtactcctccctttaagtatgtctgtcgtcgttctttctttagacctcgagatattattgtctattttaataaaatcagagcgtgtcacaagaataatagctctggtctttacacctcaagcgaactttatgaagcagaccgtgaggcgtctattagtgtatataatgaggtcattgatgaatggtccaatcaattcccagaaattgagaatctgttaactgtccttcaaacaatacaagtcgaaacatttgattttaatgatttcgctgcgaagtgtcgtgatgagtttacagatgtatctgacggaacgatacgtcattatataaactttctctttgacaactctctcattggacaaaaaaaacaagggagatgggaatacgttagcagtttgcccaatctcaaaatcaatcttcagaatgaatttagaacacatcacgctttgaagtatagattacatttaattgaaagccggcctagccagaacatttaa

SEQ ID NO: 157106 - DNA, 903 bp, Enterobacter cloacae
atggctatttattactacgaggatgtattcagaaaagcaatagcagatcttgagtcattttataaagaggaatatgggttttctgtcaaagtgaattattctgataatttgtggcaacatgcttctattgttgggaaaaatgaaaattcaaccattaggttctctcaagattgttgtgctcggaaagtaactgactcaacagagctatttgtggcattattaattgtatgccatgaacttgcccattatttaaatcatcataattattacagatcaactagcgatgaagatgatcgaatcatagaagcatgggcagataattttggttctaaacttttcatggtacttataacctatggcagtaacattatacgtatgtgtgaaatattttctgtgccgatcgatactggtgataaagttaacttaattggatctgcatttaaaaatgtctgcaatatgttttatagaaatgaaagcaaaaagtatcattatcgaattgaaagaatgatgcatatctgttcgggaattagcagttttcttcagttttattgggggagattagaccttcagttaaccttcgatatttatctaaggctttacgctcattcagggatgtacgatataatcgaggctgattataattcctttccagtaagcaatgatgatttcaataaggttgttgacatacatcaacctcttcaaaaaggtaatgctgcgatcactttgggtcttaagaaaaaatataggaaatatattgacacatcattcgttgaagatatttcctttgccaatctatacagggatgcattctcttttagtgctcaggctcaactggaaaatggggaatatcccgaggatttcaaaaaaatgatgctggataagctggagaggaaaaattcgtga

SEQ ID NO: 157107 - DNA, 705 bp, Enterobacter cloacae
atgggttttactgatgaatttttttttgcactctcaaattggcagaatggatggagagaagatcagaataaacgtgacttactggctaaggatttattggatacaacccagtgtttggataaaaaattcaaaagtgtcacctcgccttgctatagaaagcgttttcttcaccaaggtgaacttatagaaatcgttttggtagaccaaaaacatgaaggagtagtgagttggactttagataaaaaatatgctgagatattcaaaggtctttttaaagtagatgctgtttctgcggcgatttttgagcacacacctacagaaagtgaagttgttgtaaatctatgtgaattatggaagaactctgactttattgaagcagtcacactttttcagaagagatatcctgaggatgcaaaacctctttttcatttcaaagatagtcaaagtgaagtgatacttacatcaccactgaaaggctcggaaatcatcgctctcaccggagtatctagtccgtttgatgctttatgtgatcaagctggaatcccggatgattcatccagaaataacttgttttcagaattagttgaaaacggaaactatccgggtgaattaagatacacaagtaaagaaagtgcacaacgaattatagctaatgtaattctaaaagtggaaaatagaattaaagaatttaagcagaatagttaa

SEQ ID NO: 157108 - DNA, 666 bp, Enterobacter cloacae
atggcaaaaccggactggggcgagcttcagcaatggttcctgtccgaacatgccgcaacgcgatatccgctgcagggcattacagccgacatggtgtatgccgtagcaatggcacaaccctttcagggacaactgctgagtgagtgggcggataatctggaatcggacaggctggcgcggatcgtgaatgccgtacgtcggtggtatcttgccggcgacacggtagagaccatcgcacgcagtgttcgcggccacgccaataaagattatcgggacggcgcgctgcagatgagcagggcaaacgccgccagcatcgcaaaaacagctgtgaatcatctggctgccacagcacgcgacagcttcaccagcgccaacagcgatatcgtgaaaggtaaacagtggctatcggtgcgttatttggtttttctggtggtggtttggtccccggttttgatggaggcggctacacgggagatgggggtaagtaccaaccgaaaggcgtggttcacggtggtgagtttgtgtttacgaaggaagcgaccagtgcattgggtatcggcaacctctatgcacttatgcgtggagctaaggggtatgcaaacggcggttatgttggcactgctccgctgtatgggatgcaaggagatagttccgctatacatgtaa

SEQ ID NO: 157109 - DNA, 495 bp, Enterobacter cloacae
atgaaccctacactgagaaataagctggtgggcgccattgttggtggatcaggtgcaatctctattgcagctgtcatgctgggtaatgcggatgggctggaagggcagcgttattacgcctatcaggatgtcgtcggcgtctggactgtttgcgatgggcacaccggtgccgacgttcgccgcggtcacagatacaccgataaggaatgtgacgccttgctggaatcagatctgcgtaaggtggcaaatgctatcgacccgctaatcaaggttagtattcctaagcctacccgggctgcgctttactccttcacttacaacgtgggaactggcgcatttaacagatcaacgctgctgaagaaactgaacgccggagacgttctgggagcatgcaaagagctgcagcgctggacgtatgcaggtggcaagcagtggaagggattgattacccgacgcgagattgagcgcgaagactgcgagtggggccagaaatga

SEQ ID NO: 157110 - DNA, 423 bp, Enterobacter cloacae
atgagaaaagttgtttttgcatcactatttttggtttgttccgcacatgctactagccagcctacgatgttagttttcaaatgtactcccaatcattctaaaacaagcaccatcgtcacttggcaggacgttaaaaaagaagacggatggcatcgatatgccagttggaaagacaaggtggggcagcactatggtatcgaactttatttcaatggttccgtacctaatgccgatggtcagattgaaaatattaatgttttcggcaatatggatagccagaaaaaattatctggccctgctatttccatgatattcaataaaaaagcaaagcttataacctacaaaatcacaaatgattcagtcggatcggatgtacgcaatcctctggaacatggtgaatgcgtcctgagcgataaaagttaa

SEQ ID NO: 157111 - DNA, 306 bp, Enterobacter cloacae
atggaaaaggacttaaagccagaacaaatcgaaatcgtaaaccgtattgtcattgagcagatagaccagatgcaggctagggtagccgagattgttgctgagacggagagaactgcgcatcagcagttgaaggatcacgggattgatatgacggagttttatccggcgaataaggattttttgatggtgacccttgttcagcacttgattgatcaagtgcatggcggcgatatgtgtcttgcccaaaaggtgatcacgatggaggcgagacggctgaacataagcatacatgtcgacgctgattga

SEQ ID NO: 157112 - DNA, 2184 bp, Enterobacter cloacae
atgactgatactcctcaatggctgcgtgacttctttggcaacggaaatttactgaagctggacaggttgctggaaaacgttgaaaacgcctaccctgcggacttaaaaaccgtcttactgccgctctacgagagcgcgattgacgctcagtggccgatcattctgccctggtgcgatgctcatcgctgggtattttttgccgcggcagaaacggaacgcaccacgctggagctcagcaatgtgttgaatgccaggctggggtctgccgatgttattgccgatagaagggtgactttcgtccccgcgcagggagcgacatcgctgtctgaaacggctctgctgacgcactgtccggccggatttatccggatcgaattactgcccataaagcagaatgataaaccagcaaaagagcgggtcttcgccgcgctcaaagacgttatcgccctgtttcgtgacaggccatcaatcgtacgcacggtcaaacgcccctttgggcggatcttgagtgattttattctagcgaatagccaaaaagacgaagccacaagcgacgctttactacaggaactgaagaacaacggcgcgctttcgcgacgcaaccttatgctgctcgaactccagcaggcgggtaagttagagaaatgggacacgctgctgaatcacgattcgcttgctgatttggttcggggacgcattcccacaactctgatgcggatgctgctgaaagcataccagcagcgctattttacacccgacatccgcgggtatccgcaggcctccccggcggatcttcgcccgcaatgtctggcgctacaccctctgtttacgcagatgccttttttatcccaggatgaggctgactttgcggcgtggaaaacctgggccaccggcgtgatgcttattggcgaagtcgacctgctcaacgcgttaccagaacgcctaaaaaccgactggttgagtggattgcacacctgggccagtcggccgttcaacgttgtgagtccgtcagcggcgacagcgacggcgtcggtcccggatacgctgcaacagcttgccgcatatctgcaaacctccctgaccgcaacgcaagaggagattaccggctacgcacaaacgctccacacgcttgatcagcagttgatagagcaggcgatggcggtaccactgctgaaaacactcatcgaggagatccgccatctgaccaatccgcaaatcgtgggctgggatatttgtttctcccgactatgtcagtcagaagtcgacagcaacagcctggtgcaactggtcgcgctggaaagtgaaaactggcccgccgactcgttccatgaagcgacgatgctccagttactatcaagtcaggttccaccagacgcgttcccgatcctgcgtaacgtgatgcctgcctttattgaatggcttgaacgtcatcagttcaatctgagtagcacgacgtggctaaagtggctggatgttcttgcgatggaacaaagcgtcagtcaggcggatatcaagctcgccacaatggcgacggaccgcttcctacaaggctctgttagccaggaagcgtatcaacagtccggtgccatgctggaactgatcgtcgaacgcgccagttcattccgcaacctgccagcgctgggcgagttgatcgaactcttccttgatgctccggtgcaggatcgggcgacgctcacctcgctgtggctcagcgttcagtcttttgtgagcggaatatgggcgcgattggatccgactactcgtaccgtgatgcgcaacttggcgactgacgtgctaggggaaggtgcagagcgcgtatttccggctgagcaggatagctgtaaggcagatgcagaagatgaattgccggacttatccggagccagagtggcgatttatagcctgacagaaggcgcggcaagacgcgcgaaacggatgctggaaacactgttccccgggatcagagtggagatcagccatgcgcacactgcaaccgacaagttgattaatcaagcaaaacaggctgattacttcatcttttctgcaggcagcgccactcatcaggccttttacgcggtctcagcacagcgcagagatttaatctaccctacgggtaaaggtgccgggtcaatgctgaacgcgtttattgcgcacgttcagcaggtctctgcagtagtgacataa

SEQ ID NO: 157113 - DNA, 531 bp, Enterobacter cloacae
atggaagaacaacgacaaattttcctacatggcccactgggccagcgacatttgcgggaaattctaagcgcgcagtttagtggcttgatcctctatccagaaccgatctggctgatctcaccgtggatgagcgactttgacgtgattgataaccggggcggtcagtggagttttcttgatccttcatggggggcccggatggtcagcttccaggaattgctcgccaccgccgtcaacaatggctgtccgctacgcatcgtgacacgtgaagacacgcgcagcgtggtctttatcgagcgactgttgacgcgcttatcgcccgatcacgacttgcaatacctatatcacgagaacctgcacgccaaggggttgctgaccaaacatttctttctgaaaggatccatgaattacacctggagcggcgcaaacctgaacgatgagcatctgctgttttcaaccaataatacggtgatttcagatgcgttgattgaatttagcggccagtacacctttggagacacccatgactga

SEQ ID NO: 157114 - DNA, 4437 bp, Enterobacter cloacae
atgtctacggctgatttgtcccacctgcaccaagcgctggatctgctcgaagagcgggaagcggaactgctggtctggggagatacggatggcgcatttacccatgccgatatcatctcgctctttacccggcaccttccgtacgaagatgccgagtcgttactggcagaactgcagaatgctgccatgctcttcagcgtcccgaccagcaaaggggggacgcgctaccgcacgcgtatggcggaatcggtctacctgttccgccaccagcgtcaatggttccgcggtcaggcgcttcagcgagcccggacgcttgtcgccgactatcgtttcgtccgtcgcccgcgcaactatccgaagcgggaacttccggcgcaaacggtgctgagcaaatgggtcgacgtcccgtggatgaacgagattaaacgccaggcgctttcccgactgatcggcgacttttccattgccggctttcaggaacgctcaaccgaacgtattttgcgcgcctggcactttcatagtcatcatgctcacgcgaaagaagccaccgggaccattgtctgtgccggtacagggagtggtaaaacgctggcgttctatctcccggcactcacctcgctcctcaatgatattcagcgcgacaacgcgcagcgggtcaggacgctggcactatatccgcgtaaagaactacttaaagatcagttcatggaaacctggggcaaatgtcgtgaactcgacaatcaggccctagcactggcaggacgcaagatccgtattggttcttttttcggtgacaccccgttcaaccatcaatacgcaacgaaaggtaaagacaaggatatgccctttgatttactccgttgcaccacgccgaaatgtccggggcaaatgcactggaaagcagaagatatcaaagcgaaaagagagattcttcgttgtagccactgcgatcacagcgtagacagtgacgaagtgatcctgacccgcgtctcgctgatgaaaaacccgcctgacatcctgtttactaccaccgaaatgctcaatcagcacctcgggaataaccaatcgaatcacctatttggcgttggcatcggcgtaacaccgccgccggtagtcctgctggatgaagtacacacctatgtggggaataccggtgcgcagacggcctatctgctgcgacgctggatgcaacttgcgcgcagtcgcccccattttgtcgggctgtcggcaacgctaagtgacgccgaacgtttcttcgccgatctggttggcgcgcataaaaaacatgtagctcttatcgaaccgaagttccacgaaatggaagatgaaggggctgaatatctgctggcattacgcggtgatccggtctcgcaaaccgccctgctgtctactactatccagaccagcatgctcgcccggcgtattctggatacgaaaaggaaaaaatcacgcgggacatgggggcaaaaaaccttcgtcttcaccgacgatctggatatcaataaccgactttatcatcaactgtgtgacgccgaaggctggcggtcgcgtggtcaaaacttatacgttgctaaaccgccgttggccgctcagcgtctggaaacaccgcaaaacagccatacgctgactctggcaggacagaactggcgtatcgcgcaggatattggtcacccacttgacgaaaacgaccgggccatcgttgcccgaacgtccagtcaggacgtcggggtcgatcctagagcggaagtggtaattgcaaccgcgtcgctggaggtgggctttaacgacccctccgttggcatggttattcagcataaagcgccacgtaacgttgcctcctatttgcagcgtaaagggcgtgccggtcgttcaagaactatgcgtccgtggatggtcgcagtcctgtccgaatttggccgcgaccgcgtcgtttatcaacgctatgaagagctcattaatccagagataaaaggacagtcgttgccgatgggcaacattcatatccagaaaatgcaggcggcaatggcgacacttgactggctgagcatgaagatccccggaagtaatatctggtcattgctgaataaaccgcagacaaagcgagagtctcttgaccatcttgatcgtatgttccacctgattaccgccgtgatcgaacaacatgcgtggcagcaggagttggaaaagtatctgttctacgcgctgcgcatcactgacgagcaacttcagcgtgtactgtggtcgccgccccgttcgatcatgatggagttgctgccgacattaaaacgacaactcaccacccaatggtcgcggatgggccaaccggaggctgaccgttcgacgggacgttccccgctgccggactttattccttcagcgctattcagtgaactcaatctgccggaactggagatccatctcgagcggaagttcaagaaacgtgaacatttgccctttattcaaggtctgaaagagtttgcgccggggcgcatttccaagcgctatgccgtttactccgacaatgaagcagactggcttatcccgaacaactttgttccggcgatgaattgcgtttcggatgttgattttgaaattgagcaggctttcggcgatacctggcagcccgagtgtgtcattgagtatgaaggtcagccccctattagagtcattcgcccgatgcaggtgcttacgcgagcgctacaattcgagcaaaatctcaccgagaaaagcaactcgcaactgtactggcatacccggtttaacccagacgatcaggccgatccgcttcccattcctgccggcccgtggacggacaccctccgctccattacgttctttacccaccagaacatgacacctctcaacgtcacgcgttacgccacccacgcaacagcctcattacgcaataaaaccaagcaacaggcgcatgtgaacttcaggtgggtcgacaatggcgagcctgtcggggttggcgtgcggcagtgggtggatggcgcccgactcagatttaatctgccgcccactttgctgcaacgcttccggcatgacccggccattcagcgcgcactgcgaacgctctatttccagcatcggatcaaacatgaaccacgcttcgaatatgacacgtttaccgctgactggatctacgagtgctacctagcggcggttacgcgggaattggtcacacagtcgtctctggcagactctatcgcggaattaaaaaccccggacggccgacgtcgactgactgatatcgcggacacactcttccaggcagagaatatctatgaaaatagcgaggatggtgaagacgacgccgaaagccaggaactgcagcaacatttgcgcaacctgtttaaagagaccgacattctggaaatggtggacaggcacagctcgatcctgactcaggatctcagtgatgatgtcgattttcaggactggctacagcatctgctgacaacgacccttgccggagcggtcaaacaaaccagccacctgttgctgccggatgtcgatgaacgcggtctggtggtggatgccgaactcaacgacgaagtactggacatctggctgaccgaatcagaacccggcggctgtggcatcattacccgtctggaagaagtttttcatcaggatccggtctccgtactgaatctgtttatgcgtagttttgccgccagcgattacgagcagatcgactacgacctgttcgaaatgctttcgcggctcccctcttccagcgagctccaggaggccttaaatgcgatacgtaaggccagcagccatccgcagcgccgtgaggctaacgcccacctcagagcgctgctgaaggcgcagggatttgcactcagtcacagttttatgtcggtgctgcacactcgggtactacgtccgggcagccaggcgtcacatgatgcgcagatgcttgcatatctcaacgcatggcgggaactggaagacaaagccggatacgaaatcgctctgaatatttttgcccatactcaagcgactcaagaactgcctgacgccagtgtgattaaagtttttgagcgcttttgcaaaattcagggaatgctctggcagcgcggcaatgccatccgtcagtcggttctcagctattacaatccgtttaagtccggtaacaacctgactgaacgactgcttcttagctcactgtttcaacagacggcgtgcagcatcagcatcagcgagagcgactggttagcgcagttacatcacgccattacccaacacggctttgcagaactgcatatcccgcgcgaggcccgccatcgtattgtggaaatgatctctctggtgcaggtgaccccgattgagtactttggtttgcatctttatccccgcgaatccgccgtggattatcaggatggcaatctagtgttacgtattgaactggccgaagcgctgctgtaa

SEQ ID NO: 157115 - DNA, 849 bp, Enterobacter cloacae
atgaccaccttgcgccaacaactggctgaaatgcaaaaagaactcgatcttagcgttcaggctggtaaggcctcacaaatcatcgataaatgtaatctggtgtgcagcaaaactaacaccattgccgataagtttgcattgcttaaacagcaatatcccgcccagcaacaactcccgcggggcattgcggttacctggaatgacgagcagcgtagcgaactgctcactgccgcgaacagcgtcaaaagtctcaagttgcagtggggacgctggctgaaaaaccagtcggtagacaattctggcgaggaagaaaaccttgcagatcaggaagagtcgccacaggaatccctagatgagactctgaccgcctcagaggaacctatagcttacgacatcattcagaatgattccttgaccgattgcgtcagccaactcggcgccctgcacaaggacctaagcaaagaactgaaagatgcctgggatacatggctggaagagttacatcagcaggttcacgtcgatgacaaaacgctgaatttccagaaaaatgctaacaaattagacgatatcgcctccgactatgagcgtcaacgtcaggatttcgaaaacttaacgcagagccaaccagtcaacgatgaaaagattctccaaatcaaagcgctcgccgaaaaactgtattccctgcgcggcatgatgaaaacggactggcctgacgtggtgcaggcatttttcaatcgcattaatggcccgcagagcctgcgtccgacgttaagcgccctgacgcctgaggtgcttgagtggttaagggatgaagagatgctggatgagttcgtgatcacaaggaaatag

SEQ ID NO: 157116 - DNA, 3207 bp, Enterobacter cloacae
atgagcatgatggagtactggccatccaagagaaatatcgtccaatgcattcgcaatgaagcagaagaattagaggatcatgtgcttctggccgtgcatgaaccgatgctactgacccgacgcgacgtcaatgaaaatcataaaatattgcgtgacgaagacctgttccagcagttacttcatacggagcgcgccatcccactgattggccgctcagggatggggaaatcacatctggtgcgctggttagactgccggttcaacatgtacctggcggaaaacgaccagagcgagcaatgggaaattgtccggatacccaaaaactccagtctacgacaggtgcttttacgcatcctcaaaaacttgacgggggaatttttcgacaacgcacgcatgcgcgttaatgaagtaacagaacagtatccggcgaaagatctggcagacctactgttgaccatgatggcccatcagttgcaggacatgcaaaaagcggtcatggaagaaggtcaaacgctgcttgcacaaggtaaagacattccagcagaccgactcgcctatatggaagccatcattgaagaggtggaaaacggtatctgtgatctgatcaccgaccccaacttcaaacagaatcttctgaagccgggccactgtattttcaaacttgccagtcggatgagtagtggtctggaagaaggagaagaagatcatgataaatatgaacttcttccggaagacctctattttgtctttgagcctgacgatctgtccgcgcgtgcacgacgctatcttaaccattctcaactgcatgagtcagaccaagtggaggcgcgtacccgtgcagcgcgcgtgctcaatgaagccatgcatacctcgttgaaatcactcttcaagcgcctgttcaccttcaatggaggatcttttcaggagctttttcaggaaatccgcaaggagtttctgcgacttaatcgccgtctggtgattctggtagaagatatggcggcgatctccgccatagaagatgtcctgatcgacagcctgatcgaagaagcggcacctggcggcgtgcaaattctctgtcctgtccactcagtgattgcagtcaccgacaattatcccggctataaacgccgccaggaaacgttaatcacgcgtgctggctacgagtgggttatcgagaacgtcgataaagacaataacgaagatcgtattgtctcgctctgtggtcgctatctgaacgccgcacgcttgggatcagaggagttaaaaaacagtcctgggcaaggtaagccccagtggccacctgtctggcacagtgatgagatccccaatgcactagaagattttggttattctgccaataagaaattcccgctcttcccgtataaccgcaatgccattctggcattggcggataagcattgccgcgacagcagcggagagttgatttttaacccgcgcacaatcattaaccgcatcctgttagatattctgcgcgattgcagaatagaagcggaaaaaacacagttcccgccagcaaatttcgctggaattcatgccgttcccgagatcgaagacaagatttcacagatggttgtcaaccgggttggcagttcggtgacgcttgccgccatctggggatatggcattgattcctttgatgaactacgcgaaaaactgccgggcagcgttgcgagtgcctttggcctcgatgaactagcagcgcaactgaatggcaaaagtcccaccatggagtcggcggaaccagcaacaaagaacgcacacgaaacggcgggcaaaacaggaagtacgccggcgggtaaaaagattgacaatccggagttcaaaccgaaagaagaggcaaaatacactgccaaatccgaactgccctttatcagggcggtccgtgcatgggtgaatgacaatgtcattctgccgcaggatgttgcccgtgatttgcgtgctgcactgaacgcctgttatgaaattcatgcacagccagagttgttcggtatgtcttctcggccaccactgaaagaaggtcgttttacgttgatttcactgccaaaagcggcgtctgatccctcaagcattattacgaacttttactctgagcaggacctgaccgatccttcccgacgggtcgatgtgtataacgccgcagtagccctgttacgtatccagcattacgccggtttaaagcaaggctttaattatccagaggcacaggaagactacactcgctatcaaaacttcatccagtggtgggtgccgcaggctacggaaagcgccattaatcacttccgggcgcgtaacttacaggatgcgctgaaaaagcatctgcaaaaagctctgctgcttggcctggtaacgggtaaagaagaaccggcggagatcgtcaataccctctgcctcacccagaaaggtgtcgggagaaccgaagggaaaagtaccggtcgaacgctgacgacctctccttccgagatctgtttcagagggattgaggcgaccctgcatccgcacgccagcgccagagtcgccgaagccagggcggaggcgctcgtaggatgggatgatgccagaaaagcgtggcttgaacaggttgccatcactgagcaaggctcaggcttgggcagcagtcgtgcgctggatgcagatgtaatatattccgcgcttaaaaccgtgttaaaacagccgattggtgcggaaattgaacgtgcggcgctctccgtcaaacaggaacttgccagcacgctaaaaaatgttcatctctttgccaacattaaaggtagcgacgatttccttagccaactgaacgactggcagacgtttattgagactgtgcggaccgagcactatcccacaggcagcgctcagtacaaaccatcttcgtggctgctgggtgaaattgaagccctcagaaccgacgccgaggagagtctggcgactttaattgcgttactttccattgaaaaacagaaagatagtgcgaaattgtggctagagatctgtcggcttgacggtgactacgtttcaagaatcagcagcgtacttgcgcaatggcaactggtacaacccaagatcgcgttcacactccagcagatgaacgccaaaggggatatccagcaactaactcttgctctgaataaagtgaatgaccgtctgaaaacacttgtgagcgatatcatcgcctctggagccgatcaatga

SEQ ID NO: 157117 - DNA, 876 bp, Enterobacter cloacae
atgtcaataattaacaacgcaaacccaggaagcggactgatactgcttcctttgattgaacgcgttctgcaaagcgcactggaacctttgtttcaggacaccctgctcgtccgctatcgtcctgataacctgcccgctaacgacaacgcgtggggaaaattaaaagagaacctgaacttctggtgcaatctgggactctggccgatgctcgacggaaagatgttaccgcttgaagcaggtgtgcgtccgttggcgcatcggttgcttgcctgtacgattgatgcttgtcgtgaaaacggcgttgccaatgggaatgaatgcgaaccgctgtggcgggtactgagttgcctgttgagccttcagcaacactcgctcgggggccaggaacctctctcccctacgattatcaccaacaaagtgcataaatggttacccggcgaaaccatcaataccaacaccgaaaaactagtgagagaatttggtcgttttctcggttttctcgagttaatgccggacggaaattatgtcaccgaccctacccgggccattcaatattttctgccggagatctttgacgatacgcgtacccttcccgccaaaatctttatggcaaacatggcggaggtcatgccaatgatggacggtggccagttcagaaacgccgttcatgacgtgatgcagcaggaaaaagactgggtcgcgccggaaggtgacaatatctgcaccagcacatccgttgcgctgcaacgacttgaaattagtaagcgcattatcctcgccatcggcagtgatgataaagacgccttatcactccacttacctggcggtaaaattcgccgggttagccaaatcacgctaagggaggatgcagaatga

SEQ ID NO: 157118 - DNA, 2481 bp, Enterobacter cloacae
atggaagaggaatggtcacgcctgcagcaggcgctaaccacctgttttagtcaaggggtcacctttaaggacggcatcgaaaatcagtttctgaacagactgattcagatcatcaccgatgcctcggcaggtcatggtgatatttttgccggctacgccgatgcgttacgtgccgctcacgcgagtggtattagcgcgccgtggctacccctgccgccggaactggccgacgctccggcgcctgagtggggcatgacaaagtcgcctgccgtgcaacaaattcaactggctgaagaggcggacctggcgctgaccagagccacctatcagcgtaagatccgcaagaacttgctgcgccccgagaccgatccggcactgaagcgcctgttacccgaggagccctggctgactcactatcagggattcggtcaacaggccgccattcggacgctgctaacgtctgataataactgtacattgctggtgaatctaccaaccagttgcggtaaaagtctgctcacccaactccaggcgctcagcgcaccgacaaacaccctcacgctggtgatcgtccccaccgtcgccctcgcaattgagcaggctgacgacatgcaaaaactgcttcgcggcaccgaccaagatcatggtggaagttatgcttggatcggaggacaagatcagccctcgcgtcaggcaattaaggaaagaatcaaagcgggaacacagcgtgtgctgttctgttccccggaatccgttcgctcttctttggttccggtgctgtttgagctttccagactgaatatgattggcgcgatcgtcatcgacgaagcgcatttgatcgatcaatggggcgcagagttccgccctgactttcagctgattgcccctatgattcgctcactgaaagtcctaggaaaatgccgttttcgtacgctgctactttcggcgacttacagcaaaagcacccgggacattctggtcgagcagttccatgatgaaaacagcgaactgattgaagtttcagctaattttctacgcccggagccggaatattttgtgcatcatgaggcaaatgaaaacgcgcatcgtcagcgggtcgaactacttctgatgaccttaccccgcccgctgattttgtattgcactacccgcgcagatgcggaaatgtggtctgcccgtctgaacgaactaggctactggcgaaccggcatgttccacggtcaaattgacacaaacaatcgcaagaaattgatttcaaaatggaaaaatgaccatctcgatatcatggtcgctacctctgcttttggggtagggatgaataaaaaggaaatccgcagcatcattcatgctgctattccggaaaatatcgaccgctattaccaggactgcgggcgtgctgggcgtgacggcagatcctgccaggtgcatctggtatggcataaggcgcaaatgaaaacggcaaaatcgctggccgttgagacgctgattggcgtagaaaaaggttttgcccgctggaaagcaatgtttgacgatcgtaagaaaagcccgatcgctgactacatgatttcactgaacaccaagcccgttcatattgatcaccaaggcgataaaaacgaagcctggaatcgtcggacattgctgttaatgcaaagagccggactcatcaaacttgtctttgctgatccgaaaattcctgacgacctgcgagataatctggatgacaacaacacgcaactgattgaatggttcgaaagctactataaccacgttcatatcagtcactgtgacgatgcgcattattcagaagcgcactggaatacccatgtggagaagatccgccagtccgagttgaataaccgccgggcagcctttacggtaatggaaacgtggttggaggatcctggcaaaccactgtgtaaaattctgcagaaattctatgaatatcagtgccatcctcccgagttaacctgtggaggttgtccaggatgtcgccagaaagggaaaggggcgttttcgcctaccgtgggcacagatgtacaaattttacgttccgagccgaagaaaaaagcactcttcgcaggtgcggaaaagaaagtttattacaacgaaaatatgaagttacattcgttgttgatggaacttcgtgtgactttgcggtcgctgatcacctctggcgaatatgtgtttattcgtgcagacaggccagtgttcctgcaactagagaacaacctggattcgctttcgcatttctggagcgcacagaaaatgacagcacctgcatcggatggaccagagatagtgatcatccctaacacggccaatgcgttcccagacctacccatgacgcgctttgagcgaattattattgcacctgagcatctcgccgatcctcagttcccacatcgaacatggtgcgcaagcgccactaatgcgctgtcgctggacacttttatcaggcaactacaacatgtcaataattaa

SEQ ID NO: 157119 - DNA, 3111 bp, Enterobacter cloacae
atgatgagcatattaccgatagggtcgctggttagttctgtgcattttgaaggcatcggaaaagtcgtcaacattgatattgagacaaacaatgcaaaagttgctttttttgagtcaccggcccaaccatacgcacggcaaaaagaagtttctttagaacaactcatccccacgataccgcacgaagagacggtaatttattgcattgaaccacaaagcaaacgatgggccagagctagatttggcggttcgcgccccaaaggggattttctcgtaatctttcgcgaagatgatagtacgactttgccaatcgacgaaatttttgttctgaacaaagcgccagataccccagtaaaccctgctgatttccttgccctccaagctaatgatgctccgttctttttccctcaccgccaagcctttattgaaacttacatccagcaacgtgctgcctgccgagcaatggcatccatttccagtagtgccgttgaacttgagccccaccagttggcggtggtacgtcgtgtgcttcaggataaaaatcctaagtatattctggccgatgaggttggtctggggaaaaccatcgaagccggaatggtcgtccgtgaacacgcgttagaagcaactggccacgtcagcatgcttattgcggttccggcaccgctcgttaaccagtggcgggaagaactgggtgaacgctttcaactgaaacaacttattattgatgcctcgacggctctcgcaggtttgcgacaaaatgaggtcacagaaggcatcgtgatttgcacccattgcgatgcctgtaccctgattgaacggggattcaacccttcgcttatcgcggtcgatgaggtccaccagattgcctcctggccatggtcaggagataaagatgaacgttatgacttcaacctgatcgctgagggttgccggaaagcccactacgttctgttactcacggggacccctctgcatgggcatgaaaggaacttcttgtcgatgctgcactgtattaatcccgaagcctacaaagtggatgagacccatctgcaagactttatcgaactggtcaaaaatcgtgaaaacctcggcgggatcttctcggggttagtaccttccgtctcaaacgtcagcttacgccgtaatctggaaacaatgcagcaccagttcccagaagatactgttctgatgacgctctgccagcaactcatcccgcttattgggacgttctcccccaataccccggagcgtgaagaaaggatccgggatattcgccggcacctaggggaaaactatcgcattcatcatcgactgttgcgtaaccgccgtcaggtttcactcagcttcgatgaaacgaaaaacctcaacctaaaccttctgtttccagggttaaatggagcagctgagtgccgctggtattgcgatgggttagcgttagacgaactgattgatgagtatcgttcattatctttactgccgcagaatacacagtgggcaatgagtgaagacacgtacctcttctggattgacgatctcctatccagcccactctgtgtcatgcaacgcgctaaagtacatttgggtgaagcggaacgtactcaggaagaacgagatctgttagaacacattgtttcaactgcaaaaaatgaacttcaggccattgataacaagcttgccatcactctgaatgagtggctgcaaaagaatccgacaggaaaagccatcgtcttctgcgatcgtccggatcttgcccagcacttggcaataaagctcgaactgctgctggagtatcccctggagcgctatcagccgggtcaacccctgatgtacctgaaacccggcagccccattcggatcctgatctgtgataaaagcggcgaagatggtctgaatctccatgggggtctgcgactggccgttcactacggtttaccgcgctcttgtagccgtattgaacagcgccttggtcgtctgaacaggtacagtgcaaacctgaaaggcgtaaaacccgtccagagtctgatccttaaaaatcacgccgaccgcggattacgcaacgtgtgggccagcattctgaaagacagcattggcgtatttaataacaccatcgccagcctccagttcgtcctcgacgattatctggaaaatgcgtggcaaaatgtctaccaagaaggtccggtggcccttgaacgtattgccagcgaattccctggcgaacagggcattctggccaatgaaacgcataaaattaacatgcaggaaaagctgctggcgatggatgacgagattgcagaggcggcgatttttgcgcaacagataagcgctgacgatcatcttgcagtagcgcagtgtaatgcgctgacaagttggatcacgcgtgcgctacgttttcgcgccaccggcaccgcagaaaaaggtatcaagtttcagttcgaactctctgaccgcagcacagggacactggtcgattttaaaacctttctcaccacctgcatgctcagcttcgataaagaagggggtaacccaccgtcaacgcatctgatgagcgctgaacgcattccggcgatcgacgggacaaccgtttatccgctgcgttatgggcagccatttgtcgatacgatctggcaactgttaaaccaggatgcccggggcagttccatggcggtactgcgggtgctcccaaagccactaaatgagcccaattacttcttccagtctacctggcttgtcacccatcgccagacgcaggacacctacgcccaacgccgtatcgcagacgagttgtaccccccgcgtattgtgcaacactggctgtcctctaagggtacaccggtgacgaatccgcagttgctggaattgctcaatagcgagtacgccaaacatgaaacatcgcagaaattctatgcagatatgaatctgcgccctaatctctggcaagaaattgaagagcttgtctcaccggacacctggaaagagatggtggaacgagtctatgccagtgaccaggaacaacaacaggcaaccttcggcgaacaagccagactccagttaatggccgtcaaagccgtggtggtgtgcagcagaaatctactggaggaaatcgtctga

SEQ ID NO: 157120 - DNA, 1050 bp, Enterobacter cloacae
atggataattctctcagacgtttgtcacctttattgaaaagtgccgtaggaacgccaggtaaagcaggaaactttcagcgcgacgtgattatcgtgcaatacctgtttaatctcattaagcctatcatccagtatgacatcccagaagatgggattatttccccgacattgatcagaaccatcagccagtttcagtccattcatttgcgtttccagcatcccgatggggttattgagccagaagggaagactttccgtggattagttgctgctgcgatgaaatatccccttgcgtctcaacaatcgtctttcacgtcttcattttttaggcaaccttctgccaatgaaaatagcgtccgtcagctggttaacgattatctgagaaaagagcgctacaacgtagcagatgaaacccttgagcgaagcaagctcatggcacctggtattgatggggctgtatcgctgacggaacaggactttactgaagcctgggaaaatcttaatcgtcgggtagaactgaatatcatcaaagctttttctattgtggagtcgggcggacgatctgggtttaatgctttaaatctaccgattattgcgtatgaagggcatattttccgtaaatacaccaaaaggaaatacgatcaaacccacccttttttgtcttataaatatgtaaagaaagcgggtccggaatggcaaaaaaacaatatcgaccagctttctgcatggaataccctggcgaaggcttacgcacttgatgccgaagctgcgataaaatcgtgttcatgggggatgttccagattatggggtttaattacgaatcgtgcggttataaagatctcggcacatttttaaaagatatgaagtcaaatgccggtaagcaattaaatgcttttttacatttgtgcaataagaacagctcactactgtcggcaatggtaaataaggacttttataatatggcattcaactataacggaagcgatttcggtgattatgacgttaaaattcgcagaacgtatgaaagcctggagaaggggcggagatga

SEQ ID NO: 157121 - DNA, 957 bp, Enterobacter cloacae
atgatacctgaagaaaaggcaaaattaatcaaagcaagactaattcttgcacaacaactgctagaagaagctgacgtattacctggccttgaaggctacaactttagtaaaccagacagtggttctgatgatcctttctatcatatgcggcatgaaagagaagccctcgtggtttaccttctcctgacttgttttgaccttctggggcaatcacaaccgcacgttccgtttatgaaatggctaacaagcaacgatccagtacttgttgaggaaaggagagttgcagcggaagggcttgactctgaagatagtgattatgttgctcacgctaaagggttgcttgaaaactataatagccatcatggagcaacagtagccttttattcaggaattgatcagcttaccgaaagtgccagaaagcatttgctgtctacagtagatgttgcaaaagaggatccggacgctagaaaacctgaaaataaagataaaaacatcagttactgtcgaattccaatcaatgatgatgcgaaggtactaagactacagaaggcgtatttatattcaaaaagaaatgaattcacacatcagctctctcagagacacacatcatcggtcccgatgatgtcaggttttggccgtaatcctgatttcagcaatcctctttcggaaacaggagcctcttgggggatttttgtttcagacgggaaagtaaattacagcggcgtcaatcaggaagtaaaagataaatatgtttatacgctctctgactggccgtttgtcttatttgaagttctatattcagcgcttggtgaagagtttgatcgaacctcaattaaattgaagttctttattaaggttataaacaccgatgaaagcactatagaatattattcctctgttgctcatgaagacgtaacagcacttttgttacataagtatggcatcactaaaaactga

SEQ ID NO: 157122 - DNA, 666 bp, Enterobacter cloacae
atgaacgtaagtgttgcaataatggctgaaattcatatcgccaagcagtatgaagctgacggttacactgtagtacgtaacccaaaacaagatctcataccttttaatttagagggatatattccagatattctggctaccagaggtgatgaaaatatcttaatcgaagttaaaacatccaaagcacgagttaataccgaaaaactatttaaaattagcaagatagtccagtctcatcctggttggaagttttcagtagtgacgataaatgaagatgagatcaatgaattcaaaaaatctattccagagttagatattgataaaatatcacagacccttattttaataaaggaaaatttaaaaaactcaaacttatctatttttttagttcctcagatttggatttgttacatttcaattttatctttgcatttaataaatgagggagttgaaatatcaggattatctgacttaagcatattaaactcagcttattctgaaggtatacttgattatcaagattttgaacgctcgagagatttcctaagtttaaggaactttgtttgccataatttacctggcgacgcagacattgaaaatgttgagaaattctttaaaatgactcttttagctttaaataggtataaaaaccaaattagtgattaa

SEQ ID NO: 157123 - DNA, 411 bp, Enterobacter cloacae
atggctaagcttgtagagtttttgatgccaagaatgcctgtatcgcatcaatgtaaaaataaagtcaacaaaaaagaatggatggagtacgtttcatccgagggagtagtcgcctggaatgggcaggcggttataactgataagaaattgaaatttttgatggtttaccttgctgatttttcgatgccaggggatataaataattttgtaaagccggttcaggatgctctgaatgaaaaaatatatagtgatgatgttttaatcaaagatgtatcggctcatatgcgttttctaaatgaacctaatgatcctgccggacttccagatatgctaggaaaagcaattatcgatgggaacccctgcgtgtacgtagctatctatgattcaattgaactgagcgaggttgtatga

SEQ ID NO: 157124 - DNA, 903 bp, Enterobacter cloacae
atgcaaactacaacactctatgtcatcggaaatggcttcgatctcaggcattgcatcccctcaagcctgtggcattttaaggaattcctccgggtgagggattcggatatctaccgggacgttgaagaatatctacccgtgaatgatgactggtgtgatcttgaaactgcattagcaggtcttgatgccgacatgcttgtcaataatcttggccatttcatgagctcttacggcgatgaggactggagtgatgcaggtcatcatgattttcagtatgaggtggagcaggtagttaaacgcctttctaagggcctgcgttaccaattcggactgtggatccgtcaattgccgataccctcgtgtacaaatgcacctaaccgcttgactacgctggattcacaggcaatgtttctgagctttaattacaccaatacacttagtcgtgtctacggagtcgaaccggagcgtgttcttcacatccacggctctgcagagacgagggacgatgatttgattctggggcatgcctgggagccgggatcccgcccctctctcaacgaaagagccgatattgcagagattgatacccggctcatggaagcgaacagcatcattgatgactatttcttcgcaacttttaagccttcacagaagcttattgctaaacaccggtttgtttttgaggagttgagcgaggttacgcaggtgatgattttaggccattctctgtctgaagttgatgcggcttatttccaggctctttttctgcagaaatccgttgcagcggcacaatgggtgatagcgtgccgcagcgaagaggagtgggatgagaaatcccgtaatcttgaactaatggggatcagtcccgcttctgtcagaaaagcgctctgggataagctgtaa

SEQ ID NO: 157125 - DNA, 918 bp, Enterobacter cloacae
atggaaaaaatcatcccgacagcagtttattttatcaagcttggtgaggctggtgaatgggagcagcagtgtctgtcagatggcacgcttcggtttgggtatcataaaaccccgaacagtctctgcgttgagggacgatggggggatgttcatgatatatggcttaacatgcgtaatagtcggaaagccatcgcgaccaatgacgtaaggcagattaaaattttctacacagcaggcgtagagacagtatttattaccttttacggcgggtttctttactggtgtcgtcctgcaggtcaggtagaagtccttgaggatggaagccgaatccgaaaaacggttgaggggtggaaaaaaaccagcatcgggggcgcgcagctaacgacagatcacctgagcggtgacctcttaaaggttcagggataccggggaacgatatgtaacgtaagtgcgtatgattatattgttcgtaagataaatgatgaagatctctcagccgtttcagctgcgaaagaggctgaagaggcatatctaatcgcaatgaaaaatctgtgccaattactgacttggcaggattttgaactactgattgaccttattttttcaaccagtgggtggcgacgtaccagcattgtcgggaaaacacaaaaaacgctggatcttgagcttgaattgcccaccaccggtgagaaagcgtttgtacagataaaatcgtatgcaaacgcaggtgctctaagtgagtatgaaaaacgtttcagggaaactactgcttataaaagaatgttttttatctggcacagcgggcctttatccgaaagtatcaaagccgacggcattacgttaatcggccccgataagttagccgggctcattctggacagtggcttaacaagatggcttcgtaaaaaagtttcgtga

SEQ ID NO: 157126 - DNA, 1164 bp, Enterobacter cloacae
atggctatttgtaaaagaaataactgtacgctctcaattggtgaattacctgatgagcggaaactgcgcttatgcccaaaacattatcagggtaagctatctaatgcagctaaaagagcccaaaggtgggggctgacgtgtcagtacccatcctgtggtattagtctgtctggtactcgtaatcaacggtattgctgtattgagcatcgtaataaagacagaaggctcgtagatgacgatgccattgtcagtctggtaaaacattcttactggatcaacgtggagtctatgctgaagaataaccccctcgggctggggagtatcaccggtccggcggatattgcggaactcatcaggttatacgagcgtaaggcaagccaccagaaggcgtataacacgctaaacggatatagggtttgtgactcatccggtgcagcagtaaaacgtccaatcccctggctggagctggaattatgccatatttaccccaattccaaaggaggtgccaatactacatgcaacatcattatcgctccatcattgattaacagaatgatgaaggactcagtacctgtttgtatcaccagaagaacattctgcggcataaaagcagcaggttcattcttgcctgttaaatctacactattgaaatcgctcacagagcaatacagccaggttgaagttcaggaggctttaaacccagttaaacatattacatttgcagaccctagtgtatcacgcaggctgtttggtacagatatttatgcttatccacctttactaaaacttttaaaggaggaatcatcgcgcctggaactctgggatttaagggaatctattaatcatattgaaagtagtcactggctgtttgctggccctgcaaatgagttatttgctgtcgctgcttttcatgccatgttaaatggagatgctgataacttacttgagatattttccgggttgcacgaagacgtaatggaacgggctaggcaaaaagagactttgaatcatgcatattaccaaagcactctggaccagtatatgtcccatcattttcgtcttgacttgcataatcaagaagcctgctttttattttacaacacatttttcacagtgccaccattggacaaacatggggctttaatcatacctcatcaattctaa

SEQ ID NO: 157127 - DNA, 2817 bp, Enterobacter cloacae
atgccaatggagagctatacgcaaatgaacgccgtagaaattgaacaagccatcacggatcttgcagagcaaccctttgatcccatagagtttccttatgctttccttgaagcctttggtaacaaggcaacgactatcaaacgcctgcgcgcgggggcatcaaacaagtccgacttaggcggtgttctccagaccaacaatattcacattctgacctgtgaagaaggcctggtgacacataagctggccgcacttaaggcgagcccggcaacaggcaaggccaaggccaaattcatcctcgccacagacggaaaagacttcgaagctgaagatctcatcagcggccagactgtcgcttgcgcctttaaagactttcccgatcacttcggcttctttttgtcgctggcaggtatcagcactgttcggcaaatcagcgaagacgcctttgacatccgggctaccagccgcctgaaccgcctgtacgtcgaactactgaaagacaaccctgaatggggtactgcggagcgtcgtcatgacatgaataagttcatggcgcgtttaattttctgttttttcgccgaagacactgacatatttataggcaagaggcgctttaccgacaccattgcacagatgagtgagcgcgatgcttctaacatgcacgaggtcatctccgagctgtttcgtgctatgaataccccacgagatgagcgtactgctgttgatattccgcgctgggctacagagtttccttacgttaatggtgctctattctcggggagtgtcgaggtgccgcgttttagccgcatcgcacgatcctacctgctacacgttggcaatttggattggaccagaatcaatccggacatcttcggctcgatgattcaggctattaccgaagacgaagaacgtggtgagttgggcatgcattacactagtgttcccaatatactcaaggtgcttaacccactattcctcgacgaactgcgggcgaaactggatgaagccggtgataatccgcgcatgctgctcaatctacgcaagcgcatggcccgaatccgagtattcgaccccgcatgtggttcgggcaattttttggttattgcgtacaaggaaatgcgtgctattgaggccgagatcaatcagcgacgtagcgaacctgatcgtgcatctgacatgccccttaccaactttcgagggatcgagttacgcgactttccggcggagattgcccgactagcactagttattgctgagtatcagtgcgacgtgctgtacaggggacagaaacttgccctagctgaattcctgcctctgcgcagtgacaactggatcacatgcggaaacgcactgcggcttgactggttgagcatttgcccaccaaccggcaccagcgtgaaattgaaggccgatgacgtgttcgattctccactcgatcaggcagagattgacttcgagaacgagggcggcgagacgtatatctgtgggaacccaccgtacttaggcagcaaatggcagagtgccactcagaaagctgatcttggtgcattgttcgatgggcgcgtgaaaaactggaagtcgctcgattatgtggctggttggttcttgaaagcagcagattacgggactcatacctcttcttctgctgctttcgtcgccaccaactccatttgccaaggtcagcaggtacctattctttggccggagatatttgctacaggcaatgtcatcgtctttgcgcacacatcgtttaaatgggctaatctagctagccacaatgcaggagtgactgtagtcatcgttgggatttctgtcattcctagccccacacgccgtttattttccattaaggacggtagccacgatttggtcgagtgcaagcaggttgagaacatcaatgcctatctcgtcgctgcgccgaacatagaagtgcaacccgcaactaggccgaaaaacggtttgacgccgatgcagttcggcaaccatccctactacggggcggcgctgattctctcaaacggcgaggcggggcatctcgttgccagatcgccggaagttgcccgcttcgtccgtcctttctatggttccaaagaatttatcgacgccgcgcctcgcgcctgcctctggatctccgagccggaggtcgaggccgcgcttgccattccagctattgctaatcgtgtagaggacgtagcccgctcaagaagagctgcgaccaaagacgccagcgcacaaaaactggctgacgccccatggcgattccgggaacagacgatggggaatagtcacgccttaattgtcccgcgagtaagttctgagaatcgtccttatctcccggttggtttgctggagccgcattgtgtaattcaagagaaagcgtttgctctctatgacgccccgctgtggaaccttgccctgatcgcctcgcgacttcacttggtctggattgccacggtctgtgtacgactggaaatgcgattctcttactctaatacactcggctggaacacattcccagttcctatactaaccgagaaaatgcgggctgacctcacgcgctgcgctgaggaaattttgctggcgagggagcatcacttcccagcgaccatctccgacctatacgatcccgagaagatgccctctgacctgcgcgctgcgcatgatcgcaacgacgaagttctggagcggatctacattggtcgtcgcttcaagaacgacaccgaacggctcgaaaagctgtttgacctttacactcaaattacttcttcgcctgcaccagttaagagcaagaagcgtaaagctggagctaacacatga

SEQ ID NO: 157128 - DNA, 177 bp, Enterobacter cloacae
atgcttaacaaaactatttggttttacaggtttggtgcattcatagcgttcagcgctatgatactgaatcttatcggcgtgactgatttctctcaaaaagtcgtcatcattgactgcataggtctgcttgtctggctccatgctgaatgggattactccaggcgtggccgtgattaa

SEQ ID NO: 157129 - DNA, 1020 bp, Enterobacter cloacae
atggctgctatctttgttgtaatcagtcacgtatgggctactaatggcgtaatcggaaagcctcttgggtttgattatataggtgggtatggagtagacatcttctttgttatcagtggctttataatgtgttacacgataaaagatgttttagcttcaccaagaaaggaggcgctttcttttatcacgaaacggattcttagaatatatcctgtttattttattattgcttccccggcaataatatatctgatgcatcagcacgtttcctttggcggcaatctctcagcatatgatgtcattgggaatttccttttgcttcctacatttacgcaaaatccagactatcacatgttctattatgtggcctggtcattgtgctatgagatgatgttttatgctctttttgcactactgatgtgcttctgcaaaagaaagacaacgttaatactatcgatgatcgctttcatagtaggaatggttgttttcgttcagacatttagattgcaggggcagatgcttggatgggttaatatcacctatatgattggtgacagtctgatgattaactttgcccttggatgtgttgcctttctcgtatactcacagatcagaaatgtatcaataaaaccactaattgcaattggtatgatcgcattgctaattgttatagggataataaatgcacaacatcaggcataccgacttttcagctttggtatcacttcctttgctatagtaatgattgctttgtatacgaagttgccagacatagaaaaatccaaaactgagacaatatgtgtctatcttggcaatgcttcatacagcatttaccttttccatctatacgttgttttcgcttcagagaaaatatactcaatcgtgccgctacagaaagacgtcactggtgcgataatgagctttgttgccgttatcatgggttgcattttttacacattcatagagaagccattgaacagcattattcatggacgtgtttataggcgcttacatgcttaa

SEQ ID NO: 157130 - DNA, 2160 bp, Enterobacter cloacae
atgacggtatcaaccgtagttgaccataacgattacaccgggaacggcgttacgacatcattcccgtacaccttccgcattttcaagaaaacagacctgaccgtctcagtgattgacctgagtgaaaacattacggtgctggtgctggacaccgattacaccgtgacgaatgcaggtggctataacggcggcagtgttgtacttaccactccgctggcgaacggatggcaaatatcaattgcccgcgagctggaaccgacacaggaaactgacctgcgcaaccagggtaagttcttcgcagaagtgcatgaagatgcgttcgataaactgacgatgctgattcagcaggtcggtagcatgttccgtctggcactgcggaagccaacaagtatcgcgaactggtacgatgcccttaataactacatccgcaacctgaaagacccgagagacccacaggatgcagcaacaaagaactatgtcgatactctggcaaatagcaacctatcaagaacgttgagaactcctgaacagataccttcattacctggtattgaactccgtaagaataaaattgttggatttgatagcttaggaaatccagtcgttcttacacctgagtcaggatctgcggctgatgttttgcttgatcttgctgattacgcgccagggaaaggtgatgaacttgtagcaaccaaacagccatacacgggtgctaaaaatcagacagttcatacaaaactggcgcaggtcattaacgttctcgattttgatggtgtagttggcgatggtgtgaatgatgacacggctggtattcaagctgccgttgatgctactccgcaaggtggaactcttaacattccaagcggaacatttgtcttgacagacgaaataattatacagaaatcaataacaattaaagggcccggcggaaggatacttagtgacactttgaatagtgattgtattattcaaaaaaacagtgggaagtgtattttcagatttagagctactgccaatggttacctattcggtcagtatggtcttacagcagtgcatttctatgatttaaacctcattggtccaagcaatactagcagatcaacatatgcatttgcttgcgatgaaagtgtagcaagtggtgcatatcatttcagagggtggtctttcaataatgtcaattttagatatttcgtttacggattctatttacgcggaataatttatttgggttgctttaacagagttagaggaacacgatgcaatgccttcgcactgatagataatcttgctggtagcaatgatttgtgtgggcaaatcagattccatcagtgcgaaggtacattctgcgataacgggcttatgcttagccttgagagccagactggcgattatgccgtgagtcaaagcactctcgcccatggtgataagggtattcaattcggatgggcttgtcacattgatattggagacgatgtttcacttgaagacaatcgtgattgcggtatttacacaatcattccggcatcagtgagtaatccgaactgtgaagcagctaagaatattcgtgggattaaatttataggaaatggtgatgacatctggattaacaaagaaacaactgcatattcaggcggcggtttttcatggcctatgtacattgacggcaacacatttgcgggcacaacaagaaagattttaaagattacaggtaactcgccttttgactcccagcaatttgtatttggagtatcaaatacatattcaggtgggcttgttccattgtcgaaaattgactcaaatttcagaggttataatgctattaaagaacagggtaaaatatcaatcagtgcgaatgttacagctacaactgacacgaacgtagcaacgtttacaatccctgcaggaaagtcgtgcataatttcaaagtattcagctatctcgctctctacgaacgccagcggtggaaatgcgcgatacgctgctgcggttaggtttaccgatgctacgaacagtatcgttctgaaagatgtgtcaggcatagtggtaggtgaggatttcgtaatcgctagttctggaaactctagggacgttgttgtttctctacgctcagacgctgcgggccacacggcaacgctgagttttacttacaaattctactga

SEQ ID NO: 157131 - DNA, 702 bp, Enterobacter cloacae
atggcaaattctcaagccgcagtgttcaaatttgaatcaaatgacgcaatccgttctgttctgatcgatggatccccgtggtttgttgcacaggatgtatgcacggccctccgtattcagaacgtgacccaagcgctcgataaacttgatgccgatgaaaggtctatgctcaatatagggcatgagcacaggtcaatttttgataaacgagttaaggaaattaacatcgtatcggagtccggcctctacactctgatcctccgctgccgcgatgcggttacgcctggcactatcccctaccgtttccgcaaatgggtcactggcgaagtgctaccgcagatccgccagaccgggcgttatgttcgcgaagatttatcaccggcagataaagcgcagaaggttgtcgccagctttatgccagcgatactggaggcgatgaagtcgggagagaagcaggaatacaacgtaccgctgaaaccaggataccgcgagcacatccattcccctgaaggcgttctcggtctggctgagcattcactgctgatgaacctgctcaaccgcatgcaggacgacgggcacgatgtttccggcgctgcggctgagtttactaccatggtgagctacatcgtcggcgtcagtaaatgtctgaacgacatccgcacccacgcgcagtacatcagcacgaatgcggcgaagttctga

SEQ ID NO: 157132 - DNA, 258 bp, Enterobacter cloacae
atgagagaatcaactgtagttatgttttctcggcctttcgacgttaatgtatgccatgaccatcaggaaaatgtgtgggtggctgaatgtgatgctctcggtcttgttactgaagcagcaacatacgaagaactgaccgagcgagtctgggaagtagcgccagagctgtacgaattgaacggcttcggtggcaatccttcgcgtataagtctgtcttttaatcaggaacaatcctactctgacaggatcgcactctga

SEQ ID NO: 157133 - DNA, 381 bp, Enterobacter cloacae
atgaaaaatttgattatggctttagggattatgtttcttgttggttgccagacggcggcacagtttgaacgaaacatgatcacttggcgtggtcagcctattgattctttgattcagcagtggggttatcccaatggcgagctaacatcacctgatgggaatcaggtatacgtttactcaaacaacgggtcgtacaatgttccgcagacaacgacgtacaataccacctctaatgtgatcggtaataccgtttattcaaacacatatgcaacaactgacggtggttattccatcagcttcagttgtacaatttatgtagaatttggtaaggacaaagtgattaaaaatgtctcatggcgcggcaataactgcgtagcgtga

SEQ ID NO: 157134 - DNA, 2475 bp, Enterobacter cloacae
atgagacaggaatgcattcaggcagtacagcaggcagctaagcgcacgctgacagctcgcgagattcaggatattgaagatcgtatctaccgcaacatgcgcacgcttgccagagatgacccagcgtcgtggcgccagcttactgatgcagagagattacgccgcgcagggcaactggcatctgatgagcttcagcgagaggctgctctcaaaaaacgccgtgtcgctttgacgattgctgcacgccagagactcgataaatttatcaacagctaccagggagcagacggaaagctgggtgcgcttaaccgcacaatcgctttcagtgctgacggtaagtcaaacttcctctctgttgagtccaggaccaaggctacacgcgattatgccctgagccagttgcaggaggctttcgaggctgttgatccccgattctttggcttgttcgaagatgaagctggcgtgcgcgatctggtatttgaaatccgtgggcagaaaaccggtaatgcgaaagccagcaagggcgcaaaggcttggggagaagtaaccgaattactccgccgccggtttaatgatgcgggtggtgatatcgggtaccttgaaaactggggcattcctcaacatcactccatggagaaggtgggtaaggtatccagagataagtgggtcagtgatgtgatcggtaagcttgaccggaaatactacacccgcgccgatggtcagttgatgagtgattctgagcttaccgccttcctgggagaagcatacaacaccatcgccaccggtggactgaataagcttactgataacggcatgcgtatttccggggcacgggccaatcgcggtaacgcctctcgacaaatccacttcaaagatgctgactcttatctgcaatatcagcaactttatggtgaccgctctctctgggaaataatggtcggacacctggaaggcatcagtaaagatattgcgctggtggaaacctatgggccaaaccctgaccacgttttcagctctcttctcgatcagacgaaatcagagactgcaacggctaacccgagcaaaaccggaagcatagagcgccaggctgataacaccgcaaacctgtacaattttatttccgggaaaacccagcccgttgccaacccgcacattgcacgctggtcggataacattcgcaactggatggttgccagccgccttggttctgcgttgctggcgtctttctccgaccttggcacaatgtacctgtcggcgaaggttaccaacctcccgatgaatcagcttttccgtaaccagctggaagcaatggatccgacaaatcgcactgagcttgcccgggcccgtcgtgctggtctggctatggaatcactgctcggaagtgttaaccgctgggcgatggataatatgggtccatcagtctcccggtgggcggcaacagccgttatgcgagccagtggattaactgcatggtcggatgcccataagcgcgcctatggcgtaacaatgatgggcagccttggcgaggtggtcaatagaacacctgatcttaaaagtctctcaaatgacgatttccgcattctgaaaagcaaagggataactgaagaagactggagtgtctggaagctggcgcgccaggaggactggggtaaaggcaataatacgatgctgaccccggaaagtatcatgcgcattcctgattctgccgtgcagcaccttggcgcgccagagcgtgtaaaattcgaagctatgcgtaagttgcttggtgctgtcaccgaagaagttgatatggcagtaattacgcctggtgcgcgcgagcagatgattaccggctccggtattcagagaggaacagcaaagggggagttaatgcgtagcgtattcctcttcaagtctttccctatatcggttgtcatgcgtcactggtctcgggcaatgggtatgccttctgctggtggccgagcggcttacatcgcaacatttattgccagtacaacactccttggtgcactgtctcagcaactgaacgacatggcctcaggtcgtaacccgagagatatggccggtaaagatgccgctaaattctggcttggcgcattgcttaaaggcggtggtcttggcctgtacggtgatttccttctttctgatcacaccaggtacgggagcggcgcgctggcgtctatgcttggcccggtggctggtctcgttgatgatgtcattaagatcgggcagggtatcccgctgaatgcggtagagggtaagagcgagcagactggtggcgatctggttaagcttggaaaaggccttacgcctggcgcaaatatctggtacctgaaggcagctcttgaccatatgatctttaaccagatgcaggagtatttttcccccggctatctgcgtaagatggagcagcgttcgaagaaagaattcaaccaaacatactggtggcgaccgcaggacgtcacaccacaataa

SEQ ID NO: 157135 - DNA, 1803 bp, Enterobacter cloacae
atgagttactttggtctcaacgcggttaaccagaatcagcaactggatgaggcagcctctaatcctgcaggatttaatgatgatgtcggattcttcgataactcaggtactgctgccgtttccggcctgtactccgggttggttgccaaacctgaccagcttctttgggctggaatggataagatcgtctcaccgatcgcgaagtttgttaacgaaaatacttccctcaatgacacgtctgctgagtatatcgccgaacaacgtaagctcgcagagcaacaggtgaagcgcctgacgcctgacgcagctacgacaggcactgctggtcaggttctgcatggccttttcgacatgggcggtcaggctgttgttggtacgctgctggctggccctgccggcggcgctgccgccgtcactgcgttgcagggattctcagagtttgaacgactcacctcccagggtgttgatttccgtaccgcgcaagagtctgggcttgtgcagggcatcactgctggtgcgggaacattgatccccatgagccttgggttgcgcgcaggtggcgctcttgcagaaagcgttggcgcgcaacttgcaagaacaggtgaaagcgcggttcgcaatgcggcagccaccgccgtgcgagcagctccagatattgcttatgcggcaggtacaaatattgccttcggcatggcccagcgtggcctgaccgccaagacattacgcgacggcggatatgatgaaatggcgaatcagtacgatgtatttgatcgccagtctatcgctatcgatgccgttctcggtgttgcatttggtggcgtcgggcgattcctgaatgcccgtggtgagaacgctacaacaccaacattttccccggcagaggtagatgccgcgctggcagcaaacgcttcgcatcatgctgagattgatgtagcgccaggcgtccccgtgaatgttctgtcgcgcgatgcccatgttaaggcgttgcagaaagcaatgaacgacgtcagccaggggcgcgccgttgatgtggccagcattgccgaaccggcatcattcagtgatattccagggcggcgcagtatgatagcgcagtccatcgatgaggtgcttttcaatgctgatgagggaactgcggcacgtgcaattgagacaagaactctagaagaacaggcagcgcaggttttaccacgtggagatcggcaggtataccagtctgaaatcgccaacagtcagaggattattgataacctgacagagcaacgcaataacattctttctgaagaaaccaagggaagcggaaaggcgttggcacaatcacgttctgataagcagtccagattgctcgaccttgatcagcgtatcactgaggcgcagggccgcctggaattttctcgtaacgcactcgcacctcatgagccgggtggggcattcttcgaagcgcgggcggaacttgcccggcgccagcaggcagaaagcgatcttaacgctcaagccatgtctttttacaaaacagccgaagttcgcacctctgatgaaacagcaccatttgagcctgcggcggttcttcgccaggcagataacaaaccatcccctgagcaagcgggagacccggatatcagaatggctgaagactctctggcagaatcacctgacatgatggttaccgttcttgatgatgatggcaatccgcaaaccagaagcgccagggaagtactggacgaggcgagcagggaaaatgaacaggcaatacaggattccagcctctttgacgtggctgtctcgtgtttcttgagagggtaa

SEQ ID NO: 157136 - DNA, 987 bp, Enterobacter cloacae
atggctgttaaaggcttaactgcgctgacgctggctgactggggtaagcgcatcgatccgaatgggaaggtcgataaaatcaccgaacttctcagccaaaccaaccctatcctggacgatatgccgttcatggaaagtaattctccaaccggtcatcgcacgactatccgcaccgggttacctgatgcgtactggcgtatgatcaactcaggtgtcccgaagggtaagtccactacggtgcaaatcactgacaccatgggcatgctggaaacctatgcagagatcgataaatctctcgctgacctcaatggtaataccgctgaattccgcctgtcggaagaccgcgcattccttgaaggtatgaaccagcgcatggctcagactcttttctatggtgacacctctgtaaaccctcagcagttcatggggctttcttcccgatattcgttgctttcggctggcaacggccagaacattatcgatgccggcggcaccggcacggataacacctccatctggctggtagtttggggcgaaaacaccgttcacggcattttcccgaaaggccagaaagctggtttgcagatggaaaacaaaggccagcaaaccttgctggatagcaacggaaacccttatgaaggttatcgcacccactataagtgggatgccggcctgacactgcgtgactggcgttacgtggtgcgcatcgccaacatcgatgtaagcaacctgtccgatcctcaggcggcagccaatattgcaaagttgatggtccgcgcactgcatcgcatccctaaccgcggcatgggcaagccggtcttctacatgaaccgcaccgttgcccaggctctcgatactcaggctatggataagtcttccctggcaatctctgtcaaagagactgagggcgagtggtggaccagtttccgcggtgtgcctatccgtgagaccgacgctcttctcgaaacagaagcgcgcgttgtttaa

SEQ ID NO: 157137 - DNA, 720 bp, Enterobacter cloacae
atgaatttatttgaacgtttgctgcatcgccgtctttgcaatgagcaatccactgaaggtggtcaggcagatacagcctcaactggtaccactgaaacaactcaaggtgctggcgaaacgcagcagcaaactcaggagcaaagccagacgcaggataacgcgacgggtactgattctgacaaaggttcagaaactcagaaaactgaggaggaacttgctgctgataaagccaaagccgaaaaggctgaaaaagaccagaagcaggaaggtgcgccggagaaatacgaatttacagctggtgaaggcgttgagctggataccgaagcgctgaaggacttcgagccggtcgcccgcgatctgaatctgaccaatgagcaggcgcagaagttggtggacgcgtatccgaaaattctggccggtgtgcagcagcgtcaggcagaagcctggcaggcgcaaacagagcagtgggctgctgacgtcaaggcagacaaagagatcggcggtgacaaactcgaaagcaatctgagcgccgcgcagcgtgcgctcgaccagttcggcacacctgcgctgaaggaatacctggacaccaccggcctgggcaaccacccggatctggtgaaaacgttcgtgaaaatcggtaaggctatgtcggaagacggcatggttaccgggaaagaaagcggtcagcgttctgctgccgaagtgctttatggcaactaa

SEQ ID NO: 157138 - DNA, 213 bp, Enterobacter cloacae
gtgagtaagcacatcatcaagtatgactatcgtgacggcgtcaaacttgcgaaacatgaaacagaaacctggtgcggacatgcgcctcaattctctgactggctgtttcaggatgctcagcatgcgctcttgagcattgagcaaggttcattgcaggtgccgtgcaagaagtgtctggctgcaatcattaaagcggcgcagggggtgaggtga

SEQ ID NO: 157139 - DNA, 315 bp, Enterobacter cloacae
atgaaaaatacaattttagctatcccggttgaacgcgaccaatacggttactggactcacccagagtacgatgcgttttgtgatggccgtgaatccatttcgcccattgagttcgacgcctggttgaagaaacatgggcttgagtggacggtaatttaccgtgatgaagatgatgttgaccctggggtagacggctatgacatttctgcctggcagccagaatcaccagatggtgatggctggtttgtcggttctattcacgatactgaagacggtgctgtgtgcatctggttacgccaggaggccgcccaatga

SEQ ID NO: 157140 - DNA, 195 bp, Enterobacter cloacae
gtgagaaataaaatcgttgagttcgttaagcgtatggaagagcaaggtcgcactctggaagtgaatggaaactttgttgtggttacccctgccgcaggtctgtctatcacagacatgatggagatgcagagtctcaataagaaaggtgagcttgctgagcacatcactaaagctaaagacggagatgcaaaatga

SEQ ID NO: 157141 - DNA, 858 bp, Enterobacter cloacae; identical to SEQ ID NO: 118087

SEQ ID NO: 157142 - DNA, 1353 bp, Enterobacter cloacae
atggagctggtccggaagaaaaatccgagaggaagatttgagcggaaactgaatctggctgaaaaggaagccctgctgcacgtattcagtaacggtcgaaaaccaagtcaggcggatttacgcattgttaatgccgttcttgaagagatggaccgacaagaactttggatcaagtgtgactgtgttgactcggacccaaaagcagaaggcccctttaattgtgaagtaaacgtatccaagttacgccatgtaaaaacaacaaggccacataacgaacagtgtccgttgtaccgactaaaaaaagaaaaagacgcagacaacaccgttggggaggggaaaaccagcccactgaaccctgtcggaggcgatgactggctcccggataagaagaaggaagcaagagcggtcgcagtggagggaccggtagtgccacgtaagcgcaggcgcaaaacgttgaaacccgtcccggcccttgggcgaaaattactgacgctcattgaagccgcaggcctgaaccagcttgagctggttccggagtatcaaagtccagggctgacaggtgcgatcttcaggctaaaagaagtgctggaagagcactcaatgagaaatggcacacctctgagccaattattcagttgctcaccctggctgagcatcgatcgcatcgatgaaatgctcacaaatttggaatcaatacagggtatcaacagcgaggaaaaagaactgtgcgtatatatcatcgggatagcgacagaagtcagccgggaagaagtgacctttagcgttcgtaggaaaaccttcacgcaccggccagaggcacgagtcagtattaatggcgaaaatagttataatgccggcagccgagctccctactgggcgattattgaatatagaagggggagggatggtaatgtttattgccatgaaagctacgcccatgctgcttatacgctggataatccggtacctgtcgacagcaataaggagcgtgataccctgaaggtaatcatcaatgccagcagttatgccggtcgccagccaaatcacccagaaacaattagtctcaccaaacctctattcacgatgaaaagcatcaaagatggtgtggaggatgtaattcatcctgatttcatcctgaatgtagcacctgccgacgaacgtgcagtgacgacgttcatcattgaaacaatgggatatgagtccgaggactatataacgcgcaaaaagaatacgcacagtttgatggagcaagaaggggtgttgttaaccgatcccccgggctggccagcggcttcagataaaacgtttaacagtgttctgctcagacatatcttcagcgcaggcaaagtgtga

SEQ ID NO: 157143 - DNA, 264 bp, Enterobacter cloacae
atgtcagtgattaaacgaacggcagagcagttcattcacaactttctgcgcgcccggaatgtccctgaatctcagtggccggatctggtcaaaaagatcggcaggggaatgatactggcaggcgtagccatcgtggttcccggcgttctggttgataacatctccttgccggtgacaatcacaatacaggtctgctacgcctcgttgatttgtctcggtgttctcctggcttttgacgagaaaaaaccaaaggggcggagatga

SEQ ID NO: 157144 - DNA, 204 bp, Enterobacter cloacae
atgcaaattgaagagcttaaaggtgacgaacgcacgctgattgttctggccttgcaggcgctataccgtgagagattaaccgcatcaaatgcggtctttacggtctgtagcatggccggaaaggatcaaccgccggaagatatttttgggctgcgtgaagttcaggatgcgctgagacgtattggttctgctcctgtgcgttaa

SEQ ID NO: 157145 - DNA, 540 bp, Enterobacter cloacae
atgaaaatatcattactgcctacaacattgctgaccctttcactatctgctggcgctgctccccagatgtgctttgaacaagccgggaaagattatcaaattgatccgctgctgcttatgtcaatttcgattaaagagagcagacttaaaccaggagcaataaatggatcaaacagggatggaacagaagatgtctgtgggatgcaggtgaatagctcacattacggcaaacttaaaaattttaatattacccgtgaacgcctcctgaatgatccatgtatatgcgtctatacgggcgcgtgggttctggcgcacaacttcatatcatacggaaaaaactgggacagcgttggaatgtataatacgggaccaagcaaaaagctaatcgtgaagcgtaaagcctatgctcaggagattaaaaatatatatcgcgtattgctggccagaaaagcgttactttctgaacgtctcgcaccaaccactgaaaaggatctcagaagtcaaatgacagaaacggtatcgttaaacatgggtcagtaa

SEQ ID NO: 157146 - DNA, 225 bp, Enterobacter cloacae
atgtttcgggcggcaaccggattgatcccaatactgttattcacagtaacagtattcattttatggttcgcgctgcacttcagtatatgggtaaagctcacaggacttctcatctgctttgcaggtggttacttcctgattgaaaccatgccgggtggctggatatggcgtgagctgcactcatcaccttcagacgtaacacctgaagaaaaggagagcaaatga

SEQ ID NO: 157147 - DNA, 147 bp, Enterobacter cloacae
atgaagcgtaatacatcaattgcactgctggtaataattgttggagctaccggtgcttctgtttactacgatgccggcgcactcatttgggttgcaaccctgatgaccatcggagttctgtatcgtgtcatcaccttcttcctgtaa

SEQ ID NO: 157148 - DNA, 690 bp, Enterobacter cloacae
atgaacaaaaaagtaagtgcttattgttgtttcattccaatcggcatttatgcagcttattctttaagcatgcaggtactttttgacgtgccatttatggctaagagcatgctcttatcaattatccccagcgctatctatctgctctgcttttggaagttacgaagcagccaaagagggatgggtttaaaagcaactttcctgagtaacgtggtgcttgcagtcttgctaaccttcctgatggtgtatgtaggcaatgatacagaaagtgctttaatagcaggcatagctgttcactcgttaatagcttttatcctagtgggagcagtattgcgacctactacttacaaggataatacccttcttaaggatgaagataatgggcggatatacgttatccggaacgggatagctcatgtgttaccagataatgaggctcaacgccttagcgctagtgacaacaaaattatcagcttttcaggcagccaaatgagtatccaagatgccggtataacccctgttcctttaaatacttccttcaacgattcgttcagtaatggaataacggtgaaccctgcatcaggaatgccaatggttggtggcatctctggcctggatatacacggaaacagttggggaacaaacttcaacgaacctttaaatacgtatgaccctaaccggggatactga

SEQ ID NO: 157149 - DNA, 363 bp, Enterobacter cloacae
atggcacgttcaataccggtgaagattggtcagaaggaatttaaatccaaaaaagccgctgtggactatttcatggatcagcgtgaagcagtcaaagcagtgagcccgctgaaagagggagagttgtttgatgaattgcgcgacctttatctgcgttactgcgaaatcacagactatccactgggcaaccgggagatttacgcattcagcgtaaattatgaaactcgtcataccgaccagaactacggtacgtatttgtgctactgggtacatttttcaccgaaagatacggatggattgtccttttcagtcagagaagcggttgatgcgatcgccaaagctgctgcaactgaacaacgatag

SEQ ID NO: 157150 - DNA, 567 bp, Enterobacter cloacae
atgaacacgatagtaatacgcggcctgctggtaatgcttctgatcggtatgatccagggccggcccggagcagcaaccctcagtgaaatgcgggcgctcaacgccactcagaaaccaggaatgaccattgtctgtcagagcaggacggtcattcctgttaacggcaaaaaagaaccggtgaccattgatgagagactcagcggatatgtggtcagtaataccggcgacatgatggttctggatgtgacgtatgaacagagagatgacggaaaagacgaaccattccatacggaaaagtaccttctgaccacaacccttgaaaacgagcgccagaagatggaggttgatatgcgcactcttaaaatcatggtgccaaaagcccgccatcttgaaagcggattacgggaagtcatggaggccgaaccagtgacttacaccgattacggtacataccgcatcacagcacttccggcttatgagatcctgccgggcagggataaccccggtgcgccatccatgcattgcgcacccgccatgaacgcgtcagtaccgggagacacacgatga

SEQ ID NO: 157151 - DNA, 531 bp, Enterobacter cloacae
atggcggttgagtgggtggatgtggctgacagtgccgttaaaatcgggctgggcgcgttaatcaccattattggcggctgggttacactgaaattaacacatcgtcatgaaataaggaaagaagcattagctcaacgactgcgggatatagataaaaaaacagaccgctatatcgatttcctttcttcatcgcaaacgctaatgcagaaatatctttatgaatcatgtgaaccgggtagcgaggattacaccgattatatgcggttgcataatattgtgagtcttacctcttcgtcagagttacgagtttatgcgtttgatactcaggcaaaagtatcgcaatttattttgctcagtaagcccagtgatcttattgattcctgccgtaatgccgcgagagactccgtttcactgcttcagggggcagtgagtgctgaattgcttcaggaaaaagcagcacttcagggtaaaccccatgcgtggtggtcattctggcggaggcagggcaaaaacgtagacagaatcacctga

SEQ ID NO: 157152 - DNA, 240 bp, Enterobacter cloacae
atgtcagaacgtgaattatggttagcgacagaaaaccaaatagccgcaagagcatggaatatgattaaaagaatcagtaagttaaacgaaccatttgaattaagaccgtaccatcaggttccgggctatatcgaatatatattgccatcaagtatagaatttttagtggtcaacaaattcttagaaccacaaaatgaactaaacatgtttgtaagatcgcaaagcggtgacgaaagataa

SEQ ID NO: 157153 - DNA, 234 bp, Enterobacter cloacae
atgtattattataatctcgatattgacgaaaatgatgtgtttatcttcgagcgatttgacaggagcaattgcagttctgaggaatggtatttcaatgatgacttgttctttaatccttcggcccccacagacgaggaaattgctctccttgatatgatttatgcacacaaaacaagtattaaaaccgtgtggattgaatttcaggaagtccgttttcttcagagcttaaaataa

SEQ ID NO: 157154 - DNA, 798 bp, Enterobacter cloacae
atgatgcaaaagactttagcagaacggtttgactcacttgaaaaagactatcaggacgttttatcaaccaaatctatgcatttcagctcaatgctgaacgtaaacaaaatgtatgttgattcaggaaagtacaagacatggattggccgggttaaaaagttacttgaagacagctacggaaaagattcagatttttataatgactttataaaggctcagaaagggttttatgcctcgaactatgaggttcttaccatgcaattaaaaccggccttcgacgcagctaaagctgacttggcttatgccctccccctgaattcaaatcctgtatttaaagaaactgacagattagatctgataattaacgtgcttgaaaggtttccagcgttctgtcgccagctgaaaaagcgacatgacgacagaaaaaccattgaggtgaacgacgagtatgacgttcaggatctggttcatgcgcttctgacgctgcatttcgatgacatcagacccgaagaggcttcgcctagcttcgcaggttcttcatccagacaggactttcttctgaagaaggagaagatagtcattgaggtgaagaaaactcgccggtctctaggggcaaataaaattggagaggagctgctcattgatatggcccgttaccgtgcacacccgtactgtgagacgctggtctgctttgtgtacgaccctgaaggttgggtgaataacccgaaaggtgtgatagacgatcttgaggggaaagataccaaaggaaagacaagagtggtaatagctcagttctga

SEQ ID NO: 157155 - DNA, 372 bp, Enterobacter cloacae
atgacacaacatattgcctgggacacttttccgatccagtttaatgaaaaagtcaaaagtgaagtaacgaatgtggccgcatggctgagtgatgaatacacctccagaaacatcatatccgacgacgacctaaagtattgtgtgatgcgtaaactcgataagattgcgttatcagcgatgcctgcaccctatctgggccgtactttgttgctcatggctttttatggcctcctggagaaacctggtgttatttcgttcgaggatattgaagacgctcgttggttactggataaagaagagtatggagttccggcaagcccatgcaaccctgataaattacataactttccgaaaagttggtttaaacgatga

SEQ ID NO: 157156 - DNA, 291 bp, Enterobacter cloacae
atggacgtgataatcgagcatgcagttcgtttacttcgcgacagagatctttcttatcttgaggaaaatgccagacaggaagttctttccctttatattgatgataaaaagaagccttcaacggaaggacgagtggtactggccctgcatgctcaggctgttggtttggatcttcaggagccagcactacaggcaatggctctggatatcctgttgggctccgacaaactgtacattcttgatgtactgaatcgtattcaattccttcttctggaaataaagccagagtga

SEQ ID NO: 157157 - DNA, 666 bp, Enterobacter cloacae
atgcgacagcagttgctcgttgatcttcacccccttacgcttcagggcatcgaccgctctttccatatacacagtattccacagggagatcgccgccgtcagcagtgtcagtccgctggcgcgatagctctgattttccggctttctgtccctgatctctcccaaccggtgcatgaataccgcacgcgccagcgcgttacgggcttcgcctttattcagtccggcctgtacccgccgacgcaatgctggatcgcggaaccagtcgagcataaacagcgttcgctcaatgcggccaatttctctcagcgcctttgccaggccattttgtttgggatagctggccagttttttcagcatcagggatgcagttacggttccctgctttatcgaggtcgccagacgcagcacctcgcgccagtgaatctcgatcgctttcaggttcaggctggtcgtggatatcagcgactgaagcgccggatatttatccgctttccctttgataaacagcttcttgtcgtgaatatcccgaatacgtggacagaacgcaaatcccagcaaatgcatcagggcaaagacatgatcggtgaacccagcggtatcggtgtaatgctctctgatttcaaggtcgctttcgtggtacagcaagccatcgagcacatgggttga

SEQ ID NO: 157158 - DNA, 255 bp, Enterobacter cloacae
atgacacaatatccgaccgggtcccgggcagagggaaataacggcaacgttaagctgccgctcatccgcccactcatggtgaaaggagtatacggagcacgacaggacacacgtgagagggctcacagccaattagcaatgaaaacgggtcaattcagcagcgaggcctggaggtacacctgcgaacgcctgtcgtgccagtgcagaaaattccctgcgaagcaggacagaaattgtgaagccagggggagataa

SEQ ID NO: 157159 - DNA, 591 bp, Enterobacter cloacae
gtgatcggcctcgatcacgttattgagatacttcacctgccggtgggccgtctcccggtccagctttccttcgcgcttcaattcggtgatcgctgcaccatagctcggcgctttgtcggtattgagcgtggcaggcttttcccagtgcttcaggcctcgcagggccttgcccaggaaccgcttcgctgccttggcgctgcgggtcggcgacaggtagaaatcgatcgtgtcgccccgcttgtcgactgcccggtacaggtaggtccacttgccccgcaccttgacgtaggtttcatccaggcgccagctcggatcaaagccacgccgccagaaccagcgcagccgcttctccatctccggggcgtagcactggacccagcgatagatcgtcgtatggtcgaccgaaatgccgcgttccgccagcatttcctcaaggtcgcgatagctgatcggatagcgacaataccagcgcaccgcccacaggatcacatcaccctggaaatggcgccacttgaaatccgtcatcgttccgtccgtccaatctccgccaagcatgctcaagcttcacgatttttgcaacagagcccttga

SEQ ID NO: 157160 - DNA, 864 bp, Enterobacter cloacae
atgggtacatgtgtaccccaaatcgtgttaccgcttgcagccggtcttacccggcctgagagacgaggacgagtaatagcagcggtacagaccggtctcgtactcggcatcctattttcccgaatgctcgctggcataggcgccaattcgctgagatggcggaacgtatacctcatcgcttcaatcctaatggtgatatcagcggttatccttccggttatattaccccgacgaaggtcagcaattaaacctattccttatctttcacttatttcgtcgctcttgcacttgttcggtagagaaagagacctccgcctttcttgtcttttgggtgccgtcgtttttgccgcgttttcggcattctggacgacaatcagcttcaaactagcgcaggcccccttcaacttcgacttagcagaaaccggtctgtttgcgctttggggcggcattggcggcctagcctcccttttggcaggcggacttatagatcggtttggctatgatagggtgaatgcattctcgatagcgttgactgcattctcattcatcatcgtattagctcttcgcgacagttatatcgccttggtcgtcggagctaatcttgtaagcttctctctttcgaccggtcagatcgcaaatcaagcccgaatttttgctattggcgaggaagtgcgcagtcgcgttaacactgtttatatggcgttcacattcgcggggggtgccgttggaagtgccgccgggggatttatgtgggcgtcttggtcttgggtgggcgtatgtgcgttcgcgttgggttgcgccttgatcgccgcagttggccttggattgatgcgtcgaactttcgatcgcacggtcgaaggttaa

SEQ ID NO: 157161 - DNA, 183 bp, Enterobacter cloacae
atggaaccggaaataaatgacctctccgtggcgttctctttgctacgggaggtcctggccttactggagtcacctcaatatgccaaagcgatcgaacatatcgagttggccatgcgagccctgcggcaacaagaaagcgcaaaccattcatctcgcgaaagcgggatgcaaagcgtagcttga

SEQ ID NO: 157162 - DNA, 567 bp, Enterobacter cloacae
atgggagcagtgtattacagtggccccatgagcggacggaacggacaggagcttttatcaacgtgggtgccggcggacgtggctgcggcctttaaagcgcacgcccgcggaacggacggcggcacgtcggccgcgttgcgtcgccttgtttacgaggcgacgacggggctcgctccagccgcgccaagaggagctggaaccggcacgcaggttggggttcgtttaaagcctgaagaacgcaccgcactggccgaggcggcacgttcgcgcgggaggagtccggcaaattggctgcgttcgttggcgatcgttcatttgatgcgacaaccacagtggaacacggccgaaatcgaggaactgcggctgctgtttcgtgaggttcgcgcgatcgggaacaacgtcaaccagatcgcgcatgctctcaacattgccgttcagactggcaaatatccgccctatcagggggcggcagctcgagaagcggcagagctgttgcgcctcgaaatgcgtcgcatcgtggcggtgatgacgggcaacttcgaatattggggaatgcccgacaagtag

SEQ ID NO: 157163 - DNA, 891 bp, Enterobacter cloacae
atgcacgacgacgagctggacgatctgcgcgcgcgtgtcgattgccgagcggtcttagagaaagccggttgggagctggatgcggccgagagcaccgctcatgccgtgaagtatcgcggcggctccgcagcgattgtcatcgtaacccatgagggcaaaggctggttcgatccactcaacgacacacgcggcgacgttcttgctctcgctcagcgcctgtggggtggcacattgggccacgctcgcaaagcacttcggccccttgccggcctttcgccccagatgcgaccgagccaacgggagaagcgcccgcctacaccgctcgacgcacctaagacatggtcacgcgcccatcagctcaagccaggatcccaggggtggacgtatctgactggtaagcgcggtctaccagcggcgacaatcgaacgcgcgttgagtgcggacctgctgcgcgaaggcatctatggtacagtgtgggcgctccaccgcgatagtgcaggctgtgcctgtggctgggagatgcgcggaccgcagtacaaggggttcgcgaagggcggcgacaaggcgttgttctggatcggagagttggcaagcgcccagcggattgccgtgaccgaaagctggatcgatgcattgagcctcgcaactttggagacatggccagacggaacggcctatatctcgacaggcggtggcttcgggccgggcaccgctgacgtgcttcgtgagctgttgccgagaacggcgcggctggtggcggctacagatcaaggtaagggtggagagttgctgtccgatcgcctgcacgagctggccgcaaccgtctgcgctggcttcggtaggttgcggccgacggcaaaggattggaacgcccagctcaccaagagctga

SEQ ID NO: 157164 - DNA, 348 bp, Enterobacter cloacae
ttgtccatccgccgtcccgccgctctggcgggacggtttctcttcggtgtggtgcggatatgctggggggtgatctgcttcctgttttgggggctcattatcctcacaattccgttcgcgcgcctgctcatcctcctaccgctctcgttcacgatcatcggaagcgctggcgctgcggtcttcttcgcctggcagggcgcatgggccgacgccgggtcggccgcgctgatatcgttcgtcgcagcgctcttgttcggcggctacagctattgcgccgaaaagatggaccccaccgttggcatgatgccgccgttcgcgttctggcgatctgactggcggtacgactga

SEQ ID NO: 157165 - DNA, 213 bp, Enterobacter cloacae; identical to SEQ ID NO: 25793

SEQ ID NO: 157166 - DNA, 2706 bp, Enterobacter cloacae
atgctgattccgtcaaaattaagtcgtccggttcgactcgaccataccgtggttcgtgagcgcctgctggctaaactttccggcgcgaacaacttccggctggcgctgatcacaagtcctgcgggctacggaaagaccacgctcatttcccagtgggcggcaggcaaaaacgatatcggctggtactcgctggatgaaggtgataaccagcaagagcgtttcgccagctatctcattgccgccgtgcagcaggcaaccaacggccactgtgcgatttgtgagacgatggcgcaaaaacggcaatatgccagcctgacgtcactcttcgcccagcttttcattgagctggcggaatggcatagcccactttatctggtcatcgatgactaccatctgatcactaatccggtgatccacgagtcaatgcgcttctttattcgccatcaaccagaaaatctcaccctggtggtgctgtcacgcaatcttccgcaactgggcattgccaatctgcgtgttcgcgaccaactgctggaaattggcagtcagcaactggcgtttacccaccaggaagcgaagcagttttttgattgccgcctgtcatcgccgattgaagccgcagaaagcagtcggatttgcgatgacgtttccggttgggcgactgcgctacagttaattgccctctccgcctggcagaatacccactcagcccataagtcggcacgtcgcctggcgggaatcaatgccagtcatctttcggattatctggtcgatgaggttttggacaacgtcgatctcgcaacgcgccattttctgttgaaaagcgccattttgcgctcaatgaacgatgcactcatcactcgtgtgaccggcgaagaaaacgggcaaatgcgcctcgaagagattgagcgtcaggggctgtttttgcagcggatggatgatagcggcgagtggttctgctatcacccgctgtttggcaacttcctgcgccagcgctgccagtgggaactggcggctgagctgccgaaaatccacagtgccgctgcagaaagctggatggcccagggattccccagcgaagcgattcatcatgcgctggcggcaggcgatgcgctgatgctgcgcgatattctgcttaatcacgcctggagtttgttcaaccacagcgaactttcgctacttgaagagtcacttaaagccctgccatgggagagttcgctggaaaatccgcagttggtgttattacaagcgtggctgatgcaaagccagcatcgctacggcgaagtaaacaccctgctggctcgtgctgaacatgaaatcaaggacatcagagaaggcaccatgcatgcagaatttaatgctctgcgcgcccaggtggcaattaacgatggtaacccggatgaagctgaacggctggcaaaactggcactggaagaactgcctcccggctggttctacagccgcattgtagcaacttcggtgttgggtgaagtattgcactgcaaaggggaactgacccgctcactggcgttaatgcagcaaaccgaacagatggcacgccagcacgatgtctggcactacgctttgtggagtttaatccagcaaagcgaaattctgtttgctcagggtttcctgcaaaccgcgtgggaaacgcaggaaaaagcattccagctgatcaacgagcagcatctggaacagctgccaatgcatgaatttctggtacgtatccgagcacaactgttatgggcctgggcacggctggacgaagccgaagcatcggcacgcagcgggattgaagttttgtcgtcttatcagccacagcaacagctccagtgcctggcaatgttgattcaatgctcgctggcccgaggtgatttggataacgcccgtagccagttgaatcgtctggaaaacctgctgggaaatggcaaatatcacagcgactggatctctaacgccaacaaagtccgggtcatttactggcaaatgaccggcgacaaagctgccgccgccaactggttgcgtcacacagccaaaccggagtttgcgaataaccacttcctgcaaggtcaatggcgcaacatcgcccgtgcacaaatcttgctgggcgagtttgaaccggcagaaattgttcttgaagaactcaatgaaaacgcccgcagtctgcggttaatgagcgatctcaaccgtaacctgttgctgcttaatcaactatactggcaggccggacgcaaaaatgatgcccagcgcgtgttgctggaggcattaaaactggcgaatcgtaccggatttatcagtcactttgtcatcgaaggcgaagcgatggcgcaacagttacgccagctgattcaactcaatacgttgcctgagctggaacagcaccgcgcccagcgtattctgcgagaaatcaatcaacatcatcggcataaattcgcccatttcgatgagaatttcgttgaacgtctgctaaatcatccagaagtgccagaactgatccgcaccagcccgctgacgcaacgtgaatggcaggtcctggggctgatttactccggttacagcaacgagcaaattgcaggcgaactggaggtggcagcgaccaccatcaagacgcatatccgcaatctgtatcagaaactcggcgtggcccatcgccaggatgcggtacaacacgcccagcaattgctgaagatgatggggtacggagtgtaa

SEQ ID NO: 157167 - DNA, 126 bp, Enterobacter cloacae
atgggcgagaagggttgcagcggcttcttgctcgagcagaaaaagatgacattattctttgtaccaaaatggacggcactgttgcaaatagtcggtggtgataaacttatcatccccttttgctga

SEQ ID NO: 157168 - DNA, 381 bp, Enterobacter cloacae
atgtccaagcccctcagcatcggcgctttcgccgccgtgcaatacctgccgcatatcgaaaccttcctggccaccggcgacggtgacttcgacggcccgatctgggccaaggccaccagtgaaatcaagttcgtcgacggccgcgcgagcttcacgatggttcatgaattcatgagccgcgacggcagccgcatctcgacggtcgacaccgccacaggcatccaggtgccgggcatcgacgaggtctcgctcaccgtcatgcacaaggtggtcgattccaccggcaagttcgaaggcctgcgcggcaccttcccgagcttcggactgcacaactttgccaccggcaagggcgtgcagcgcttcggcggcgaactgagctga

SEQ ID NO: 157169 - DNA, 1437 bp, Enterobacter cloacae
gtgatcgtgcacgagcgggcaattcggacactgattgcggcggcacttgcccagcttgaagttgaaacaggcaccgccatcgccgccagcgttgatccagcaacacttgatcgctggcgagcctcagtttcagagctgcgcccagatggacaaacccagcagagttggctatgggctgcaccggcgaaacactcaacccgccaaatcagcgaggtactggagcgcatcgacctgctttacacgctggacgttcataagcacctggcagacatccccgatctcatcttgcgccgctacgcgcgccgacttgtctccaggccgccctcagccggagccaagatcaaagagccagcgcgcaccgtggaggtcgcatgctttcttcggtattgcctgttcaccaccacagaccagttgatccttatggtgcagcgccggatcgccgatctgtggcgtcaggctgccgccgatgtccccgctaccgtcaattgggccgcaatgtacaaaacgctgctcggcgaacttgttgccttgagcgcgcaaggtgcggtgccagatgctgagttgcgtgcccgtcttgaagccttgatcaccgaaacccagaaacgcaaaccaccgagcagggcctccctggtccgcgagggattgattgatggaattcgccccgtgcggtcgttgctcgtcgccattgcaaagctgccctggcaggccaccggcgagcatcctgccatcgagtaccttgccaagctgcaagctttatatctcaaaggatccagaaagctgccagttgaagtggtggcaccaagtctgggaatgatctggcaggtttcgatctccagcccagaccgggaacgggcgtttcaggcgttggaggtggccaccctgtttgccctgcgccgcgcggtgcgcaatggctcggtctggattgagcacagcctgagctttcggggtcgtgcgcgcttgttcttcacggacgagcgttggcaggcagagtccaagaaacactatgcccgtctatcgttacccagcaaggctgccactttcttgaagcctttgctggccagagtaactgccggtgtcgatgcggtggccgctgcagcccgcagtggcgtactgcgcgtggatgatgaactccatttgtcgccattgcccgcagaggacgaagacccagaagtgaccaagctgcgcgcggctttggatcaccgcatcggtgaggttcaattgccggaagtgattctggccgttgacgcccaggtgcgctttagctggatcatgctcggacgtgagccgcgctctaccgacgagctgctgatggtctatgccggcatcatggcccacggcaccagtctgactgcggtcgaatgcgcgcgcatgattccgcagcagaaggcggcgcggcagtgctgcctcaacttcgggtgtcacgtctgtgctccttga

SEQ ID NO: 157170 - DNA, 906 bp, Enterobacter cloacae
atgcaggatctcaatgacttcgtctggtttgtgaaggtagtggagtacggggggtttgcggcggcgggaagggcgcttgaccaacccaagtccaaactgagccgcaggatcgcgcagctggaggagcggcttggcgtacggttgatacagcgcacgacgcggcagtttacggtgacggaagtggggtacactttctatcagcactgtaaggcaatgctgatagaagcagaagcggcagaggaggccgttgctgcgctgcaggctgagccgcgcggcgtcgtcaggatcacctgtcccgtcacgttactgcacgtccacgtgggaccgatgctggcgcggtttatggcgcgctaccccgggattaatctccagcttgaggccaccaatcgtcgggtcgatcttgttggcgaaggtattgatgtggctatccgcgtgcgtccgcgtccgtttgatgacagcgatctggtgttaagggtgctggctgacagggggcattgcctggtggcaagtccgcagttgattgaacgtatgggtaaaccgcgaatgccttccgagctcagtgaatggcctggattaagtatgggggccggtaaacaggtgcataaatgggagctcactggtccagaaggggcgaaagcggagatccactacgcaccgcgctttattaccaccgacatgctggcattgcgggaagcagcgatggcgggcgtgggcgttgtacagttgccgatattgatggtgaaggatcagcttgcgtcaggggaactggtacgggtgctggacgcgtgggaaccccgacgggaagtgattcacgcggtttatccttcgcggcgcggcatgctgccgtcggtcaggacgctggtggattttctgactgaagagtatgcgaagatggtggaggagtag

SEQ ID NO: 157171 - DNA, 678 bp, Enterobacter cloacae
atgtctacacctgcgaactttaatggaacccgtccggtcatcgatgtgaacgatgctgtgatgctccttatcgatcaccagagcggtctgttccagaccgttggtgatatgccaatgccggaactgcgtgcccgtgcggcagcgctggcaaaaatcgctaccctggcgaagatcccggtgatcaccaccgcatccgtcccgcaagggccgaacggaccgcttatcccggagatccacgccaacgcgccgcatgcgcaatatgttgcccgcaaaggcgagatcaacgcctgggataacccggaattcgtggcggcggtaaaagccaccggacgtaagacgttgatcattgcgggtaccattaccagcgtctgcatggccttcccgtcgatcagcgcggttgcggacgggtataaggtgtttgcggtgattgatgcctccggcacctacagcaaaatggcgcaggagatcacgctggcgcgcgttgtacaggccggtgtggtcccgatggatacggcggcggtggcctctgagatccagcgtacctggaaccgtgaagatgcggcggagtgggcggaagtgtacacccacatcttcccggcttataagctgctgatcgaaagctacagcaaagcacaggaagtggttaaaaacagcgaagtgctcgattcacagcgttaa

SEQ ID NO: 157172 - DNA, 690 bp, Enterobacter cloacae; identical to SEQ ID NO: 28130

SEQ ID NO: 157173 - DNA, 366 bp, Enterobacter cloacae
atgcacggcttgccgatagtggctcatggtgaagggcttgaacccaaaaaccgtttgcagctcgaccaagtgctcccgccgtgtctgttcgcgctggccgtactcgctccaactttccactggcatcttgagttgcgcggccaccatgcgcaacaggggcggaaacggaggctcatcgacgcccaaaaaggtgccagggaatcgcaagtagcaaagctgcacagcgaagcccaatcgattcgcggcgccgcgacgctgacggatcaccgacaggtcggtttcgttgaacgtgtagtgccgtatcagttcgtctttggcatctggcagtgccagcaggctttcgcgctcggtggcggacaggattga

SEQ ID NO: 157174 - DNA, 378 bp, Enterobacter cloacae
atgcttgttcttggccgcgttgaacagcttgccgatgatgcgatcgtgaaggtcgatgatttcatcggtgacggtggccatgccttcgatggccagcgctaccagcgtggcatagcgtcgttgcacctcgaactttgccagatcagcaggcgtcatctggccaccttcacgagcgattttgagcaggcggttctggtgaacctgccgctcgatgcctgcgggcagatcaagtgcttgccaggatttcaggcgctcaatatgttcgagcatgtggcgagagttcggtttggcaggcgactggcgcagccatgccagccacgtcactttactgccgtccttgcgcttgagaagttcgtccaggcgctgacggtggggtga

SEQ ID NO: 157175 - DNA, 1023 bp, Enterobacter cloacae
atggcccccgaactcgccagtgaactgactccacgatttaaggaaaaacccaagtggaccttcaatttcaccctggacggggaaaatggcatccccatcaataagcgcggcagcgggataaggaggcttatcctgttgaattttttccgggctgaggctgaaaagaatgtcgcggggacgcccagaaacatgatttatgccatcgaagagcctgaaacgtcacagcagccaaactatcagatgatgctgatgaaagcgttgctggcactggcaggccagccgcaccgtcagattatcgtcaccacccatgtcccggcgctggccggattgatccctgtcgaaggtgtacgttatgtcacccgaaatgaggcgggtgaacccgtagtaaaaatgccggatgacgctgtgctgaaggaagccactgaaagcctgggggtgctaccagagaccggtatggaaagggcgcaggggattgttctggtagagggaaagtcggatgtcactttcctgaggcatgcggccagttcattaaaacagtcaggtgtgctgccagcctctctggaggacgtgaaaatagtgccagtcctcataggagggtgtggcagcgtcaaacactgggttacattgaatctggccaacgatctggggcttccctggtgcgtttttctggactccgatattgggggagaccctgcacaggttatgtccattcagaaacgtaaaagagaagtggaggatgccggtaaggtattcttcgccacgcgtaaacgtgaaatagagaactatctctgcccggatctgatcgaagaaatgaccggtgtagccgtcacgtttacggacacctgtgatgctaaaaaaataattggccgggcggtgggaatgaagcccgataatgtgcttgataaattctggccccggatgacagcggaaagaatcatctcaagatcaacctatcatgacggaatgcaggaaaggattgagctggttgagatcctgagcgatattgttgccatgacgagataa

SEQ ID NO: 157176 - DNA, 270 bp, Enterobacter cloacae; identical to SEQ ID NO: 28148

SEQ ID NO: 157177 - DNA, 318 bp, Enterobacter cloacae
atgctgatgtatctgcgtcatgccattgaagcgcatccggaactgtcaaacaaagaaacgttcacaccggaaggtcttgatgaagccctttatcatggtgccgtgctgcgtgtccggccgaaagccatgaccgtggcggtgatcatcgcgggtctgctgccgatcctctggggtaccggcgcaggttcagaagtcatgagccgtatcgcggcccccatgattggcgggatgatcacagctccgctgctgtccctgttcattattcctgccgcctataaactcatctggctgcgcagacataaaaagagcgtgtcataa

SEQ ID NO: 157178 - DNA, 456 bp, Enterobacter cloacae; identical to SEQ ID NO: 25798

SEQ ID NO: 157179 - DNA, 306 bp, Enterobacter cloacae
atgtgtacggcgctggtctcctgtctgacaggcaacccggtacgcgctgatgtggcaatgaccggtgaaatcaccctgcgtggtcaggttctgcctatcggcgggttaaaagaaaaactgctggcggcacaccgtggtgggatcaaaaccgtattgattccttacgagaataaacgcgatctggaagagattccggacaacgtaattgccgatctgcagattcatcctgttaagcgaattgaggaagttcttactctcgcattgcagaatgaaccgtccggaatgcaggttgtaaccgcaaaatag

SEQ ID NO: 157180 - DNA, 492 bp, Enterobacter cloacae
atgaaagcttttgtttttgttaatgataatggtgcggcctattgtcgctatgctaaaaatgagatacctgcacagtttgtgtatggtgtatcaaaactggaaaaaatgggatttgaggtaaaggttggcgaaggacgcttattcaaagatttagtctccttctggaaatttaagcctgacttgttttttatgccatttctcaaaagaaagacgatgctctatttcattctggcaaaaattttcatgttcccaacaaaattcgcgggctggatgcatctcgacgtcttttcgccaccaggttccagactcaaaagaatgattcattcactgctgctgccttttttgcagctatatgttaaacgcattgatgccattttctttctttctgataaaactcgcgaagaaatcattctatcaagacagcttcctcaggaccgatgtcattttgttccctggggggggggaggcgaatttttacgccccctttgttaa

SEQ ID NO: 157181 - DNA, 231 bp, Enterobacter cloacae
gtgatcaaatacgcgaaactggatagtgaggtgttaagcgctatcggtgctcagccaacctctttttctgagctattcagcccttccgtgagacaggagtgcctcgtcattgctgaagcagaaggaaagcacctaatggacgtcttccgtattcttgaccgccggctccagtcactcaggaagcttggcgttattcagcacgtcaaaggaaaggggtggatacagccatga

SEQ ID NO: 157182 - DNA, 198 bp, Enterobacter cloacae
atgtctgaatctaaaactcactaccgaaaggcttttgactctccatacctgagcagcgccgacatcgttgagccaacggtgctgacgatcgcccgtgcaacgttaaaaacgacaaaacaaaaaaatccaaagacgtttttaacactgcttattttgaagagcgcgagctgcgacctggcgaaaagcttaagccgatga

SEQ ID NO: 157183 - DNA, 1083 bp, Enterobacter cloacae
atgattaaattcattgatagtatttcttccatcaatcctcaaagttacatggatggtaaacttgtagatttttgggatattttgaacccgaagaaagttgatgatagtctaaaaaaaatttcaatttgtaaaaaactatcctcacttttaactcaatatcgttctggtttttatttaaataccgttgctgacggatgtagaataacagaacttagacatattgaatatcttgaatatttggagcgcaatgattatcaaaaattgaaagctgttgtactggctactcctaatgaacttgataattacataaatgaagcttttgaaatattgcatagagacgatatttcaatatgtaccaatggaatatggcaggctgtaagccttggtgaattattatctacggaagttttttcatatggctcattcagaaagagtgataaatgtattttattttataagaaccttgggatagataaaaaacattgtctctattgtggcgatacaaaactaaatatcatatccaaggaagtgccaaatgctaaaaatcattatcgcaataaagatggaaaaatattatttgatttagatcacttttatctcaaatcccgatatcctttcctttccttatcattttacaatttagttccatgctgtggcttatgcaatagtagatatcgctcaacgaaaaattttgatatcacttcacatattaatccttactttgaatcctttgatgaaaattatttttttgaatttaataaggcggaagtagccgtttctattagaactaccgtcccatgtttagaaaccttaaatgtaacatttaagcctaatgcccacaaaccgggtgataaaaccgctagcgatctatgtattgaagaacgttaccaagaacaactacattatataaataatatacttaaagagatcatatattatagtgatagagattgggatgatgttgagattataatttgtggagtagattatgacagaatacctaatgagcgtagcaatattcttgatgtcagcatggctaaattcaaaatggattttgtagatgtaataaaaggttacttttag

SEQ ID NO: 157184 - DNA, 264 bp, Enterobacter cloacae
atggtctttaagcctgccggagggggcatactcaggcaggatgaaggcggaacctattttgttcagttggatgtgatcggtgccatcaatgaagaccgcaaagcgaataccgcagctatgggcattatcgattacatacaggctaatcctattgcagatccttgcatcggatacatcgaatcctacggtatgcctcaaccaatgctaaccgctgagggacgggcagtattttcgctgcgcttccgctgcgtatacggcgaataa

SEQ ID NO: 157185 - DNA, 441 bp, Enterobacter cloacae
atgggtatcaaagttaaaggcatcgatcagaccattgctaagttgaaccgcatgattggggacgttaaaagtgtccgcatcattcgggctttgtacttagcatctgaacaggttcttgagtcggctgctgtgataacaccaatagacacatcaaccctcgttaactctcggtttatcgattttgattcaagcggcaatcgaattacggcaaaggtggggttttctgcctcgtatgccgcctatgttcatgatgcgcccggcaagctaaagggccaaccaagggcgcactttggaaccaccagatcaggcaagcagtttggtggtggtacagagcaaggcgtttattggggacccggtggtgagccgcaattcctgaaaaaagcttttgagcaggttaagccacgaatccctgaaattattgcaaaaggcatgaagaaatga

SEQ ID NO: 157186 - DNA, 207 bp, Enterobacter cloacae
atgagtgcgaaggccggactcgaacatcgctactatccttatgatcttaagggattaaaacttaccaaattgggcatgataccatcattgataccatcagtcccgactggtgataatcgaacaaagagtatattaatcttgtttgcttacactaacttcgactttatctatatcataaatacttacattgcctccagtcgcatttaa

SEQ ID NO: 157187 - DNA, 234 bp, Enterobacter cloacae
atgagcttattgactagatgggccaataaattactacctgatacagcaaaagagaaaatcatcaaacacgaagtgaagaaactggttaatgaaaagcttaagcttgatggtgagctagacaagcatgttgatgcaatagccgaaaaggttatgggcaaagtggatgcctcaaccatattcgaggcaaaggatatctacgacaagctcaagtcagctaaaaccaacaaggattga

SEQ ID NO: 157188 - DNA, 345 bp, Enterobacter cloacae
atggatgggactagcaagatcgagattgaagactacaacgaggacggattttggtcaaaagttaagaagtactgtaaagcgatcgggaaagactcgcttgagcaggtactccgtctgtattacgccttggatagtgaaaactgcacagctaaacacagagcaaccatctacggggcgctggcgtacttggtatcgccgatagatattatccccgatttaacgccgatactcgggtatacggatgacatggctgtaatcgctgccgcccttgtagcagtggcaggttgcatagatgatgcagttaaaggtaaagcaaaagggaaggctgatgagcttattgactag

SEQ ID NO: 157189 - DNA, 936 bp, Enterobacter cloacae
atgttaagaattcctgactcagactggcagaccgttgacggggtcccccagctttccgttgctttcttgcggaaaatgacgcctcaggcaacaagatttactcaatgggcacagcggacacatgccaaattgctcaaggctcccgaaaatgtcctgtcgtgctgcacatccggcctgattgacggtgaaattcccgacaaaaacggctggattcccgctggcgatgcccttgccctgctgacttacagcatccactccagccagaacggacttctcattgatgcaattgagcttaaatctggtttgaaactgccagttaggtccggtgaaagccgtcttgaagggcaatttggcgtcaaattacacgatttgatcgtcgaactaaggcaacaaccacgattcacaagctatgaactcgaacggcaaaagcagatcggtccctacagagtagatttcttcctcactgagcagtggtacaccgatatggcaaaaggaaaaaccgctaaacgccagttcatcattgaatttgatgaggaggctcatagaacgacacgttatcagttcaacgataaacgacgggatcggtggttacggaaaaatctgcacggtacaaagctaatcagggtcagacatgcagaacaggaagtatggctggaagcggtccgccagctaaagcggttcgtcagtctggaggattgctattcccactgcctgcgaatggcctgtatcagcctttcagactccacgctaaagataagcagcgagtcagcccgaaaagcctatgatgcagcccataacgaatgcattttcctgctaaaaagcccacggcagcctctaagtgagatgggtaaactgctggacaggctgacaatcccctttgataaacgcagggacatatacttccaacgtgcgaaattgaggtcatacggcatataa

SEQ ID NO: 157190 - DNA, 1158 bp, Enterobacter cloacae
atggacagctacatggagccagatccggagaaaacttatataagccccagtttgccatcttttggtaacaaagatttgaaaatacgaattgcctcaaaagcgatagttagtaatgaaggatatgagttcgcaaaaattaaggatgaaattatactcaggcacaagctagatgcatcaacttatataacagcgaagttttttgaaagtagtaaggaaatatttgttctatctattcaaaagttttccacgcaaactggacagccttatggttctggtttttcttttataggtgatgagattggtaagtttattgaatttctagccaacattaattcaatgggctttaacggcaatggccccatgaaaattacggatgaggagcttaggaaaatcgttttaactaataaccaagcttcacaacttttaaatgggaatgagggggctatctctgaggcgcttaaaacacatgtgactaaaaaagatattatatcaatagcatatcgtaaaaaacaacttgatacatttaatcgacttcttaatgatgaagcattttttgaatatgctaagaaagaaaaaaactgttcaaatgaggctttgtggcaaaagttttttgaaaaaaatccttggatctttggatatggattaagttatatctacttatcaagtttgaacgataagaaaatagagcaagttgttcagggagcgcagattggccaacatggaaaacgagttgatggattgctgaaaacaagaggtgcaatttctaatctatgtttcgttgaaataaaaacaaatacaactggcttactagctaatactccatatcgctcaggttgttgggccccatctagtgaattaactggtgcggtggcacaaattcaagggacagtttcttatgctatggattcaataaaaagcaatttaaatttaacagattcttatggggatccaaccggagaggagctatttaattttaatccaaaatcatttttggttgtaggtaatctctctcagttttcatctgataatggtatcaatcatgataaacttcggtcgtttgaaaattttagaagcaatttgatccgtccagaagttatcacttttgatgagctgtatgaaagagctcggtttattgttgcatttagcgaaaatatatga

SEQ ID NO: 157191 - DNA, 327 bp, Enterobacter cloacae
ttgagaaccgtcgagatactgcaatacaccttacgcaaaggcagcggcgccacttttcatgccatcatgcgggaaatcagcgttcccctacaccagcgctacggaatcgatgtcgtgtcgtttggtaactcgcttcatgacccggattgctactacctcattcgcacctttgatagccctgaaaagatggctgtagttcttgatgctttttacgcaagcgatgactggcgcagcggcccacgcgaagagattattcacagtatcgaaaccagcattagaacagtaatgaacctaccgccagaaagcgtgaacgggcttcgaaaataa

SEQ ID NO: 157192 - DNA, 501 bp, Enterobacter cloacae
atgaagcgtaggcactggataagcatcgaaacacacaagaagttctatagggctcgcagtgagtttgcggactggacggacagggagtggaaacacccggtttcctgctttcttttgcaggtctggggattcttgatgtttgttattcttggactggcctctctgcttttgggtgttggttcacataaaaatgccttcccggaattatatcagaacgatgaaaagcgcagaccaattcgctttaagtattccttgacctcattcgtagagggtaagggctggattttgtttgtagtgttcgcacttttgttcgtctcagtcgccgatgcattcaacccattctatttaacatcgtcctttatttattacgtaatcaatggggtagcactatttgctgggtggtggggtggggtatttgtttatttaaggttagttagttggatgagagaacgcaccatttggctatcagaatggcagcgtagatgccctgatgacaagtag

SEQ ID NO: 157193 - DNA, 231 bp, Enterobacter cloacae
atgggtaaatataaaaaagcattcgatgaagttaacttacttatgaatgaggtgcttgataaattcaatatgacattagaggaaactaattttcatcctacggaagatatatttagaatagttgttagagaaatcgaagttgataacttgaaggtaatatcttctatttttacgaataatgaatatcatgaggtggtaatccccccgaaaaaccggtgtgtttataagtag

SEQ ID NO: 157194 - DNA, 507 bp, Enterobacter cloacae
atgaaaaaatcacgttttactgacagccagatcatgtccattctgaagcaagccgaggccggaacaccggtatcagatggtcgctccgtccgtttactgaatgtcatcgatgactttaatcgtgaagcactggcgattgaagtggatttttccctgccagcaaatcgtgtagtgaggactctcgaacaactcattgaatggaaaggtaaaccggcagcaatacgatgcgataacgggccagaatataccagcaaggtactgatgtcatgggcagctcagcagaatataacacttcgttttattcagcctggcaaacctcaacagaatgcttgtattgagcgatataaccggacggtacgttatgactggctgggccagcacctgtttaactcactggacgaattgcagggctatgccacgcagtggcaatggttttataatcacgaacgtccgaatatggcactgaatggcttcacgccgatgcagcatattcaacgcatgacctga

SEQ ID NO: 157195 - DNA, 225 bp, Enterobacter cloacae
atggaacatccaaagttccgcgccgcgttcgatctgctgtccctgcgtgcggaaattgaacgcaatcaggagctgcagcgtctggcccagtggtgggctgaattccaggtttccgctccgccggaacagaaggatatgctgaccgggctggatgaagagcccgcaccgcgtcgccgtcatcgtcgtccgcgcaaacgtgcgccgcgtcgtgaaggttcagcatga

SEQ ID NO: 157196 - DNA, 849 bp, Enterobacter cloacae
atggcttacacagcaacggttatccctgtaatgatcgcatcccctggtgatgttactgaagaaagaagaattattcgggaagtaatccacgaatggaatgatattaattctgccctctcgaaagttatgctaattcctattgggtgggaaacccacacatcaccggagcttggcatgagacctcaggagttaattaatcagagactgctagttgattgcgatctattgattggtgctttctggacacgacttggctctccgacaggtgatgaagcaagtgggactgttgaagaaattcacaagcatttagacgcgggcaaacctgcaatgatatatttttcatctaaacccgtagtgcttgatacagtggatatggggcaatatgatgccctaaaagcattcaaacaagaatgcatgcaacaaggcttgattgagacctttaatgagtcaactgatttcaaacataaattatataaacaattgacgctgacactcacaaacaattcatatctgaaaaatatcataaactcttatcgttcagaaggaactgataatttaaaacaagaatctcctaagatgcttctatctgaagatgcaacttttgtcttgaagatggcatgcgaggacgaaagcggtgggatattaatattagagcatctggatggaacagatattcatgttggcggccaaagtctcggtggggaaaatgctagagaggttgctaaatggaaatctgctttagatgaattgaaatccaatgaattaatatcttctcgggattataaaggcgttcaattcgaagttactcataaaggatggactctttttgaatcattgaagaacaagtaa

SEQ ID NO: 157197 - DNA, 633 bp, Enterobacter cloacae
gtgggcgagcagcgtgaccacttcatcgagcgtaccgcgcagtgggaacggtatgctctccagaataagcttgcccgcctccagcttggagaagtccagcacgtcgttaatgatcgccagcaggttgttggccgaacgttcaatggtgtgcaggtgatcgcgctgagtcgggttaagctcgcttttcagcgtcaggcgggtaaagccgatcaccccattgagcggcgtacgcagctcgtgcgacatattggcaaggaattcagatttaatccgcgccgcttcctgggcgcgctttttcgccagatccagctcaacgttctggatctccatctgctccagcgtttcgcgcaggtcagatgtcgcctggtcaacgttatgctgcatctcttcgtgataggccgccagcgacatggccatagagttgatgccgtttttcagcatatccagctcgcccagcataaaaccttctacgcggctgtcgagctgtccccggcggatgcggtcaacagtattgaccatattgcggatggggcccgttacgtcgcgcatcaggcgccagccgaagatcagtgcaataccaatacagaacagcatcatcacgccagagataaaaatctctttgtactgctgtag

SEQ ID NO: 157198 - DNA, 363 bp, Enterobacter cloacae
gtggaaagagatatcgccgcccatctcgtttaccagcctctgcgtaatcaccagccccagaccggtaccgccatgacgacgggagatactggcatccgcctggcggaacgcctggaacagacgcgactgatcgcgctcgggaataccaatcccggtatcgcggatctgaacctcaatctgtaccttgttgttactgagcgcgcgtttttctaccagaatgtcgatgttgccgctttcggtgaatttaatggcgttgccaacaagattggtaatgacctgctgaaggcgcagaggatcgccgatgacgttatccggcacgtcgtttttgatgttaagcgtcagttcaaggcctttgtcgtgtga

SEQ ID NO: 157199 - DNA, 1179 bp, Enterobacter cloacae
atgaagggaatgcagaagatcaaaaggggtaagagcttctctggtgttgttcaatatgcattgaagccaggttcacatcataaaagtgatccaatcgtcattggcgggaacatgttaggtgattcagcccttgaactgatcgctgaattcgatagcaccaaacatcttcgccaggatgtcgcaaaaccagtttggcacaactcgcttcgcttacccaacggtgaatcactaacggctgaacaatggtccagcatcgcagatgactatatgaggagaatgggattcggtgatacccatctccgttgctatgtgcttcatgacgattcggctggtcagcacatacacattatcgccagcagaatcgacatagctggtgggaagctctacttgggtaggaacgaaaaccttataagcacacgaattattagtgaactcgaaatcgctcacggtctgacagtgaccaagacagcaccttccattacaccaaagcaacagaagcgaagaaaggtatcccgtaatgaacaaatgctttcagaacggacaggccttccctcccccaaagaagctctccaacagatacttgataaaagtttggcagatacacctgaccttttaacttttatcaaaaggctggaagaagcaaaagtcggctggacggctaacattgcttctaccggtaagatgaacggcttctcattcgaataccgcgatatagcattcaaagcttcgcaattgggtaagagctactcctgggcaaatctcagtaatcggcttaacaacaaccccgaccacttagaagctttacgaaccaacacaccggcaaaagaccaccctgctcctgctcctgctcctgctcctgctcctgctcctgctcctgctcctgctcctgcaacagttttgaaaaccgctgagagaaaggaaagtatcggtaaaaaaattgcagaactggaactacggctcagagaagacaaacggaacgaaatcgtagaaaagattcttcaaaagaatgcagtcaaacagcaaaagcatctcaggctcaccggctggattccctttttacaacggctcatagagcttctcagaaaatatggaaggagcatcctccacaaggttcctacaaacttctcagaagtctattcaacacatcatctgaaacccgcaagaaaaattcgtttatag

SEQ ID NO: 157200 - DNA, 258 bp, Enterobacter cloacae
atgagtgatttaacaaatatttatgagggttttttctctcagccgggaagaataaaaagttttgaaaaaaagagaataatttcagagaaaggagttttaatcagcttctatgaagcacaagtggaatatcctaatggcgagataagcagtcatatatactacccagataaaaaaataaaggatgtattaaatgtctgggttgtattcgactgctttgtaactaatgaaaaaagatatattatgcatatatatcaatga

SEQ ID NO: 157201 - DNA, 297 bp, Enterobacter cloacae
  misc_feature (269)..(278): n is a, c, g, or t
atgtattcattagttatagctgaaattttcatttataaaaatccaacgatttctgatacaaaagcatatgaaaatatttatatcacttttaacccttatagtggtactgatttccgatcacatgcatctctcagtgatgctcagcaatatgttgataatgaaaataagaacgaatcaaaaagaagtgaagctcaaaaaagcgatgtaatcaccgatactttaaaattgaaatatgacaattccatagaagatacagtcagtatagatannnnnnnnnngaagatacagtcagtttag

SEQ ID NO: 157202 - DNA, 192 bp, Enterobacter cloacae
atgagcatgaaaactgatatcactgaactcccgccaaacattggctatggcgttcgtcgtcgctggcacgctcaacgtgggcaacgaaatggtcgtggtgggagatatcagcgcctgccgtcacgacagaatttaagaaaatggattgcaaagcgcttgattgcagaagttttagcggagtccgcccaatga

SEQ ID NO: 157203 - DNA, 570 bp, Enterobacter cloacae
atgaaaccaacatacgaagagctggaagcaaaatgcgcggcgctggctgcggagaatgaggggctgaaatcaaatctgatgtactggaacagtgaagatgcagagccagccagaagcccgctggatattgctcatgaatccagctttggtgagggtgtagagttcgatgttcaggtggctgcgcgcatgccaagcatgacgtatcgagtggtgcgcagaacaacatactcaacagaaattgagcttgtgagtggtggaataccagaaaccccggcgaccgacgctttcctggctgaagtgcgggccagtgctattcctgaaggttacgtgcttgttccgcaggaaatgcacctgtcatccgaagccatggaggggatttgtttccactgcggagacggcgaccataaatttggtgaattcactgatggcacgttgtttgtcggggaagtcgattacggcgatgggaagaaggtgcatggtctgcacatcgcaacagccgattatcccgaggaaggatgcgcgacaatctgcgagttcgccgcccagcttcgcaaaggagtgcagtcatga

SEQ ID NO: 157204 - DNA, 351 bp, Enterobacter cloacae
atgattacgagtgctaacgactcaaccgcaatgcaaatcatcatgaactcacaatacgccgagtttcccgaaaccctcctgacgctggagttatgccgcgccactgcccgggctgacggtcgcaagattggcgaatcactccgggcctgcgcaaaggcaaaggctcgccaggctaagaaccgcaatctctacaacacgctgatcgagatgtcccgcagccagttcccggaaacgcaaatgacccgcatccgtggctgcgtagaccggatggagaaggccctgggtcgtgaaatgcgcgttctggatatcacagcagaagatgtcatcgaatttagcgaggaggcggcatga

SEQ ID NO: 157205 - DNA, 438 bp, Enterobacter cloacae
atgagacagcactactgcatcgttaacgacaccgttaaagagaacctcattgcgtacattcgcaccctgcctgtaaacgcagagttcccccttgttgtgagttttgccgaccctaagcgcacccttcctcagaattcactgttccacgcgctttgcggcgacctggcaaagcatcgcattcagtgggctggctctgcgtggtcgcttccgtcatggaagtcaattctggtttccggtcactccattgccactggcgggcaggggaaggttatcgccgggcttgagggcgaattggtggcaattcgcgaaagcacctcatcgatggggatcaaacggatgaacagcctgattgagtacacccaggctttcgtcgtcagccagaacatccagcttcgcgatgtccgttatcgtggcgactatttcgggaggcttgcatga

SEQ ID NO: 157206 - DNA, 1365 bp, Enterobacter cloacae
gtggtggttcgcgataaggagcatcagacgcaggacgtggcggacctgagccgcgacacggcgaatgcaaacggcagcatcgacgccatcttcgataaggagaaagagcagcgcaggatggaggaggcgcagcttatcggggaaatcggcagccaggtggcggatatcgcccgcacgcagggtgagataaatgcgctggaggaagcgcgtaaggtacatcctgagatgaccaccgaccagctgaaagacactcaggcctaccgtgacgcgcaggcagaatacggcacgggcagcgacatgcagcgcgccatccaggcggctacctctgccgctcagggtctggcgggcggcgacatgaccgccgcgctggccggagccgccgcaccgtacgtggcggaggttatcggccaccgttccgggctggacgacgggatggaaaaagccgccgcccacgcggtggcgaatgcggtgctggccgcgatgcaggggaaagacgcgcttgcgggtgcggcgggtgccgccgccggggagctggcgggcggaattgcgctggagatgtacgggaaggatgttgctgcgctgagcgaaagtgaaaagcagaccgtcagcgccctggctactcttgccgcagggatagcaggcggcgttgcgggagacggcacggcaagtgccattgcgggggcgcagtccgggaagacggtggttgagaataacctgatggccgggagtgaggatgcacaggttgcgtggctacaacagcacggaactgatatgacgagctgtgcagatgccccctcttcagcaagctgccagaaagcaatgaatgaacgggatgccgtcggactggcactggcaagcggtggcgtggcgttattgcccggtggtgctcaggtaatgtgggggcttggtgctggcgctaatgccggggtcagctattgggtagatggcgcaattgacccggcgaatgtcgccatcgctggttgggtaaacatattcagtatggggaacggaattacaggtaccgtgggctggaatgcggcaggtggtgcgctgggtaactggattgacaataaagacccactttctagtgcacttatcaatggtgtcggtgcgggtattggttatggtattggtaaaggactttcatggggcgttaatgccggggcaaactggtggaaaggcggctgggatccgaagtttaatgctgacctgagacagtttactgaagtaaaaggggattatggtatttcaaaagaaattaaaccaagcgatattcctggtaatttcggtgacattggagcctctttctcctccgaatatggcggtaaaaaacttgaaccattcattgaggataagtttaaatga

SEQ ID NO: 157207 - DNA, 1137 bp, Enterobacter cloacae
ttgtctcgtgggctcggagatgtgtataagagacagttacggctcattgttacgaaaaaaaataccatcgtgtcgttaataggggataaggaacaggctatttatactgggcttggagctattgtaaagaatagaagtgaattaatagatttttttgagcttgatgacttggctgagatgagattgactggttgctttagaagtagtcaatcaattattgatttttatagtaaatataaagatgagccatataagatccattctctttcagagtataaagagtttaaatcagttcttgtcactgaaagcacaatagactttactcaattatcgtcatacatttcaagtgtaattaatattcacttaggaaaaggtacccctcctaatgagatcgcagttttgtgtccaggttggtttgatgtaattaaattatctaatgagattattgctctgaatcctcattttgaaatagatggagtaatggtttctccaataccaaagaataatgagaacttttggctgaatctgattaaattgcttttaattaaaaaaacacctaataatttcaatctgagacagaaattgcttcgtgattttcacaaacaattagacgttttagaaccatggactgaatctttatcctcaaagcaaatgatgaagtggataaataaaatagctattacaattgattatgattgtgatatttctgattggataaataaagtgattagttgtttttgtgactatgtgcatattgattgcaattctgaaagctattacttcaaagaagcagaatctttgattgatgccactcaaaatagaatgagtaagtataagatgacttataaagcaaatgacttgcattcgttttttaattcaaaaagtggcataaaaataacgacttgtcactcaacaaagggtgatgagtttgaggtcgtcatttgcaccagcctgcttaatggaaaaatacctaactggaatgatattatagggtgcagtcttgaacatcagaattatgttgcccgtagacttctttatgtcatttcatcacgagcaaaaaaacatttatatatgatatctgaatcaggctgtaaaacaaatggaggctatccatataggattacacctcaattatga

SEQ ID NO: 157208 - DNA, 288 bp, Enterobacter cloacae
atgttcgcaaacaaaataggtaaaggttggttagccacgagtatggttgaacatcttaatgttaataatagaattcccgactatattttgagtgcagttaagtttgctcttggagatcgtgaacttaatactatatatgagaaaatactttcctacaatatgtcatatatgggggaggattgtgagaaggaattcaataccataaatagtaagcctgatttagccagtaaattaacacaatataaagaatgttttagtgatacttttgttcgctttatggagttgtga

SEQ ID NO: 157209 - DNA, 270 bp, Enterobacter cloacae
atgccagaaaacagcaaaaagatgacaaacttaagacatccctcgccgcgcgcggtcgtgctggcatatgacggtttatgtacctttgagtttggcgtggcggtagagatctttggcttgccgcgcccggagatgggcgaggactggtatcagttcgccgtggcgagcgtggatgacggcgagctccgggcaacgggcgggatccgtattctggccgatggcgatctgcgtctgctggagacggcggatctggttgtcgtacccggctga

SEQ ID NO: 157210 - DNA, 246 bp, Enterobacter cloacae
gtgaaagactgtaccgttgcttataccgtctctttaatacagtactttctagtgtcgctcgtgctctgcttgtttgccacggtatttccccagcgtatgcatacgttcaataccctgtttttgccgctgtcggtggctcagctagtccttatacgatattgcggccatcagatcgataagtatgttattgatggtggttatcacggcgcaggtgaccggatcaacctgcgaaggatccttatctga

SEQ ID NO: 157211 - DNA, 1200 bp, Enterobacter cloacae
atgactttaatctggtttcaggccgcgctgtggttaggactcgccttaatcgccactatcctgtccatatacctgcgtatcgcgacagcgctctccgaaattgtggtggggacaattgcgcagctcattattggtgccctgttaggtgccagcatactggcaggagatgccagctgggtgcagtttttatccggcgccggcgcaatactgctgacttttcttgccggagcggagctcgacccgggcgttttcagaaaacagtggaaacaggcgctgattattggtctgctcagctttttcctgccgtttttcctctgtgcggcgctggccagatggtatctgggatggatgcccgaagccagctggctggccgggattgccatgtccacgacatcggtcgcggtggtgtatgccgtgatgctggagcttgggatcaatacctccggctatgggaaaacggtccttgccgcctgctttgtcaccgatctggcaaccgttattgctctggggctaattttcgccccctttacgctcagaaccgtcgcatttaccggcgccatggtggtggcggcttttctccttccttggcttaccccccgtttcttcaagcgctttggcgatcggccttctgaactggaagccaagtttttaatgttatgtctgtttgccctcggtggactggccacctgggcagacagtgaggcggtactgccggcgtatcttatcgggatggtgctggcgggaaccgtcggtaaggatcatgtgctgatacgtcgcctcaggacgatgacgttcggcctgctgacgccgttctattttatccgggcgggttcgctggtttctcttccggcactggccggcgcacctggcgcttttatgatcctgctgctggtcaaaatgctcaccaaacttgccggggtttatcctgtgtgccactggtatgggtcttcccatcaggaaagtatgtacaccacattgctgatgtccaccgggttgaccttcggcacgatttcggcgctgtttggcctgtcacatcacctgataaatgaggcgcagtactcatcgctggtcgctgcagtgatcggcagcgcagtgctcccgacgctaatcgcgaatgcatttttcttaccacgccatttactgccggaaaacgacaccgcccggcgtgtgacggatgaagggatgaagaaagcggaataa

SEQ ID NO: 157212 - DNA, 417 bp, Enterobacter cloacae
atgaaccgaatactggttgcctatgatggctccgaacccgcaaaagaggcgatgaattttgcgtctgaacttgcccgtcattataacagtgaattgtacgttattgccgtttgccagctgccggagtttggtggcgagctggagatgcaggattttgttagccggacacaatcgtattttaaccagatgatgcggaatttgaaaaagcagtacccggagctgaaaaaagagaccaaattccatgtggcaatgggccatccagccgaacaaatacttcgttatgcggatgcgcacggtatcgatcatatcgtggtcgggcaccgcggcaaaacgttgttttctcgctggctgctcggatccgttacccgccaggtcgttgaccatgccctttgcccggtaacggtggtcagaaaataa

SEQ ID NO: 157213 - DNA, 1539 bp, Enterobacter cloacae
atgaattttatcagcatattgttcgcgacgcttgatgaaagcagaaaacataaaataaacacccgacagcctgaacactttgttgatttgaaccttgatcaagttgtgacggcgattgtcaaaggtcgggaggagtatgatatctctccattcttttatactacactggaataccctgacgatatttactaccgtcagggagttattcaggatgtggctaaagacgacctctacaatgccctggtggaatattcagcaacaatgcagaaaataagggagattggttcgcgtaaggagaaccgctactatcattaccagcagcgtcgatgggaactggagtgtgttttgctgtactgccgtgccgtgaccgtgttgcatgagcgactggaaaccctttcattcacgtcctgcgggatgacgaacttcagaagttatctgtctgaatatatcaacagtaacggatttactgatttatctaccgttgctcagaccatcagaaagcagcttgaaaatatccgctacagcctgaggatcaaaggggacaccatcagcgtgggacattacgcggatgagataaattacagtcatgaagtcctgcgcgttttctcccggtttaagcagcatgatgtccaggttgacgtcgacttcaggagtcatgatggcatcatgaataaccttgaagccagagttctggactgtgtagcgaaacttttccctgctgttttcgcagggcttgatacattcattgaagctcactctgattatcaggaacatacgctgaaggtctttgagcgagagattcagttttatcttgccagcatccattatatccgccagtttcaggcggcaggattaacattttgcattccagagattaatcgcgaaaaaaaagagattacggtaacgtcggcttttgacctggcgcttgcggacagtctgattagcaagcagggcacggttatcagtaatgatttttatctccacgggagagaacgaattttggtgatttccgggcctaatcagggtgggaaaaccacatttgcaagaatggttggccagttacactattttgccctgctgggactatacgttcccgctcaacaggccactctgtatctggttgataacatttttactcactttgagaaaagtgaaaacattcataatttgcgaggaaaactgtatgacgatctggtgagaattaaagccatactggataaatccactgcccgcagtctcattattatgaatgagatattcacctccacgacctcacacgatgcgatttttctgggtacccgggtcatagaaaaggtcatttcgctggatgccatttgtatctgcgtgacgttcatagatgaactgacagcactgaatacgtcagtcgtcagcatgatgagtacggtggaagtggggaatgaggcttcccggacctataaaattatcaggaaacctgctgatggtgtggcatggtcggtcaccctggttcagaaatatggactgacctacgaaaaaataaaggcgaggttaaacggatga

SEQ ID NO: 157214 - DNA, 1521 bp, Enterobacter cloacae
atgaaagcatacctgatgtataaacatgatgattttatcgtggatgaatcatttcctgcgcactttacccttctgagtaaagatcttgagctggatgtcctctttcaggcgctttccggcggagatgattttctgtattcggtggtgagaaaagcgtgttcacaaccattaacagaggtacaggatattgaatatcggcaagctatcctgcgcgattgtctctacaaccctgaaattttcagggaattttataaaattgtggtggattgcctgttaatggaaaaggagaagctccattatggtattttcgggcggtatccttccgccattcttcatcaatccatttcgttcacccgttttctgatggacaatttacgcaaggtcagagggattgcggaaaaaaaccttcttcatgtcgcttcacccggtatggaacgcctgtttgtcatgattatgcaggagctgaatgatgaatatcttgaggtgatcgaggaacatctccgccagatgacgtttaaaaaaggggtattgctgagcgcaaaactgggggcgggcaatcgcggagagggttacgtgcttcgacagccagcaccggaatacggaaactggttccgtcgttttttttcccgcaaaccggagcattatacggtaaagattgctccacgggatgaaaacgggttcagagcgctcagtgatttgcaggatgagggactggtgctggttgccagcgcaatggcccagtctacagcacatctgatcagtttctttcgcgccttacgtgccgagctggggttctatatcgcctgcctgaatctttctgaggcactgagccaccggaatatcccgctgtgttttccggttccgatctataaaagggaacgctatctggtcttttattcattatttgatacctgtctggcgctgacctcttcggataccatcatcagcaataccctgaaagaagatagtaaaaacacatttattatcaccggggctaaccagggaggaaaatcgacgttcttacgcagcatcggcctggcccagataatgatgcagacgggaatgtttgtttctgcagaatgtttcagtaccgatatctgtaggcaaatttttacccattttaaatgtgaagaagacagccatatggtcagtggaaagcttgatgaagaactcagacgcatgcgggatattgtcagtgaactgaagccggatgatctggtgctgttcaacgaatcattttccgccaccaacagccgggaaggcgcagacattatcaggggtatagtaactgcgctgacagaatgtcacgtgaagctgtttttcgtcacacacacttcggagttcgcttgcaaattttatcatgattatcagaaagatacggtttatctatgcgcagaaaggcgtgaagatggtaaaagaaccttccgcattacggaaggggcaccactggataccagctatggtgaagacctctatcgggaggtcttcacgcctccggcacactcaactgaaagccactga

SEQ ID NO: 157215 - DNA, 2310 bp, Enterobacter cloacae
atggagattccccctgagaataacgcaaagggactttgcgaagccgaggtgcagaccaggcttgcacaatatggctataacgaagtaagtgaacagcctccgggccagctacgtgctgtccttaaacgtctgtggggccccatcccatggatgctcgaaattgcgctggtactcgaagtggctctggggaagacgactgaacccgtcatcattgctggatggcttgctttcagtgcgatccttggcggcattcaggaacgacgcgcgcagtcagcacttgacctcctgcgtaaccgactgagcgtcaatgccagtgtatgccgtgatggcacctggcaccgggtaccggctcgcgagcttgtccccggggacgttatcgccttaaccgcgggggatctggttcctgccgactgtatgattgatgagggaaccgtggatgttgaccaggcggccctgaccggggagtcaactgctgagtcacacagaaagggggacactctctattccggatcgacggttacgcgtggtaaggcaacaggaactgtcaccgccacaggcgcccgaagctactttggacgtactgcagagctggtaagaaaagccagctctgccagccatcttgaacagcttctgttcaccgttgtgcgctatcttgtgaccattgatgcaatgcttgcggtcattctggccattgtttcactcttgcgcggtgaagatttgttgcccctcgttcccttcttccttgttctcattattgcgactgtcccggtgacaatgcctgcagcttttacggtcgccaatgcagtggaagcacggcggcttgcgaatcagggggtacttgtcaccggcctgtcggctgttcaggaagcagcaaccatgaatgtgctgtgcatcgataagaccggtacgctgaccagaaaccagcagtcagttgccggcataacggctcttccgggagagagtgaggacgaggttctggcctgggccgccgcggcctgcgacgaaacgacgcagggaccactagagatggcgatttttgatgcgctacgacgccgagggggaatactgcatgtccgcgatcaatttatcccgtttgatcctgccacaaaacgttccgaagctcgcgtacgttcagatcacgatggaccatccgttcacgttattctgggttcaccgatggtcgttgcctcattcgctgaataccctcctgagttcaccaggatcgagcatgtcatggcggcgtccggtgccaggatcctggcagtcgcaaccggcacagaaggtcatatccgtattcgcgggttgctggcattcgctgatgcgttgcgtgaggatgcagaaacccttgtcagggatatccggtcactgggtatcaggataatcatggttaccggtgatacggttgataccgccagagttatcagccgccaggtaggtctcggtgaccggttcggcgatgcggccatggatctgcagacaccacaccactttgatgcttttgctaatttctatccggaagacaaattccgtctggtacggtccctgcaagaaacgggctgtattgtcggcatgacaggggacggtgtgaatgatgcgccggcactgaaacaagccgaagtaggtattaccgtacaggcagcgtctgacgtggcaaaagctgctgctcatgtggtattgacccaccccgggttagacggtgttgccgctgtcgtatcgggtggtcgccgtgtgtttcgccgcatgctgacctggacaataacgaaaatagcccggaccgttgagctggcggcacttctgaccatcggttctatcgcgacaggattcttcgtaacgccgctgattatgatttccgtgattgtggttctcaatgatgtggtaacaatcacgctggcgacagaccgggcatgggtttcttcattaccagaacgatggaacgttggtgaaattgccaggctgggaggggttcttgcagcaggctggcttcttctggcattcgtgatcctttggttcgtccttacccggttgcaacttcccgtcccgcaaatccaggcgctgatgttcgcctatcttatgtatactgcccagatgacaatttatctctcacgaacaccgggtcgctgctggtcactccggccgggcaggttggtcgtgttggccactgtgggaaatattgttattgccaccatactggcggccggtggtttccttatgacgccggtttcactgatactgctggccatcatgtttgctctggttttgctcgccacccttatgcttgatcagattaagatatggctcttcacaagatga

SEQ ID NO: 157216 - DNA, 231 bp, Enterobacter cloacae
atgacgcagagaaggctgttgccatactggcatagcgtcattgtcccgcgtgttgccagtggcgaaaccatactgctggtcagccatgctaatgcactgcgtgcgctaaccatgtttattgagaagattgatgaaaaaaaggttcccgacctgcatgttctgacggggctccctgtactgtatgaaatgaatgaaaagcggatcatcaccgcccgttattccctcgaataa

SEQ ID NO: 157217 - DNA, 138 bp, Enterobacter cloacae
atggcgtatcagaagatgggagccactcccgatgaacagagcaagaacaacggcactggtatcatccggcagtacgttgaagaagacatctgcaatgaggaaaaccagacaggttgccatgatgcccgtagctgttga

SEQ ID NO: 157218 - DNA, 963 bp, Enterobacter cloacae
atgaaaaataaagccacattatcgcttacctcagaagctatctcttctctacgagagaatcctatttatgtctttggccatcgcaatcctgacagcgatgctatctgcagcgctctggttgtggctgactggctcaattacaccggacgtcctgcaaagccctggaggctgggggatatcaccccggaaacccaatatatcctcaactctgcgggtgtttcacaacccgatttgctcaccgcagacctgactgataaaaccgtatggctggttgattttacggatctggaacagggaccatcttctctgatggacagcaatgtcatcggcattattgaccatcatcgcattggcaccctcattacccgcaatccaccggatgtctgggtgcggtcggtcggatgttgtggaaccgtgattctctcgatcctgatgcatgaaagtccgatgccgcttacagccacacaagcagtattgcttatgggggcgattctcagtgataccgttgcgctaactggacccacaaccacctcccaggatcaggacgcagtggatattttgcgggaaatcgccggtgtcgattatgagcagtttgtagccggactgctccatgccaaaacagatattaccgggcaatctgcgtcagtattacttcatcgtgacgctaaacattaccggatccacgatgttccccttttgttgtcacaaattgaggtacgcgacatcgatgatgttactccccagttgcctgcgctgctgcaggaaatggataaaacctgtaaggagagtgaactggaaatggtgatcctgatggtgacggacattacgagccaaaactccgttttgcatttttcggactgtagcctgactggctaccgccaggtgtcgctgcctggcatgacaagccggaaaaaggacatccttccctggctgactgaccgtttcgcttcgtataagaggtga

SEQ ID NO: 157219 - DNA, 255 bp, Enterobacter cloacae
atgactatatttgtgtgttttgcgctcgcgttaataagcgcaaaggctgtacgtactggcctggtggttttgggtatcagtattctggttgcctggtcacgtatttatcttggcgtacattttcctctcgatatgataggtgctgttttaaccggaatggtgtctaatgaactactctgccgtttatggaaacataaaggtcagaatatatttaacttctttaaattaatcagcctgaaattatttaaaatatag

SEQ ID NO: 157220 - DNA, 1374 bp, Enterobacter cloacae
atgaaacgactaaaacattacgatcaaattgaagtattttcctacgtaggaacatggttagttaccgcgagtcttatcgcattgctggctggtaccgcatccgcgatgtttctcctttcgctcgataatgccacgacatggcgggaatcccattcctggatgatatggctgctgccacttgctggtctcctggtcggactggtttacagctggtatggcgagcctgtcaatgccggcaataatctgattatcgatgaaatacacgatccaagaaaggtggttccgataagaatggtacctctggttctggggggaactctcatatcgcatctgttcggtgcgtcggtaggacgtgaaggaacagcggttcagatggggggggctctggccgatcaactgacacacatatttaaagtgaagaaagacacccgccgtatcctgctgatggctggtatgagcgcgggatttgcgtccgtattcggtactccgatggcaggtgctgtttttggaatggaagtcctggcaattgggcgaatacgttacgacgcactgtttccctgtctggttgcagcggtgcttgccgatcaggtatgtctggcatggggtgtacatcatacccattacagtatcggtattattcctccattcactatgtggagtttcctctccgttgtggccgcgggagccgtattcggcgtggcaggcatggtattctctgttgcaactggaaaagtcagtgggatcgttaaacgctgtattaagtatgctcctttgcgccctttttgtggagggatactgatcgcggtcgccgtctggtttatcggtacagatcgttatattggccttggtattccggaaattatccgctcctttaaagaaccggtattccctctggacttcatggggaaaatgagctttaccatcgtttcactggcgacaggctttaaaggtggagaagtcactcctctgttttacataggcgccactctggggaatgcgctggctcctcttctgcacatgccatttgcgtttatggccggaatagggtttgtggctgtttttgccggtgctgcgaatacacctcttgcaacaacctttatggcaatggagttgttcggtaccgaaatggcggtattttctgctctcggttgctttacggcatatcttttttcaggccataccggaatttatcatgcccagcgaatcggtcatgcaaaaagtcgcaaataccgcacgcttatcccgtcagacctgcgtatttctgaaatttcctctgctcgcaggaagaagtattccactttaccccttaacgaaaaccaaatacaaaaaaaccagaaaaatgacaaaaaagtcacaatggagagttctaaatga

SEQ ID NO: 157221 - DNA, 390 bp, Enterobacter cloacae
atgagtaaagatgcagcccagccgttagccgcattaagattatattttcctgtcgcatccaggatcagtgtcagacgtttctggcacagattgcttgctcctcaactggcgcagcatcttctttccgtggcgaagaaatcggacattaaagcggcgacattacatcatgtcacctcaggttatcttccaggcaaacgattatctcatcatcacccagagttaaccaatatgacacatccccagtgtctcgaactactggactcggaagaaaatctgagagcttttcttcatgaaaatacggaagaattgaaaaaagtctatgcggtgcttttaaaatgtgaagagcctcatgctcatcatatttccattcatacacctcatttgggctga

SEQ ID NO: 157222 - DNA, 411 bp, Enterobacter cloacae
gtgaacagaacgtatatgctcgacacccgactctgcgcgttcatcatgcgcgagcagccggaagccgtgctcgggcgactggagcaggcggtgctgcgtggccaccatattgtgatttcagccgtcacctgggcagaactgtcacaggccgcaagggcgtcaggccccgccacgcaggccctggctgatgcgttctgtgccagtctcgataccgtgcttccctgggaccgggcggcagcggacgccaccacggatattaaggtcgcgctgcgccaggccgggacgccgatcggccccaacgacacggcgatagccgggcacgccattgccgccggcgctgtgctggtgaccaggaacgggggagagtttgagcgggtcccgggtctggtgctggaagactggtccggttag

SEQ ID NO: 157223 - DNA, 231 bp, Enterobacter cloacae
atgagaaccgtatcgatatttaaaaacggcaataaccgcgccatccgtctgccccgcgatctggattttgaaggggtgagcgagctggagagcgtccgggagggggaccgcatcatcctgcgtcccgtccggccgacctggggctcattcgccctgatgggtaaagccgggcctgagtttatggcggagcgtgaaggcgtaatcagcgataacgggcgggatgaacagtga

SEQ ID NO: 157224 - DNA, 453 bp, Enterobacter cloacae
atgtgggaaacaggtcaacttcacaggcatcccggactgtgggaaacaggtcaactttatggccagaaggaatgtgggaaacacgtcaacttcgcggacagtcatgactgtgggaaacaggtcaacttcgcagacggaccgaactgtgggaaaaaggtcaacttcgcagaaggcccggacagtgggaaacaggtcaacttcgcagaaggcccggacagtgggaaacaggtcaacttcgcagacagcccggacagtgggaaaaaggtcaacttcgcagacggcccggacagtgggaaacaggtcaacttcgcagacggcccggacagtgggaaacacgtcaacttcgcggccggccgggactgtgggaagcaggccaactttatggccagaaggaatgtgggaaacacgtcaacttcgcggacagtcatgactgtgggaaacaggtcaacttaa

SEQ ID NO: 157225 - DNA, 2127 bp, Enterobacter cloacae
atgacaggcaagcgtgataaaggtttcatatacgcccccttttgccgtgcagattatgacctgcacgctggccttagttctgagcagaaagaagcgctaagtacaagccataaacgctcccgtaactatggcaggtccggttccctctcttccctgctcacccctctgctggatatcgccaacaacagtggcaccggctgtagacttacccggactgtaattatggcgatgcttactgaaatgcagaatgtaggacaaccctgctggaactggcggaaagaccagtggatttccctgtttgataaatatcgtcgcggtaaaccacttatgatggcatttgcatatcatctcggtccattcacgtcgccgcttcagatccctcatgaagacactctgtcgctttacgccagtgccatctacggcaacgcgattttccgggaccagctgaaccgcctgtcggaagcactgatatcactgggctattcccctcagcacctgcggcatgccgtttcctcccccttgggtctgctgatgctactcaatgataatcccaggcttgaagagatgaccacagaacttctctggcaagctcagcagtaccacgacaagcgcgtatcaagacacgtagggaaaatttctcatgggcttgccgcacttggcattattgcaaagccggtacgaatgcgtaactacaccgaatggcatgagaagccggtcgaaaatatcagccctgaatgggtcgcatggtgcagacgctggcgtgagacatctgtgcttcgtcccagaacccgtgaaaacctgtacagctttattcttcgctgcggcctctggctggcaaaggagcatcccgaggtgaaggttccgacagactggtctattgagacatgtgccagttttatcgctgctgtggggcggatgaaagtggatgagctgtctctggggactgaacatggactgcggaagtccaaacgctccggagagcccatgatgccacattcacgtgcacattttatctattcgctgcgacgatttatgagcgatttcgaactctggggatggggacgccttaatttcagccccgcccgtcaccttttcacgccggataccccactttttcgccgtggtgtaaatccgagagtgatagatgatcccgtctggctcaaactcatctgggccagtctgaacctgcgccatgaagacctgctcagtgaaattcactatcccctttccatgcttcaggcaatggctgttatctggacccatgcaggtttgcgacagaatgaactcctgcgcctgactacggaatgcgtcacgcctcagtcagaagacattatcagggaggatggtagtgtcgttcctgcaggaacactatgttatctaaatgttccggcaggaaagacatcgaaagcatttgttaaacccgtctctgtcattgtaaaaaaatatgtagacatatggttgaacgtccgccccgtggatcaggcaaaactgaatgatgatcgcaccggagaaaaagtccgttatctcttccagtatcgcggcaagccagcaggcagcgatgtgattaaccggacggtcatcccagtcctctgtgccagagcggggctgccggttgaagacagcggaggcaccataaccagccaccgtggacgggcttcagccctgactgcgcttgccagcgtaccacagggcatgtcgctgtatgaactgatgcagtggtcaggtcattcatcaccacagtcaaccctgcattacattcgcatccgccctacacagctggcagcgtcatttgtgaaggccgatcggatagcccatatgataagcgtactggtcgatcacgatccggaagcggtctcgcccactgggctggcaacctattatgaccttggtgcgtccttctgcatgaatccattctggagcagttgcccgcacagaatggcctgcattggttgcgattttaatctgctgaaagacagtgcgcgcggactgatgctggagagtaaaacatctatcaggcgttatctcgaagaggtcccactcacacctgatgagaaagccattgtagagcaggatattaaaaaagtagaacaggctcttgcaaaattaaccggtaagtccggaggataa

SEQ ID NO: 157226 - DNA, 243 bp, Enterobacter cloacae
atgccgtttctgaccacgcacacctttcgtcacctgcgactgacacatcttgcccgggcgggatggaagctgcatgagatagcaacctatgctggtcatcgtgatctacgcaccacgcagatatatatccatctttcaggcactgatcttgcggccagaatggcgatgactgttgcggagactgaccgaaaaatcgcagctatcatgtttggcccggagagcgagaatgacaggcaagcgtga

SEQ ID NO: 157227 - DNA, 747 bp, Enterobacter cloacae
atgctcaccactttattctgtactcccgccagttcacaggcagaacgatggttggggttattatccgatctcggcaggtcaccggcgacaattcatgcctaccgcggcgcacttactcacttctttcacttctgctgccagcgggaactgccccccgagcaggcaagctttgaagatatcgctgcgtacattcgcccccagttacccggcatgcctcagcctgcagccagtgcaacgattcagcttcgcctttctgctatccgtctgtggtttgactatctgatttacatgggggtaattagccggaaccctttaccgcgagcaggcacaccccacatgccttcagcaggacacggtatggtccagcgaataacacggctgccacaaattccggatgacggccagtggtatcatctcttgggttatatatcagactgttcattgcgcgatcgcctgatgctagcgctggcgtatcatggtgcgctaagacgcactgaggtgacaacaataaccatagaggatatcgatcctgcccacaggcttatacggattcgcgccgaaaacactaaaggcaaacgcgaacgggtggtctgctacggcccggcgattacgccggtactggcagcacatctcaggaacctgaggcaaacgggtattactggtggagcactgttccgttcgttttctgacagaaattatggctcaccgctttcatactggagctggagtaaaacggttcgcgagtga

SEQ ID NO: 157228 - DNA, 780 bp, Enterobacter cloacae
atgaatcgttcagtacccgacgttcttcccgctatccggaacgccagccagctcagtcccgctgctctcgatatggtcaagcttctcgcacttctggccatgattatcgatcacaccaatacggtgtttctgtcgccagcctggccggtgatgtatgcgcttggccggatggccttccccctgttcacgcttatatgggcgatgaacgtacagcgcaccccggaacgactgcagaagagagccagtcgtctgtggatctgggcagtcatcacgcagccggtgttcagcctggccttctcgcatcaccagccctggtgggccctgaacattctgttcgtgtatgcaggcgtcacgcagctgcttgcccttcagtaccggcacggccggaaaggaatgctcgccggatatctgctcctggccctcatgatttggcccctgcagccggcaagctacgggctggcaggaataacgctggccatcagtatggcaacggtttctggcagcgatacacccggagtgcagcggctggcagccatcactgccgtgctgtcactgatttgtttaaacgggttatcgcatctcctggatatgcccgcagaaacattattactggccacgctgcctactctggcattccccctggcagtagtttccttctgcaggcaaatctgtccggacggccgccggcgtttcatgccgcgtaatttcttttattatgcttacgccggtcacctggggattattggtctgataggggtcgtctcagaaaacggaaaataa

SEQ ID NO: 157229 - DNA, 372 bp, Enterobacter cloacae
gtgctgaaatacaaaagcttaaatgattttctggatgataaaaaacgtaaggaacagcacaggaaacgtcttgctgataagttgtttcatactgttcgttctggtagtgatacagagattcaatctgttataaaagaatgttcagaaagtggcttagattttaaagacgtaaaacatgattacctgttagaatattttgattccttccataaccgctttacccctccttccattcccatcattaaattacttattagctatcaaaataacatatctcacaaagccaaattagctttttgccgtaatgtatattaccgtggaattttaaaagaagaagacttatatgaagtttctgaattaattataaaataa

SEQ ID NO: 157230 - DNA, 363 bp, Enterobacter cloacae
atgaattctataaaagagattaaaacagtagctttagctcatggaatattaaacgatataagaaaaggtaggaaccataacgaagttttcgcaagttcagaaagaatagatgttgattatttaactaactatttaagcggcaagcttggtaaaaaaataacaacttttaaaagacttgatggaatcctttcttacagcaaaagaaaagatcaaatagtagcgggttctgttttcttctatgctcctgaaaaaaatcaggacagtgagaaagaaactcagttcttgaagttattaacgttcaggttagcacaaagtaattcatttttcatacattttaaagaccaaagagaaggagggttataa

SEQ ID NO: 157231 - DNA, 318 bp, Enterobacter cloacae
atgatattggattcaatcagttttaatgaacacgattaccacttggtttctaatacaacagcgacatacgaaatcaaactaaaaatagtcaaagttttacgtgggcgtaagtttgaaaggttcagggtagatagtccgtttgtcgaaatactcaaagtggcatatgccccggcaggtaagaaaagagcaaatgaaacaacgagtattattgagcaaatgaaagaggacttaacaaacatagttcttgaagaggcggtaaaaacacaggataaggcaatgagttttataaaaggtgattcagatggagatgataaatga

SEQ ID NO: 157232 - DNA, 909 bp, Enterobacter cloacae; identical to SEQ ID NO: 104034

SEQ ID NO: 157233 - DNA, 258 bp, Enterobacter cloacae
atgaaactgattaccctactgtctaaacacttcgacgttgaagtagctgattttgagatggaagatgaaaccctgccagaagcaatctggatttatgaaaaggggcaagactctgaaccagtggtgatcctgaaaccaaccgaacagccgggaaactggaaagttggaaacatctactctgcccttcctcatgatgccatcctttcagaacaacagctaaaggaactggtaaaggccgggaaggtgctgaagggctaa

SEQ ID NO: 157234 - DNA, 294 bp, Enterobacter cloacae
atgttatgggaaatcactgaatggtatatcgaaacgactaaaactttagcaaacatgttttatgctataccgcttttaatatttcagattgctttgaccttagcttttattttcggtgtaattcttccgattagtaaaatcaaaggattgaagaatcttgattcaagcgctgctgcaccattcatggcagtcttaggtttacctgctttaggattgatatttttaacattcggaatgacgggggtagcgtttttaactgtcatatctaaaatattcaatctgaatatcttataa

SEQ ID NO: 157235 - DNA, 1185 bp, Enterobacter cloacae
atgtgtatgaaccctttcccacagcaaaatcaaagctatcagttctattacgatgaatctaataacgtaaggaaactatatctatccaaacagattgatggttataacattgaccatgatccagacaagcacaacagcgtaaacttcgtgttagccggtgttgctcatactggttcctcatcgagtgctgactttgacgatttacgccagcgcatacagctacaggccaatgctcaagagttcaagcttaagcacatagcaaagggcgacttcctgactatgctcacctccaagaagcttacagcgttctttgagtggcttctctatagcgatctctatctacactacttccatctgaacatggagtactgggggtatgtagacattattgatgactgtatccattttggcatccagaaaggctttataaaaaatctcagtgatgaggggttgcatcattacaccctcgctaccaaagatgccttgtataactacgtccgggctaacaaggtgcctttcatccagttccttaagtcttatgacttcccgtatatcgaaggccgtgaacaagagttcatacaagggctatcaagccaaatcactactcattgcgtaaacctctatacagccgaacataaggacactattcagatacagttagctcaatccctactgcagctcttaatggcctgttcagagcagcgcatcaatgagttggggctaacgatggatatacgctttgaagagcctcaagatgacgataaccgccttgttgatggctttgcgttgttctaccagcatagagcaatgatgttctcacaatcgagccacgtctttgacattgagaaagtggttgaagctgatctggcagaagcagctcaggccgcccctcacttggcaacgctgaactactcttttgctgattctaaaaccaatccactgatacaggttagtgatgtgtctgccgggtttatgcaacgctattttgactatctgaatagcaatagctatggaaaaataatttcagatagaaagaatctcaataaaaatcaaaggctgaatatggagttattacaactcctgataaaaaaaaccgataaacacaacccaacattattgcactatgttatgtcagctttagaacatgaaaaacataaagcatttacttacccggatgaaccataa

SEQ ID NO: 157236 - DNA, 828 bp, Enterobacter cloacae
atgaagacttttgaagtcaactatcttgaaagcaaagtatctaaaagaacagcggcaaacaaagaagctatagaggcatttgatgcagtagaaactttttctgatgagataccattcccggaagtagaaaaatcaaaagaaaaactcatggacagtatcaatgaaaccaataaatcaattgcgagcttgcaagaaaagattattaatgatccaagtgttaatattactgaagaacaatcaaaagaaatagaagaaataggttgttttgtagaatcatttttagaagatataattacagcccctttcaaaagtgagatagctgaccttaaggaagaacttttttcagtagaatataaactgaaaaatacaaagatagcgttggaaagctctgatgaattacttagaaacgcaaacaagatgattgatagactaaaaaacgaagtttataacctaagcatggattgctcgaagttaattgttcaaaaagatgaattacaggaaagaaatcagatcttaaagcaagagttagaggaaacagcagaaatatcaggtttaggcgatgcgttattggatgaagcaaaaagcctaatagataaattagaaagcgataacaacggtcttaatgacgaagttaaagcacaacaactatacatagaaagtcttgaaaatgataagagaactctactggatgattatgaatatataagcttggataacctaacattacaaagtgaaataatcagtctgaaaagaaatcttgaagagcatgataacaaagttgctaatctctttgcggagttaaatagcatattaaaaaagaacaaataa

SEQ ID NO: 157237 - DNA, 285 bp, Enterobacter cloacae
atgaaaaaaacattaaaacacataggatttaagattcctgaaagaatcaaaagccatatcaaaaagggaataatgataacttacatattacttaccatgatatttattttgggattgatgggtaatgattcagcagccagtaaagatgatgtaggggggatgttaggatcatggtttatatttacattgcctcttctgtttttaatagttggagtgccgaaagaaaacggagaaaaaaatgaaaaaagacataacaagagaattgaagaagttgggcttacataa

SEQ ID NO: 157238 - DNA, 696 bp, Enterobacter cloacae
atgaaaaaaacagatgaattacttaaaaagaaactgattaaacagattcaggctatcagtgataacacacacaaaagcttttcagcctttgcttttgcggcagctaccgccgcaagggatacaacccgactctttgcctctgagatcgaaacaggagatttcttggtaaggccagatgtatacgcaagaacacgctacagcaagatctgtgatgccatagagacatacatagagctggtatcagtctctgagccgtatacagacctgttaagcgatgtattccatcaactacagcttgattacgcaccacaggccaagagaacaggacagttccatacaccgagttcgttagctaatggtgttgcgagattcaagggtaaagagttctataaatcagaacttgatttgtgttgcggtatgggagcgttagctctggcaaggggtaggtatgctctggaacaaggtaagagtattggtgtaatgaaaggtgtagatattgatccaacctcgatagcagcatgttttactcagttggcatacaacaatctaaaaaatcctgtgtttcataccattgagttaaagtgtatgaacgctattatgtattatggtgatgaatgggatatttactatcatatcaagctggatgatgaaaaatcgcatcataatgctgagtatttagatttagcaacagggtga

SEQ ID NO: 157239 - DNA, 873 bp, Enterobacter cloacae
ttgaaaaataatcatttaatatcatatgattggctaaatgcgctgaataatcttgagttactgtcacttcattccgaaattttaacgcagttgcgttttagaggtgtcattcgcaccaagaataatcctgttggtgactatgctgaatggctggtttctaaagcactgggtatgactcttctcagtaattcgtcggcgggcgctgatgccattgatgctgatggcctgaaagtgcagatcaaagctaggagagttacgccggataatccttcccggcagcttagtgccttgcgtaactatgaggcagccgattttgattatttaatcgcggttattttcgatgagacttacaacattcttgatgcttacaaaatcccacatgaagtaatacgagattatgcacggcatagtgaccacgttaacgcacatatcgttaacctcaagggcgcgattcttactgatccccgagttagttccatcaaagaagacttgattgtcaggagttcggcttcagtcaatgaagcggctatgcaaacccttccacccgaacctatggaagaggttttgaatcaaccagagaagataacgagtagtgttaccctggtcagcctccttaaggctattgggatggagtgcttcgtaaactactaccatcattttgccgattcaaatttaccaagcgcttatatcattgagcaaatgcactcacgtgagggttatacagagaaaagttgccggagccgtctcagtaaagcgcgaaaagtgatcagggatggtttaagtattgaggctttggcgttgatcgctgactctgagcgaatgcaagattctgtcagaaatgacgcgctaaaacttatcagcgttctggagtga

SEQ ID NO: 157240 - DNA, 1116 bp, Enterobacter cloacae
atgagcgttggcattgtcacatttcacaagcatacccagcttggtttttaccgttacggtcatgatgattactgtgagccacttgaaatggatgcccttctctcatctctccatgtgtggtttcaggatagagtgtcacttgaagacacgcttctttgggatgacgaaactcctggctactctcatcgtaaaaaggtttatctaaaatcaatcgaaaaagatgaggagactggcgagtatattcttgtcctttggagagcggtgggaagtggcgatggtgtttacggcattaaagctgatgcacgacttgatgacaacactttatatgatgctaataatgcagcagatggagcgcgagtcatttggggtgaagcctcctattactggtttatcccatctaaaaacttgtttgcgtccatccgattctctaactcaatcgcagatactaacctgatgaatttatttttcagggattttgtctgtttacacgcagacataagagaaaaaagacgagaagttaaagagggaaaaacaggagcttacacaagtgtatctttccctgcgcagcaagctggcgaaactggaaatctgtggttccgcatttactcaaaacagtatacaaaactcaccacacgagcagatcttggtgctatcgcccgtgacataacacattttgtaaagcgtgaggtaattgctgcaagagaagtcgaccaatccgactggacacgatttttcggaagacttccattcgtttctgctgaaattacaaaagatacccgtaaagtagagataaatattgaagcgaaacctacggcagaagaattgcagcaaattttcgagcaatatgccgaggattataatggcggtttagacggctggcgtaaccttgggtttagaaaagaaggtgttggtggtatttgttggttaaatagctttgttgtaaaaaatgttctgccaatagatgatacaactggtggcggcgtggacgatacaggccattatacggctcagcggctgtttactgctctacaattcaaacgcgatggtttgcttgcgccattcggcgttgccgtggcagaagccgctgccccccaagcagttcgggaattaccatga

SEQ ID NO: 157241 - DNA, 537 bp, Enterobacter cloacae
atgaagaattacacaactatagcctgtataggctggcatctacttttagctgtggcagtaacttatattagttactgctttaggctagatattacttttaaagatattgagcccataatatcaatattgcaaaacacatcagcaatgatttttacaataatgggcatctggattgcttatgtttatccaaatgctgttttaaaaattgttcaaccctcaaaagtgacaacaattttctcagaagatgacctaaaaagagtaaaactattagtcggggtggtaatttcctcagcattcattctgttattattattaacaggagttacgttaaaaacattcctgacaaaaactgatgtttttgcacgatactggcaagtatttacaggtattggcttatggtgtttactgtctttgatttatgcgcaattgttttgtatttatgcggtaattgcatcaagtgtaaatttcattatcgacttaaaaaacttaaatacaaagaaacgattatcggaaaaacttgatggaaaacagaaataa

SEQ ID NO: 157242 - DNA, 807 bp, Enterobacter cloacae
atgttattagctcatatgtcggcagtggaagagcaacttcttgccacttctaaaattccggcaaattctggtcactctttgcacaaaggaacgccgagagaagctttcatcagggaatttttagaggcccacttaccttcaacacttgcaattggaacaggcgaaataatcgatagtgactcctcgccaaattcaccacggcggcagtttgatattgtgatttataaacgtagccttcctaagctcgattttggtggtggtgtgagtggctttctcgtggagtcagtgatcgcaacgatagaagttaagtccacccttgataaagcgggaatggagcaagctattactgctgcctatcaggcgaagagacttaaaaaaaatgaacagtggtccttcagtagtggttatatccctcctgccattctcaacttcgttgtcgcctatgatggtcctcagcagatggatacggttcttggttggatcattgatatagagaataaattaggtattactggaaacgatttacccctgggagagcagagaatcagcgtcccaagtgaatcgatagatggggtatttttactcgatagaggttttgttacattcgataatttcccgatcgggtttttggatgatgaagatcggcagaagacaccaaaaaataaatgggtggcggtaactgcgcagcgaggaagcttgttatggcttttccaaatgttgacccaagcctctatgaatattaatggaacgtttttgaatttaaatccatatatgaaaaatttgagagttgctctccgcactggatga

SEQ ID NO: 157243 - DNA, 573 bp, Enterobacter cloacae
atgtccgcatctaattattaccaagctcaaccggatggttatgtgcgctttgaatttcacggtaagacgatggaaggcgagttcttccgctatgagtcatttggcaaggatattgaccccaaatgcggatatatccgaccatttgatagagtaatcaggcagcaattgcttgataatacccaatcatttcatggtgttgatcttctcaagtttacttccttggatgatctgatcatctgtgatgcttatgtgactgacgaaaatataaaggggtcacatcaaatagttatcaaagattttgattttatagatgaagcagacctggcaactcataaacaaattattggcagttgccgggtggatttgctgcggcgccaatacattgtcggcagcaatcttaaagcacccaaagagtctttggacagcctcaacgctgagttccttagatgggtgacacctttctacactccgctacgttatgagcggaaatggtttaccaagcatcgcgaagggttactccgttttgccatgcttgtggttgtagctgtgcttgcgtatttccattttagctga

SEQ ID NO: 157244 - DNA, 147 bp, Enterobacter cloacae
atggcaggccacgagtggttcacgctgcatttcaaaagcgacaatcatgtgagcgaaaattgcgttcagggacccgccgttcatgtgggccagatgcccaaccgtcttcttcttgctgctagcctgtcctgtcctgcatacatttga

SEQ ID NO: 157245 - DNA, 1692 bp, Enterobacter cloacae
atggacgaccacaatattccactaatctatcttttaaacactgatgtagattctgacaaagcacttcaagcatctggctttaatgcacacagatataaactgaatggttacgttcttcaagaacagtcttatcatgctaaatcaattgcttatcagcatagacttcctgataacatacacgaagctgaaattgtagttatcgataccacgctgagaaactttagccatggggaaggaagaacgtcgtcagttcgtgtgtattttgaacatacaccttcttatgttgacttgcttcctcttgatatgtctgtaatcagcaatggaatcttttctactaaaaaaaaacaagcagttgttgttttttgcagtagttatactgacatgttttatgcaatggaaaatggtcctgtcagaaatcctcaacaattaagatatagtacctacgattttaatgatagttatcttggtgttactgatagaacaggtaatcgttttaagaaaccggataatgtgattgctaaagatttgacagacttgatattcaaatattcacgcaacagccattacaatgttatttttaaaggcattgatggacaggatataattttggctgaaaatgaaggtggagaggttatttcttttataagaataataaaagagaaaacctttatctttctaccagcgattaataacaaaaatgaattcttaaatgagttatttagcagtgtcttacctgacatacctcattttgaggattactttccaaataatggtggttttcaatggattaatagcgatttatatctttcttatgaagaaaaaacaaaatccaatgagattgaagaactaaaatctgagtacgaaaaaaataatttaaaacttcaaagtgagctaattgatttatctaacaaagatgaaaatataaaaacaaaagcattgctcactgcgactgatgatgaacttgtattttcggtaaagtggttccttgattatattggttttgaaaacgtaattgttccggatgaaaatgttgatgaagaaaatggtgaggtttttgaagaagatttaaatatagaaacaccatctgtaacatatctctttgaagtcaaaggaattggcggaacttcatctgatgaccaatgtgctcagatttcaaagatagtgtatcgtcgtgaagaggctaatcctgagcataattacaaaggcgtttatatagtaaatcatcaacgccagaaaaaccccaaagagagaaaaaacccgccgttcttcgaacagcaggagcttgatgctgcaatagctcgcagaggcatgacttacacatatgaattattccaagtatatcatatgattgagtcaggcatactcgataaagctgatgtaagagaagcattcaaccagcgcggccttataaatttccgcaaatcatttaagcccctaacctgcgaccatacctttcgtgacatcaatgtgtactcttttgaccttactagtacaccgggcacgactataagtgaaaaagataggattgtggtgaaggatgatgacaaccactggcatttactaacgattgtcgggatacaggtaaacaaaaaaccaatcgaagaagcaacgtcagatagcggtgctagtgccggtgtgaaagttgacagactggtaacaggggcgagagaatttttccttttgaaaaaataa

SEQ ID NO: 157246 - DNA, 2121 bp, Enterobacter cloacae
ttgttcataaatattgactttgacgatcagaagggaattgccagtatttcgttagaaggttgggctcagccgcttgtcgaattactctcacagtattttatcatcgacaaagaaatgctttgtctgaactactcccacctatcaactgaggaccgcagtcttggggttatggcttggcaagatctgctaactgctcgtgagcattttatgagcaaattcagagatgcgtcacagcaggggcagatagcgctgaccttaaaaattctcggacacggatccacggggattgagaattcgtcctctatcttggagccaaattcttaccagcgcgctcaggataccttcagggatagcttacttaaggtcgatcccccgggcttacgtgaaatcattgtggcggaaatcgagccacatgcgacttgggtgagttggttgttaaatgaacgttcatattataagcgttattttttggacgatcagcaggttatgagggcgttggtggacaatacgtccgagaaagattgcatctatgtacttcaactagtcgaccctcctctgggggcgaataattgggctttcgatcaactggtccagcagcattggcagcgtgtacgcgcatacctggaagaacatatcgacaagccgtcgggctatccaagctatagcatgcctgagctcgtcttctctctttttgcgaattcgcagacagtgcagacgtcccggtgggcttgcgaacaggttttggaacgagcagatctgtcagtctttcctgagctaatccaacatagcagcatgatattgccagaggatgtacgtaatctgttcctgcgctggcacagctattcgcataaagagaagaaagacaatttaaaggggggcgttgccaaagccttctcgaagcttgctacattgtgcgtggacaccataccctctgacctcgcgcttgcggcggcttggcacgagtttgaagaccctgtgcggtctagccagcaaaacgtcgtagccagtctcagagaattgccatccctgacgagtggtcgaaaaacgctgtggacacaactaggcccggccgcccgcgaggcctggcgacaggatctgttcgatcaagcgaatgaggaacctgaattagctcaggggctcctcagttttgcttgcctttggctcgagcagacggcatttgccgaagtcgagccagtgcttttgcgattgatggatgacgagcaacatctggcgtttgcgaatcggcttgtcggcactgatgtaaggcaactgcaactgaggtgcaagggactactgcggtccaagcagggtgcactggacttagaggggccggtaggccgggtcgagggagacactgcgttgcctagcgtaggagctaaaacttggctgagcgatccttccgtggagcaagtcatctttagggcgcttagccagattgaggaagaattttgtcgcgaatattcgaagacttggggagaggacgaggaggcccatacggcgcgcctcctgactatgacgaaggaggcgattggcaacgtgagcagccagttgcgccaactctcggctacgacgcgggcgacgtatccgagcctgacagtgaacgtgcgtcaacccagtaagcgggaggaaggggcgaacacacaagccggtgctccgctgggagcagacgtgctgttcctgagccgtatcgtggacaaggggaaaacagtggtccagcgtgcgacccttatgcaggtgaaaaagcgcaaaggcactaattcgggacaggccttcagttcgacggtaggcattaacctgaagcagtgcgaggacatactcacgcagtcagaacacgcctactatcttttcgcgactccggcctctcctcgcccggttctctgggttgccccagctcggctcgttaggaatttgacccagttggacacgagcaaaacctcggtttcggcgatgcgggtgcgggacgccagttgctcctacgcggagttttttctgcacgagcttgttggcctgtgggctggcgacgagcatgaggatatcatcgctgtcgctaacggcgatgctaagcttgggcgaacacctcgccacattgttgaaatcgaggttcgccgccaatttgattaa

SEQ ID NO: 157247 - DNA, 744 bp, Enterobacter cloacae
atggctaattgccagaactcgaacgagcgcctgttcggcggtgcggtcgtgctggaagtcgccgatggctgcccggacgtcaaaccacttgaagcagagtggatggcgcttgccgctggtacgtcgaagggcttcgacttcaacccgaactcggttacctctgatgcagatgacggcggcggctatgtcgagaccatcatcaccaacagtgactttaccctgagctttgagggagaagtgcgcaagaaggacaagctggatcagtacggtgtcggcaagttcatcaagtatttcgctgatgagctgaaggccaagcgccagcctggtatctgggtgcgcatggactacggcccggtcgaattcatcggctacatgaacatcacggcgctgagctctgacggtggtaccaacgacatcgtcacgttctctactgagttcaaagtcggcgatgcgagcactatcgaagtgaacgaaatcactgcggttgcggtgactggcgtgacggtaaccccgacaaccagcaccggcacggcaggcggtaccagcaccttcacggtgaacatcgcaccaaccggcgcaaccaacaaagatttcactgtagcgactaccgatgcgaccaaagcaacggccaccgcatccggcaacaccgttaccgtgacgcgcgtcgccaccggcagcgcgcagatcatcatcaacaccgaagacggcaactttgtggccgtgcatacggttaccgttacgtaa

SEQ ID NO: 157248 - DNA, 204 bp, Enterobacter cloacae
atgatttacccatgtgatgccgccaatgcggtggagattctgaggatccattactcattcgcagaagccatatgccgcccaacagaaaggattaaggcaattactcagggtctggtagcacatgacaggatgcttgccgattgggatggagacagaaaaagctccgactatcgccggaaagcgccaccaaaatttcaccaatga

SEQ ID NO: 157249 - DNA, 135 bp, Enterobacter cloacae
atgttctcagaaatagttctttctttagccattgcttacgcgccatcaatcaaccagatcgttaaaactgcttgcctaacaatcaatttggcgcttttgaagcgctacggcattatcaagcccgcccacagatga

SEQ ID NO: 157250 - DNA, 783 bp, Enterobacter cloacae
atgaaaaaaattattgggttgtctctggcgttctgcgctttctcgtccgtagctggtgatgctgcctcaggcgaaatccagccatatcctgaatacctgtctgcctatgtcaaaacgcttgttacagccagttgcgaccaggtactttcagatgatggaaagaactccgttgatagagtcatcaaatccatcagcaccagcgccaccaaaggaatgactaccgacacggaaagctactacgctgtttacaattcaatcgtctttggtgctgagatgggggataagctaaaaaatgctaagaaacagaaaatgattctggcaacgaaagacaaaattggaatagatagttgcggtggtgttggtgcttatgcattgatacagaaggattttagaaagatgacccttacggggctaatgcctttagccacgcaagctggtgtcgtaaaaccgaagacgacaacttctgatgagggcatttaccgtacaacagcaaaagctctggcagaactgtacagcgctaatgaagttgcagcggatgacaagattggtggtcgtaaggtggaaatgaccggaactgttcaggacataacaaaaaatttcgcgaatgatgtcgttcttaaacttgaaagtggtaatcgcttcatgcctgtcagcctgagtatggctgattcagagatggcgcaggcgtcgaagctgaagaaagggcagaagataaccgtgacttgcgaaaagatgcagcttttcatcggtgcaccgtctggcggcaactgcacctttaactga

SEQ ID NO: 157251 - DNA, 210 bp, Enterobacter cloacae
atggtaagaagagtgttgtggatgggatttattcttgctgcgttcagtgccaatgccgggcgtataactatgagcaacccggagcagtcaaccacggcgaacgggcaaaccttgtgtgtctattccaacagtatttacacctttacctacatcacgaagtcgaaacattgcccatatagcaaaagtttcaacacggtcgaaagtgagtaa

SEQ ID NO: 157252 - DNA, 627 bp, Enterobacter cloacae
atgtcattaacttatgagcaatgccctttcgtaaatgatttttggtttggtaatgtaccagaatgcgttgaagttaataagcgtagatggaatattataaaaagtttcaaagaaagaaagaatatcattatctcagcaaattattatttcttccgggagggtaagcttgcaacaaacaatcctctggaagacggtaggaataatttgagctacggcattagagccaatgaggatgaggtatggcagtctttttctaagaatattgaaactcttcaggcattgggtcacaatgtaatcgttatttaccctatcccatctgttactgaagatgcaaagaaaatgtatttatcattaataaccgatcttaaaccccagtttgacggtattatatacgagaaaaatatcaaagggaaagccgatgctatagaatttgctaagaaattagattctgtaatcgttaataaagaaaacctaactataattaggcctgttgattttatttgtgataataaaggatgcaaaataatcactaccgaaggatctctatataacagcgggagtcatctgtcaaatattggtgttaaattattatttagcaaaaccgatttcaatggggctaatcgttga

SEQ ID NO: 157253 - DNA, 273 bp, Enterobacter cloacae
atgacgttgacgaataggactaaaaccattctccgatggggagggatttgcattgtcagcatgggttacttcctcggactgtttgtagcctcgcaagcattcgcggttttctctgaaaatcagactcttgtctcaaatcctgttccattgagagagtattaccaagcggttgattcacttggtcaagctacaagcggtgtttttgatgcggcaatttacggtttcgtgatttgcgtccctctgatcctgctcatcttcaagaaagtgagatga

SEQ ID NO: 157254 - DNA, 1404 bp, Enterobacter cloacae; identical to SEQ ID NO: 118507

SEQ ID NO: 157255 - DNA, 165 bp, Enterobacter cloacae
atgaaaccctcaccctggtatgacaggattgtcgacgttaccgaagagttgttcaaaatgacgttactcctgaaagggcacacagcctacctgtccgaccgctacagcgaaaggaaagagagtcatcaggagctcgcggcacgggtcaatcaggccaaaatctga

SEQ ID NO: 157256 - DNA, 1011 bp, Enterobacter cloacae
ttgctcacccttgtaggtgatgaagtcttcaaacgcgatagtctgcgcacgaatgaagcctttctcgaagtcggtgtggatcttaccagccgcctgaggcgcggtcgctcccacagggatggtccacgcacgcacttcttttacaccagcggtgaagtaggtttgcagattcagcagctcatagcccgcgcggatcacgcggttcaggcccggctcttccagacccagctcggccatgaactcttcacggtcggcgtcgtccagctcagcgatgtcggattcaacggcagcgcaaaccgccacaactacagaaccttcagccgcagcgatttcacgcactttgtccagatacgggttgttctcgaaaccgtcttcgttaacgttggcgatgtacatggtaggcttcagggtcaggaagctcaggtatttgatcgccgctttgtcttcgtcagtcaggtttttcagcgcgcgcagcatgcccgcgttttccagctgtggcagacatttctccagcgcagccagttccgctttcgcgtctttgtcgccgcctttggctttcttctgcacgcggtgaatggcgcgctcgcaggtgtcgaggtcagagagggccagctcggtgttgatgacgtcgatgtcgtcagctggatccactttattgttaacgtggataatgttgtcgttctcgaagcagcgcacaacgtggccgatcgcttcggtttcacggatgttggtcaggaactggttgcccaggccttcacctttggatgcgccttttaccaggcccgcgatgtccacgaactccatggtagttggcagaatgcgctgcggcttcacgatttccgcgagctggtccagacgcggatcgggcataggaacaacaccggtgttcggctcgatggtacagaacgggaagttcgccgcttcaatacctgctttggtgagcgcgttgaacagggtggatttgcccacgtttggcagaccgacgataccgcatttgaatcccatttctaa

SEQ ID NO: 157257 - DNA, 1263 bp, Enterobacter cloacae
atgtatgatcagtctttcaatccgcgcacactctcacgatgtttcaaacctgaggatttccataaaaatagagcattaagtctagacagtgttcgagaaaagactattaactcggctatcgaaagatataaggatgggttcttgggttataatttacgctcatccgttttaagagggaaaacagtatattgggccgatgagttagctgatgtattggtcttgaggaaaattaaaaaaaatttatctaagctatatcaattaagattaccttctcgaacaaagattgttgatacattaaaggtttttttatcagagtgttcacagtataaaatatacagattggatatattttcattttatgaatctttcgataaaaactatatatttaataaaatagatggattggagcggttagagcttaaaacaaagcaggttctaaaggaatttctttattcattctatctgaatggtgggcaaggaataccaagaggattgtcaatcagtgcatacttggcagagttactaatgtatgatttcgataatcaagtgaaagataaccactctgttttttattatgctaggtatgtagatgatatagttattgtcactagtggttacgaagatagtgatgcttttattgagaatgtaaaatcaaaccttccaaatggattgcgttttaatgaagggaagaaatattatattagcgatttaattccaaaatcttccaaaaaaacaaaccgtgcaccctccaaaaaattgttatcctttgaatatttagggtacgattttagcgtgggagataaaattgaagagtgcaatataagaggattctatagggtaattgaaattgatcttgcacatgcaaaggctaataaagtaaaaagtagagtgatttattcgattgttgattttaataaaaccaatgattttgagttgctatgtgaaagactaaaattcctgtccacaaactttagtgttttagattcagatagagtattaaaacggttgtcgggcattcattttaattatcctcttattgatgctaaatcttctaagcgccttgctgaacttgatgtgtttttaagaaaggctgtattatcatctagtggtaaggttttctttgattttcatgcgaacttaaaccaatgcaaaaaatatcgattacttaagattagttttgttagaggccatgagaaacgtcatttttttcattattcagcttcaaaaatgatgaaaattcaaaggtgttggaaatatgtctaa

SEQ ID NO: 157258 - DNA, 147 bp, Enterobacter cloacae
atgaatcaggagccggtattgtccgtgacgggtatgcaccggccgcagattactgacgttgatacggagctgttacgcagccctgcgaagaggatgatgcttgccagaaagctggctgaaaatggcgagacaaaagcggaggagtaa

SEQ ID NO: 157259 - DNA, 1584 bp, Enterobacter cloacae
atggcaagcaaagctaaccttgttaatttagatgcgatgatttcaagagaggatttttctgctcaatcagataatgatctttcttttgaatccatacaaaacatagcaatgagagatattgggatgttgtccggattgctccgaaagcctgactttcagagggaaacaaaccactggactccggagcaagttgtttctttgttaaaaagctttgtaacaggggatctaataccttctgttattttgtggaaaagctcatttgtttttgtcatcgacggtggtcataggctcagtgttttgagagcctggaaagaaaatgattatggagatggagctatatcccagaagttttttggtgacagcatttctgaggaacagaagaagctagctcaaaagactagagatttagtagatgcatctgttggtaaatggtctgagatagaaagaaagatgcaagactctagcaacgaccacgaagaaagcaggcgactgacaaatatctatgttagagccctacaagttcagtgggtgaaaggtgactctgacaaagcagagacatccttttttaatataaacaagaagggaactccactagatgaggtagaggaaactctactcagacatagaaagaagcctatatccattgcggctagagctataattcgcgcaggtaaagggcacaggtactggtcttctttccctgaagaaaaaacaaaaaaaatagaagaactatcatctaagataaactctgctctttttgatccagatgtgaagtcacaaataaaaacattagatcttcctttaggtggctctcgtggagttaggctggctcttgatatattaatcgaccttatgtcgatatctgtttcgcaaagcgatgattatcagaagaaactatttgagcaaagtgatgatgctgatgggagcgaaacagtccttgctctggagaaaacaaggaagttactaaattgggtaactggcaatgacaaaggtagcttagggttacaccctgctgtgtatttttacagcgcgtcagggcgtcatgttaatcctatgttcctagggactctgttgttgatagcgaagaagttgaagtttaacgacaaagatttctttaaaaaatttacatctatcagagttaatttggaaaaaactttaataaacaataagcccatattagcatccttggttaatagagcgggtcataaaaaaaggactgagtattattgcggtttgtttgagtctattattgattaccttctgtctcttaagaaaaaaggcgatgatatgaccgattactctattagtgaggaggttatacttcagttagctcattttgaaggtaatatattagctggaagtagtgttaagaattcaactaaaataagtgaagatgctaaaaatgcagtattcattgatacggcattgtcttcagctataacgtgccctatttgttatggttacttagatccatccaagtcagtttcgtacgatcacatcattagagttgaagacggcggaaaaggctccgcaaaaaacgcccagctgacacacccctactgcaatatggccattaaaaattag

SEQ ID NO: 157260 - DNA, 204 bp, Enterobacter cloacae
gtgggagcgaccgcgcctcaggcggctggtaagatccacaccgacttcgagaaaggcttcattcgtgcgcagactatcgcgtttgaagacttcatcacctacaagggtgagcaaggcgcgaaagaagcaggcaagatgcgtgcggaagggaaagattacatcgttaaagatggcgacgtgatgaacttcttgtttaacgtttga

SEQ ID NO: 157261 - DNA, 261 bp, Enterobacter cloacae
atggaaatagaaaaattgatagatagatattttttagcattagaaaagaaaataattgctgagatttataataaacaaacaagaaaagaattagaaaagtttatatttaagtgcaaccaagagctaatggggtttgaacagcgatttaatataatatgctgtactgaatattatgagaaacagaaacttatattttctataaattatatttcagcagaatttgagcaaagagaaaaattaaatttgacaatattaaaataa

SEQ ID NO: 157262 - DNA, 435 bp, Enterobacter cloacae
atgcattggtttttctttattctctttatgatttggacgctagcgctaatctggaatggaagagatttatttaacaaaaaacaatggctcctggcggggttgatgttcattctggtgctagtggctacagtcgtcattggctttacgttgaaatggcttgctcagtcaatgtcattattttccgtcgcaacggccaaacattattcgatcatcttatccatgtctttcctgtgcgtctggggattaaaggtcacagtagccctgctgtgcacgttattttccgggattatgggggggcacaaaagatacaacgcagaaaattatgaaaaagtatcgtctttaacacgcgtcgctgcacctggcttacttattgttgctaaaagtgcagtttccctgggaagcatacttatgttttcaggtttatggcttaaataa

SEQ ID NO: 157263 - DNA, 927 bp, Enterobacter cloacae
gtgatcaaaaaaaaggcatttaaatttctgcttgaaccaagtaaaagtcagatttctgacgttttggtttttgctggtgcctgccgttttgtatataataaaggccttgctctcctaagcgaaaactataataatggcaagccgttcctgaactacaataaactcgcacctttattagttgagtggaaaagtgatcataaatttgagtggcttaaactttgtccatctcaatgcctacagcaatctttacgtgatctcgatagggcttttcagaatttcttctcaggaagagcactgtatcctcgatttaaaaagaaaggccgcagtgattcttttagagtcccatgtcaaagagtcagattaaaccaagaaaaaggtttagtatctttgcctaaattaggatgggttaagtaccgtaaaagtcgcgaagtcacggggaatttgaaaaatgttactatttcaaaaaaacttgataagtggtacataagttttaatactgaggaatttgtttctgagccggttcatccatcaatcaataagacaaaagttttactcaatgatggatatgttaccctgtgtgctgggaatgaggtttcagtcgaaagctttactggcattgttgatgaaaaaaaaataaaacgtcttaataaagagttaagtaggaaagtaaaacacagtaataattggctaaaaagtaaaaagaaaattgacagaataagaacaaggtcaggtaatttcagactggatgccttacataagataactacggcaatatgcaaaaaacacgcagttgtagaagtagttgacgtaaagaattttgtatcggataaaaacaatattgcaaaaaatatgaggtacgagtttgttaggcaattattgtataaacaagagtggttaggtggaaaaattgttcagctggatgcttag

SEQ ID NO: 157264 - DNA, 240 bp, Enterobacter cloacae
atgcctcgtcaaccggatattcgtgctgcttttattgcggccatacagcaaaacccgaagggctatctctgcctgcatacagacaaattcatcgctgaactgcaggagaggcactggcatttcagccaggaggatgcaaattcatggatcgagcgataccagccggacttcgccgataagacgacaaacggaagtgagaaccgatactggatcctgcgtaacatggggagggttttctaa

SEQ ID NO: 157265 - DNA, 525 bp, Enterobacter cloacae
atgcttcgacgagcccccgccattgcggtggtcgctcggcgtatcgacgtcgtaactgccttttttcttcttaccgataccaggatccgcaagggtataggagatattgttgcccgcttctttttcgtcacgggtgacaacggacatctcatccttgttggtgttgatctcgccagtcgtacctttgctggtggtgtcacccacggaaatggtggatttctgcgtttcgttacggtggatctcatcgaccgtatccacgtagatgttagccgatggaatgccgccttttttaccaggcaaaccaccgatacctacgccgccaccgccgtacaggccgtcctgctcaacggtatcttgcaggtctttggcgttgatattgcccgcaacgttgacgttaccggtgccattatcagagacgatattagcccccgccatgttgaggtcgccgccggttttcacctgcacgtcacccgtggtgtgaatgccggactgcttcgcggtggttgccgagtcataagcctctga

SEQ ID NO: 157266 - DNA, 222 bp, Enterobacter cloacae
gtgcgatttagacgaactgccgccaatggtaacggaaccgccagccagatcgttgagcagcagattagaggcctcgcccagcacttccgcagccgttgttccggcgttggcagactggccttcggtgcctttttcaatcaggttaccggctttatcaaaggtatctacaagggtgctgtgggcttcacccgtgataccaaacgacgtcgctttatgggatga

SEQ ID NO: 157267 - DNA, 378 bp, Enterobacter cloacae
atgcaggtcattgaaggtgacgtcgccgtcggtggccttcatgcttacatcctgacccgccgtaatatccgacgcgttggaggtgatagatttagcctccatgttaatgctgccgcctgcggtaacgccgtcctcaaaggcgtggatcacctgcttgccgctctcatcgcgccctacgctggccgtcatggtgatgtcaccctgagctgcggacatgttcacgtcgccctcagcgttaatcgccgcgccgttgttattgatattgccgctggtgctggacatattgatgtcgccgcccgcagagatacccgcgctcatgccgttgctaacgttgttgatatccccatcagagaccagcgtcatgtcgcctttggatga

SEQ ID NO: 157268 - DNA, 315 bp, Enterobacter cloacae
atgaacggtcgcggtgccgccgttaacgtctccgctctccatctgacgaagcgtttcagggcacaggtacacgaccgggaccatcacgtccacgccgttcaccgtctgattgacgaaccagacgatatcggcgtccagtccgttgcgctgctcctcggtcagggattgaccgacaaccagccccagctcgctgtcctgtgcggccacgcctgcattgtccatcagggcctgcaccagcgcgtcgccttccagaccatcacggatcgaaaagaaactgcccaccgagctgttgatctcacggcggatcaattctga

SEQ ID NO: 157269 - DNA, 657 bp, Enterobacter cloacae
atggatctccttcgcgataatcgacatatcgcccatgctgagcacgttacccgacacgccgttgaagaaagtaccgttacgggcttccagactcatatcgcccatcgtccacagcaggctaccggcattgttggtgatattgcccgcggtgacgttgagatcgcctccggtcacgatagagacggcgttggtgaaattaccgtctgcattcacggtcaaatcgccaatcgcttccatctgggtgctattggtaaagtcgccgtgcgtggcgatcgccatcgcgcgtccggcgtagatattctggttattggcgtcgagggtcaggctgttgtcgacgctaagcgtgagatcgcgtccggcctcaagaataccggccgtgttgttcaggctggcgagagtcagctgcagatcccggtcggcggtgatggaggcgttggcatcgttttgcaggtttttggtcgcaacagcaatatttgtgcccgcaatgactgcttcagtggtgtttttgatgttgcctgtctgaacattcagcgaggtcgtttttgcccctgcgagcacggcttcatcgctgttgttaagggtgttcttcacgttcagcgtcaggttgttatccgtcgagacaatggccgcgccactctcgttggtcacattctctga

SEQ ID NO: 157270 - DNA, 447 bp, Enterobacter cloacae
atggtcgctcccgtcgttcatcaggcttcggatattgcggataatcagatcggtgcccgcctgcacgacgccgttattgtgcagcgtgtcgccgttctgcaccgtgatgctgccgtcgctgaggatcaccgaggcattgttcagcgtattcacaccgtccagggtcatgttgcccgaggcgaggagcgccgcgtcagtgctgttgttcagcgtacctacgttgttgatgctgagggcatgctcagactggatcaccgcactgttgctgttgttgagcgtatccacattgctgattgttatgctgccgctaccgaccatcgcggcgctgttggagttggatacgtttgtgatgttcagcatcgccagcgcaccgtctgcaaccagctgagacgcatcgttggagagggtaccgatgttggacagggtgagattgccgctgctgtatag

SEQ ID NO: 157271 - DNA, 1044 bp, Enterobacter cloacae
atgccggaggctgagttggtcagcgttgttgtgccggacagatccatcgccccactcgcgagcagaacggcgtcgcccgtgttggtgagagtggacatgttggtcagggtaacgtttttcccctggatccggctattgtcgttggtcagtgcagtcgtctgcgcgccgtccagcgtaaggttttcgcccgccaggatctcgccgccgtgggtgttatttaattgcttactgacgttcagcgcaacatcgcccgctgcgctcagggttccgccgttgttattcagcttcgccgctttcacctgcgctttttgtctggcgttcagcgtgccgctgttttcaagcgtcgcatcgacgttggacgcggtcagggtaacgtttttcccctcgattttgccctggttcttgatggatttaccgctggcagcgagggtgacatctttttcgttgctgatgatgttaccgctgttgtcgacgtcgccgcccacgttcaggctgacggctgccgcatcacccacgagggtgccgctgttggtcaagttgccggtcgtggtgacctgcagtgcgtcagtggtcgcaccgatgtttccacggttgttcagcgcgctggcgttcatcaccagccgtttttccgcgaagatgcggccgttgttgtccaggttgccgacgcggagcgtctggttattggatgcgtacagcacgccgtcgttcttcagtgaaccggacgcaatcgtcaggtcccccgtggcgctgacggagccgctgttcacaaaggcctctttcagggtgaactgcagggtgccttttttcgccaggacgctgccgccgccgttattcatgctgcctgcggtaatctctacgtcaccgctgtggctgatcacctgggtatccgagatcagcgaggcaaacggcacttcaacgccgttgaccttcacaacgaaatcgccgtttttcagcgtcacgacgccgtctgcaatgaccttgccgttggcgtccagcgcctgcagtttgccgttcagggtatactggcccgcgacgttaatctga

SEQ ID NO: 157272 - DNA, 642 bp, Enterobacter cloacae
gtggctacgggtcgcaaggtcgtagtcgttctggcccgccagcactttgatgtctgctttaccagcaatttcgccttccagctgcgcgctgcggctaacgatgtcaaagtagcccagcccgtcggtattaatgccctgaccggtgacggataccgcccctttttcgaccgccagcttataggaaccgtcgttatttgcctgcactttaccggtgctgagggtcaggctgttggcattgatggtggttgcgccgtttacgctaatgccgttttcgttggcaatgatgatgtcggcctttttaccgaaaacttccatcgtgccgttaatgtaggacgctttcgcacccgttacttcgctgataatggcgctggcttcgtgctgcagttgggcattttttaccgcatagccgccaattttcgttacgccgtcctgcatgctgttgttaaagatcatcccctgtttttcaacgttaaattcgttgaatttattcatggagatgcctttcgcattaggatcggcaatattcaccacgggcgtgccgttggccgcctggcccatggtagggcctttcgactgacgattatcaggcgtggttgccgcatcgacgggggccgagaaaatgccggccaaagacagatataa

SEQ ID NO: 157273 - DNA, 702 bp, Enterobacter cloacae
atgagtcatcctgttgctttgaatcaattcgattttaacggtaatgccgtaaggactatgaccgacgatgattcagaagtgtggtttgtagctaaggacgttgcagatattcttggatatgcagaaaccagcaatatgacagaaaggctggatgatgatgagaagagaaaacagaccctgcaaaatgggcgaaactatacaaatcagacacttattaatgagtctgggttgtataatgccgtcatggggtcgcagaaggtagaagcaaagcattttaaaaaatgggttacttcagaggtgcttccatctatccgcaaaacaggcggctataagatggttccacaaacctacgctgatgctcttcgccaacttgccgaccaggcggaagcagcagagcgtgctcagatgatgctggaaaagaaagatggtcagtttaaatctgtacgcggcgctttcggaaaccacgtcatgcaacataacaaatacgtccacagtaaaggcgaggggtttaggcatgccacgattgcgcatgtaaagagcgtaattccaggaaaatatagctggaagacgttggcaaactactgcagttaccacaacttatccgtagaaatccttactccgcattatgagtcagtaccgttgaactcctatcctgcagaggcgtggatggcggtgtataacatagacatatcgcaattctaa

SEQ ID NO: 157274 - DNA, 159 bp, Enterobacter cloacae
atgacagtcacccacaacggcaagcagtacaccgccaaaaagctcaacgataacgagtggcagctgacgtcggtatcggcaccgcgggaaaaactggtgctgaaccgctggcagatgcatatcgctggcctcctggaacaggttgaggtgaaggtatga

SEQ ID NO: 157275 - DNA, 1038 bp, Enterobacter cloacae
atggaactaggggcgttaaaaaagcaattacaagaatttctaggggacggacttgttctcattattggttccggcttgtcctgcgcagagggcataccgggaatgggggccctaggggatcatttagtgaccagtattcctgctagtctttcccctgaagatggtaagctctggcaagtaattcacccacttatcaatgagataggtttggaggctgctttgttgaagtatgctccatctccatcacttgaggctacaatagttcagaatacggcagaattcattgctaccgcagaatctaaaattatttcagaagtttttaataaaaccagaacacttagattaaccaaactgattccgcatttgcttaagccagacgcaggtatacctattgttacaacaaactatgatcgtcttgcagaactagcctgtgaggaagctggtattggtgtggacactatgttctgtggacattttgcagcacggcttgaaccacaaaatagttactggagtttttgccgcaatgtgaaattagtaggtaggaatgtacgctataggtttgcacttaaggctaacatcttcaagccgcatggcagccttgattggtatcatcgagagggaaatcctgttcgctatgctggggtactgccgctccctcgacttataattactccaggtataaataaatttcgtaatggatatgagagtcctttcgacaagcatcgagaaaaggcaaatgacgcgatagatcgggcgcagcgcttcctcattatcggctacggttttaatgatgatcatttggaaactcatcttactcctcgcattaaatctggtgtgaaaactgtaattttaacttacgcgctttcccctaaggcgagagagctagctgtaaaaaataagaatgtgatagctgctgagtatcgtgaagagtcaggaacctcaggtgcatgcttcataatagacggtgcagaaatattctaccctggtgttaactactgggatcttgatggattcgtgaagggagttttatcagtatga

SEQ ID NO: 157276 - DNA, 786 bp, Enterobacter cloacae
atggctggttgtgtacctaaggaaaaagctggcgagttgattgagctgtatggcgacatgcttgaagcaggcacgcctataaatgagctcgagtatcgtcgtgctgtaagggatttggaaaaagagaatacagctaacgctgtaagtgctcttggtatactgcacgctgctgctggtaagtttgaaaaggcgtattcagtctttgagactgctctttcttatgttgatgatcctacaattgctgcaaattatatttatgtgacgaaatataataatgatgcaattaggctccgagataaatcattagaatttgtcgaaaaatttcagacgaagaaattcactgggctagctttctcatctgcatatcgtttcgggtacagagatttgttgattaaatatattgatcagcatatcaaacttctttccgacgaggagggcagggaattggcaatattacagaaagcagaattattgtcagaaattgatgatgcctatatttctactggatgctctccagagcaatttaatttgctcgcggaaattgtagcgacagtagctaaagacttttcagcagaaactggtttgcttgaagtcagccgaaatggcaataaatgctatgtggctgatataaaaaacaaagaccctaaatcgatcgctcaaatgaattttgcattagctgaagctgtatgcatggagcctcggttagacgactgtgagttaatagctcgtttttctgcgccgagaattcttcatacgggggttagctatgtcgataaacagtattga

SEQ ID NO: 157277 - DNA, 168 bp, Enterobacter cloacae; identical to SEQ ID NO: 131756

SEQ ID NO: 157278 - DNA, 396 bp, Enterobacter cloacae; identical to SEQ ID NO: 131757

SEQ ID NO: 157279 - DNA, 951 bp, Enterobacter cloacae
atgatcagcaagtaccaagccgagaacgcaagcaaagaacactcgcagaagagtcaggacaaatatgctcactcgctcgcactgaccttcagtttcttcggcaatgtgcccatttcggagatctcattatccagcggtagagagtttcgtgagttacttgcatcattacctgagaaactcaaagccaaagaaatgctcgaaactccactgctcgagcttatttctaagaaaaaggcgtccaaaactatcgcaacggctactgctaacgatcaccttgaaaaggtacgccgcttctttcaatggatgctagatacagggtatctgcctgaagacaatcccatacctaaagaaccactacccgagccgaaacagagcaataaagcagcgagacatgcgacttctgacgaagatgcagtaaaagtgtttaaacatcagatctttactgagcatcaaggtcttgtgaccaccaaaattcaacatccacatcacttctggcttcctttgctctgcctctttacaggcattcgcccgaacgaggcatgtttactatatgttgatgacatcgagctggtgggtaaggtgtggtgtatacgcattgataagcgttttgatgaacaaaggttaaaaatgcccaacgccttacgctatatccctctgcataagtgtctactggaaattggcttcttgagatatgtacatgatttccgcactttggtaggtggaaacagccgactattcccagagattaaggcgatcaaaggctaccactcacataaacccggagagtggtttaaccgtaacattcgcggtaagcagggcctagatccgagttcaactctttataccttcagacacgcttttcgcgacaagttagtaatgctgaatgcaactgatgaatacctaaaccgtttaatgggacatcaaggtagccccttgaatcgccacggataa

SEQ ID NO: 157280 - DNA, 1638 bp, Enterobacter cloacae
atgtcgcaaaatgctttacttgaagagaagattatccgcttagtgctgtctgagctgggccaccctgtagaaggtgagcggctttttcttctatcgcacgacccttcccttactgaagagattatgcggcttaaagagcggattgagagccttgcacagggtttatctgcgcgggttagcgaaggtgataacgacgcagagatcgccgcctcgtcagcatccagcctttccgatcagcaacaaacggtcgtaagtgttgctgataacccgggcattgacgctaccgatacaccagaactgcaacccctgccagaaaatgagcctcatcctccgttctggaagctgatgccttattacgaatttgataaaccagcacagagggaagacgaaaacctgtcttccctggtattaaaacccgggcagataccgacaggccagcagcgggccagcttagctgtgccacctgccgttcccccgagagctaaaataacgatccccaacgcccgcgcaggcgaacgtttctcttcgccggttgctatcgttctggatgagggccagcaggctactgtcagggacgttgtctttccccggaacattggcctgacctttgacaaagagcataagttgctgacaggtacacccaccgaaagcggcgatatagagctttcagtactctggtcatgcgcttcgcacgacgaatgcgaaacaaaacagctttttatagtcaatcccgatccgagaagcctgtggaaggtggtagagccaccagcagacgcttcctaccctaagtcccatctggacgctgctggcctggtcaggggtgacatacgtattgctgccgccagtcgccggggacgatctcatgagcatgccgggagcttcagagatgacgacttctatatcaaccactgccaggaaacaggatggtctgtcatgctggtcgcagacggggccggtagtgcggtaaattcccgggaaggctcccggattaccgtcaaaacggctggcgattaccttttcaatcagctcagtggtgtaaaaggcgtccacttaaagcagcacatcacggcgtgggaagggagcgatcagcaggcaaccataaacgccatgcttcatcattttaaacaggcagctacgctcgcggtcaacagtatccagaacgaagccatttgtgcagaacaacctgtgaaatcctattcaacaacccttctggcaactgtagcgctacgaactgataaagagctgtttgcggctgcattctggcttggtgatggtgcgataggtgcatacagcccttccggtaaagtcaggatactgggaaatcccgatagcggagaatacgcaggacaaacccgtttccttgaccagagcattatcgcagacccctcgtttagcggccgcatcagcgtgggtaaatggaatgatgtatctcacttgatcctcatgacagacggcgtatcagaccctctgtttgagacggataacgggcttcgcagtgacgaaaaatggacccgtctcgttgatgagctcaaccctgtccttacagacgccagtattgcgcctgagaggttaggcgactggcttaactttttctccacagggaaccatgatgaccgcactattgcggtgttgtggtaa

SEQ ID NO: 157281 - DNA, 312 bp, Enterobacter cloacae
atgctgaggaggtacgctataacaaacgccgtgtatcagccgcggcagtgtgatgtagtcagcctgagtcttatcagcaataatcagccgttcggctatctgcatctggtactgcggcgggcggccagtaccgagataaaggctcagcatgtcgtcagggaagcgggtcagccagtcgaccaccagctctgcaaaccaaggaacgggcatcgcatcgtcttccagcacgaccacccggcaaggttgctcagcagcccattcaagtgctcggcgatggttagcattagctccaccgtcgccctcatcaattag

SEQ ID NO: 157282 - DNA, 213 bp, Enterobacter cloacae
atggaaaagaaaagaatttgcaatgacctctcaatacattatcagtactcaaaaacaaccctcttgtttttagtgagttttttcgaatggagaactgattgctacgtttcatccatgatgtctaataacaaagagtcacttattaaacaaatcagcgagtacgccaagctcaacgagcaggaagaaatccaattgcgcaagataatcagctga

SEQ ID NO: 157283 - DNA, 231 bp, Enterobacter cloacae
gtggctccgatacttgtttttgccaataacgaacatgtgagagtattgagaattcgtgattacagaagcaaaatcagatacctgcattcaaaccaagaagtaagatctctggatgtcataatggttttttcaaccttcctcaacgggaaaagcggtgctgtcctggtggcagcagacagatatgtaagcaggaaagaaattctcgaggcttatgatgcgctgctcagttaa

SEQ ID NO: 157284 - DNA, 225 bp, Enterobacter cloacae
atgaccgtacgtgctaaatttttctgccaatcaattcagaaggcagaagatgattcatatcgaaccatccacatgagcccaattactgctgacaccgaagaaaacaaggcgtggtcaaagtacacgcctgacggccagttgacgatgcatgtgtccaacccggcagcattcgaccagttcgagcaggggaaggaatactacatcgacattcaaccagctcagtaa

SEQ ID NO: 157285 - DNA, 276 bp, Enterobacter cloacae
atgggtattgaaatgattgtcggcctggctgttgctgttcttggggccattgcagctgctttcggttttggtcatgcctctggaacgactaaaacggaagcaaaattccagaaacaaaacaccgaagagaaagccgctgccactgaagcagttgcagaacgccgggtagacgttacgaaagaggccagcaatgtacagcagactgttaaccatatgcctgatgacgatgttgatcgcgagctgcgtgacacgtggaagcgtcccggtggtggttga

SEQ ID NO: 157286 - DNA, 216 bp, Enterobacter cloacae
atgccgggtatgttcgcgccactggtagcgagggaactcagttcgtcaaacaagcagcaacgttcttcggtcctgatcggcacttcgaagatgtatggcagcctcccgcaggcaaaaccaacgtacgaaccggaatgctccctgtatcagggttcagtgaacaagattacggccagtcagactgcaactggtaagcaggagaaatcacaatgctga

SEQ ID NO: 157287 - DNA, 873 bp, Enterobacter cloacae
atggccccgctggatgaggccctttaccactacgtgatggactgccacaaactgcatacggatgacactccggttctggtgcttgcaccgggcagaaagaagacgaaaaccgggcgtatctggacgtatgtacgtgacgacagaagcgcaggttcatcagatccgccagcggcatggttcgccttctcgccagaccggcagggaaaacatcctcagcaacaccttcgccactatcatggtgtgctgcaggcggatgccttcgcaggctacgatcggttgttcagtccggaacgtgaaggagggccgctgacagaagccgcatgttgggcccatgcccgccgaaaaatccatgatgtctatataagcactcacacagcgacagcggaagaagccctgaaacgtatcggtgagctgtacgcgatagaagaagaaatacgcggcctaacgacagaagagcgtctggcagccagacaatcgcaaagcaaaccactgctggcatcgctgcatgaatggctggtagaaaaaaatgagacgctgtcgaaaaagtcccgtctgggcgaagcgttcgcttatgtcctgaaccagtgggatgcgctgtgctactactgtgaagatggcctggcagagcctgataacaacgctgccgaacgagcccttcgtgccgtctgtcttgggaaaaagaattttatcttcttcggcagcgaccacggtggtgagcgcggagccctgctgtacggactgatcgggacgtgcaggctgaatggtatcgatccggaagcctaccttcgccatatcctgagcgtactgccggagtggcccagcaacaaagtggccgaactgctgccatggaacgtggttcttaccgataaataa

SEQ ID NO: 157288 - DNA, 2229 bp, Enterobacter cloacae
atggaaaaccttcgtcaacaaacacaagaacgtcttgatgaagagttctcaggaagaaaaagtgaataccttttaaatcctaagagggatattgaaaatataccagttggtgtcggtaagcatgggcataaaaaaagaatagaatcattcacgtcagttataaaagattttgataaaaatatattacgtcaaatgagcctgtcgttacaaagtgttaataatacagtcttgtttgtcatcaaaaaaaacaaaagcatccttgcaaatctaaatagatggttaaaaagtaacaatgctgatgcaaatggtttaattgcgaagtcattacttctgattgatgatgaagctgataatgcatccgtaaatacaaatgattcggaaaaagatcctacagcaattaataaagcgatacgcagtttgttgaaacttttccggcaggcatcttacctaggtattacagcaacaccgtatgcaaatatattcatcgatcctgaaagtgctgacgagatgacaggcgatgatttattcccgcgtgattttatttatacgctatctcctccaacaaactatattggtgcagagaatatatttggtgggaatgaacagtatcctgcaaaatataaaaccgctcttgaaccgatatattcatctgaaatggatgatttctttccctttaatcataaaaaagaacatcatgtcacagcattaccgccaagcatgatagaagcaatggcctattttttgctagccactgctattcgcgatataagaggagattccaacaagcatcattccatgatgattcacactagtcgcttcacaaatattcaaaatcaaattcgtgatttggctggggaatggataataaagatacgctctgacttacaaaactatgcaaatttgtctgaagaagaaagcgaaggtatatccagcatcgcttatcttaaaacagtgtgggaaaaacacgagctagcttttaaagcaggcacgtccaaacatccactgccatggtatgaattcttaagtaaatatctttataaagctgtggcaccaattgacgtaagatccgttaatcaaaaaagcggctcaaccggacttgattattttaatcacaaagacgatgggctacgtgtcattgcggttggaggtaatagtttatctcgaggattaaccctcgaaggattatgcgttagttacttttatcgtcgttctattatgtatgatacattattacaaatggggagatggtttggataccgtcctaattatgatgatttattcaagatttggattagctcagaagcaattgattggtatggatacataaccgcagcggccgaagagttaaaacaagaagtcgcacgtatgaaaaatgcaaatcttacaccgatggattttggtttaaaagttcgtcaagatcctgcatcacttatagttactgcgaaaaacaaaatgagagcagcgaccttcgtgaagcgtccaataacagtatctggacgtttacttgagactccccgattgaagtcagatacaatgtccttaaatattaatgaggaaacttttaaagattttatcaataggttgccagagaatggggttagggttaccaggaaagatgagaagtttttctggaaggatgtacataaagacgaagttgaacaactacttcgagactttaaaactcatccttggcaacttaatttccaaggagctgcccttgcggatttcataagggatgattcaaatttagaaaaatgggatgtgcacatcgcccaaggtagtgggtctcatttttatccattaaattatggtaatcaagaaattttgattcaaccagaatcacgtacagttaaagctgcaggctcacaaatctgcattagtggaaccaaagtgcgtgtgggggccggtggcgcaaccaaaattggcttgaccgaagaacaaaagaaatcagtcgaaataaaatttcggaccgataaccctaaggcccaatatatcccagacaaagcatatttatgcataccacgaaaccctattttaatattgcatgtaattgaagttgacaaagcaagaagtcaaattgaaggcaatataaaagtccctgactatctctttgctttagggattggcatcccagcaaatggaaaagaaaaaacagctaattatatggtcaacccaattgagctgcgcgactataatgatttcattgaagatgagggaaacgacgaatga

SEQ ID NO: 157289 - DNA, 357 bp, Enterobacter cloacae; identical to SEQ ID NO: 120046

SEQ ID NO: 157290 - DNA, 168 bp, Enterobacter cloacae
atggatacaggtattttgcacctgacgggccgatcctgccatgacaataaatcgcagcgcgcggatccttttgttgtcttatcccgcattattgcgggtaaaaccaaatacgtaaaggatcctttttctgctcagatcctccatgaagccagtaatgacgcgggttga

SEQ ID NO: 157291 - DNA, 2904 bp, Enterobacter cloacae
atgtgttttctgaacgaaccggatattgcgctcattaataagcaccgaaggccagcgaatcgcctgggctttgctgtattactctgttatctgcgtggacctggatttattccggacaaaagcagtgctcctcacaatggcgttgtatccagggttgcttcccgactgaaacttcagcctgatttatggccggaatatgcatccagagagcaaacccgctgggaacatctgaccgaactttatcgctacctggaactatccccgttcagccggtcaatgcaaaaagactgtatccgtcatctgcacccctatgccatgcgaactgacaaaggatttatgctggcggaagaaatgctcagctggctacataacaataatgttattttcccttctgttgaagtgatcgaacggacgcttgccgaagtcgtcacgctcgctaacagatcggtattttcgacacttaccgcgcaactggaaaagcagcataaatcagcactcgacagcctgctcatatcagagggtgaacaaccttcccgtctggcatggctgctacagcctccgggtaaaataaacggtaaaaatgtgctgcaacatatcgaccggcttaattccatcgctgcgctggggttgcctgatggtattgcactttccgttcaccagaacaggttgcttaaactggcgcgtgagggccggaaaatgagcagcagggacctggcaaaattcaccgatgtcagacgttacgctacgctggtttgtataataacagaggccagggccaccctgactgacgaagtgattgatctgcacgagcgtatcctgggtagtctgttcagcagggcaaaacgcacgcaggccgaacggctccagcaaacgagaaagcttattcagagcaagctgaagcagtacgttaccgtcgggcaggcgttacttaacgccagagaatccggggaagatccctggactgcaatagaagatgtccttccctggcaggaattcatcaacagcgtggaagaaacgcggtttctttcccgtaagggcaatttcgacgcgcttcatctgatcaccgaaaaatacagtacgttgcgtaaatatgccccgcgtatgctgtcagcattgcagttcatggcgacacctgcggcgcaggcgctcagcgatgcgctggacaccataacggaaatgtaccgtaaacaacttcgtaaagtgccgccatcagcgccaacagggtttatccctgaaagctggcgaaaactggtgctcacgccttcaggcatcgaccgcaagtactacgagttttgcgtactgaatgaactcaagggtgcattacgttccggtgatatctgggtaaaaggatcgcgccgctacaaaaattttgatgattatctcatcccgactgctgagtttgagaaatcccgacataatgaccagttacagttggccgttcagaccgatagccaggcataccttcaggcccgtatgactcttcttgcatctcggctggaagaagttaacgcgatggcgcttgccggtgatttgcccgatgtagatatctcagataaaggcgtaaaaatcactccactggagaacagcgttccttcaggtgtttcgccctttgcagatttggtctatggcatgcttccccatccgaaaattacggagatactggaagaagttgatagctggacgggatttacgcgtcacttcgcgcacctcaaaaataataacgtcagaccaaaagacggaagactgttgctgaccaccattctggctgacggcatcaaccttgggctgacaaaaatggcggaatcctgccctggggccacaagatcgtcactcgaaggtattcaggcatggtacatcagggatgaaacttattcagcggcactggccgagctggtcaacgcacagaaagagcggcctctggccgcattctggggcgacgggacaacatcgtcgtcagacgggcagaactttcgggtaggcagtcacggacgttatgccggtcaggtcaatcttaaatatggtcaggagccgggcgtgcagatttatacgcatatctcagaccaatacagcccgttctacgccaaagtgatcagccgggtgcgcgactcaacccacgtgcttgatggcctgctgtaccatgaaagcgatctggaaattaccgagcattacaccgataccgcaggcttcactgaacatgttttcgccctgatgcacctgctgggattcgcttttgcgccaaggatccgtgatcttcatgacaagcggctgtttattcatggaaaggccgagcgctatccggggcttcagtctgtcatatcaacaacctgcctaaatatcaaagacattgagtcgcactgggatgaggtattgcgcctggcaacctcgattaagcaggggacagtcaccgcatcactgatgatgaaaaagttagccagttacccaaaacagaatggacttgccaaagcgctgagagagattggccgcatcgaacggacactatttatgctggactggttccgtgatcccggtctgcgccgacgcgtgcaggcggggctgaataagggtgaggcccgtaatgcccttgcgcgagcggtctttttgcaccgtctgggtgaaataagggatcgtgggctggagaatcagagttatcgcgccagcgggctgacattactgacagcagcgatcacgttgtggaacacggtatatatagaaagagctattgagtcactaaaacgaaagggtatcccgataaatgagcaactggtctctcatctttctcccctgggctgggaacatatcaatctgagtggagattacgtctggcgtaataatcttaagctgggatccggaaaataccgctcattacgtacagtcgataccgctttgtacaaaaaacagtcttag

SEQ ID NO: 157292 - DNA, 384 bp, Enterobacter cloacae
atggcgggactgacgcaactggcgaggtacctgcggatcgtcttcccgtccgttgtagcgatcgctttgctgctcctgctgtttcagcagggcttcggcttcttcaacctgtcggcgaagtttttcggagcgggtaccgaacaacattcgacgcagtttttctatctgtgcccgcagatgctctatctcgcgctcttcgttctctattttctcttctgcgcgggccagtgcagaacgcaggaacgactcagtctctgcaacgagactgagctgactgtctttctggcgaagcgcgtcttccagcgcagcgatacgggcgagatagtcgtgattcataaccgcttttataatgcggttatgatttttttacaacattgtcagtga

SEQ ID NO: 157293 - DNA, 276 bp, Enterobacter cloacae
gtggcttctgtttctatcagctgtccctcctgttcagctactgacggggtgttgcgtaacggcaaaagcaccgccggacatcagcgctatctctgctctcactgccgtaaaacatggcaactgcagttcacttacaccgcttctcaacccggtacgcaccagaaaatcattgatatggccatgaatggcgttggatgccgggcaaccgcccgcattatgggcgttggcctcaacacgattttacgtcacttaaaaaactcaggccgcagtcggtaa

SEQ ID NO: 157294 - DNA, 417 bp, Enterobacter cloacae; identical to SEQ ID NO: 126957

SEQ ID NO: 157295 - DNA, 795 bp, Enterobacter cloacae; identical to SEQ ID NO: 82735

SEQ ID NO: 157296 - DNA, 1173 bp, Enterobacter cloacae; identical to SEQ ID NO: 82734

SEQ ID NO: 157297 - DNA, 144 bp, Enterobacter cloacae
atgcgcactactggaatcctaatggcggaaattacgcttcgcccatacatgaagccgctgctcatcctttcagtgcttttgcgctggggctggctcactaagaagtgcatccggattacccctgtaattggcaagcaggcgtaa

SEQ ID NO: 157298 - DNA, 174 bp, Enterobacter cloacae
atgacgtacaaatcagttaagcacgggctaccgagctcgttcacccgcgtatgggttatgactgacaccgggcgggagactaccggctacgtgaaatcggatggcgagtggttcatcaactgcccgcgcatccgggcgactggcgcgaaggtgctgcgctggaaggagggatga

SEQ ID NO: 157299 - DNA, 420 bp, Enterobacter cloacae; identical to SEQ ID NO: 142562

SEQ ID NO: 157300 - DNA, 858 bp, Enterobacter cloacae
atgaaatacggaagcgtgtgcagcggtatcgaagctgccagtaaagcgtgggaacctctcggctggaaacctgcctggttctctgaaatcgaaccattcccttccgcagtcctcgcccatcactggccggaagtaatcaacctcggcgacatgaccaaaatcgccgatgcggtgcgcgctggtgatgtcgaagcgcctgatgttctggtcggcggtacgccttgccaggcattcagtatcgccggattacgtgaaggcctgtcagacgatcgcggccagttaactctctcttacgtggaattagccaatgcaatcgacgcaaagcgccgcgaacgcggtgagccagaatcaattattgtctgggaaaacgtccccggcgtgctcagcagcaaagacaatgccttcgggtgctttctggcagggcttgccggagaaagcagtgaattgcagccagcagggggaaaatggacgcacgcaggttgtgtgtctggaccagaaagggttattgcctggcgtgtccttgatgctcaatttttcggagtggcccaacgacgccgccgtgtgttcgttgtcgcaagtgctcgaaaagggttcgatcccgcagcggtactttttgagctcgacagcgtgcgccgggatactgcgccgcgccgagaaacgcaaaaggctgttgccgcccttactgcacgaggcgttggaacgtgtggcgcagacggcaaccaggcacaagctggacacctgatcgctatgacgcatgaccagggtggtgacgagattaaaacggacgatccagcttctgaactcacctgcaaccacgaagcgccgattgcagcttacggaattcctggcactggatag

SEQ ID NO: 157301 - DNA, 138 bp, Enterobacter cloacae
atggctattctcggcaaaggcataggctactccgtggcggtcagctacagtcaggcatggggaaacatcaaccattggctcagttgcattaccaccgttttccggagcgcggcctatccagtgccaggaattccgtaa

SEQ ID NO: 157302 - DNA, 462 bp, Enterobacter cloacae
gtgctcagtgccatagtccgcactgtgctcaataccggagatatcggcctgtatgttgccgatgatgtcagcgataccctcactggatggttcggacagtttctggatccctacctgcagggccagggtcatacgacgtccaaggtgcatttccctaagcttttcgcagtaggcggcaaggttagcgaacgatggcgtgtttttgctgcattcagccaggtaagcgaatcccccggcactttccagcgctccaaggcgctcaaggtcgctggtcagtgtcagcaggtctatcttctccccggattcgttaaggcgcttataggaccgcaaagccaccttgtgaggcgttgctgtgaagtggtcctcagtcagcccctcaatcgcgtcagtcgccatgtcaacgccgtctgtgcggcccgctgcgagcatgatcccgccgatgacggcctgctcaacgtataa

SEQ ID NO: 157303 - DNA, 123 bp, Enterobacter cloacae
atggggcgttgctgtgaagtggtcctcagtaagcccctcaatcgcatcggtagccatgtccacgccatctgcgcgacctgctgcaagcattattccgccaatgacggcctgctcaacgtataa

SEQ ID NO: 157304 - DNA, 294 bp, Enterobacter cloacae
atgggagaaatcagcgaatacctcatcaaatccgggcgtaccgacgcaacgccggaatgggttaagcgcaacctcaaaaagacgtacctcggctgcgaagaagtcacctataccgacttcattaccggtgcgaaagaaacctcatgggagcctcgacacacctccctcctcgacactggagagatgcatatcttcatgtgcaaggtcgaagcctggtgcgcccagttcggcctggcgctgacaattccgaacggttgcgaataccagcagctgcgcgataagcaggaggcgtga

SEQ ID NO: 157305 - DNA, 1128 bp, Enterobacter cloacae
atgatttatactactggcactatcgccatcagcggaaacacccttacaggtaccggcacaaacttcactgctgctggttctcttattcgtaacggctgtaccgtcatcgcactgaccagccccgctcaggtattccagatcactgctatcggcggggcaacaagtctcacagtgactcctgcagcaagtcctgcaataccggcgggaacgaagtattccattttgctgagtgacagcctgagcgtggatggcctggcgcaggacattgctgaaaccttcacgatgtaccagcgctacatgagcggtttcgctgatgtgatgaacggtactacagacgtcaccatcacgattaacggtgtggccgttaccgtgccgggccagaaatcactggcgaagaaaggggctaacagcgatataaccagcctaagcggcctgactaccgcgctcagtatcagtcagggcggaacaggtgcaaagaatgctgctgacgctcgcacaaacctcggtttgggtagtgccgctaccaaggatgtcggcgcgaatactggtaatgtcctgggagttggatattttggtttcggaactccaactattaacgttttaggaagtaccgaatcagggttttatggtattgacagttctggtactgcctgggctccgcaagcaggatcgggaattgtatgcgggtatgacccagctcgccgacagcaaatatttacaggatcatccggtaatctttttgtaagaaacctctccgcatctgcaatgaacacctcatcatccacaataccgtggacgcagatgcaggcggttgggacatctgatatcaactttaagaaagatatcactgaacttgatacggaaatcgcgctggcaaacatcgatgcgatggagttcgtatcgttcaggtataaggatgacgacagtgaagcagtacgccgtggtgtaatcgcgcagcaggttgagaagattgacccgcagtacgttcacagcgctgagggggtgggtaaaatgacccttgaccttaacccattgcttatggatgccctagccgccatcaaggcacttaacacaatggtagtggaacttcgtggagaagttgatgagctaaaacagggtggagcttga

SEQ ID NO: 157306 - DNA, 552 bp, Enterobacter cloacae
atggcaacaccaattctatctgacttgattgcagtggatccatcatcttcaactggattgcggtggattgtggcaaggggtaggcaaaaggccggtagcgaagccggttgcttattcaacagcggcacaaaccaatattatgtcgtccgcatcaataaagttctctattacgctcacagaattgtttgggaattaaccaacggcaagattgctggagatttaaccatcgatcacattgatggcaatggcctaaacaatgcaaaagagaatttgagggtggcttccttcgccttgaacttgaggaaccgaaggaaaagcgactccagagaatcggtatctgttggtgtcagtttgaataaaagagagcgcgataagggctacaaagctcattatcgtgggcttgatggaaagaaacattttaagttcttcgggttctcaactcatggcgagaaaagagcgcttgaactcgcaatcgagtggagaaaggaaaggatgcttgagctcaatgaggctggcgcgggatacacgtcgcggcatctttccggtgaataa

SEQ ID NO: 157307 - DNA, 2931 bp, Enterobacter cloacae
atggacgccggatcggttgtatacatcatcaaagccgaaacagaccaactgctaaaagcaaataagcaggtcgataaattcctttcacaactacagtcatcttttgatggcgcggacaaagctgcggatagtcttgggggaacgctcaagcaggccggatcagctattgatgacaccagtagcgccgctggtggtatggctaagaatgttgccgccgtagaaggcgccattggcaaactaaataccaacatcaactcactgacgcgggctattcttgagtctcgttctggcgtcagtggggccagttctgaatttagccgggcggagtccataattgaatcgctgggaaatcaactggcaattctggaagaacaacaggaaggtagtgccagaagtgctgctattcttgccgcccagcttcgtgccggttccaacgctacggaagcagagaaaaagaccatcgccgatctgactggccgtctgtatgacatgaagaacggcactgaagcaggtgcaaaaggtactaaaaactggaaatccaccatgcagcaggcgggctaccaagtaaatgacttcatcgtccaggttcagggcgggcaatccgcgctggtggcatttagccagcagggttctcaactggctggcgcatttggtccgggcggcgcggtaataggtgctgtaatagcattgagctcagtgattggtggcgtactaatttcatcccttaaaggtggcaagagcgccactgatgccttatccgaagccgtcgaaacaatggataaggtgataacagtttctcaaaatggcgtagctgcatattcagataagtatgcagagctggctaagattaacgcctctatagccacattaatgaggaaacaagccgagctagagcttcagtcagccttatctaaagtatcgaaagaggtacagagcgcatcaagcgactttattacatttggcgattctttagtctcgtcacttggtaatggatatgccagcgttaagctatttgatggctacctctcaactctcaacatcacaacaaataatttcagcgatgctctgaagcaggccgccgctagcggccagacggggcaaactgcgatgaattctatgattgcgacagtaggggccctttccagtaaattcgatatcagtgatcagcaggcatacgagttcgcaaagcagttatcagacatcagcaagaatccatcagatgaaaaactaaactcattaatcagaacattacagatgtttggtagcggtgcttctaaaggggctgatacggcgcaggaatatgcggataagcttcttaaaatagttaccagtagcgctgatgccactcataggctgaagttgctaaaagatatgacagactctctgacatccagccaggatagagcgctacagctggcaaggcaggagctgttcattaccaagcagaccggtgacgaaaagctcaaagctcaggcttggcgtgacgccgaaacacaggggcttaaaggcggcacccaagcattccgtgattattacaatgtgaggctgcaaacctatcagcagcagaaagctaatgccgagtcggcaaaaaatgaacgaaaagagcagagtgcgtctctatctgctgctaaaaaggcagagtctcaggcggagcgcaatgcaagagtgctcaatgaatatcgacagaaagcagatatatcggcagattcaaccagcgctctgtccagagaacaggcaattcttgccgctcgccagaagttagctaaccccacccctcagcaaattgcccaggtagaaaaggatgccgccgcagcatgggataaagccgcagctcttaaagctcagaacgctataccggagcttaaagagagcgccagttataatgcccagcgaaacgctctggatagcctcaaagaccagagggacgcaaacggacagctcatcctttctcagcagcaatataaccaggcgagtgagcagcttgagcagcagcaccagactaaccttgcaaaaatccgcgcccagcagacggtaacgcctcagcaatcagctcttggtgaaatagacccggttcagcaattggctaaccagcatgcgcaagaattggctctcatccagcaatttgagacgaagaagggccagatcactcagcgcggtctcgaactgatgaacgcggccaataccgaatatgagcaggctcgcattgcggcgcaatgggagatttaccgcaaccagagcacgaccaatcagctgatggctgacgctatcgattctctccaggggggggcgaccaatgccattaccgggctgctcaacggcacccaaagcctgcaagaatccttcgccaacatcggcacgacaatcctcaacagcgttgtcggtagcctggtacagatggggatggagtacgttaaaagcgcggtgatggctcagtctgctaacgctaccgccgcaacaagcgccgcggcaacaggtgcgagtattacggcttctatggctccagcagcggcagctacaaacatcgccacgatggggcaggcgtcaactatcggcatggcggctatgtcggctgctattcctgcaatggttgggctgtttggtggtgctcgttacaacggtgggccagtaaatggcagctcaatgtatcgcgttggtgaacacggtaagcctgagatattccaggcgaagaacggaaaccagtacatgataccgggtgacaatggtcgggtgataagtaacaaggatatgcagggaggcggtggcgcagtcattcaccagcagatgaatgtgactattcacacgacaaatggcattacagaggaaaatttacggcagattgaatcccgaatgtataaagttgggagaaaagcggccctggatgagatgtttaaccaacagaggccgaaagggatattgcctccaaggagatag

SEQ ID NO: 157308 - DNA, 321 bp, Enterobacter cloacae
atggagcagctaaccagactggcggacaccattgcagaaacgtatgtccgtgatttgaagcgagggactggcggcaatactgtcgaatataacggtgtatcagggcaggtggtaccgcaccgtctttcatccgggctggtggataacgttatctcggccgtgcgtgatgacgctgacaaagaggcggcggcatacaagttgctcttgcggctcattgatatcacaggtcgtgagtaccgcattacggaacgtggcgcattggttatagaaagtatgctcaggaatggcctgatgaacagaaataaacgtgcgattcactaa

SEQ ID NO: 157309 - DNA, 171 bp, Enterobacter cloacae
atggcaacaccatcagtaaaacccgtcctgctcagtcgtaatcaagttgataagctcaaagcgctacaggagcaggagcgcagaaaatccccgctgggcattgccccgaccattcacgttatcgcgcgtcagctaatggatcgcgccctgaatatgccgaaggaggtttaa

SEQ ID NO: 157310 - DNA, 201 bp, Enterobacter cloacae
atgagtaattttcgcgtgattgcctcctgttttgatggcgctgatgcgccgatcccggtcacatggtacggaaatgccgctagttccaatgatgctgtattgcaaatgacccacgaagcacagcgcaacggctggagcgtcggggtaattatttgcgtacagcagagaacaatcagcaagggcacagaggtggcagcatga

SEQ ID NO: 157311 - DNA, 519 bp, Enterobacter cloacae; identical to SEQ ID NO: 120062

SEQ ID NO: 157312 - DNA, 339 bp, Enterobacter cloacae; identical to SEQ ID NO: 151695

SEQ ID NO: 157313 - DNA, 561 bp, Enterobacter cloacae
atgaaaacaaccgattttgaaatccgtacctccgaagtgagcgccagcaacaaaaagctggtgggctatgccgtgcgctggaacagcctgtcagaagttatctgggatgagttccgcgagcagtttgcgccgggagcgtttaaagacagcctggcatccggtagcgatgtgcgtgcgctgtacgagcataactatacccagctgctgggccgcaccaaatccggcacgctggtgctgtccgaagacgataccgggctgcgcttcgagctgaccccgccgaatacccagcttggcaacgatgtgctggagctggtggagcgcggggatatctcaggcatgagcttcggtttccttgcgctgaaagaggcgtgggatattgctcagtctccatatctgcgcaccgtgaccgccgctgaactacgggaaattaccgtaacatcaatgcccgcctacccggaatctggcgtggaaatcgctcaccgttcgcttttctcccaacatcctgaactgcgccgcgctggcgataaccgtcgccgctgggctgaattagcggggctttga

SEQ ID NO: 157314 - DNA, 249 bp, Enterobacter cloacae; identical to SEQ ID NO: 119946

SEQ ID NO: 157315 - DNA, 147 bp, Enterobacter cloacae
atgcaatcgaacggcctgatgctgttccagtttgggaccccgatgatgtgtcagttcattatttcaaagcgttatttacgggtgagccagcttcgaatggtaatcctactcaagtttggcttcaatgtttcgatagacgacaaataa

SEQ ID NO: 157316 - DNA, 336 bp, Enterobacter cloacae
atgcgtattttgtttgtaggcccgcctctctatgggctgctgtatcctgtgctgtctctggcacaggcgtttcgcgttaacggccatgaagtgctgatcgccagcggaggaaaattcgcccaaaaagcggcagaagcagggctggtggtatttgacgccgcacccggttttgattctgaagctgactatcgccgccgcgaggcacagcgaaaagaaagcaacatcggcacaaaaatgggcaacttctcattcttcagcgaagagatggccgaccacctggtggagtttgccggacactggcggcccgatcgccgctcggcgtcatcgggcctctga

SEQ ID NO: 157317 - DNA, 2520 bp, Enterobacter cloacae; identical to SEQ ID NO: 119968

SEQ ID NO: 157318 - DNA, 207 bp, Enterobacter cloacae
atgtattactattcggaacacatctcggtggatatcggccatgccgacggatggctgaataacgtcattgtccccatcggcaaaaaatatccggcggcgctggaggaggtctacgtcggcgcggcgcttcgactgcagacgtgctgcgattactacgaacgcttgctcgagtccctgcaggcgctggatgctcccggcgctgcgtga

SEQ ID NO: 157319 - DNA, 132 bp, Enterobacter cloacae
atgggaaaagtgttcaccactgttcaccatgtgcaaaaatcattaaataacaatatgttaatgggtgaacacttttttatgaagtgttcaccaagtattcacctgttcacctttaaagatcttttcttttaa

SEQ ID NO: 157320 - DNA, 762 bp, Enterobacter cloacae
atgaacaagccagtaatagcagtttggttttcctgcggggctgccagtgccgttgctgccaagcttaccatcgagaaatatggcgatactcacgagattcgcgtgctgaacaacccagtagctgaagaggatgaggacaacgtccgtttcctgcatgacgtggagagatggattggaatcaaaattgagtcagtggtcaatcctatgtttccgaatgccagtgcagtagaggtgtgggatcaccaacaatacatgtccggcatagcaggtgctccatgcactaaagctcttaagaagctcgccagaaagcactgggagcaaagcaacagatgcgaccacgttgttttgggatttacggctgatgaagctcatcgcgctgacaactttgttaaaaatgagcggcacgaccttcttccggtgctcattgatgccgggcttacaaaaggtgactgcttcacgattttactcgaagctggaattttgcttccgcgaatttatcagcttggctatcccaacgccaactgcattggttgtgtgaaagccacgtctccgacttactggaatcacgtcagaaaagttcaccctgaaattttccagcagcgcgcagaacagtctcgtcgtatcggaacaaagctggttcgccacaaaggggttcgaatgttccttgataaacttccgccagatgctgtaggccgaccaatgaaagatatggatttcgagtgcggtattttctgtaagccgcaagatgaggaggctgcatga

SEQ ID NO: 157321 - DNA, 594 bp, Enterobacter cloacae
atgtcattaacttatgagcaatgccctttcgtaaatgatttttggtttggtaatgtaccagaatgcgttgaagttaataagcgtagatggatcattatctcagcaaattattatttcttccgggagggtaagcttgcaacaaacaatcctctggaagacggtaggaataatttgagctacggcattagagccaatgaggatgaggtatggcagtctttttctaagaatattgaaactcttcaggcattgggtcacaatgtaatcgttatttaccctatcccatctgttactgaagatgcaaagaaaatgtatttatcattaataaccgatcttaaaccccagtttgacggtattatatacgagaaaaatatcaaagggaaagccgatgctatagaatttgctaagaaattagattctgtaatcgttaataaagaaaacctaactataattaggcctgttgattttatttgtgataataaaggatgcaaaataatcactaccgaaggatctctatataacagtgggagtcatctgtcaaatattggtgttaaattattatttagcaaaaccgatttcaatggggctaatcgttga

SEQ ID NO: 157322 - DNA, 759 bp, Enterobacter cloacae
atgaaaattgacattagcgaagaaaaatccgaaacaacagacgtttacgaaatgtggacagagttacgtggttctgaagcatcctctacatatgaagatatttacccttctatttttctaagccatgttaatgaaagaaattaccagcaattaaaaaacacacttagtcaatttgaatcttttgatatcattcaaaatcatttgatgggagataagattcataaagaacagtttatattaattactggccttttcgttaactacattgcgtcagccatatctttgcgcgaaagcacgcgcaatatgcaaaaaaacaaaagattgttccctaatgagctcaacatggaagccgaagaaagactaaaaaaagaaatcatccctaacaccagcatcaaacttatagaggatataagaaatatcataactcaccaatcattaatcatcccagtattatcttttgtcgctaacaaaggaatatttcaatctggctactcatacaacataaaggaattacttaaaaataaaagacttacagaaaaatcaagagagcacttatcaaaaataaatcatgggaatttatacctgcgaccacttattgatgattatcatcatacaactgcatgctatcaaagctggattataaatgtagcgttgaagaagcataaatctgaaaatccaacgtactggttagtcagggataaggtttcttgtgaatggggaggtgatttagaaccatcctcacctttatcattgtcataa

SEQ ID NO: 157323 - DNA, 903 bp, Enterobacter cloacae
atgtttttcatggagtcaaaattgaagatttttgcattaatagtaacgtttaatcccgatttagactcttttgggaagaacttatctgcgatcagtgaacaagttgataaagtaattattgtcgataatagcaatgtctctaaacaccaaaaagagttgaaagcatatattgatactaaacaagacattattctcattcaacctgagaaaaatttgggtattgcttacgcacaaaatataggttttgtgcatgcgatgaagaataatgcagattatgttattacttttgaccaagactcatctgttgaagctggtctaattgaaactctttatgctgaatacaagcatgtagaaggacaaaaaggcattaatatcgcctgcatcggtccttctgtgattaatgaaagaaataacactcggtacgaaaaatattttcgtaatagcgtaaaaataaatgaatcaacatttagtgttaaatcgataatttcctcaggaacgttatacaatgtcgagatctttgcagcaataggatttaataaagctgaatggtttattgattccattgatatcgaatggtgttatagagcacgctatcttggatatcatgtattgatgacaaccaaagtagccatgaggcataatcttggtgcaaaagacatgaaactccctgcaggaaaatctatcaatattggttctccgtttagattgtattttgtataccgcaactggattttttccctccgtgagcctcaattcgaatggggttataaacttaaattattatttatgatgcctataaagtttgtcattttctcaaacgtatcaccacgtaaatcaagaatgctttttatgctgagaggtattaaagatggcttgatgaaaaaacattctttcctgaaataa

SEQ ID NO: 157324 - DNA, 1242 bp, Enterobacter cloacae
atgcgcaaatttattaaagacgtaccccttaagtccatttttcatctttttttagttaggggtagcatataccttttcccatttatcacactacctgtgattactagggggcttggtgttacgcagttcggtatattatctatttttcttgccgctcaacaatactttattatgctagttgagtacggatttacgttaactggagcaagagatatttcccggtcatcggataaaaatgatgaaaataatatattaagtgaaattttagcttgtagattcttaatttttatttttagttccatgctggtttttgcaacatatttgtttttaccagagtatggttatgcaggttgttacttaatacttttatttactgtcttaagttctgtatgtaatcagacacatttctttattgggaaagaaagaacaggctttattgttatctcaacgtcagtaactagggtggtttcaattctgatagtcatcttttttgtaaaagataaagaagatatatatatagccatgctagcatattcaatgaatgttgctttgccgaatatagtttcaaccatctatctcaaatattcgttgaattataaaacattcagaaaaacttcattggatcgaatattatcaagattcagaagtggttttgatattttcatctctaacgtttttactaatgtatatagcacattaaccttaatttatttaggatcggtacggggaccaaccgaaaccggatactactcgagcgctgataaattaaaagcagccgcccaagggatattgtcccctgtagcccaggcatttttcccaagagtttcaaaaaaagaagggcgagagttttacatcttatggcgtaaatcgacatttattcttgttggtttttcgttgttcatagttgtgggattactgctttttagtcagttaatttacaaaatattcctgggcgagcaatatcttgctgggttgccaatatattatattttatcttttagcataatctctatttcattcggaatcgcctacgctcaaaatttgtatttaactcagggcaaaacaaaactgttaagagtaatttacttcagtgtctcgattcttcacatggttcatatgcctatattagttcattattatggtgcgatcggtgcagcgctttctgtattaataactgagtctctcgcatccttacttatgtttagtttcaggaaaaaatgtttttcatggagtcaaaattga

SEQ ID NO: 157325 - DNA, 741 bp, Enterobacter cloacae
atgattgaattattaacttgtggcttgttctccttctcgaaagagccacgcagagaaaatcaagataccatccttccaccactactcatcaataatggttttttgattgctgtagctgatggcgttggatcgtatgacggtgcacaaaacgcgtctcaatcagctataagagagctacctgaacttgtcagaaagggaaatctgcaaaatatgacgagcctttttctttctctcaaggagggggtttcttcattgtctgagatgaacatcaagttttctcacgcagctacaacgctgacattttgttttgttgatgatgagggccttcatattggacatgttggggattgtcgtttgtatgtgaaaacggattctaaactcaaacaaatcaccaaagaccacacccagcaccagaagctacttgatgataaaatatacagcaagagtgagctgaaacagttgccgggcaagaatactctcactacggcaatcgcgaatgcgatcccgctcgatttccagcaaacctttatccctcatgatgagctgcttaatgaccgtgacgaagcattcgtatatttgatgtcagatggtacacatgcattttgggaaaaaagaccacgtttctcaccgaacacattagaaaacccttcaagtttcgcatccagcctctataaacgtatcgagcgagctggtccgatagacgaccattcattgatcgcagttagatacagggttctttaa

SEQ ID NO: 157326 - DNA, 756 bp, Enterobacter cloacae
atggatgatgcacatggtaactatgttatcaagccgataaggcgcattggtaagggcgggttcggctacgttgaagagattcggctccaaaattaccaaggtcacacctgcggagcatatgcaagaaaagtcttcgcgctacaagacccagcctatagagatgaattcatccgtaggttcgaaagagaggtcacttaccaagcggactgtaagcatactaatattgtgcctatttatcttcatcacttggttggtgatgagccttggtttgtgatggatttagccgaaggagatttggtaacggctttgcgttcaggcgaaatgacaataagagataagatcagcgccattcgcatgacactggaaggcgttgcataccttcacgatcacaactattggcaccgagatttaaaacctcaaaacgttttgaggttttctgacggaacttacaaaatttctgatttcggtttagtcaagaatgcggatcaaaaagccgagtcggaggtgataacaaaggtagctgcaatcatgggtaccgaacgttacatggctccagaggtttttgctgggatctattcagaaaaaacagatatctttgccttaggtgtcctcattgaagacatggacttaggggcaataccgggtgtagatgacttggttacgaaaagtacagccaggaagccgcccaaaagacatagttctgtgcatgaaatgctcgcagacttggaaaaaatagttatagggaatgggttatga

SEQ ID NO: 157327 - DNA, 726 bp, Enterobacter cloacae
atgaataaggctttatggattgcggtttttttgttagctcttatagctttacttggagtgtttttttcttattattattggttcaagttagagcttggttttcatatttcaaaaagtcccgaggtttgggggcagtttggtgactttgctggagggttaataaacccaatactcggttttatcacggtcgtaatactaataataacttcattgtatcaacaaaagcaatatgaacgattagagcgacgtgagaaaaataaaatatttgatgaccgattctatggtatgatttcttatcaaagagattttgccaatgattttaaatgtaaacttccaagcggtgttgatgcaaatgtaaaagagttaaccatttacgttgaaggtgtttttttcgatacagatgatcattcatatttaaatgatgataaattcaaagattcaatatttcctcttgttcgtggcttttacattttggtaaaaatgatcaatgaatctcataatgaggaaatagaaaaaaaggatgctgataaatattatgaatggctcgttaatctgactgactatagtttgatgagacttgttcttttatgtgtttattattacgatgggatatcatcctttaactatataaagtccaactcagcttttattgcaaagctgtctatgattgggtggggagattatatagatgaagttaaaaagcgaaaactgcatatcggtaattga

SEQ ID NO: 157328 - DNA, 258 bp, Enterobacter cloacae
atggatttacaaacatgggataacgttatctctatcgtttcgaatgctgtaacagcgctgagtgtggttggcggcgtcgtcttcggaggggttaaacttcaggagatggtgaagacgagaaaaatggagcgggtaattgattcagcaatcgctcttaaagaaaaatttgacaatctttttgacttcaacaaagtacataaaaaatccgggattaacccagctctcatgttttcagttttcattgtcgctgtttgctga

SEQ ID NO: 157329 - DNA, 1131 bp, Enterobacter cloacae
atgggagtcaaaggttactttctgtttagaggtgacaagacggtttgcggcggaaaaatccttgaaggatgtaccgatcaccagttcttcgataaagacatggcctgcgaaggtcataaagttacctgcggcaaacatccaggacattaccgtatttgcggcgggcttgaagacgacatacatggtgaaaggattgccggaacgctacacagctatagctcctgcccctgcaagtcgaagttcgttccttcaaactgggatgatgattacgagcttggcggagaaccaacagtaacgcacatggatttgtctcacctcatagagatacctgaacttccgggaccaattgccgaccctaaaactgatacctttgctgacacctgcaaaccagaagataacccgctattgaacggtgtttacatctggactgaaacaacaagtgcaggtcatgctttcgtttcggtgcatgagaataataacatctacctgtacacctatggacgctatggacgcacagacagaagcacgctaaccggggatgggattttagatttcttccaagatgaagatgcacggaagtattaccgttacgaactttatgaaatgggtgctcgtgcatttcggattgatgatgctgatcctgaattaatccgtaagttcttcgaaaaattatggaataacggtgtatcaccgatacaaacaccaaagatgcaagatggcacaatacgaagaggccgcacgattgataagtatgacgtaacagggaataactgtaccacccactcagtcgaggggatcaagtttgctggttcaaaggtattcgaccgcggttacacctccacgactacacagctaccaatcgacatagaagaagatttcactatcccggtctcactacaaagtttccttgaatcaaagagtgcagattattcctcaatgctcgttgtcgagatgacaagcacgttcaagcagcagtatccaaatattgagaacaaaaaccctcaaccgttgggaggaagtgcaaaaatccaacaagcagcggctgattctgctgccgttgctggctcagcatctccatactcagctggtacagtaggcggcgcattggggagcacatatgacgatgaataa

SEQ ID NO: 157330 - DNA, 474 bp, Enterobacter cloacae
atgcagcaatacaccaacgagctaaccgacgaaataataaaatcatgcgctcaaccaccattcacaccagaagagatcgccacatttgacgaaagcacgcagcaagaagtcttaaacctaatcacacgattagccacctgccccgtcaagctaatattcaggatagcaacagtcggaagcctcagccgcaatggcgggattattcaaaaagtatcaggaaatagcactgctgggggcttacaggttgcgcgagttggcgataaggttgtgtatgctgatggtagtgaagccactattatctcaggtgctggcatggctcgcgttatgcagggtgcatctgctgcactcgttggcagtatgctcgataatggtgatgagataatttctacccctcaatcaattagcaaactggcttttcgtgaaggtgacacactcccggaaggatttctgaccatgccggggagtaagcactaa

SEQ ID NO: 157331 - DNA, 1383 bp, Enterobacter cloacae
atgggggtccagggctactttctgttcagaggtgataagactgtttgcggcggaagaatccttgaaggatttaccgatcaccagttcttcgataaagacatggcgtgcgaaggtcataaagttacctgcggtaaacatcctggtcattaccgtatttgcggcgggcttgaagacgacgacatacatggtaaaagaattgccggtacgctacacagctatagttcctgcccctgcaagtcgaagttcgttccttcgaactgggatgattattacgagtttggtgaagaaccaacagtaacgcacactgatctatctcacctcgtcgagatgccagtgcttccggggccaatcgattcaccggggccagaacaacacgcccaaaccgcgaaaaagaaaacaggcattgacgcaggtttcgccgttctcccctacggcggtacaaccgaagcctggcaacgtctgctattcaccgaaaacccaccagcgggagcgaaggaactattcgccacgctgaacggcccggatgaaagatacaaagcaggttctattatgttgctggttgatcctgagaagcaggacgacgaacagatcgcccacatgaaagccgcgaaaacacgagttgatgcagcgttagaaccgttgaccattccggaagctaacttcctgcacaagtattacgccacaatagctaatttcacgagctacgcagatacaggaataggccttgcagctgatcctgtaggaaaatattttgaaagtatcgaaaaaatactcaaagagattcaagaaacgtataagaatacctacataacgagaggctctttgataggagaacaattttatgtccgacgtagccagttgtttaaagagcttgaatccatactcaaagtcagtttcctgaataaggctatgaaattcggagagtataccaaaataaaaaatgcactcggactgtccagtagttctattacccacaaatggaatgaaacggggatcagtgacattgaaggttatgctacccacatcgaacgggcagctaaatacgtaaaagcaatgcgttacactggttatttaggcattgcttttagcggactccattctcttaacgaaatccatgaggcatgttctgttggtcgcgaagccgaatgtaccaagaaaaagtatactgagataggtagttttgctttgggtacaggtggcggtgttctcgctggtggcggggctttaccattatgcgtcgcaatcggcgttggtactgctggtgttggcgggcttgtttgtaccgttattgcaggtgttggtttagggtacgctggtagcacagtggggagcgctgttggggaattaggcggagaacagttgtatgacgttttcggcaattaa

SEQ ID NO: 157332 - DNA, 321 bp, Enterobacter cloacae
atgaacgccagcgatggcacgtgcgatatccataaaagcaaagcccaaaaccaggcacagcagtcattggctgacattcacgatcctttacgtgaagcctcattctcatcagatgcgcttaatgccacgatttcaaacggcttttttagcgccaccattaatggcaagaaggcaaccattaagcgtgtgcacgctaacttctatgaaattcatggcggtggatttgttatctctttaagccttgatgagaacggcataattggtgcttcctggaataaaacgaagggtcgtgaccacggcattttgcaggttaaacagtaa

SEQ ID NO: 157333 - DNA, 531 bp, Enterobacter cloacae
atggaaacgttaactgtacaggcgtatctacatgaagtatggacggatattgctctcatcacatttcccggtagtcaaaacaacgcctggaataccacgcaattaaactatctcactgagtatgcgattaattttctggattatgatgatttacacgccgtcacgctgaatcaccccgtatcacttttttttaatgaccacggaaatccaggctggctgcgattcatcgacgatatcattcccgccggcgccagtcgtcgctactggataaatgcgcttggtatcagtgaattaccactcagccagcaaaattttttattgctaaaatttggcacaatgtcccctgttgggaatttacgcattaaagaatccgtaccggaatggaatgaattcgcaagcgctaaaacgtttacggttacggacgtcatcgagcgggcagccgactttctggattatgcccaggaaagaggcgccgcggcaggtggcgcaaccggagctggcggagtggattcccccttcgacgttgcttaa

SEQ ID NO: 157334 - DNA, 159 bp, Enterobacter cloacae
atgcctgacggcatcagcaatgagcgttcgcttcataccctcctcctgacgctggcaaatgaaatgacgccagaagagcagaagcagatgacatcactgttactgcgggaagggattaccggtttgttacaacgtctaggaattcgcgaccagaattaa

SEQ ID NO: 157335 - DNA, 2637 bp, Enterobacter cloacae
gtgagtaattttaaagaaacatctatttggaaggctgcattccaaagccaacaagccaaagaacatgagtcatccgttaataaattaattaatgtatttgaacaaaccagagaaaactctcgaattcttgtatcagaaatttcagtagatctacctaattatacggttcatgatattacgcatcttgacgctctttgggaaattggaagccaaattgtgggctcgcagttttgtcttaatccggttgaaggttttatattagggtgtagctttttgtttcacgactcagcaatgacattagcagcatatcctaatggacttgcagaaattaaatcctcaagggaatggaagcgtttacatagcagaataaaagcctcacatgaacacactttagatgaggcaaatgttctggagattttccttagagaacaacatgctattcgcgctgaaaaactacccaaaatttcctgggagagtgatgctggttctcgatatttgattgatgatgcagatacaagggaaaggtttggagaatttatcgggcaagtagcagcatcccattggtgggatcattctaaactagacaatcatctacataataaagttatccccgcaccggcaccttttccaagtagttggtctgttgatttacttaagcttgcgtgtgttcttcgagctgcagacgcagcacaaatagatgagcgacgagctccaggctttttacatgcattgagacaaaatcgtttatctgagtattctaaacttcattggactttccagaataaactaacccaagctcaaaatagaagcgacacattgtatttcgctgccttgcgaccattttctaaaagtgaagcaaaggagtggtggttgctacacgacaccttaaaaatgattgataaagagttacgtaagacagacgatttgttagctcgacgtcgtggaaacgaatgccgttttgcggctcggagagtagcaaatattgagtcagcagaaagccttaaaacatgtatacaaactgatggctggcatcctgtagatacagcattttcaatttcagacattcctaagctcattgctaatttgggagggaaccaactctatgggcatgataatattgctgctcttagagaaataatacaaaatgctatggattctataagaatacgtagcatagttgaccctcaggctaacaatccattagttgaaatagagttaagtaaggaaggtgagcattacattctaaaaatacgagacaatggtgttggtatgtctgaaagctccatagtcgaaaacttactttcttttgggaaaagtggttggcttacagacgatgcaataggagaatacaatgacaacttcccacataaaaacaatgtatcagggagatatggaattggattcttttcaatatttatgcttaccagtaaagtagaaataaaatctcggcgtttcgatgctagccctgatcaaacttcaattttatttttccctgacggacttaacacacggccattgctttgtggtgcagaatatatggaaagaatgacagcaggcggcacagaaattaaaatccacctcaataaagaaacatttgaaaatcatcaatggaactcaaataacataattaacaatttagatgatcctgatgtctttgctaatattttaattgacaacatttcaaaacatttccccacatccaatgtccctgtaaaaataacccataacagtaacgttaatattatagatggaagtaattgggaatctgagccagcatcattccttcttaaacgagtcgagggaaatgcatatcctggtgatgttggccaaccatacgaaacagcactttcattaattactgagccgactggtgaagtagtaggcagggcattcctctgtcctgatagattaactggtaggcacaggtttgaagaaacagtaaccggttctgtggtttcgcaaggggcaaggttatgttcgggtagttttagaggagtattaattggatcttcaatcagagcatcaagagatgcagctaatattttagcatcgtctaaagccttacagcaatgggctactgaacaggcaaggttattacattcgataataaaagatgatgaagatcaagtcagtattgctgaacaagtagcttctattggtggtgatattggggaactaaaattctgcgaaataggcggtaaatactttaatcgggatgaactatgctctttcctaaaagaaaagaacgaaatatgggtggcattcaactcaggagtttctctcgattgcccaaaagataaaaagtcattgcgtacagaggaatgtatatcagtaaattgtggaatccgcagtttgatttacactccaatctgggctcactcggcttcaagattcaaagatggagtggaacttgaagacatcgccattaaattaatctgcgaagaatttgcaattaagaaagaggtttctgacaaaatgtgtttgatagaaaatggtcataatgtctatagcgctccttctccatcctggcgatgtgaagacggaagtataatttacacagatggaagttatttcaaaagaaatatgattttgagtgatattgatgctttctttatacctgaaaatgaaagagaataa

SEQ ID NO: 157336 - DNA, 159 bp, Enterobacter cloacae
atggcgtttgaactgctgagtgtgttgcatatcgtgctttctataacgttcgccacttggccaagtaccgcttcgccccaactgttccatccaccgagattactgttacataatatgcaccggttcaatacaaggttgcttgcattacgaatcgcgtag

SEQ ID NO: 157337 - DNA, 1458 bp, Enterobacter cloacae
atgaataacataaaatttaaaaactatctaatcgtaatattgtttttttctcttccgataattttggcgtcacagtattacattgatgacatgggaagagcaacaaaagggtataccaaatggggggttgatggcaggcctgtttcagattggttaatgcagttactgtctttcaatcatagattgattgacatcttccctttgccattaatcatatcatgctgtttaatagcaacatccctatatatgtttcacaagaaatatataatatctggcggaatttactttatagttccccttggatacttgctatctccatctctccctgagattctatcatatagatttgacgtgctaacaatgagcgtatcgctatgcgcaccgttgttattgattggctactacaaaaattgcaagcttgattttttgttatcagcagcaaccgttattattattttctgtacatatcagccatctattaacttatacatcttttgcagtataatacagtttttgcatacaattgaacatggcaaaagccataaagatgccttaaagctagtcatttccaggttattagctcttgctatatcctccctcttatatatgaaagttattttgcctaacacattttcaggatctcacaacacaagtcacccaggtttagttgatggcggcttaattaacaacgctctaaataacatcaacgcatattataacttcataaataagtttttcttccatggttacgctgggttttatttattatttactacctctgtggtcatgatttgctgcataaagcttgcattagaaataaaaaacacacaaaaaacaccaactttaattattacatatctggtactttgcatactaccttttatatctttgatttccattatggcttccctgcttcctcttgaaagagccgtaccgtatttttcaagattgtacgttggatttggtggattaaatcttcttttgttttactgtgtttacacagtcacaaaaaacactactgcaaaaatatcaatctcattattattaattcccatcgcttatttcacagtatatctatacgcatttggcgcagcatcaaaagcccaatcggaatatacttccgtagtaatgaatgacatcaagaacagcttaaagaacattaatttcaattacattgcatttaatggtgcctatgccaaatcacctgtcctgatgaattcagaaaataactttccaatttttaaatttaacatcccaaattacttttacaattgggcctggccttacataagattcaattttgaaggattatatctaccaacaattcctgataaggacttagtcaaaaatgcattaatagatatgtgctcatcaaaaataactattaatgaaagattatatgacttgcatatcgttaaagatattgcaattgttgacttcgaaaagaaatgcaaatga

SEQ ID NO: 157338 - DNA, 894 bp, Enterobacter cloacae
atgcaacatgctaaattccataaaaaactaaattttaacaaacttatcatcctcgattgtctggctgaaaatgattatcaaacagcaaggcgcctacatgaaaatctatccgataaaggtcatggtaatggtattagcttgcttaagattcatgatgagaatactttccgcgatataatacaagatattaaagatatgttcaatcctgaattcaacctcggaattcaacctattattcacattgaagcgcacggcaatccactttcactggagttaccagataaaagtatgatcccctggagcgatctcgctgaggattttagaataattaacaaagcgatggggaatgaacttattacgttcattggaacttgtcatggttatcactttatttttaacaatcatacaataaaagagtttgcccccgtttatttctgtatagcccccctggaaaaaattgctagtggagatattgaatgctcagcacttttattttatgagaacttgttttcaacaggcgatttggcacgttctgcaaatcttttggatccgtcaattttttatacttataactctgactacatgtttcatcgggcatttcatgaaactatgcaaaaacatcatagaggagaaactctaaggcttagaaaagaaaccttgatttcggaagctattgatctaatgggtgattcctgggaagcaaagagcccgaaagaaaaagaagcttatttaagtaaagcgcgaaaattattgagttattctttaaaaagcaaggaatcacttagggcggaatttgatagattttcaataggttatatgggttacgcagatgaagaggtttttgaagaaatttggaaccatatgcaacacaataagcaaggtaaaatatattaa

SEQ ID NO: 157339 - DNA, 273 bp, Enterobacter cloacae
atgcctaattcttttttccgtgaaagctggtcgcgcaggcgttacgtaatcacgcaagtgatagtcacttcctgttatatcgctaacattaattttacgactttaatgcgggttaaacaggtaaaaactcttaaaggggcgttaggaatcgtctcagacgaagggatatgcatgcgcccgaatgacgggcgcgaaatggactcaggcggacgttttaataatatcgacaatcagaccgtcttcttccagcttattacgatgctcgtcacttaa

SEQ ID NO: 157340 - DNA, 1122 bp, Enterobacter cloacae
atggctattggtcattttttatttaggggtgatcagacagcttgcggtggtaggattcttgaaggatgtcccgaccatcaatttttccaaaaagacatggcatgtgaaggccatcaagtgacctgtggtaaacatgcgggtagattccgcatcgtgggaggacttgatagcgacgacatacatggtaaaagggtagccggtacactgcatagccgtagttcctgcccttgcaattcgcgttttattccttccatcgatgacacttacgaattttctacaggaacagcgaaagcctgcactgcccaatctgacatggttgaatttccctttctccccggcccgattgccgatcctcaaattgattgctttgctaacacctgcaagccagaagataacctgctattgaatggtgtttacatctggactgaaatcacggacgcaggacacgctttcgtatcagtacatcaagacaattcgatatacgtttatacatacgggcgttttggtcgaagagggccagcgaatttaactggtgatgggatattaatatactttactggggaagatgctcgcggctactaccgtgaggaattgtataaagtgaatgcgagggtgttcaggattgatgatgcttctatagttgcaactcggtcattctttgaagatctatggctctcagggacaaaacctaaagtcacggataaaatgggtgaaagaacgcagcgccgtggaagagtaattgacatttatgaccttactggcagtaactgcaccacacatactgttcaagctattagtgaagctggctcaagggtcttcgatactgtctacacatcaacaacaacacaactctctatcgaaggagaagaggattttgccgtccctctatccatgcaaaaatacttagtgaataaaagcagagccttgaatgcaatgcaagtttttgaagtcacgaaccagtttagagaactgtatccaaacgtggacaactacgccgcaggagatgaaaacgctatggagaaaaagctggctgaaggcgctgcaacattaggttcagcttctggttattcgggcggtactgttggcggtttcttaggtggctcacatgatattaacgagtag

SEQ ID NO: 157341 - DNA, 276 bp, Enterobacter cloacae
atgatattaacgagtagagcaaaatgtataatccgatgggggagcatactctcgatttccctcatctacatcgcaaccatacttatcagcgttttagattacgggataacaaaaaaatacaccgatattcttaatgctaagacaatcacagttgaaggttgtaatgcggtgatttttgatttcgaacagtactatttttggttgataaatgtttctctgtttggatacatcatttctacagtgatgatcatacttgtcttcaagaaagtacgatga

SEQ ID NO: 157342 - DNA, 240 bp, Enterobacter cloacae
atgccccgaatttcagatattcaggccgcctttattgcggccatagagcttaacccaaatggctaccagtaccttcggaccgagagcttcatcgagaagctgcgtgactacaactggcactttacccggtcagatgccaatgcatggatagaacgttatcagcaagactttgtggataagacaccagaccacagcgataaccgatactggatcctgcgtaacatggggagggtgcaataa

SEQ ID NO: 157343 - DNA, 240 bp, Enterobacter cloacae
atgagattgtctatcggcgatatcaaactttgcctgacgccgataatccggatgttctcctcagcgaagaattccagttcaattctgcgcgctgaggctaacggttccagctcggccattcgctccggtatgagcgacgttagcggcacggactccgtcgcggtgtcaatgcgtgcctcactgtgctgtggtacggcttttaagggggagagatcgtcaggtgtgcgtaaaatgcggtaa

SEQ ID NO: 157344 - DNA, 852 bp, Enterobacter cloacae
atgtttgactgggaagacttacgctatttttcaacttttgcgcgaacaggttcactggcgtcggcggcaaggaaactgggggttgatcatgctacggttgcccggcgaatagcgtcgcttgaagcctctgttaacctcaggctggtagaccgcaggccgcgctcctataccctgacggaagatggtcgccaggtggcccgctacggtgatcagatgagtgactctgcatactcattagagcggttttccggagcagagcagagtgtggtggaaggcgatgtgattatcgctgcacctcacgtgttcatgggcaatcttattgccccgcacattggcagcttttacaaacagtatcctcgtattcgtttaagcctcacgggaaccaaagaacgcctttctcttgcccgtcgtgaggcggacataactctcggtctggttcgtcccgttgagtcagcagtcatcaccagacgactcggccaggtgagttttacgctttatggcagtgccgggtatcttgcatcagggcaggaattaagtgttatcgcttacgatgattcagtggtagatacgccacagcaggcgtggctgaaaaagcattgtgcaggacgccccgtggtatttttcagcaatgatttgcgtatacaggctataacagcagccggccatgcgggtatagccctgttgcccgattatctggcaaaagaatatcatcttgtgcctgttcaaccagacggtcccgtacttactcaagacatttggatgagtgtacataaggatgtgcgccatgcccgtcacatcacccccgtaatggattttttaaacaattgcattgaacctgcttatggcttgtga

SEQ ID NO: 157345 - DNA, 741 bp, Enterobacter cloacae
atgaccagtaatatcagtggaaaagtcgttgtcatcacgggcgccagcagtggtattggcgaagccacagcccgccggttaagcgcagccggagcctgtgtcgtgctgggcgcacgtcggctggagaaacttaatgccctggctgaagaaatcactgcggcaggaggaaaggttgaagtagcgcagacggatgtggcaaatcttcaggatattgaggcattggtaaataaagcggttgaggtgtttggccgggtcgatgtgcttattaataacgccggtatcatgccaaactcccgtcttgatgagctacgggttgatgactggaaccgggcgattgatatcaacctgaaaggcacgctttatggtattgctgcagcacttccttttatgaaagcgcaaaacagcggacacattatcaatgtttcctctctctcaggacatcgcgtccgtccgactactgccgtttattccgcaactaaatttgctgtcagagccatatctgaaggcctgcgcatggaaatgacaccttataatattcgcagcacgattatttctccgggaccggtcgataccgacttaccgtccagcgtgacggatgcggcggtagcagagcaggtcaggaagatacatgaaatggccattcctgtagaaacgcttgccggtactatcatatttgcaattagtcagccggaaaccgtcgacatcaatgaaattgttgttcggccgacagccatggagtaa

SEQ ID NO: 157346 - DNA, 177 bp, Enterobacter cloacae
atgaccgccagccagttcaccggccataatttgtgggtcatattgatagtattttccccattcatgtgcatcattcccaaggcgagcgggattggccggcatgatgaggatgggattcagattaagtcgatgaaaggtattgcgaatttttttcgtaccggtaaacacgatccatga

SEQ ID NO: 157347 - DNA, 753 bp, Enterobacter cloacae
atgagtcgaatcaataaacagttaaatgcgtcgaacagcaacatttacacacctgtatttgttgagagtattttaaaggttaatataccagttagtatttatcttaaatcggcagatcattttgatgacaaatatatcagctcaacaagtgacagttgggtattcgattattcaggaagccgctgctatgcccactttcgtcaggataaaatcagcaaccaattaatcaaatatatttgcttccattatgcatctgccaagtgtccagctcaggttcctggggtactccatgcgtggtctttggcaactgatcattgcataagcaaatctgctttcacttttacggtgttgaaagattacctcgaaactcaggaaattaaacctcaatatttctactttatcattttcggcctaaaaatcctctgtaccgaagcattccctggttttaccctcgaagattatgaagacctcgaattcatccctcgcccgcactcccatgactggggaatctatcaggaaattgatcatgttctggatcccctcgaaaaaaacatgatcagtaaaggcttgtttgaaatggctgtggcgattcggtatggcgaaaactacagtctgaacaccatgcgagatgcagtaattctgggactgacgtatgtcaccggtgcccgaccggtacaactggccaagctggcggtaaaagatttacgtattgatacccgaaactccgaaaccggattaatacgatatagctaa

SEQ ID NO: 157348 - DNA, 1035 bp, Enterobacter cloacae
atgagtttgttaaacaagcaggaacttcaggttatccaggcgttttcgtccgcagatttaccggaacgtgtctttcgcgacagcaacattaaagaattgattagcagtatgacggaggagcagcaaacggttcagaagagcgcgaaggatcttgaccgcctgcgcagggaacagagggacggaaactttataactaactggtggaatgatcgcgacgatttgttacaggatgcgcagattgatctcaataaagccattggtcgcctgacgcaaaaatcttctcagttattgattgtcaatacggcgctatccaagctactgaacgagcaacaacagattttattgaatcagcaaaacattctggaaggccaaacacgctcccttgctgaacaaaatgaacaaatcctgaaacaacaggtgctactggaagaacagcaaaaagagattaataaggccaaccagggattaatggatgcaaaaggggtaacgcaagatcaggctaagcagctaattggctgcgtaaaaagggtgacagaggcggaaaacaaaattggcgaggcaaacgccaccttgctggcagaacttgaacagcgtattgctaacttttcttctgatcttgcgcaaaaattgcaaagtggccttgatgaccaggtaggacggcatagcatgctcgaacagacaatggtggacaatcaggctgttcaaaagagtttcgttgagaagatgcagcaatccttgttgcaggaacagcagttgtctcatcagcaactgctcggcgagcttgagcgaaaccggatggatttagttaattcggttaaatcaaccgtaaaccagtgtgacgcgctccagcatgaaatatccgttgttgtggcgcaacaagctgataggcaaacaggcattgatcatgctattgctgagttacaggtgaattttctcaaatcccgatttcgtcatcgctttgtactgacggtgatgggttgcattgttgggctttctgtcggttggcaaattgcgcagcactttatgatcttctga

SEQ ID NO: 157349 - DNA, 1539 bp, Enterobacter cloacae
atggatttaacatatgaagacttaaaacaacagcgcctgcaaaaactcttccacgattgccagcagcaagtgttgtcacaaattattgggccttttgggctttcaacggccatgtttgaggatcgcaatggcggcaatgtaacgacgatgcataatttcgagcgtgaagagtcggatttcatcgctgataaagacatgtccagtcatgcgaaatcgcgtgaggattaccagcgcaaagaatatgaaagtaaagattttacaaaaaaaagcgtgaaactccgggccggtggtattgatggttatacgggaaaaacgaccaacgcggcggatatggatctcgaccatgtcacttcactaaatacattgtccaaaaataagaaagtgcatcttgctcttgaaaccgggaaaggcgttgaaaaagtcgtcaaaatggccaattccgacgaaaacctggtaaccacacataagtcgattaaccgttcaaaaggcgctgctgaactcgatacttttgcagaaaaaaatggtgaaagatttgagctggacccagaacgagtagcagcagcgaagaaacaatctaaggaccatatttcgacaacgcttaactcggcgctaatgaaaaaacaaagcgcagagttgttgcagacaggcggccaacaagcgttgcagatggggctcagacaagctcttgggctattgctcactgaactggtaaatggcttgtttaacgagttcaaagtgcttattcaacatggtgttgaagtgggaaaaacattgtttgaggaggtccgacagcgcttaatgcgcgtagttgcttccgtgaccaaaaaaattcccgatgcgctgggacaaatgttccagggtggagtgagtggattcatgagtaatttactcaccttcttgcttaataattttctctctaccgcaaagcgtttcgtgaccatgattcgggaagggctgttgggacttttccgggcatttaaaatgattttcttcccaccggcacatatgacggcacagcaagcgttacaggaaggactgaaaatgctcactgctgtcatcgtgacttcggtcggtatgttgttgaacgaaagcatcacgacgtttatggcgactgtaccgtttctgaaaccttttgcagatatgttaaccccagttctcataggcattgccaccggattgctttctgcctttctctcgtatcagattgatacgttttttgatcgctcccgttttacgttaagcgaaaaattcatggatgagatgctcgcagacggtatacgtcgtgaagcgtttgccagtgagctggtgacactttcagaacgttcgctgggtaatattgaaaattacgcgactgctataacccagtatcaagctattggggaaaacctggctactgcaacgatttcgactaaagcaacactggcatgtcttgagagaactactgccgagacagctgtgcaagtggcgcggagtactgctgcaattgtgtttattaatgaaagccaggccgaaattgatgactttctaaaaaatatttga

SEQ ID NO: 157350 - DNA, 504 bp, Enterobacter cloacae
atgaagcaactatgggaaaaactggaagtcattctgcaagaccgcgaccctgaggtattaatagatcttgcacctccggccacagatgaagaaatcgtcgcgttagagcaggccctgagtgtaatcttgccagccgattttgtagccttcatgaaaattcacaatggtcagcgtggtatgagccatggattatttgatgattgcgaattcttatccacttcacgcattttgcaggagtggcgtgtctggaaagatttacttgatggtggcgattttgatggagctgagtcgtgtccgcaaagtggtattcgttcggaatggtggaatccctcctggatcccgtttacttacaatggagcgggcgatcatctttgtcttgaccttgccccgactgacgctgggattcgcgggcagattatcacgctctggcatgatgatggggagcgtagaaaacaagcggacagtttcagtgattggctcagacagtatgtagagcaaatgtag

SEQ ID NO: 157351 - DNA, 1434 bp, Enterobacter cloacae
gtggcaaagcctaaaactccttctaaactgattaaaggtaatatatttgaatattacgtacctaaaatacgcggggcaaaaccaaggcctaagcagattattaacaaaaaagatccaactaaaaagatttatgataaaagcaaaccagctagttttttaaaaaattcttttacgaagacgacaagaatcccattcggaagtggcgcaaaaaaaaatctttcagcgcattacccggcactacccctaccacaaattgtacatgccgcgcttgagtgtgggtatggtcgtacaggaatgtggtcatctcatcttcttctaaatcataacgagtcacttgaactggcgtcttacttacttaaaagattactaatggtggcttcatgtatcaaagtaggtaaaaacgatgcttatttcacgcaggagttttattcaaaaatagaaccttcagaaaaagttgcaatctcatttatagcaggtggtataggtagtttcattgctgcataccattggcttgctgctgcgggtgaaaaaatcaatgttatgttgcataccagtatttatactaaagggttgcatccctctatattagcaaaccctttcactactaaaaaatcacccgactatattattgagtctgataccggagaatggcatatatttgaaagtaaaggtggcacggatgctgggcgtaataaaaggattcaggaaggtttactgcagcttggtgctataacacatctggcatgggcttcacctactttgactttaaaacaggtgcaaaccaatgtatgtacgcacacgtccattgatgctggccgtcctttgaaggtgcttgcctatgatcccccgggtgagtataccgaagaagggaaaaacatcattcttgatgaagccgtttgcaagctgctgaaaatcgttgaaagtttagatcaattccatgtgctcgggacagagatgagaacagaagatgactgggaatggaagactgtgccgcagataaaaaacttaatagtggctctgccatctcaatatttcgatcttgaagaggagcttagaacacggcttggattatattttatcgctactgaaattattgataaatataagaggggagcacagtggtcggtagagttcatcataaaaaatatcggtaagaaaatttcatcctacgaatttaaatataaaggtaacgctatagtggagaaatttttgaactttatttcagaacttaatgaagttgatgaatccacctcctttattttacgttgtcgtcagcatctgaaacttgatgaaatgcttaatgaattcaattctttatttgagaaagttatcattaaatcggctttaccgaaatcgcaccgaaatggaattaaaggatctgatgctttgacctcaagcggaatgttaatcagagaagttaataaagtagattaa

SEQ ID NO: 157352 - DNA, 1176 bp, Enterobacter cloacae
atgcctgtcgcacttttcgccctcgccgtgggggcatttggtatcggcctgaccgaatttgtcatcgccgggatcctccctcaaatcgccgccgaatttagcgtcagtatcccgaaagcgggaatgatggcgacgtcatacgcactgggcgtatttattggtgcaccgctgctaacgattatcggtgcgaggatcccccgcaaggctatgctgattacgttagcgggtatctttacggtcggtaatatcatgacagcgatcgcgccgacaatggggatagcgattgtgggccgaattattacctcttttaaccacggggccttttttggtatcggttcgattattgccgcatcgctggtcgcgcctggacgccaggcgagtgccattgcctttatgttttcagggctgacattagccaatcttctcggcgttcctgcgggaacctggcttgcgcaaacctttagctggcgactggtattctgggtcattgccggtattggccttctgacgatggccagcgtagccctgctggttccgcatattgcgaaaggcaaagcgattgctttacgtaacgaactgagagccttcattgacccgcaggtgctgcttgtcatggggatcaccattttcggtcctgcagccttttttacttctatcacctatattgccccgatgatggttcaagaggccggtttctccgaaggcggcgtggcggggttaatggtgttgtttggtctcgggcttgccgttggcaactgggttggcggacgatttgccgatcgctccctgtttggcacgcttttcgtcaccctcgcggctcaggggctggtactaatcgtattttggataggagtggaaaatcagtggattgccggaatgtcagtattcctgatggcggcattcggctttgcgacagtctcgcctattcagaagctggtgatggaacgggcaagccaggcgggtgcccccacgatggctgcatcggtcaatattggcatgtttaatctgggaaatgcgctgggagcatgggttggcggggtaactattgccgcaggatttggtctggcctcacctaactgggcgggcgctattctgtcctttattgctctgggcttagcttatcttgcctggttcagtgctcgtaaaggatatgtgttaaatgtcggttcttgctga

SEQ ID NO: 157353 - DNA, 519 bp, Enterobacter cloacae
atgagaagccctgtgagcgcatttgataaagaaaaagatggtattcggcagacaaggcataaacctgcggaactagacgccattgaccgaaaaatattaggtgccctggcggaggatgctggtcgcagttacacagagttgagtgagattgtgaacttatcggccccggcagttcacgatcgcgtaaaacgactgaagcgcgacggggtgatcaagggtactgtggcggtactggatggttgtaagctgggacggacgcttttaacgttcctggttatcgataccagtagctatcgggcgacgcgagcccttttgcagttcaccagccgcaaagaagtggaagaattgcataccgttgctggggacggctgcgtcttaatcaaagtgcgggccgcggataccgaatcgctggaaaatttcctgatggagattcagagccttgagggcgtacgttctgtgcgcagctatatcgcgctttctacgttcctggagcgtggcccatcacctgattcagcttga

SEQ ID NO: 157354 - DNA, 705 bp, Enterobacter cloacae
atgccgcttactgaagaacttattcattaccgggcagtggaaaaaacctttacgggtatactcattcgcaattccaggaatgcaacgcttcccggtattcttctcgccccgaatatgatgggtaccgcagcatcaagcattgaacatgggcgcaccattgcaaaaaaaggctacgttgtgctcgttgccgatatgtacggccatctgcccgattcggcagatgaggcagctaagtgtatgcattctgttaaggactcgccggccgagcggctcatactcaacgcagcgctggctcgactggctgagctccggttcgtaaatgcggaaaagctcgctgccgtaggattctgctatggagggcattgcgttctcgaactggcgcgcagcggagcgcctctggctctcacggcatgttttcacggtacgcttgatacgcgtatccccgcggagaaagggaatgtcatgggcaagatcgctgtattaaacggggccgacgatccttttgtaaccgcagagcagatacaagctttcgccgctgaaatggcatcctgcggatgtgattttcagctgacgaactatgccggcgcggttcattcttttacctacccaagggccgatgttccgggcaaaacgtattacaacgaggccgtcagcaaccatgcttttgatattgtatttaccctgctgaaggaggcgctgggctga

SEQ ID NO: 157355 - DNA, 498 bp, Enterobacter cloacae
atgtccgaaaaaacgctttcagaacagcgtgaaattattcgtccccctatgggtctttttcccgccatgcttgcactgggcgcgggcggattgtgcatcggtacgggcgagtttgcgccgatgagccttctgccggacctggcccagggtaccggcgtttccatccctgccgcaggaggttacatcagcgcttatgcggcgggcgtggtcgtcggagccccggcaatcgcggtgcttggagccctgcaggcccgtaaaactctgctgctgatactgttaattattgcgcttgcaggttatgccctgagcgcggtagcttcaacgctatgctggcagcgcgcttcatttccggtatgcctcacggtgcctggtacggcgtatccgcgcttgtggcggcctcaatggtatcaccgcagcataaagcccgtaatatcggttacgttatgctgggacttgccgtcgcgaacgttgccggcgttccgcttgtcacatgggtag

SEQ ID NO: 157356 - DNA, 1125 bp, Enterobacter cloacae
gtgtttcatatctggacccttcttcctgcgctttatgcgctgttccggtttatcaggccgctgcccgccccactttcggcaaaaattgtcaccgcaggcacaatgcttgtcgcctctgagtttcatctgattacaaaattatttaccggaaatatgttttctccggagataccaaaaccgctgttcctgcttaccacctggtttttcggtatgaccatttttatggggggcctgttagtactgcgggacatattctgggtactgcaccgacttgtatcaggacgccggatgaaatggcattcggctttctggtttatcctgcctgttctggcggcaatgctgacaacgctgaccctgaaaaatgggacagcggttcctgaagtgaaaaagacagacgtcgcgctcaggggattaccaccccgttttgaaggttaccgtatagttcagctgacggacttacacgccagcagactgctgccgagaagctggatacaggatgttgttaatcgaacccttgagctggatgcggatatagttgtggttaccggagatatgattgatggctggccggatgcacgtttctccgacattgaaccgcttggccagctacgagcgcgggacggcgtttttgccgtaacgggcaatcatgagtattacttcgacgctgaaaactggatccagacttttgaaaaactgggcatgcattttcttaataatgcaggataccgtgtaaaccgtgacggcgactcgctgtatcttgctggcgtgacggatgccgttgcgccatcatacggactaccggggcctgacctggcgcaggctctgaagtcttcccgctcgggtgaaaccataatccttcttgaccacaggcctgagaatgctggcctggctgcagaaagaggagtaagccttcagctctccggacatactcatggcggtatgatcgccgggctggacaaactgatcgcactggccaataacggttttgtttccggcctctataaacaaggctctctgaacctttacgtcagcaacggttccggcatatggaacggctttcctttccggctgggaaagcctgcagaaataacgttgatcactcttcacaatgaaaatgaccaatga

SEQ ID NO: 157357 - DNA, 363 bp, Enterobacter cloacae
atgctccgccagatggttcatgtagacgggcagggataccgcatagcgagagcaatagactggataaagcaaaatttcaccaaacctctacgtatcgatgatctggctgagcaggttcagatgagcgctccttcgtttcacaatcatttccgaaggttaacctccatgagcccactgcaatatcaaaaatccttgcggctgcatgaagcaaaacggctaatgactaatcaacattacagtgcatccagcgctgcgttcgaagttggatacgaaagtccgtcacagtttaaccgggaatacagtcgtatgtttggcaacccacccaagcgagatattcagaagggacatcatagcgagggatga

SEQ ID NO: 157358 - DNA, 1815 bp, Enterobacter cloacae
atgaaagcctgtcctcagcatagtaccgggaaggagggagtgaccatctcattagatatgggcgagatgttgcaggctattctgcatgccgaatatgagcaattagtagccattccgacctggggaaaaggaagtatcacaaagttattggcattcagagacaggttacgagaagagatcatcgccattcagaatggtgacattgactacctagcgcttgaatccgtcttgatcgttccaaaacggcttataaactgcccattgaataaacttgaagccgttttactggaagatatcgaatcttacttcgataaaagcagtgaaatgaaggtcgacattgcccaacgccgctgggggtttgtcgaagaaaaaaagaccctcgaagagatcggggccgattacgtcgtatcgagagagcgcattcgccagattcaggccgatataagacaggaatttctagggcatatgcggatcagtcaaccattggtttgggaggcactggagcctgagatatcgccggaccttagtgtgaaaatgcagacgcttttttcctgtttctcctctgaacgtgacttcttcgaatttctggatatggtgtcagggcagacagagcttatcgctcatgtctatcccgagattgataaagcgatcctgaatacctactttgccgagaatggcgcaccaatccaccttgacgacatccgggagtttattccctccgtctgcagcatcgaaataccctacgttgacaatgcgattcgtcatcttgcgcaacaaggcgtcatccagcttaaagatgagaacgtctaccccctgcaactgaagaaagctgaagccagcgcctgcgtgctgattaaacacgaaaaaggtctgccctggctggatattgcaaaattaatcaatggaaataattattcgcgcagccctgtttacgaggaccgtctggatcacgaagcgtttaaccagcctgaatatatctacctgtccggcaagggtacctacaagcacacctgttttatcgatgtcgatgcggcgctgatagacgacatttttctggaaatgatggaatacgccgagaaaaattcccgtccggtgttccacctgaatgagttttaccaagcctcgcgcaatctaaaaaagcatgattactatgttattcgccattttgtgaaacatttcggcgaggattacggtttttacttcgacggaaaatctcagacggattcgatcgggctggagaaaggctttaagaacatcacacaaaaggacgtcatcgtcgaagcgatgaacaacagtgataaaccgctaacgaaacctgaaattgccaatttgctgaagagtaaaagcctagcacatgcgtcgttttatctggatgacctgattgagcggggaagtgttgttcaggtggaccacatgctctacaccacacctgcctgcgcctataaaaatatcgtcatcgacgactatgtcgcggcccttcatgcattgcttctgcattttggaaagccagtagagccctccatttttaaagcacaactgaacatgcaatttgagcgaagctactcgaaatatttctatgcttctcttgcccggttaaatgccaaagcacagggctggcaccgtaaacatagcctatattcggccacagagattccttttagcaatatatcatcggcaatggacatgctctgcgattctggggctcccttgcagcagaatatagatgccctgcaggcaaatatcgccattacacgtgaaacggctgcgattgccattcgaaactggcgcacagcacgatctatggtcaacggctaa

SEQ ID NO: 157359 - DNA, 429 bp, Enterobacter cloacae
atgagcgaaatctttttttatagcgcggggagtaaaggtttttatgcgggttcaatgcaggaagcttatatgcttgcggacagttggcctgaggatgttatcgaaattaatgaaactctgtatcgtaacttacttaagggacaggctgaagggaggattattacccatggtgcatcaggtcaaccaaaactttccgaaccacctgagccctctgtcgaagagttaatagcgcaggctgagataactcgagcagagctgtttaaagaggccaatataagaatcacacctttgcaagatgccgacgagcttgggattgcctctgaggatgagaaagaacggctcgcctgctggaagcgctatcgggtgtcgctaaaccggctggatctcagtactgccccagatatcgactggcccgaacgcccagcctga

SEQ ID NO: 157360 - DNA, 156 bp, Enterobacter cloacae
gtgagttacacgccagttgaacgcctgtatgtcgatctgggcaagatcgaaagcggatataacaacctcactaacacgcgtggtttcaaagacgaacagatgaaagcacacatcgtctctaatgaatttacccctggcatgcgttatgtcttttaa

SEQ ID NO: 157361 - DNA, 321 bp, Enterobacter cloacae
atgctgcgtgatgcgctgcagcgctgggtggcgagtgccattaccggtgaggtcactctggaactgcgtcgcggtaacgactactccatcctgaacaccgtgtctgacaacctgacctataaagcagagcgtctgaccatggagaaaggtgagtcggtgttctcgccagatgaccgtattggtcagctgaccatgcgtaacctggacatcaccgatacccgtgaaaagctgttcaactatgttgagaatggtctgctctccgcaagctccggtaacggcctgccgcaggtggaaaacctggagcacagcgataagaagtaa

SEQ ID NO: 157362 - DNA, 1398 bp, Enterobacter cloacae
atgactattgataatgatgttcccgagttattaatcgttggcgcacgcactcaattaggccaagggtgggcaaacaacgagcaccgactggtagcacttgataagatgacgcgtcaaccaattgaagttaattggagttatgaagattcaccagaggatattgttacagccgtagcatttacagataccagaccagatcagcgcttgctagctaattcaagcaaatacatccgcggaagtttaattaataaaagtaatattggcggtaatgcgagttcctttgcggccatcatggataatggcaaagtcgtagcatggggatttaatggtgaagctggaatcacacccacaagtacttttaatcatgatgttataaaactttatggtggaattgaaatcacgtctattggcattaataatgaaaagagaattttttcatggagcaaaacttccaatgactccatcccacttgaaatttccgcattaaatgatattgtagtagccaaaacatttaattcttatggttataatacacgtgttttcctggcgttaagggaaaacaaacagatcgtccaatgggaagatggtaactggccatggccactacctctcaatattgcagaaatgaaagatattgttgcaattgaagcgtcagatggcgcattcgcagcgattaaagaaaatgggcatctcattgcaagcggggatcctgcctatgggggtgaattacccgcgcatttgcaagatgtttccgatgcatgtgccatttttgctaataataaagcatttgtttcactgcaccaaagtggaaaagtttcagcatggggagacgaaaaccatggtggaactctgccagctgatattgcgatactgaatgatattatttccgtgcatccatattatcatggatttgttgcattaagagaaaatcattcgattgtcgaatggggaagcacagtaaatgattatatgaaaatctcaccagaaatttcatccaaaacagacatcctcgatgtccaaatagcattgaatggttctggcgctatcctccttcccgaggggaaggtagctcactggggtgctactaaggataactctcattacatcccgttacctgataatgtagataacgttgtttctctttgcgctgcaccagatgcttttgccgtaattaaacgagatgggacagttattgcatggggccatcctgaccaaggaggaaatatttctcctgtggctgatgaactttataacatccgcgctatttactcatcaacctatggtttttgcgcgattcgtgatgatggccagattattacatggggtgataatgaacgagaggttaacgtatatgcaatacctccagaacttcaaaacaacttaacttacgcctggtaa

SEQ ID NO: 157363 - DNA, 546 bp, Enterobacter cloacae
atgcgtagcaggctggcggatgccgaaccggggacgcagctttatacccagaccgaaagcggaacgttgtataccttccggcaagccgacagctacgccatgacaatcaacggcgtgacgcgggcgattcgcaccacaaccacacaggccgggtatggcgtgcgggaatggtacgtttgtccccactgtatgaaacgggtggcgaagctgtatattggcaaaaaagatattggctgccgggcgtgctggaaacttcactacaccagccagagcgaggacaggttaggccggatgcgaatgaaaatgcgccgtcagcgttatgccatctggggaaacaccgaacagacacgtaatttggctaacaatccctgttccttcccgaagccgaagggaatgcgctgggatacattcaacaaaaaagtaggggtgctggttcgctatgagagtgtttactggcaggcattcagcccggtagtggacagaatcacgggcgtgaatgagcgtaagacggggaaagcagccagaggcattggcctgactttgtaa

SEQ ID NO: 157364 - DNA, 858 bp, Enterobacter cloacae
atgtctaaaaatagagtaatacaagtaaaaaacataggaatatcaatatcatcagttaatgagcaggattacatcagcctgacagacatggtgtctggctttgatggcgggtctagccttatagaagcgtggctgcgtaacaaagatactgttgagtttttaggtgtttgggagcaaatcaacaaccaaaattttaattcccccgaattcgagggaattaaaaatcaagctggtgcaaaccgcttctctctgtcagctaaaagatggattgaactgacaaacgcaatcggtcttgtagcaaaagccgggcgttacggaggaacctacgcccacaaggacatagcttttgagtttggatcatggctaagccctgagtttaaactttatttaataaaagaatttcaagaacttaaggaaagagaagccagcgtaaattctattgaatggcaaataaacagagagctggcaaaggttaactaccgactacagactgatgctgtccagaaccaccttttgggaggactaccaaaagataagcatggccgaatttacgccagtgaagcagacctgattaataaaattatcttcggtagcacaaatcaagaatggaaatccaagaatcctaatgccagtgggaatcagcgcgataatggtagtccgcttgataatgcgttagtcgcgaacttagaagctcaaaattctttactgataaagcaaggaatgcctcaaacagaaagagttaagtttttaatcgaacttgagcgatcctttagagcaacaatgagcaaaacacctgcaatgagtcggcttgaaaaccaagcaaagacccctttgctaaagaataagaaagacaattaa

SEQ ID NO: 157365 - DNA, 1581 bp, Enterobacter cloacae
atggctgaacccgctgaagttattaatatatcgaatgcaaacgacagtgatgcttatgaacaggacaatcgtagaattgatgaaaagataaaggatagaagatcacaagaattaattataggtttatgtggagcaataggttctggggtaaaaaaacttaaagattctgttataagcgaattaaaggtggtcggctataaagtatgccatattagacttagtgacttaatagcagatactcaaggtgataaagccaaagaaataaaatcactaactggttttgaaagatataaggtgttgcaggacttaggagatcaacttaggaatacagatagaaataatatgacagtcgtagctgagatggctattagagagattgtcactttacgtaatgcagagtttaaagatgaaacaactaaaggtggcttagcgaaaacgaaaaaaaaggtagcttacgttatagatcaacttaaaaaccctgccgaagttgaattattcagaactgtctatcgaaataacttctatctcattggtctattaagaaataaagaagaaagagtccaaaaccttcgcgatgaacctatgtcattagaacaagcaaatattctaatggaaagagatagaagtagtaaagatgttaatggaaaatcggtagattcaggacaacaagttgaaaaaacactttatttagcagactacttcataaaaaacattgatcaagtagcagatataaacgcttccgtaggtcgctttttaaagttaatacatggagttggaaatctaactcccactcatgatgagacaggtatatttactgctcattccgcctcgtttcgttcagcatgtttatccaggcaagtcggctcttgtataatggatgatgacgggaatatattggctacaggatgtaatgacgtaccaaaagcagggggagggttatatacttctaatacgaatactgatatgcgctgttataaccgttctacatgttttaacgataagcataaagacatcctttgtaaagaaattgaagtgctcctcaacaaactaaatgttgaatcatcagccacaattgcaaaaaaaataatgtcagaaactaaagcaaaatcaatcatagaatattccagagcgattcatgccgaaatggactccattatggctttagctagaaatacaaacataagctctgtggataagatcatgtattgtacgacattcccttgtcaaaattgcgctagacatattgtagccgcaggaatcaagaaagttatttacattgagccttatgaaaaaagtcttgccttagacttacacaatgatgcaatcactcaatcagataccgagagcacccaaaaagtcatattttgtaactttgaaggtgtatctccttctcgatacgagtcatttttcaaaataagtagaataagaaaagaagaaggcaaaatcaagaactatgaaataaccaactctccgcacgttgaccctatatatttggatagttatatttcttatgaaacaagaatttctaaagaggtaacaagcaagctaggtaaacaatctattcctgattttgataaataa

SEQ ID NO: 157366 - DNA, 459 bp, Enterobacter cloacae
atgaccctgagaaaactgtttggacaacgagtaaaagagttgcgcattgccaccggaatgagccaagaagcctttgccgatcggtgtgggtttgctcgtagctatatgagccgcattgaacgcggtggctctaatgcgtctttggatgcgattgaggtgctggctaatgctctgagtgttgagccgtggcgactattggtgtctgattcatctgaagatagtgacccggaattactggttccctatgcagctgatggctcgtgttttcatcccgggctggcaagcactcgcgatggctcgtttggcgtaggtgataaaacggctcagaagcggtttggcacgttttctgaagctcttgagtatcttcgtagcatggagacagcaaaatggcgtaggcctaatcctagcggcaactggggtatcgtatctgcggttcggtgggacaagctgagaaagtag

SEQ ID NO: 157367 - DNA, 1317 bp, Enterobacter cloacae
atgaatgacggtgttatgctagattctgacgttattgctggtcttgagtggttagcatcaactcaagagaacaaacaacacttttaccagcgcttagcaaaagcacagcaattttacatagctacaacccaaaaagctgccaatttcgggaaacagtttgacccagaatggtatggttccgacgtggttgctggttatttcgcacaagcaaaatcgcttatcgataatagaaggtcttacgaagttactaatgcttcaaatataataccatgggttaaacaattaggagtgtgtgctaaatcgctcgatagaattactggcgctagagatcgcgcaatcagaatgcttaagaatacaacagtattaccagacacagccttattagagttggttcttgctggaaactatgcatcagaaggttatgaagttgagttcattccagaacaaaaagggatagcaaaaaccccggagtttcgttgccgccttggtgatggcgattatttctttgttgaatgcaaaaggcttcagaaaggtccttacgtaaagcaggaaatattacagcatcatatacgctcacatcttgccgaacttcatatcaaatccaaaaagatgaacgtatggactgatgtcacatatttatgtgaagttaaagacgcgcctgaaaactatatcatcagccacttaaaaaactttaaaggtgtattttatgaatggaatgatgattatggaaaaggaacgattagaccggccaacttaaatcttatcagggaagatatcactgaaaacggctcattactagtcaacactaaacttgctcgtcttatcaaaggctcccctctggaagatgaaaattaccaagttgttgctatgggacgaccagatgagcgcgactcacgtttcataaccaaagttaaacttgcttctttgataacatggcgttgtatcaatgaaaaatctttcgatgcacgttcgcgacatgtaacaaaaacattagcagagatagataaccagcttttggattatggtctaggcgtagggcatatagctttggatgtagatattcaaaaggatgttgccgataaacgaagggaaaaaaactatgctgccatagtaaattttgagcaaaaatctaaaatagtccgcctgaatgttcattatctcgtgccacgcatagatgagaactctgcgtggatggtagatgaaactgcggatgacttttttacccatgatctggtcaaatatgttatcccattgactaaaatattccccgaggctgaggtatttgagaatgaccaacctggctggcatcaaaagtaa

SEQ ID NO: 157368 - DNA, 570 bp, Enterobacter cloacae
atggctatttttggctacgggcgtgtttcgacatcccagcaggatactgagaaccagcgcatggaacttgaacaagctgggtggacgttcgacttttggttttctgatgtagtcagcggaaaggttcctgcggtgcaacgcaaagcgttttttgaaatgctcagcaaaatccgcgatggggaaacgttggtagttgcaaagctggaccgcctcgggcgtgatgcaattgacgttctgcaaactgtcaggacgttggctgaccgaaacatcaaggttattgtccatcagcttggcaccactgatctcacctctgctgccggtaagctcctgttgtcgatgctagcagcggttgcggagatggaacgtgacctgctgattgaacggactaatgcggggctgttacgggcaaaagctgaaggcaggaaattgggcaggcctgctaaaatcgcaccggaagctcgtggagcgattttagacaaaagggccgctggggttagtgttagcgcattggcgcgtgaatacggtgtttcaagagcgacgcttgctgcattactgaataagggttactga

SEQ ID NO: 157369 - DNA, 363 bp, Enterobacter cloacae
atgtctttaaaaatccgtggtgtccaaaacgcaggggaagtagggaaggaaaagttaataatcaaagtcactgccgattgtaacttgattgatttcatggtgatggattgcacctacgacgatgatggacaaagctcaaataaacatcggcacgtctacatgttcccagaaaaggaagttcatgtgggtgaatatatcatcttgtataccggaagcgggacaaataagatcggtgtattgaatagagaagatgcgacggtgactcatcgtttctactgggggctggacacgacggtctggaatggagatggagatgaagccttgattctgcaatacgctatcgtcgataggaagaaagtttaa

SEQ ID NO: 157370 - DNA, 333 bp, Enterobacter cloacae
ttgagaaccgtcgaaatactgcaatacaccttacgcaaaggtagcggtgccgcttttcacgccatcatgcaggaaatcagtgttcccctacaccaaagccacgggatcgatgttgtttcgtttggaaactcgcttcatgacctggattgctactacttgattcgcgcctttgacagcgctgaaagcatgactgcggttctcgatgctttttacgcaagcgcagactggcgcagcggcccacgcgaagacatcgttggcagcatagagaactgcattaaaacagtgattagcctaccatcagaaagcgtgaaagggctgagggtgcaatcgtag

SEQ ID NO: 157371 - DNA, 936 bp, Enterobacter cloacae
atgaaagtcctttataaatacatgccgttcagggtatcattttttgatgatcctttactaaggctcactcctccatcagccctaaacgatccgtttgactccaagcctactcaattagcaataaataaaaaaagtgacttctttttcaatgcgagcagagcggacgatgatgaacctgatgatgatgaattacgttctttttatgaaaatgacctccgttatggacttgaaaaatttgggataatttctttaacagaaaaccataaaaatttgctgatgtggtctcattatgcaaaagaccactcaggtgtagttatcgaagtttccaacgaacatccaatatttaactatcaccatttaacttatcggcaatgtggtgtatcgaagcaacatccaataaaggttgaatacactaatattaggcctgggcaggacattccagacacagcgatttatgaatattttgaatataatttttacacgcattttgccacggtaaaaggaaccccttgggagtatgagcaagaatataggtatctgcttaccctcgatgaagctgatgttggactggtgaggctgctaaaaaaaatagaagatattcaggaacctagattatctgttaggcacgttcatgaggacttatacaaagttgaatacacatcccctgaagatagggaacttttaaagtggtatctggctatccatcaagggcggggaaatatatgtgatgtcattctttttaaaaggctgagcagagatgctatcaaagccatttattttgggtgtcgcgttagcgatgatagtataaaagaagcaagaaatagaataataaaaagtggtttttatagtaaagaaatcaccttttataaagggaaggaaagtgatgacttatttgaaataaattttgaagaggtcaatttccacgagaaatactaa

SEQ ID NO: 157372 - DNA, 1950 bp, Enterobacter cloacae
atgtctcagcgatataaactctatcgtcgaaccagcggcatttatgttgtccgcattagcgttccccaacgttttcgtcgatacgcaggacagtgtgagattcacacttcaacaggcactcacgatcttcatgaagcaaagcagaagtccgcgctcctgttggcggtctggtatcagaccttacaagagtatgaacaattggattatcgaactttaagtgactgcgccccactgcttgctggtgagggtatgatctcgctttctaactttgctcagtcaatcgagttgcctatatcgcaattgattcgagaggtggttaatcgtaacctcccagtattctggctggcgactggtcagttcggtttctatgttgatgaatttaatgcagtagagcgggaacccggtgcaaaacgagaaaaacagtctgatgatgaaaaggatcaacctaaagaagtcatcattctcaatagcgcgtttgagctgggtatcgagagcttcgcaaatggttatctccgccccttcaatccccggcatactttagattgtctgttgagcgctggagtatccgaaggagaggctgcatttcgaactagtggtgataaccaaagtggaggttggttcttcgatttacccggcgtagatataactgctgatagcctgttaattagcaaagttcatgctgaaggccttcgacttacatggctggttaagaccacgccaccagcagttagcattcaccctgccgtgcctcttgtcgctcctgttatcgctaacgaatatgttcaccgcaaacattacaatgaaaacttgtcatggcttcgtgaagagtatttgaaacatcggcgtaagggcaaggtatcagaagcggcgctccgcgatattcgctattacttcgatttgatgattgaagtgatgggggatattcagttggaagatttcgaccgtgatttcctccgggcttatgagagcaagttgcgcacaattcctgctaaccgtaatttgatgaaaggtaagcacggggttaagacgctggatgagttaatcgccaaagcggcagaatgtggcgataaactgatgacagaagagtctgtcaaaaagtatatcaacggcctttatggtgcaatggagtgggctgttgatgatggtaagtttttgaaatcgccatgcgacaactttttccctcccgatgataaaggtgagcgagagcaggatcacactgacatatttgaaccgcatgaaattaaggcaattttttcgcaaccgtggtttgtggctggaactgttgaacgtaatgcgcaagggcgattccatcaatattgcccgtttcactattgggcgccgttgttgggcttgatgacgggggcaagggttaacgagattgcacagttaattctggacgatgttctggcagatgacggcgtttattacctgaaccttgaaagcgatagcgaaaacggaaagaaactaaaaaatgccaattcccgccgcaagattccggttcattctacgctgattaaactcggttttatcgagtatgtggatgcgttgaaagctgccgggtatgaccgtctttttcccgagcttaaaccacataaaactaaaggctatggtaggccagtttccgcatggttcaatgaatcattgcttgcgggtcgattaaaacttgaaagagacagaagcaaatctttccactctttccggcattctgtttcaactttgcttaaagagaagggtgttagttcggaactgcgtgggcagctacttgggcatgttcgcggcaaaacagaaactgaagtgcgatacagcaaagatttaaaaccggttcacatggttgaggttgtcgaaaagattgatttttctttgcccgagatagcgagattcaacattcctgatgggctggatgctgtaagagatgcgctgcgaagaaagcgtggcaaacaaacaggttga

SEQ ID NO: 157373 - DNA, 231 bp, Enterobacter cloacae
atgtttgatttattaaacgaatttctatggcgttgcattaagcgcttctttgttagtattaaagatgattgtgttaatcatataatgggctgtgggttgatttttataattatgataatttccatttctgtttcagcgcttatcaaaaataataaagttgcgtttataattatctttttgatagtggtggctattttttcattagtgtttttctataaaggaaaaaaatga

SEQ ID NO: 157374 - DNA, 7719 bp, Enterobacter cloacae
atgaaaaacaaaaacacacgcagcggaaaaataaccacgcgcaatttgcataagcggctctgcccattatatctgactttggccggcattttctcggcccccgtcgatgcggcaaccacgcctgataatcgtcagtcgaaaggccctaccatgggccaggcggccaacggcacgcccgtggtgaatattgccgatcctaatgcgaaaggcatctccatgaataaattcaacgaatttaacgttgaaaaacaggggatgatctttaacaacagcatgcaggacggcgtgacgaaaattggcggctatgcggtaaaaaatgcccaactgcagcacgaagccagcgccattatcagcgaagtaacgggtgcgaaagcgtcctacattaacggcacgatggaagttttcggtaaaaaggccgacatcatcattgccaacgaaaacggcattagcgtgaacggcgcaaccaccatcaatgccaacagcctgaccctcagcaccggtaaagtgcaggcaaataacgacggttcctataagctggcggtcgaaaaaggggcggtatccgtcaccggtcagggcattaataccgacgggctgggctactttgacatcgttagccgcagcgcgcagctggaaggcgaaattgccggtaaagcagacatcaaagtgctggcgggccagaacgactacgaccttgcgacccgtagccacaccgtgcgtaacaaaggcgacggacgcggtccggccgtggctatcgacggtagcgcgcttggctcgatgtacggcggtaagatccagctgatcagcaccgaatccggggcgggcgtccgtcatgccggcggcattatcgccagcagcgatctcgagatcagcgcggatggcgacattacgctcgccagcctgtcgagcgagaaaaatatgtcgctctccggcaagaatatcaccctgaacaaatccacttccggcgttcaggcaaaaaacgacattatcatgaacgccctggcgggcatcacgctgaataacgacgtgatcgcctcaaccggcaaaatccgcattgatgccagctcgctggtgcaaaatgccgcctcgctggtaaccaataacaccactaccaccgtcccggcaattcagattaacgtcgcgggccagtataccctgaacggcaaactgcaggcgctggacgccaacggaaaggtcattgcagacggcgtcgtgacgctgaaaaatggcgatttcgtcgtgaaggtcaacggcgttgaagtgccgtttgcctcgctgatctcggatacccaggtgatcagccacagcggtgacgtacagattaccgcaggcagcatgaataacggcagcggcagcgtcctggcgaaaaaaggcaccctgcagttcaccctgaaagaggcctttgtgaacagcggctccgtcagcgcgacgggggacctgacgattgcgtccggctcactgaagaacgacggcgtgctgtacgcatccaataaccagacgctccgcgtcggcaacctggacaacaacggccgcatcttcgcggaaaaacggctggtgatgaacgccagcgcgctgaacaaccgtggaaacatcggtgcgaccactgacgcactgcaggtcaccacgaccggcaatttgaccaacagcggcaccctcgtgggtgatgcggcagccgtcagcctgaacgtcggcggcgacgtcgacaacagcggtaacatcatcagcaacgaaaaagatgtctccctgactgccagcggtaaatccatcaagaaccagggcaaaatcgaggggaaaaacgttaccctgaccgcgtccaacgccgacgcgacgcttgaaaacagcggtacgctgaacgccagacaaaaagcgcaggtgaaagcggcgaagctgaataacaacggcggaaccctgagcgcagcgggcgatgttgcgctgaacgtcagtaagcaattaaataacacccacggcggcgagatcctggcgggagaaaaccttacgctggacggcgcgcagacgactgcactgaccaacgacaatagccggatccaggggaaaaacgtcaccctgaccaacatgtccactctcaccaacacgggcgacgccgttctgctcgcgagtggggcgatggatctgtccggcacaacaacgctgaccaactcggcctccggcattcaggcaacgtccatcctgctggaccacatcggcacgctgaataacatcagcgatgctaccctctacagcagcggcaatctcactctgtccaacatcggtaccctcaccaacgatgcgtctcagatggttgcagacggtgcgctggcgatgctgaacatcacaaacgtatccaacaccaacagcgccgcgatcgtcggtagcggcagcgtaacaatcagcaatgtggatacgctccacaacagcaacattgcggtgatccagtctgagcatgccctcagcatcaacaacgtgggtacgctgaacaacagcactgacgcggcgctcctcgcctcgggcaacatgaccctggacggtgtgaatacgctgaacaatgcctcggtgatcctcagcgatggcagcattacggtgcagaacggcgacacgctgcacaataacggcgtcgtgcaggcgggcaccgatctgattatccgcaatatccgtagcctgatgaacgacgggagcgaccatgtgctcatggccctgcggaacctgacgatcgaggatgtggattccctgaccaactccagccaggcggtgatcacggccagcatgaacacggtgctgaacgccgttggcgtactgactaacctctccggtggggtgattcaggccgttgatggggcgttaaccgtcgcggcaaattcgctcctcaacagcggcagtgaaaatggttcgaattcgactctggtggcgggcggcgatgtgaccgtgacgtcagagaatgtgaccaacgagagtggcgcgaccattgtctcgacggataacaacctgacgctgaacgtgaagaacacccttaacaacagcgatgaagccgtgctcgcaggggcaaaaacgacctcgctgaatgttcagacaggcaacatcaaaaacaccactgaagcagtcattgcgggcacgaatattgctgttgcgaccaaaaacctgcaaaacgatgccaacgcctccatcaccgccgaccgggatctgcagctgactctcgccagcctgaacaacacggccggtattcttgaggccggacgcgatctcacgcttagtgttgacaacagcctgaccctcgacgccaataaccagaatatctacgccggacgcgcgatggcgatcgccacgcacggcgactttaccaatagcacccagatggaagcgattggcgatttgaccgtgaatgcagacggtaatttcaccaacgccgtctctatcgtgaccggaggcgatctcaacgtcaccgcgggcaatatcaccaacaatgccggtagcctgctgtggacgatgggcgatatgagtctggaagcccgtaacggtactttcttcaacggcgtgtcgggtaacgtgctcagcatgggcgatatttcgattatcgcgaaggagatccataaccaggccgggatcattcgcgcagagaaggacgtgaatttagacgcggaatccatcagaaacgaaagtagctataccggcgacgaaatctccatgacgggttatcagaacgccagtgcggtatatagcaccgtagagcatctcgcgacgaaatctaacaccatgattaacttctcaatgccggttgtgacctcgggattgagactggatcatcaggccgagatcagcgcgggcggcaacattaatatcaaccagcgcaatatctacgacagaaaacagattacaaacaaaggtggtctgattcaggcggcgaaagatattacggttaccggtgatatctacaactcaccggaatacggtgaaatgtccatttatgattatctgcagctgccgttagagatgcagggcgggctcacctatcagtggcatttaggcgcctatcatacgtcaacgtggaactttgataccctttaccagttcctcgacttcgagtttggcaatggcgcagcggccggtaagacaggcagtgatgaccctgaaaaaacgctctggtacaacgccgtcgtgatgaccggcaacgagtccacgcttttcaacaaaatgatgtccgacatcttcggtgaaacctggcaaaccaccgactacggtacaatgtgcggtatctgggcgagcgtaacagcctccaataatgaggcattaaaaaacaataaaacctacttcgttccttctgaaaaaggcgagatcaccgcgggcggtaactttacgcataacggcggcacgctggataacggtattgcggacgctggggtgattaacagccacagcgacgtaagcgatatcgacgtgggtgaatacaccgtggatacggtcattgccggttacgatgtccaggtgaataccaaaaaaattgacgagctggcgatgggcattagcccgatgccaaccatcaaggatatggtctccattccgggcatgtttgaagtctcaaccgactttaagaaaaccgccgaagcggaaaaaaatggcacggcgtatccggggccagccaacaatatcgttccgatctttgaaacgcgtccgtctatgatcgatcagagcgcttacacaggatcggattacttcttcgatcaggtgggttatgacccgcagaagccggttaacgttattggtgataactacttcacctcagaattgatccgccgtgagatcaacagctcggtgggcagtttcttttcgatccgtgatggtctggaaggcgacgcgctggtgcaggccctgatggacaatgcaggcgtggccgcacaggacagcgagctggggctggttgtcggtcaatccctgaccgaggagcagcgcaacggactggacgccgatatcgtctggttcgtcaatcagacggtgaacggcgtggacgtgatggtcccggtcgtgtacctgtgccctgaaacgcttcgtcagatggagagcggagacgttaacggcggcaccgcgaccgttcatgccggtggcgatatgaacgtcgacgcgaacagcatcaataacgccaacggtacaatctcctccaaaggcgacatgacgctggtctctgatggggatatcaacaacgttagcaacggcatgagcgcgggtatctctgcgggcggcgacatcaatatgtccagcaccagcggcaatatcaataacaacggcgcggcgattaacgctgagggcgacgtgaacatgtccgcagctcagggtgacatcaccatgacggccagcgtagggcgcgatgagagcggcaagcaggtgatccacgcctttgaggacggcgttaccgcaggcggcagcattaacatggatgctaaatctatcacctccaacgcgtcggatattacggcgggtcaggatgtaagcatgaaggccaccgacggcgacgtcaccttcaatgacctgcatgaaattgacgccacgcgtatcattgataacgacgtcagaagcgcgcttaactacacgatgtctgatacctcaaccaccatgggcaaagccattggcgcgaatgtttccgctggcggcaacatgagtatcgaggccaaaaacgacgtagtgatggaaggggggacctacaacgcccagaccggcagcatcaccgctgaaaatgacgtgacgatcaaaacgtcccaggacgttgctcacgaagaacagcacagctcgtcacgcgagtttgtcatcagcgcgggcgtcagcggcggcggccagtcggttaacaccagctacggcaccatggacggcggcagcaccgaaacgacctccggcgactatgtcagcgcaggatcagaatccgatacctctgctatcggcaagaagcctggccgtgcgccggtcaatgatacggctggcttcacgtttggcatgagcacctccagtgactcgtccgtcaccgacagcaaaaagaacaccaatgccgcaatcaactttggccagtccgggacgattgaagccggtaagaccgctgacatcggtggagcggatctcagcgcgggcgacgccctgaccatcaacgccgaggacgtcgcgaccacgaaatatgaagatgagatgaaaaacacctcatcccataaagcgacgtcgtttggtatcacgggtgaagcccacagcacccttgtagatacctttgataaagccggtaacctgattgaaaaaggcaccgaaggccagtctgccaacgccggaacaacggctgcggaagtgctgggcgaggcctctaatctgctgctcaacgatctggctggcggttccgttaccattggcggcagttcgtctaaatcgcactcgatctccacctccacggcggaaaacattaaccacatcagtgccaataacgtttcgatcaacaccaaaaaagacaccacgttgaacggaacagacattagcggccagaacgttgaaattaacgcaggcggcgatgtaaacatgaatgcggcgaaatccacatccagctacagcaacaccaccgaggagcactcggcgggcatctcggctggcgtgggcgtggatctttccggcgtgagcggcggcgcgtccgtcgactacagcggcagcaaagagaccggaacaggcaacagcaccagctacaccaacagcaccattacggcaggcgacgtcaaaattaagtccggcggcgacatgaccatgagcggtgccaacattgatgccaataccgcggacgtggatgttgcaggggatatgaccgtgaactcccttcaggatacggttcacacggacaacgagcgtgccaactggggtgcatcagtcggtgtagccgtgtcgacgaaaggcgtgatgcctaccggggccgttaacggcggcggcggctcagaggcttatgactcggcaaccaccgcgaagcagtccggcattcacaccacgggcgacgtgcaggtgaaaaccggcggcgacctcaacatggcgggggccaatatcgtctctgataatggcaccggtaaggtcaacgttgcgggcaatatcaacgccaaagacctgcaagataccgttgagcaggatggcctgtacggcggtggcggcgtaggtatcggtggtttgccgggtaaaaaaggcggcattccatcggctaacatctacgtggatacggtcgatgaaatccaccgcaacgaaacgcagaaatccaccatttccgtggggggcaccaccagcaaaggtacgactggcgagatcaacaccaacaaggatgagatgtccgttgtcacccgtgacgaaaaagaagcgggtaacaatatctcctatacccttgcggatcctggtatcggtaagaagaaaaaaggcagttacgacgtcgatacgccgagcgaccaccgcaatggcggcggctcgtcgaagcattcaggcgatggcacgaagaagaaagaggatacgccagcgaaacctgcgcacagcgaagcggtgcctgccgttacgccgtcgaaagcggacaatcttaagcctgcgccaaaaccggctgacagcacgacgaagacggataccaccccgtctgaaaccgcgcacagcgaagcggtgcctgccgttacgccgtcgaaagcggacgatctgaagcctgcgccaaaaccggctgacagcacgacgaagacggataccaccccgtcttaa

SEQ ID NO: 157375 - DNA, 1917 bp, Enterobacter cloacae
ttgaaattccgtaaagatattaatgggctaagagcatttgctgtccttgccgtaatgatctatcactttaggccagagtgggttcctggtggattcgctggtgttgatgttttttttgtgatttctggttatctaatgaccggcataattttttcttcaattgaaacgaaacgttttaatttattagggttttatgtagcgagagttaatcgtattgtacctgcactaaccgtattgtgtgctgtattacttatcattggttggtttgttttggtaccagttgattatcgaactcttggcaaacatatagcaagtagtttacttttcttctcaaatataatttattggcttgaagctggatattttgatgttaattctcatgaaaaactcttgctacatacatggtcactgtcggttgagtggcaattctatattatttatcctgtcatatttgtttttttaactagagtttttactcttcatgctataaagaaaattgttgcttttctaacagttggtttcttttttgttaatatttatatgacacagcattggccagatgctgcatatttcctactcccttctcgagtatgggaaatgcttttgggcggtattgcatttctatatccattaggattgtccacgaaattaaaaaatggaattgagaaagttggtcttgcattaattatttgttcatttttcttcatgaatagcaagatggcatggcctggatattatgcgctgttaccggcattaggcgcttttttaataattcaaggtgacaatgaaagtagtattgcaacaaataatcctttttcacagtttttagggaagatatcttattcagtttatttatggcattggccttttgtggcattaagttattattatgatatttcaaatgcctgggttttgggtgtgcctatttctatccttctcggatatttaagttataactacattgagtcagtcaagtggcaacatattactcaatggaaatcaacattcaagcttaaacctctcattattgctgcttttgttgtgtttggggcatccttcacttatgctaaaaatggtattattgaccgatatcctgagaatcgggttttagttttgaatgcgttattaaaaaatataactatgcctcttcgagaaaatggctactgcttctattcatttaatgattcacagtcgcttaaagttgatcgaaatgcaggaactcaatgtttcctgggagttaaaactgaaaaagcagaaacattgatctttggagattctttcgctggccagtatgatcctttctggaatttctttgcgaaagagcataatattagtattcaatctgtttcaacaaattggtgttttccttcattcaatgaagattacactggaaataaagcacatgtcgctttcaaacaatgtcttgaaaacagaatgtttctaaaagactcgattcaacaaaaaaaatacaagtatcttatattagcatctgactggaatgctgtttattccaaagggtatattgagggttttaatagggttgttgatcttgccgtgcagaataacattaaggttattcttgtttcggctcctacattatatagaaaaaatccattaaataaattccagcgctatatactttcagatggtgatttaaatattagagatcttgaagttgcagagaatgggaatgcatatattgcaaaaaaatatcttaataatccagatgttttctatatatccaaagaagatctatataattcaactggattattcgttcgtgggggatatgccgtaccatatagtctagatggtatgcatatatcattgatgggcgctataaaatcatacgagcacttccgagacagtccagacaagaaaaagctagataactatatgcatctggcaaatgaataa

SEQ ID NO: 157376 - DNA, 1155 bp, Enterobacter cloacae
atgccctggatagttataattatttgttgtgtgatgagtattttaatttgcttattgagtcaggcttattcgagggtgatgtctcttgcacttgcactgatgtttagcgtaattacaactctttattatttcaatggtgttgattggctgaattattattttgtttttgattatttcaggagcagctttgatattcgctacgatttgttgtttaatgcctatttgtatgtaatggctaacatagttgagcagtttcaaatagctattgccattttttattttttctgtttctatttgctttatagagttgtaagatccagttttataacccttaacggaccggcattcattacttgtattgttttattaggtgggttgtctttaatcttagatcaaataagacaatttgcagctgttacgattagtttttttgcttgtaatagcttgatgaaaaataataagaaaggattttacaaatatgtttttttagcagttttgtttcattattcagctgttttcttacttttgtttcaatttttctacaagcttagaaaatctcaagctttagtggttggtagtgtaataatagctttgtttgtatttttaggcggtgttgtcctattcaatcttagtatggtggcaaatattccattcgttggtgttgagctttacagaaaagcagcgctttatacacgtgatcttgattcatttaaggctgagattggatttggcgcgttggctgatgttttaattattggttattatatgctcaggagaaatgcatctgatcaccttgataaactgtggtcgctagcattcatttgtgcttgtttccatattggattttattttctgcccgctttctcacgctttaactattttgcttttattcctctttcctatatattcggccatgccctttctcttaaaagagagagaatggggtttgcgcaggtttctgtaatcggtagtgccatcacaataatgattgttattgtaaccgccaaaacctttagtgatccaaatagaccttcatggagtgagtattcgcttgatgctgcattctatgacactctacaattagatcagttaagaagtaatcgctgcgcaactttagaaaatgatgtgaacgatttctgtgctgtgtataaatag

SEQ ID NO: 157377 - DNA, 252 bp, Enterobacter cloacae
atgggagtcaaaggttactttctgtttagaggtgataagacggtttgcggtggaaaaatccttgaaggatgtaccgatcaccagttcttcgataaagacatggcctgcgaaggtcataaagttacctgcggcaaacatccaggacattaccgtatttgcggcgggcttgaagacgacatacatggtaaaaggattgccggaacgctacacagctatagctcctgcccctgcaagtcgaagttcgttccttaa

SEQ ID NO: 157378 - DNA, 948 bp, Enterobacter cloacae
atggctaatataggtcgtaagttaaatcttttattgatttcaggcgatgcaagcgtaaaagaaggtacaattgagtataagggttatggagcttctggattcgttgataatggttcaggtcttccgcctgtaccttcacctcctgctgatgttagaacaaacgctgttctaaatgatggagagctttggtgtgaatatgttttttctgggcataattgttacttctccattaacttctggtcggcaacagataatctcatggtgtatttaaatgagcccccttacctttgctcaataaaaagatatgataatgggttgatatcagtaataaattcggttgggcagtcgactgtttctgttattaatacttcaatgaggcttagaattagaaataatgctggatttgttacgatttttataaatgatgttatcgttttaacatattacttcccaaataacgggttagggataacttttactttatttggtgctgattctatttatattaatgagttaatggtgtcaagttcaacgccgaaagcatttgttgttatggagtttaataaggagtttaatgatctttattctgaggtaattaaacctacacttgatttgttggggtttgaggtgataagggctgatgaatcattcaataatggttcaataattcatgaaattattacagagctaacaggggcatcagtgattatagcagatattactccaaacaatccaaatgtatattatgaagttggttatgctcatgctttgaaaaaagacgttattttattatgcaatgaaaaaagggaaagattaccttttgatttagcagactttagaactattttttgtaaggattctattgctgggcacactcaagtaactgaaaaattaaaaaaacacatttctaatctaattggagttaacagttcggtaagaagtttatag

SEQ ID NO: 157379 - DNA, 2229 bp, Enterobacter cloacae
atgacggtttctgtaattccgcagtacaaacctttaatcgcagaatttaaagacatcgataaactttcctctgcggactttgaaattttcgttcgcgatttgtttgtcgcatcgggatggaccgatgccgaaattacccaaacaggcaaagaattcaaacacggtgatggtggggtcgatattttcgcctggaaagggaggcgaaagtttgctattgaggtgaaacagcgccaactgggtacgacagtagatgtgaaggctcttaatcaactagttaccggcgccacgctggcaaatgttacctataaaattttagttaccaactcttggtttacctctgaagttaaggcgcgggcgttacgacttggcgttgagttgatagaccgggatgagttgcaaaatctgtgggtcattaagcattccgagattggccgtgacattaagccgcgaacttatcagcaggacgtgattaacgaagcccttgcacttcatgcggcaggaaagtcaaaacttctgattgaaatggcgacgggattaggcaaaacctataccgttgcccacttaattaagcgcttaatccaacaaaatagccgcaggccaagagtgctatttctggcacatcaggtcgagattttactgcaatctgttaccgcatttaaaaacgttttgggtattggtaactacagtttttctgcctgtttcggcggcacacatcccgaagagactgatttcgtctttgcgtcatttgatacgctctatagcaaactcgatgagctatctgcaggagcatttgattacgtcattgtcgatgaagcccatcatacgctggcaaaaacctattctgcggtggtgtcgcttttccagccgcaactcctgattggcctaaccgcgaccccgtaccggacggataatcgcgatgtagtgagtttctttggtggcgccgatgggcatatcggtaaattcgatctggtttgggcactcaaaaataaaaaactggcattccccaaatatcttgtcctgcttgacgatctggatcaggataagatcgaccagcttgagagcggcctttctctatccgatatcgataaactgctttttttgcataaaaaagatcatgagattgtccggctcatcaacaaaacagtgaccgagcaggggatagaggacgtaaaagggatcatcttttgccggaatatccagcatatgaatcatcttattgcgttctttgagcctggcacggctacccttgtgcactcaaaaatgtatgatcaggaacgacgagaaaatattcgattgttcagggaaggggattataaatacattttggtgtgcgacctgttcaatgaaggtattgatattccagaaaccaacctgttgatctttatgcggtatacagggtcacgtacaatctggttacagcagttaggacgtgggttgcgcaaaacgccaaataaagagtttgttcatgtcttagattttgttggatcccttgagcggttgaatgagattaagagcctggcaaaagagattgaacagcagccaaggtatcacgacagcactattgatgatccggaggagatggacgcgcccgaggtttatcatgacacttcgctggaggtgcaattcagcgcagaggcggcgaaagtactggctctgctggaagagatgaaaatgcagcttaatagccgcgatgtactgctggataagttgcgccgatatcgcgaaaaaaatgacgagttgccctccattgcagaactcgaacaagagttagatgacgttagccttgatcaaattgccacccatttcggctcttatttgagctacctgacagccgcattcaatgaagacgtagatattccttccatgcgcacgagactgattgaatttctcgatacctttgtcgggaagaacaatatggcaccaagtttttacacgatttcactgaatttcggcgtgaacccgttgtacgaattcagcgaaaaagagattcaacagcttctgccagattacgacaaccttgtcagtgccagaattaaggtgacagccccgcaggacgtgagtgatatgccggtgaaggaagtggaagtttgcccgtggatcgaaacgtaccggggacagcctttgaacctcgtcagatttaagcaattaccgtcggatgtgcaggaacagattaaaaacaaatatcaatcggcattcgtgtttctcaaaaagctaaaagacgcgctttaa

SEQ ID NO: 157380 - DNA, 729 bp, Enterobacter cloacae
atgcactccgccaaaactttttgcgtgccgcaaaaactttcgtctccgcccctttccttcctcccttcgccgttgctccttttgccctttgccgcgagagaactcaccagggagatggccagccatcaccacaggagaaaaccaggatgcacacacgaaacgtcaacgtcaaaaccgccgctcaagaatcttccaggaagatgggggaagaacaaaaccctgtttctgtcgcacgggagtgggtggctcaccggccagcagaataccagccctgttaccattcgcctgcagggcaacattcagatgcccaacaacaaggagttcaacgctgacggctgctttattgtgggtgagatgtggggcgatatctccagcgagcgcggaaacgtccgcacccagtccatcagctgcatcctgaaaaacggcaagcacgttgacatggagtttcagggacatgtcagcttccagggtaaaggcggcattcgcggcaagcccgttatgcgaaacggcatgattgtcggctacgccggtgcagcaggcctcctgtcaggctttggcgaaggtatcaaatctgccgctacaccattcgtcggcctcggtgccacagcggatgtcggagccggtgacgtgtttaagcagggcataggcggcggggccagcaaggcggccgacacgctgagccagtactggattaaacgcgctgaacggcaacatcaaagaaaccagtga

SEQ ID NO: 157381 - DNA, 930 bp, Enterobacter cloacae
ttggctatttatgatttgttctctaagagacaaaaaagattgagaggggatgtccccgatgtttaccaatatactaaccttcctcaaaatttcagggttcaggtggtacatatagttaaatcaactattggaaatgattctgattataatactcctgcaagccaaatttataattacataaataatactctttgtagagagtatggtgtatttaaacttcaggagtatgcttcagaaaattttgagtatatatacaattttttcctgaaggaaaaagaccccgaaaaatgccttgatgtaattgagcttacctttaaatgcatcaatggatatgtcaggcaaaactcctgggaatttcgtgattgccaccaatctccagatgatgctatagaggagctaaataataggttcagagaatcaggcattggctaccaattcgagtctggagaggttgtcagagttgattcacaattcattcattccgatgttgttaaacctaccctccagattttggggaattctcaagaattcgcaggggctaatgataagttcctctctgcgcacgagcactacaggcatcaaaggttcaaagagtgtcttaatgattgcctgaagtcgtttgaaagccttatgaaggccatccataaaaaacgctcatgggaatatggaagtactgatacagcaaagaaactaatttccagttgcctttcaaatgggcttattcctgactacatgcaaaatcaattttcatcactgaggattttactcgaaagtggtgtaccaactatcagaaataaagagggtggacacggtcagggggatgaggtgacgaatgtaccagagcatcttgctagctatacattacacctgacggcgtctaacctactatttttagcaaaatgtgatgagaatttcacaaagaaaaaataa

SEQ ID NO: 157382 - DNA, 210 bp, Enterobacter cloacae
ttgtacaagcgaagctataataaaaacaatcaattaattatttttaaagtattaaacaagaacctattgacattcataaaatacaagttatttataatgtatgccataaataaaaagttttatgtcatatgtatcctgcactatgtgcagttaatgtaccacttgtcccatagatgggaatattggaaaggttactttgttttgaagtag

SEQ ID NO: 157383 - DNA, 1122 bp, Enterobacter cloacae
atgagtcagtggataaaaactaaacttggtgagattgtcattcttaattatggtaaagcattaaaggcacaggataggaatgctggctctatacctgtatatagttcaggtggattaactggttggcataacaaagcattaataaacgaacaaggaattattattggtcgtaaaggaactgttgggaaagcgtacttaacttatggaccattttggtgtattgatactgcttattatattttacctaacccttcgaaatatgattttgtttttttattctatttgttgaaaacattagggctggaagaactgaacgaagatagcgctgttcctggactaaacagggataccgcttatagtcaagagatcctattaccttcactgccagagcaaaaagccatcgcctctgtactgtcctctcttgatgacaaaatagacctgcttcatcgccagaataaaacgctggaatctatggctgaaacactgtttaggcagtggtttattttagatagcactggtgtatcagttagtatagatcagataattgactttaatccaaagcgaactttaattaaaagccaagacgctacttatttggacatggctggactgagcactgttatttttcgtgcaaatggatattacagacgtccattttcttcaggaactaaatttactaaacgagataccttgctagccagaattaccccatgtttagaaaatgggaaagcggcctatattgattttttagacgacaatgaaactggatggggttctaccgaattcatagttatgcgtcctaaaaaagaaatccatccttttatctcatatatcatgtgccgaaacccggacttcaaagaatatgcagaaagctgtatggaaggttcaactggcagacaacgagttaacttggatcaccttaagaagttcaatgttaatctgccaacagaagcttccctacgtataattaatgagttattagattcatttgaaagtaaacttattaacaactcaaaacaaattgatagcttagaaaaactccgcgataccttacttcccaaactgatgagcggtgaagtacgggttcagtatgcagaagaagcaatcgcatcagtagcataa

SEQ ID NO: 157384 - DNA, 531 bp, Enterobacter cloacae
atggaaaaaaagaatcaatggaataccggctactggatcgttgccctcctgctgttgctgagtttgcagagctactggcagacggcgaaaaccgtcgagccggtgccctacagcgagttcgagaaggcgctggacgaggggcgcgtggccgaagtgctggtgtcggatcgtacggtgaccgggcgcctgaagtcgccggacagccggggcaagacgacgatcgtggcaacgagggtcgaacccgatcttgccgatcgcctgtcgaagtacgacgtaccctatgcccgcgtgttggagagcacctggctgagcgatgtgctgtcgtggatcctgccagcggtatccttctttggcgtctggttcttcctgttccgccgcttcgccgagaagcagggcatgggcgggtttctcaacatcggtaagagccgcaccaaggtgttcgtggaaaagaacaccggtgtgacgttcgccgatgtgggggggggggggatgaggccaaggcggagctggtcgcgatcgtcgatttcctga

SEQ ID NO: 157385 - DNA, 1170 bp, Enterobacter cloacae
gtggtttttttgagcggcctgtgctccaccgtagtgctttaccaactcatcgtcgagtccgtcgatcaacgacaacaggtctacttcgacttccgcgcccgggaggctgctgagcgcatcgagaaccgcatggccacctaccagcaggtcctgcggggcacggccgggttctttgatgtgcatgatgatgtcggacgtgaagatttccgaaggtattccgatcgccaggctctggaccagtacctgcctggcatccaaggcgtgggcttcgccagggccatccggcctgccgatctgcaaacccacatcgatcaggtccgcgccgaaggctttccctcttacacggtgcaaccagcaggccaacgagacctgtattcctcgatcgtgtatctggagccgttttcgggacgcaacctgcgtgccttcggcttcgacatgtattcagaacccgtgcggcgcgaggccatgcagcgctcggtagatacgggtgccatcgcgctttcggggcgtgtgcgtctccagcaggaaacgggggttcaggagcagtcggggttcctgatctaccaggcgatctacgctactgaccagccagcggcaaccgtagcagagcgccgggaacaactgtgcggctgggtctatgcatcgtttcgcatgacagacttcctgcagggtctcctcggagagcaggagcgtgacctgatcatcgacatcttcgacggcgaagagatggttgaagcgacacgaactcactttggcagttcagggcgtaccgatatccgtccaaggtttgaatcggtgcatcggctgcgcatgatgggacaaacctggaccgttcgcgtgcatggcagcacgagccttctgcaacgggtggacagagggctaccgatcttgatcgcggtaaccggtgtcttgctcagtgccatgctggctgggctgatgtttttgctggtgtcgggtcggtcccgggcagaagcggcggcccgcgcgatgacagaagacctgtctatggagaggtctcgattgagtgccattcttgaaggcacccgggtcggcacctgggagtggaatgtccagagcggtgaaaccgtcttcaatgaggaatgggcgaggatcgttggatacaagctccaagagcttgagtcgatctccatcgggcactgttgcaaatag

SEQ ID NO: 157386 - DNA, 210 bp, Enterobacter cloacae
atggcaagccggggtgtccggatcatgcagaaggttcgcctgattctccatgacgttgagtgcaaacatcttctgcttacgtgtttcctgctgttcctgcagcttattactgacggtcaccagaatctccgggtgagataccagatagtcggcagcgatttcgccgatacgagcttcctgctccgggctgaataccggctgaggtgctga

SEQ ID NO: 157387 - DNA, 984 bp, Enterobacter cloacae; identical to SEQ ID NO: 140602

SEQ ID NO: 157388 - DNA, 255 bp, Enterobacter cloacae
gtgtcttctgcgctttccccctccaaccccactaggacaacttcccgctggggcttgtacgtcagcattgtgctgattggcgctaatctgcgcgcccccattacgagcctcgggccggttcttcccgatattcaacgcgccttacacctcggaggtcttggggcggaagcagctggcaccgacggcaaacatctccaattcaatgcgcagctggcgacaaaccatttccatcaattagggctggccgccttgtga

SEQ ID NO: 157389 - DNA, 360 bp, Enterobacter cloacae; identical to SEQ ID NO: 111885

SEQ ID NO: 157390 - DNA, 348 bp, Enterobacter cloacae; identical to SEQ ID NO: 16878

SEQ ID NO: 157391 - DNA, 348 bp, Enterobacter cloacae
atgatcccgttaccttccgggaccaaaatctggctggttgccggcattaccgacatgcgaaacggcttcaatggtctggccgcaaaggtgcagatggcgctgaaagacgatccgatgtccggccacgtcttcatcttccggggccgcagcggcagccaggtaaaactgctgtggtctaccggagacgggctgtgcctgctgaccaaaagactggagcgtgggcgcttcgcctggccgtcagcccgtgatggcaaagtgttcctgacaccggcgcagctggcaatgctgctggaaggcatcgactggcgacagccgaaacggttgatgacctccctgactatgctgtag

SEQ ID NO: 157392 - DNA, 1005 bp, Enterobacter cloacae; identical to SEQ ID NO: 31749

SEQ ID NO: 157393 - DNA, 1125 bp, Enterobacter cloacae
gtgacgcagttggtctttggcccgtactcgcccttcccggttgcctggcgcgtttcggggccggatgtcggtaccttacgcgatatcgcagacaaggtgaaaggcgtgcttcaggcaagcccaatgatgcgtaccgtcaataccgactggggatcacgcgttccggtattgcatttcaccctcgatcaaaaccgtctgcaggccaccggcttaacgtccagtgccgtggctgagcagcttcagttcttgctctcaggcgtgccaattaccgccgtgcgggaagatattcgctcggtagaggtcatggggcgcgccgcgggggatatccgtctcgacccggcaaaaattgagggttttaccctggtcggcaatgcggggcagcgcgttccgctgtctcaaattggcaagattgagatcggtatggaagacccgattttgcgccgccgcgaccgcactccgaccattaccgtgcggggtgatatcgccgacaatcttcagccaccggatgtatcggtcgccatcatgaaacagctccagccgattatagatacgctaccggccggataccgcattgagatggccggttcgattgaggaatcgggcaaagccacgcaggcaatgattccgctgttcccgatcatgattgcgctgacgctgctgatcatcattctgcaggtgcgttcgctctcggcgatggtgatggtgttccttaccgcgccgctggggctgattggcgtggtgccgaccctgttgattttcaatcagccgtttggcatcaacgcgctggtggggttgatcgccctttcaggcattcttatgcgcaatacgctaatcctgattgggcaaatcgatcataaccagaaggacggtctcgatccgttccacgcggtggtcgaggcgacggttcagcgagcccggcccgtactgctgacggcacttgccgccgtgctggcgtttattcctctgacgcattcggtattctggggaaccctggcttacacgttgattggcggaaccttaggcggtacggccattacgctggtgttcctgcctgcgatgtatgcgatctggttccggatccgccctgcggaacagcgcgtgcagtccccggcagaaaacgtgtaa

SEQ ID NO: 157394 - DNA, 240 bp, Enterobacter cloacae
atgccgcggcagtatgagatacaggctgcattcgttgaagccatacagctaaacccaaagggctatcgctatctcagcacgaacgccttcatcgataagttgcgagagaagaactggcactttagcctggctgatgcaaaccagtggatagaacgttatcagccggacttcgctgacaagacgaccgacggcagtgaaaacagatactggatcctgcgcaacatggggagggtattctga

SEQ ID NO: 157395 - DNA, 318 bp, Enterobacter cloacae
atgggctttgtttcaccggctactgactatgttgaagagcgactgactatcgattctctgtgtagcatcgacggaaactgccgggtgatcgaaacgtcatgtgggtgggccgttattaacgtagccataaaagcgagccttggcgatacgctgctggtaaccatggatggcagaaatcagtttgtaaaactgcatggccaggcattaatcacggaagatggtgaggctatagagggagatgccctggatgatgtgacggtgcgtggcgtactgacgcacacactgaatcgggcaagtgatgacagggaaattgtttga

SEQ ID NO: 157396 - DNA, 177 bp, Enterobacter cloacae
atggagcaacaggcttctattatttcagatttttattatttgataaattacggtctgggtgatttccgaaacattgcagggtttgaagggattatcggccccgacctgaagaataaatacctgcaggtattatcgttgtttattcaaaatcctaaagatcggcgggtatggttatga

SEQ ID NO: 157397 - DNA, 714 bp, Enterobacter cloacae
atgtgtaactgcttttccaaaaaccttggtttgagaacaattttcggaacgcgagtattcacatcttctggttcatggacttgccctgaaaatgtgaccaccgtttatctctcaggatgtggaggcggtggtggtggcggcggtggcggtggcgctccagatgccaatacaaaaacatcttcatcaggtggtggcggcggtgcgggtgttgcaacaataaagcaagcagtcactgtggtgcccggaaacgtatataccataacgatcggtagtggtggggccggagggaacggcggagcctctgcgggtaatggctcatacggtactggagggggatccacttcttttggtggcttgttaacactaaatggtggaggaagaggtagtcctggctctgctgctattggctcatccggtaatcctattggaggggatggtggttttccgggagggtcgacaggtaccacaggctcgcaaaacctaatcgttccttcagttggtggtgccgggggtactggtccattcggcacaggggctggtgcatctcgtggttcgactggcgcaggttcgtcagcaggtagcggatctgcaagtccggtaggtagcggttacggttcaggcggtggtggtggcgcgggtacgcttggcgcaacaggctctgcggggaataacggctcagcaggcactaacggcattctgattttggagtggtaa

SEQ ID NO: 157398 - DNA, 405 bp, Enterobacter cloacae
atgaatttcgcactagtgaaagatggaatcgtagaaaatgtcgttatctgggacggtgaaggggatctctttgagggttacaaagctgtaaacatcgaaggcttgggcgtaggcgtaggctggacatatgacggcaaaaattttacagcaccggctgaacctcctcagccagaactgacttatgaagagttggttcagcaggctgaatttcagaagcaaaccctgattagccaggcgaatgaatacattgatagcaagcaatggccatcaaaactgtcactcggccgcctgagcgatgctgataaggcactgtttaatcaatggctggattatcttgatgcgctggaagctgttgatacctccagcgcaccggatattaactggcctgttgccccggcagtgtag

SEQ ID NO: 157399 - DNA, 195 bp, Enterobacter cloacae
atggcagattacgcattaatcaaaaatggcgtcgtcgagaatgtggttatctgggatggtgaaggcgatattttcgctgattacaccgcagtcaatatcgacgagcttacggtaggcatcggctggtcatatgacggaacagacttcactgctccgccagagccggaactgaccgatgaagaacatgacgggtag

SEQ ID NO: 157400 - DNA, 1287 bp, Enterobacter cloacae
atggcaaacctacccgaaaccccgcagtgggaagacggcatctaccagatagaggtctctgaccccgtactgggtgggcctgacgggatatctaaccgtcaggctaaacagctggccagccgcacttcataccttaaacagaaggtcgaaaaaggcggaacagatctggctgcacacatcgcggcagcagatcctcatacccagtacgcgccgaaggccagcccgacgttcactggcacgccaacagcgccgacccaggccaaaacggataacagcaccaaactggccacaacggcacacgtcaagtcggtggttgctgattacgcccctttgtccagtccggcattaactggtaagccgacagcgccaaccgctgcgcaaacggccaatgacacacagctggccaacacagcattcgtcaaagcggcaattgctgcactggttgcttcttctcctgaggcgctagatacgctgaacgaactggctacggctttgggtaacgatcctaaatttgccactaccatgactaacgccctggctggtaagcagccgctggacaacacgctaacggcattatcagggaaatcagtcgcagctcttctcgaataccttggtttaggagatggcacaggtcgattaataaatatccgcacattcacgtcatcaggtacatacataccgacggcgggaacaaagaaaatcagagtccgtatcattggcggcggcggtgctggtggtggcgcggctgcatcaacagtatccggatacctggcggcagggcatggcggtaatgccgggtcatatggtgagacagggctgattaatataagcggcattgcttcagtcgcggttactgtcggggctgcgggtgtggggtctgccggtgctaatggcacagatggcggcgcatcatcatttgggggttacatcatcgcacctggcggaaggggcggcaattacggagcgtccggggtagacagcaactcatgggtgccggactacacgcaaagcgatgaatgtaccggcaccgcgatgcttatcagtattcctggcgagggtggcttcgggcaaatgtcgttttccacgggttctgccaagggcggacgcggtggaagttctgtgttgggaaccggcggctctgcctttgtgatcaatactacaggaggatacgggagggggcttggtgggggcggggctggttctgttacaacctacgccaacggaacatcggcaacggctggcggccacggtgcgcgcgggcaggttatggtggaggaatacgcataa

SEQ ID NO: 157401 - DNA, 366 bp, Enterobacter cloacae
atgtccattattttagaagaacttcacgatcgtctagttgaggaattaaaacgcgtcggccctcaaactgttgctaagttaacgggcatatctcgtgcgacgatttacaactggatggaaaagggcaatacgcccttagataaattggctcttttggatgcagcgggcatagatgttacttacatacttactggtcagtgtgctccaggggctattgtagagagaccttccttaacaacccggcaggcggcgttgttggataactatgagcacttaaatgattcagacaaaaaggctttagagcgtacagcctttgcgttggcggaacagggaaaggtgagcaaaaaaacaaaaacagcatcatga

SEQ ID NO: 157402 - DNA, 306 bp, Enterobacter cloacae
atgaagaaatcttcccatcaaaatacaggcagcaaaaaatttaatatccacgacaagctcagaggtagcaatactcactggtctcatcgtttttcagcccagcctcatgatgaaggttttaattaccagttcagaacaacctgtgtagatggggtagagtttgcggtttacgagcgcattgataattgtttcgtgttagttgatttcttcaagtcctatgatgaagcatgtgatgacgctaaaaatataatcgatgatcatccggacattaagcggatgttttccgccaatcaattaagatattaa

SEQ ID NO: 157403 - DNA, 198 bp, Enterobacter cloacae
atggtggaaacacaaatgaaaggcattttgattgaaagcgatccgagattaatgaacggtctggatgcttttgatacaaattgcattgcaaaactgagacgcatccagacagttaagtttggaaaggaaaaaaaatccgaaaccagcaacgttaatctttttccgggagagtttgtgcatgtcgagcatgaaaaataa

SEQ ID NO: 157404 - DNA, 531 bp, Enterobacter cloacae
atgtcacttgacgaacacttagtccatgaacgtacttgtggtgagtgcacagtatgttgcatatctcttcgcattgaagaacctgagctaacgaaaaaggcagatgtaccatgccctaacttatctacagtgaaaggctgcgcgatctacaactccagacctggcgtttgtcgtacctggtactgcgggtggcgaataatgccttttgtaaatgaagacatgcgtcctgataaatctaaggtattaatcaaaacagatggtcataatttcatttttcagccattaacggctcaagatgtttcgtcattactcaacataaatgttatggaagcaatggccactcttgtattgaatgacgtatctgttcaaacatccattcctacccggccaggattcactaatgctttgtctgaggttaacgatattctaaagccatcattgaaaacgatgagcctacgagagggaaggcaagctatgaaaacacttatttttcatgctcgacatgcacaaactctcccggaaaaagattaa

SEQ ID NO: 157405 - DNA, 1473 bp, Enterobacter cloacae; identical to SEQ ID NO: 140586

SEQ ID NO: 157406 - DNA, 516 bp, Enterobacter cloacae
atggataagtttattaatccagttatttataattatgaacatattgaagtcagcggaataattcgtacaggtctttattataaggatgagcaaggccgggactggtatgaaaccttaacaggctggaaaggcgcggtttctgtggatagtgacgggattgtcgttgcttacgaacatgatgtttcgtatatggggatggaggaaggccgcaatgtctatgaggtcgatcccctcagcgtgccgatagatgtgttagggaattacaaatatgcggatggtgttttttatgatatccgccctgatgcggcaacgcttgccgaacaaacgcgaaaacagcttattgaggatgcgggtcttacaatttcagtcctgcaggatgccgttgatttagggatggcaacagaaaacgaggtagagcagttacgcttatggaaaacttaccgtatcagactgagccgaatctcaacggcgacagcgcccgaaattgaatggcctgaaccaccttcgaacgattaa

SEQ ID NO: 157407 - DNA, 285 bp, Enterobacter cloacae
atgaaaaaaggtaccactgaaattattgaacgctggacccgtttagcagcggaggccaagcagctggggctcaccactatccctatcgacccggaaaacatgctgatggtcctgggagatctgccagccagtaaagactatcaggctgcaatcgattttttgcgcaagagagcggccagcgaacttgatggcggttttagagcgcaccacaacgcacttatctatgcggcaaatgaactggaaaatgcccaggcatttgggtgggaggtaggtcatgagtcttga

SEQ ID NO: 157408 - DNA, 195 bp, Enterobacter cloacae
atggcgcatgaattctcattagaacaagcaaaagaaaaagctcatcaggcagaaataatctgcctaatgatggaggcatatccaaataaaatggatgattcagaaatcgaggccatcgcatctttattaagcaagttaaccggggatgtttgtgcctggttaatcgaagagcaagccattagatccaacgcttag

SEQ ID NO: 157409 - DNA, 594 bp, Enterobacter cloacae
atgaatagaaaaacgtacaataatgtaaagatatttataattgccctggcgatatgcctgatcgcggttcctttctcccgttatctctccccgcgcgcgattgtgaatggtcacgacgtttatttagcgtggttacccctgagcgttatgctggcggtaattctgttatttggtcgtcgggcaattcttcccattctgttaggttttactgtcactaatttattctatattaatttagcaccgctacaatattcagtattgctgttttgtcagacctttgcgttgttcgcggcgtgcggcctgttgcgcctcatgctgggcaggcgctggcgctactgcattcctaacaagcacattggattacggatattctggctcggttttattgtgccactcggcattaaaatgtcgatgtatttagcgggctatttgtttgatttcccggtaactatctccaccttcttcggtgaagggacggtaatttataacgtcgtggatattcaaagtctgataggcgcggcgctgatttttaccatgatgttctattacccgttaagaatgattattaatcctcgttatgccatcaccttctag

SEQ ID NO: 157410 - DNA, 321 bp, Enterobacter cloacae; identical to SEQ ID NO: 14983

SEQ ID NO: 157411 - DNA, 231 bp, Enterobacter cloacae; identical to SEQ ID NO: 14987

SEQ ID NO: 157412 - DNA, 435 bp, Enterobacter cloacae
atgtttaataaactgtttggaaaaaaagtagcagcggcaaaagttgaacttaagaaagtggaaaatcgcgatcttatggaagctattgtcggcggttgtcttttggtatctgccgccgatggcgagatcgaaaaagaagaaaccagcaagctggatcagcttatccgctctaacccgcgccttgcgcatttcggcaatgaaattacatccaccatcaaccgctatacggaacagcttgaagctggcttccgcgttggccgcatgaacattttgcgcgaaatagacgacatcaaaaacgatccgaaagaagccgaagaagtcttcgtcaacatgctgactatcgccgaagcggacggccagatcgaaccagaagaacagaaggtgctggaagaggtcgggcgccgtctggggctgcgtgttgaggattatctctga

SEQ ID NO: 157413 - DNA, 183 bp, Enterobacter cloacae; identical to SEQ ID NO: 14989

SEQ ID NO: 157414 - DNA, 213 bp, Enterobacter cloacae; identical to SEQ ID NO: 14990

SEQ ID NO: 157415 - DNA, 195 bp, Enterobacter cloacae
atgccttctaactcacatgaatttaatcaaggcgcgctgcacgcactgaacgaaatcaagttgatagcgttggcgttagccacgcacgtgggcgtgatgaatgggcaggaagaggcgcgggcgataaaggccactctcgacgggattgtagatccgcttatcacgaaataccgcaaagcggaggggcagcagtga

SEQ ID NO: 157416 - DNA, 915 bp, Enterobacter cloacae; identical to SEQ ID NO: 14993

SEQ ID NO: 157417 - DNA, 639 bp, Enterobacter cloacae
atgagcactcgcgacaatgcttctacgccactttcaataccctccctttacgcaggtgagttggttgaaaaacttttaccccattcacctgttaaaagttaccctgcgcggcgaacattatacatttcgagtaataatgcaaatttttgctatatcattgcagagggaaaagttgaattatgtcgggaagatagtattgtcattgccattggtaaggccccgttagttttagggttaggcagcattaccaatatgtatgaaggtatgtttatcagaacactgacaacatgcaaaatcggtatgctttctgcacaagaagcgctcggtctgattgaaaaggaagatctatggcgcccactggcaaatcatatgcttattattgctgcaaagttatatacagtgggcatgcaactctcggcccctacaacgtatgaaataatctgttctcaactgcacgaactaatgagtgaagatgagtctgtacgtggatccataaccgctgaaagatatattcgtaacaaaacaccgctgtcacgcagtggtgtaatgaaaatcctttcctcattaaagtcaggcggttacataaatattgagcagggcaagcttatcagtataggtgttttacccaaaaagtattaa

SEQ ID NO: 157418 - DNA, 663 bp, Enterobacter cloacae
atgaaggctaagtttacaattgagcaccccgcgccggttacatcaacgaccgagttgaagccagttactcgtatccaacgtataatcgatatcgtggccccctacgcagaagatttttcagtatcaaaaggcgaggttttacgttacagctataataacaagcgagtttgctatctacttcatgaaggtcatactactctttatcgccgtggagatgggatggtccttaattccgaacaagcgccgttcattatgggcgtaagtaacatgaaagcccgccaggaacatctttacggaagggcaaccagcgatgttaaattgagccgtatcccctcagaacgtttcattctcctgatagaaagagaaaacttgtgggaagatttgtgctacttcattctctacacggcaggcagggtttatcagcattgcaccatgatttcgcagctatctgcgtacgaaatcataaggtttcatctggttgaattaatgcaggagccagaaaggttgcggctaaatacgacagctgcaacttatattcttaatcgaagctatctttcccgcagcggaaccatgcgtattctctcaaaactgaaggaagcaggttgcatcaccttaaaccgaggaattcttattaaaataaataacttaccgcaaaaatactag

SEQ ID NO: 157419 - DNA, 531 bp, Enterobacter cloacae
atgaaaaagtctattatcgcagttgcttttgccactgttgcaacgctctctgctgcaaatgcttttgctgccgccggcactgttaacttcactggtgaaattctggatgcagcttgtgatgtttctgttgcttctcagaaccagactgttgctctgggttcttacaacaagtctgaattcaccgctgctggtgatgtgactgctgcgaagaaattcaccatcgtactgcaaaactgccctgtagctgttacttctgcacatgtgcgttttgatggtacaccagaaacgactgactctacactgctggcaatcgacagttctgtcgcaggtgctgcaacaaacgttgcaatcaatctgatgactgcagataaagctcaactgccactgcatggtgataccgcttaccgttacccactggtaagcactgccgacaacaacttggatttctacgctcagtataaatcaactgcagcatcagtaaccgctggtccggcaaactctgtagctaacttctctgtaatctataactaa

SEQ ID NO: 157420 - DNA, 678 bp, Enterobacter cloacae
atgaatttccttagtaaatctttaattgccctgactataatgagtgctggtttcactgcagcaaatgcaggcgttgttattggcggtacgcgtgtaatttatgatggcaataaaaaagaagcaaccctcagcgtaaataatcctgacaatacgccttatcttattcagtcctggattgagacattgaacggtggcgctgagaaagctccttttgttattacacctccgctatatcgtctcgatcacggccaacaaaacgttgaacgcattatcatggccggtgcattgcctcaggataaagagagcctgtactggctaaacattaaatctattccatccgcgccgcgtaaagacaacacgctacaaattgccattaaaactcgtattaagttaatttatcgacctgctgcattaaaaggcactgcccccgaagaagtagcggataaattaacctggtccgttgcgggtaaccaacttcaggtcaccaatccaacaaattatgtgatgaactttaacgaagttaccgtcaacggtaagaaacttgatgatgtgacttttgttatgcctggttcaagcgctcgctttaatttacctcagggcgttcacggcggtgctatgacctttaccattattaatgattatggcggtccgggtaaaaaacataacgcaaacatttaa

SEQ ID NO: 157421 - DNA, 2529 bp, Enterobacter cloacae
atgataagtagtaatgtttgtttaaaacctgccaggctggcaatcttgatcgcggtcgctttaaatggtttcattccgtttgccagcgcccgcgactattttaaccctgaattgctggagcttgataaccccacgggcggtaaaatcgatcttaccgcttatgaatctggcgcgcaggcaccggggacctatcacgttgatatcgtgctcgatgaacagctcgttgatacccgtgatatagaatttatagccgtaaaagataaagatggggatgctacgttacagccctgcatcagcgcggagttattgaaaagttggggtgtgaagacggaactcttccccgatctttcaccagattcaaaatgcgccaatctggcagccatcccacaggcttccactgattttcaattcagtactcagagactacttgttagtattccgcaggcggctttgataccgcaggcgagaggctatgtttctcccgataaatgggacgaagggattacggccatgttgcttaactacagtctgagcggtgccagtaatcgggggcgtggcagtaacagttcaaatgacaatactcaatatgccaacctacgtccgggtattaatattggaccatggcgcctgcgcaactatacaacctggaaccgtgacagcaacggtcagaataaatgggataccgtttatacctatgctcaacgcgatattatttcgttaaaagcacagctcactgcgggtgatagctccgcgcctgctgatgtttttgacagcatcccgttccggggggctcaacttgcgtcagatgacgatatgttgcccgattcattaaaaggatatgcaccggtggtacgtggcatagcccgtactaatgcgcaggtggtcattcgacagaatggttatgttatttatcagagttatgtcgcaccgggtgccttcgaaattacggatatgtactcaactggcggagcgggtgatctttatgtcaccgttaaagaagctgatggtagcgagcagcatttcaccgtaccttttgcgtcactgccagtgctccagcgtgaaggccgtttgaaatatgctattaccggtggtcagtaccgttcctatgacaacagcgtagaaaagacacccttttcacagatgacagccatctatggtttgccaaaaggcttcaccctgtatggcggtctccaggaatcgagcaagtatcagtctctcgcaactggacttggcaaaaatatgggcgacctgggcgcggtgtctgtagacgtgacccaggcctggtcaaaaccgcaggatgaagcaaaaaccagcggtcagtcctggcgagggcgcttcagtaagaacttcgctgagaccgggactaactttgctattgccggctatcgctattcgaccagcggttattatgggatgcaggaagtgctggattcgtatagcaacaattacgcactgattgaccgccgccgtaaccgtatggagttgacgatgaaccagacactcggtgctgacttcggctcactgacgctgggggcggtgcgtgaggattactggacgtcaggcaaaacgatgcaatccatcagtgcaggctataacaactcctggaatggtgttaactacggtatcacttacacctacagcaaaaatggcgcagcggatggctacagcgagcaaacgcgatacgataaagatcagcagattgcactaaacatcagtattccgttagagaagttcctcccggggacatgggcaaactacggcatgaacgccagtaagatgagtggcacaacgcataccgtgggtctcaacggtgtggcgctggagaacaacgcgcttaactggagcgttcagcaaggttatggcacggataatgtcggctatagcggcacaatgaatgccgattataaagggacatatggtgaagtcaccgcgggttacggttatgaccgtaatagcgatcgcctcaactacggcttacagggcggtattctggctcatgctgatggggtgacgctctcccagccgctgggagaaactaacgtactgattaaagctccgggcgccaaaggcgtaggcgttcagaaccaaagcggggcgaaaacggactggcgaggttataccgctgtcagtaacgtcactcctttccgcaaaaatgacgtgacgctatctcctgattctatgccagatgacgtcgaactggacctgacaaccaaaaccgttattccaacccgaggcgcaattgttcgggccgactatgtggcgagtgtgggaatgcgcgcattattaactctgaaacagacaaacggggaacccgtacctttcggtgccatcgtgagctctgcaggaaacagtgaacagggtgcaatagtcggggatcagggacaggtttatttaacgggtttacaaggtagcgcagacctgagcgtgaaatggggcgatgaaacatcacagcaatgccgggcgagagtcaatattcctgagactgcgccaaaaaatgggattgcgtcccttaatgcgatctgtagataa

SEQ ID NO: 157422 - DNA, 870 bp, Enterobacter cloacae
atgaatttacatctcagtaatggtatgaatatgaaattatcattcagaatattatttatatttctgacgctcgcgtcgggttatagctatgcgggttgtagcaatttaatttcttctgcaacccttaactttggcaatgtgattgttcagcgggatgcgccttctaactcggcggtcagtggcctaatttatggagttcaacaggatgttgcgacatgtgtcgaccctggcggaacaggcgttgcgaatggaattgtttctgttttaaatactgcagggtcctataatggtaatgcggtctttaacacgtcactaaacggtattggtatctccatggggctcctcggtggattttacgccggtcagtatgataagcctatgcttgcgggtaccactttcacaagcgaagggtggtcatcgggacctccaacccgtacctggacctatcagccctatatacaatttgtaaaaacggccgcattagcgacctcaggttatattaatcaacaaatagcttactatcgccctgaatatggctctactaattttatggcgggtgtcaattctggagttatacccctatatatatcaggcactgtaacggtagtggcatgttctataagcacgccaaatttaacgtttcctattggagatgtacctgtttcttcttttggaagcacagtcggaactaccccagcggttgctcagaacacacagaatctgggattaaattgtgatgtaggtgcaaatattaacgtcagcctttcaggtacccagaatcccgatataagcgatagcagcgttttggctctaaccggacagggggggggcaggggtggcaaaaggtgtgggtgtgcaaattgtctataa

SEQ ID NO: 157423 - DNA, 516 bp, Enterobacter cloacae
atgaaaaaacattatttaaaaaccctggcgattggttgtttctctttaagcatgctggcgcatgccgctgatcccgtcacactgaatattacgggaaatattattgcctccccttgccaaatcagcagcgatagcgtcacaaaggcgatagatttagggcaaaatatccaggcgtcatcgctacaggctgcgggcgcgtccagtacctgggtaccctttacgattaaccttacctcctgcccggcagggaccaccaaagcaataatgaccatgcacggagcagcggatcctgcacggccggcagatctgtatcttagtactggcacagcaaccaacgtttcagtccaactgcaaatgcaaagtggggaaccaatgggtgacggcaagtcctatacggggaatatttccagcaatgcatattcttataatatgcaggcacgcgcttattccgtgagcggcggggctacacctggcactattagttcagtcgtgacggcaacgtttgtctatcaatag

SEQ ID NO: 157424 - DNA, 558 bp, Enterobacter cloacae; identical to SEQ ID NO: 144157

SEQ ID NO: 157425 - DNA, 1242 bp, Enterobacter cloacae
atgtttgaattgtgtatttttgatttagataatactttgatacatacagatgatttgaaagaaataagagagagccttgctaataatgatgatgagggtattctagacgatttatcagaagcccttgaggaagatggggatagaatcatttattctcaggatcttatacaagaagtaatttctagacatcctaacatcttcttggttatttttactaggtcaccacgtagttataccgaagcagttttagcgtgggcataccctgagatagaatgggatatgctggtttgctacgaggatgtgaggccaacgaaaccatatgggaaaggaattcattatgctatggaggaatttgatattgacgatcttgagcgagttataatgattggtgatacagatgtcgatataaaagctgcttacaatgccggttgttttgcagtgcttgataaaagtggttggccatacaagtatgcacaaggacattggaatgcactcggtttaattcctgatgcaattataaatagtcctgagataatattagatgttttagatgaaccatgtaaattcttaccaagtttagaatgtttattatcttctgattacatcatttctgaaagatttgacaaacttaatcattttataccaaaagctatcggtggggatacaaccactttccctatatattcagctggtagaaatttttcaaattatgaatcgcttagttacaaaaggtatgaacattcacttactaattcgatagagaataacaaaagctctaccaactttcctgctcagtggatcagtagtctcagagaatttcttcgtactgaatgtgcaggcttttttggggcgacaacgacaataattacctgtgttcctcatcggcctgggcgtgttcctcgcttagagcacctacttaatcaattaatgatttcactagcaaatgatccaattgaacactgtaatgttatactggtaccagatctattagcctaccgtgatggagttcgttcgcagcatggtgagcatttgagccacggtgacagatttatgaacgtcagagatcatttgattactggtaatgtatctaaactggctttggctgataaagtgcttgtagttgacgatgtggtcacaacaggagcatcgttaatatatgcatctaaatatctaaaagatgcaggggctaggaatgttatactatttgctttagctaaaaacataagtgatatcttaagatga

SEQ ID NO: 157426 - DNA, 1986 bp, Enterobacter cloacae; identical to SEQ ID NO: 109730

SEQ ID NO: 157427 - DNA, 495 bp, Enterobacter cloacae; identical to SEQ ID NO: 109731

SEQ ID NO: 157428 - DNA, 1212 bp, Enterobacter cloacae; identical to SEQ ID NO: 109732

SEQ ID NO: 157429 - DNA, 294 bp, Enterobacter cloacae
atgcttcatggtgccgaacctgtaacgacggcttacaagttgcaagatggttgggtggcttgcagtgagcggatgccggaaaaagggaggattcttgcgctatttggcaaaagaataaaagaggtgtgcgaaaactatgttgatgaaggttacatagggagtgatggggaatattacttttttgactgggagagcggcccaagaattgatgattgtcatccatatgacaaggccattgtatcgcactggatgtactgggaattgccagcagctccgaagcgggaggatttatga

SEQ ID NO: 157430 - DNA, 156 bp, Enterobacter cloacae
atgcagcaccgctacgccatcaaagaaactcgctcaaagctgaaaggcacgatcggcagccggttgatgaacgagcggaagaaagagaagcgcgttctggagctcgagcatgagcacatcatgcaggtaacgcagccggaattacttattggctga

SEQ ID NO: 157431 - DNA, 933 bp, Enterobacter cloacae
atgaaaatttctcttgtcgttccggtgtttaatgaagaggaagcaattccgatcttctataagaccgtgcgggaatttgaagagctacaacagcatgaaatagagatagtctttatcaatgacggtagtaaagacgcgacagaatcaatcataaatgcgctcgctgtggccgacccgcttgtcattcctctttcctttacccgcaatttcggtaaagaacctgcgctgtttgcaggcctggaccatgcaagcggtgaagctattattccgatagatgtcgatttgcaggacccaattgaggttatcccgcacctgatagagaaatggcaggccggggcggatatggtgctggctaaacgttctgaccgctctactgatggacgactcaaacgcaagaccgctgagtggttctacaagctgcacaacaaaatcagcaatccgcagatcgaggaaaacgttggcgacttccgcctgatgtcccgggaagtggttgaaaacatcaagctaatgccagaacgcaaccttttcatgaaaggcgttttgagttgggttggcggccgcactgatgttgttgagtacgctcgcgctgtacgtgtcgccggggattctaaattcaatggatggaaattgtggaaccttgcacttgagggaataaccagcttctctacgttcccgctgcgcatgtggacgtatatcggtttatttgtagctggcctagccttcatctatggcgcatggatgatcgtcgacacattagcattcggcaatccggttcgcggctatccatcaatgctggtttcaatactttttcttggcggggttcagttgatagggataggtgtgcttggggaatatatcggcaggatttatgttgaagttaagggaagaccgcgatacatcatcaaaaatgatgaaccaacaaacaagtcttaa

SEQ ID NO: 157432 - DNA, 825 bp, Enterobacter cloacae
atggttcaagactcacaaaacatagattcactatttgattttttgtatgtagatagagaaagagtaggttctttaaccgcccaactattcccgtcaggtgtccttagtaccatcaagcaaacttcatctacgtccgaaagcgaccagaaagaacttaagggtggtatcccgcttataagtgcgaagacaaatgcaggggaagcatgggccagatctcaagaaagacttttcgattcatcatggagccttcctttaaatcttatcgataaactggatgagttatccctgattcaagacaatgtttctaagtcgcatttaggccagatcattatagctaccggtaaaattaaacttttcgatgttaaaatggttcatgacatcatgcctattttcaaaaaaattaaacaggatgagttaaaaagcgctaagaatgtaacccaaaagcaatcaattaaagaagagataaacaatgctgataacgcaattggtatgctatctcttttgccgttttctacccaaatcgaattttctgatgagcaaggaaatttattttggatgtcagtaaaacctgacgatttaacaatagattctggtaatttgactctcaaatacggtccgcggattccgggtgattggcatgttgttggctttatcgatgctcaccctgaagaagagatcacggccccagaactttctgatggttttccaacaaatgaattgaaagaaggtatggatgggatgctacacaccatcagggaactgatggggcgcagcccgcaatcctatgggttaacccccttgcttatcttcagaaaagtatcttag

SEQ ID NO: 157433 - DNA, 180 bp, Enterobacter cloacae
atgattcgcaagttaattaaaaagcttacttctgatgcacccaaagcaggtgtagatgagttgcagcaaatttatgacgaaatcgaagctcagcaacagcgcatagctcaggaaaaagcgaaaataaaagaggagcatgaggatggttcaagactcacaaaacatagattcactatttga

SEQ ID NO: 157434 - DNA, 168 bp, Enterobacter cloacae
atgcgagacgttaccgacattaccgccatcgagcatttgacgaagcagaggagacagcgatcgcgctggaacattttccagagaaacaatacgtgtcaccagttcatcacccttgccgggttgcgtattactggtaagctttcctggaagatttttcacggtttctga

SEQ ID NO: 157435 - DNA, 732 bp, Enterobacter cloacae
atgagtttagcgcagcctaaatccggagagcttttggatctccttggtccctcactcactcagggagaaaacctgctcagtgagtttgaaatccatcgcgtcattcgtgaagcaagaaaggttcctgagtattatcaaggactttccatcgaggggttggctaagcttgttttaggtgaaatcgaagagggctccgctctttgtgaaaagtcattggcgttagcacccgatgactcagtttcgttctgtaactacacgatagcgttgcgaaacaagggctatcacgttaagcaatacgagattcttaagaaagcgatcaactcgcgcaatcctcgaatcctttctgaagtggctgttaatgctgcctattgggtggatttagatttgctgaaaaaggtaatgcctatgcttaatgcgatggaagttgctaaggcagatgacttggtcaagtgcaatgagtcgcttgattacctgatcaagcatgacaatcattctcaggattttaaggcgatcggccgattgatgatggctattgctgaaaagtatcgcttacgtctggctggcgcgaatgctttttatgtcatgaatgagctgaacacatttttcgtagaaattaaaactgacgacccagcacttttgtcaaaagttaataacgatcttgcagatgatctcattgctgctggtttggaaaattcagaatgtattggttgtttccaggcaggagacttctga

SEQ ID NO: 157436 - DNA, 462 bp, Enterobacter cloacae
atgtattggttgtttccaggcaggagacttctgatgccagtaatgcataattgttttctcgacttagccagagaatccttgcaacacaacggtgaacagtggacgcgtaatgcaatcagcaggtcttactatggcatgtatcattcagctctcaggatcacaaacaatctgacgcctacccatgatactgatggtgagagactacctggcggttcccacatgcggctctatacagttttttgcagcggcgaggcggctgaagttaacgacgtagatgtagataaggtccgcaagattggcgttaagttaaagatgttacatgctcagcgcgtaaatgctgattacagacttgaacgaaaaattaatcgaattacggcaattagcgccttacaagatgctgaagagattgatgctttagtagatcgaatgatgaagaatccagacgattcattaacagcataa

SEQ ID NO: 157437 - DNA, 192 bp, Enterobacter cloacae
atgactattctttcggttaaacatgggatcattccaccaacagtaaatctcagctctgtggatcccgaaattaatcttgatgttgtttacggagaatctcgcgaactcaaaatccgtcatgccttaaaactgtcaatgggatttggcggccataatggggcacttatcatttcttctaacgaacaggcctga

SEQ ID NO: 157438 - DNA, 690 bp, Enterobacter cloacae
atgagcattttcaataagataaaactcgtcgctgttgacgttgatggtgtacttttaactgacacctacagccccgcaatcagatcctttgttgaacaacacggaggtgtttatacaccagagctggaaaggcaggtctggggctctcctcatattgcaggtgggcacaatatgtcgttagcctgcaaactgccatggtcggcccagaaaactatagaagcgttttttcaacatcatgggaagtatattgaggaaaatccaatagaggttgtgtcgggtgctgaaagtttccttggtcttttacaggagtttaatgtcagagtgacctcatacggcggacggacaaaggaatatatctttgacaagcatatgccttcgttaaaaaaatatttcgataaagaaaagccatatatcgatactaacaccatcagaccaggtgtaatggagatcactaaagatatatttcatttagactttgatgaggtcttattcattgacgatatcaatagaatggctgaggtcgcgaaatactacagaactggttttattggaactccggtaacaacttatcaaaaagaacagatgcagcaaacaggtgtgaggtatatagcctcatcagtggccggtattaccaaggatatgctgattcaaatcgatgaggaattggtttcagacaagcactggtcatga

SEQ ID NO: 157439 - DNA, 966 bp, Enterobacter cloacae
atgggattgtccgaattctacggtctgacatcagaaatcgatgcagagacaatgctcgatagagtcattgagaaaggaattaactttcttgatactgcggatatctatggttatgggcataatgaaaaacttctcggaaaggttctgaaaaaacacccagaagatgagattattttggcgacaaaatgtggaatagttcgggatgttaataatcctctttatcgggaagttaatgacagtcgtgattatattttgagctgtttcgagaacagttcggaaaggctagatagaaggattgatttgtattatctgcaccgagtgattcaggacccggatacacttagagaagccatgacgacaatgcatcaattaaagtctgatggcaaaattggtgctatcggtctgtccgaagttaacgccgaaaccatcaaacttgcacatgagttgttgctgaagttgtctgatggtgaatttggtttgagtgcagttcagacagaatactcattgatgtcccaagatattaaaaataatggggttttggatacgtgtaataatctagggatttctgtcgttgcatacagtcccgtaagtcggggattacttggagggaaactacgggatctcagcaccctctcagaaaatgactcacgacgttacctgccgcgttttatgggaagtaatcttaaagcaaacaatgccatcgttgctgaactgaggacatttgcccagaacaatggaatcactcctgctcagcttgctctggcctggataatgaacagtgaggcgaatatcattccaatcccgggaactcggacgcctcaattcctggatgaaaatattcaggctgctgacataattttaaacccagaacagatttcaactattactgatatcatatcaagccatgaaactgcaggggcacgttatcctgaagaattcatgaaagcctatggcatgattaaataa

SEQ ID NO: 157440 - DNA, 1188 bp, Enterobacter cloacae
atgactgaattaattaaattgacagatgaaaaatcggggttacccatatttaaactcgctatcataggtgcagctctcttcctttcaatcctcactgaggcgcttcctgctggattcctgcattcactggagctgactttcagtgttagcgcctccgaagcgggtcaatgggtgacgttgtatgccatcggttctctgctgtcggccattcctttaacactggcaacacaacattggtcaagaaaaaatctattattaattacattagcaggttttgctgtatcgaatgctatcactgccgcagttgattcgttcattgttacgcttgtagcccgctttttagctggaatcttcgccggtcttttatgggcactggctgcaggctatgctggtagaatggttgctccggctcatcagggtagggccataactattgtcatgctaggcgttccgctggcgctttctctgggggtcccggcaggaacattcttgggaaatatttatggctggcgtactattttttatactatgacggtactggccggtttgctttttattgctggtgcattcactttaccggaccaaccgggaatcagtcatgcagagcgtatttctgttggaaaagcagtatctataccaggaattaaaacgatattattagcgacatttattttttcactcggtcataatatgatgtatacgtatatttctccgtatttaattacatcactggatagtagattcatcagtacatttctgttggtttttggcgtgatgtctgtcatcagtattataattactggtgtgtttatcgacaagcatcttaagttacttacattgtgtggattgtctctgttcatcatttcgtctttgttattttctctattttgtgacaacatttatttagttatgagcggtgggtttttatggggcttagggtttggtggcggtgcaacattatttcagacagcatccgcacgtactgctggtaatgctgctgatatagcgcagtctcttatggtagctatctggaatatggcaattgctggtggtggtcttgtaggcggtttattactggatcagttcggtattatatcccttcctgtagtgttaacagcactactaatgtcttgtatttttattgttatggtaagcaaggctcaaggattttcccgtatattgaattaa

SEQ ID NO: 157441 - DNA, 720 bp, Enterobacter cloacae
atgaatttgttgattgacttgcatatccatactcatgctagtgcgcatgcctatagctcagtgttagaatatatcatggaagcgaagtgtaaaaatatgctggcgatagcaataacggaccatggacctgctcttgatgattctcctcacaagtggcattttcttaatttgaatgctatcccagaacgagtagatgggctccgaattttcaaaggcattgaagccaatatttataaggacggcagtattgactgcgataacctgatgtctgaaaaactcgactttgtcatggcgggatttcacgatgcagtgtatcccccatgttctgatgtaacaaaaaataccgactgtttgatgaaagtgataaatcacccatctgtgaaaattatcgttcatccgggcaatccgaagtttcctgttgattaccgggctatagccactgaggctgccagaaataatgttgcactagaaataaatagtggttctgctgttgcccgtaaagggagttcggtaaactgccgtgagattatcgaagaagttaagtccgctaatggctatatttctgtcggttcggatgcacattactgttctcagatggggaattttgaacatgcgctgaaactgctggaagcgcagaaatttccggaagagaaaattatcaactcatctctgatgcttacatcatctttccttggaatcaaggaagtattgcattggtaa

SEQ ID NO: 157442 - DNA, 717 bp, Enterobacter cloacae
atgctttaccagaatgccttggtgcttgatgaacaaataaatcattttttgtgtgttgcaaaaaaaatccgcacaggaaaaactggtcatcttaatattggatatacatcatcatttctcaatatagttcccgagatcgttaactccttcaattcccagtatcctaatattaatattaagcttattgaaatgtcctccatacaacaagagaaagagctattgaagggtcggattgatctaggttttatgcgaaaatctggagaagataatttatcgttcataccacttggtaaggattttttatgtgttgtcacacatcccgacatgaaaaataaaaaacaaactatcgatgatctaattgatgcgcacaatcttattttactaagtgaaatcagtaacccggagctgcatcatattgtcagtgactatcttaaaaaacgtaattttgataaaaaaccagctcaatatttgacaaatgtatacagtgtactggctttagtgggatcacgaatgggagtcactatccttcctcacagtatcatctcttttttaaattccaatttttcatgccaagctttgacaggatatcaaagtgaatggccgttaggtcttgcgtggaataaacaattagatatttttcttcgtaccgaatttatcaacagcgtgactgaaaataaccatacagaaatcactgattctcaggttttaaagagataa

SEQ ID NO: 157443 - DNA, 171 bp, Enterobacter cloacae
atggaaaactggcaaaaaaagaaaatagacaggtcgctgaaatatcagacccggttattttcagagcatattaatgaactggtggctgtgcagcgcgaaggaaaagagattaccctcgatgacgggagaaaaatggtcgagttcgtctcctgctcttgtaagtatccctga

SEQ ID NO: 157444 - DNA, 1140 bp, Enterobacter cloacae
atgctcaggatgtatctgtaccttattcttgccgcatcggtatcggcgctggcaacggatatgatcgtgcccgcgctgccgatcctccagacggccttcaatacagattactcaaccatccagttgacgattagcggctttcttgtgatatacgcagcgagccaattagtatcgggatttttcggggataaatttggtaaattacgggtactgacgtgcagctttgccattttcctcgccggaagcgtcctctgttttatggccgagagcttaacgatgctgctggctggcagggtattacaggccttgggcgccggggccggtccggtgctttcaaaagccatcgccaaagaaacgttccccccgctgaagctaaaacgcgcgctttccgatatctcctcagccagtgccatcattcctcttattgccccgctggcgggggcggcgatcctcgggcttctgagctggaacgtgattttcctggtcatggcgctatttaccgtcctgaccatgctcctctccccacgcgccctcgtgcatcacgatcggatcgccgcttcctccaccggcggatttatcacgccggcatttatccacggaacctttctggtttcgctgatcctcagctcactattttgttatatctcgctgtctccggcgatctttatgcagcagcttggtctaagtacgatgaattattccctgctgttttcagcatcggtgttgtttttcattattggcaatcaggctgcgaaattcgagcagttcatcaatccgtggattttattttcgctaaacgccctggcggttgcgccatttatcctcggcagccactcgcttattttatgcgttgccggcgcaatggtttttaacttcagccttggcgcctattatccaaccgctaacttcatcgcactgcaaattaaaggcaataaaacgggggtagccgcatccctcaccggctttattcaaacagcgagcgccggaaccattagctttttggcggtaaaactgacggataccggtattggtttcgacaggacgcttggcgtgagcaccttatcgctggcgatgctgtctcttgtggtagtcacttcaattaaggtaacacaatggaaaactggcaaaaaaagaaaatag

SEQ ID NO: 157445 - DNA, 900 bp, Enterobacter cloacae
atgccttatctgttactcacgctggcggccctgttctggggggggaattatgtcgtaggacatattcttgtgcagggtgcagatccgatccttatgaccgatgcacgatgggcgctgacggcgctgctgctgctggtgctctatcatcggcaaatcagggagagccgcgtgctgctgcgtgaaaatgcccccacgctgctgattttaaccctctgcgggcaggtaagtttccccctcacgctctatataggcctgcagacgacctctgcgctgaatgcggcgatctacatgtccgcgaccccctgcatggtcctgattattaatcgtcttattttccgcgaccgggtttcggcgcgtaactggctgggcgtcgtcttcagtactgtaggcgtgctgatcctccttctgcagggcaacctggtgcatccagaagggttgaggagtttccagtcgggcgatctctgggcgatgggatcggcgctgagctgggcgctgtactgctccctgctgcgcaataaggaccgccgcattccggcgaacgctttcgtcgccgtcagctcgcttgtgggcgcccttctgctgatcccggtggtggtattttggctcgcgcgccatccggctctctccttcgccgcttaccacgacgtatttttcctcagcggtctggcgtacctggttatttttccctcgtggctcgcctatttattctggaataaaggcatcgccgccatcggtgcaacccgcggtgaaatttacacgcatattattcctttttccggcgggatattaagcatcctttttttacatactccaccgcacgtatatcacctagcgagtgccctgttaatcatgacagggatcggcatctgctccgtcgagaaaaaagcctgcagaaattaa

SEQ ID NO: 157446 - DNA, 216 bp, Enterobacter cloacae
gtgctatccgcgccggtgcagaaccagttccaccctctgctctctgcggtaagaggctatattgagtcagagtggcttcgggcggaaaacaaacgttttattgcgcataagccggtactgaacgccggcaatatcgtcgaagagctgggtgatttatgtcagaggcactcggcctcgaaccatccgcttttcgattttctctccgcttgcgcttaa

SEQ ID NO: 157447 - DNA, 579 bp, Enterobacter cloacae
atgaagccaaaacaggcggaaattatccgccagtccacgtctctgtttaacagggagggataccagtcgccgagcatcgatcgtatttcggagaatgccggcatctccaaaatgacgttctatcgctactatccggataaagaagcgctcatcctggacattttacagctgaaagagcacgagtttatgcaagctctgcagagcattactgcggataaaccctccccgcgagagaagctgtttgccgtgtttgagtactataacaactggttcacctacgaggatttccacggctgcatgtttacccgcgcgctgttcgaatatggcacctcatccccggcaatccgcgagaaatgctcgcggtttaaatcgcgcctctaccagtttttccgcgatattttgcggctagtcttaaaaccggagccggccgagcgggtggcgatgatgatggtcatgcttatcgacggcgcaatcgccgcccagcaggcggagtcgtcagagtgtcgggagatccccccgggtatgacggcctggagcgcggcgaaagcgcttatttactccgaaggtggaacgctctga

SEQ ID NO: 157448 - DNA, 933 bp, Enterobacter cloacae
atgaacttaagacgactgaaatacttcgtaaaaatcgtcgatatcggcagcctgactcaagcggcagaagtgctgcatatcgcgcagcctgcgctgagccagcaggtggctactctggaaggcgagatggatcagcaattattgattcgtaccaaacgcggcgtcacgccaacggaagccggaaaaattctttatacccatgcccgcactattctgcgccagtgcgaacaggcgcaactggcggtcaacaacgtcggccagaccctcagcgggcacgtttccattggtcttgcgccgggcactgcggcgtcttctatcaccatgccgctgctgcaggccgttcgtgctgagctgccggaagtgctggtctatctgcacgagaacagcggttcggtactcaatgacaaactgctcaatggacagctggatatggcggtcctttacgatcgttctccggtcgccgggatcaccagccagccgctgctgaaagaagatctctacctcgtgggcacccgcgactgtccggggcagagcgtcgatcttaccgccgtggcagaaatgaacctctatctgccgcgtgattacagcgccgtgcgtgtgcgcgtggatgaagcattctccctgcgtcgcctgacggccaaaatcatcggcgagatcgactcactctccacgctgaccgcggccattgccagcggaatgggcgtcaccgtgttgccagaatccgcagcgcgctcgctctgcagtgcggcaaatggctggatggcacggatcaccacgccttcgatgagcctgccgctgtcgctcaacatgtccgcacgcggctcgctgacgccacaggcgcaggcggtaaaagagattttgatgtcgctggtcagcaagccatcgcttgagaaccgtgaactccagctcgtgagctgtgaagtggcacactga

SEQ ID NO: 157449 - DNA, 174 bp, Enterobacter cloacae
atgcacattaaagcgatcagctttaaactctaccttgctctggccgtcttctactccaacggccataccggcagcatgctctttgccatcattgttgatgttcaatttcacgttataacccgtagacaatccgccatcaccgatcagcgcctcgtggatgtaggcttgccctga

SEQ ID NO: 157450 - DNA, 324 bp, Enterobacter cloacae
atgcccaataagtcgggaaaccttcaggatatcgacgcctttgtttgccaagcgagatacagcaaagtggcgaagatgatggaatcgcttaatgccatagtcgttcagagttctgacgagaacgccctgagtgccgtagctggtagcgaggcatgcgccggtaaactggttgcagataagaggctcagaggtaccgagtttacttttatccagcaacgcgaaaagctcacgcggcatccgtacccggcgctccactcctcttttcagcccctcatgtataacgccgtcaacaacatgcccccggatgtcgatccagtcggctga

SEQ ID NO: 157451 - DNA, 150 bp, Enterobacter cloacae
atggtctattccggtccagctggcggttcgacaatccagctcgatattctgtttttgccagaaaagatgtgcggcatcatcaatattcttaaagatgcggcggcgtccatgaccggatttttcatccttccagtggacgtaatattttga

SEQ ID NO: 157452 - DNA, 741 bp, Enterobacter cloacae
atgattgagctgatgaattgcggtgcattctcatgcccaaaagatctaggtcgcgaaaaccaagatgccattttacttccccaaccttgtaacgatggtttcatttttgctgtggctgatggtgtaggttcatatgtaggtgcaggagaggctgctaaagcagctatagactttgttgctgcgcataaggatagagctgggcatgagccaggaatcattttcactggcatcaaaaacaacatagcagagctttctcagaacgattcggcgcagcgcaaggcggccacaacgttatcatattgtgttgttactggtaatgaacttgtcattgttcatgttggcgatacacgagtttatgtaaaaaccgaaaacaaactaaagcagttgactaaggaccacacccaacatcaagagttgttcgacgctggtttgtataacaaaaaagagctagcagaactacccggaagcaatatgctgactgccgctctgtctaaggtgttacctatcaactttcagcatttaacattgccgctagcggattttgtagatgagaacggcatcatcacgattatcatcatgtctgatggcgcccaccatcattgggagcgacgacctcggttttcctctaatacactgaacaatgcaaatagcttcacttcgagccttttaaaacgtatacaaagaattggccctacagatgaccattctctgatcgccgtgaatttaagggtgagtttatga

SEQ ID NO: 157453 - DNA, 783 bp, Enterobacter cloacae
atggaacccagaggaaattaccttatcaaacccctgagagatcttgggtgtggtgcatttggcagagttgagaaagtcgaagtttacaacactgctgggcacctcagtggtgaatacgcaagaaaagtgctttcagtcaacccggttttgttgaatgaatacttcagtgttgatgattggaagcgaagatttagaagggaagttgattatcaagccaagtgtagtcacgatcatgtcgtgataatttgcatacataatcttgattgcgaacacccttggttcgttatggaactggccgaaaccgacttaagaagtgagttgaggtccaacgcgctgctagacgatgaaaaactatcggttcttcaaatggtattcaaaggtgtgcaataccttcatacaaaagggttgctgcatcgggatctaaagcctgagaacatcctgaaatttgatggtggatgctacaaaatttcagattttggattgatcaagaaaatggattcgaaagcccaatccgatttcctctctggggttttacaagataaaaatgccggaataggcacggccaaatacatgtccgatgaggctaaaagaggagtttatacccaaaaatcggatatttttgcattgggtgtcatcattagcgaaatggatttggctcatattgatggcataagtgctctgatagacaaatccgctgcattcttacctcgttcaaggtacgattctgtagacgaaatgattgttgcacttgatgaaattgttgctactaggagaggcaaatga

SEQ ID NO: 157454 - DNA, 969 bp, Enterobacter cloacae
atgaagacggcagaagcagcaaaaggtcaatgggcaatgattttcgaacattacggactgccgccggtcaccggtaaacaccatttcagaggcaaatgtccgctttgtgattcgattggtaaattccgcatcgatgaccgcaatggcgcaggaacgtggatttgcacctgcggctacggtacaggaatggacttggttaccaaaacccagggcaaaccatttaacgagatttgccgcgaaattgatgagctgatcggcaatacgttccgtcgtgagaatatccccaagacaagcagtgcagccagtatgcgtaaaagggtgctcagtaagttctccaagctggtcccattgcgagggacctctggcgcagattatctcaacgcgcgcgggatttataagcttcctactgatgctattcgtttcaatgatcatcaacgtcacaacggaagggtatttcagtctctctatgcattagcgaccgatgacaaaggcgaactttgctataggcacctgaccttattagatggcgcgaaaaaggctgacattggagacagtgtgaagcgtcaaaaatcgcttcaagatgaaaattatctcgaacataccaagtcagttgcgatccgcatgttcccggtcgccagcaccctgggcattgccgaaggcatcgaaacggccctatctgcgcaccagatttataacgtgaatacctgggcgactatgacggcaaatttcatgaagaaattccgcgttcctgccggtgttaagcacctgattatttttgccgaccgcgacgagaacagcgctaccgggctggcggctgcgtatgaatgcgctcatgccaatctgctggcaaagaatgacctgcagcgtgtgagcgtgtactggccggatcacgatgatttcaacaatttgctcatgaacggcgatcaggttcgtgagctggttttccacaagaaaaaggcggctgcgtaa

SEQ ID NO: 157455 - DNA, 483 bp, Enterobacter cloacae
atgagtgaatataattcaaataataatgagaagaaaaacaaaaaacaacttgaacatattaatctatgcattacacgagatttttatttttatggtaagttttacgatgagctaaaaggtatcatcaaatcatataatgatgagataatggaaatcaaaagcgatataggcgaaaaaatatctttaagtcttttgtgtgatcatggtgataaaattaatagcgaaataaaagaggtgatggatgatgctgatatatcatttaaaactgtgactgaacgtttcagagagagtgttttggaaaaaatgattaattggctagatagtgggaggattgtgcattctgacgttccgatgattattacaatttttcaacaggaagtttatgggttcaattttagaaaattaaaaataagatcatatataaatgacgggttaattaagaagttcggtaaaagtattgatcatgggatggttaaatggtag

SEQ ID NO: 157456 - DNA, 294 bp, Enterobacter cloacae
atgagtactgtttatgtagttgttttaacgtatataaaatcactggaagaagttgacgcgcagataccagcccatgttgaatggcttaaaaagggttactcggatggtgtgtttcttgcctcgggcaggagaattccaagaaacggtggcattatacttgccaaatgtgacagccttgaatctttggaagaacgccttagtcaggatccattccaaaaattaaacattgctaaagctgaaattattccctttgaagccagtatgaaagttcctcttcttgataagattttttga

SEQ ID NO: 157457 - DNA, 621 bp, Enterobacter cloacae
atgaatgataataatgtagataaaaatagtgtttctttatcatgtcgggatgaaaaaaagaaaattggtgatgtgaacctgaaaggcattattgacggagttgaaattaactgtactgttgatttgtcatttcataaagctaaggaaagtgaaaatggtgaaacaaaaaaagaagtccaaatattaacgaaagcgcagtgggtgatctattttattctacctctccttgttgttatagttggcttttttattgattcgtttatagatgcaagtcatcacctgactctttttatatcaccactggcatttggtattataatacataagatggtgatgaatagttcgaatgtgaatatccattatttcaaaaagcttgttgatacaacgggattggtttcttcaacgttaagtgcaagtattctaatattcaaaacgattaatgttgaaaatccatacattagtatgctggattcgttgaaagacgctggagtgttcagttcaattatattttatattataatggcactcgtgtatattgttgtctggatatttgcgacatcgataactattaagttaatgatcacatatgatgaactaatagcaatgaagaataaagcctaa

SEQ ID NO: 157458 - DNA, 3525 bp, Enterobacter cloacae
atgccagcaacagctgatgaaattatcgaagctattaaggaagcttcagctgtaggttttcgcgggcgcctgattgcacgcgggcaagcccggtcggtgatctggcgagacggtgacttgccgccggatgcaccggagtttagcgcactgctcagtcaggaccttcaaggctatgcttatgccctaatcgacctcggccttcgtcttcgagaacttaatggagacgacgcctatgtgcgaattgcttttgaacaggccggaaccgcactcgagtcggctattgctaaaggaaaacgcgacagccgggatacggattttcacttcgtaatggctgctgcaagctatcaccttgcgcatctttcagcacgagcctattcgttactcgcaatggttggtcaggatgataatttttcaccaatagaaagggctcttacacaactgatccggcgtgatttgcgtactctgcgcgataatgcgttgggctttcggctcagaggtgatggcagtgatgtgaaaattactgaaatcctccaggctcgcctaaacttgccgcaagacgagaaaggtgagagtgagtcagaggaggacatcctttttgatgggcttgatttggcactgactgacgcctatatgtcggccatttctctctaccttctcgctgtagaaaggggagaatcacgtttgctctccaaggctattgaaaaattaagaattagtctaagtatatgtgctcagtttaatatgctaccccagtggtggctaaactttattaccattcatctgttatctgacctttggtcagatacattccatgaaagattgccactggttccagttggtggtgacgctgctgaatggcccgcgcttcgggaactgtttattgcactgcttcaaagacgacctcgagccgaaattgatctctggccatcgcagagagaggccgctggacgctctgttaatgacaatgacgatttggttgtttcgttgccaaccagcgctggaaaaactcgtattgctgaattgtgtattcttcgctgtctggcgggtggcaagcgtgttgttttcatcaccccgcttcgtgcgctttctgcacaaacagaggctactctctccagaacatttgggcctcttgggaaaacaatatcaatgctgtatggcagcattggcgtaagtggtatggatgaggatgcaattcgccagcgtgacatcgtcgtcgccacgcctgaaaaacttgactttgctctccggaatgacccgtcaattattaatgatgtaggactttttatttttgatgaggggcacatgattggggccgatgaaagagaagttcggtatgaagttcaaattcaacggctgttgcgcagacaggatgccgatacgcgcagaattgtctgcctctcggcaattctacctgatggtgagcaactcgatgattttgccggttggctccgtcgtgacaagcctggaggaccaatcaaaaataattggcgaccgacccgcttgcagtttggcgaggtcatatggtccgctccagcaggtcggcttaatctcagtgtcgggtatgaggcggcttgggtatcgcgttttatcgtcagcagacaaccgccaaaggttaaattacctaataaaaagcagcgaacaaaaatgtttccctctgataataaggagctctgcttagcgacagcctggcgtctaattgaagatggacagaccgtacttatttactgcccacttcgccggagcgtcgaaccgtttgccgagacaattgtcgatttgcatcagcgcggactactgccatctttatttgatgctgccccggacattctggatacggctatctcgctgggagaagaatggttgggggcacacagcccgatacttgcctgcctacggttgggcgtggctcttcatcatggcgcattgcctacggcttaccgcaaagaaatcgaacgtttgctgcgagatggggtacttaaagtgacgatctcatcaccgacgctagcacaaggtcttaatctttcggcaacggctatcgtcatgcattctcttcatcggaatcgcgagcttatcaaagtgtccgagttcagaaacgtcataggcagagcagggcgcgcatatgtagatgttgaagggctggtgatttatccaatattcgataaagtaaataaacgccagactaactggcataccctcacatctgacatgggggcccgtgagatggagagcggactaatacagcttgtctgtgtgttattgattcgcatgcatacacggcttggtggggatttaaaagcactcactgaatatgtgaccaacaacgccgtagcgtgggaatttccagaaattatgaccgaatctccgcaagaaagagatattgcgcaggccatctgggaaaaacaactttcaacgcttgatactgctattctgagccttcttggtgagaatgatatcccggatgaccagattgaaactgctcttgatgacattcttcagtcttcactttggcaacgcagtttgcagcgttatagggatgagactgaaaggattttgctgaaatcgggactcttgtcccgcagccgctacatctggcagcgctcaacggcagcagggcgccgggggtacttcctgtcgggggtaggacttacaaccgggctacgacttgatgctattgccgctaaggccaaccaactattgattgatgcgaatgcggctataatgggcggtgatgccgaagaggcaattgctgctatcactgcgctcgctgaagaggtctttaccttctatccgtttatacccgatccattgcctggcgactggagaggtattttacgttcctggctattgggtgaacccatgactaacgtcgcgaatacgcaggcgtctgaaacgcttcaattcgtcgagaatgggctggtgtatcgacttccgtgggcaatggaggctattagggtacgtgcaacagctaatggagacctcataggtgatacagataccacgctagacgattatgagttaggctttgcggttgctgccgttgaaacaggtaccttgagccgttcgtcttcactgcttattcaggcgggttttagctccaggcttgcagccataaaagtggttgcagacactactgccgattttcaatccggccaggagcttagaaggtggctgaactctgaagaagtgataagccacacggataatcatgactggcctacacctgaaaccagagtgatgtggctggaattcttgggtagtctcagccccaaaggcagccaggtttggagtcgtcatcgttataacggaatggtgaactggatagatactccggcagtgatcggcacaccattgcagctttacactgttgatggtattcatcatgtattggctgatgatggcactcctctgggaagtataaatggcagaattaacacaaacagaagaggtcttcttagagttgaggtggatgatgagaatggtcgtgccatgttcgactatttaggaccggacgactttatttctacctga

SEQ ID NO: 157459 - DNA, 780 bp, Enterobacter cloacae
atggcaaatttcgaggactggtgtgattcgacagagcgtaatatcagcgaccattatttgcagtcaataaaggccagggatgccgagtttatgttcggcgttcaggttatggccgcgctaatacctgaacactatgcgtcatcaagaaatatcgctaacgcatttgaagctctaggtaaaccggggctggcggcatacattgctggaaaattgcctgaaacgaaacagattcgttccggtgatttgggtgagatatttgcaactgaatggataaatgcacgtggcaatggctataaaacgcctataaaaagattgcgctggaaagatcatcgcaatatgtcgatgcgtggtgaggacgtcattggtatttacatagatcagtcttctcaacaactttttttccttaaaaccgaagcgaaaagtcgcgccaaaatgacgggagaggtggtttctgaagcccgcgataacttgaataaagagcaagggctgccatcttcacatgccctaatgttcatagcagatcgcctgaatgaacagggtgaggagcttttggctaaagcgatcttaaatgcaacgcttcggcaaggaattgttcctggatgcgtccggcatcttatctttctattatcaggcaactcttcagaaactatgctgaccacttcaattgaaaagtatacaggtcaaaataatcagtggggtgtttgtataagaattgctcgccatagtgagtttattgccgcaacttttgaaaaggtgattagcgatgccagcaacagctga

SEQ ID NO: 157460 - DNA, 591 bp, Enterobacter cloacae
atgaaaagcaaaggcacatttaataagatagggttgtacatactatctttaatgctgttgtttgtttttattatcatcttaagtgcaaaaattccgatgtgttatggtgactcatgtgaatttataggtttttataaattagccatcgacaatgtaataccaataatatgtttcttttttatttttttagcatgctatttttataagaggcttcgctcattaattaaaataaacaatgctgacactgttacaataacatcctgccaaagtgagaattatgaaagtttaactttcttagctacgtatatagttccttttatggggttcagtttcgatgacattcagaaaaatattgcttatcttttgttagtaataatcattggtttaatcttcatcaaaacggacaaatattatgcaaaccctacgctagccctttttggatacaaattatatagagttaatgtttcttatacaggaagcgttgaagttaaaaatgttattgcaatatccactgatattttggctgttaacgacaaggtcttttacagttttttagatgattatgttttcatagcaaggaaaaaacaatga

SEQ ID NO: 157461 - DNA, 960 bp, Enterobacter cloacae
atgactcctgaaattcttaagagtgaagtttctgatatcttcgataattttactggcatcagaattattttcgttgtgaagattgaggatagttattctttaaaattatcaaaaattgaagcaggggctctgccgaaaattgttgaaggatttaaaagaaaaattgaagaggacatgatagaaaatgatgatttgaccatacctttcctatcaaattttgatgatagaaagaatgctctatttaaatttgattatgaggaacaacctaaagaatttggatttattaaaagtgctacagccataccccctaactcgcaggatttttatgatttgaggaataaatttaccgatgttaaagggataataattcaattacgtggaaataataagtgtctatctttgtataaaaacaaaaccaaccttaccgtgtttgaacaaagccgtaaattattcaatttgatacctgattcggatggttacttgaaagagttaccaaatcaagtatttagattggattacaactacgaccttgctctcctggataatgattttttaataaaaaaccagaaaactctcgaagttacaatgcaattccaccaagttattgaagctcaggcgactgtcgctctggaatctttaaggtcgtcatcattaattgatgacctttctcaccttgaaaaaagcgcaaaagaaatatctttctcaagaaaacttgccaaaatctcaaaacactcccctgttttaggaaaaattgatgtcccagtaatcatccattatgttagtcatcatacatacttatctacagtattaattgttagtgaggatggtagaaagctaattatcaagactaaagagtctcaaaaacatttcataaaattattaagtgatgactatcttgagtctcctctaacgaaaattctctacgactcactagctaaagatgaattaaaaacaaattaa

SEQ ID NO: 157462 - DNA, 468 bp, Enterobacter cloacae
atgaggaaagtaaaattagacaatgatgatttaattcagtacatgaacaccattaaagcattaaaaaaatatccaacgatgactgaatacagagatgaatatcgcaggataagaaccgatggttcacccttgattgaagcaaaaaaatttaaatcggcgcataccgaacttctgagattagacaggaagaaaaagtcactactcgaaaaatttattgaagaactcaaccctgtaagtcacgcatcagcccttgcatcaagaaagcttgaaaaagtacaagagtccattatctaccgaaagtcattacttgagaaaagccctgatgaactcgtcgctctggtcataaaacagcgcacagaagctgctattgagttccagcgttctgttgagcaaagtcttgagcaactttctaacatttcgtcagagttcgaaccatcaagtcaactacaacgaaaaatggccctataa

SEQ ID NO: 157463 - DNA, 153 bp, Enterobacter cloacae
atgcttaaaacctcccttgagggaggtagactattatttaatagtgttatactgaacatcactgactgggtttttactcttggaataatctactacagaaataccaaccagaataaagtaaatgactccagcaacaataagaaagaaaagtag

SEQ ID NO: 157464 - DNA, 648 bp, Enterobacter cloacae
atgtttgattctcttattaaaccagatgaatctcatttcgaagcagataatggttacgttttacaggaaagtaaccggcccgataataagacaatgatcctcgatatagcatcagatatttccattcaaacaggaaaatcatctcagaataactctgtagaaacagatgaggtgaagaattcaaaagttgggaaactgatggtatccagtgattttacttttgattttaattcagcattgaaaaaaataaccgttaaaaatgaaaagttaatgacaaagttagataagcaagatgaaaaattacagcttattaaactacggttgaaaatcattgtcaggaatttaaaattgttgcatggaaataaattccatgaggaaaaagaaactgttaacattctaaaaaacaaactgataatcgaaagtgttcttgtccatatgctaaaggttataattctttgtaattttgaagattctgaagctgacgacatagttccgttgaaaggtaaaattgaaaatattttgtgcaattttccagattcaattgttttctgtgatgttaattttcagtcagatgatagttgtaacctttttgataatcatagattggttaaagtgttagaagaatttaatcggttagtcttatcatga

SEQ ID NO: 157465 - DNA, 600 bp, Enterobacter cloacae
atgcacgtagagggggagaagccagtttatttgtaccaaccgatgagtaaggtcacggacgtagaagaaacgatgccggtatatctcgaggttggacctgcgatgccccctaaaacgctctggtacaccggattatcccgtacggaaaaatatcccttgatgcaggcgctggatgctaaaagcgttgcgatggaacggctggaaatggaatcctcgctaggggaaaagagcgagggatacagatggctggcgctggcgcttgcggccgatgcggtaaaatatgcccagggaactcagctggtggccaattcagcaatgaataaattttccatcaccgcgctttcctcacaggaaactcatgtccccgaaacatgccgatgggacgtttggatccttcccttagttaacggggttatgatggggctctttttattattttcgttatttctcattatgataataacaaataaacccggagagataccttccataccggtattaggggcaagcagcatgctctctgtgttggttccggcggtaacaggagttttcctctctatcaccagctcaaaccgggcttgcagagatatgggatgctag

SEQ ID NO: 157466 - DNA, 960 bp, Enterobacter cloacae
atgacccctgtgaattttaaaaatcaaatcaccgaaattttcgataatttctcaggtataagaattatctttatagttaaaactgaagatagttatgaattaaaattatctaaaatagatgctgaagctttaccaaaaattgttgaaggattcaaaattaggctttacgacgacattgtgacaaatgaggatttaaccattcctctcctttcgaattttgatgatagaaaaaatgccttgtttgcatttgattatgaagaacatccaaaagagtttgattttataaaaaatgcaatagccataccgcctaactctcaggattattatgatttaaataataaatttactgacgtgaaagggataataattcagttaagaggcaacaataagtgtttgtcattgtataagaacaaaacaaacctcatggtttttgagcaaagccgaaaattgtttaacttgataccagacgcagacgggtatttaaaagaattgccaacccaagtgttccgattagattataattatgacttggctcttatagacgacgaattcctgataaaaaatcaaaaaactttagaaataacgatgcagttccatcaggttattgaagctcaagcaacggtggctttggaatcattgaaagcttcattgcttatcgaagatcttactcaccttgagaagagtgcaaaagaaatttctttctcaaggaagcttgccaaaattgccaaacactcacctgtactggggaaaattgatgtgccagagattatcgattatgtaagcaagcatacctatctttcaacagttttaattgtaagtgaagacggcacacaattgctcgtaaaaacaaaagaatcccaaaagcattttattaaactacttagtgatgattatttagagtctccgctcacaaaaatactctatgactcattagctaaagatgaactaaaagcacactga

SEQ ID NO: 157467 - DNA, 921 bp, Enterobacter cloacae
ttgattcaagcatacgaagacggctatttttacagagataccccgcaccacgatcaccgcccgctttcagcattttccagaccatcccagcaactcaccgttattgataatgttctgtacgttgtcgaagtggaaagtggtgaaattcttcactacgactcgacagagtatttgcttgatggtggcattgtccaggatctgcatttgagttactcgacagcagacaccgccaaatcaaaacaggctcaccgtgaatacgctaataagctgggcgaccttccagggaatgcagcctataacgggatcaaggaatacgcagacgtattaagcaagccagatttcaagaaagtatttgcattgtgtcaggaagtagatagacgcaatgtagtgtttataaaacgtgcggatttgtgcgtaatactgaacaccacgccggatcatctcaatcgtgtattatctgctcttgaacgtaagcactacatcaaagttgataaagctgaacaccagaaaggagtattaaaactgtgggttaatccttcgtttgtctggaagggtgattcagctaaccgctacttatctggacatttgcagggcttcccaatcttggaacgtaaacgctccacaaaacgttctgacgtgctcgacacgctcacggctgctgcaatggttgcctttgatacctggaacattgaacacggttataaggccaatcagcctcattctaatgaatggtatgcagagatcacgatgtacgaaaacgcccacggcgaaggggtgaggcttgcagcagaaaataagacattgaacaagttattgaacccggcaacatctgagggggatttcatttatgagctattcactacggcacaatacagggaatacctgcaaacattggcaaaacaagtaaggagattacactga

SEQ ID NO: 157468 - DNA, 273 bp, Enterobacter cloacae
atgccaaaattcaagagaataatcattagctacatcaatggagatccaaaagagttgatgaagaaggcagggtttacatggaagttttctaagcctgttccgatagctgactctgttgagttttattgttgcgagcgcaggaaaaaaggtccattaccggaacactttcatagtgtcggatggagtgatgacagggcatttttatacttcacggatgagcagattgaggtatgcaagcagtgggcagcagcaccgcagcaggaggtgaagtga

SEQ ID NO: 157469 - DNA, 546 bp, Enterobacter cloacae
atggcacacacaccgatcaatcacaccatcatccgtaacgggatctactacgtcagctttcgcctgtcgggtcataaatatttccgtcggtcgttagagacagatagtcatagccacgcgcaactcttgatgtcatttgcatctccagccattccattagtcaaacgtggaaccattcacccggatcagtttagtcaacgtctttctgatttcagcaaccgcttaaagcaacagaatgaacactggctggttcaacaatttctcagtgatgaacggcgcaatcttcagccgatagttgttcaggaataccgtaaggttgttgcgccttcagaagatgaggaagaacaaacagaagcacagtcaaaggatgtgttaacactggctggcgcttggaatatgtacaaaaaggagaaagcccaaaactggacgaaggcaatttcacaggccaatgagcgctttatggaagtcatgttcattgtccttggtgcatcaacagatgtaatgacgatcaccaagcaggacatcaagcaggtgccactgttttaa

SEQ ID NO: 157470 - DNA, 993 bp, Enterobacter cloacae
atgggatcgaccagccatccggcggatgacccggtacgctttgcgtcgcatccggggatggggttcccggccagcgagctgaaagcggttgaatacgacgaggatgatagcggcaagccgccggttattcgcaccacgtttatggggatgtacggcgtcgactcaccgttaccgacggcctatctcgatgacattacgcagcgacgggaagggcatgacgcgctgcagggctttctggatatcttcagtcaccgcatcctgacgcagttttaccgcatctggcgtaaatactcctatcctgccacgtttgaaccgggcggtagcgacagcatttcacagtcgctgctgggcctggtggggctgggtataccgggtacggcaaaccatattgccacgccagtgtcgcgctttctggcgctgctgggcgttctgcagcagccaggcaaaacccaggaagggatgcaggcgctggtgagcctgcttgctccggatacccgcgtaaaggtcagcccgtactgccttcgaccggtggagatcggtaagccgctgggtttttacggtgatgacgatttcctgcttgatggcaatacgcctttaggggacgaagcaatggatgcgggcagccagctgctggtcgcgctcaagaccgataacgaacaggaagcgcagggctggaaaccggatggtctgctttatcaggattttctggtgatgctgcgggtgtacctgggatggcggtttaaggccaggatcaccctgaccacgcctgtccgactgctggccgcccctcctttaggcgaaaatcctttctggctgggaatgaacggcgtgctgggagctgaagctgacagccttcctgatgatattcctgagacctttacgacagagctgggttattaccgcgggctggagcctgcgaaaccacaacaaggaagccgcataaacgacgaccttcactcactcctgatacgccaaatggacgactggtcatga

SEQ ID NO: 157471 - DNA, 930 bp, Enterobacter cloacae
atggaaaacccggcaatcctccttcgacgtcttaatccatactgcgcgcgggcaatggaaggtgcagcttcgctctgccagactcgcgcgcatgcagaaattctgccggagcactggctgctgaagctgctggagcagggggaaggtgacctgacggtgctggctcgccgctacgaatgggatatggacggcatctggcaggatttactgggctggctggataaacagccgcgctcggtacgccaccggccgcagctttcagaaaacatccagtctctgatgcagcaagcctggctgatagcctcactggcgggtgaagaacatatccgcagtgtgcatttactgatggcactggttgagaaacaaaacctggtgcgctgcaacggtctgtggcctttgctgaccctgggccagagtcagcttgagcgtcttcgaccgttgcttgatgcgcagtcagatgaacgtccggaagtgcagcaggaagcggaactggcgcaaagtcatggtggagaagtcgagttcgtcgggcgccctgtgggtgcagaagtaaaagagggagaactcaaccctgcgttgcagaatgcgctggataaattcacccttgatgtcactgcgaaggcgaaagaaggcaaaatcgatccggtgtttggtcgtgacaccgaaattcgtcagatggtggacattctctcccgtcgacgcaaaaacaacccgattctggttggcgatccgggcgtgggcaaaaccgcactggttgaaggcctggcgctcagaatcgccgaaggcaatgtgccggaatcgcttaaaactgtggtgctacgtacgcttgacctcggcctgctgcaggcgggcgcgggtgtgaagggggagtttgaacagcgtctgaaaaacgtcattgatgcagtacagcagtccccggtaaacgggacctga

SEQ ID NO: 157472 - DNA, 696 bp, Enterobacter cloacae
gtgatgaaaaataaaatagtacattttataaatggaattacattttcacatattatgtgtattgcttttggaatattagttccaatttatgctgatgtactattttttcatggttatgacagttcgaccgtatccgcaataatggataccgtaatggctatagtggctgtatacgctgcgttcggtgtacgtcattggattaaagatcgtgttaaaaacaaaggttttgaacatgctcaagctatattaattgatatacacgcaatcactaaaaagttttttgacttacaggcaaattataaacaccttgcgaagagatatatggatggtggtgaaataaatcaagaagagcaaaaaaaatttaaattagaaagtgatgaaattcaaagtcaatgtaatactatgcgtgataagtcacttgagatgttaatttcaatattaggattaagctcatgggatatgaagtgtaactacgaaaaagaatacataagatatatgaaggaaatagaagatgcaagagagcttattgaagaacaactattgaatttagatcatgacaatcatatagttagactcaaacagtggaaaaaatttgaaataaaatttaatgaatttgtagttaaaacttctcattcatatgcgaatttagacaagagatttgtaaccgcatttagctatgtccctcctacagaatag

SEQ ID NO: 157473 - DNA, 399 bp, Enterobacter cloacae
atgtctacttatgcactgattacggatgggcaggttataaatactattctgtgggatggtaaaggtgatattttcgaggggtatgaaacggtaaatatcgacggaatggacgtgggtatcggttggacatatgacggcaaaatatttactgcccctgttgaaccaccacaaccagaaccgactcatgatgaactggttcagcaagccgaactccagaagcaaaccctgattagccaggcgaatgaatacattgatagtaagcaatggccgtcgaaactggcactcggccgcctgaaagatgatgaaaaggcctcatttaataagtggcttgattatcttgatgcgctcgaatcggtagacccatcaaaagcaccagaaatagtctggcctacaatataa

SEQ ID NO: 157474 - DNA, 1794 bp, Enterobacter cloacae
atgaagcggaaattgtactcgtatcagcgttggtctagtgcggttcagtcagacggtactacaaaagctcgacaaactttcgcagcagaagagtacgcaaaacgtaatgatctggaagtagttgaaatcgtcgatgcgggaatctcaggtttcaaatcggataactcaaagtctggggcactatctaagtttttagcagcagttgatgaagggctaatacctaacaatgcctatctattcgtagagtcactagaccgtatcacacgtgatgagatcgatgtagccctagagctattcatgggtatcttgcgacgtggtattactatagtcactggcatggataataaagtatatacacgtgctggtattaaaggtaatccgatagatttacttactagtattctattgttcacgcgagcacatgaagagagtaagacaaaacagaatcgtactaatggtaatgcgttagctatgatccgtcgttttcaatcagggctacctactactattaaggcggttggatcacatccttggtggattgattgtagtacagacaagttcgaagcagttcgtagacaccctacattatggcaacctgcacaggacgctattaatatgtttatggaaggtgtgagcgtgtttaaggtagtgcaataccttaatgaaaagtacccacatgcatataaaagtaaagcatggaaaactgctaatattcgtaaactacgattcaataaggcagtgtatggagtacgtgaaattactgtagacggtacagactacgcattacctaactactttccctcattaattacagaggggcaattcctacgcctagaaaagatacgtgaaactacaaagtatattggtaaggttggcgaaggtaaaacagttactgatgaagaaggtaacagtaaagtaattgccgaaaggaataatattaacttacttgctggtatgaagttgttccggtgtggtcattgtggcggtactatgatggctatgcgtcacggtgatactatccgctatctatgtgagaagggtagaggacaccagaacgattgtaaaacatggtcactacctggaatcttagtagagcatacactgatgcttgttactactattgcctatatcaacatgcagcgtaaaggcggtgttgataaagaggactatacagcacagatcagtagtactgaaaaacttattgaagatataagtaagaaaataagtaatggtactagcttagtacttggtggtttaggtgatgtagaagaagtaatagcacagcttcaacagttgaaagactcaagatctaatctggtgttagaacttgaagtattgcagcgtaagcaactattagcagaggatcatacgtttgaagggctaatgatggacttcttcacgtatgcacagtatggagtactacaagatccaatacatgagtaccgcagtaagctacgtgacattgtatatagttctatcggtgatgttcgtgcatggaaagtagatcgccgtctgatgattagctttcagattaaaggcgatgatgaatactatactttcagtgctggtgatgaacagtataattacatcttctattatggctcaccagtgcagctaaaagagggtttatcaccacagggtaactacgaactaccagaggaaataaagcagcgtatacgcgagcacagaggcgtatatgaagcaacaatggcattaatgaataccgcacacgaactactagcaactgttaactatccacagttagatgggcgtttgttctggcctcgcaagtaa

SEQ ID NO: 157475 - DNA, 513 bp, Enterobacter cloacae
atgtcaaataatcagattcactctaaggtttccccactggtaactaactttactactacctacctcgtaccacgtggtttcgattcgttcactacttgcgtgattgatattgaagacccgaaacagggtagtacggtgatgcttattgatcctggttcggatatcggtacgtatcaattcttctacgattgggctaatagtagtttggtagtggcgaactactttgatagtagtgttgtgtacggcaagtataagacagccgaacagtttactaatgactttgacctaccgatcaagtttggggaactcgtaggactcttacacttgctgatgacaaatgaagcaagtttgtatattgggattgattcagcgtatatcgatcatacagaactactaacccgtgatggttggacagatcgccgtatcaagaaagaatttggcattgtacctaagtgtgagtttgatcgcgttagttactaccgcctgaatgaagtaatccaaaaagaacaataa

SEQ ID NO: 157476 - DNA, 231 bp, Enterobacter cloacae
atgattaacgcacaacgcctacaccgccaataccctgaaactttctacgtaccgagttatgaagaactagaaaagttaaagcccaatgaccaaattaaagtatgtatgggtgacactcgtatttgggttattgtaactgaagtgaagggtaaacatattacatgtactagtgattttacaggttctatgaaagttcgcttttgtaatgtatttgacaccataatttactag

SEQ ID NO: 157477 - DNA, 171 bp, Enterobacter cloacae
atgaatgattggttagtaaccatagctgtactagtaattggctttatcatcctcgtcactgggtttatcgaatacgttctaatagcgtggttaggattactcttaattctagtagtattaggcgttttaggccgtatttggtcatgtttccaaaaacaaaatactaaatag

SEQ ID NO: 157478 - DNA, 492 bp, Enterobacter cloacae
atggaaaaaatcaatgacctaaaaggccaggtatcactacacctatataaagaagctttacagaaatggcatagtatgcattcaaggctaagacgcaaaggttacgctaatacaactatttgtgctgaatggtacactttcagcaactactactactggtacttagagaatagtattaggggatgggatgtagacaaggatatgttaggagctaaccactattccccaagcacttgtatgttcgtaccgcacgaagtaaatcaactattcagaggtggttatggtaagtataagaagggtgtacagaagatttataatagttgggtagctaaatcaacatacaacggtgtacaggagtattacggtacattcgctacagaagatgaagcacaccaagtatatcttcaacaccgccaagtacgtattcagaacctagcgaccaagtacagcaactatccagtacttagtacagcactactaaacagcaagtaa

SEQ ID NO: 157479 - DNA, 474 bp, Enterobacter cloacae
atggcaggaaaaccacaaaaaacagacaattcagagtttctaaaaatagctggcagctttagcaagtattcagacctaacgaaagacgggaaagatatagtaggggcaattattgataagtgtgcaggtaagaacggctacccacgtgcaaagatttatttcgtactattcaagtgctccgaaatatcaaaggaacgtgtaaagtactggttagattactatgcagctactcataaagatgactcattaccaactgacgataatgtacgtaagattctaacgatcactaagcaactatcaaaggcgttcgtagaagctcaccagaagggcgtagagctattcaaaaaggcaaaggtgggacagtattaccttacaccagtagagaagtatacgattgatcagatgcacaacaacggcatgtctgctcaagagatgatactagcactgcaaaagatgattgatgatgcgaagtaa

SEQ ID NO: 157480 - DNA, 276 bp, Enterobacter cloacae; identical to SEQ ID NO: 36843

SEQ ID NO: 157481 - DNA, 375 bp, Enterobacter cloacae
atgaaaaaacctttattagctctgttactaatcacttctcagagcgcattcgcggacaaaatacccaactctatcgacaatctgatagctggttatgatatcaggactcatgtactggaagatggtgagctgaccgtcagatacaacaagcaagcactaatgatagacgctgcaaaatccatgttcagcgcaatatgtgatgactactttatgaacaagtggaatccagagacaataaaaaaaatcactctatggaatgtcacgtccgatcagggttacaaaataaatggcggtgggattgagtgtaaaaaaactggttccatggacttcaagcaagcagaagaatacagaaccagcttaatcgaaaaaatgtaa

SEQ ID NO: 157482 - DNA, 297 bp, Enterobacter cloacae
atgactatgcgcatccatcagataaaaattgcacctaagtattttaatgccgtagtcgctggcagcaaaaaggcagagcttcgcaaagatgatcgcggctacaaagttggtgatgtcctttctctctgcgaatggaaacacggttcatatactggtcgggaatgggccgctgttattacccacgctttgccgattaatgaagttgtggcagtggaagggcaatgggtaattctttctattcgctcattaacgccgcttgaggctctctactatgtcatttcagggggcgctatatga

SEQ ID NO: 157483 - DNA, 546 bp, Enterobacter cloacae
gtggaattattcgaaccgttaaagccggtttttgactggctgggtgacaaacttaaagcggcgtggcagtggtttaaagacctgatcgcaccggttaagtcgacgcaggagacgctcgacagctgcaaaaatgcgggtgtgatgttcggtaagatgctggccgacgcgctgatgttaccgctcaaaagctttaatacattgcgtaccggcgttaactggctgctggaaaagctcggggttatcaataaagaatcgaccgaccttgaccagaaggccgcaaaagccaatgccgccaccggctcgcaaaatgaatcttatattccgacaacctcaacatatggcggttatcaggcatatcagccggtaaaggcgccgactggtaagacttacgtcgaccagagcaagccagaatataacatcaacctgaatggtggcatcgcgccgggcagcgacctcgaccgtcagctgcgtgaggctgtcgagaaactcgaccgtgaaaaccgtgcgcgtcagcgctcaagtatgcgtcatgactcaaggggataa

SEQ ID NO: 157484 - DNA, 1185 bp, Enterobacter cloacae
atgtatttttataaatacctgagggtcgataaccttaatctttctatgcttcgtcacggagaggttttctttgcatcaccaaaagagttaaatgacattcatgaatgcaaaccgcaatttatatttaatgccagccgtgaattatggtcaaggcttatccatgaaattatcaccggcatttgcattgagatgaagttaaaaacaaaatcctatgtattaatgacgctattctctttcaaggaagacatcgtcacagctcttttaaataaaaaaaagaaactatcgcttaattatgaagagacaataaatagaatttcacacgaaatcagcacaaaggccatcgaaaatttagattttgttgatgcacgaaaagtgataaaagccctcgactcatatatacaagataagttaaataccgaactaaacgataagctatacatcacatccttttcaaagagcgctaccattctgacaatgtgggggcattatggtaatgcagaaaaaggttttgcaattatttatgaaacaaatgacgggaacattaacttagaaagcaatataaaaatattcccttcacatacaaagctatctgaatcaaattattcactaggtatatcaagattcagtaaagctgaactcctcgaggtagagtacaagaacaaacctgttagagcaaatggcttcaggaaactaatacctacgttttcttttagtgaacaggaagacttttacgattgccgagagtctttattatcagatatcccaaaatacaatgagaatgatatagggcgagtgaaatacaccgactggaagtatgaaaaagaactgcgcttacacttaccggtctatgatgaattaccaccaccactaagaagcataaaaatatccacgcagcacattaaaggtgttatttttggaacaaacacaagtgacaatgacaaagaaagcattctttccgcttgttattacctaaaaaaatcgcatacaaccgaaagtgagctgtatatttttcaggcaaaatccattccggggcaatataaaataaaagcgatccccttaggtagagtatgtgacattaaagttcgaggattacctttcatagagaaagtaaaccccaaaaatatagaacacactaaacaccatgaagaaatattaaaaatgacagaagcaataaatgcaagttag

SEQ ID NO: 157485 - DNA, 585 bp, Enterobacter cloacae
atgtctgctgataaagatttttttactaatgttctcaagggtgccataagcgcccacattgatgatcttgtaaaatcaatttcccctggcggtgaacctccgcaggcggctcaagtacagcaagaaaatgaattagaagagaataaagctaagcttgaagagcaagcctttgataaaccatctgaagatgaaaatgaagagatagaagtcttagcttattggagcttagaacatcggcggaaagtcgataatttaactatccaaaagactcaggaagagattgttcgcattcgttgtgaaaatgatgaggttcgagctaaaacaaaaaacaatcacgctcttgctcgtggtcgtcgcattgataaccgtcttcgcttacagatggcttctgccacttttaaatttatgcagtattggtgtggttttgtcgctttgatagtgttcttgtatgtggctaaacatgacggaaaaccagaaaaagaagtaattattgcccttctgggaacaagtacaatcagtattgtaggtctcgtgggttttgtggttagtgggttatttaaatccaatagagacaaggaaaattaa

SEQ ID NO: 157486 - DNA, 471 bp, Enterobacter cloacae
atgtataacccgatttgtatcgtcaacgagttcattgatcgtgcaaggaaaaacggggataacctcactcacatgcaggttcagaaactgctctatatagctcatggctatagtctcgcgtttctggaagagcctttacttgaagagccggtgtgtgcgtggaggtatggcccagtcataccctccgtttactacgcacttcgacataatcgatccaatcctattgcggaaagagctgtgtctacagcgcttaagcctgaggtggtcgacgctaaaactgcttctttgcttgactcgatttacgaaacctatggcaagctctctggagtagctttatcagagtttacccatcgtgcaggtactccgtggtcacaagcgatggataaaagagaaaacatcattagtgatgcgagtatcaaagattattatcgacgtcttgtggaacgagatccggtttgcaacggattgtaa

SEQ ID NO: 157487 - DNA, 129 bp, Enterobacter cloacae
atggagattttaggatttgaaaacgaatttgatagagagaagctttacagcattctgcaagaggtatggaagacgaacggtggaggtagtggcataagaagtgtactaattttcatagatcgtaagtag

SEQ ID NO: 157488 - DNA, 141 bp, Enterobacter cloacae
atgagaatcaatatcacgcttagcaaagagcagaagatggcgcaacatatggttgatgcctttgaaagtgacctggttcgcagagtgcagatggaactgccagcatctttggtaacagtaaaaaaagttcacttgctgtaa

SEQ ID NO: 157489 - DNA, 474 bp, Enterobacter cloacae
atgacaatcaaaaatttgaccgaggaaagccgtttcaccaaagagcagttaatcgctagggctcaggaaaatctccgcgctctggagtgtttcccgttgcaagcggtgcctcaaatggatttggcgctaatgaaaatcgcaatggcagtgctgaccgcgccagactacatcccgcctcacgtactggacgcaatgagcgatatgtgcgacgggggttttaatgcacaaggcatttgggatttatgccgggaatcaattatgcccccagcgccttgcccccgttgtgggactgtatcaggcaggccagacggtggacattattgtcacatcgacgccgggcaatgtggaatttgcgctaagtgcgccccacagataaacggaggttcagggtttagcaattgtgccgaagcgcatgctgcagagataggccaaccatgcattgcagccattaagggggctgacgctaatgcatag

SEQ ID NO: 157490 - DNA, 276 bp, Enterobacter cloacae; identical to SEQ ID NO: 101078

SEQ ID NO: 157491 - DNA, 453 bp, Enterobacter cloacae
atggcagatattaaagagagattgagactatatgaaggctcattagactatcaaaaatataaagggtactataagaatggtaaattttggacgtacaaagattcacttggctaccctacaattgggtacggtcacttagtacagaaaggtgaagatttcagtaatggattaacaccgattgaagcagacattctattagctcatgatatcgaaaaggctaaagcagaactacgtacacttaatctgggtacgttgcctactgatattgaggactatctaataattatgatcttccagttgggtttagctggtacgagtaaatttaagaaactacttgcagcggcaaagattggtgatcgtgatggtatacgtagagaatcaaaagattcactatggtataagcagacaaaatcacgtgtcgatgatatgaataatcaattaaagtggaaataa

SEQ ID NO: 157492 - DNA, 429 bp, Enterobacter cloacae
atggattggaatagttataacgaaaatgaatggaatgtagatgatatcaattctggacagtacgccgcatttgtttacttaatcacttttgataacggtgacttttatattggagtaaagcaggtatataaaggaattaaagatattaagaaactaaaagacagtactaaagaatctaactggcgagaatataccagtagtagtaaatcagttaatcagatgattgatgatggattagattataagaaatatctactttggtgtttccctactactaatcaagccgccttagtagaagcaacattgattggtctatttggttcaaaaagtaattgtgtgaataaagcagttatggttaaggcaagaataccaaatgataacggtgcaacgttccgtatcattcaacaactcatagaggaattaagttaa

SEQ ID NO: 157493 - DNA, 837 bp, Enterobacter cloacae
atgaatgaagctggtaatattttccagttaattataataatggttactattatgaacttttataaaaaaattgatgtggtgataaaattttttaaggttaattcaacatctattttgtcttttttattgggtggtatatctgtcctttgttttgtcaaaactgataaagtgtcagattctattagtgcattagcaaatgttgttatggcatttgctgcaatacttggtttggtgtttgctaaaaaatggaaacgtgatgctactaaagataaagtgattgaacgtagcattcagattttatctgtacatttattagatattaataagtattatgtacctgctttacatattaacgtatttcaattttggttttcctcatttgtggaaaaggtgcctactacttataaatttgtgcgttctatgaaaaagatggcaactaactatctagggtctatcgaaaaggaaagtgaagtatatactaagttcgtatctgagatagagtacataaaacttctgtcatgggatattaagaaagaacatagagaagtagttgatgcaattcaattagcaatgaaaaacatcatcgcaaaggatcaagagttattagctcttattaacactattttcagtatgtggaacataagtgtgtataatagtgatgaaagtaaagcctatactgagcttccacttaatttgtcgaacagtcctatagtgcaaatggctataagtttaataccggacatggtcagagaaagagaggatttacacaaactactcgaagatatgttaagtaaacagttgaatgttttctctttcgttgagcaggtcgaacactaa

SEQ ID NO: 157494 - DNA, 969 bp, Enterobacter cloacae; identical to SEQ ID NO: 147108

SEQ ID NO: 157495 - DNA, 609 bp, Enterobacter cloacae
atgaataaagatatggtgctcatattacgtgacgatggccatgagcttcaaacggccgagtatacagcccgctacgatcgtaatgggaaaagaacgattgccatggggctttatgaaaagagtccattcagtttccgcgttgaacgattaacagaggataaatccacgggattggctattggcgtcaaagaaggcgaggtctttatcaaggatgcctttattggcagtggcattgtatctgcgaactataacgtgaagttgaatatcaacaacgttggcaaattacacgaagctggcatgaccctcggtgttgaagatggccagagcaacgttgagtttatggctgatcgctatacggtgcatgaagccgcttcatccatcatcgagaacgccgtcgcaacaagcgcgaagacgaagattaggcttggcgatgaaatgacgcaggccatcattgatgctgtacgtgaaagcgatttgttcgcagcccttcaggcagcatcagcctctgacctgcaacaggcagtggatgacgcagtgggcaaggctctccgcaaagcggtgaagcccggtggaatgatttggtcgagctttcaattatgccagcactaa

SEQ ID NO: 157496 - DNA, 768 bp, Enterobacter cloacae
gtggttatagatgtgccacacatcccgtggcatatcagccaggacatacatcttattgtcgccccagtacgtcatgccgcgaaatatacccgccagatcacgaagtacggtccaggcgtcattacggtcctggatataaacgttgcaacgaaaacgaggctccgtaccgctgccgcccttgccgtctggtaccagttgatcgcaatactgggcgatgcgataaagttcccatttgtctatctgagtcgcatcgattctttgacccagcccgaagcgctcgttcagaatgatgtcgtaataaatccaggcagggttatccgtccacgcccatttaaatacgccctcccatgtaccagaataggtgcgggtttcgggatcataagtatcaggtacacggatgattcgccctttcggattgcacacaacctgaggaatgccattagggaactgctttgcgtcaaactctacatacagcagcgctgtgttaacgtagcgaagtttggcgtcaataatttcagtaacggccacaacgcgcatggtgtcgacgatattcacgctcgtggaatccggcgtgattctgcgaacccgcaactgccatccagtcgaggctttcggaagattgacgcggtgactgcgctcataaagcgacgtggttttgtcatcaacagcaccgttaaccaccgtttcatacggcccgccatcgaccgacagatcgatagcatactctacgcgggtgccgactttatcgccgttgtttttctggagtaa

SEQ ID NO: 157497 - DNA, 144 bp, Enterobacter cloacae
atggcattgatggctctggtactgcctgggctccgcaagcaggatcaggtattgtatgcgggtatgacccaacgcgccgacagcaaatatttacaggagcatccggcaatctttttgtccggaacctgggtagtgctgctatga

SEQ ID NO: 157498 - DNA, 327 bp, Enterobacter cloacae
atgcagtctgttggaacatcagatattaattttaaacacgtcaacggcgatctcgatgttgctgattctcttgaaaacatctgtcaaatggagtttaagcgattctactatcttgatgatgatgagcagacagagcgccgtggcgtaattgctcagcagatcgaacaaatcgacaagcaatatgttcactctgctgagggcgtagggaaaatgacgcttgaccttaacccactgatgatggatgcccttgcagccataaaggcacttaacgcaaaggtagcagaacttagtaaacaggttgatgagctaaaacagggtggagcttga

SEQ ID NO: 157499 - DNA, 807 bp, Enterobacter cloacae
atgattgagttagaatcaatattaaatatagaaaatgaccttgattataaagttcactttgctgtttataactatgaagaagaaccgcttgatacattccttagagataaagatgaatggcaagggtggaatgaatggcggaatggtagggatgatttcaacaggcagtttattttcagtttgataagattctatccccaaaacaataggtggttgtttggagggatatatgaagtactggaacgcaatcctgatagatataggattagattagtagataaacataaaggtttaataggtaggttattaatagactatccaggtcctggagcacgtggtagatcctttcgttttgaaaatcactactttaagatgaaagtggcagaagtattcgagagtgaatatagtggtgaaacatttcgtggttttgatcaaattcagcactcatttgaaacgttagagcatatcattaaaaaacaaaaaatggactggaagcgagcattattgaacgtcaaaggtgtctatctaattgttgataaatctaatggtaaaaagtatgttggttcagcatatggtgagcaaggaatttggtcgagatgggaaagctatgtacatacagggcatggttggaatgaagggttatcgttactgattaaggaaaccggtatagaatatgccagaaggaattttcagttttcaatattagatttttactctatgagaacagatgatcaaatcattatagatagagagacatactggaaacgggttttatgctcaagagagtttggttacaacaggaattag

SEQ ID NO: 157500 - DNA, 624 bp, Enterobacter cloacae
atggaaataggaagcatcagtgattggttcagtgctataggtacactaggaacgttagctgtagccgttgcggcatttagaaaagcacctgattggatggcccaaaaacattatgatatagtttatgggttaattgaaaaagctgtttataaagatctatcacaggttaaatcatcaaatatgatattaagaacactcttaataacattatgtcgtaatttgaaccgctttttaatggacagaaagccagagtctgaacttatttcggatatgacaaatagaatggaatctgttctcgaagagttttttaataattcatacttagttataaatcagctaaattctataacaagaaacgattataagttatctgaatatgctcaagatatcctcgacaaactaaaaaatatatctaatcaatatcatcagatttatatggattatctagtaactagagctgaaattggttctctacttgaagcagaccaacaagcaatagatataacctcacaagaaatcaaagaaattgaaaacagagccttacaagtaggttctgaattggattcttatataaagcagatttttgataaaaactctccaattagggatttcattgtacgataa

SEQ ID NO: 157501 - DNA, 564 bp, Enterobacter cloacae
atggaatttggtagcatttcagattggtttagtgcggcgtgtaatggcgttatggctattgtagctgtttacgcggcaaggaatgctaaggactggctttcgccgaagcttaatgaaagaaaatttaagttcgcagatgaacttatagagcaattctgtcgattacagcaggaagcattttatttattcagtgatactaagaatttaatcaatactgatccagatgaacaaggtgattctgaaaatttcagaaaacaatggaatagtatttccgaaagagaaatatgttatagaaagaacacaataaacttacgtacagtgttggaaagaatggagctatggggtttaagagcaataaacaatgatgaattcatacaaattatagattctcatttagctttgtcttataaaattggtgaggctttagcaattggtgctgatgaaacgcattttagattaaaaaacagctttgaatacgataggcaaattagtgagaaatacaaaactgtaagagcatcgcataataatattataaagcactacagtcagttgttcattgactga

SEQ ID NO: 157502 - DNA, 1821 bp, Enterobacter cloacae
atgaaactccttcgtattgacatacaaaactttagaggcatttcttctgcatctattaatctcgagaactttactacattaattggttcaaataacatcgggaaatcaacaatactcaaagcaattaaaatcctcgttgatacaacaaatcctacatccgaagattggccatttcgtatagctagtaatgatgaaatgatcataactggtaccttttcagatatacaggatgcagaaagatctaaaccagctatatctaacttaattcacaacggtgaattaaacattagagtaagaaccaaatgggatcacgataatgaatgtatgggtgctccgagttatgaagcatactacagcaaagagtcaatagatgagttcacaacatctataaccgccgccagaaacatcccatggctattcgatataatccgtgaacttgattgtaataacagcaaagcatataaagaaatgcaaaatgatgtagttggattgattaaacaacgacatccagaaaaagttacatcagaactatgttggacttcagaaggaatcaattttaaaaatagcctacagcaagccttaccacatgttttatatattccagcatgtttcaaaattgaagatgacctaaaatctcaaaaagggacaccttttggattcctattttcaaatagagtttaccctgttcttcaagccgattcttctttcacacaatacacctcatctctcgaccaactacataaaaaaatgaaaggtgaattagatggtgaactgattgaaggacttcaagagctaatggaatccataactgaatcacttaatcaagtcatggatttaaaatctaaggtaaagttgagtttaacagaaatagatatcaatgctgctttgatgaaagccgcgacattagttatagaagataaattagaaactcaacttgaatatcaaggaagtggtgttcaaagagcattggcttatgccttgctcgagtcaaatgctcttttcgaagtaacagaatcacaacgttcaacactaattctttacgaagaaccagaactatatattcatcctcatttaatgagattacttagagataaacttagagagaaatcatcagtctctgcttgccaagttattgttagcacacattcaccatttttaatcgatatcgctgaaaacccttcttcattaaagttaataaaagacaaccatgaagggaaaagaactgtccatgaaataaatgattctatattccacattgatgccgaatataacgaaagggaaatgcttagagccgcattagattttcacccaactgtctgtgaagcattttttgcaaaacgtgttgtagttgttgaaggtgatacggaagttgcgatacttagatttgcttctgaactatgtgataagttaaatatagataaaaaccttattaaagatacaactatcgtttccgcaggcggcaaatggacaattccagcaatcgcaagaatactctcaaaactcaatattccttataaggttgttcacgatactgacaggaaaggtatgacggacgaggaaattgaaaatttatcagcaattaacgcttaccgagcgaatataaaaataagcgaaatcgttggtgatgataatgtacatcgtgtagatgatacatttgaacatcttctatgggatcctgttattgatggaaacgctccatcagaaggaggtaaaccctttaatgcctggaaaaggattaaggcttatttagatggagatgtaaatctaaacccgacatgcgagcataagttaaaatcagtgttacaattcatctacgaatga

SEQ ID NO: 157503 - DNA, 546 bp, Enterobacter cloacae
atgacatacctacaaatagcaaatatatacggctatgatccggcgaccgtcagccgtgattggaaagccagaggcttagatattagccaaacagacgaagaaatatatcaatgggtacaggataacgtactaacaccattgagaggacaaacagatctaaaagaagaaacccaacgtgaacaattacgattagcaaaagctaaagctgacattgaagaaatgaatgcggatcaacttagacgtaatttaattgaggttgattatgtaactgaatcactatcaagctacttacttcaactaaagaacatgttgcgtagtattcccaacacaacatacgtagaactattcagtagtgaagatgctaaccaattgagggaaacactcaaagataaaatagatgaagtattacgtgatattggaaattacgagtacgaggaagaaatagaagaatatgaaaatggaatttcagaatcagaagaaattattgaagatattgaatcaggcagtgaagaacatcctaccgcctcagaagataaaaccgagtga

SEQ ID NO: 157504 - DNA, 651 bp, Enterobacter cloacae
atgagcactatcctgaaatgggcgggaaataaaaccgccatcatgccggaactgattaagcaccttcctgctggcccgcgactggttgaacctttcgcgggttcatgcgctgtaatgatggcgacagactatcctcattatcttgtcgcggatattaatcccgatcttatcaatctctataaaaaaattgccctcgattgtgaggctttcatatcacgtgcaaaaaatatttttgcgatagcgaatagagaagttgcttattacaacattagacatgagtttaatcattcctctgaaattactgatttcatgaaagcagtatatttcctttatctcaatcgtcatggttatcgtggactgtgccgctataacttgagcggtcattttaatgtcccttacggtaattataaaaatccgtatttccctgaaaaagaaatacgcacttttgcagaaaaggctcaacacgcaacgtttatctgtgccagctatgacgaaacactggcgatgctgcagacgggtgatgtggtttattgtgatccgccatacgatggcacatttaacggttatcacactgccggttttacagaggacgaccagtatcatctggcgtctattcttgaacgccggtcagcggtgctcctgatcgtctga

SEQ ID NO: 157505 - DNA, 678 bp, Enterobacter cloacae
atggcgttgggtaaagacctgacggacaaggcactggatcacatggaccagaccaatgaaagcgatgccagtttcctgatgaagctggcgcgccagtatggggcgattgcgtccgttaaggatggaaacctgctgtttatcaggcaggggcagggaagaacggcgagcggaaagctgttgccggttatcaccattcaacgtaaagccggtgacggtcatcgttttaccctggctgatcgtggtgcttataccggtgtaattgccagctggctgcatacccgcgaacccaagaaaaaagaaacaactaaggttaagcgccgccggaagaaaaccaccgcgcccaaagagccggaagcaaaacagggtgattatctggtgggaacggatgaaaacgttctggttcttaatcgtacttacgcaaaccgcagcaatgctgagcgtgcggcaaaaatgcaatgggagcgcctgcagcgtggtgttgcgtctttctccctgcagctcgctgagggccgggcagatctctacaccgaaatgccggtaaaggtgagcggctttaagcagcctatcgacgatgccgaatggaccattacaactttgacgcatacggtcagcccagataatggttttactaccagtctggagcttgaagtaaaaattgatgatttagaaatggaatga

SEQ ID NO: 157506 - DNA, 579 bp, Enterobacter cloacae
atgagaataaacaaaaacacttttgagcctctaactatccttgacaggatcatctctgtttatggcttcacccaaaaattgcagctcgcaaatcactttgaaatgtcaccaagttccctgcagaaccgatacacacgcggcactatctcttacgatctagcggcgttctgctcgcttgaaactggtgcaagtctcaggtggattctgaccggggagggggaaaaattcgaaaccagcccttcaatcactgatcctaaaaaaatggatctttatattctcaaggatggtgttcttgagaaaaattccacattgagcattgaccctaatattttgagtacgcagatatcaaaagggattgcagttcgagcagaaggaaggttgcattttgttgatcaagattccccacattccgatggcctatggttggtagatattgaaggagcaaacagcattcgcgagttaaccattctccccggtaagaaactccacgttgcaggtgggaaagtgccctttgaatgcggctttgatgagataaaactgattggtcgtgtggtgggtatctacagtgaggttaactga

SEQ ID NO: 157507 - DNA, 258 bp, Enterobacter cloacae
atgattcattgctttcaccagttcccgcttttcgtcagtagtcagatcactaatattgacgccgtgacgttctgccggaatttttgccatataaaaaatggctgccagtgcccgctcattctgtttattatttacgtcgcgtgggtcgcgcatatctttaataaacctttcaagctccggctcaatattcagaccaaacactttagccctcaattccgcaatatggttcagtccgtccaggcgttcaccggggcttaa

SEQ ID NO: 157508 - DNA, 1113 bp, Enterobacter cloacae
atggcacaagtcatcaataccaacagcctctcgctgatcactcagaacaacatcaacaagaaccagtctgctctgtcttcttctatcgagcgtctgtcttccggtctgcgtatcaacagcgctaaagatgacgctgcgggccaggctatcgctaaccgcttcacctctaacatcaaaggtctgactcaggctgcacgtaacgcaaacgacggtatctctctggcgcagaccactgaaggcgcgctgtctgaaatcaacaacaacctgcagcgtgttcgtgaactgaccgttcaggcgaccaccggtactaactctgattctgacctgtcttcaatccaggacgaaatcaaatcccgtctggacgaaattgatcgagtttctcagcaaactcagttcaacggcgtgagcgtgctgtctaaaaatggcgaaatgaaaattcaggtaggagcgaatgacaaccagaccatctccattaatctcagccaaatagactcaacttctctgggtcttgataaatttaatgttgcaagtggctttactgcagttggttcttcgttaacaggtaaagatggttctaataatgatgtaacagttgctagcgctgacgtgaaggatactgctggggaagctgtcaagctttatacttataaagataccgccggtgatactcaatttgctaccaaagatgctgatggtaactacaccaaagcacaagttgcatttacagcagctgtggcagcagacccaacagctactcctcctgttgaagcggctgcggctaaggctgtagtaactacttctacagatgctgtgaatgataattcggtcactaaaacagccagtcctctgggagcactcgacgatgcgatcgcatctgttgataaattccgttcttctcttggtgcggtgcagaaccgtctgagctctgcggtaaccaacctgaacaataccacaactaacctgtcagaagcgcagtcccgtattcaggacgccgactatgcgaccgaagtgtcaaatatgtctaaagcgcagatcatccagcaggccggtaactccgtactgtcgaaagctaatcaggttcctcagcaggttctttctctgctgcaaggctaa

SEQ ID NO: 157509 - DNA, 168 bp, Enterobacter cloacae
atgatgtccctctgggatgcgctccggatgaatatgatgatctcatatcaggaacttgttcgcaccttccctaaccttaagccccctctgaggaacagtttcattgaagatatccggttgttcgcaattaccttgtgtaaggggtcagttcttaattttcacaaataa

SEQ ID NO: 157510 - DNA, 405 bp, Enterobacter cloacae
atgaaaccagtaagtatgaaccaactcggtaaacagtacgggtatgacgagagtactgtacgacaatggcgtgataaaggtatgccaattggtaaagatattgatgaaattgaaacgcgtgaatggattgtacaaaatattatcctaccgctacgcaacactgatattaaagaacagattgaacaagagcgactaaagaaactcaaggcagaagcaagcctagcagaattagaactagcacagaaagaagatacagtaattagtactgaatatattgaagatgtacttactgcctatctatataaattgaaaactactattcgttcaatacccaataaagtttacctagaactattcgcaatggataacgcgaaagatctacgtgaatcgccacggataatctag

SEQ ID NO: 157511 - DNA, 381 bp, Enterobacter cloacae
atgtgcatatcaataatcctacacttcccaaaaggctctacaaccatcacagacggcgtaatgtcaggctatgaatattcacgtgatgatgtactaatatcggctcacatagcgattgatgaagcctacagcctattcattgatgactattcaataacagccaaacataaatatatcagtattaactataagcacagctacacaataggccgctggtggtattactggaatagtattgataactatgaaggtagtgaacgtacacatctggattacctacacgggctaataaaagaactattagaacatgaatctttaaacggtagacctatcaatagctacagagtgtcagtactactcaataacttcaaagatgaatga

SEQ ID NO: 157512 - DNA, 318 bp, Enterobacter cloacae
atgcaggccgtcggcacatcagacatcaactttaaaaaagatatcactgaacttgatacggaaatcgcgctggcaaacatcgatgctatggaattcgtatcgttcagatataagaatgatgacagtggggcggtacgccgtggtgtaatcgcgcagcaggttgagaagattgacccgcagtacgttcacagcgctgagggagtgggtaaaatgacccttgaccttaacccattgcttatggatgcactggctgccatccaggctctcaacgccagggtagtggacctaagtaagcaaattgaagcattaaaaagttag

SEQ ID NO: 157513 - DNA, 240 bp, Enterobacter cloacae
atgtttgttgaactggtttatgacaagcgaaatgttgaagggctagaaggggccagagaaatcatactggcagagctgacgaagcgggtgcatcagattttccctgatgccgaagtgaaggtgaagccgatgcaggcaaacggcctgaatagcgacgccagcaaaagcgatcgggaaaaactgaaccgtatgctggaagaaatgtttgacgaatcagatatgtggctggtatctgaatga

SEQ ID NO: 157514 - DNA, 1191 bp, Enterobacter cloacae
atgaagaagaacaacaagacgaaattaacgatactactcaagaaagtactaccgacagtcaagccaccactaaaacagaaaacgagtgattggattaaagctggtggagtaatgaagttaatcgacggtccaggaatgggcttagattatattccttggaatttccaatgtgaaccaatggatgtagcacaggatagaagtactaagaagatcgttattcaggcgtgctcgcaattacttaaaactcaagtaatgaccgcaatagctatgaataagatgttcaatgatcctgcaaactttgcctttgcatcaagtagtgaagatgacattaaaaagtttaaacagggtaagtttatgcccgtagtagaaacttcacaagtactatcaaaactaatcacaagtaaatcagataagaatgcagccaacaatgctaaacaaactgaattaaaaaatggcacgtttatctactggcttaatatgaataccccaaaagatctacgtggtattacatgttcaaccgtactactagatgaagtgagtaaccttgttattggtgagcaaggcaacccaattaaattagcagaagggcgtacttcaacatttggtgaagatgcattaacagtagtagcgagtaccccactattcaaaaatgacttaatcaattcagagtttaaccttagtgataaacgctactggtttgtaacacatgattgtggtcatgaatataaatttgaatgggaacaagtaacatttgattttaaacaattagagaatggtagagcaataccagatagtactacggctaaattgatttgccctaattgtaaggaagaaatcagtgaacataaacgccaccaaatggtagataaaggtcgatggattgcgacaaatccagatggtgaaaagggtgtagtagggttcggtatctctcgtatgtattcacctctaggaacaatagaggaaatgacagcacgttatgccgatgcactctataacttcaatcttcaaactttcatgaacaatgaactaggtgaaatctttgaagatgaatatcagaaagaagtagatattattcaattagaacaacacagggatgatagttttaacttacataacataccagaaagtgcattaggtatttgtactgccacagtgacctgctccccgttgattagtacaccccgatgttag

SEQ ID NO: 157515 - DNA, 378 bp, Enterobacter cloacae
atgtctgttaaaaagctcgatgatggtcgatatgaagtggacattagaccgagcgggcgtaacggaaaacgcatccgtcggaagttcgacaagaaaagcgaggcgatggcttttgaaaagcacactcaatataaccatcactcaaaggaatggctttcaaaaccaacggacaaacgccaattgtcggaactgaaagagttatggtggaagctgaaaggtaaacatgaggagcacggtcaatcgtatctcaggaaaattgagcgtttcgaaacgatgaccggaaacccgtgcgctttccagatcaccaagagcctgataacgcaatattgtgctcaacgccggggtgaaggtattaagccaactaccatcaaccgctga

SEQ ID NO: 157516 - DNA, 783 bp, Enterobacter cloacae
atgatgccggcaatcccaggccagggcgtttcgctttctgccgcgcagctgccggtggccatcgactacccggccgcactggccctgcgacagatggcgctcgttcaggatgaactgccaaaatatctgctggccccggaagtgagcgccctgctccactatgtccccgatctccaccgcaagatgctgctggcaaccctctggaacaccggcgcgcgcattaacgaggcgctggcgctgacccggagtgatttttccctggcgccgccctacccgttcgtgcagctggccaccctcaagcagcgggcggagaaagcggcccgaacggccggccgctcgcctgccggcagtcaggtgcatcgcctggttccgctttccgatgctaactatgtcagccagctggggatgatggtggccacgctgaaaatacctcttgaacgacgcaacaagcgaagcggcaaaaccgagaaggcccgtatctgggagattactgatcggacggtccgcacctggctcagtgaggcagtagaggcggctgcggccgacggggtgacattctctgtgccggtgacaccgcatacctttcgccattcctacgccatgcacatgctgtataacggaatcccgattaaggtgctgcaaagcctgatgggacacaagtcgatcagctctaccgaggtctatacgaaagtgtttgcactcgatgtcgcggcacggcatcgggtgaagttcctgatgccggaaagcgaagcggttgcaatgttgaaagggaatcaccagtaa

SEQ ID NO: 157517 - DNA, 957 bp, Enterobacter cloacae
atgaaaattttcattgatgatggctcaaccaatatcaagatgttgtggaaggagggggatgaggttcgtcgctctgtcagcccgaacagctttaagcgggagtgggcggtcagttttggggcggataaggttttcaactactccttaaacggggaaaactacacctttgatccaatcagcgccgatgcgatggtcaccaccaacattgcatggcaatacagtgatgtgaatgttgttgccgtgcaccatgcattgctgaactccggactagaaccgcagccggttgatatcgtggtgacattgcctctggcagagtactacaaccgtgataatcagccctgcactgaaaacatccggcggaaggaagcgaatcttttgaggccggtcactctgaatgacggcgtcaccttcactgttcgcagtgtacgtgtcatgccagaatccatacctgcaggctttgatgtggtaagtaaactggacgatctggattcattgctcattgtcgacctggggggcacgacgctcgatatttcccatgtccgggccaaaatgcgcgggatttcgcgtatctacggagactctggtctcggtgtgtcgctgatgacccaggaggtgagggcggcgatggcggtggccagaacgcggggcagtagttttcttgctgatgagctgattattcaccgtaatgacgaagaatttctgcgtcgccgaattaatgatgcgacaaagctgacagttgtgcaggatgcgattcgcgaatcacatcatcgcctcattaaccgggtgacagatgctgtgaaaagtttcgagagttattctcatgttatggttatcggtggcggtgccgaactcatcgctgacgcgatcagactgtgttgtggggttcgggaggacaggtttttcctcagtaaagatccccagtttgatctggtaaatggcatgtctgcaattggttaa

SEQ ID NO: 157518 - DNA, 390 bp, Enterobacter cloacae
atggataaaccagacccacgaagaaaaattacgttctacctgaaccctgaaagtaatgctgcagagcgctacgtctgcgaagaaattgagaaaatgccgcagggggaaaggggtaatctctggcgggctgcgctgttgtctggatttgccctgaggaaacaggatgagaggctgccacacctgctggcagcccagctcactgaatccaccacctttgaggaaatggttttgcttatgcagtcggttttcccggaggaaatgaaagcgttagacggccgcagaccggcatccggaaaagagccggaagtggcctgccaggaacaggcctcgacggctgatacggatgatgaaacccggcgtaatgcacagaacatgttcggtcgcgggtaa

SEQ ID NO: 157519 - DNA, 264 bp, Enterobacter cloacae
atgttacaggttaaaacaatcgctgtacgaataattcataacctcctgctcgcccggaacgtacctgaatctcagtggccggatatggtcaaaaagaccggcaggggaatgatactggcaggcgtggccgtcgtggttcctggcgttctggttgataacatctccctgccggtgacaatcgcgatgcaggtctgctatgcctcgctgatcggcatcggggttctcctggcgtttgacgagaaaaaaccagaggggcggggatga

SEQ ID NO: 157520 - DNA, 354 bp, Enterobacter cloacae
atggggaaaatgatgtacagactcaggcgtatacagccaactgataatcaacttgaagcaacccgaaatctggtgagggatttaattgcctccggcaccttatttgctcttctcagtactggagcgaggtcgtgcattccagcgacatcttttgctgattatgtctttctgactttattttttatctgcttcatgtttgttctgacctggtcatccttaattgctgatttaaacctgcggcagataacaggtagcgatgcctcgaattaccgcgtgccgtatttcattctggcgatatgtttcactgtcgtattttttggactgacttttttacttctcaaaagcttctggtaa

SEQ ID NO: 157521 - DNA, 240 bp, Enterobacter cloacae
  misc_feature (152)..(161): n is a, c, g, or t
atgaaagtagcaatcgttcatgagtggttcagttcctatgcgggttctgaaaaagtggttgagcaaattttacgttgttatcccgatgcggatgttttcgctgtatgtgatttcttaaagccgaaagacaaacattttcttaataataaaannnnnnnnnnctactacatttattcagcgtttaccatttgcagcaaaaaaattccagtcttatctgccgttgatgccattggcaattga

SEQ ID NO: 157522 - DNA, 1566 bp, Enterobacter cloacae; identical to SEQ ID NO: 119967

SEQ ID NO: 157523 - DNA, 1194 bp, Enterobacter cloacae
atgaacacatcgggtagtatgtttggccgcctcggccgagtcgggatcgtatttgcaggcgtggtggcgctgtggtggatgataacccactacgccaaagcgctggatattgatacgcggggtgaacaggttctggcgtttgtcctggtgtgcctggtgctggtgcttattcgttatgcgccagcactttcccgttatgttaaggaagtttattatcgtcgccaggctcagaagattaatgccttacctgacgaagaaggtcgcattacactgacgccgccacgtcatatcacggtagaggaaattcgccaggagttgtgccatctgtacggtcgttgctggccccgcaaactccgaatcctgctgataaccggcagcgcttcagatgtcgaacaactcatcccaaaactcacccaggaattctggcaggaagaccaggggacgctgctgctgtggggcggtgacccggcagcaccggcggacactgcctggcttaccgcgctgcgtaaactgcgccgccgcccagtggatggcgtggtgtgggtgacctctgcgtttgatcgcctcgcaggctcagatactgaactggcagcgccgctgactcctgaatccatggacgccctggctcacgccctgaaggggcgctatgacgcgctgggctggaaactgccgctttacgtctggtcgctgcatccgcgagctggagagcaactggggcggattacccagccggtggggtaccagctgtcagcggcctctaaacctgaagcactggcccgccagctaagcgacctgataccggccctcaccgcgcagggcgttcagcagatttgcgacaaaccacagcagagttttttgctcgccctggccgaccagctgacgcgcgagccggaaacgctgaccggccccttatcggtattgctcaaaccgtaccgcccgctgccgctggccggtgtggtgttcagtccgtccacgttcggcggcgtgcgcagcgttgctcatcactggggcaaagacaaccgctgggatgccatcccggcctcggcacaggccttaccggcaggtctgcgcccgcgtaaacccggaatcagctggacgcagatggcgggcgtgagcgtggcggcgctgatggtgctctggggggcactgttgcaaatagtcggtggtgataaacttatcatccccttttgctga

SEQ ID NO: 157524 - DNA, 591 bp, Enterobacter cloacae
atgagatatctcatgatgaagcgtgtaatgttagcaatccttcttccgtttattgttggatgtttatttggtgctaaagcattatcagagtattgggttgtgtggttttttgtttgtgcaatgttgatgatcacagcctggggcgtgtggttaaaaaataaaaacagaggttccagcttcagctacctgaatgataatgaagatggtgtatttatctacaaatttcataatcaagagatgcgtttagataaagccaaaaaacagctttatttaaaagatgggttaaacgaaaaaacctacgctttttccgatgttgaaagctgggaatataacattagcacaggtggtcagatcctcacttcaggtcttaaccctacaactaacttgactaacaataagattcttggtgaaaacattaatgacaccggcttctttatcaaagttaaagacatcagaaaccctgagtggcatattcgattcttccctcaagaaggatcttataaagatcagaggggattaattagcttaaaaaaacagatgatgcagtggatgaccgtttttgacttaaccgtaaatgctgatacaaagtaa

SEQ ID NO: 157525 - DNA, 1188 bp, Enterobacter cloacae
atgaaagggatgcaaaaaatccgcagaggaaagagttttgctggcgtcgtcctctatgcgttaaagcccggttctcatcataaaaaagaccctatcgtgatcggtggaaatataacgatagttggcaatgccgctaaagatctgatcgctgaatttgatagcaccaaacagcttcgccctgacgtgcaaaaggctgtttggcacaactcgcttcgcttacctaaaggtgaatcactaacggctaaacagtggtctgaaatagcagatgattacatgtcccgcatgggcttctctgaaacgcatcacagatgctacgtcctacatgacgacgaagatggccagcacatccatatcatcgccagcagagtgtctctggatgccggaaagctctacctcggcaggaatgagaacctggcaagcacgagaataattcagcaacttgaaagagattacaatctgacaagaaccaaagggccaggagctaaagcatctacatcttctctttcctctaaaccgaaacgtaaaaaatcacgtaatgaggctatgttagaggagagaactggtgaaccatgccctaaatccatcatccaaagggctatagattcgataacattaaatcctatagcaattgatgacttcgttgaaaagctgaatagcatagggattacggcgaaaagcaacatttcttcaactggcaagatgaatggattttcctttgaatgcaaaggtgttgtgttcaaagcttcccagcttggcaagaagtatagttggaagaacctggaatcaatgatttcaatgaattacaactcacacattggagatgaaaaacctgtcatccctgaacctgctgcccatcgcagcaacgaagctgtcatacctatagtggaagactattctgatgaaaagatttactctgagataagggtacccttaccaagacctgacacagcgcccacaaaacctacaagcatgacaatgcgttggatcgcaaccataccttatcttgtgagtgttattagcgcacttaaaacgatgcgtatcccctttctaaaggcgttcaatggcccaaggaagttcttttccgtgtccatgattcacctgtcctctgtaagcctgaaacagaccaaaacgaataatttcaaaccaaaaagttcccaccaaaaagcccacaagcccctactcccctga

SEQ ID NO: 157526 - DNA, 414 bp, Enterobacter cloacae
atgaatgataggaatcatacttttaataagttcgagccattcagaagttgtagctatgaaaattttacttctgctaaaacactctcccagcagacacgttctcattgtattagtatcagattaaatgatgccgagttatcttacgttgatggcttacgagaagatctcaaccgtgctgtttggatacgtatgtcagcattgaatcgtctccctcccaaaattcctgaaataaatctaattgtctggaaagaccttgccaaagcatctcagaatctgaacaacctcgttcagcatctcaacactaaatcacacaatagtccttttactatcaccgaaatttatacggtacaaaaaagaataaaagcactaagagatgcccttctgtcagcaaatcgatctgtcagtgataaataa

SEQ ID NO: 157527 - DNA, 744 bp, Enterobacter cloacae
atgaacaataatacaactttgttagacgatatgtgtaggctcagggactttttatatgatagccgcatatgcccagatgttaatcctctcaaccgtttaatcagtaaacttaatgcaaatctccactccgaaacaggggaggactttgaatactctttagacgatttagtattttatcttagcgaaaaatctggaacaatttgtccgacccaaattacacctaaagaaaaccctattgaaatacatttggaacttatattaaaaagtgaaggcccttatgaattttcgaagattaaagaactttcagggcaattacgacttaaagctgagtggatcaatgacacaacagaaaaaattgagataaaaacatcacatagtgcttggcattttgattatcatgttcctcaaatgggggatggcgtaaattcatttactcatcctcaattccatttacaaaatggaggaaacaggctgactgataatttaaatgactatggagagttaatgattcttgatgctccaagactacctttacctcctatggatgtgatattagccattgactttattatttcaaatttctttggttctatttggcaacaagcattatgtgattctgaatacattgatgtagttaaaagagcacaaaaagcatggtggaaaccttattatgaaggtataagtcaacactggtctggcaatggctcaggaatatccaatatcctaattccaaaccttctgtag

SEQ ID NO: 157528 - DNA, 477 bp, Enterobacter cloacae
atgaaaccaataatagaacgcaaaggaattcagtttgcaatacattatgaaggttatgaactttttacgaagccgattcatgtttcagagctatattctgtatttataaatctctttacgaatgcatataaagcaatacttcgttctggaacaaatccacgaaaaatgtctttaactgcgaaaaaagatagtgaagatataattatccgattcgaagatagcggtgatggaattgaacctgcaaatagagaaagagtttttgagcctttctatacaacaagtacaccatcaggaccttttgaaagtgatgatttatcattaaaaggaatgggattggggttatcaatcgtacgtgatctcgttgaatccatgtctgcagaaatatctatagttgatgcatccgatggttttacaacgtgctttgagttgagaattccaaaagctgatgataaggaaataccagatgacatctattaa

SEQ ID NO: 157529 - DNA, 177 bp, Enterobacter cloacae
atgacatctattaacctactttatatcgatgatgatcagcctcagcaagtaaagggtttaattgaagcaataatcagtaaagcgagttttgatttaaaaatcactcataaaccgccgactaaaatgagtgaaatagccatagagttaagacaaggtctgtctcttatacacatctga

SEQ ID NO: 157530 - DNA, 609 bp, Enterobacter cloacae
atgacgggtaaggagtctgatctccctgtcgaacgggaacgcatagcttacgctggtgatgtcgctggtagaggacaggtcaaacccggcgtagcactccattccggccagatcgtcttcgttatagtcgagcgcacaggcatcccatgcaccggcacccatccacggcgtggagccctgacaccagatattgaaacgcttggtcagcatttccacccactgcgacggtataccccgcgctttctggatggtggactccagtttcgccgcatcaacggacacatgcaggttagggttagccttgatccacatttcaggctgctcaacctcgctttcgtcgtccagttcgtagatcaggacaaacagcgaatcgttgttctcttccccggacagaatctggcagcagtagtcataatgctgtttacaggcagagacaacgttactcccggcggtagtgatggcgaacaaaatcgcctccggacgtgcgcccatacccagctcaagcgcggaataaacgccgttatccgggtgaaggtggtattcatcgacaatcgccaggctggggttagttccttcaatggtggccgctttcgccgccagcggctttaa

SEQ ID NO: 157531 - DNA, 228 bp, Enterobacter cloacae
atgactaaaagcttcattatcttctcaggcttagaggaactgcatttaacaaacgctatttttattaacgcaattaaagataatgttaacaccactatactaaagattataaatggtgtagtaacaacaagacttagcatatttccaaattcggaaatgttacgtgatacaaccgttaaggcatcatttattcctgaggtcgcaagttcactatgccttagattataa

SEQ ID NO: 157532 - DNA, 630 bp, Enterobacter cloacae
atgaaccaatcacaatttcaaaaggcggctgggctaagcgccgagttagctgcgcgctggtttccgcatatcgacgccgctatgaaggaatactgcatcaccgcaccgcttgatcaggccatgtttattgcccagatggggcatgaaagcaccagatttactcggctggtggagaacctgaattacgcggcagaaaacctggtacctacgtttggcagccaccgcatcacgcaacagcaggcctacgcacttggcagaactgcaacgcaaccggccaaccagaaagcgatcgccaatctggtatacggtggtgagtggggaaaagtacacctgggcaatcaggttgccggtgatggctggaaatatcgcggtcgtgggctgaaacagattaccggcctgagcaactatcgcagttgtggccaggcgttgaaactggaccttgttactcatccggagctgcttgagcaggatgaatacgctgcgcgctccgccgcatggttctacgtctcgcgcggatgcctgctccattcaggcgatgtggagcgcgtcacgctgcttatcaatggcggccgtaacggtctggataaacgccgtgcgctgtttaacctggcaaaatcagtgctggtgtga

SEQ ID NO: 157533 - DNA, 939 bp, Enterobacter cloacae
atggatatactcttctatcaccccacttttgatacggcttattggattaaagcactgtcggcagcactgccgggcgcgcgcgttcgtgagtggaagcggggcgataacgaacatgctgactatgcgctggtctggcatccgcccgttgagatgcttcagggccgtaaactgaaggccgtgtttgcgcttggcgctggcgtggattccattctgagcaaactgaaggcacacccggagatgctgccggaagatatccccctgttccgcctggaagataccggtatgggccagcaaatgcaggaatatgccgtcagccaggtcctgcactggttccgtcgctttgatgattatcaggcctttaagcagcaatcccactgggagccgctgccggaatatcaacgtgaagactttaccatcggtatcctcggggcgggcgtgctgggctcaaaggtggctgaagcccttgccccgtggggcttcccgttacgctgctggagccgtagccgtaaagcgtatccgggcgttgagagttttgccggaacggatgaactcccggcgtttctgaaaggcacacgcgtgctgatcaacctgctgccgaatacggcggaaacggtggggattatcaacgaagccttgctcaatcagctggccgatcggagctacctgatgaaccttgcgcgcggggtgcatctggtggagccggatctgctgaaggcgctggatagcggaaagcttaaaggtgccatgctggatgtttacagccgtgagccgctgcctgaagaaagccctctatggcgacaccctcgcgtggcaatgaccccgcatgtcgccgccgtgacgcgaccggctgaggcggtggcttatatctcgcatactatcggtgaaatagagaaggggaacgcggttaccggtcaggtcgaccgacagcgcggctactga

SEQ ID NO: 157534 - DNA, 396 bp, Enterobacter cloacae
atgtccgatcctgtttctggcacgacagtagcggctggtggtctgatgggggccagcatgttcggcctggcaaccggcatagattacggtgtggtgtttggcgcattcgctggtgcggtgttctacgtcgctacggcggttaatatcagtcgccttaagctggtgggctacttcatcacctcattcatcttcggcgttatcggcgctccactgcttggctcttacttctccaaatggacggggtacagcgacaggccacttgatgcgctgggcgcggtaatcgtagccgctattgctattaagctgctgacgttcgtcaacagtcaggatttgggtagcctgtttggaattctctcgcgtttacgtggtggaggggccagcaatggtaacaagtga

SEQ ID NO: 157535 - DNA, 141 bp, Enterobacter cloacae
atggtaacaagtgatccgagtgcgatggcaaacgcaattatctctgctgttatcgttattgcactgatgttctaccagcgcggcggggcgagacatcgccctctgatatcgctgatggcttatttcacggtgctggtataa

SEQ ID NO: 157536 - DNA, 318 bp, Enterobacter cloacae; identical to SEQ ID NO: 157512

SEQ ID NO: 157537 - DNA, 1365 bp, Enterobacter cloacae; identical to SEQ ID NO: 142312

SEQ ID NO: 157538 - DNA, 768 bp, Enterobacter cloacae
gtggttatagatgtgccacacatcccgtggcatatcagccaggacatacatcttattgtcgccccagtacgtcatgccgcgaaatatacccgccagatcacgaagtacggtccaggcgtcattacggtcctgaatataaacgttgcaacgaaaacgaggctccgtcccgctgccgcccttgccgtctggtaccagttgatcgcaatactgggcgatgcgataaagttcccatttgtctatctgagtcgcatcgattctttgacccagcccgaagcgctcgttcagaatgatgtcgtaataaatccaggcagggttatccgtccacgcccatttaaatacgccctcccatgtaccagaataggtgcgggtttcgggatcataagtatcaggtacacggatgattcgccctttcggattgcacacaacctgaggaatgccattagggaactgctttgcgtcaaactctacatacagcagcgctgtgttaacgtagcgaagtttggcgtcaataatttcagtaacggccacaacgcgcatggtgtcgacgatattcacgctcgtggaatccggcgtgattctgcgaacccgcaactgccatccagtcgaggctttcggaagattgacgcggtgactgcgctcataaagcgacgtggttttgtcatcaacagcaccgttaaccaccgtttcatacggcccgccatcgaccgacagatcgatagcatactctacgcgggtgccgactttatcgccgttgtttttctggagtaa

SEQ ID NO: 157539 - DNA, 303 bp, Enterobacter cloacae
  misc_feature (53)..(62): n is a, c, g, or t
atgaaaagattgattctcacgtcactgatcgttctccccttcgcctcaagtgnnnnnnnnnnatcttcagtcgaaactcgccttgatgtgcaggacaaaagtatgaaggtgaacatgggtggtaaaacctggcgactcggtttcttgggtgagaaaagtattgcgaagatgtacgccacgccagacggagggattgccgtcacatacatcgacaatgggagtgagcctattttcgttatgcgccccacaaacaatgatggacagactgctgtctacacgctcagcctgtgctctgagatgtaa

SEQ ID NO: 157540 - DNA, 267 bp, Enterobacter cloacae; identical to SEQ ID NO: 126402

SEQ ID NO: 157541 - DNA, 189 bp, Enterobacter cloacae
atgggtatagcaccgcatatagtcgaactgctgctgggccatgccttgccaggcgttatggcgatttataaccgtagtctgtacctgccggagaaactggacgcgctgaataagtggtatgaccgcttagaacttcttgcgggtaatcatcaaaatgtggttctgttaactgtagcgaatagagattaa

SEQ ID NO: 157542 - DNA, 201 bp, Enterobacter cloacae
atgaatacgactactgacaccaatcagtggtgtagccagttcccaaaatgtaaagggtgcaagcttgatgcagagtgcatggtgaaaccagaggaaatgtctctggtgagagagaatggaaagattgtcgatcgatgggcaatacggacaaccgccatgattgcaagagagcttgaaaatcagaaaaacagagccgcttaa

SEQ ID NO: 157543 - DNA, 237 bp, Enterobacter cloacae
atgacacgttcaatgaagttggtttatgaagcaataaagtcaggtcaaaggaatggcaacttaataactattacctataaggaaattgctcgtgaaacaggacttcagataaccctggttagcagctgcatccgtttgctggttcgagactcatacatcgagagaataaataatttctctgaatccggcggggctaaaaccaacagttacaaaatacgcaaatccctagaggattga

SEQ ID NO: 157544 - DNA, 1014 bp, Enterobacter cloacae
atggcgctaatcacctgcttcaccggtccggaggggctacagggggtacttacctgtttgcgcgacactgaaggcctgaccggtattcttgtcgtggttgggttgctcactggttggcttgttgttcagtacctggcaggtgcccggcgcgaacgtctggcacgggagagcagaccgggaatacccgtcccgccggcccagtttggcagtgcccgacatgctgaagcggtacatgcctttgctaaccgggaattataccaggcgatgcttcgcgggctggaaaacggtctgactgaaacgggctacgaactgacgcgtgatagatcccggcgtgtggtggcaataccactggaagacagactgacgatcagtcgctgggtttttcgggcgcggcagtggtacacatcaccaagaatgtctgaacaaaggacgaaagacattgaagatgacgcggtgaacgacgggtacgctggcatgctgctcaatgtacttatccgtggatgtgatcatgagggctggtacattacagaaccggtacaagaattcgccccgacatcctttccgctaaaacaggtagccatcaatgtcagggccacacaggctgtactgaccagagatgtggtgagcatcatcaatgatgttgctgaaaaagtgagaatgcagtcatctttcccccatcaaccgacgtgtattgtcgctgacgtgatgaacagcgagctgaattatgaggtccggcagcaggagattgacgagccgcctggctggtttaattctcccgcgggatgtgagcttccggacgatatcaccgaaggacattttccactcttcatgacatctggacaccggcatttcattgtccgggtacagggagggagattttatacacagggtacgcttgccttctttatagagcaggccgcacacaggattgcacagggtgaaatcagcggagcgtgctacgaagatgacagcggttatgctttcgctgtgatacctgcaaaaacgacccattaa

SEQ ID NO: 157545 - DNA, 642 bp, Enterobacter cloacae
gtgttccctgataacgttacaaatgcaccttatctggctgtcagcctgacgcccaagcctgaaattattgccgatctgctggacaagattcccggcactggtgacgcttatctctatcattcaggattttcagtagcgccagtcacccgggaattactggatgcatggattagaatgctgtcccttgtcagaaagcctgatgaaattgccgctctggctccggcgtatgaacgggaaattctttttcgtgtactgcagggcccccttggatggatgctaagggagattgcaacgcctgaaacccaccttgcaaggatttacaaggtgatcaactggattaagacaaactacacacaagccatacgtgtagaggatctggctgaaatggcagcgcttagcgtgtccgcttttcaccgccacttccgcgccataactgccttaagccccgtgcaataccagaaacaaattcgcctgatgcatgcccggctcaagctcgccacatcgggcgaaaatattatgaatgtcgcgctatcggtgggctatcaaagccacactcagttcagtcgggaatatgcaagacagtttggattaccgccctcagctgatttgaaaaaaatctccctcagccatgcccgcaattag

SEQ ID NO: 157546 - DNA, 744 bp, Enterobacter cloacae
atgaaaaatgttttgattaccggcggcagccggggcatcggtgcaagcaccgccctgaaatgtgcccggctcgggtatcgcgtcatactgacctggaacagccaatctgaagctgccacccgtgtggtggaacgtattgaggcggaaggtggcgaagccatcgcattgcagctggacgtcggaaataccgattctttcagtcattttcgtgctgagcttgagcaggtgatgaaatcccgctgggaagatggcggcctggatggccttgtgaataatgccggatatggactttttaacccgattgaaaccgtcacagagaaccagttcgacagcctgatgaatgtgcatctgaagggacctttctttctgacgcagacgctactgcccctgctgcgccacgatgcgtgcatcatcaacatgacgagcgccaccacgcgagtagccacttcaggcgtcgccccttacgctgcctttaaaggcggacttgaagttctgacccgctatatggctaaggagtttggggaacggaggatccgggtaaatgccgtctcgccaggtgcaatcaggactgaactgggaggaggactgaacgaggaatttgaaaatctgcttgcctcccaaacggcactgggccgggtcggtgaaccggaggaggtagcgcgcgtcatcgcctctttactttcttccgatggcggctggattaatgctcagacgattgaagtcgcgggcggatataacatctga

SEQ ID NO: 157547 - DNA, 402 bp, Enterobacter cloacae
atgcttgaccatctctttctttccgtcagtgacgttgatcgttcggtcagcttctatgaacgcgtattacctgaacttggtatctctgtccgtcacgattatgacggtaaagagggacctgccggacatcccgaccttaaaggatttggttctaacgggaaaatattcttctggctgcgtcagggaacggtgtttccggatgccatccacgtaggcttcgcaggcgattccgaatctgctgtcaatcaggcttacgcagcggccctgtcggcgggtgccaccgtgattcatcctcccggcccacaacttcattatgatccccgctattacgcggcccaggtcagggaccccgacggctacagcctggaatttgtctataaaagctggcagcacggtaagtaa

SEQ ID NO: 157548 - DNA, 984 bp, Enterobacter cloacae
atgaaaagcatcatgatttacggcgcaaccggttacacaggcggtctgataactgctcatgctctgatttgcggcgtcccgcttattttagccggacgagacgaaagaaaactcgccgctatggccgcagagttaggtatcccttatcggaccttctctcttgcagatgcagaaacagtcagtgcggcgcttatggatgttgccgttgtgctgaactgtgccggcccctttatgtatacggccagtgctttgatgagggcggcggttaacagtaaaacccattatctggatgttgctgctgaacccgacagctacaggcttgctgagatccttgatgctgatgcagcggctgcaggcgtgatgctcttaccgggatgtggtggcagcgtggccatgctgggttgccttgccgcccatgcagcagagcggatatctgccccgacaaaaatcgcccttgctttgaatgtcgccgggccaatgtcgcgaggatccgccatcagcgcgactgaaaatctctcgccgcagtgtctgaaacgctcaaacggcagattaatacctcaggaacctacccaaacaagacgttttgattttggcgttggacccgtagagtgtttcccggtaagcctaccagacctgacaacgatatggatgtctacaaacattccagacattgagacttttgtgcatcttagcggcacagaatttccacaaggggatctgtcacttttagcggatggtccaacagaacaggaacgcctggataaccgatatcaggctgtggctgaggtcgtcaatgcgaagggagatgttgtgcggatgttgctcgaaacagtgaatggctatagttttaccgccatggctgcagtggaggcagtgcgtagagtgctggcgggggaagcaaaaccaggttttcagacgcccgcagatttgtttgggaaacatttcgcagaaaccatcgcagatacgcggatctctgaggtgtaa

SEQ ID NO: 157549 - DNA, 666 bp, Enterobacter cloacae
atgatacatgttatgaattatcagtttgttgttttctttaagcaacatattattagaccggatacttttttcaatacccttaatgaaggaattggaaatttatttgatcgtatgccccaaataatacccatgcctgctgaggttccacctgaaatccctagagtaagtgctaccaactctagtgatacatatctaatgaatgtttcactaaacagatttgattttacagtaaatgtggctgattctaaatttagagaagacgaagcaatgagcgacttcattgtaaaattaaagttaattattaaaaacctgccaaataattatgatgtcaatagaattggtatggttggaaattattttgaattagaaaagaatcctgcaacagttcttgcaaaaaaactttctcgtaaagacctgggtttagtaaatgaattcaattacaggttcaataaaataagtcaagattttggttttaatttcaatcatatactttcatttagtagcgccttaataaatacaaaaggtgtagatgctgaaggtgtttttattcagaaggatatcaataataacccaactgatgatattttcaagaaagagctaattattgatgttttaatgaagaaaattaaggagttaacacctgatagtttagaggggatctattga

SEQ ID NO: 157550 - DNA, 1032 bp, Enterobacter cloacae
atgtcgagcatagcacccataccccgtaacgaacgacgcctgatgaagaaaattatccataaaacgcgcgacaagaatcacgcccgcaggttgaccgctatcctgatgctgcaccggggctctcgcgtcagtgatgtcgccagaacgctttgctgcgcccgttcgtcaatcggtcgctggattaactggctcactctttacggcattgagggactgaaatctctgccgcccggccgtggacgccgctggccgtttgagcagatctgcgtgctgttacatcaactcgcaaaacgttctccgggtgactttggttaccagcgctcacgctggagcacggaactgctgacgataaaaatcaatgagataaccggctgtagattgcatgcttccacgatgcggcgctggttgccttcggccggtctggtgtggcgacgtgcagcccctacgctgcgtattcgcgacctccataaagaagaaaaaatggcagccatccgtgaggcgctggaacagcgcagcgctgagcatcccgtgttctacgaggacgaagtggatatccatctgaatccgaaaatcggcgcggactggcaggttcgtggagagcagaaacgcatcgtgacgccgggccagaacgagaaatattatctggcgggggcgttacactgcgggacgggaaaagtcagctatgttggcggaagcagtaaaagctcgtctctgtttatcagtctgttagagcacctgagagcgacataccgacgggcaaaacagctcacgttgatagtggataactacatcatccacaagagccgggagacgctgcgctggctgaaagacaatccgaagttcagagtgatttatcaaccggtgtactcgccgtgggtaaatcatgttgaacggttatggcaagcgctacacgacacgataacgcgaaatcatcagtgccgctcaatgtggcaactgttgaaaaaagttcgccattttatggaaaccgccagtccgttccccggaggggggcatggtctggcaaaagtgtag

SEQ ID NO: 157551 - DNA, 360 bp, Enterobacter cloacae
ttgttgtgcatatctccgtgggtcaggcctgaagtatccctgcggccactgccggcaccggcacgcctgctgcgcgttctgcgcgacagtccggaggcattcccgctcgcggctgccggctgtgaggatgacacgcaggccgcgctggccgaccagctggcgcgcgcagggttcaccggcgagcaggtgcaggagctcctgtggcaccgcatccgctggccgcagatgagtcaggaagacgctgaccggcgcgaactgaacagcctgctggacgaactggaacagcgccagccatactgcaaccgcgaacagctgacggagattgtgttttcaccagtccgcaaacccggcgaaaactag

SEQ ID NO: 157552 - DNA, 474 bp, Enterobacter cloacae
atgaaaaaaattatcggggttgcgacaacgtgtattttgctgatggggtgcagctctcagccagctaaaaagctttaccttaatacgcagatgcaatcgctggtatctggcccgacgaaagtcagcctcgaggctgatcgtcttctccctcagaaaaacataagtcatctaaacctttacccaatgcaaccgttgccaggcaaagcatatagagatgacctggaccggaaatttgctgctgcgaaaatatacataaacgtcactccgggtgccaacagccgaacagttgaaatcagtggtcagatcgattattacgatcaccaacgatataacaacacacagctggtcggtgattccattaagaccttcgatgtaccgaaaagaaccgtggagctgacatacgggaaacccgttgttatcgaattaccccgcggtgttcagtattcccttttgttgacagatcaacttcagtaa

SEQ ID NO: 157553 - DNA, 915 bp, Enterobacter cloacae
atgacccagacccaagaaaatgttttgattctaccgttgcatttacgtccggtggtgctgatggatatttgtaccattggagtactgaaggagagggaatctgcttataaaggaagcgatgaacggaaaaaaacacgcattaaacagctggcaatgatggctgagtcaggactatgccggttttccttcctggtcgcgattattgaaaaagcgaccgattttacaaacataatgaacgcagaagaattgtcttctgtttttcagaatgactacgatcagattgttaattttctgggacgagaaaatatactggaaccacgggagttactctcaactatgattggccatcttgttgatccgcggttcaacatggaggagagggctgaattatctatccctagtagtctggaactacttagtttttttaactcacttggtatatctagtacgccagcaaaacacctacgatttgatctcgccagcagagttgccattgaaggtgagcgactcgggcttgcaaaagggtatccctgcattgccatatgtgtagcgtcaatttatggctgcgaagaggccagaaagatattgaaaatcaaaaaaaatggtcgtgaattcaaccccagtaattgtctgggcgatatcatgacgttctatcgggtggcgaaagcccgccacatgctccaatcaaatataggtgatattaccgttatttttcgtaccgaagatgcggcacttgaaagtcttcatacctatatgcaaaccagtgtggtcagggataatgaggatgagggtagtgtgatgaacacccgttgcctgtcacctgaaaagttttttcccgcactttttaaagaaggaaaatgtaccgacgagaaggaactgaaccgtctttactctcttctcgatttcgttgtttaa

SEQ ID NO: 157554 - DNA, 345 bp, Enterobacter cloacae
atgcaacctaataaaacactccgggagtatcagatcgaatgctgcgagcaattgaaacagaataaacctgagagcgtagatgatattttctctcaaatgaaaaaatcggaacatgacctcattcggttgtgctttatccagcagttccctggttgtgtgtcgaatcattatctcctgccagtgctggaagggaatgcccgcgatttacttatacttcaatgggaaaatcaggaaccagagtggccagaaagattgaagaatgcgttgataaacgggactgctggcgcagaggcccgtattctcagggcatcgctcctgcggtttgtggagaaggataatgactga

SEQ ID NO: 157555 - DNA, 204 bp, Enterobacter cloacae
atgtggccgacagaggccagggcaaccccagatgaaaagaatattatccggttccctgttctgttggctaagccaagacagcaggtaccggtgcgcccgggcctgcttttttttgtgcccgaagaaaatgacgcgattatttattccgctactgcggagatggattcgtataccctgaaatcaactttcgcgtttcgcgaataa

SEQ ID NO: 157556 - DNA, 861 bp, Enterobacter cloacae
atgacagctgagctaaatcatatggcgctgtgtaaaaaatggcagggtgacacacctgaatttacgcagcgtaaccagaacgatggggacaccataaatctgccctcctttattgcagcctcccctgccctcctccctgggggacagccgacagtccttgactatggtcgtgcactttccctgcgggagatggcgcggcactatacggagctgccaaagtacatgctggcaccggaagtggccgcgctgctgcactatgtcccggactggagccagcacgcctttgtcaacacgctgtggaattccggggcacgtctgaatgagggtctgtcagtgagacgacgggactttcatctcaacgagagcattcctcatgtcgtcctgagaaccgccaaacagcgacgtgccggtggcggccgcccgcgtaagggaaaaagcgcgaaccgggtggtaccgttatcggacccggcctacgtcgatgagatgcgccggttgttcgccagtacgaaagagcagtttgaagatgatccgattaccggtgaacgtcgcgcactgccgatatggaatgtatccgaccggactgtcagaaactggatcgccagggccgtcgatgcggctgagcgcgacggggtgaaattcagtataggcataagcccccataccttcagacacagctttgcgatgcaccttttatataaccatgttcacccgaaggtgcttcagggtcttctggggcacgagaagtttgaaagtaccgaggtgtacacgaagatatttgctctcgacgtggccgccagtcagcagctgcggttcaccctcgatacgcgtgacgcgctgcagctgctgcgcggcaataactaa

SEQ ID NO: 157557 - DNA, 348 bp, Enterobacter cloacae
atgagcaacatcgacaaacaggctggagaaggcgacgtgagcccgaaaacatattacatccatccgatggcatttggtggtacgcaaaacccaggctacgggcatgttcctgttgtacatgctgatgatttcgagaaacagcgcgccaagctggaagccgcagagaagcggattgctgagctggaagcgcgggaggtgaaattgccagcagaaaaattctgtccagccgagtatgccggaagtcagttatgggaagagactgaaatctggaataaggccgtacaatcttgcgaggacgctatccgaaccgaaggaatcaaggtaaccgcagccggtaaaggagagtaa

SEQ ID NO: 157558 - DNA, 657 bp, Enterobacter cloacae
atgagcactaccctaaaagaatggctcctgaagaccatcgcagagcttgaagaagagcgcgatgcgacgccaggcgctgtaaacgaagatgccgttatggcgcttgaggcgatgaaacgggctctggcgtctctgatggctgatcctgtagcgtggactgacgagcaagaattgcgtgatgttgagaaatacggctgcggctacctgtttacagcaaaccctattacgccgaacgcagatccgcgtcgtgttatcaagctatacaccgccccgccagcgctggtatctgtgccagatgagcttacccgcgaagagtgcaagcgtcgattcatggaagaggacaactttgatgacactttccggggtggttggagcgcctgccgcgccgccatgcttcagggtgccgagcctgattttcgggaaatctcaaattcgtcaaccaaacattttcgggaaaacgcggaaacgtcaaccaaatgctggtgccgcacctgccgcccggtgacatttactgatagtcacttcgtcgtttgccctgaatgcggaaacaaacgctgcccgcatgccaatgaccaccggcatgcatgcaccggaagcaatgagccaggtcaggaaggcagcgcgtacccagcagcaccgcagcaggaggtgaagtga

SEQ ID NO: 157559 - DNA, 357 bp, Enterobacter cloacae; identical to SEQ ID NO: 120281

SEQ ID NO: 157560 - DNA, 600 bp, Enterobacter cloacae
atgtctcaggcacaattagacagcgagcttattaccatagtggcaggtgatatcaccgtatttaattatgatggcaagacgcgcgaatatctttcttcctcggttgagtttttacccgtgggtgttggtattcccgccaattcttgcgttgatgctccaggagaaatcaaggaaggttttactgtttgcagaacagaggatggcaaagcctggatggtcgttgtcgaccatcgcggcgagacggtatacagcacaacgacaggtgagaaagttatcatcaccatgccgggggagtatccgaaagataccaccacgctggcaccggccacaccatacgataaatggagcggcagccagtgggtgactgacttgaaagcgctgcacgctgcggacgtgatggcagcggaacagatgaaaaccgcgttattatcggaggcgacggcaatcatctctccgctggcagatgctcaggctggaggttatatcgacgatgccgatgtgtcacgcctagctgaatggcaacggtaccgctacaaactgactaaagttgataccagcaccgcgccagacattacccttccaccgaagccggagatgtag

SEQ ID NO: 157561 - DNA, 483 bp, Enterobacter cloacae
atggatgagtggcgccggtggattcaacctctcatatatagcggtggggtactgataatgaaatacagatattctggcgagacaaatgccttttatccctggatgttaattgatgattacaagcgagctaatgcatggcctgaaaatggcgctgatgttgacgaagatatttttacgaaatacagcggtataccgccagaaggcaagactcgcggcccagatgttaatgggaaaccatcttggatagatgtactgccaccttctaaagaagaacaaattactgctgcggagtttcagaaagcagcgttactgacggaggcaacggagattattgctccgcttcaggatgctgttgatttaggtatggcaacagatgaagaatctactgcactgtctgaatggaaaaaataccgggtcttgctgatgcgtgttgatacaacaaaacccgtatggcctacatctccggcttcggtggaagggtaa

SEQ ID NO: 157562 - DNA, 651 bp, Enterobacter cloacae
gtgtggagcctgattaaacaattgccgtggcgctctattttgctcgtcattctcatcaatgccttcctgctcggcgtgtactgggtgggttacagctcagggcatgatagcgcgaagctcactggcgataaggcgctcagcgagctgcagtccgcatttgatacatacaaaaccgaacaaacggcgcttgagaacgctgcgctccgtgactgggcaaagcgttatcaggtgcaggttgccaccgggcaacaggccgaggctggctaccttgagcaaatagcccaacttgagagccagaacaaacaactacaggggcaaattaacgatgtcacacagcgctggattgatgaaaaaggcaagagccatcccattgagtgcgtgtttactcgcggtttcgtgcgccagtacaacgccgcactcggatatgacaacgcatccgtcggcagcggccattcagacacaactgccgccgctggcgccggcactggcacagcgtccgggcaacctgaagccgctgacgcctggctacgcgactcaggcgtctcccagcgtgacgtcctcgccaacatcatcgacaacgcgaagcagtgccgcatctggcgcggccagataaacgggctgctggacgaacgggagggattacagaaatga

SEQ ID NO: 157563 - DNA, 741 bp, Enterobacter cloacae
atgaacccctatatgtactggcctcaggttgtctgggccgtgctgtccctgctggtgctgggcatcgaactggcacggcacgggcaggcccgcacgggtaaacacaacttctggtggcagctctttggaacggcaacgttagcctggttactctggtgtggtggtttctttagtcaggctcatgccgcccagccgccacaggctgcactgcagtatcgcgatgatgtgatccgtaatgcccggcttgaatgggggatgtctgcgccggtggccgattttgccgcgcagctacatcaggaaagcggctggcgacctgatgcagtctcaccggttggtgctcagggactggcgcagtttatgcccgccactgccgactggataagccagctaatgccggggcttaagagccgcgagccgttcaatcctgcatgggctatccgggcgctggtcagctatgaccgctggctatgggagcgagtaagcgccgccaacaactgtgagcggatggccatggccctgtcggggtacaacggcggtctgggctgggtgctgcgtgacaaacggctggcatcgcagaaagagctggacagcgcccgctggtttggtcatgtcgccacggtcaatgccgggcgcagcgccgccagctggcgtgagaaccgccactacccgcagcgtatcctgcgggagctggcaccgcgctatctcacatggggaggcagcagctgtgtggagcctgattaa

SEQ ID NO: 157564 - DNA, 549 bp, Enterobacter cloacae
gtggagacaaatctggatcatgagtgggaaggccttctgttcgatgtaaggcgttccgttcgttaccataaccgccgcagagcttggtttgatcggctggatcagaccacgaatgtgttgtctctgatttttggctcaacggctatctatggtgttttatctcaggctaatacgaatttagccgtgctttcagcggctatcgtgactgctttttctgcgatcaatttggtcgttgcctcatcgcagcgtgcccgtgctcattttgattttgcacgcaagttctttgagctggagcagaaaatgatactggtgtctgacgtatcaaaagaaagtgttcagaccattacatctgaacgtttatctattgagaaggatgaaccgcctgttcttcgtgttctggacagcatctgctataacgagcaaatcctttcgatggactaccctgttgaccagatggtcgtcatagggttctggcagcgtctgctttctcctgtattagactttcaggcgggcaaactgcgaagagttaaagatatgaagcacgcctga

SEQ ID NO: 157565 - DNA, 528 bp, Enterobacter cloacae
atgcgcaaattgtttttaacgttggtatttgccttggctgggtgtggagataacgccgatcctgctgatgcgtccaccccagctaaggagcactcggttttcagcgttgaaactgacaacccggtcgtaaagcgcgaattaccttttattcgtcaacagctccccggtttagataagtatgcgagcagctttgaaaaattcgaagtatccgaggatcgcgagcgcccggtgacaaccgttcaatttcatatcaaagacgagaataatattcctagtgactacatagcctctggccataattgttttttgttcatatcaaataatgtccacgaagtgaaaatatctaaatcagcctgccaggctgtttttctcgataaaaccgatgttcccggaggagacctcatcgtgaaacttgataaggaaaatgttcctatgacagatgatggcaaggccccacgagaggggtgcttgaaggttttttcaccaaatcctgatagcgattcttggacgtgtccgaggctgaattaa

SEQ ID NO: 157566 - DNA, 171 bp, Enterobacter cloacae
atgtgggtacttattttgtggatgttcacatcaggtactgaaggcgaaggccttgtcataacatctccggaatttactactgagagtgcctgcagggcagcattccaggaagttaaacgcgtcaatgccggtgaaatttatcttcgcggtgtatgcacaccaaaggactaa

SEQ ID NO: 157567 - DNA, 192 bp, Enterobacter cloacae
atgccttcattactattacagtcactgtttccgctcgtctttataatgttacttggatggctaagtggaaagctgggatattcccggcgtgaagatgcaaacgtcatggcaaccgtggtgattcgtttcgcccttcctttccatcttttttcggtgcattgcataccgatcccaataaaattaagaacctga

SEQ ID NO: 157568 - DNA, 390 bp, Enterobacter cloacae
ttgctttttgttcagcgcggcgccctgcccgacattggtattctcacaggccgcgtattgctgcagacggcagaagaaacagtctccgcaggcaatgacaaaggggatcaccacgcgatcgcctttttgcaaattcttcacctctgcgccgcactcgacgatctcccccataaactcatggccaaaaatgtcgccgtgctgcaccttcgggatctttccgcgatagagatgcaaatcggagccgcagatagccgtggccgtgacgcgcaaaatgatatcgtcgggctgctcgataatgggatcggggacattctcgacgcgaacatggtgcggaccgtgatacgtaagtgctttcatgcgacctccgaaaggttccaggtaagtgtataa

SEQ ID NO: 157569 - DNA, 597 bp, Enterobacter cloacae
atggtggaaacacaagtgaagttcatcgtggtcggtcaccataagcggattgagcaggcaagcgccttggctgccgcaatagggccagcttgtacgatgctgattgatgagcaatatagcggagctaatgccggacatcggcgcgcgcttgagtgggcatcgtggcaggattgccgtgtagttattctggaagacgatgcgctgcccgtcgctggctttactcagctggtgggcgaatggctgtatcgcttccctgattcacttgtgagcttttacttgggcactggccgaccacctcagtatcagatgcaggtagccgaacgtctgattgttgctgacaagacacggtctgacttcatcacgctgccgcgccttatacacggcgtgtgctacagcgtaccgcctcatagcatcagccgtgtgctatctcaatgggatagtgataagccagctgattttgcagtgggtgatgcctggggcggttcagtggtctatccgtgttactcgctggtggaccacgctgacggcgaaccggttgagcaccaccatgattcagcgccacgaacagaacgccgccgggcgtggaggttagcctga

SEQ ID NO: 157570 - DNA, 783 bp, Enterobacter cloacae
atgcagccaggcatgtttggactgggattggcaaccggtgcaattacaactaactcgactcacgtcagttcgctgatgaacgacaactttgtgactaagggaattgggctatgtacattcaggaatgatgctgaagttaccggtggtgatacacctttttatcagtattctccgtcgttatttttcaggaccagagatacatgggctgtattcaactgccattttaacggtggaccgataagggtttttgcaggtggcattagtgatacaaatttaatcatctcgacaaatggcagaatactatgggacaccaaaaatactgctgtagacagtaatggttttatcaagcaagcatctcctgtcgtgaaaatcttcgctgatggtaagtatgaaactaacgacgaatcagaaggggttacggttactcgtctggaagtagggcagtaccttattgaaggctgtaaagcactcaattcagacgctgcctggggtggtatcgacggaggatttgagattcccacagacaggaataaacaaccgctgatttggctggattatgaggttaatgccgatggttctgtgttggtcaaaacctatcaccgtacctaccctgacgcaccagcattcgccagaaacgaacaggatggcgtgagtaatggcgatccagtcgacattcctcgcgaccagtttatgtccgttcgtgtcgaaatgcctgctgattctttatacaaccaaaagctcagatccgcagagcaggccctcattgcaggtataggtgaataa

SEQ ID NO: 157571 - DNA, 633 bp, Enterobacter cloacae
gtgaccatagatgccgttttcaaacttgaacgcgtaaccgccatcggcagcaatgagcggccaggtgaagtacggctcttgcaggttgaacatcagggcggatttacctttcgccttcagctctttatccagtttcgggatctcttcccaggttttcggtgggtttggtaccaggtctttgttgtaaatcagagacagggcttcaaccgcgatagggtaagcgatcagcttgccgttatagcgaacggcatcccaggtgaacgggaacagcttgtcctggaaggctttatctggcgtcacttctgccagcaggccagactgcgcgtaacccccgaaacggtcatgcgcccagaagatgatgtccgggccgtcgccggttgctgcaacctgcgggaacttctcttccagcttgtccgggtgttctacggtaactttgatgccggtatctttttcgaattttttgcccacttcggccaggccgttatagcccttgtcgccgttaatccagataaccagcttgccttcttcaattttggcgagcgctggggcggaaaccatcattgctgcaagggcggacaatgcgaaaacgcgtgcgccagtcttgatattcatatctgccatcctttttggtga

SEQ ID NO: 157572 - DNA, 366 bp, Enterobacter cloacae
atgcaaatttcaactgcaccgaccacggtgcctgtttcgtcacgcctgtcgcctatcgaggtctggcagatactactcaaacatcttctggcacaacactatggtctaacccttaatgacactccgttcagcgatgaaagcactattcgtgaacatatcaatgctggtatctcactcagcaacgcagtgaattttatcgtcgaaaaatatgagctggtacgtactgaccgtagtggatttacgattatggagcagtctcccttcatcagcagtatcgacattcttcgtgcccgccgggccactggattgatgaaacgtcagggttataaatccatcagcaatatcactactggtcaccttctctag

SEQ ID NO: 157573 - DNA, 339 bp, Enterobacter cloacae
atgactaaagaacctgttcaggaacacgtttggggtttacacagtcaaaccgttccatcattcagcgcccggttagttcaggaaggtcgacggctgcattttctggccgaccgtgccacgcttctcggcacattcagcccggaacaatccacagcgctggatgcgatcttcccggcattaacccaggatatggaaaccgctctgcttagcggcaaactcgacccacgtgaggctaaacaatacatccatacccgcaacggtttcgcctgcgagtcagatacgttggggagttgcggttacgtttacatcgtaatttatcctcaatcagaaactagctag

SEQ ID NO: 157574 - DNA, 222 bp, Enterobacter cloacae
atgaaaatcatcagcaagcgccaggcgatgatgctttaccgccaaacgcccggttcacgtctggcaacgtactgtaaaggtcgttaccgctggaccggtagcgtctgccattacaccggtcgccacgtccaggatatcagcggcgtactagccgtttttgctgaacgtcgtcaggaccgcgacggcccgtatgccatcctgcgtagcgtgacgctacgataa

SEQ ID NO: 157575 - DNA, 501 bp, Enterobacter cloacae
atgagcactgtaatatcactgatacccgcatccgctcccgccgtaccactagccttaacgccatatgcacagcgaacaattcaaagggccttgaacctgctggataaacacctgcgacagcccggcgtgtcattcctctccgcaaccgaaacccgtgactggttgcggttaaagatggctgtgctggagcgggaagagtttgtcgctctgtttttggataaccagcatcagttgctggcctgcgaaactctgttcaccggcaccatcaaccatactgaggtccatcctcgcgaaatcgtaaaggcagctctgcgacataacgcagcagcggtgatcctcgcgcataaccatccctccggcatggcagagcccagcagggcagaccgactgctcaccagcaacctgcaaaacacgctgttactggttgatgtgcgggttctcgaccatctcatcatcggccaccgagagatcgtctcgtttgccgagcggggatggctatga

SEQ ID NO: 157576 - DNA, 819 bp, Enterobacter cloacae
atgcgcttagcttcccgctttggcagggtcaatcttatccgtcgcgaccgtccattaacgcacgatgaaatgatgaaccacgttcccagtgtattcagcgctgaaaagcatgaatcccgtagtgaacgatatacctgcattccaactattactctacttgaaagcctgcaacgggaaggtttccagccgttcttcgcctgtcaggcccgtgttcgcgatcccggtaaacgtgagcacactaaacacatgcttcgtctgcgtcgggaaggccaaatcacgggtaagcaggtgccagaaatcatcctactgaacagccacgatggttcaagttcttaccagatgctgccgggattatttcgcgcggtttgccagaacgggctgatatgcggtgagagttttggcgaggtgcgagtaccgcataaaggaaacgtggtagagaaagtgattgaaggagcttatgaagtgcttggggtttttgaccgaattgaagaaaagcgtgactcaatgcaaagcctcatgcttccccctccggctcaacaagcatttgcgaaagcggcgttgacctatcgttttggagaggagcatcagccagtaaccgaagaacaaatccttgcgccacgtcgctggcaggacgaatccagcgatctgtggaccgtgttcaatcggctacaggaaaacctgataaaaggtggtttgagcgctcgtactgcccaaggcaagcgtagccatacccgcgcagtgaaagggatcgatggcgatctgaagcttaaccgtgctttgtgggtgatggctgagcaaatgcagcaggcgctgggctga

SEQ ID NO: 157577 - DNA, 678 bp, Enterobacter cloacae
atgaaaattcagacagccattgcaattgtgttatctgccgcttccgtatcggctcaggctggtaattgggctgtgaaaaacggctggtgtcagaccatgactgataatggtcaagcgctggtgatgctgaaaaatgacactattggcatattcggacagcttcaaggttgccctaatggtcctcaggaattaatggggagccgcattagtgtcaacggcaatatggttcccacttcccagatgtgcaaccagcaaacaggatttaaagcagttgaagtcgaaggggggcaggctactacggcagctaaaaaggcaattgtctccattgccagccaggaggtttcaaccctgcaagtttttggcggacagatgactttcacccgtggcgacatgatgagcgtctgcccgaaatacgtctctgctcttcccaccagcgccgggagcagttcaccagagataaataaaggttcagtcatgaaagcagccaaacaggcgtatacaaaagagtatgacagcgaaaccgctgaggccgctgattttggcagctatgaagtgaagggaaatacagtggtatttgaagtctacaatgctggatatcgaacctacgacaaggtagtggtcactgtaggcaatgatggcaaggccaccagtgcaaaagtagaatatatgggtcgttaa

SEQ ID NO: 157578 - DNA, 894 bp, Enterobacter cloacae
atgtccgattcccccgacacgcagtccgccagcgatgccctacgatcctcgctttcattcttatcccaacacgcttgcgatcgaattctttccagactccagcacgcaattcattacgaacccgtaatcggcatcatgggtaaaactggtgccggtaaatcttcactctgtaatgctctattccagcaaccggtatgtcttaccagtgatctcatggcctgcacccacgaacctcagcggctggtgctgactgttggtgcacgcagcatgacgctggttgatttgcctggagtgggagagactccagaaaaggatgaagcctatctctcaatgtatcagcaactactcgctgaactggatttgattatctgggtcatcagagccgacgaccgtgcacgggcaacggatatcgccacacatcgggctctgctgaacgccagtgccgacccatcgagatttctatttgtgctgtcccaagctgaccgtgtaccaccagtacccgatggaaaagaatggcaggtgctccccgatgcagagcagtgcctgtctctggccgctatcagctcactggttgccgtacagctcccctcctcttttcctgtaatgcctgtatccgcacataccggctacaacctgtcagctctggtggagctgatggtacatgccttgcctacgcgggccagtagcgcagtctatcggcagctgaaatctgaccataaaagcgctgaaagcgactctgccgtgcggcagcgatttggtgaattagctggtagcgcttttgattccgtgatggaccaaaactcgctgccgtcatgctggcgggctttgctatgccggttacgtgaaaaattggtgcagttagctactggcctctgggacaaactcttcggctga

SEQ ID NO: 157579 - DNA, 150 bp, Enterobacter cloacae
atgtctgttgaaatcgtgccgtatcgctggtgcgtgggaatcttccggcaatgccacgtcgattacctgcaacatcaggtcgcgcagtctctgagcaagacagtgacgacaaacagccactttgtgagatggatcataggcatggtttag

SEQ ID NO: 157580 - DNA, 228 bp, Enterobacter cloacae
atgacgccggaagacccgcgattacccgatgcacagatcagtgccctgtttttcagcgtcaaagggatcctatatgagagtcagaacacaaaacgtctgaccatccttgcatcccgcgccgcgcagtttatcgttgccgaaggcgatggacttctgtacaacgaggagaatgtcatccgtattttctctgacctcgtgatcattataagcaggggcgttacaaattga

SEQ ID NO: 157581 - DNA, 981 bp, Enterobacter cloacae
atgagtcatcaacttaccttcgccgacagtgaattcagccgtaagcgccgtcacaccagaaaagagattttcttgtcccgcatggagcagattctgccatggcaaaacatggtggaagtcatcgagccgttttaccccaaggcgggcaatggccggcgaccttatccgctggaaaccatgctacgcattcactgcatgcagcattggtacaacctgagcgatggcgcgatggaagatgctctgtacgaaatcgcctccatgcgtctgtttgcccggttatccctggatagcgccttgccggaccgcaccaccatcatgaatttccgccacctgctggagcagcatcaactggcccgccaattgttcaagaccatcaatcgctggctggccgaagcaggcgtcatgatgactcaaggcaccttggtcgatgccaccatcattgagacacccagctcgaccaagaacaaagagcagcaacgcgatccggagatgcatcagaccaagaaaggcaatcagtggcactttggcatgaaggcccacattggtgtcgatgccaagagtggcctgacccacagcctggtcaccaccgcggccaacgagcatgacctcaatcagctgggtaatctgctgcatggagaggagcaatttgtctcagccgatgccggctaccaaggggcgccacagcgcgaggagctggccgaggtggatgtggactggctgatcgccgagcgccccggcaaggtaagaaccttgaaacagcatccacgcaagaacaaaacggccatcaacatcgaatacatgaaagccagcatccgggccagggtggagcacccatttcgcatcatcaagcgacagttcggcttcgtgaaagccagatacaaggggttgctgaaaaacgataaccaactggcgatgttattcacgctggccaacctgtttcgggcggaccaaatgatacgtcagtgggagagatctcactaa

SEQ ID NO: 157582 - DNA, 276 bp, Enterobacter cloacae; identical to SEQ ID NO: 118716

SEQ ID NO: 157583 - DNA, 174 bp, Enterobacter cloacae
atggaaaagcccgtgatgctcatccctgagcgctgcgtggctgatcccgatgttgagcaggttaacgccctgcgtaaccagatccggcgagccgcaaagcgccgggctcaggaaacgcaggagcgtgccatggctgcgccagattatcactggagcgcaccgcgccgcagatag

SEQ ID NO: 157584 - DNA, 339 bp, Enterobacter cloacae
atgacttttaaccgcacttacgcgccagacatcgatcagaccttccagcagggaggccgtggtggcagcgccgagccgttccagaatcagccttatgcgccgggtgaagctgggggagccgctggtcgccagtccgccgcaaagggcgactttgacggcatcacgttgaccgatcaccctgtctacggcaaagccgcaggccataaccgtgatcacctctccggcgagtgggttgtggaggctggcgcggtatcagtccgctctcgcgtttctgctgctgaggctgcgaacaaatgggagcaggctgtggcgtctgctgtcgcggcaggtaaaccgtaa

SEQ ID NO: 157585 - DNA, 930 bp, Enterobacter cloacae
atgttagatcagcaatataaaagccgtgcgactaagtacaaaactatggttgatgaaatgcttgctgaaacagaccgtttaaaacaagcacaaaatattgccgcaattgccagtgatccgaatgccacaccagaggctaaggccaaagcagcagcagcgggtaagacgtggacaggtgacacagcaagtcagggattagggtacaagaacccgttggacttctcaccagatccaacacaggtacagcaagtaagtactgaacagcaagagaaccaggatggggctaaagctctatacgatgccaaagtaattggattccaggagtaccaggatcagctaacagcgattcaggccaacgccgatatcaaacgtgggcgattaaccgcagacgcactatcaaacactttaggtatgtgggctactggtgcgggtgatgtaggaactatcatggctggcgtgttcggagagtcctcggcagcggctaaggcagcttttgccgtaagtaaaggtattgccattgctcaggcagtgatcaacatccaacagggcatatccgaggctatcaaacttggttggcctatggggatcgccgcaggtctacaggtagccgcacagggtgctcaactggtcagtactatcaaaggtacaactattcagggtcaagcccatgatggttgggattcactaccaagtactggtacttacaatcttgaaaaaggtgaacgtgtagtaggtaaatcattgaaccaggatctaactaagtatctaagcaatcaagatagcggtggtactggtgatattaaaattgacgcaccgttaattattaatagtaatggtcagatttccgatgctgattttcaaaagatgtgtgataaacacgccgatactattgtacaggcaacacgtaaatctcagaagaataacgtataa

SEQ ID NO: 157586 - DNA, 543 bp, Enterobacter cloacae; identical to SEQ ID NO: 100889

SEQ ID NO: 157587 - DNA, 543 bp, Enterobacter cloacae
atggttagtaagtttgccgatgctctttataatttcaatcttcaaacattttataataatgaattgggattaccctatgaagatgaatacgcaaaagaactagatatacttcgattggaatcattacgtgaagatgaatttaatatacatagaataccagaatcatcaccgaaagtactagtacgtgcttctgctagttttattggtgaaccttcttctgtaatagaaacattactcacctcatccaatagaactacacgacatgtaataccgcgtaggtttcctggtgtattgaggtttagccagtacacaaaagtaccgtttatcatttgtgtttgcttcgcgttgttcgcggcgttcttatcattcttgtctgttactaatgggcttagtacttcactagtttcaatagctggtagaaatttaccatccttgaatttcttcacttcagattcagaagaactaccaaaagcaaaattacatggatcatttgccattaggttaaatgctatggattgtaaaacagtggtttttaaaagctga

SEQ ID NO: 157588 - DNA, 567 bp, Enterobacter cloacae
atgcagatcctgaaacaggccgatgtggtgatgcttaactacctgctgccggaacggtttacgccgcagcagtgtgccgccaatctggcgttttatgagccacgcacgatccatgattcgtcattgagcaaagccattcacgggattgttctcgcgcgatgcggtgacacgcagggggcctatgccttctggcgtgatggcatcggcattgatttgggtgacgatccgcacagcagtgatgaagggatacatgctgccgccaccggtgcgatctggtctggcgcggttcaggggtttgctggcctacaaattatcgaaggggaactgcatcttgcgccgaaactgcctgctcactggcagaaactggcattcccactgcggtggcgcaacgcaaacctgcatttcacctatgaaaacgaggtgttaaccattgaaacgaccgcacctgccaagctaacgctgtggggcaaaacgctacatgtgtcggcgcgaaaagttatcacccgtaaggactttcttgcatctgaagatgggaccgctaccacggaggggcaccatggcgcttaa

SEQ ID NO: 157589 - DNA, 282 bp, Enterobacter cloacae
atggctcaactgtctctaaaacatattcagaaaatctacgataaccaggtccatgtggttaaagatttcaacctcgaaatagaagacaaagaattcattgtgttcgttggtccatcgggatgtggtaaatccacgaccctgcgcatgattgccgggctggaggagatcagcgccggtgagctgatcattgacggggtctgcatgaatgatgtccccgctaaatctcgcgatatcgcgatatcgcgatggtcttccagaactacgcgctttacccgcatatga

SEQ ID NO: 157590 - DNA, 267 bp, Enterobacter cloacae
atgaatatcgcgaatggaaaaaaaatagcgattctggcaacgctctgcggaggtctgttttctggcgcgtgttcagccaactcggtcaatattgacattacaggcacggttgttgcctcaccctgtgtggtcaatggagatagcccctcgctggcggtaaaattaggtgacaatatacaggctgatagtctggccactgccggaagtgcaacaaactggactaactttacgcttgcattaacaaactgccctgcttcaacgtcctga

SEQ ID NO: 157591 - DNA, 612 bp, Enterobacter cloacae
atgaaccaatcacaatttcaacaggcggctgttattagcgccgggttagctgcgcgctggtttcagccgattacggatgcaatgaaagagttcggcatcactgagccaaaagataaagcgatgttcattgctcaggtaggccatgaatcagcgggattctctgcgctggtggagaacttcaactacacgcctgctgcgttactgacaacgtttggacgccgggtaacgaactaccaggcatcaatgcttggacgtgccaacggtaagccagcgagtcaggaagctatcgcgaacctggtatacagcaaccgcctgggtaataaagctgctggtgatggctggaaataccgtggacgtgggttaattcagattaccggtctcaccaattaccgtgattgcggcaatggtctgaagcttgacctggttactaaccctgaactgctggagaaagacatcaatgctgcgcgttctgctgcatggttctacgcctccaaaggttgtctgaagtacaccgatgatctggtgcgcatcactcagattatcaatggcggtcagaacggtatcaacgacagacgcgtgcgttacgccaaagcaaaagcggtgattgcatga

SEQ ID NO: 157592 - DNA, 267 bp, Enterobacter cloacae
gtgctgcactttttgccgatgaatgtaaagcgttccgaatatgccagcctcctcctgatcgaaccatacacagccgcaaaccccttcttgaggttccttgatcgaataccggatccgggaaacttccaggcgcgcttgcgtagtttgtatggcaaggtccattgcagtcttcagccaaggttcagcagctgcatgtatggcaaggaactgctccaaagtaagtcgccggcggacctttttatcaacatgacctgcccccacgattag

SEQ ID NO: 157593 - DNA, 744 bp, Enterobacter cloacae
atgcagatcgatttaacaggtaagaaagcgctggttaccggcgccagccgtgggttgggccgtgcgatagccctgtcgctggcccgcgccggtgccgatgtggttataacgtatgaaaaatcagccgataaagcccaggcggtcgccgatgagataaaagcgcttggccgatacggtgaagccgtacaggctgacagcgccagcgcgcaggcgattcaggatgccgtcacccatgcggcgcgcgcgctcggcgggctggacattctggtcaacaacgccgggatcgcgcgcggtggcccgctggagtccatgacgctggctgacatcgacgccctgatcaacgtcaacatccgcggcgtggtgatcgccattcaggaagcgctggtgcacatgtctgacggcgggcgcatcattaacatcggcagttgcctggcaaaccgcgtggccatgcccggtattgccgtttactccatgaccaagtcggccctcaactctcttacccgcggcctggcgcgcgatctcggcccgcgcggcatcaccgtcaacctggtgcatcccggtccgaccaacagcgatatgaacccggaggacggggaacaggcggaagcccagcgccagatgattgcggtcggccattacggtcagccggaagacatcgcggcggcagtcactttccttgccagcccggccgccgggcagatctccggtaccggtctggacgtggacggcggtttgaacgcctga

SEQ ID NO: 157594 - DNA, 546 bp, Enterobacter cloacae
atggatattattagaaattcagtctggctctctcaaggcactgatttgcttgcagaggggctttatcgtgttttggattttgacagaaaggtcgatttgttaattttgtttaaaataaaatcagaaagaacgggtaagccaattcctttctcattttcattgtttaaatattatattgaatcaaatagcataacttgtaaagattatatatacccttcatatatgttagtagatgagaaagaaataacagatgaagacaggggaaggcgagatgaaaattacaatatcattaaagatcttgtagatgacagaatgtttctgttcgactatgcattacataaaaagtcgcaccttttaatggattactcaagaaataaaaaaatatcacaatatactatcagaacgcttctggcgttgtactggcgacatgggcaggatgtttatgcattactacccgcattctcgaactgtggtgccgctgggaaaagtagaatcaaacatgaaattaaacttgggaattccaaagaaaaacagagcattacctaa

SEQ ID NO: 157595 - DNA, 264 bp, Enterobacter cloacae
atggagaaggcgatcgtagttaatcgacaggtgctaacctctcggccccaggctgtgttgatggttcatagcttgaacggatataccgtttgcgttattcctgccgctttctctctggttgtcggacaggaactgtacaggccagagcatcaccgcggggtctggagagtatcagggagcaatgatctattccctgcaaatgtcactggatcaatgacacttgatgaggcgcagcgcgctttcaatcaaatacttagtcagtag

SEQ ID NO: 157596 - DNA, 288 bp, Enterobacter cloacae
atgcaaacgaaacttattgccgaattaaagaaaatcgaacatggaatcaagaaaaatgctgggaagaaaattccatattcccaccctgcatacgatcaattaattgaggacttttcagctcaagataagatattcaaagatgttgatccaaatgatgttgattaccagattgctcatgacctgatcctcgctattgataatgagcttaccgctttacatgatagtgagcagataatgggctcctttggagacaacctaccaagcaggccaccatttaaacgtttataa

SEQ ID NO: 157597 - DNA, 201 bp, Enterobacter cloacae
atgcgtaacgcacggccacatcagaattatggtgggctgggcggggcaaccgaaaggttggccgggtcctttgtagccggtagtctcaacctcgttcagttcaccaccagcaagattgagaccttcggtggtgatttgccaaactacaaaggtgatcactatgaatacccaaatcaaaccatctccagacgcagtttttaa

SEQ ID NO: 157598 - DNA, 270 bp, Enterobacter cloacae
atgtcttttaaaaaagttagcatgggtatggcaattgcactggctctgagcgcaggttccgcagttgcagctgttccaggtgacacaggtacgattactttccacggcatggtgtctaacaccacttgtaaagtttccctggatcagaaaattgaccagagtggtaatgatttcgatgtcaccctggacaccgtatctgttgctgattttgcaccactgcactgggtactaccagcaccctgggccagaaaaaattcaacctggcgctga

SEQ ID NO: 157599 - DNA, 1761 bp, Enterobacter cloacae
atgactgttcgccttaaatcagtatctatcaacaattttagatcctgcaaatcaacaacagctatcctaagaccttttactgcactagttggatataataacgcaggtaaatcaaatattatcctagcaattaaatggctcttggatggctctaccatttctgaggatgatatgtatgaccctcaacaacctgtatcagttacgggggtcatcgaaggtataacagaagatacattaactctactatctgaagaaaatcaacaaaagatcgccccctttattatccatgaaactttaacattttcaagaacgcaagaatttgatgcagataaaggaaaaacaaagaaaacccttgatgtatttgatggtacaaattggaagaaaaaccccggaggtattgatggtgcaatatccaatatattccctgaaccaatacacatacctgcaatgtctgatgccgttgaagatgcaacaaaatacaaaacctcaactaccataggaaaaatattattagcaatagtttcaggaataaagaaagagcatgagaagaaattctctcaaaatatttcagaaataggtaagtatctctcccacgatggagaaagccgcttagatggattaaacaagattgacacaggagttaatgaaaaggtaaatcagtttttcccagatgtaagtgtgaaaattcatttccccactcctacacttgatgacatattcaaatctggcactttgaaggtttttgaatcacgtgaagatagttctgtgatgcgtgatataagccgtttcggacacggaacccagcgttctattcaaatggctctaatccaatatctggcagagattaaaaaaaacagcgaggatacaaaaaaatcaaacacattaatatttatcgatgaaccagagctatacttacatccatcagctattaactcggtcagagaatcgctcattacattaagcgaaaatggctatcaagttatcatatcaacacattccgcaagtatgctttctgcaaagcatgcttcaaatgcaatacaagtttataaagactctaatggtacaatcgcgagaaaaaccatctcggaaaaaattgaagaactatacaaagagtcttcaccacaattacactcagcgttcagtttatctaactcatcatatttcttgttttcagaggaagtgttattggttgaaggaaaaactgaaaccaatgtcttatatgctttatacaaaaaaatcaaaggaaccgaactaaacccaactaaaacatgtattgttgcagttgatggaaaaggaagccttttaaaaatggcaaatgttatcaattcaattggcattaaaacaagaatcttagctgattgtgattttctatctattctcttgacgaccacacacacagagtcccttaaatccgagtgtgatgatttacttactgccattaatcagtcgacaaacaatggttctttatcactaaatactcctataacgtcaattgactcacttaagggaagctcgagcaaagactttatcaaactatgcaatcacgatgatatcctccaacatatccacaatatccatcagaaattaaaaaatgagggagtttacatctggaggttaggtgatatcgagcaagtatatgggtttggcaaaaaacaaacagagtgggatagtcttttagagtgcttaagtgatgatagcctagatgtaagaaatacgatcaaaaactatcatgaaatggaagatttcataaaatggatttaa

SEQ ID NO: 157600 - DNA, 612 bp, Enterobacter cloacae
atgattattttcgcttcgataattatcaccctcatcattgtctatttagcccctcgctacattaagaaggaggaaatgaatctcttatcttcatgtaatgatattgatttaaataaaatctatacaaaaagctattttttaggtggtgcatttatagtagcacctcagcttcttttaagttttggttcatttaattggctatatcaagcgtttttcatcactcttggcattgctgcctattttgacatcaaaaggaattggattcctgaccctgtaatatttataactttaattattaatttcctatcgatcatttctacccaaaatgtcgatttttcttctgcactttcaaactctttgattttcatatttccatattgtttgttaaacgctttagcgttcatagctgtgaagaagtatattttttttagtggcgacatctatattattatttctatatcattctcaacattccctatggttgggttcatcacaaccacactagcaattttctctgctctactatttatgctcatatcaaaaaaacgcgaaatcccttttattccattcttgtttttttcatttctcgtttctaatctcgtagttaattaa

SEQ ID NO: 157601 - DNA, 1227 bp, Enterobacter cloacae
gtgtaccacgctctttcaccggaacatttgagccatgataattacacatttgttccgctttgtacaaatcaattttgcaattttgatttagtcaacaatttaagagcatcaccagctcatcggaacaaaacgccgctcacatcatcacggccagcgccggaacaaaacgccgctcacatccccacggccagcgccggaacaaatcgccgctcacatccccacggccagcgccggaacaaaacgccgctcagcatccccacggccagcgccggaacaaagcgccgctcagcatccccacaaccagtaccggaacaaagcgccgctcacatccccacaaccagtaccggaacaaatcaccgctcacatccccacggccagcgccggaacaaaacgccgcacacctcaccacggccagcaccggaacaaagcgccgctcagcatccccacaaccagtaccggaacaaagcgccgctcacatccccacaaccagtaccggaacaaagcgccgctcacatccccacagccagtaccggaacaaatcaccgctcacatccccacggccagcgccggaacaaaacgccgctcacctcaccacggccagcaccggaacaaagcgccgctcagcatccccacaaccagtaccggaacaaagcgccgctcacctcaccacggccagcgccggaacaaagcgccgctcacctcaccacggccagcgccggaacaaagcgccgctcacctcaccacggccagcaccggaacaaagcgccgctcacctcaccacggccagcgccggaacaaagcgccgctcacctcaccacggccagcgccggaacaaagcgccgctcagcatccccacggccagcaccggaacaaaacgccgctcacctcacccgccccagcaccggaacaaagcgccgctcagcatccccacggccagcaccggaacaaaacgccgctcacctcacccgccccagcaccggaacaaagcgccgctcagcatccccacggccagcaccggaacaaaacgccgctcacctcacccgccccagcaccggaacaaaacgccgctcacctcaccacggccagcgccggaacaaaatgccgctcagcctccccaccccagcgccggaacagctcgcagctcagtacatcagcatgccacgaggtacaaaccacatcccggagacaagcgaaactccgcatcagttagtaatcacatgcacataa

SEQ ID NO: 157602 - DNA, 186 bp, Enterobacter cloacae
atggttattgagcttctgcatgatatatcggagatggtttcaaataatgaaaataacaatagagacacaaccaatcttgaaacattaatgtatttaagattgctttcaactccagagcatcgtaagaaagttaatgcggaattaaatagattaggaatgaaacctgtgaggattgataatgagtga

SEQ ID NO: 157603 - DNA, 177 bp, Enterobacter cloacae
atggcattacgctacgagctggaatccacctacgacagcattaagtggtatgaggatgagaaagcggcgggattgtggagcgatgatcatgaaatagaatataacggcgagcttaaacttatcaaagtcataaaagccagaatcacgcgactgagaaatatcaaatcaataaggtaa

SEQ ID NO: 157604 - DNA, 282 bp, Enterobacter cloacae
atgaaaaagttaaagactactgtatctgcaattgtattttcactggctacatcctttcctgtcttaacgtttgcggctcagcctgtaactgatgttgactctctcaatgagttgaagcaaatccgcgctattcttgagcagaacgttcaaaaaaactttacatgtactgacggggaaaaatcatatactgctggtatggatgtaaaccgtaatgggaatcagtataagtgtgaagttaaaggcgatcatactgagtgggttttcattccgcgcatgggttag

SEQ ID NO: 157605 - DNA, 588 bp, Enterobacter cloacae
atggcgactaaagagactgaaatactgctgggtgatgaactctgcgataacgagctggagccagagtggttagctcatgggatcgttaatctgaacagtaaatacgtgccgggcgaggatgaaaagaaacgctatcaaagcgctgacattgttaaacatatcatagaatttgattcgtcgatcaaatggtctgtggattctattcttgatggagtcgcaaaggctgaaaacggcggctattcatctgccgaactgtccgaactaaagcaagtgacaacactgtatttaaaaaatttaaaagacattcaggagagagtaacccaacaatgttatgaacttgcagaaaaaactctactcgctcatggaattaagttagatactgagagtgattttgatgttgacggctatcagtttaaagcaacagctgttactgatgagattaattatatagtgtctgatttgttatctcccggtgacatcgctaatattaatatgagtctttataatgtggttgttacaggagataaaaagatacgaaaaactcagttgccgacacgattgataatgaatctatggcttaattcttag

SEQ ID NO: 157606 - DNA, 168 bp, Enterobacter cloacae
atgagccttaagaataaaatgtttgatattccaggtatccatgagtcagtaaaaagcgattttgaagccggactgattactctcgaacaagctgccactgaattttataaaggtaattggacggcttttgtcgatattgaatataccaaaaaacaacttggtatttag

SEQ ID NO: 157607 - DNA, 192 bp, Enterobacter cloacae
gtgcgtatttctatagtccagatgataaatgattactatgaaggtgatcgggaaaaagcagctaaagcagccggaatcaattcagttcaacagcttaataatctggtttcaaaaggttatgaagtagcgaggttagataatggtgactggatcatgttgacgagcaaaacgaaaatatttaagcaggcgtag

SEQ ID NO: 157608 - DNA, 309 bp, Enterobacter cloacae
atgatatcttttattttagcgtttcttttactgtccttgtttttcgctggcctgattctctttccatataacaaagtagctcagtggctaaaaggacatatacacatacgcactttctgcgctggtatcgctttgattgcgttcggtttcatatttgatagtgaacaggctccagttaaatctgcaaatgatatgagtttaatccttcctcagtatgcttccggtattcatctatttattgttgcctccggtattatctgcttcgtggcctccttctttatcaaccgccttttcagtgataacgattaa

SEQ ID NO: 157609 - DNA, 195 bp, Enterobacter cloacae
atggaggcagtcacggcggtgcgctacgtgaattctgcgattttcgcaggggtgacgggcgaaagaatttacgagagaacgcaggaaaaaaggccgctggcgcggcctaagagaaggttatggtgctggaggagtccaaccgtggcgttcagcaagtatctgccattcgggttttttggcctcaatatatggtag

SEQ ID NO: 157610 - DNA, 435 bp, Enterobacter cloacae
atggaaaacaatttggagagcctgaccattggcgcttttgccaaggcggccggggtcaacgtggagacgatccggttctatcagcgcaagggcctgctgccggaaccggacaagccttacggcagcattcgccgctatggcgcggcggatgtgacgcgggtgcgattcgtgaaatcggcccagcggctgggcttcagcctggatgaaatcgccgagctgttgcggctcgatgatggcacccactgcgaggaagccagcagcctggccgagcacaagcttcaggacgtgcgcgaaaagatggccgacctggcgcgcatggaaaccgtgctgtctgaactggtgtgcgcctgccatgcgcggaaggggaatgtttcctgcccgctgatcgcgtcgctacagggcggaacaagcctggcagggtcggctatgccttag

SEQ ID NO: 157611 - DNA, 351 bp, Enterobacter cloacae
atgtctgaaccacaaaacgggcgcggcgcgctcttcgctggcggactggccgccatcctcgcctcgacctgctgcctcgggccgctggtcttggtcgccttgggattcagcggggcatggatcggcaacctgaccgtgctggagccctatcgcccgattttcatcggcgcagcgttggtagccttgttcttcgcctggcggcgcatctaccgccctgcgcaagcctgtagaccgggtgaggtctgcgcgattccccaagtgcgagcgacttacaagctcattttctgggtcgtggccgtgctggttctggtcgcgctcggatttccctatgtcatgccatttttctactga

SEQ ID NO: 157612 - DNA, 276 bp, Enterobacter cloacae
atgaagaaactgtttgcctccctcgccctcgccgccgttgttgcccccgtgtgggccgctacccagaccgtcacactgtccgtaccgggcatgacctgctctgcctgtccgattaccgtcaagaaggcgatttccaaggtcgaaggcgtcagcaaagttgacgtgaccttcgagacacgcgaagcggtggtcaccttcgatgatgccaagaccagcgtgcagaagctgaccaaggcaaccggagacgcgggctatccctccagcgtcaagcagtga

SEQ ID NO: 157613 - DNA, 423 bp, Enterobacter cloacae
atggggatgatcacacgcattgccgacaaggctggcgcgctcggcagcgttgtttcagcgatgggctgcgccgcctgcttcccggccctcgccagcttgggcgcggccatcgggctgagctttctacaggaatacgaagggttgtttatctccacgctgttaccgctgttcgccgtcgtggctttgctggcgaatgcactgggctggctgagtcatcggcaatggcaccgcagcctgctcggcatgatcgggccagccatcgtgttcgccggaaccgtctggctgcttggcaactggtggacagcacgcctcgtatacaccggcctagccctgatgatcggcgtgtcgatctgggacttggtttcgccggtaaatcgccgctgcggcccggatggctgcgaactccccgcgaaacacgactga

SEQ ID NO: 157614 - DNA, 1686 bp, Enterobacter cloacae
atgaccaccctcaaaatcaccggcatgacctgtgactcgtgtgcgacgcacgtcaaggaagccctggagaaagttcccggcgtgcagtcggcggatgtctcctatacgaagggcagcgccaaactcgccgtcgaggccggcatatcgccggacgcgttgactgccgccgtggccggactcggttatcgggccacgctcgccgacgcgcccgtgcctccggtgggcggtggcttgctcggaaagatgcgcgaatggctaggtagcggcgacaaggctggtggtgacggtggcggattgcatattgccgttatcggcagcggtggcgcggcgatggcggcggcgctgaaagccgtcgagcaaggcgcgcacgtcaccttgatcgagcgcggcaccatcggcggcacctgcgtcaatgtcggctgcgtgccgtccaagatcatgatccgcgccgcgcacatcgcccacttgcgccgagaaagcccgttcgatggcggcatgccgcccacaccgccgacgatcttgcgcgagcggttgctggcccagcagcaggcgcgcgtcgacgaactgcgccacgccaaatacgaaggcatcctggatgacaatcccgccatctccgtgctgcacggcgaagcccgtttcaaggacgcgcacagcctgaccgtgcaactcaacggtggtggcgaacgtgtgctggcgttcgaccgttgcctgattgccaccggcgcgagtccggccgtgccgccgattcccggcctgaaggacacgccgtactggacttccaccgaagcactggtcagcgacaccattcctgagcggctggccgtgattggttcgtcggtggtagcgctggaactggcgcaggcgttcgcccgactgggcagcaaagtaacgattcttgcacgcagcaccctgttcttccgcgaagacccggccatcggtgaggcaatcacggcggcgttccgcgccgaagggatcgaggtgctggagcacacccaggccagccaggtcgcgcacgagggcggcgaattcgtgctcaccacggcgcacggcgagctgcgcgccgacaaactgctggtcgccaccggtcgctcgcccaacacgcgcagcctggcgctggacgcggcaggtgtcgcgctcaacctgcaaggcgctatcgtcatcgacgtcggcatgcggaccagcacgccggacatctacgcggccggcgactgcaccgaccagcctcagttcgtctatgtggcggcagcggccggcacccgtgcggcgatcaacatgacgggcggtgacgcggcgcttaaccttgccgccatgcctgccgtggtgttcaccgatccgcaagtcgccaccgtgggctacagcgaggcagaggcccagcacgacgggatcgagaccgacagtcgcaccttgaccttggacaacgtgccgcgtgcgctcgccaacttcgacacacgcggcttcatcaagctggtcatcgaggaaggtagtggacggctcatcggcgtacaggcggtcgcgccggaagccggcgaactgatccagacggcggtactcgccatccgtaaccggatgaccgtgcaggaactggccgaccagttgttcccctatctgacgatggtcgagggactgaagctcgcggcgcagacctttaacaaggatgtgaagcagctttcctgctgcgccgggtga

SEQ ID NO: 157615 - DNA, 366 bp, Enterobacter cloacae
atgaacgcctacacggtgtcccggctggcccttaatgccggggtgagcgtgcacatcgtgcgcgactacctgctgcgcggactgctgcggccggtggcgtgcacccctggcggctacggcctgttcgacgatgcggccttgcaacggctgtgcttcgtgcgggctgctttcgaagcgggtatcggtctcgacgcgctggcgcggctgtgccgggcgttggataccgcggacggcgacgaagcggccgcgcagcttgccgtgctgcgccagttcgtcgaacgtcggcgcgaagcattggccgatctggaggtgcagttggccaccatgccgaccgagctggtacagcatgcggagagtctgccatga

SEQ ID NO: 157616 - DNA, 237 bp, Enterobacter cloacae
atgaacagccccgagcgcttgccgaccgagacacacaagccgttcaccggctacctgtggggcgcgttggccgtgctcacctgtccctgccatttgccgattctcgctgtggtgctcgcggggacgacggccggcgcgttcatcggggagcattggggtattgcagccatcacgctgaccggcttgtttgtcctgtccgtgacgcggctgttgcgggtcttcaaggaaagatcgtga

SEQ ID NO: 157617 - DNA, 237 bp, Enterobacter cloacae
atgtcgaagcttaagctaggccccatcgcggacgacaagccgcttaaggtacaggtcgagctacctgcagctctccaccaggaccttgttgactacgcccacctattgggccgagagcaaggtcagtccgctgttgacccagctcggttaatcgtcccgatgttacaacggttcatcgcgacagaccgtggcttcgccaaagccaggcgaacgttgacgccggggagcgccgattaa

SEQ ID NO: 157618 - DNA, 744 bp, Enterobacter cloacae
atgactgaaaacggcgcgcaaatcgcgtggcagtcatgcgtgatcgacgaaatcgtccagcaaaccccgagtatcaagagcttcttccttcggttgagcaaaccgttcgcgcacatcgcagggcagcacgtcgatgtccggctgaccgcgcccggtggctacagtgcgatgcggagttactcgattgcgtcttcggcaatctcgttcccgacggtcgagctcgctatcgagcgcctgccggatggcgaagtttcgccgttcttccacgatgtcgcggcgatcggagacgaaatcgagcttcgtggtccgctcggcggccatttcctatggcctgaacctgccatagacccagtgctgttgatcggggcaggctccggcctcgtgccgttgatggcgatgatccggcagcgccgcgcactagcccaggtcgtgccgacagcgctgctcctgtccgcacgaaccgctgaagacgttctcttctcaaaagagcttcattccatcgaatgcagcgatccggcattcgccttggcgctggcaattacgcgcgagaacccgatccgcgcatcggactttgcgcgacggatcgacggcgtgatggtccaagaagttctggcccggcttcaccgaaagcccacacaagtattcgtttgcgggtccaacggtttcgtcaacatcgcgaccgagggcgcgctgctggccggcctggacccctccattgtcaaaaccgagcgctacggcggctag

SEQ ID NO: 157619 - DNA, 1266 bp, Enterobacter cloacae
atgagccgctttgccgaacccgtcttcattgccgctggccttcggacgcctttcggccgcggcggaggcgcgttggctgcctacgatgccatctctctgtccgtgcctgtcgtgcaggcgatggcggcgcaggcggagcctgatctcctcgtctggggaaccgtgatcccgaatttgggctggagcaatattgctcgcgaaacctggcttgatgccaagctcaatccgactgttccggcgttctccgtcgtcctggcatgctcgaccagcatgacggcgaccttcgctgcggcagggatgctgggcggaggaaccgacctcaccatggtcggcgggtccgaagtcatgagccggccgtcaatcgccctgacggccgatgcatcgaagcggctcaccgacctctttgcgcaggatgcgaccgccgcgcttgccgccctccagtctctgactccacgagactacgtgctccccacaaagggctgggcaaaccggatcaccggaaggacgatgggtgatcatatggaggagaccgccaaggcttggcgggtctcgcgcgtcgcgcaggatgattgggcgctcaagagccaccagcgggcagtcgctggttgggaacgtggcttcttcgacgatctcgtgatttcgctgcctgagctggcgcgcgatgcgaacccgcgcgccgatacgtcgcccgaacggctggccgcactcaagcccgccttcgatcgcgacagcgggaggggaaccctgaccgccggcaacagctcaccgattacggatggagccgccgggtgttgggtcgctaccgaagccggtgtggcgagactcccggcgggcaccccctacgcgcggctcgtcgactacgagatctctgccgtcgatctccacaccgagggcctgctgatggcgccctcctatggcattccgcgcctgctcgcgcggcatcaactcagcttctccgacatcgcactctgggaaatccacgaagcctttgcagcccaggtcctggcgaacgtcgcggccatcaccgatcgggagtgggtgcgcgcgacagccggtgtccaggcggctatgggcgattttgactgggaccgcgtcaatcccaatggaggctcggtcgccctgggtcatccgttcggcgctacaggcgcgcgcgacctcagccaggcggtaaaggaactttgggccatgccgcccggatcgcgcgcaatcgtcagcatctgcgccgacggcggtcaaggcacagtcgccctcctcgaacgcggctga

SEQ ID NO: 157620 - DNA, 213 bp, Enterobacter cloacae
atgctcctcgaggagaagggcgtgcaatggaaggaactcgatatcgaggcggatccggttcaccggcaggccatgacggaagcgtcgggtcgaaacaccgtgccgcagatcttcatcaacggcacgcatgtcggtggctccgacgagcttttcgagctcgatgtcagaggcgaactcgacaaactcctggggcgcacgccgcccgccatctga

SEQ ID NO: 157621 - DNA, 282 bp, Enterobacter cloacae
ttggtctcagctatctggaatgacgccaccatcgccacaagcaacgagacggtcgtcgtcgagggaaaccactacttcccaccgtcggcagtcgattttggcctgcttgagatgagcccgcacacgtccgtctgcccgatcaagggcaccgcgcgctacttccatgtgcgtgtgggagacgcgctcaacgtgaacgcagcctggacctatccagatccgacgccaggcgccgagggcatccgggatcatatcgccttctggaaaggcgtggaggttgcgtag

SEQ ID NO: 157622 - DNA, 267 bp, Enterobacter cloacae
atggagcatgccgagttcgatgccgccttcgcgcagcttcccgagggatacagcgaaggcgcctacgaaggccggcgtttcggcgtgactgtccggcgatccggtgacggacgtcgcaacagcctgttcgccagggagttggccgggaccgacattgtcagcttcaacctctatcgcgttacatcagatagaacattgctgaagccgtgcgagatgtccgccgaaaaggtcgtcgcgttcgtgctggatttccgaccggccccctga

SEQ ID NO: 157623 - DNA, 711 bp, Enterobacter cloacae
atgcgtcagaaaaccatcgatgcgattatagcgcatgctgccgctgaatatcctcgcgagtgttgcggcgtggtggcacagaaaagccgcgttgaacgttatttcccatgccggaatcttgccgcggcgccggaggacaattttgccctttgccccgaagactatgcagctgctgaggactggggaacggtgatcgccatcgcacacagccaccctgacgccacgacgcaaccaagcgaactggataaagcgcaatgcgatgcaacgcttttaccctggcacatcgtaagctggccggagggggatttacgcaccatccagccgcgcggagaattaccgctgctggagcgtccgtttgtgcttggtcacttcgactgctgggggctggtaatgagctatttccggcaaacgcatggtatcgagctccatgattaccgggtggattatccctggtgggaaaacgactatccagacaacttttatcaggattgctggtatgagtgcggattccgtgaattcgacgggccaccgaaacccggcgatatggtgatcatgcaggttcaggctgataagtggaaccacgcgggaatcctgcttgagggtaatatgctgctgcaccacctgtacggacatctgagccagcgcgtgccgtatggtggctactggcaggaaaggacgatgaagattctacgttacaaatctctgtgctaa

SEQ ID NO: 157624 - DNA, 756 bp, Enterobacter cloacae
atgagcttaaacgcagattatcaaaagctggagcccggcagtgaagtaaggctctttgaagtggacgggagtgcttttggggtgggtgagattttacgattccacgcctacaacattcctcatactgaacaggagattctcgctgcaagcggagatgaaaccaaacttcccgccaaaagtatctggtggcagggggaagagtactcggcctggccgtgtcagattgaaggtattgagacgtcgacggatggcaactcagcccagccgaagctgtcggttgccaacctggatagttcgattactgctttatgcctcgcctatgatgacctgctgcaggcgaaggttacgatccatgacacgctggctaaataccttgatacgcagaactttccagacggcaatgctacggcagaccctacgcaggaaaagcttaaggtgttttatatcgattccaaaagcagtgagacgaacgaggttgtggaatttactctttccagcccgatggacctgcaggggctgatgattccaacacgccagctgcattctctgtgtacctggtgcatccgtaacaagtatcgaaccggcgacggttgtgattacgccggaacgcgctatttcgataagcacaataatccggtagacgatccgtcgatggatgaatgcaacggaacgctgtcggcctgcaaacttcgacatggagacggcaacgaactgccgttcggtgggttccctggcacgtctttgatcaggagttga

SEQ ID NO: 157625 - DNA, 546 bp, Enterobacter cloacae; identical to SEQ ID NO: 86455

SEQ ID NO: 157626 - DNA, 234 bp, Enterobacter cloacae
atggggctggcggattccgacagtcgcctcacgagcctactggccctgatggggcagatcgcgatcctgctcagcctgcccgcgcagctggttggcgcggcggaggtctattggcctggtctattgttattggccgcatcgccccagctggccctgctcgcacagctcggcttgtctcgcgtgcgtgagttcgacgctgaccgccttgcggcggaactgactggcgacccgtag

SEQ ID NO: 157627 - DNA, 462 bp, Enterobacter cloacae
atgagcaacatcgacaaacaagcgcttcgcagcacatccgattgcgactggtttgaggattggttcaagcgagaattccatccagataagacaggcccatatattaaagaacagttgttctttgctgtacgggctgcaagagcgccgctgctggatgagctggaagccgcagagaagcggattgctgagctggagttgaaactagaagccgcagagaaacggattgctgagctggaggcgcgggaggtgaaattgcctaatcctcatgctcacctcatctggattcaggcaggccatgcccctgatgactattgggatgatgttgccgtttctcatagcgaaaaggataagtgctgcgacggttcagatcgctatccggtttatgctctctgggaaatcaaagaggcactatctgctattggcatcaacatcgccgcagccggtaaaggagaggactcatga

SEQ ID NO: 157628 - DNA, 765 bp, Enterobacter cloacae
atgagcactattaccaaagaattcaccaaagagcagttaatcgaaaagcttcagcacagaatttctgtcgcatcaggatttccggagtcagaaaaagcgcaaatggatcttgagctggcgcgtatcgcgctggcatcgctcgaagcggagcctgtcgggtacatgaacaggtttacaggtcgtgtatttacgcttgaagaacagcctggtgccgacaccgatgctcaggtttacgtaccgctatataccgccccgccagcgccggtatctgtgcccgctgcgatggaaatggatgatgactttgacagcgcgtttgaacacggaaaagctgtcggctggaacgcctgccgcgccgccatgcttcagggtgccaatggcaccctcaccaatgagggtaccataacagccacgcagtttaagccggtagcagacctgtacggcttaacctcaccaactggcggtgaaacatcgttcactttcgacgctgttgaagctcgcgattttattgatggcgggtggtcatgtcaggagtatgtggagcttggacgctttcaggaggctgtgagcggcaactctccggtgattccgggttgctcatgcctaacctgccgcccattgacttttagtgatagccgctttgtcgtctgccctgaatgcggcaacaaacgctgcccgcacgccaatgaccaccgtaatgcatgcaccggaagtaatgagccagggcaggaaggtagtgcgtatccagcagcgccgcagcaggagtaa

SEQ ID NO: 157629 - DNA, 1278 bp, Enterobacter cloacae
atggactcgaaatctcttgttgaactttcccatgatatacaatccggactaggaaacattgacgttccagattttgataacatcaaaactatcggaatggcatcaatactagcaatgcatatacgcggattgggagaaattgattatgaagttttaaggaaagtcagtgacttctttttcaacataccttcatatgctttaaaaagcgtattggaagtactggctgagatagaatatgtagatttaataacgaaagacaaaaaaatattgtcagtaattccaaacgttcctcgattcaaagatctctatcaaggtgttggtgattatttcacatttagcgatctcaacgaacatgagcaaggcacattgataatattatctaatcttcaaaacaaacccgaaaacagagacaaactaattcattctacaggcatcgacaatactcttttttctcgttgtttagagattggtgaaaaaggtaactattttagaaattatagagctagaggaaaaaacatcatagctagcccattttattttgccgataatttagagtcacttgtcgatatttcagccaaaattggttcgaatgatattgatgctgttttaaaaattataaaagataatcagggatggcctctctcactgatcgaatcacaattagaaatcggtggaaaaaagctaacaaaagtacaaaaagaacttttaattggtttttgccaagagggtgtactcaaacccccttcaattgatttcggaaaccaaaaacaagaaacattcatattcacaccgaggcccggaaatataaaattgaatgcagctaacagagagatttatgaacgagcaatggcgttagtttcttgcgttaggaaaggacaattactgcacgacaaatatagaataaggcttccagttagaatattggaatcattaaaagaaaaaggttatcttaatcaaaattcagaagctgcatcccagtataggaatctggtgtttttgaaggttggaatgctaaaagctaaggatcataacaagtgggaatttcatttaataaaaacagaagaaaacattgaagcattagatttagcaataagtctcttaaaaacaggagaacttgcaaatttagaagttgatcaaaatgcaaaaatagcattaacacaagatgaaaaatacattcaatcgatcattagctccgcagaacttagaactagagagaagataaaacaaagcgaggaagcaaaagaacaatttgaacaactgattttcgaaatggagtaa

SEQ ID NO: 157630 - DNA, 1098 bp, Enterobacter cloacae
atggctaacttagataaagacctaggtttgaagcaagacgctataaggttttgcttgataaatggttacttgccatttttagaagttaacgttgaaaactatagggaactttctgatacatctacaattataacagatgtagatgttttaggggttgcttttgatataactggaaaaaccagaaagataattttcgattgtaaaacccttaaaaataccagccctattaatagagcgttttgggcttccggtgttatgaattttttaggctatgatgaagcattcatcatattaagaaagaaagcaagtgaggcccatagactttccgcaaaaacaattaatgtccacctttttgatgaagatcaaatgaaaggatatgctcaatcattttcaatgaatttcaatattgatttaagctactctacggacattaataattggataagtatacaggaagtatataaaacagataaaaccatccaaaaatatggcgaatttttagcaagttcggttcctacagaaaatgatccagcgaagaatttgagaagatttattgctgctttacaaaaagtgaagaatgaactagaccctcaaaaaaataaacacagagcaatttacttgcatagtctaatgacattctcatatattatggcatgcttagtgcagcaactaagagggttaattgattttgattataatcagaatgaattcacaagacttctcaaatattatatctggggagggaaggatagctttatattaagacataagatgagagaactaatctcatctaatgacagttcgattcaaaatatagagccagagttaaggaattgggatgactttattgaactcacaaggagtctacttgactctcctaatgatataattaaatgttgccatgtcttacgtgaatttagttttttagaactatccatgcatgacattaaaaaggatgagcaactatccactctaatttcagataattcaagaattcgtcaatttataatgataatggctagatacttaaccaactcaatgaaaatgccaaaagatttcattaacgatctagtatcaatatttgatagattgagataa

SEQ ID NO: 157631 - DNA, 1365 bp, Enterobacter cloacae; identical to SEQ ID NO: 142312

SEQ ID NO: 157632 - DNA, 699 bp, Enterobacter cloacae
atgcgggttgaagtgatggagcattatgggctgacgcagtctattgaacaggccaggtattatgaaactgctcaccataagcagttgatgaaagacattaaaggggcgatacgcgaagggcgtctgatagccgtctgtggtgtggtcggaagtggcaaaacagtcactctgcgacgcctgcagcagcaactgatggatgaaaacaaaatcattgtcgcccgttccctgtcggtcgacaaacagagtgtccggctcgccacgctgattaacgccctgttttacgacctggcgcaggataagcaggtgcagatccccaagcagggtgaacgtcgcgagcgggaactgcaggagctggtcaaaaaaggtaaacgcccggtggcgctgtttgttgatgaggcgcatgacctgaacggtaatacactgacggggctcaaacggttgatggaagtggttgaagacggcggaggacggctatctgtcgttctggcaggtcaccctaaactgcgtaatgacctgcgtcgtccgacgatggaggaaatcggttatcgtaccgatatttttacgctggacgggatcaccggcagccagcgcgaatatatccagtggttgctgaaaaccagcaccggcaagggtaagccggaatctatggtcactcccgtttttgcaacaccgattttgacgacaagttggcttgcttga

SEQ ID NO: 157633 - DNA, 357 bp, Enterobacter cloacae
atgatgataagaatattatcagtacttttaacgataatcccattaactgcaattgcgactactattcccgatgggaagccagaaaagccctttgttgttggtaatgaagttgtttgtcttaaagaaatccagaagcaaatcaccccttatcttaagtcatttgaggaagaaagcggggttaagtaccagtacaatgttaaatccggtttgtcgtacaaggatgctgtagggctacggttacagatcaaccgtgttgattctggattggacgtgcgtgtagctgatcttgattactactggctacaggaacgtggaagcatgtgtcagccagcgtacatggtacttgagcgttcttag

SEQ ID NO: 157634 - DNA, 144 bp, Enterobacter cloacae
atggcattgacggctctggtactgcctgggccccgcaagccggatcgggaattgtatgcgggtatgaccctacgcgccgacagcagatatttacaggagtatccggcaatctttttgtcaggaacctggccagtgctgctatga

SEQ ID NO: 157635 - DNA, 270 bp, Enterobacter cloacae
atgaaccatcgcgtggcagtttgggcaaaggggaatcatgtcagtcactggatcgacaacgtaattttcaccaatcgtatgcaagggctttatgtggtgcacatgaatgaacccacgaccatgttcaccatagaccttctcaaagtcaaacccacaacatttacatgttgtgccgtgatgctgtatgcaagcatggcgagctttgggatcacgctcgtagtagttgactgttacctgcgttttcgcaccttcaacaaaacactctcctga

SEQ ID NO: 157636 - DNA, 633 bp, Enterobacter cloacae
atgaacgtgaaacgttatgagtgggtgtcctgtgatgagcatgcgtgccattgcgacgtggtagagagtgctgaaggcgatatggtcgattacgacgactacgcagcacttgaagccagatgcacggcgctggctgcggagaatgcggggctgaaggccttcaaaaccgccgtatatcagcagatgggcgctggctgcgaggctcctgaattttctatcacggaaggtcagagaaacctacgccgcttcgctgacacgctccatgccatcgagcgcgaattctttaccaaagaagtccctgatgaagaatacgaaggcgaaaccgtcgaagaatgcccgttaacctggggaatgagtgtcgaacaatacgttgctgaattccgcaaatgcctggctgaagtgcgggcgcaggcccacaaggaaggcgctcactttgttgctaacaggatgctggccgcatgggatgctggttttatcgacgacacagcaaagaacgcggcagatatcgcgcggatgatcctgacgtcaacagagtttatggctggtgcgccagtggatgatttcgaccgctcgttcgctgatggcgtactcgaagacatagccgcccagcttcgcaaaggggtgcagtcatga

SEQ ID NO: 157637 - DNA, 204 bp, Enterobacter cloacae; identical to SEQ ID NO: 129607

SEQ ID NO: 157638 - DNA, 252 bp, Enterobacter cloacae
atgaaaaaaatattactggcaacctcggttgctttggctctgtctacatcagcctatgcagactcaacggcagtgttaaagctgaccggcacgctgactaacgcagcctgcaccccttctctgagcaatggcggcgtggcggattatggccggatcatgctgagcgatctctctgctacagatacaaaccagctcggtaataaagatatcaccttctccattagggaaggtgcgaacaagttcctgatatga

SEQ ID NO: 157639 - DNA, 153 bp, Enterobacter cloacae
atggtatcggcttatattattatagaagcggaaaataatttaccaaatgatgtcgccactggaggtgtgacctttagcgcttctaataagattaaaatcgactatgccatagggataaacttttataatttccaatacaacattcaaacttaa

SEQ ID NO: 157640 - DNA, 315 bp, Enterobacter cloacae
gtggcctggtacggcaaactggtgggtgaaaagactctgaactcgccgaagcatccggttgatatcgccaccgatctcaatgccccggtgttagggctgtatggcggccaggataccggcattccgcttgataccgtcgagaccatgcgccacgcgctgcgggcggcaaacgcgaaggccgaaatcgtggtgtacccggatgcgggacacgcgtttaatgccgattatcgtccgagctatcacgcagaatcggcgaaagatggctggcagagaatgctggcgtggttcagccagtacggcgggaagaaagcgtaa

SEQ ID NO: 157641 - DNA, 762 bp, Enterobacter cloacae
atgataaagagaattacatttaacaccgatgatgatttaacgattaattcaatcgacaggtatgccgaatccaatggcatgtcacgttctaaggtaatatgtgagttattacggtccactgcacctattcttgattttgtgacatatcaaaatagaattactcaggaggttgaaagcaggctttttagcatgttttatcatgaggttcgtcacttcgaaacgcagcagcataaagatgactctacttttaaatatcttcactctctgtctgaaaagcttatattcaatgttcacccaaatcctgttgaaagctttttccttccggcaatatctgaatgggactcttgcaatagtgggtttatggagagaattgagaataaaattaaatcctatatgcccgagggtgattgtatatcacgctatgtttatttgtgcgtaaataaaaaatctggtgagaagtttggctatgacctgattcaaatagaaattccattatttgttgttgagtcttatttatttgacattcagtcactttgccatgttcgaactgttgatttttgcaatgcaggaattgatgaatatatgcgcagaaaaaaaagacatcttaattccgcttatctttcatggattccagtgcttccctttcaggaagggtttatttttatcgctgctttgcacatcgataaagccttacctaatcagctataccctcctaaagccaccattaaccttccttacgagtactggaagtatttaggatga

SEQ ID NO: 157642 - DNA, 579 bp, Enterobacter cloacae
atgaaagaaccctacaatgccaaccctaattaccctatgcatcgttttcttctcgaagatataaaccaccacctggatgaaatgtttgagcgttattcccgtatactggcttttcgtatggattttggctggaaacaaggaagtgaacgctcacagcgtaatctcatggatgagatggagggtgaaatacagcatctgatggatgtagtatttggccgaaagatggttattgggtactactgggtaattgaatacagacaacgtaaggggttgcatgtgcatgccatgttttatcttgatgggcagaaacatcggaaattttatccaacctcgcgggcggtaggggaagaatggcgcaaattgactgacgatgaaggtctctttcatctgtgttccaagaaaaagcatttcgttgcgagttccggaacgatagtggattaccgcaataggcaggcagtagatgaactacgttacgtaatcagttatttagccaaatctgagcagaagtcacgaggggttattgcaggtatgaacgctatacctccccgcagccgtagaggcaggcccaggaaagaatag

SEQ ID NO: 157643 - DNA, 165 bp, Enterobacter cloacae
atgtctcccaaatcctttatcgctctcgatagcaatggtcatctgatcggtgccaaaatggtgcagacaacccactacgaccgctatacctgccatctctacaacagcgcattgcaataccatcctgaatacgacactgaatgcccatggtttggacatacctaa

SEQ ID NO: 157644 - DNA, 168 bp, Enterobacter cloacae
atgctgattaatgatctgcttaatgtgctgactgttagcggggtcgtgaatgaaacagtcctcattaataaacaccacgccgggcttgtgggcgtcacaagcggctgcgagttcttcaacggtgtgtgcatcgttgatgtctctctttcttacccctctgcttgctaa

SEQ ID NO: 157645 - DNA, 225 bp, Enterobacter cloacae
atgggtgttttaaaaagacaggatattcaggaagtgaatatcaaagcggagaagttgtcaggcttgacgcaaacattatttgaatatcacgacaaactggaccatttccaacttaaaactatttgctctcttgtttatgacattgctggcgaaattcatgattggaccgaaaaagaagaggaaattgttatgagcttagaggaggaggctcgccgcaatggataa

SEQ ID NO: 157646 - DNA, 894 bp, Enterobacter cloacae
atgcaaaaaaacgtttctgatggcctgcccttaccgcagcggtacggggcaattgccactattgtcatcggtatttcgatggctgtccttgacggtgcgattgccaacgtggcgcttccgaccattgccaaagacctgaatgcttcgccggccagctctatctggattgtcaacgcgtaccagatagcgattgtgatttctcttctgtcgctctctttcctgggtgatatgtttggttatcgccgggtttaccagtgcgggctggtggtctttaccctcacctcgctcttctgtgccctttcagattcactgcacacccttacgctggcgcgtatcgcccagggttttggcggggcggcgctaatgagcgtgaacacggccctgatacggcttatctaccctcaccgccacctggggcgcgggatgggcattaactcctttattgtggccgtgtcgtccgccgccgggccgacgattgccgccgccatcctgtccgttgcctcgtggcagtggctgtttgccattaacgtgccgctgggcattgtggcgatcttcttcgccctgcgctatcttccggaaaatggtccgaaaagcaccatgccacgtttcgatctgcccagcgctgtgatgaacgcgctgacctttggcctgctgattaccgcgctgagcggatttgcgcagggacagtctctgtcgctcattaccacagaaatcgttgccatgcttatcatcggctttttctttgtacgacgtcagctggcgctgcccgtgccgttactgccggtggatttgctacgtattccgctgttttcgctatccatttgtacctccatttgctcgttctgtgcccagatgctgggctggttgcgctgccgttctttttgcagagcgtga

SEQ ID NO: 157647 - DNA, 1647 bp, Enterobacter cloacae
atggaaattttcttcacaatactcatcatgacccttgtggtctcattatccggggtggttacacgcgtactgcccttccaggtccccctgcctttaatgcaaatagctatcggtgcgctgctggcgtggccgacgttcggtctgcacgtggagttcgatccggaactgttcctcgtgctgtttattccgccgctgctgtttgccgatggctggaaaacgccgacgcgcgaatttctggagcacgggcgagagatcttcggcctggcgctggcgctggtggtggtcaccgtggtcgggattggtttcctgatctactgggccgtaccggggatcccgctcatacccgcctttgcgctggccgccgtgctgtcgcctaccgacgccgtggcgctgtccggcattgtgggcgaagggcgcattccaaagaaaatcatgggcattttgcagggcgaggcgctgatgaacgacgcctctggcctggtcgccctgaaatttgccgtggcggttgccatgggcaccatggtctttaccgtcggcggcgcgaccctggaatttttcaaggtggcgattggcggtatcctcgcgggcttcgtagtgagctggttgtacggacgctcgctgcgcttcctcagccgctggggtggcgacgaacccgctacgcagatcgtcctgctgttcctgctgccgtttgcctcttacctgatcgccgaacacatcggcgtgtcgggtattctggcggcggtagccgcggggatgaccatcacccgctccggcgttatgcgccgcgcgccgctggcgatgcgcctgcgtgcgaacagtacctgggccatgctcgagtttgtgtttaacggcatggtgttcctgctgttgggcctgcaactgccgggcattatggaatcctcgctgattgcggccgaagcggatccaaacgttgaagtctggatgctgtttaccgatatcgtgctcatctaccttgcgctgatgctggtgcgtttcggctggctgtggacgatgaagaaattcagcgttcgcttcctgaccaaaaagccgatggagtttggctcgtggaccacgcgcgagctgctgattgcctctttcgcgggcgtgcgcggggcgatcacccttgctggtgtgctctccattcctctgctgctgccgacgggtgacgtcttcccggcgcgctacgagctggtgttcctggcggcgggcgtgatcctcttctccctgtttgtcggcgtgattatgctgccgattctgctgcaacatatcgacgcgggtgactcctcgcagcagcacaaagaagagcggattgcccgtgcggcgacggcggaagtggcgattgtcgccatcgagaagatggaggagcgtctggccgccgatgccgaagagaacattgataatcagctgctgaaggaagtcagttcacgcgtgatcggtaatttgcgtcgccgtgctgacggacgtaacgacgtggaaagttcgttgcaggaagagaacctcgaacgccgtttccgcctggcggcgctgcgttccgagcgtgccgagctgtatcacctgcgcgcgacgcggcagatcagcaacgagacgctgcaaaagctgctgcacgatctggacctgctggaagcgttgttgatagagaatcagtag

SEQ ID NO: 157648 - DNA, 306 bp, Enterobacter cloacae
atgaataaatcttcctatcaaaatacaggcagtaaagaatttaatatctacgagaagctcacggctactaatactcactggtgtcatcatttttcagcacaacctcatgatgaaggttttaattaccaattcagaacaacctgtgtagatagggtggagtttgcggtttacgagcgcattgataattttttcgtgttagttgatttcttcaagtcctatgatgaagcatgtgatgatgctaaaaagataatcgatgaatatccggacattaagcggatgttttccgccaatcaattaagatattaa

SEQ ID NO: 157649 - DNA, 225 bp, Enterobacter cloacae
atgggtgttttaaaaagacaggatattcaggaagtgaatatcaaagcggagaagttgtcaggcttgacgcaaacattatttgaatgtcacgacaaactggaccatttccaacttaaaactatttgctctcttgtttatgacattgctggcgaaattcatgattggaccgaaaaagaagagaagattgttatgagcttagaggaggaggcgcgccgcaatggataa

SEQ ID NO: 157650 - DNA, 858 bp, Enterobacter cloacae; identical to SEQ ID NO: 118087

SEQ ID NO: 157651 - DNA, 420 bp, Enterobacter cloacae
atgatgatctcatatcaggaacttgttcgcaccttccctaaaactgagcccgggcaagattcctcaatcacggcaaaacagtttattgcgctgacgctgaatgatgaaaagctatctatgcccgtctatcttccggggatccgtaacgaagatgattgcgaagatattgggttgggtcctctcatttatatctggaatgtggatcgtgccgctggcacattcagcctctctgttaatgggaaagctattggccacctccttgagccgtttgtgccccgagataaccctgcgtatgttgaaatccgtgatgaggcaataaaagttatcgctgaagtatctacacagtccgtgctgacaactatagagaaaactggtctcatgcctgatattttgtttgcttaccacgctgaggacgcatag

SEQ ID NO: 157652 - DNA, 2541 bp, Enterobacter cloacae
atgagattccaccctgaagggccttccatacccgatatcctcttagaacgctgtgatacaggtcgagttgtatttctctgtggcgctggggtttcattaccttcagggatgccaagctttgtagagcttacccagcatgtaattgaatactttgatccaccacacgattcagaaatcatggcagcatttcgcccatggcttcacgaccaatcttcggcaaatgtccctctcgaccaaattttcaacctcctacatctggaatatggcaaggatgaggtgaatgctttggtatcaaagcgtctgggtactgcaagaactgatatagaggttggacgtgagcatgccctgattaaaagaatttcctcaaatcagagtggagttccacagattgtcacaacgaactttgaccgactgttcgaggttaaccaagcgcaagataatttaactcgatatgtgccgccagctttcccaaatctgaatttcggttcgacaattgagggaattacatatcttcacggtcgcctggtcgacgaaaatgctgtaaaccatccttatgtgctgagcagtgcagactttggacgagcatatctttcagaagggtgggcgaccaattttattaagcttcttctggaacgatacatcgttgttttggtcggttatcaggcagaagacccaccagttaaatacctccttcagggtctcaatcatgatggccagtatgatcgttccagactttatgcatttgatcgcggccttgctgaggatatcgaagccaaatggcgtgacagaggagttacagccatagcctattccgatcatccagctctttggaagactttggaagcatgggctgagcgagcagatgatccacgtcgatggcgagcttctattatcactaaaagccagcaagatccgaaagttctagcaccgtatgaacgtggtcaacttgcccatatacttcgcactacacaaggtgcgaaattgttctctgaagctgttcctcttccccatccagagtggctttgtgtgatggatgcaaatattcggtcagccaaacagaagaaaagatactacgaacttgatgacaatgatgcagagaccttcgatccacaagaagcttatgggcttgatgacgatctgcaagatatctctgaagatgaacataaacgtggagtgagtaacgataatctccttgaatggcgcgacgaagatgatagtccgtcagattaccatcgcttggctggatgtttggagacaatgccgaaacgattgagccatctcatggcctggttctgcaaatctcttgatagccccgtgatggcttggtgggctatccgaaaaatcagcattcatcctctactactacaaaatattgaacgcaatattgagcattcaacatcaatccacaaacgctcccgtcaactgtggagcttaattcttgaacatcataaagatccccgcaatcgtcgttatgacgtcgattggtacgacttaaaagatcgaattacaaaccaaggctggacaactggtgttttacgagagtttcgtagggtaatgacgccccgattggaaatgaaattgccgtatggattgggtgaagtcagaccgccaagcggctcctgggaggaaattcagttcagcgaattaggccaatttgaagttgtgttcaccgaaagacatgatgacgatttagacgtacctgacaatgtattactacaagtatttagtgctttagaagcgcaaataataattgcctccgggatgttagaggatattgatacgtactactttccaagcccaagttgttatccagaacgtgcggttgaaggagaagaacatttcgagaaaggtgcggagatattgacatggtttgtccaccttttagaccgagttgttatgaagtggccagaattggctaaggcacacgtaacaacttggccagtaaaggagccgtttttcttccgaaagcttagactttatgcattcagtaaaacaggcgtctttgaggctgaccgtgttgccgaagagcttttgtctttggatcaaagtggattttgggacacaaatgttacccgcgaacttctttttctgctcactgatcgttgggaagaattctcgcaagaaaatcagaatcgaattatagagcatattttaaccggcccgaaccatttactttattttcccgaggaagacattccaaaacaaagggagataatggcagctagatacgctcgctatctcgaactaagcggctgtaaaatgtccactattcatcgtgaccaactaactgcgatgattaaaagaattcctgactggaatgatggctgggctacatctgttgtcatcaattggggttcacggacaggttgggttcgtacagacgaaaagccagatataatcttagatcttccagcaaacgaaataatcccaaaagtaaaagagatacttaaacgagaagatgacagctttactagtaggcaaccctttgtcggattgataaaagaaaacccgcgtaaggctttatctgcactagctatttga

SEQ ID NO: 157653 - DNA, 819 bp, Enterobacter cloacae
atgattaaacagattatgcatcccgaccatgtcgctgagctttgtaggcaaatcaaaaactcaaacaacagagatttcatctatgatggatttcgtcaattgctaagccagctgccgatgggatttcatgatgtaaccgccacgaccgtgtggcgatcgaggaaaatcgatgtggcccacccggaagggttcgatcatgttaccgatattatttatccacccacgcagtacgccagaaccggaaggctaaatacggaggggatgtctattttatacgcatctatcagcaatcatgggtgcctggcagaaatcggagcccaaccgggggataaagtccatgtgtccgcattcaccctgaaaccagagcagagactgcattgcggctttttgggggatattgttagggcacataaatggagtagcgaggattttccacaggtacaaaagatccttgagccgtatacggaagcgcataaaaccagtattttcatgatagatagtttccttgccgaaacacttgccgatagccaagcgaaggaaaaccactacctgcataccacaacacttgctgatgtcatccgcaatgggaaaaatgcattggatgctatcgtttatcctggagtggaatcctccggcgctaagaactatgcaatccactgcgacgcgatgtttaaattcaacattgcggatatgtacctgctagagattacccaaaagtatccctacgggctgtatgaatggcggttacttaagcaattagaaagctatgatgatggccgaattatctggaaagagccattctgtgcaaatgtcgcatga

SEQ ID NO: 157654 - DNA, 588 bp, Enterobacter cloacae
gtggctgaagagattaagtttgtggtggtcggccatcatacccgcttagggcctgcacaacgtcttgctgcactgctgcatgctcatctgctggttgatgacgataaccacggcgcgaactggaatcatcgccgcgcgcttgagtgggcagcagaacaaacatgccgggttgtcgtaattgaggatgacgcgctgccggtgcagggattcaccgaaaaggtaactgactggctggctcgtttccctgacgacatgctgagcttttatctcggtaccgggcggcctccacagtatcaaatgcagattgctgagcggctaatcgtggctgataagacacgcgctgattacatcacgctgtcgagactcattcatggcgtttgctatagcgtcccgcctaagcatgtgcagcgcgtgctatcccgctgggataacagcaagcccgccgattacgctgtgggtgatgcatggggtggctcagtgatctatccgtgttattcgctggtggaccatgctgacggcgaaccggttgagcgtcaccctgactcagcgccacgtacagaacgccgccgggcgtggaggttagcctga

SEQ ID NO: 157655 - DNA, 570 bp, Enterobacter cloacae
  misc_feature (470)..(479): n is a, c, g, or t
atgaaccttatacggcgcgtttcagcgatatataaagaacaggagttacctgagtatcgtggcaatcccttaattgaagcacttcctgaagcgcttacggaagatgaagtacttctggaaatgagttatttccccgaaattgacgaaaaaatccgctggactgccccggcgaatgttagagagcagtatgtcgaacgtataaagaaattccgttgccctcaaaccaatcttatccaggcttataagatgatcttacgggcacttagggaaagctatgcagctcgtaatcctttaaaaagcggaacaattcaatatcttcattactatggaaatgagcgtcctgatattgagccagaaagtggatattttaaatcccaggctgaaactattacgatagttggaatgagtggttctggaaaaactaccatgattgagcaagtcatggatcatttccctcagattatagaacnnnnnnnnnncaaagaattaaatcatcatttttgggtatccttgttattgatgaaatgcagaggcttaaattttcaagaaccgggggtgagagtaagttga

SEQ ID NO: 157656 - DNA, 663 bp, Enterobacter cloacae
atggttttttgtggaaatcatccttttgacgagacgctgacaaagaaaatgagaattgccaggcgggcagagtctggtggttacatgaaaattaagaatgttagatacgattcacaagactggcaatcgtttattcattatttatggccattacaatggacaaatgttgaaactccattaaatgatgagttaaacgaaaaattattcattttatctaaaggcaatattggattggctcagatgatttatcggggggcacaattaaaggttatcggtagcggcaatgaaatcatcactggcgcagtcttgtcggcctctgtaccggtactcgtgagtcatacggaggaaaataaggatactccactcccgggggccgcgactgaagatgaggaagctaaatggctctctgcatctaatgagggtgatgcttcggctaaaatcatggcagagaagtccctaaagtctttgatccctggggatatagacaggccacagcacaaggaattcgtaggaaaaatagacgaggttttgcgcaatttcgacgagaaaatactgtctcttgaccacgatcttgttatcaacagaacagctgaaaagaaaaatacctacgatgctcttcagcgttgcgggcttataaatatagatccacttaataaattgtaa

SEQ ID NO: 157657 - DNA, 234 bp, Enterobacter cloacae
atgacggcaagcgagcttctgatgtggattgagtacgacaggcaaagtccggttggcgatatccgtggcgacattcaggccgcccagctcgtctctgccatctacggctcacagggggcaaaagtaccgctggacgatgcgatcctgcgatggggtggcgatgagcaatcagaaccgaaggacccgtttgcagggcttgaggctgctttatcaaacgcagcggcaactaattaa

SEQ ID NO: 157658 - DNA, 588 bp, Enterobacter cloacae; identical to SEQ ID NO: 127155

SEQ ID NO: 157659 - DNA, 435 bp, Enterobacter cloacae
atggctaaagctaaggtgatcatccatgacactttcgcacactatctggacgccagaaacttccctgatgggaacccgactgcgaatcccaacgaggagcgcaaacaggtttattacatcgaccgtaagtcaggatcagacgatgaaaccgtagagtttgagctttccagtccagccgatctgcgcgggcaactcattccgacccggcaaattcagccaatgtgcacgtggtgcatgcggggctggtacaaaaccgggaacggctgcacctacgccgggcaaaacggctggttcgataaagacggcaatcgggtggacgatccttcacaggatgtttgctccggattgctgtcaacgggctgtaaacctcgcttcggagagaatgaacagctggattatgggggcttccccggcgcttcacttctgagaggataa

SEQ ID NO: 157660 - DNA, 726 bp, Enterobacter cloacae
atgcacattacttacgaactcccggtgactattgaagatattcaggacgccagaaaaagactggcgggaaagatctataaaaccggtatgccgcgctcgaattatctgagcgaacggcgtaagggtgagatattcctgaaatttgaaaatatgcagcgtaccggttcgtttaaaatacgtggtgcgttcaataaattaagctcgctgaccgatgcggaaaaacgcaagggcgtggtggcctgttccgcagggaaccacgcgcagggggtctctctctcctgcgccatgctcggcatcgacggcaaagtggtgatgccgatgggcgcgccgaaatccaaggttgccgccacgcgcgactactctgccgaagtggtgctgcacggcgagaactttaacgacaccatcgccaaagtgagtgaaatcgtcgagatggaagggcgcatatttatcccgccttacgacgatccgaaagtcattgccggccagggcaccatcggcctggaaatcctcgaagatttatatgacgtggataacgtgattgtccccatcggcggcggcggtttaattgccggtattgcgacagcaattaaatccatcaacccgaccattaatattatcggcgtgcagtctgaaaacgtgcacggaatggcggcatcgtatcaggcgggagaaataaccaaccatcgcgtcaccggcacattagggaaggtgcgaacaagttcctga

SEQ ID NO: 157661 - DNA, 336 bp, Enterobacter cloacae
atgttccccaagacgtctggcgatttcttttgcagcttcacggcctacattgtcgttgtccaggcacagccaaatttcctggaagcgatcgaggttatggtattcatattcaatccactgctgtttggcccctttgccaccgccaaagggaacagacagggcatcatagccaagctgcgtaaaggtcatgcaatcaatctcaccttcgcacagaactaccaggcgggtgtttttatccagagcctgccagccaaacagacatggttcgcaatcagcttcagccataatcagttttttgccgtttggcctttcggttccaatacgttttacctgtag

SEQ ID NO: 157662 - DNA, 615 bp, Enterobacter cloacae
atgtctttaaataaattaggtttggctacagtagtagcactggttctgagcgcaggttctgcaatggctgatgaaggtatcccttctgataccggcaccgtaactttccacggtatggtttccaacaatacctgtaaagtctctctggaccagaagattaaccaggaaggcaatgatttcgacgttaacctggataccgtatttgtaaaagacttcggtactgcactgggtaccaccagcacactgggcgaaaagaaattcgctctgacgctgactggctgtgattccgcaacagtggcgaaagcctcagcacaatttgattcatgggcaggttctgcatcaaccgacggcagcctgctggttccaccaggcaacacccagggcgcagcgaagaacgttaacctggtactgtcgaacgacggtaactccgtaactgaacaagtcaaactggatcaggctaacaacactcagaaagccaccatcgatgccaacggtgcaggcgcactgtactaccgcgtagcctacacccagggtcagggctgggatgcagcaagcaacccggtttctgctggtgttgttcaggcacaggctgccttcactatgatctacgaataa

SEQ ID NO: 157663 - DNA, 744 bp, Enterobacter cloacae
atgttagtcaaagcaatcattaagggattaaaagtcgtctgcctatcggcagccgttttcgcatcatttcaggcaagtgccgatatcgtgatttctggcacgcgaatcgtctatccgcaatcgcagaaagatgtcattgtcacgttagacaaccgcggtaaaaaaccgctgctggtacaatcatggctcgatgatggtcgcgatgataccaacccgcaggaactaaaattaccgtttatcattacgccaccggtttcccgaatcgacccacaaaaaggtcaatccgttcgtatcgcctatttaggtggatcgctgccgcaggacagagaatccctgttctggttcaacgtgcttgagatcccaccgaaatcaaaagtgaaagagggtgagagcccaaacctgctccagctggcgttccgtacgcgcattaaactcttcttccgtcctgatggcctgaagggtacgccaggcgatgccgcagcccacgtcacctggtcgcagcagaagcaagggaatgctgtaaatttggtcgcacataacaattcgccttacaacgtttccattgcaaacgtcacgttgaaaacaggcactaaaacgtatcaggttgaacacaaatctgttttgccatttagcacgcaggcaatgcaggttaagggattaaccaataccgttgcgggctctgtgtcttacgaagccattaatgacaatggcggctcagacactttcgacgccagcattaaataa

SEQ ID NO: 157664 - DNA, 1467 bp, Enterobacter cloacae
gtgggttacgccacttacgcctacggtctgaacaacacgtttactggctacgtgggagcacagtacacggatatggatttctacgccgggctgctgggtctggcgatgaacaccagcatcggtgcatttgcgttcgacgtcacccagtcacatgcggatatcgacggcctcggtacgctcaaagggcaaagttaccggctgacctacagcaaaatgctggaaacaaccaatacctcattcaacgtggccgcgtatcgcttctccacggaagattacctcagtctgaatgatgccgcctctctacaggacggtattcataacgaggagtacggcaaccgcacctacgacagcaacgctgagctttacgctgactatcagcgtacgaaaaatcaggtgcagatcagccttaaccagcccctgaacaggaatggcgaagactatggatcgctctacgtcagcggtacctggcaggattactggaacaacaccagctctacgtctgactacagcctgggctataacaacagctttgcatacggtagctacagcgtgtcggtccagcgcacctatgacgattcgggcgagaaagacgatagcgtgtatctcaacgtcagtgttccgttcagcgttttcagcaaagagagttcacaaacgggcggctttaacaacatcaacatgagcctgcgctcagatttaaagggtggcaccagcttcaactcgacggcgagcggcagcacccaaaataacgacctgagctactcggtcagcgaatcgtcaagcgggggcaacttcggcaacctgaaccagatcagcggctttagctcctggaatagcccgtacgggccgctcggcctgtcagcctcctttggtgatgacaacagcaaacaatactcggcgagctacagcggtggaatggtggttcactcgggcggcgtggtccttgcaccgggcagcatcggtgaaacggattcgctggcactggtaaaagccagcggcgccaaaaatgcgcgtctgggctacggccagggccgcattaacagttcgggctatggaatcatgccgtcgatgtccgcctaccgggaaaaccgggtttacctggatatcagcaccctcgaagaggatgttgaaatcaaaaacaccagcgccgtcaccgtgccgcgaaacggttccgtcgtgttagtgaattttgaaacggacgagggacgttcgctggtactggatctgcatcgttctgataaaggcttcattccgttaggcgccgacgtgctgaacgagaaaaacgagcctatcggtacggtcggtcaggcaggtcaggcctacgtgcgcggcgtggaagataaaggcgtccttcgcgtggtatggggcagtgacggcaccagcacctgcaccgtgcgctatcacatcccggccgatgcgaagaaggttggcctcaccacccttctgaataatcagcagtgtcaaatgtaa

SEQ ID NO: 157665 - DNA, 576 bp, Enterobacter cloacae
atgggaaataatatgaagaaacaacattgcggttattcattaatcgcattaagcctgttagcgatgtcgggtgcagcagcggccaccgatctgaacgttaacttcaccgccaatattcgcgaaactacctgcgatatgaagctggtggggggcgagggttcagatacagcacaaacgctgacgctgggtaacaatggtcaggtgcgtttggatgatgtcaaagccggagcggcaaatgccactttcaaaatcgtgatggttgaatgcccagcgtcgctgacctcattaaaaacaaccgtaaagggaaaaaaatcgggttatttaccctcagggatcattaaccaggcagcctcaggcgcagcagattacgcctcagtcgaaatcgccagagcgagtacaccagaagccccctttatcgttaactctaccgtggatgcggagcgtctggtctggaaccctacagagatccagaataaagaagttgctctgatggccaccttacgtgaaaccaaggcaaatagcatgacaatcggcgattttcaggccgtggcgacttttgaattcagctacgaatga

SEQ ID NO: 157666 - DNA, 756 bp, Enterobacter cloacae
atgttcgaaactaatatccccggcatctattatctcgttagggttcgcgcatcggaaaacggaggtgcgggaggatattttacgacgaacaccacaggttgggccaccgtcgccgggtccgatagaagtgacccttgggataggaaatggcttaacacgcaggtggacgtctttattagtgatggctatgttggcaatccaaataaaataaccgtaatcaagcctaaggctggcacactgggaaaaatggcacttggcaatgatccaaatgatagtaataacaaaccctatacgtttatggttaatgaaaattcattccagatccccatcatactgcccacctgcgatatcgccatgctgtcagacggcacggacacggtgaacctgggggattattttatttccgatatcaaaaataacaacgtcaaagacgtgcccttctccatacatttaaatagctgcaccagcacgacgaagtttaccaccaagcttacgaccacaaagctgacgggcacaggcaacgatttgctgggcaacacccttacatcgggggctgaaggcgcaggcgtgcggatcatgtataacggaaattcgcagcttattccaaataacgcgaactcgtcgtacatcatgacggataccaccgttcccggctcgacgcagattgactacgtggctcagctggtcgcgaatggcagtacggtcaagcccggcgcgtttaaggccacaggcgtgttcaccctctcctacgactaa

SEQ ID NO: 157667 - DNA, 1089 bp, Enterobacter cloacae
atgcgctacctttcattattattgattattatctgctgtcattcatttgctgaggatatggtttcccttaaaaagagggattttgttcgtcagaatattgctgaggatttgcgacgtgaagaaaatctaaaaaatgcggtttttcatattaagcgtgtaaacgctggcggaaatatcgcctatttttgtgcgctcattaaagataagaaagataattatatacagacagggaataataaatatcatctctacgatcgaattatgttaagtaccgataatggttggattagcgctaccagacttgacagcgaagtagacacaccggaaagagcgcattgtttttatgcacctgaagtgattttacaatctgagtcacttatgaagagagttgagcaagagggccgaaaagacctttgccagccagtgcataaaggtgatccgttgcgcatgaatatacttaatgctctgcgcgccagttacagaggtgacagcaatagggttgaactaaacggtacacgaactgaagtgacatgggtcgttaaggaattatgtgccagcgaaaaatatgcatggttttttgggcatgccatcggagatcggcaaagtgtttatagtgaaaataaggaaaatatagaggttattttacgggcggaaaagaatggtgaatggcatacaatgccaagaaagaatgtcctgacacagcagtccgctgtttcatggcctcaaaataatggctatctttctgccgcaatgctggaaaaaatggcgcaacgcgtacagcagcgttgcgcactggagggggataccgtcagggtttccgggagattgcaggaagccggcaatgctgctgatgcatactgggtgataatacctgatgagccgtttgtttgtgtacgggatgcggatacgcatctgtcagggtggaattcacgaatgcagcttctgcttacaaaagatgagagaaagttaatgaatgatctactcggtcaaaacgttcatgttggcggcgatatcttgttggcattgagtacgcatcatcacactgcactactgttaaataatatctttttattaaaggctgaaaaataa

SEQ ID NO: 157668 - DNA, 936 bp, Enterobacter cloacae
atgagagaattaaccggagcattattactcatcaccagcatgagcgtttatgccaatgacacttctataggtgacattaatagcaccattgaatttcttaaacaaaatgatatcagcatggagaaagaacgactgctgattagcccggaacgcatcaacgttgattatctgtttgttaaccacgcacctcaggatgtgacgcttccagttgcttttcctatgccgccggagcaatactatgaatcagaccgtaaccccggattaatgaatttcaaactaagcgttaatggtaagccagtcacccctcaagagaagtgggtagccctgcttatcaacgagaaagagaaaagctgggatgatattaccgataagcttctgaaaacaggttggacggtcgaacaattacgaaatgtgataaaaaacaatgccatttttcagcagcccgacaatctaccagccctacccgaggcatgggtgaaaaatggtggagatttgctcgccgttcagcaattttttatctggcaacagactttccctgctggtaaagaggtaatgatcaatcatacctacacccccagtctgaccagcggtgtgccgcgcgaggtagcagatattacggataaaaattgcctgactgatgagaataaacaacaactctcccagttgcgcagtaacgttaagcgtaaccatcaggaggaggtctttcctggatttaactgggctcagttggactatattctgaccacaggagctaactggaaggaaggcgtcattggcgattttacactgcgtattcataagcgcgcagcggatgaagtagccgttgtttgcttcaatcattcattaaagttgatcgagccactgtcactggaatttaaacagaaaaactttaaaccagaacaggacctgagaattatttatttatcatcttggtag

SEQ ID NO: 157669 - DNA, 1014 bp, Enterobacter cloacae
atggaattttatcaggccgatccgacgcttgagaactactggcgtggtgtgatcctctttggaaggaacgtcgcatcttacaaatttgcgctggcgtcagcgttgtatgaagtggataagacgggcagcgatttgattacgctcgaccagcttgctgtgccgttcagccgctatctttgcgagcacctgaagcacgcgccaaaacagatcacctcccgcagcagccaatttctggaaacctgtctgaagttcaacagaggtgaaatcccccacgctcagctcattgaagcgacggtgcgccttggctttaacaacgtgattgatgcctttcactacgtgaaccagggcgagatcgataaacgttttttccttgatgagcgcaaaacccacaacgggatccgcctgacggataatttctttttactgggcgaacgccaacagtataaaaacctcgcctttgaaaccaatgcccgctggaacctggtagaacaggcctggtcgatggggatttcacgtaaccttgtaggtgtggagtttgacgaagataatcagctgctgttcacgaaggtgaacgcgcgtcgcgtagacatcaccagctgtcgcgacagcctgaatggttaccagaaaggacgatgcttttactgcttcaaacccatcagcctggtaccgggagacgcagaactggcggacgtcgaccactttattccctgggctgcccaccatgaagtgagcaatattaacggcgtatggaacttagtgctggcctgccgttgctgtaaccgtggcactgaaggcaaatatgcaggcattcccgagctcaggctcctgcagcggttacaaacccgcaatgagtattttattcaaagcaaactgccgttacatgagacgattgttctacagacagggcagcgtcccgaagcacggagaagctttcttcagcgtaactggcaggctgcgctggataaacttatccatacctggaaacccaacgcggaaggcgaggcaacgttttaa

SEQ ID NO: 157670 - DNA, 870 bp, Enterobacter cloacae
atggcgtttcgtccatgcttcattcgtggcgaatcttccttacatggcgatgaaagtagcgttcgttcacttcagaaagccacccaactttttaatccccaggcaaaagtgaataccataacgctggtgcttgatcagatggctaccgatcctgcgcactccggttggcagtttatgcacagtctttatgaacattttggctatcttccgctggctacatttgaagtatggcgagcactcgtacaacatccaagagcgctggcgatgtcgctcttcaaatttgaaatgtccgccgagtatttaaaccgcattgagaatgaattccctgttttttgggagtttttccctatattagaaatcaaatccgcagcagaaaccttcaaacgattcctgacccaaaaaggggcaccagatgaagttttggtaacactgctgagtaagatgtatcgacaattagggatcgtatttccaacttatgccgatgaagttgaaaaatggttaagttatgggaaattccctcctcccattccaacatcctttgtccgtgagtggtatcaggagcttttacgtgaacacagtgaagctcggtggccagaatatggctgtaagcgactgcataactggatgtcatcacaaacagatgtagtgatagatatttatcccgaggctgattatcgctattcagttgcctggttacctgttttcgcggctgcagtggcaagcggtaaaacttcctttgaaactgtgtttgaacacaaacctggcgccgtatttttcctgagacaagttcgggacttcgattctcgctggttcaaggccatattccagtgcagccttctgcgttatatttcaaaaaataaaaaggattaa

SEQ ID NO: 157671 - DNA, 1518 bp, Enterobacter cloacae
atgaagcttttttcctctcactcaagttggagtaaatcttctctagaagatattgcgattcatatcatcggtggtgactgggggaaagatccagaattcagcgaagaagggtatgaatctgtatcatgtattcgtggagctgaatttaaaaaatggaaagaaaatttcggcaataccgctgtaatacgaaagataaaggcttcgagtttaacgtctagagagttacttaaaaacgacatattagttgaaatctctggagggggaccagaccaaccggtaggtagaactgtattaattgatgatagagtattaaacaaccaaacgttacctttggtgtgtacaaactttcttcgtttagttaggttaagttcagaagtaagtgcatcttttattaatcgctacttagagtttttctacagttctggtgaggttactaaataccaaggaggaagtaacaacctaaggaatcttaaatttaaagattactcaaagatcgaaataccactaccatcacttgccgaacaagaaaccatcactgaaaaactcgatacgctgttggcgcaggttgacaacaccaaagcacgtcttgagcaaatcccacaaatcctgaaacgttttcgtcaggcggtgatgaaactcgcgataacaggtgagctaacatcagaataccgtaataattttcctactaatctagttcaagaaatcgcgggtattgtcgaaaaagaacggatagaaaagaagataaaaaacagtaaattatcgaaagaaccataccctgcaaagataccattttcgataccaaaaagttggcaatggtacagactgggtcatatcagtttaaaaataacagatggagctcataacactcctaaagtgttaagtgaaggctacccatacattatggctaaagacctaacaaaaggtaagctcgatttttctgaggaaagatttatttcagaaaaagaccataaagaactttattttaaatgtgccccagaagtaggtgatcttcttattgttaacatcggggctggaacagggaacaatgttttaatagacagcgacattgagttcagttttaaaaacatcgcgataataaaaaaatccaaactgataacaccaacttatctaaagattttctttgattctcaaaaaaatagaatattcaatgagcagacaaagggaggagcgcagccttttcttagtttatctgtattaaacgatattccttttgccctccctcctttacccgaacaacacgaaatcgtccgccgcgtcgaacaactcttcgcttacgccgacaccatcgaaaagcaggtcaacaacgccctgacccgcgtcaacagcctcacccagtcaatcctggcgaaggccttccgcggcgagcttaccgcccagtggcgtgctgacaacccaagtcttatcagcggagaaaacagcgctgccgccctgctggaaaggattaaagccgaacgcgcggccagcagcggtaaaaaaaactcgcgtaaaaaagcgtaa

SEQ ID NO: 157672 - DNA, 423 bp, Enterobacter cloacae
atggctaactcaccagttcttgaacttcaagcactagcatgcgatcccgactccgacattttatctgtactcatgaaggccaaaatgattgcagtgaagctcggcctcagcgatttgaccgagtggatacagctcgaattaaatggctatcccagctttgatacggttcctgaatacaggaaaggtcaatcgcagttaaaagcatatagcccccaacaccaaagctgggttccgcttgtggtcaacttcaacgacgcggaactaaatgcaatggtatcaacgtttcacattacagaatcaatatcatcagttaaaaagatgaataataaaggagaaaccccttttcttcctttaccggattggatggcggatacgttgtatgaaggcatcggtcaaaaaaacagaaatcgtgtgggttattag

SEQ ID NO: 157673 - DNA, 525 bp, Enterobacter cloacae
atgaaggcatcggtcaaaaaaacagaaatcgtgtgggttattagtccgggaatcttagaacatgtaataactaccgtcaggaataaaattctcgactggtctttagatttagagtcaaagggtattttaggcgaagggttacagttttcattaagagaaaaagaggtagcaccaatgactgtccataacgtgaccaacattcatggcaacgtaaacaacgctggcgttatcggctctggtaacggggacatttcacaaaataatactgtcaacgctggagacttcaactcgcttgaaaagcagctcaaggattggggcgctaatgatgaagatattaagagccttcatcaagctatacaagaatcaccagccccaactaccccggacaatttcagtgatagccttgggaagtgggttgtaaatatgattggtaaagcatatgcgggaacgctaaatattgcagcgtctgctgcaccagctctactaactaatgcaatttgtcattactacaacattcctgtttga

SEQ ID NO: 157674 - DNA, 516 bp, Enterobacter cloacae
atgacaattgcatttgacagtcccgtgctactggctgaactgtttacttatgacccggcaactggccgggtttttcatgctaaagataaacgcgctggtatggggtttatcaaagcgcacgctggtgattacgctgataccgctcgtgatgacaagggctaccaaactgtaaccgtgaccgtgggaaggggtaagaaaaggccagtgaaagcccatcgcgtagcgtggattcttgctcatggtgctattcctgatggtctgcaagttgaccacatcaacggaatccgtgacgacaatcgcctatgcaatttaaggttggttacgaatcaagagaacagccacaaccgccgaggtgcgaaaggatactactggcacaaacaaagaggtaagtggcacgcgtgcgttatgttgggtgggcgtcacattaacctcggcctgcacgacactgagcttgatgcccgagccgcttatcttgctgccaaacgtgtatatcacccatcggcaccgattatttaa

SEQ ID NO: 157675 - DNA, 234 bp, Enterobacter cloacae
atggctgagagcaacgaatcactgcaccccgccgttaatcccgatctctacgtgaaccttgacgaacaacgcgaaggatacgctcctgttaagccgcaggggtgggatatcttgacgcagaatctccgaagtgaggccgcacccgaacagtccgccgccgaccgtggacgccgccagcgtccgcgcggctcagtgggtgagaaaagatttctgcgtagcagggggttgctatga

SEQ ID NO: 157676 - DNA, 561 bp, Enterobacter cloacae
atgactttgagtattaccgatatccagcgcattaacgcgctggctcataagcacctaaagaataatgaagagattgcagcggagacaggtcataccctgaccgatattgatgctgtaatccgtggcgtctatgtcgatgacttgtccgaacattggaaagacgatgctgatattactctggcggagtacaacgccatccgcagccgctataagcccggcaagctgcaccgcgatacagagtttatgattgcccgcgatatgctgattcgccctgagactgtgctggctatcgctcattcccgctttagcaacctccacacgcacccagtgccgaaagctgttaaatcgaagcctgagaagccgcagacgatacgccgcctgtctagcgctgatcttgacgaggcgcacaagctggagcgctttggctggcctgttgctgagatcgccggaaagcttgaaattcctgttgaagcggctgctcaagcgctgcgcctgatgcgtaaccgctggagctatcccgatattctggaagatgttaacacgcgatacggggctaagtga

SEQ ID NO: 157677 - DNA, 210 bp, Enterobacter cloacae
atgacacgcaacgaactggattcccagttgtgggagctgaaatgtttactggcacaaaccctcatccgccgccttgaggaagataaggctggtgagtcgcgcatggtcgcagcggagttatccagtgcggtcaacttccttaaggccaacgccgtagaagcgccggacacatcattcaacaacgtgttcccggaggatgacgagcaatga

SEQ ID NO: 157678 - DNA, 525 bp, Enterobacter cloacae
atgagaccttatgaagaccccgcgctactggcggagctgttcacttatgacccggcaactggccgggtttttcatgccaaagataagcgcactgggcgcggcgctggtcgcatcgtggctagtgctggcgattacgcagacacgtacacggtcagcgatggttatcgcttagtttctgttcgtattggcggtaagaagcaccaaccagtggcccatcgagtggcgtggattctgacacacggaaccattccagatggtctgcaagttgaccacgtgaacggcgtccgtgatgacaatcgcatattcaacctgcgcttgcttacgccgcacgagaaccagcacaaccgtcacactgcaaaaggttactgctggcggccccgccatggaaagtggtgtgcacggattcaggttggtggccgccaaatccacctcggcaaccatggcaccgaagacgaagcccgcgctgcataccttaccgccaagcgaatctaccacccaaccgcacctgtggagctataccaatga

SEQ ID NO: 157679 - DNA, 1845 bp, Enterobacter cloacae
atgccaacaaatctacgtcgcctgctggctctggccgctgacgccgaaccgctgaacactgtgcctgcggatgctcagcaactggttgcagataagatagttatatcccgaaacaaacaatgccctgtaaagcgtaaacccatacaggctgcgtttaatacggagtcacaagagttttactataacgctgacgattctgttatgtcgttccgtgaatggaaagaggcgaatggaattggccgcaagcgacatgcccgccgcgcggatgctgggttacgacagattatccagcccggcgacgcgattcattgccgacgcgctgagattgagcaatggctgaataagaagcccgctcgttatgttgacccgctaccgccagacttccccggcgttcgcgtagacgatgccgcattgaaaccgcgagagcacaccgtgccggaatcgacaatcgggcagaatgcttttctcaaagcctgccgtgagtttctgatttgcgatgagaagaccttgcgccgtatcagtcgcggcatgagcaagctggaagcgatgcgccgcgatgacttcaccagacggggagacagcccggagtttcgccagctatggtgtggagaggttagctctgttgatgacaatttcaacacgcagaatcatcattgtgacgctggaggtgctgacctgccgccgtccatcccgccgctggttactgcgccgtacaggttccgtaagctggagcaatgcgaccgcccggtattcgtaccgttaccgccgccagatggtaatgactggagacccggccagcaggacgtagccgccgctgtgtttgcccgtgaccgcgatatgctggcggtgctgccgactgggtacggcaagacggctgcgttcacttatgccctgcaattcgagtctggtgctggtgacagtctgaccgttatcgttgtgcctacgaataccatcaagcagcaggtgctccagcagttgctggacgctggcatccatgctgttgcgttcggtgacaagctaccgaagcggcgcaatgcgcagcaacttgcggggttggctgctggcgctttccacgtcgctgtcgtttcgcctgaacatctggtgccgggtagtcaggtgctcgcggcactgatggccgctggtgtggacaggttcatcatcgacgaggttcacactgttgatgattgggagtttcgcactgctttcccggcgatgaagcacaccttgcaaaatgccttccctgatgcgcagcggtgtgcgtttactgcgaccttgcgaaaaggtgatgaggctggcttgatgaaagagctgggctgccgtggcgagttcctgaccttccgcgcctgtgctacccgtgaaaacatccagctaatccctgtaaggcaatgcgtaactccgcgccgggcagccctcgatctggtcaatgcgatgccggagaatgaaaagacgctggttatggtggacagcataaagatgctgtatgcgtatctcaacgaactgggagaccgcgcccggccttatcattcagacacccaccgcctgagccgagaccagcggcacgccaacgctgagtggttcgcctgcacgcccggcgcggttcttgtggcgaccaaagcctttggcctcggtgctgacattcccgatattcgcaacgttattgtgacttacatccctgacgatcttcctgacctcgttcagatgattggccgcacaggtcgtgacggtcaacctgcgcgggctttcatactctggtcagcgttggcactcgacgccgcgcctgatgatcttgcgacgttgtaccaaccccacaaagctaactggggttacatatctaatttcctgtag

SEQ ID NO: 157680 - DNA, 408 bp, Enterobacter cloacae
atgctcagcgtgcaggcttctaggaaaaaatgtatttatatattactcataatcctgatttcttcctatgccatatggcgtactttagatgaatttctctatattgagcaagaaattatttacaaagaaagtattggaaagctttccgtattgtatattacaaaaagcaatgcgggagctacgacttcaaatgtgtacaaatactatttagcgtcgtcaaaaatttctggcgaaacttttttaggcgaggtcaggcacgggtatgctccatttctgataactacagatcctgatgcaaaggtagagactgaagaaaacgctatatatatcaaagtcagcggtaaaatttattatttcagtaatctatcttactcaactcttatctatttggattcatcacctttttaa

SEQ ID NO: 157681 - DNA, 2955 bp, Enterobacter cloacae
atgtctgatatcgcaacgatctccctgaaagtaaataccagtgaactggagcgagggaatcaggagcttgataaattccaggcaacagctgcgggtgctgctcaaaaggcggataatcttaacagtgtttttcgggctggcgctcagtcgggtaagcaacaaaaccaaagcctgaaggagcagcagcaggaattacagaacctccttaaccgaatcaatcccaccaataaagcattcgaagagcttgataagatctacgcgcagctgacgcaggccaataaaaaaggtctgctgcccacagagcaattccgcgattatggagcgatcctggacgacacgagaaataagctccaacgcacgcacatgaccctcacggaagaaggacgtgcgctgctcgaacaggaggcctcagcgaaacgtgcggcgcaggcgggagaggcgttcgttgcttcattgcaggagcaggcttcagcagtagggaaaactcgcgctgaaattctggaaatgaaggctgctcagttgggtgtagctgaccagtctgcaccgttcatttcaaaactgcgggaacaggaggatgcctggaggcgtggtgaaattagcgctggtcagtaccgtaatgcaatgcgccagttaccgatgcagatcaccgacgtagtgacctctctcgcctcaggtatgccggtgtatatggtggccatccagcagggggggcagatccgcgactcctttggaggtgttggtaatgccctgaaggctgttacgtcattgataacacctgcgcgcatcgctatcggtggactcattggaacattggcactgatgggggctgcggcttttaaatcatccgagcaattcgatcgggcggcgtcatcagtgttgctgatggggggcgcaggtttcaaatcgcttgagcaactgaattcagttgcatcgagggtcgcatcggaaaccggtaattcagtctcagaagtcactgacaccttaatcgaccttaataatcaggggaaagcgagtggccctgaaatggagcggatcgcaaaggcaatgctggtgatgaaagacgccggcattgataccaaagactccatggcagactttggtaaaatacttaaagatccaattaaagggctggctgaactcaatgaaaaatacggcttcctgacagaagctgaaatgaaacatctaatccagcttaaacagacgaaaggagagcaggccgcggttacggaggcggttagcctttatgctggcgttatggaggagcgcagcaataaagttgtcgaagctacagataatattggcagggcatggaaaactgtaaaaacaactgcatcaaatgtttttgagcagattggggtaactcttcgcgcttgggccaatcaggttatcgatatttttgaattagtaaaagcatcgattaacgacctattcctcaatatcacttctctggatgccaaatttaccgggacgatcgctggttgggctgaaaaaatacctggtgggggtgccttagctaatttcctcggcatggatgtcgcggctatgaaaaaggccggggctgatgctgataaggaaattgaagcgaacaaaaagcgctatgacattttgtggaagcggatcactgcacctaatgcgcaggcaaattatgaagctgaagctcgaggttctggtgtaacgggagacgggggaaccaacagagaatcccgaagcgcagtaagtaagcttgctgacgattctgaaagaaaagtaagagctgataggatcagtattgatgccgcaacccgaatgcttcaggagtctcgacaacgcctggtggtattgcgtcaacagtcaatgcaaacggaatcaatgactgatggtgaaaaacggttgttggccttcaatcagcaaattgctgatctcaaggaaaagaaacaactcacatctgatgaaaaatctattctcacgcaccaaaaggaaattcggctgagcctcgagaaagaggccagtttatcccggcagattgagcatcagaaaaagatgaatgatctgatggacagtgcacagaagttgcagcgtcagcaagaggctaaacgtgccgaggttgctttactcgctacaggggtatcatctcgagatgctcagagagggatggaactcgatcgtatcgagaaagagtacgctctaaatcctaaggctcaggcgaaagcgctttctgaaatgcgcaaaacctataaagcgcaggactcgcttgaacagaactggcgagctggtgctgtcaatgggctgaatgaatatcttcagacggcgcagaacgtttattcctcagtgtcgcaggcagcgcaaactgccctcgggggtatttccgacatgatgaccagccttgttacaacaggaacggcatctttcagacagtttgcggcatccatcctcaaaatgattgttgagatcatcaacagattgcttgtggcttgggcggtacagaaagccatgggatggattactggtgatgtcagtaccggcaatacacccagcggagcttataccaatgcggcgagttctggtgttagtcttttcgactctggtggatacactggtgacggtgggaaatatgagccaaaaggcgtcgttcacggcggtgagtttgtattcaccaaagaggctacgtctgcattgggtgtaggtaatctttatgcgctgatgcgtgacgctaagggttatgcagatggtgggttcgttggtcgtgctccaatgtacgggttaaacagcagttctggatccggtggcggttctgcacccgtaatcaatactgtcgtaaacgttgacgccaacgggaatgctactgcgcaatccagcagttctggtgatgttatggggcgtgctcttgctgatgaaatgcagaatgcagccgcaagggttatacagaagcacctcaagcctggaggaatgatctacaactttagtaaaggcaggtag

SEQ ID NO: 157682 - DNA, 249 bp, Enterobacter cloacae
atgaccctggacgatctggacgatgttgaaatagacgtcctccctgatgtgtggccagcattctgtattttcagagacatgtttacacaatggagaactggtatcggtggcgtgaccgggctggactataacgtcttgccctggatgatgaggattcacggtatcgacgacgaggcaggcgctttacaggatgtgagagtaatggaggccgcagccctccgaaccatccataaaaatcaaaatcattaa

SEQ ID NO: 157683 - DNA, 351 bp, Enterobacter cloacae
atggctacaaaatttacgttaaacccgaaaccaacttttaaactttcggtgagcattccacgccctggtgaagacgacggggtggttgctctgattgtccgccataaaacccgaaagcagttgaaagacatggaagataacctgaagcgtgccgccgaactggtggatggcagcgccgatcaggtggatgctcccctgaattatctggctgaaattattgaaagctggaacatcgacagtgaatacaaccgggataatcttgcgttgctgcttgaaaattatccccgtgctttcgactccattgtttccgcttatacgaaagagttgtacgccgtccgcgaaaaaaactga

SEQ ID NO: 157684 - DNA, 681 bp, Enterobacter cloacae
atggctttccatctaccaaatggcgcaacggtatttgtggcgccagcttcaggcaacccaattaccatcacggatatttctaacgcagcaaacgctgtattaacgctcaacggtggaacagtcaaagtaggcgatgtcgttctgctgagttccccatggaccgcactggataatctggtaggtaaagtaacagcagtctccggctcgcaggcaacgattggtggtgtaaacacttcaaacaccaaaattttcccgaccggctctggctctggatccctcagggtggttgagtctgctgattgggtgcagatccctcaaatcactgaagtatccgctgctgggggcgagcagcagtattatcaattccagttcctggaagatgacacgcagcgaagcctgccgacgtataaatctgcaaaaacgcagacttatacggtcgcccatgactctgaccagccgttctacccgcttctgaaagaggcagatcttgctggcgacactatcgctgtttacatgtacgtgcctaaagcaaaagaaacacgttactggtcagtggtgccatccttctctggtgaaccaaaccctgtagttaaccagattgaaacagtcaccgtcgcgtttgccgtacagtcaaaaggcaccacattctacaaagacgcagacaccactccaggcagctaa

SEQ ID NO: 157685 - DNA, 483 bp, Enterobacter cloacae
atgattatcaccgacccaacagccccgggttttaacagctatgccagtgagtctgatttagtcgctttcgctgaagtgagagatatcgagttaccgaaaaaaattggctcattgctaattaaggcgatggactatctcgaaggactggactgggtgggacagaaagctgatccgcgccagccattgtcctggccacgcgtgaacgtcgtcatggacggctacgacctccccgtagatgaggtgcctcggcaggtcattacagctcagtgcatgcttgcagttgaggctattgatggtgatctgctcacaagtgtgcgtgaggcagcagtgaagactgaacgtgtggaaggcgctgtcacgatgacctatgcggtcgcagatggcgaagtctttacaccgtcgtatcctgctgtgatggtgctgctgggcgatcttgctggtggccgtggctacgcaatcaatgcatttgcagagagggcatga

SEQ ID NO: 157686 - DNA, 597 bp, Enterobacter cloacae
gtggtggaaacacaagtgaagtttgttgtggttggccaccacacccggacgggacaagcacaacgtcttgctgcgctgctggatgctcatctgctgattgatgacggtaaccacggtgcgaactggaatcatcgccgcgcgctggagtgggcagcagaacaaacctgccgggtagtggtgctggaagacgacgcgatacctgttcacggattcataaacaagataactcactggctggcccgattccctgattctctcatcagtttctatctcggtaccagcaggcctccgcaatggcaaccaactattgcggcaaagttgtcatcatgcagggaaaccttaaccctaccaaccctgatccacggtgtttgctatagcatcccccagaacgaactggcgggtattctggcgcgctggccgcatcatctcgcagccgattttgctatcggcagagcctgggggcgggaggtggtttatctgtccgaatctctggttgagcatgcagacgggccaagtgttgaacgccatccggatggtaagcccagaactgaggcccggcgtgcgtggtcattagccgaccccctggaggaactatga

SEQ ID NO: 157687 - DNA, 1158 bp, Enterobacter cloacae
atgccctggactgagacccgacctatgcaacgccttgattttatccgtgcctgtcatgcaggtacggactccttctccgctctttgccgtctttttggcatcagccgcaaaaccggctacaaatggcttcagcgttttgacccttctgacctgtcctctctctctgaccggtcgcgcgcaccacgctcccactcccggacggttcctgatgaggtcgtcggacacctgactgccctgcgtcagaaacaccctgactggggcccgaaaaaactgcggatgtggctcctcaatcatcacgtcgattttaccgttcctgctgccagcactgtcggcgatatcctcaagcgtgaaggcctggtacctgacagaaagagaaagcgcagaacgccggggaatcgccggcccctgaccagcatcagtgagaacaatcaggtctggagcgctgattttaaaggcaagttcaggctgctgagcagagagtactgtcatcccttcaccctgaccgacaaccacagccggtatctgctgagctgccgtggaacggaccgtgagagcgagcccttcgtcaggcactgtctgacggaggcgttcctggagtacggtctgccggacgttctgagaaccgataatggtcagcccttcgcagggacgggtatcgccgggttaagtcgtcttgcagtctggctgataaagctgggcgtcagaccggaacgaatccgccggggccatcccgaagagaacgggcggcacgaacgcatgcaccgttccctgaaaagtgcgctggcgcaggggaacaccttcatgacgatggaagaacaacagcggtggttcagcgactaccggaaagaatttaactatgaaagaccgcatgaagccctggcgggtgcaacgcccggaacggtgtggcaaccctcgaagcgacagtgggatggccgtgttcctgactatgcctatccgtcaggaggaacggtctacagggtgaaatcgagggggacactctatatggggaaaaaggggacggtgttcctgagtgaagcgctgactgatgagtacatcatgctggaagaacaagatgatggccttgaggccatcatctttaacggaataacgcttgcgtactatgaccggaaaacgcagagtgtgctccggatagactaa

SEQ ID NO: 157688 - DNA, 210 bp, Enterobacter cloacae
atgatgatcgatatgaaacatttgattgtgctgatagtggcgctattaccagccctggcgaatgccggacagataaccctgattctcagtaatgaagaggagacaggcaacgcgaagatttgcgtatacagcaacgccaattatacggagatagtgacgatcagaccgtcgcagcaatgccgctacacaatgacctttgaggaggagtaa

SEQ ID NO: 157689 - DNA, 462 bp, Enterobacter cloacae
atgaagcaatacaccaatgaactcaccgccgaaacgctggcagcatttgaccaatcaccatacacagctgaacagctcgcggaaatgaacgaagaagcccgtaatctgatcgctgaaagaaacgcctacaatctcgctcacccagttacagccgcttatttgattgctacagagggtagcttaacccgcaacgggggaacggttatcagtgaatacaacgggcagcagatcgaaattgaagacggaacacgcctaaatgtatctcttgtgggtgatgaagttcgttatccagatggaaccaccgcgaaaatcagcactggagtaggtaatacctctggtgactccgccgctcttgtcggtagcttactcgacaacggcgacgaaattatcagtagcccacagaatgccggaagaagagtagtccgagcaggggaatcgttgccagaaaactttctgaaataa

SEQ ID NO: 157690 - DNA, 1017 bp, Enterobacter cloacae
gtgaaagtacgcattatttttttattgctcagccttatggcttctacgcaatgtatggcagtggtctgctggaactatacacaccacactgctaatgtgaattacgatctgacgacaacgctgacgaaagaacaaaaccagttggggcaggccgttgaactggttaaatcgcaggatgtgggtgtgaatgccatatgtgacgcccatgtggatggcgatgcgacaacttatcgctcatacaagaatacctacccggtgattttcacggaagaccagtggcagtatatgagtctcgacccgacctatattgcaggggcgatgcggataaccgattccgacattggtgaatattatcctcccagagactatatccatatgggtaaagattacagggtagatcaagaagaatatggcgagcctttccctgtatacgactccaacctggtatttcggttaaaaattattaaaccttttattggtacagtcattatccccagcaaggtaatgtttaatgtatatgttaccaccaagaataccgacccgttgagttatattgtttatcaaataacgtacagcggtgcggtcacggtcccgcaaaactgcaccattaatgcggggcaactcattacggttgacctgggaaaactaaacagttcttcattcacgaccgcgggtgagaagccctctaacgcagcggtaaaaacctttaatgttcccatcgagtgcagtgcggacgtgatttcgcctgcgcatctcacgcttcgactggtcgcgaacgcagacagtaacgtcggcgaggcgctcgccacagataataaagatgtcggcgtggtggtaaccaaagaaaatggtgccgtcatgatacctaacgacgcatccagcgccgctgattttattaccgacgagtcgggtcatgctgatgtcacgttaaaaacctaccccatcagcacaactgggaacgccccggcagaaggtctcttcactgcgttggcctgtttacgtatcgattttgcgtaa

SEQ ID NO: 157691 - DNA, 537 bp, Enterobacter cloacae
atgagagtcttgtattttgtcgtgatgctgttatctgggataccaataacgtacgccgatgatgaagcaataattaacctccaggtattcggcacgattatcggcgaatcctgtgaagtagatgtgaacagtaaagaacaaactgtcgatcttggcgaattcgatacatcggaatttcctgcttccggagcaacgtcgccgaaaaaagcgttcacgatcgttcttaaaaattgttcacgcgccattcaggggacaaaaatctggttcagcggtatagcggataccaataatcctgacctgctggcgctcagcgacacgggtaaaggaacggctggcgaaatggcgacgggcattggcgtagagcttcttaatgccggaatgaacccgattaaaataaataatacggaatccgaaatttatcccttaaagcagggagataatagcctgacgtttaatttacggtacaaatcaaccttgcccgaggtcacgccagggaatgctatgtccatcatgtattttgatttgctctatcagtag

SEQ ID NO: 157692 - DNA, 273 bp, Enterobacter cloacae
atgagcatcatcaaaatgattttgggcggtattggtgcgttggtggtcgtcgcgctcagcggttttgttgctggcaatattcgcggcagcggaaaggcaaaggcaaaagccgaccagcaacgcaccgaagataacgccgcggcaacggtcacggtagccgaacgccgggtagaagcaacgaaagaggccagcaatgtacatcagactgttaaccatatgcctggcggcgatgttgatcgcgagctgcgggacaactggacccgtaagggttga

SEQ ID NO: 157693 - DNA, 597 bp, Enterobacter cloacae
atgaacacagcagtcgcactttccaccgaagccccgaaagtttttttcaaagatggccgcctggtcaccacctcccaatccgtcgctgactatttcgataagcagcataaagacgttctgcgcaaaattgacatgctggattgttcgcctgaatttacatcagcgaacttttgcgccgatgtccaaacagtcgaagtcggtaacggtgccgaacgtgaatcacgctgctacatgatcaccaaagatggctttatgtttttggtaatgggtttcaccggaaagaaagcagccagacttaaggaggcatacattgccaagtttaacgcgatggaagccgaactgcataagagagtcccagcagcatcacgccagggtaattacgctgtgatcacctatttcgaaaacggtctgccggtggcatgccaccctcttatgcctggcgaagtagttatgaacccagattcatgcttggaacatgtaattcgttctggctatgtggttatgccctgcgatgaagctgaaaaattcactctcggtgagatacagaaaatgatcaccatcgcgcgacaagcacgtgatcgctggctgcaaccttaa

SEQ ID NO: 157694 - DNA, 864 bp, Enterobacter cloacae
ttggatagctctaccacttttaaagtctattacgatgctttggatgaagaattgtcgaagcataagatcgatgccaagacgcttagtttgtctatcggctcaatggccgatctaatctctaaagctgaccgaaatcttaatgatggccaagaaacagtcaaactaatggtaacagcgcctgccgcaccaggttcgataggcgtagtgtattccatgcttgaattagtaccgcatgcagttaacgttgcaaaagtgattgggttgactatggctggcggagctatagccggtggttctgcgctttctttgataagacaactaggaagccgaaaagtaatttctattacccgaagagtggatacggatgaagctgttctagaacttgatggagaagagattgtttgtaacgaggctgtagcaaaattggttaccgatcctgaaattcgtcaagctttagtcaacgtggtacgagcgccacttgatggtaaagagcgcccgattttcaaagtcactgatgaaaacggagaagaagtcatacgtttagaaggtgaggaaactgaagaagtgaagccattacctcgtggaactttgctcgaaaaagaggtttccgttaatgaagttaacgtcaaatttatccaagtcaattttgaaggtaacaaaggatggagaatcgaacacctaggagaggaacactctgttagccttgatgatgatgtattccttgctcaagtacaggcagcaagagtccaattttcgaaagaagatctttatgttgttgatttagaaacaacaaaaacatttactgcacgagccgtcacaaaccgttatgctatcaagaaggtaaaaaacaaacggccagcctag

SEQ ID NO: 157695 - DNA, 570 bp, Enterobacter cloacae
atgggtgaatggtttaatgataatgcaagtgccattatagcggctagtgctgctttatctggtgcagttattgcggctatatttgcttttattaacaacactcaaaatattcgtgctgcaaaacttcaacgtagcgaacagtatgattttgaaaaatggaaagccaatcgacaagtttatattgagaagggggaggaggctattggattgattacctctctcctgaacgctttcttgggcgtcgttaacgcgtccactttagatgtcgtaatgacgcataagcatggaatatccgatagtgtaaaaagtcaattaataaataataaatccggcgataacctaaaccggttagacactatcattatctcctactttcctgagctaatagaacataaaagccaaatgattacatattaccagcgtggaatttattcctacattgagtcggcaatggaggaaaaagagaagagcgctgttgcaattgaattgttagatacccaggcgaaattaactgaaagcgctaatttatttaaaaataaaatttctgagattatatctaagcatctctga

SEQ ID NO: 157696 - DNA, 225 bp, Enterobacter cloacae
atgtcatacatggaacaaaaagagatgactatcgagtttgattcactcgcaaccaccccaaaggaaattgcaacagaattaaacgatattaaactcattcttctcagtattgcttttaagcttgaagaggaagaaagaaagcaattatttgaagagctaagtcccgtcaagtcaaagggaatgcaacagtggcttgcgaatttgaagaaggttgatatttcttaa

SEQ ID NO: 157697 - DNA, 204 bp, Enterobacter cloacae
atgcctagaaaaacgccagagtactatgcgaatgtggcacgccagacgcaagagcgaacagatatgaggagtcgatatcgcgagtatcttgaggctcacggtttcgaaaatagcgagaataacgctcattcttttgctatgtcccttggacttggggcagatgcaagggtgaagcttgtaagtgaattgctgtctgcattttaa

SEQ ID NO: 157698 - DNA, 591 bp, Enterobacter cloacae
gtgaaccactatcaaaatattggctggcagcctggtcacgttttatctgcttcagagcttaaagaagagagttttgaacgcaagcatgaagttatttatggtgaggtgtcaggttcgcgtgattttcagttagttacccttacctggaagaaaacaccggaagaactgcaagcggaatggcagaaaatcgacccggtaggctacagccagcactcctctattgtgatgagcgaatttgcaccatcgcacgctatggcgtttgatttggctattgggcagtgcaaatcattcgattatcaggcggggaaattttgggaagggttattacatcgtgcggactggcgcgatccgcagaacggttatcctgccgctaaagaatattaccgtacaggaatgctagatgaacagcgtacgaaatggtttatgaataggcctgatgaggtgcttccaaaaggggagtacggtgtggaaaaccactttaaaaatgcctcgccagccatgccgtcacgcgaactgtccatcagaaatcaggatgtagcaaatttgcaatgggatatgccaaagcccatgagtgatagtcaactggcttaa

SEQ ID NO: 157699 - DNA, 777 bp, Enterobacter cloacae
atgacgattaacgtgaataaacgcctttttgtttctctttgttttaccctgatctcgacctttttgtgcagttatgaagtattagcgctggctatgccacccattctggctgaacaggatttttccaaacagattagagacaaatctgtcgccctgggcgacagatggactcctgatattgcccgaaaaatcgacgtgccggtggaagaggaggttaccggtgaggttccttttgacgggatttgggctgccggggtcgagaacgactcgtcattaaccctgcggttagcggaatcaggcaaccatatcaccggctcttattgctatatatcccagaaagggaaccgcatagattgcccggaggatgatgagcgtaatcttagcggtacgatcgcaggcaatcatgccaacgttgaattcaactcatcgtttggcggcgtaggtggacgggctgttctggaaataaaggggcgtgaaatggaatggcgattagttactcctcctcaaaaaggaaattactatgccccgctgcggtatacgttacgtaaagccgcttcggttcaaaacgctgaaaccagaaaactggacaccgataaattcgctatttcgctgataaacaagtgcggccattttgagagcgaatgtgaccagatggtttatctcggcgtgcgcaaaagcgataacagtacgatttccttaatgggaaaaacgttgcgcgactccgaagataaaataatcggctcaacgtacagcaatggcgggacgtttacaccgtga

SEQ ID NO: 157700 - DNA, 237 bp, Enterobacter cloacae
atgcaggcgatagggtttttattaaaagatgaacttatggttttacctgtagttgacgatcaggataagcaaagagtaataacacagttagttaacgaaggagccctttttttatttggatacggttggtacccatccgaagtaatggagtattacaaagagcaaaacatcaactttggtaaatacaagattatatattggagtgataaggatacatatcatatagaggaaagatag

SEQ ID NO: 157701 - DNA, 123 bp, Enterobacter cloacae
atgctcaacgccgttggcttattacgtctctttggacgtctgccattccccctcaccctaaccttctccccctctggggagagggccggggtgagggggaaaacttatcagtttgcgctgtag

SEQ ID NO: 157702 - DNA, 984 bp, Enterobacter cloacae
  misc_feature (938)..(947): n is a, c, g, or t
atgacggaaacccggacaacgtgcccttactgcggcgtgggctgcggggtggtcgccagcgtagacggtgaaaaggtaagcatccggggagatgaaacccatcctgcgaattttgggcggctgtgcgtgaagggatccgccctcggggacacgacggggttgcagggacgcctgctgcgcccgatggtcgacggcctggaggtagactggcccgaggcgctgggcgaagcgggagagcggctgcggaacatcatcaacgaatggggcccgcaggcggtggcgttttacgcctccggccagctgttgaccgaggattactatgccgccaacaagctgatgaaaggctttatcggggcggcgaacattgataccaactcgcggctgtgtatgtcgtcggcggtggtgggctacaaacgcgccttcggtgaagacgtggtgccgtgcagctacgaagacgtggaaaacagcgatctggtggtgctggtcgggtccaacgcggcctggacgcatccggtgctgtatcagcgtctggtgcaggccaaacacaacaatccgcagatgaaagtggtcgcgatcgatccgcgcaaaaccgccacctgcgatgtcgcagacctgcatctggcgctgaaacccggcagcgacgccgggctgtttgtggggttgctcaacctgattcaggggagcggcgagtggactatccctcgcgtggcggcgttttgcgacctgacgccagacgagattggcaccttctacgactggtttgtcaccgcgccccgcgcgatcacgctctacaccatggggatcaaccagtcctccagcggcagcgacaagtgtaacgccattattaacgtgcatcttgccagcgggaagttcaaccgtccgggctgcggcccgttttcgctgaccggacagccaaacgccatgggcgggcgggaagnnnnnnnnnngtgggcgggctggcgaatcagctggcggcacacatga

SEQ ID NO: 157703 - DNA, 336 bp, Enterobacter cloacae
atgaagccatatataatgttatacagtgagacaacagatattgttccttcttgtaagaatatcctcgagtcgacaacaagaacgttttctattgaaactaacgatgatgattacttaaacatgaaggattggacaaccataactgaaaccatcgaaacaacagatgataactttattaccaacaacttatgtcagattagctctgcatttggagaatacacaagcacgataatcacacgctcgttggaaaacgatgacactgattatttatacttgtcaacaataagaacaaacacaatagagtcaagtgacgatgacaacattgttttgaattaa

SEQ ID NO: 157704 - DNA, 672 bp, Enterobacter cloacae
atgaacgcgcagcaactggaatatgtacgcattcaattacgagctgcgctggtagatgactcaggcggcaccaaagggcaactggaagcgttcgccgaacatccaccagctgataagaacagaaacccgcgccaacaagtacacgtagtggaactcgagaacggtcgcggcggtattcgtcgagttaaagctgagaatagcgctctctacgtcctcgaaacgcgaagccgccgctgtcctatgcctcccctaagagataaagcgttttcttcgtgtgcatggcgtagagccgttctaaaactcgatgttagccaacaggcctggatcagatactgctatgggtttgatcttaacttccggtatcaacgggagatttgtcgatttatatggataaattatatgaagcaacagggggggcataaattacagaaacgtgtggaaaaacgtttgattcagcttgtgtggttggccgttcaggaaatcgctgcccgcaatacaaatgaaacttacagagactatgcagcgacaacattagctggttttttgtcaatacatcgtgatacctggtatgaaacttatgcggaaccgtggagtgaattcaaacgcttatgcaccttattggattataattgcttgagctgtatccaagaatattgtttactaacgtcttga

SEQ ID NO: 157705 - DNA, 300 bp, Enterobacter cloacae
atgaagaaaaaagcgaacttgcgaaaagcggctgagggaagggagtgcacaattcgcatcccaggcatctgcaaccacaaccccgaaacctcatgcctggcacattaccgtctcgcgggtacgtgtggtacaggctgcaaacccgacgatgaacagggcgctatttcctgcaacgcctgtcatgacgtgatcgacggtcgcgtaaaaaccaaagaatacacctacgaggaacttcggcttatgcatgctgaaggaattcttcgtacacaaaaaatctggcgggatgaggggttacgatga

SEQ ID NO: 157706 - DNA, 597 bp, Enterobacter cloacae
atggcacaggcaatacaactctttaaatcttcacctaccaccctgaccacggctacgcccgaggccagtgattttttgcaacgtatcaaaatcggcgtgtggcttaactgcgacgttaagcaagcccgaaactacctcttccataagcgcttcttcgcgctgctcaatcttgggttcgaatactggacacccaccggaggggcgataacccccgctgaaaaagagtatctacatgggtacgttcgttacctgatctcgatggccggcaatgacgatctccttttagaaactgagaaggtttacaacgaaacccacgggcagtggcgaacgaaagaggcggcaattaccaaatcgttcgaagccttcagaaagtgggccgttgttgaggctggtttcttcaataccttcatcctcccagataacaccattcgccgagaggcaaaatcgatctcgttttccaacatgacggaggccgaatttttccaggtctacaaagcagtttttaacgtcctgtggaacaccattctctttaaaaaattccgcaactatcaggaagccgacaacgtagccatgcagctgctggagttcgcagcatga

SEQ ID NO: 157707 - DNA, 633 bp, Enterobacter cloacae
atggcatggcaccaggaagaggcgcgcaagcactcagaaaagctgaaccaggagaacagccgtaccaggttagaaaagacattcgggcgctcgggcattcgtgaacgttatcaaaactgcacgttcaaaaattattcggtagtgaatgatggccagcgcaaagcgttgtctttggctaaatcctggctgaataatttcggatccggctgcgcatgtttcgttttcagtggcagccctgggacgggtaaaaaccatcttgctgcagcgataggaaatgctctcctggcacagcacaaaagcgttctgattattaccgttgctgacctcatgaccgagttcaaagcggggttcagtagtggaaaatcagaggccgagctgatggagcagatgtcgcgcgtcgatttgcttgttctagatgaagttggcgttcagatgtactcacaatacgaaaaggtgattttgcatcaggtcattgatcgacgaacggcaatgcttaaacccgtcggggtgctgaccaatcttaaggaggtagagttaacgcagactataggggagagggcgcttgatcgtcttcgaatgggtggggggatgtgggtgaatttcgattggccaagctatcgtggctgtcgctga

SEQ ID NO: 157708 - DNA, 810 bp, Enterobacter cloacae
atgagtatgtccttgatggttcaggccatgaaagcgagggtgggaaatcccctccgtaagctggtgctgataaagctcgcagataacgccagtgatacgggggaatgttggccggcagtggcaacgatagcgtatgaatgcgagatatcttctcgctcagttcagacacatatccggcagctcgtgaaggatggatttgttcgagttgaagagcgaagagattcaagcggcgttaaccgatccaatatctatcacctgacctttaacaatgagggtgaaaatcctgcaccctatcagaaacaggctcaaaagcagggtgcaggagctgcaccctatggtgcaaatggtgcagggtgggagggtgaaggagctgcaccccctggtgcaaatggtgcagggggggagggtgcaggagattcacccagaatcagtcagttattagatccagtcaaagaacctaaaaccccccttaatccccccaaggggaatttggcgaaaactaaattcgatcctctcgcggttgaacttcctgattggctctcctgcgcgttatgggttgagtgggtggagtatcgcaaggcattacgtaagccgataaaaacccctcagggtgctaaaggctcgattagggagctggagagatatcgaagccagggcattccgcctgaggtggtcattcgtcacagcatcgctcgggagtatcaggggttatacccgccaagcaatttcaatatggctcagacgagccgacctgacattaccagcgtttcaaaaccagatagctcaattcctgacggctttacggggtga

SEQ ID NO: 157709 - DNA, 768 bp, Enterobacter cloacae
atgactaaacgccagcggatatttgttcaccgtagccgattcatcaccgataaaccgtttgagcacatcacaaagctgcacaaggaccgtaagaaaccggatccgttacagcgtgatgaatacgccacgatgatgctggccctgacgggtcaggacaaaaacatgtggcagttcgccatcggtgccggcccccgtcacggtgagattgcggcactgtcgtgggatgatgttgatcttgatgcaggaaaggttcatatccagcgcaacctgacgggccagggtgattttgtaccgcccaagactaaggctggggatcgaataatcacccttctcgctcctgcgcttgatgcgctgcgtgcacaatataccctcactggccatttgcctgacacggagatcgttcagcatttcagggagtatggtaagtctgaagtacagaggaagcgttttgtgtttctgccgcgcctggggacaaaaaatccgggtaattatttttctacgcagtcaattaccgatcgctgggatgcctcggtgaaaaaggccggtattcgccgacgcacgccgtatgagtcacgacacacttacgcatgctggtcacttgcggctggagcaaacccttcgttcatcgccagccagctcgggcacgaagatgctgagatggtgtatcgggtgtattctgcctggatcaaggagtttgacggtgagcaagtggagctgttaaacgagcggttagggtttgcccccaatatgcccctgaaaacaaaataa

SEQ ID NO: 157710 - DNA, 270 bp, Enterobacter cloacae
gtgtgtgccggaaatgctgtagggatggggcgtattgttggcgatggtgccctgaacttcgagatcgttgatattgctgttgacccggagcatcagggaaaaggtttgggacgagaaatcatgcaaaatttaatgttatggtttgaacagcatgtgcccgccggtgcctatattaccctgatagccgatgttcccgcgctatatgaaaagttcggttttaagaacgtacggcctgaaagcgaaggcatggctctgatttggggacactag

SEQ ID NO: 157711 - DNA, 450 bp, Enterobacter cloacae
atggatacaatcgaagaagttaacggcacctacttttacagaggccattcaaacgtcaccccgggcgagttacttgagatcatttttctggaggagttctgtatagagttggggatagatgcagtttcaggtgcggctattttgggcgggcaaccgtggttaggtacgcgaaagaagccagggaatgccattgaaggaacaagcgttatttcaaagtatgcgcgaatgattttgaaggatgtgaaaaccccattcggaattcgagtcaaaactccggtgggtgtacggatgagaacaacaacaagccttgccgctgttattgcccgctattgtccctggttaggttgggggtcattagtgaccaccctttacagaatttcgtcgcgcactcaggagaaatataacctgatcgcacgacctaaagaccgtatacagtggacatcgttctaa

SEQ ID NO: 157712 - DNA, 339 bp, Enterobacter cloacae
atgctgacagacgaaattagctctaaagtccttgatatgttcaacgatgaaatttcacgcgaacttgacgataactggaacgagatattgcttgaactcgattctgatttattcggttcaccaggcgatgaccttcacgacgcgttaaaccggtacgagaaagaatttaacgtggatttatctgctgttaaatggtctcgttattttccctggcagaacaccccattattaaagcgctggtttaagctgaagcgggaagaggtggaatcaacccgcattccgttaacagtaagaatgtttgctgaatctgcaaaagcaggaaaatggctctacgactga

SEQ ID NO: 157713 - DNA, 354 bp, Enterobacter cloacae
atgaacagggactacgttgttgaacgctaccggacccgtgatggaaaagtgccgtttgaggagtgggtggcaaaaacgaggcgtaaggatccggagaccgttttacggatccttatgcgcgttaaccgtgcaataaaacgtaattttggcgattacaaatacctaagagaaggtgtttgggagatgcgaattgactgtggtcccggttacaggatctattttgccgtagagcatcagaatgtcttattgttactcatcggtggcgacaagaagcgtcaaagagcagatgttaagcaggcggtagaatatctgaaagatcatctttctcaaggaaaaacagatgggcacgcctaa

SEQ ID NO: 157714 - DNA, 552 bp, Enterobacter cloacae
atgaaaaccaaagacgcactgattaaaaccatgcaggaacttttatggacccgtggttactccaacactagcccgaaagagatacaacaggtttctggcgttgggcaaggaagcatgtatcaccacttcaaaggcaaggcggatctggcccgacagacgatcctgcttaacgccgaggagctacaaaaagagatttccaccattttgcatgctgagaaaaatgcacgtgagcgaattaaggactatctgctgcgtgaacgtgaagtactggctgggtgcaggatgggcggattagcgcaggatagcgaagtgattcgcgacgacacgctacgtgaacccattgcgaacaattttgaatggctgatcggcgagctggaaaaagtgctggaagagggaaaaacctccggtgaattttctgccgatctggatgtaaaacaaacggcattaacgctcatttcagtcatgcagggggcgtttgttatcgccagggcaacccagtccgaagcgtattacaaacaagctattgctggagtgatcgcaatgctcaaataa

SEQ ID NO: 157715 - DNA, 378 bp, Enterobacter cloacae
atgaataacggtctgcccgttaccctgaatttgttttcggtgttgaagaatatagatagcgtcgcctgggaagcccacagcacgcttgatcgcaaggatgcgcgcatttttgaactttttcaggatgattcagggcagcgcatcgcgctagtgcattgcgcgccgggggcatctgcaaaatctcatctccatacggggcatgaaacgtttctgattctggatggcacctttgaagacgataacggtgtttaccaccccggtgagctaatctgctacgcaccaggcagcgagcacgcctggcgaacgccgcaaggcgcgctcatctatgcagtctggggcggccgcgttgaagccgctcttacggatgtcgccgcatga

SEQ ID NO: 157716 - DNA, 1935 bp, Enterobacter cloacae
atgaaactgatgctaactcaggccagaatattattcctggcggcagacccgaacaaaattacggctcagcttcgtggcgaatctctttcgctggcgcaggccaggccgctgcgcgataacatttccaccgatgaaatcacccctatcccggcgctagcctactacgacgaacgactgggagcattcgcctggacgggcctgaagtgcggcgctgaaaatccgataggaaaaaatgccatcgttgaggcagggataaacgtcgtggttggcggactgcgctacggtaaaggctcatcccgcgagcatagcccggttgcggagaaggcagccggcgtacagctggtcatcgccgaaagttttgaacgtatctaccggcaaaacgccgataacataggtttgctcacctccactaacatggcgctggtggacaaactggcgcgcggagaagcgctcacccttgaagagattgttgctgaccgggaagagagcgcccgacgcgttatccagtccggcgggctgctggcctggtggaaaggacagatggagaaaagcggtctgccgcctttagccgccacgagcgagccgaaaccgatgacgctgggggagaaaatcattgtccgccatcgtctggagcagggcgatttccccggcaccgcgctactgctgcgcccggactggcgctttatccatgagtattacaccgccatgtgtggccatatgctgaaacggacttttggccgcgagctgaccctgtggcagccggattcgatcatcacctttgaagatcacctgccgtacatgcatcaaagcaaagtgcatattgacgggcagcttaccggcgacctggaacacctgctggcggctcaccgggcgtttacccaaacgtggggattgacggcacaccgatacaacccggacggcgagggtgcagaaggtatctcccatgcgctgatggcggagcgccacgccctgcctgggcagcttatcatcggcaccgactcccacaccccacactgtggtgcgctgggctgtttggctgtgggcgtcggcagcaccgatatggcaggcagcatggttaccggcgcttttcgtatgacgccgccggaaacggtgaaagtagtgttcaccggtacgctgccggaaggcactggcgcgaaagatatggtactgcacctgctggcaacggagtggatccgtcagggaggtggtattggcaaaatctttgaattttgtggtgaggccgtcgagggattatcggtggacgaacgcgccacgctcaccaatatggtggcagagttgggtggcgtttcaggactggtggcgcccgatgcgcagactgttgccttcctgaaggcccgtcgcggaatcgatttcaccattgaagcgtggatgcgtagcgatgagggcgcgcattacgcctcaacaatggtgattgactgcatcgatcttgcgccaatgattgcactgccgggcgatccgggtaatgggctggcgctgtcgtctttgagcgagccggttaaaattgatattgcctacggcggttcatgtactgcgggcaagcgggatgattttgatgaatatcatgcggtgctggattgggctttatccaggggtaaactactgccgccggatgtgacgctctatctacagtttggcaccatggatgtctacgactactgtcgcgagcaagggtatctggagacgttccatcaggctggggcgatactgctcaaacctgcctgcggtgcctgcgcaaactgcggccccggatcgtcggtgaatgctggacaggtcactatcagcgccattaatcgaaattttcctggccgctcaggtccggggaaagtctggctaggcagcccttcgacggtggtcgccagcgcaataaagggtgaaataacctcatttaatgatttaaaacgtcagtaccgttaa

SEQ ID NO: 157717 - DNA, 1008 bp, Enterobacter cloacae
atgaaaccgttttatcatttttcggatgaagaaaacaaagaattaacccgcttcttccagcaaattgttgttaatccttatacggattatcaggtatttaagcttgcggttgctgagatttgttattttagaggcgtgccaggcttttttgtcgatatttgtaccgcaattaaaaatgaacgcgagttgggcgtaagtgatattcatgtattacgcaattgcccacgggatatcgacttgccggagttggatccggaaaatcccattagcgataaatataaaaagaaaaaaacatttatcggcgaggtactgctggaatgtttttcgctgctaaccgatacaccgttattagcctacggcagccgtaataatggagatttctttaccgatgttattgctattcgcaaatacagcgggcaattaacgggttttagcgatagtgaactggtctaccataacgaccgtaccgctcacgcggtacgcgctgatttcgtcacgcttttgggtctacgcagcccggacgaggagctgatttttaccggctatattgacggcaaagccattctggcgcacctgacggacgaccagcaggcggcgcttcgccagccgtggtatcgcacccagtttgacgtttactcccgtgaaaccaaccgccgtcaggtgagctcgccggatcacgccattttgaaaaatcaccatagcattcgttacctggatacgttgactcacgttgcgccagaggcgcccaatgaggcaaaagacgccctgattgcttttatgcaggcgatgaccaaagcggataaacagcgccaccggattttgcagggcgaccttttaaccttcgccaaccaggatggattgcacaaccgggaaaaaattgaaattaaggataaagagaatgccgcgcgccgctggctattaaaaacctatgcattccgcgatcggcaaactgccgagaaatatcaggaacactggcataacggtatttttggccgggttgaagattag

SEQ ID NO: 157718 - DNA, 1203 bp, Enterobacter cloacae
atgagaaacgtcgccgatcgcgtaaagcgtatagggttatcagaaacctatgccattctcgataaagttaaaaccatgcaggcggaagggaaagttatttatgatttaggcggcggcgagcctgatttcgccacgccaaatcatattactaattacactataacggcgatgaaaaatggcatgacccattacaccgccagtaaaggtacgcctggattattaaaagccatcgccagccagctctttgaagaaaatcagctgccggttcagtggaataaaaatattattgtgacgccttcggcgaaacacgcgctgtttattacgctgatgacgctgctgaatcctggcgatgaaatcgtgatccccaccccctgctgggtgagctatatcgcgatggcggaaatggccggggcgaagccggtgaccctgccgctggcaaaagagaatcagttcttcctcacccgtcaggcgctagaaagttgcatcaccgcgaaaacccgcgtgctgttgcttaataacccgaacaaccccaccgggcgggtgttaacaacagaggagatcgacgcggtctgccaggtcgcgcagaagcatgacctgttcgtggtgatggatgaaatttacgaacatatccgctatctgccggggcgccatcgtagcctcgcggcggaacccggcatgtttgagcgtaccgtcactatcagcggtttctccaaagcctgggcgatgaccggctggcggctcggctacctcagcgcgccggaaactctgctcaatgaaattcttaaagttcagcagcacagcgtgggatgcgccggctccttcgtgcagcagggcgggttggccgcgctgattggtgaccgtcagccgatgctggatatggtggcgcactaccgtcagcgcagggatctggtggtaaaccggctaaacgccattccggggatcgcctgccgggcgccggagggaggactgtatgtttacgccgacatcagcggcctgggtatgggggacgcccgggctgtaacacactggctgctgactcacgcccatgttgccgtcacgccgggtaccgcattcggcaaggaggaatccagcgcgattcgcctgtcgtttgccggggcgactgacacgcttatcgccgcgctggatagcatcagccaggcgctcgctgactgcccgtatccgctaaagcaggtggcgtcatga

SEQ ID NO: 157719 - DNA, 1872 bp, Enterobacter cloacae
atgagcgaagcgcttcgaatcgccattattggcaatggccctcgggcgctttcggtacttgaacgcctcgccgcgcgtttacaggaccagccggacgccggggtggaaatccactatatcgataaacagcaccccggaacgggccgtatctggcgccaggaacaggatgccgctttcgtcatgaataccgtagcggaagaagtctccgccttttccggcgaaggcgacgtggcaacggctcgtccaggctgcggcccttcgctcgccgcctggtggcgtgccacgcgggacgacttccctggcgagaatgcctgggcgccgcgtgcgctgtatggcgaatatatgcacttcgttctgaactgcatcaaagcctcgtttagcccggcgcagcgcttttgccctcgacaggcggaggtaacagacatagtgccgttgaacaatagccgggcggtgctgttatttcgcgatggtgaaaccctcacggtagaccgcgtggttattgccagcggccatccccgtaacagcctgagcgaacaggagcagcgctggcaggcctatgcagacactcatccgtcgctgcgctgggtgcctggcgattcagccgccgatatgccgctggaggagatcgcccccggcagcgccgtcggcattttaggactggggctgtcgtttctggatgtcatggcggcgttaaccaccgggcgcggcggccagtttattgagcaggccgatggctcactgcgctatcaaccctccgggcgcgagccgcgtctggtggccggttcacgcagtagtctgcccatccccggccgtgggcgtaaccagaagccccctaacttccgctatcaaagcgtgctttttacccaggagcgtgccgaggccctggccgcccgcggacaactcgattttgatcgcgacgtgctgccgctgctgatggcagaggtcaacctgacctggtacgccaccacgctgcgccagcgttttggcctttccgccgaactggaatttcgtgcctgcgcgcaggcgctggaggttgaggcgtttgatagcctgccggacatcgccgcgcgctttggcctcaccgatgtgcctgcactggatatttatcagctcggcgatccctttcgtgagcgccggttcatctccgcgagccatttccatgccgcgctgcgcgaagagctggttcgcgatagtgaacacgcggagggaggtaacgtggataacccgcttaaggcagcgctggatacgctgcgcgatactcgcgggctggtgcgcagagtggtggatttcggcggtctggctccggcctcgtttcgcgatgcgtttctctcccgctactccccggtgagtgcgctgctttccgccgggccgccgcgctaccgaacccgtcaaatgctcgctctgattgacgccggcattctggcggtcgtcgggccgcgtatgcagatcacctgcggcgtggaaagcgctgcttttgagctctcttccccacaggtggaaggggccgtgtggcgcgtagagacgctgctggacgccagggtgccggggcaggatctgacgcgggatctatcgccgctgactcaggcgctgcggcagcgtggtctctggcaaaacttcaccgtggaagatgccgatacccgctttcagaccggcggcgtggcggttacccgcgcgccatatcatccccttaaccagcaggggaaggcggttccccagctttacgttattggtattcccagcgaacacacgcgctggtttatgtccgctggcagcagccgcccgggctattggactgattttatctgcgatgcggatgccattgcagaacacatcttaacggcgctacccgctgccgatcttaagcaggaataa

SEQ ID NO: 157720 - DNA, 615 bp, Enterobacter cloacae
atgaaaaaaatggcgttactgatgttggattttctcaatgagatagtccatcccgacggcgtatacgcgcagatgggttactaccagcaggtgcgggaaaaaggggtgattaaacaggctgctcaggcgctggcaggggcgcgtgccgctcatactccggtggtgcatgtggtagttggtttttctgaaaactacgttgaatgcccaaccggctccgaggtttttgatatcgcacgtcgcaaccggctgttgcgttttgacacctggtcgacggatatcgtcgaagcgctggcaccgctgccggaggagagcattgtccgcaagcatcgggttgatccgttttaccagaccagccttgaattgacgctgcgaagcatgggcgtggacacgctggtgctggccggcgtttctaccgagtttgtggtgctggcgacggcgatgagcgcccacgatcgcggttttcacgtcgtagtgctggaagatgccgttgcggcggtgaataacgtgaaacatctggcggctctggaggtgattggcagtaccgctgaacggcgaaaaaccgccgatcttttcccggctcgccggacgtttaatgccactcaggaggccctctga

SEQ ID NO: 157721 - DNA, 1272 bp, Enterobacter cloacae
atgacagaagttgcaacgactctgctgcgcggcgcgcgccaccgctggaaagtgttgggtattggcgtagcggccaacgcctgtttctcaatggtggtaggaggcttgccggcgacggcggtctttatgcgtgccgattacaacatcagcaatgccgagctggggttcgtgcttgggatgctgggattggggatcgcgattagcgagctgccctgggggcttttgaccgaccgctggggcgaccgcccgatcctgctgaccggcttgttaagtaccggcgcgatgttgctgctgatggcggcctttgccgcgccgcataacggttttattcccgcatacggcctgcttattaccggagtgttgtttatcggactgcttggcagcagcgtaaacggctccagcggcagggcgatcatggcctggtttcaggagggggagcgcggtctggcgatgagtatccgtcagaccgcggtaccgatgggctatgggattggcgcgttacttctcccctggctggcggctacatgggggtttgtaacgatgtttatcgtctctgcgctgctgtgcgccgtggtgggtttttatgcctggctgtggttgcacgagccggatcgcgtcgggggcaatacggctcaggccgctactgcgtctgccgtaccgggcaaagggccgctgtacgatcctgccatctggaaaatcgtgctggcaatcggcattctctgcgggccgcagttcgcgctgctcactttcggatcggtcttcctgcacgacttcgcccatatcgacgtggccgtagtgtccgtgtgcctggcggttatccaggttggggcgatggtgtcgcgtatctggagcggacgctggacggacaaaaataaaaaccgtaagcgttatctcaaaagctgcacgctgataagcattctggcttttgtgctgctgagcgtgctggtaggcatctggccgactctgccgcatcagggagcaacccttgccttactggcggcgctatttatcctctccggcgtggtggtctcagcctggcatggcgtggcctataccgagctggcatcaatggcgggggcaaaacgcgccggaacagcgctggcaatgggcaacaccagcgtgttcgtggtgatgtttatcactccgatcgctatcccttggatgcaaacgcactttagctggagcagcgtctggctcgcctcagcggcgtgtgcggttattgcgctctggtttttcccgaaggtggagaaaaagcaggagaacgcagcatga

SEQ ID NO: 157722 - DNA, 1539 bp, Enterobacter cloacae
atgagcgcgcatgtgactggtggtaaatattgcccgatgccgcagcctgaactgccgaaccgccagtggccgacacgcgcgctgctccacgcaccacgctggtgtagcgttgatctgcgcgacggcaaccaggcgctgccggagccaatgaaccctcagcaaaagcgggcactttatcagcagttggtagcgatgggctacaaagagattgaagtaggttttcccgccgcctcggaaaccgactaccagtttgtacgaaccctgatagacgacgggttgatccccgatgacgtacgcatccaggtgctgacgcaggcgcgagaaaaccttatcgccgacaccgttgccgccctgagtggggtaaaagaggcggtggtgcatctctataactctacgtcgttacagcagcgcgagcaggtctttaatctcagccgcgctggggtgatcgaactggcgctacagggcgtgcgctggctgctggaggagatggcaaaggtggagcaaaattgggtgctggagtactccccggagagttttactgccaccgagatggattttgcgctggagatttgcaacgcggttatcgacctgtgggtggggaagacggggcgggaggtgatcatcaacctgcctgctaccgtcgagctggcttcgccaaacgtctatgccgaccagattgaatggatctcaggtaagcttcgccaccgccagaaggtgacgctttgcgtgcatcctcataacgatcgcggttgcgcggtggcggcagcggaaatggcgttgcttgcgggcgctgaacgtgtagaaggcactctgtttggcaacggcgaacgtaccggcaatgtcgatctggtcacgctggggttaaacctgttggtgcagggcgtcgatccgctgattgatttcagccagcttccgcaggtggtgaatgtctatgagtcggcgacgggaatgacggtgccgccgcgccatccctacgccggaagcctggtattcaccgccttttccggttcgcatcaggatgcgatccgcaaatcaatggagctgcaaaaataccgcacccgttgggatgtgccctatttacccctcgacccgcacgatattggccgtagctacgaagggatcatccgcatcaatggtcagtcgggcaaaggaggactaggctacctgctggattattactacggcattcgcccgccgcgcccgctgcttattcgctttcagcagcacatacagacgctggcggacgccagtaaccaggagctggagcacgcgtttctgcaccagcaatttcacgcgttttttgcgacctgtgacagtatcagcgaagcgcatcccggcggtacgcccgcagaatttcacccccagtgggatagccatcggctgggagcatcacaggtgatgagctatgtctggggaacgtggcagggcgaactggtatacggtatcgggctggatattagtgaagagaaaagccgccaccgtgcctgggggcagctgttgcgctcgctgccggtgagcgtgatcagcgtgccgctgtaa

SEQ ID NO: 157723 - DNA, 492 bp, Enterobacter cloacae
atgcccatccctccctatatgtggctcaaagacgacggcggcgcggatatcaaaggctcagtagatgtccaggaccgcgaaggaagcattgagataatcggtttaagtcacggtatcaatcttccggtaaacagcgcaaacggagcgattaccggtacacgtcagcactcttccatgaggatcgaaaaagaggtggatagctctaccccttatctttataaagcagccgccaccggacaggcgctgaaaagcgcagaaataaagttttatcatattaacgatgctggtcaggaggtctgctattacaccgtctttatggagaacgtgaaggtgaccggggttaactgtagcgtgcctaacgttaaaatcgcggcgaacgataaaattaaccacgtcgaaagcgtcagcttacagtatgagaagatcacctggcgcattgttgatgggaacattcagcacagcgatgcgtggaacgagcgtgcgacagcgtaa

SEQ ID NO: 157724 - DNA, 915 bp, Enterobacter cloacae
atggtggaagataagcgacggctaaacggctggcagctgtccaaaatgcatacctttgaagcggctgcccggtatgaatcttttgcgctggcagccgctgagctgtccctgacccccagcgcggtaagccaccgcatcagcctgctggaagacgagctgggcattcagctgtttacacgctcgcaccgcaaagttgagctgacgcaggaggggaagcgcgtgtactggacgctaaaatcctcgctcgacgcgctgaaccaggaggttctggacattaaaaaccaggcgctgtcgggcacgctgacggtttattcccgtccgtcgatcgcccagtgctggctggtgccgatgcttggcgactttacccaacgctatccgtctatttcgctgaacgtgctgacgggcaatgaagacgtgaatatgcagcgaacgggcgtcgatctggcgctctatttcgatgattcaccgccgaagcagctcggttatcacttcctgatggatgaagcgatcctgccggtctgctcaccggaatatgccaggcagcacgcgctggcgcaaaatcccgataaccttcaccgctgcacgctgctccatgaccgtcaggcctggagccacgattccgccacggatgaatggtcaagctgggcgacgcattttggcgtgaatatgccgccctcatcggggattgggttcgaccgtgcggatctggcgattattgccgcgacgcaccacgccggcgttgcgatggggcgaaaaaggctggtgcaaaagcatctcgtgtgcggcgagctgattgcccctttcggcgaaaagacgcttaaatgtcatcagcactactacgtctcaacgctttcgggccggcaatggccaaaaattgacgcctttatcggctggctgaaagagcgggcgaactga

SEQ ID NO: 157725 - DNA, 1077 bp, Enterobacter cloacae
atgttgaagaaattgatgacgtttgctggtctgttggggggagcagcattattttccgggcaggcaattgcggcggcggattttgggccatgtacccctgatagtacgcatgtttatagtactaacataaataaaacagttacagatgtttcaaaaaacgtaaagggtgcgacctttatagatttcgatagctggaatttagggggatcctatgtgatgtcctgtgaatgtcctgatgatccaaatcttattaaagaaacattatttaagacggtggttcctctgccctttgttacgactataggcgatcgccactatcaccagataaataataatatcgccattgcgagtgatgtattaattacggggggacgaggagagtacctgaacacaccgtttgagaatgagggtaaccattcgtacaaccgcagtcagtgctcgcaaaatgaaagtagtaaagacgctgtgtggacatcgggaagtaaaggcaacatatcgctctatattctccatccgtttgtgggtgaaaatattatacctagcaccaaaatcatggagctttttgcaacaaagaaacctggtgtctatggcagcatacctgcgtcatccgtatttctcagtggttcaatcatcgtccctcagggttgcgaactctccggcggcagcacgctggaaattccgttcggtgattttaaggccagtgattttaaagatcgtaaaggccaaactccgcaaggttcctcgaaatacacaaaagagttgcagtttaaatgcaccaatatttctgatggcgtgaagatctccttgcgtattgaggggacgccaaacgccaatgattcgaatgccattgatatgggtaatccagatatcggggttgtgatcgaaggcaagacgggtaacattcttgtacccaatgatgccagctcgaatcaggcgctggtcgtgtctcctctggtcgatgatatacaccgtgtcgccacgacgacaattacggcctatccgatcagtaccaccggtaaagtgccggcggcaggagattacgaagggatcgccaccatgcgtattgatgtggagtaa

SEQ ID NO: 157726 - DNA, 744 bp, Enterobacter cloacae
atggcaaaacaaaagttcaaaatcaccaactggaacctatacaacaaagccctcgtcaaccggggctcactgacattctggtttgatgagtcggccattcaggcctggtatgacaaacccaaaacctcttcacgtggtcgtccgcaacgttattctgagctggctatttctaccgttctgatgctcaaacgcatctttcgcctcatgctgcgcgctgtgcagggattcattgattccatttttatcctgatgaagctcccgctccgttgcccggattattcctgcgtcagcaggcgggctaagtccgtcagtatccctttcaaaagtcctgcacgcggcgaaattgcccatctggttatcgactccaccggattaaaagtcttcggtgaaggggagtggaaggtgaaaaaacacggtcaggaaaagcgccgcgtctggcgaaaactgcatctggcgttggacgccggtacgcatgaggttatctgtgctgacctgtccctgaacaacgtgactgatgcagaggcattcccggggcttatccgccagacacaccggaaaatcagggtcgcttcagccgacggagcttatgacaccaggcggtgccacgacgaactgcggcggaagaaaatcagggcgcttatcccgccgcgaacccgcgcaggttactggccggctgaatatgccgacagaaatcaggcggttgcccggcaacggctgacaggaagcaatgcgtactggaaatga

SEQ ID NO: 157727 - DNA, 234 bp, Enterobacter cloacae
atgaaaaacgctcttatgacaatactgctttcatctctaattatgtctttctccgttaatgcagagacagttactggatgtggctattcaatcgactcagctgaaaatatgattaaagaaaaagcaaaagcaaaagcaaaagcaaaagcaaaagaaaaaggagttacaaattatgtaattacctcagcacacatgggtaattataccaccatgagcgcaaaattaattaaataa

SEQ ID NO: 157728 - DNA, 963 bp, Enterobacter cloacae
atgaatatctggactcttggcgatgctgttgttgatcttctaccccttacagatatgcaatttcgtgcttgtgcaggaggtgcgccatttaatgttgcgataggtactgcacaattgaaatgtcgtaccggctttataggtcgcgtaggggatgacgattttggccatttcctgagaaaaactctcgaagattcaggagtttctacacaatgtatccaaatggataaatatcatcgtacaagtacagtactggtttctcttaaagatcagggagaacgtggttttacatttcttacgaacccttcagccgaccaatttctaacacaagatgcccttccagcttttagtgatgatatcctgcatttttgttcacttgcgctggttgctgcagattgccgcacgactttgactaaagcagtccaggaagtcattgaccacggtggacttatcagctttgatgttaatttacgagaccaaatgtggcgtgataaggaagaaatgtttgcgacggtgagtcaattcgctgaaaaagccgatatccttaaactctctgaagaagagtggtactggttaatgggtacacatgattatacagaggcgttagaagcactcaaaacccatcctgccagattaaaagtggtcacctttggtgcgagaggttcattggtattatggcaagatatggtgatacatttcagaggatttaatgttaaaagtattgacacaacaggcgctggagatgcttttatggctgggttacttgccagcatcgccaataaaggtttgccaatgaattttccagaacttcaattagcaatcactcaggccagtgccaccggagcgctcgcaactaccaaaaaaggtgcacttaccgcccttcctgatacagccgcactggaaacgttcattaatcattttccattaccgggctatgagatccttggagcaaccgctacggtgtaa

SEQ ID NO: 157729 - DNA, 744 bp, Enterobacter cloacae
atggcaaaacaaaagttcaaaatcaccaactggaacctatacaacaaagccctcgtcaaccggggctcactgacattctggtttgatgagtcggccattcaggcctgctatgacaaacccaaaacctcttcacgtggtcgtccgcaacattattctgagctggctatttctaccgttctgatgctcaaacgcatctttcgcctcatgctgcgcgctgtgcagggattcattgattccatttttatcctgatgaagctcccgctccgttgcccggattattcctgcgtcagcaggcgggctaagtccgtcagtatccctttcaaaagtcctgcacgcggcgaaattgcccatctggttatcgactccaccggattaaaagtcttcggtgaaggggagtggaaggtgaaaaaacacggtcaggaaaagcgccgcgtctggcgaaaactgcatctggcgttggacgccggtacgcatgaggttatctgtgctgacctgtccctgaacaacgtgactgatgcagaggcattcccggggcttatccgccagacacaccggaaaatcagggtcgcttcagccgacggagcttatgacaccaggcggtgccacgacgaactgcggcggaagaaaatcagggcgcttatcccgccgcgaacccgcgcaggttactggccggctgaatatgccgacagaaatcaggcggttgcccggcaacggctgacaggaagcaatgcgtactggaaatga

SEQ ID NO: 157730 - DNA, 996 bp, Enterobacter cloacae
atgttgttaaaggcattcccgggagaaatcctctttagtcggctttgtagaagcttgtcagtaagtggactgccggtgcagaaattttcaaggagcctcggcctggaagcccggtcctcgtttcatcctttcctgacacaacatctgacagagattgctcagactagtcacgaaaacgctgagcttctctgggcggaacaaaccctgttccctctatgggtatggtcaatgcccggttatgcaaaagcacttcggcaactgacgggccctccggcgcgtttgctatggttttatcagcttacaggcaaccactcatcccaaaggatgcaacttcatttttgccctgtatgcgcaagggaagatgcaatgggatatggtgtcccttactggcattgtgaacatcagatcccgggagtgagcatctgtaaccgccactgttgccggttaatgcccaagctggttccacccagtcctcacattgctgttgaattttaccccgacaatttcaataccatgatcctcagtaagaacatagaaaatgattttgcagtctttgccaaccagatattgactcacctggcgcatggtgaagaaatatcagataattacttttccggttttacctcgaccagaactgatttgaagaacatgaagcacagcggcaacgaaaaactcttcctgtctttgaatgacctgattaggcatttgtgggaggaaaattctgaccctgttatctctgacaaatcacacttcctttattacatcatttctcattttgaaaatattttcccagcacaaaaattacttctcttattttatttacagcgcatgcacagcataagacaaaatgctagtagagagcacatcccctcaaacaaaatgaataaagaaaacacaaacaatgaaatacacaagcccgtaatggagttaaattacctgatggttagactttggccttcaacaaaattcatcgccgacctgagaactcaaacataa

SEQ ID NO: 157731 - DNA, 1464 bp, Enterobacter cloacae
atggctgtgaatgcaaaatatcaccaggcagatttgccagaatacagaggtaaccctctaattgaagcactccctcccctgatgtcccgggaggatgtcatgctggctctcagcaactttcctgaaattaatgcaaacgagcgtgaactgagcactgaggtgcgtgaacagtatgttgatcgtatagatgccttccgctgtcctcagggaacattcttcgactgttacaaggcaatagtacgacttctgcgaacaggttatacaacccgtaacccacttgatattcacacggttcggtttcttcattacagcgtagagggaagcttaggtgaagctctcggcgatggatttcatcgaccccgggcagggactttttccattaccggcataagcggtgtgggtaaatcaaccatgcttgagcaggtactgggacattttccacagatcatagaccataatgtttatcagggccacgatcttacccctcttcgtcaggttgtctggcttaaaataaattgccctccaaattcgaaagcacgtgacctgacggaaatcttacttaccgctatcgacgatgcacttgggcttgagcgtaccatcccgccatcaaggactggtacgttactccggctcattgctcagaaaattaagtcggccttcattggcgtgctggttattgacgaaatgcaaagactgacccgcacaaacggtgatgaacagcttatcaattttcttcatgacatcgtcgatacattaggtgtcccgctagtcttttgcggaaatccagaattcgaagacaaaatgcgccaacggttacgtttcgccagacgtgcagaaaccgcaggtttcattcgtcttaatccgctcgcgtaccagacgacagactggcaatctttcattcagtatctgtggcgctatcagtggactaatgtctacactcccctgaatgatgagctcaacataaaaatgcataagctgtcgaaaggaaatcttgcgatagcacagcgattatttgttactgcgcaattaaaagttattggtaccggtaatgaagtcattacacccgctttgttgggtctttccgaatcagtattaaccagtcgcgcagacgaatttatccaggcagatgctctcatttatggcgaggaactgccagaattatcagaatctgaagagacagtattacctcagaagaataacggcaaaagctttctcaaaagccgtgaaatcaggcaaaaaccggtcagacgggtgcataaatcattcacagtcacagccgatttgaaccgcccccagcatgaggagtttgcggaggagttaaataactatactgcacaaactgaggcgatcctggccaaaaggtgtgagcctgtcctgttccgtgcactctggcaaaacaaatgtcgttacagtgccctggaacactacgaccggctttgcaacgatccttcaacagaaacatga

SEQ ID NO: 157732 - DNA, 2022 bp, Enterobacter cloacae
atgattttgtatgaactcaacgacaacaaaatcacacgtccgaaactgttttacattgaaccatttaagttgggagttcaggaaagaaacattgtgcacttcaactatcctattcctgtatggatgatggtcacagacaatgatattccggataaaaacaggatccggagagataagaatttcgccctgattagcccactgttgtctgatcctgattttctctttttgtacgctctgaacgagcgaagtcctttgttaagaaattatgcaaaggacaacaacgccagctattccacaataaaaaaattattatcgaactgctggaagtacggaagaggtaaacagtccctgacgccagcatacgccaggagtggagggaatggggtcaaaaaaacagttaagtctgtttctgttggtcgtaaaaagaaagggcgcgccctcattgacggcagagcagaaacctacatcatgcgagaacgggactcagctagcataaaaaaaatcctgaaaaaacactacctcaaaccgaagggcaaaagccaagctgaatgctggcgcatctatcttgaagaatacttccctcaactggcttcaataactcaggactgcgccatttcctatccttctctggcacagttcagatatcgcatcactaaacttttctctcttactgagattgcacgtcggcgcacaacagaaagagattttttacttaacaaacgggctttagcggggtcttctgctgactctgatacactgccgggctcagtattcgaaattgatgcgacagttgctgatgtgcatctggtatctgaattaacaggagatgtggttggacgaccgacagtgtatctcgttgctgatcgtgcaacccggatgataaccggcatgcatgtgtcttatctttatgcttcctggcgagcagcatctcaggcacttgctaactgcttttcaccgaaaggacagtactgtaggttatttggtgtcaatgacatcagtgacgaccgctggccatgctcacatgtaccaacaaagttactttgcgataatgcagaaatgttgggtcttaaaacgcagtctgcagttgttcccttcacggaattaatgtttgctccttcctacagggctgacctaaaaggcgtcgttgaaagcaggttccgcatacttaaccaaaaggcaatccataagcttctgggtacgacaagagggggatttgttgtcaggggtgagacccggccacaattaaggtcatgttatacgcttaaagcgtttacagaaatcatgatacgtgccgttgatgagtataaccatgccctgaatacagaacttctgtatattaaccctcttcttcttgagcataatctgatcgctacccccgtcaatagctggaatgtcagtattaataacttccgttttggtggttatcagatcactgagcacgaaattatatcaagacttctgtacccggatagcgcaagtattactggcaagggaattcagtatggtaatcgattctatgagtgttcagaggatgagatggtcggggccagaagtttcggtcagacacgtgttgatgttcggattaatgataactccatggataaaatttatataagaagcggaaaagataccgttttttcgcaacgagaactgctgtccaggcgaaaaatatttcagggccttcctcatatggaagcagaagttgtttctgatattgtcgatatgcataaaagcagtaatgttattacacctgagtcgatggcattgcgtaatctgattgaagctaatgaacaggaaggcgagattttgctggcagcactgaggaaaaagggtcgtgggcgctataaaaacataagggaaaatcgtagaaaagaagtgctgtatgctcaacagggagactccagaaagaccagtgagaattacaaacttccccccgcaaacaacattgtgattttgccaggtcccgaagcgaggaaagcgtggcttacaaaacaaaacgatccttacaagaaggataaatag

SEQ ID NO: 157733 - DNA, 849 bp, Enterobacter cloacae
atgactagaggaagacggtttacatcttttgagagctatgaaaaagcactcagggacgggattggccttggaaccggggaaaactatcagccctggatacggccacaagattttacaaactcaacgggtatccgctcagccatacgcggtttgaaaacgttcagacagcacaacacgctgtccgggattgaaagcgagttttattaccttgccgaattcaatgattcagtaattgacattcgcgaacagtttccgcttctccccgtcacgctaacgcaaaagatagccaacattctcaatgtcccccatccggcattacgcaggaaagtctgcgacacagataagccagcagtgcccgccgtcatgacaacagatttcgttctgacattcagaaaccaggacggaaccatcaaatataagtcttattcagtgaaacctgatgaaatcatttccaaacgtgatgccgaaaaacaagaaattgagagactgttctgggagggcattaatgtatgttttcagatatatacagggtcagaggttaccagaataaaaagtggcaatattagctggtttactgctcctttcaggatgaacggactgcccgattatcatcttgatgtgtccttattaagggagtttcctcccggtcagtatattcttcttcatatggtaaaaaaaatagcttcatctttaaggatcagcactgatgatgccttcatcgcgctgaaatttatgttagcaaccaaaagcatcgaagttgatctcacctcggacatcgttagcaatggatgtattgtcgttttacgaaacagcgcatgtgacatgggattagcatatgaaaataattaa

SEQ ID NO: 157734 - DNA, 690 bp, Enterobacter cloacae
ttgaagaaacagtacgaactacgactgttctttgacgaaagcaaaaaacaggttcgctatcgcgagaaatccacagatgtggaatgggatgccagcctcggcgccttcaaattcagcaaatctgtacacgtaggtaagaaacttgaattctcagcgggcggcgccttgggcgtcaaagaagatggcagtattgacaaaatttatggctataaatttgtctctacagaaataatcgatcccatctttgatattgtccgcaatgccggttggcaggtaaagggcattctggcagacaagaaaaaaagaaagtttgttatcgcgggcgtgattggtgcgatattaatcgccgtagtgggcatcggttcagtcctcttcgtttcaatgggcggggtaaaagatgcggcccgcgcggaagtagatctgctgcgccatgggcaatatgcggaagcctggcgggcgagttcttatgctattcaaagggaaatgacgcaagaggaatttattgaggcgacgaagtccgttaacttccctgaaattgaagactactcgttcaacagtattaacgtaacgaacggtgttggcaccctgtcgggtaaagtcacgttcaaaaatggggcgccgggggttatcaccgtcactatgtacaaagaaaacgaacagtggaagctggctggcgtatccgtagattaa

SEQ ID NO: 157735 - DNA, 717 bp, Enterobacter cloacae
atgaacgcgatgtttaaaaaaggaatgctggcgtccgtgctggctgtagcggcgtcttctgccatggcggcatccagcattgatattcaggttacaggtaaaattgtgccagcttcctgtacgccttcttttgtgagcgggggcggtattgctgattatggtacgataaaagctgcttctttgaatgacaccacggcaacagcgctggcggagactaaaattatccctatttccatctcctgcgaatctcctacacgtattggcgtaacgtttaacgatgcgcatgctgactcagcgccaaccgacattctgccagtcaattttggcgatctggattttggaacagccgttgataatacagcagggctgggtatgtataacggccagaagattggtgcttatgcaatgggtattcagaaggatgagggtacagtgacaaatgatacgggtgataatctgtatccaattttcacgaaggttgccggcgcagcttctggttggggtataaaatccggcatgcattatatgcaaatttctacggataaaagtgagacgtactctttcaccgacagtgagagtggtgatgcacctgttgcacagaaacagattaacttcaacgtgggcatcagagcgcagatcaacccaaccaacgatctcaatattgtcgacgaagccacgctggacggtttaaccaacgtagagctggtttatctgtaa

SEQ ID NO: 157736 - DNA, 546 bp, Enterobacter cloacae
atgaaagaagtagtaaaaaatgggactaccgagatgaacattattgattctgtaaaaatagctgccgctatcggtttgctcatgcaacagaccagtgccatctcatgcccaaactctttgtccagcaatatgactgcgcccgcaaactttgttaagccgcaggacagcgacgttgatgaagcaatctcaattattgatggtcttcgtaaactgcttgaagaagcgtactggaatttatcatcctcagatgaacatgctatgtacgccgttattggcttattgaatccggccaaagttgatctttgtgagattcaacttcgtagcctagaagcaacattgaaagacgctttacaagaagtggctagggtgcaaagagatgactttaagccattgctaatcatcgttgcaaaagcgcgttccgccgccagtaatctcggtcatctgatccagcaaatgacaaagccaacggaacaatttaaaagtaaaacggatcttaccggattggctaaacttgccgatcatggaacgtctattatttttcactga

SEQ ID NO: 157737 - DNA, 195 bp, Enterobacter cloacae
atggataagaagttaaaagcgcttttagaaaaaattacacgcctggagctggcagccaaacgagggttgcagatcaacgaagagattaagccccatttaacacaaggcaaggtgatctccgttgaatactgcaacacgacgttaaagcactgtgctctttttcgtcagtggattaacgagtgcctcggatcatga

SEQ ID NO: 157738 - DNA, 753 bp, Enterobacter cloacae
atggatattagccctgcggaatattgtgaaattataaattgttttaatcacttgctaagttatagaaaaccagctgaatatcttagacatcagagtaaagctgttatcaatgatgatgatattttcgctgtacagaaatttttacctgccaactatgcaaattgttcattgatgatgggcgaaacagtcataatgaatagcctgtttgcaacgagcgtaaagggcgcggaaaaagtcagagatattcaaatgctctcggatcggcacggatatactttacccactacggtagccagtttagccttacggcagagtagggcaaatcaggaatggtattcacagtcagatcctatctgggtcgctgcaccgtatcctgcatcaacttttgcgctttatgaaattgaatataaaggtgaatacgaccgagttcatgactctgaaaggatcctgctaaatgttattcatagtctaatcgtgaacaaagacttcatctttgaccgggtgattttactaactgaacgtatcccatgcgtcagttgtacaaaggttattatcgattttctgacccaacatgatgttaagttgattctggcgtactgttactcctcggggcgggcatggtctggccgcggttatgagagctttagcgagcaactaaaaaccgcacccgatattttgggacgtctgtcggtaaaacatattatcgagcttcggggcggagtaattgacgttatagacaggacggtaaattga

SEQ ID NO: 157739 - DNA, 927 bp, Enterobacter cloacae
atgttttttaaaaagttcacgcgggactaccgccgaatcaatgctcgccataatatcgcttacgaaactgattctgtaacaggaggtagtaaagtaagcagtattgtaatccctacggttggtgaagatttcgttgacgaggctttacttagtgccaggtttgcatcaataaatgctacgagcgtagaagaaatcgtcatcgtctcagaccagtccgtggctcgcttcggagttttgccacccaaagttcgcattgtcactctggatattcaaattccaaatccagagcataaatacgcgcaaatttataaaagcaggatgcttaagatacaagcccctttacaagccaacccgaaatcaacaggcgttttgatgatcgattcggatcttaacttgttgcaggatcctgcatatttggtaaaaggagagcgtctctactcttgcttccgaaaaggacgcatgggtgcgaagttcgaaaaacgaggttatagcaccgtacctgcatattatgcatcgacaattcggcctctgttggaagaccatgtaaacagtgcttttttagctgcaacttactttacatggcagaggctgtgccctctatggttgaatctatttaatgacacatggggaaatattccagatgaccagccaccaacagatcagccgcctttggctgtcgctctggattttcttgattttatcacaataaatcttggagactggactaactggcctgtatcaaaaaaaataggcggaaccctttctgcaatacccaaagatgtcattggtgctcatggaggttttccactttctgaatgggagaaatatcttaagtctccggacgctgagcttctttttaaggggcaggattataccaggaaagttaggtatcttagtgatgaggaaaagaaaagcgccatcccataa

SEQ ID NO: 157740 - DNA, 1953 bp, Enterobacter cloacae
atgaaaccgactctgattgcagttagtcttttcacgctgttcgcttttcaggccagcgcaaacgacagcgcccccagcccttctgcctatacgaaagagcgcaatgccgccgtctataaaacgctggatttcaccgaccagcagggtatcgctgacgcgaaacgcggatttatcgccacgctcaccacgccggtaattaaaaccgacggcggcaaaaccgtaatgaatattgacggctggtctttcctcaagggagatgccccggcaacggttaacccttctttatggcgccacgcccagctcaacaatatttccgggttatttaaagtcaccgataaaatgtatcaggtgcgcgggctggatatttccaacatgaccattgttgaaggcgacagcggcattattattatcgatccgctggtggcgaccgataccgcccgtgcggcgcttgagctttattatcagcaccgtccgaaaaagcccattgttgccgtcatttatacgcatagccatgtggatcatttcggcggcgtgaagggcgtcgtttccgagagcgacgtgaagagcggcaaggtgaaaatctacgcgccggatggattcatggaggaagccaccagcgaaaacctgctggcgggaaacgcgatgagccgccgggcgctttatatgtacggcatgatgctgaaacccgggccagaaggccacgtggataacggcatgggcaaatcgctggcaaccggcaaaaacagcttaatcgctccgacgtatatcgtgaataaatccggcgaccgggtgaacatagacggtattgatatagagttcctgctggttcccggaacggaggcaccgtccgagatgatgatgtggttcccgcagttcaacgtgctggacaccacggagctgctgaaccccagcatgcacaacctctataccctgcggggcgccaaggcgcgtagcgcggtgaactggtggaaagcgctggacaaagcgctcgtcacctacggcgataaagcgcaaatcaccatcagccagcacctctggcctatgtgggataacgcccgcatcaggaagtacatgggcgaccagcgcgacatgtataaatacctgaacgatcaggtgcttaatctgatcaacaagggctataccatggatgagatcgccgagaccatccgcctgccggacagcctcgcgaaaaactgggccaaccagggctactacggcacggtcagccacaatgccaaaggcatgtacatgtattacatgggctggtacgacagtaaccccgctaacctgaatcctctccccgaaaaagaggccgcgcctaaatatattcacctcatgggcggcgagaagcaggtctaccagcaggcgcagcaggcggtgaacagcggagactatcgctgggccgcacagcttcttaaccatctgattttcgccaacccggagaacaagcaggctaaggcgctacaggcggacgtcttctcccagctcggctggcagagcgagaacgcgctctggcgcaatgagtacctgagcggcgcgaaagagctgcgcgacggcgttccggttatcccggccgggtcgacaatggacagcgatttaaccgccagcattgcccctgaagccctgcttgattatatgggcgtggcgcttaacgggccgaaggccaacggcaagcagctgcgcttcaactggacgttgcctgacggcgacaagtgggggatcgcgcttaacaacagcgtcatcatgtaccacaaggatctccccttcagcgaccctgatttcagcgtgaagaccagcgtggccgggatgtcccatttgataaaccaccagcagccgctggacaagagtatcgctgatggcgagctcagcgtcgacggcagcacccagaagctgaaggagctgctggacctgctggataccttcccgcagatgttcaacatcgtcaccccctga

SEQ ID NO: 157741 - DNA, 924 bp, Enterobacter cloacae
atgcaaaaatctgaacgtcatctcgtggtggccattatcgttctgatcgcaggcctgctgctggttttgttgccgctgtacgtgcgggccgataacgcccgcgactggcaaaacctgccgaaggacaccaatctcatcttcggctattacaacaatgttcataccaatacctcgctcgacggaaaccttcccgccgatggcgccagcgtggacgcggacgtgtacgttttacgctacgcgcattcgttcgatatcgacggacgcgtttcagcgatacaggtcatccagccctacgccagcatgacggcctcgctggataatgccaaataccttaccggttcgctcaatcatgaaaatcttggcgatacccaggtggtctttgcccataacctgttcggcggcccggcgctcagcgtggaggaatttaagcgctggcagccggagatgttcctgacgggcgcgctctggctcacccttcccacgggagactatgacagcgataacgcgatcaacatcggcgcgaaccgctgggcctttaagcccgagctggcgttcggcgtgccgctcggtccgacctggctggagctcaacagctgggtcagtttcttcaccgacaataacgactaccagcaaaacagccgtctggaacagcgcccgctctacaccctcgagggccactggagctataccctctcgcccgcgctctggctctcgctggactccagctggacgaaaggcggcgaaacccgcgttgacggaacgttgcaggacgacgaacaggagaacgtgctgcttgggggctctctgggcttcatgctgagcccgcgttttggggggatgatcgcctacaccgacaccacgcatcagcgggatggctcgccggacgtcaccacctggtcattccgtctgcaatatctatggtaa

SEQ ID NO: 157742 - DNA, 771 bp, Enterobacter cloacae
atgcgaaaccgtttactgttacccggcctgatgatgttgatgccggctctcggccacgccgcggtagaggatgccattgaaaaagccaccaacccgttacacctttcaacctccgttgcgcttcaggattactacacgcctgagctttacaacagcgatcggcatctcaacgatacgctctttcgcgcaaccgttccgttagccgctaacagctgggtacccgtgccgcagatccttcgcttaaccgttccgatggcaacccgcccacagccgcagggctataagaccgggcctggcgatatcaacgtgtttgatattttcctgctcaaacaggagggggtaaaaattggcgtggggccgctcatcaccgcagactccgccagcgacgacgcgctgggcagcggcaaatggcagggcgggctctctgccgttgcgatcaaatccacccccggctggatggcgggcacgctggtgcaatggcagaaaagctttgccggagacgacgcgcgcgacgacgtagagaccgcgacgttccagccgattttcatctataagtttcagggcggctggtacttgcgcagctcgggcatctggacctgggatcgggagtcggatgattattacattccggttggcattggcggcgggcgcgcctggggagtgggaggaaaagtggtcagcgcctttgtcgagccgcagtggacggttgcgcacgacggggataatctgccgaaattcaccctctttgccggtttcagcgtcgtcatgtaa

SEQ ID NO: 157743 - DNA, 438 bp, Enterobacter cloacae
atggaaaaccagtctatctcccagctctatagcgagctctccctcaaccccgatctcccaacccttgccgaacgctgcaacctgctcactgaaatcctgctcgactgtcattcgctcccacaaacgcagcccgtttgccgctgtctcggagcttatctggaagaggtaaaatccggcctcgcagaatccatgcgtgactttcaggtggtggaatttgaggacgacgcggaacagccgcgacaaaaagagtggttgctggaagataccgaaacgaaatgcgactactgcctggcattaaaccacgtgctgctggtttcgcattttgaccgcgatatgctgccgcacctgacgggactgctgcatgacattactcattctatggccgctgatgtcgttgcacctccacgtgtagaatcggtaattcacattatttcctga

SEQ ID NO: 157744 - DNA, 1065 bp, Enterobacter cloacae
atgatgaaaaatatcactatccaaaatcgtctgttttcacctttagacattaccctccctcgccatggaatgtttcgtcaaacagaggatgataactgggaaattaatctctatatgctgtttaaaaaactaccaaagccacgaggttcgaggaccaattggtataaaaccagtcaaaatatggttcaaaaactacccagagattttttcggaagagaaattcgtgagattggcgctgttctccatgatcaaattgataagaacacatggatttcggcacgttcagcacttgttttacttacttatggctccctaaatcacaaacatctgggagttactcaatgggttgaacgatacacaggtgtgcagcttcctcgtaataagggtctgagccgaagagaagtggtttttggtcgcaaactgagtgaattcattgataaagaactcgtagacatcacctatggagactatgagctgaaaactcagcagcgaatgtgcaatgggaagtactacgtcgattttgcagttaagcattactggaacggtaacgaagatagctcaaaatattacctttatctcattgaatttgacgaagaagagcacgcattagctccaaatcaggcagcggattcaatcagggactctgaaatcaagagtcaagaaccacaagctaccatcatcagggtaaaacatgatgagagtgaggattggtttgaactagtacgtaacactaatcggctaattagcttcgaagcagctcttttatcagggatttctgctgcaagctgtggtgttattggcaacagcattgtcattgattcaaagtccgccaagaatgcttatgatgacctcaaaaaccagagtgcttggttgctaaactatgagaaacagccgttgaggggaatcgaggaagcggtaaaactatgtggcattcgctatgaaaaagcacgttcaaagacaagcagacaattgagagtatctctggagtcgttaagcaattcactataccgttggttacctgatagcgccgccgaatacgtactacaaaaccttaaaccagactga

SEQ ID NO: 157745 - DNA, 465 bp, Enterobacter cloacae
atggcgatacctttaatgaagaataatgggttaaaaatgaaaaaacacttactcatcgcgttgagctttctggctttcgccagcccggcgatccacgccggttcccgaacgctggtggaatatggcaccgttcagcagagccaaatcattacacatacgcgtgagggctatcatccactgcgtacgctggtcgcgggtacgattgggggcgtcgtcgggcaccagttcggtaatgacaaagggaacaccgcgatgacggtggctggcgctacggccggggcggtggcgtcacataaacagcagtccagcgagctggccgtgcaggaagtgaagctgctcatcaagacccaaaccggccaaaccattcaggttgttcagcctaataatggcttggcgtttaaccccggcgataaagttcgcattctcacaacaggatcgattacgaccgttgataaattctattaa

SEQ ID NO: 157746 - DNA, 795 bp, Enterobacter cloacae
atggcttggcatggtattccttttccatatttatcaaatgcatcagaacacttatcagtagcacttagctcaataccaaaacttatatttgaaaccccgacggattggactactcctcttttgacagcagcagcagccgttataggtggttgtattcctgcgacaatagcttggcgcacattcaagctgagttcagctcaattacaggctgaacgccaagagcagcaacgatttcttagagaggaaagaattgctcaaaatgattcgttagaagcggataggcaaatgcagcttttgatagctgaaaagaatttcaatatggaagttttgtctgttaatagacaggcatggataaataatgttcgggatcttattgctgaatgttgtgtagtaggcacaaaaatgtttgatgaacgctatgctttgaacaataaaactgaacagttcaataatttcatggcggaatactacacgcctgtaaatttaacctacaaagaagtttttgaacagtttagtgatgaacttgatttggctcgtaaaaattataataaaacacaagaacatctggattttctctactctaaaattcgtctgatgttgaatcctgaggaggcggaaagttcttctataatcaatgtgcttttcagactccggtgtcgaggcgcagagcttacggaacaaggaaacacttacggggcagtatatggagaattgagaggggatattaatgaactaattgatttaacacatgcttgcttaaaaaaagaatgggtaagagtaaaaagtgggacctga

SEQ ID NO: 157747 - DNA, 345 bp, Enterobacter cloacae
atgcagaactacaccccgccaggtggctgggggccggtacttcattttttacatgagcaccgcctgtcaattcaggcagctcttacggctttctgcatagccatagctttttccttatgggatgggctggcgtggcgacgcgcaataaatgctggctttatctgtttctttgtagctctggccgtttcagcttttttggaacagctaggggtttcagacatcgactggtcttttgttgtgggggtcgctgttggtggtgcgggagctgacaggtgccgttctctgattaatgcggctgtgacgttatttgcaagtaagaaaggtatcaacgatgaccaaagatga

SEQ ID NO: 157748 - DNA, 309 bp, Enterobacter cloacae
atggatgttgatgccattctgggtctggttcagggcgcggtgtatgtcaccgagtcacaggttccggggttccgttcctacgacatcaacaatcaggaaaaccttgcagtaggcttccgcgcagaaggtacggtgaatgttgagcttctcggctacagctgggatgaatcgaaaggcgataaaaacccgagcctggaaaaaatcggcacggaaggtaactggaaaaaacatttcacctccaacaaatccactgcgggcgtgctgatcaaactcactggcaccgaaactgtagaacagcccgtaaagtaa

SEQ ID NO: 157749 - DNA, 483 bp, Enterobacter cloacae
atgattgataccaatatcacctctcctaatttcaacagctacgccagcgaagccgatttacagaaatatgccagcgctcgagatctgatgttgctggaaaatctccccgcgatactcctcaaagcaatggattatctggaaggccttagctggtacggcatccgcgccagcccgtcacagcctctgtgctggccccgtctcgatatcgaatttgacggtcatccgtttccgtcagatcagattccccgtcaggttattaccgcccagtgcatgctggcggttgaagcggttgacggtgagctgctcggttcatcccgtgaggctgcggtgaaaactgagcgagtggaaggggctgtgacgatgacttacgccgtagctgaaggtgaggccttcattccgtcttatccagccgttgacgcgcttctggcggcgttaatgggcgggcgtgggtttgccattaacacattctcggagcgtggataa

SEQ ID NO: 157750 - DNA, 396 bp, Enterobacter cloacae
atgccgattaattatcagcgtatgcagcaacgctctgacaggctgttacgtcagaacggcgcagagtatcaggttacacggaaaggcagtatttctgtcgtcggaggcgttgagtatcagaccgacgacatgaggttttctgcgtggggcgtcaaaaccgagtacaaccctgatgaaattgacggaacggttattcagcggggcgacgtaaaaatcgttttcacgtcagaaaaagttattgaggttggcgatctggttaacgtggacggcaaacaacacagggttattaaacctaatccggttagccctgtcatagctctccagcgaaccacacaatgccaggcaggcatcacgtctggatacggggtcatcctttccaaatccatcacaaagtag

SEQ ID NO: 157751 - DNA, 348 bp, Enterobacter cloacae
atgcgtgacatgtacgaggtaatggaccggtggggagcctgggctgcggccgatagcagtggagtggactggcaatcaatagctgctggttttaaaggtgtactgccgcacggtaaaaaaacacgcctgcaatgtgatgatgatgaagggatgatgatcgatggctgcgttgtacgcctgaagaaatataagcctgaagaatatgaactaattattgcacattttgtgattgggctttctttaaggaaaatagcaaaaaagcagaagtgctcagacgggacaatcaggaaaaaaatgcagagcgctttaggttttgttgatggcttgttatcaattttaactgaataa

SEQ ID NO: 157752 - DNA, 513 bp, Enterobacter cloacae
atggccaaaataagacaaataagacacacaaaagaaacattgctctttgttggtgaaggctactgtgaaagagcatttttaattcatgtcaatggactgtattcaaaaggcctcgtaaaaacaaaaattgttacggctaaagggaaaggtcctgagcatgttattaatcatgcaatttcttgtaaacgaatggatggatacgatagagttgcagtattgattgatttggatttaccatgtgcaaaaggagtattgagggaggcgaaatctaaagggattcgtattattggttcctcgccttgtttagagggatttctacttgatattcttggtgttgcaaaagcgcagacaaatgatggttgtaaaaagctatttaaccctatattgaaaggtgatccgacggatagagatagctattcggaacattttaaaaaatcagtattagataaggcgcgtaaaaatcatccaaacttggatgaaataataaaaatttttgaaggaaagttgaagtaa

SEQ ID NO: 157753 - DNA, 1158 bp, Enterobacter cloacae
atgccctggactgagacccgacctatgcaacgccttgattttatccgtgcctgccatgcaggtacggactccttctccgctctttgccgtctttttggcatcagccgtaaaacaggctataaatggcttcagcggtttgacccttctgacctgtcatctctctctgaccggtcgcgtgcgccacgctcccactcccggacggttcccgattatatcgtcggtcacctgactgccctgcgtcaaaaacaccctgactggggccccaaaaaactgcggatgtggctcctcaaccatcatgtcgattttaccgtacctgctgccagcactgtcggcgatatcctcaagcgtgaaggcctggttccggataaaaagcgaaaacgcagaaccccgggcaatcgccagcccctgaccatcatcagtgaaaacaatcaggtctggagcgctgattttaaaggtaagttcaggctgctgagcagagagtactgccatcccttcaccctgaccgacaatcacagccggtatcttctgagctgccggggaacggaccgggagagtgagcccttcgtcagacagtgcctgacagatgcgttcctggaatacggtctgccggaagtgctcagaaccgataacggtcagcccttcgcgggaacaggaatagccggattaagtcgccttgccgtctggctaatcaagctgggcatcaggccggagcgtatcagaaagggtcatccggaagaaaatggccgccatgagcgaatgcaccgctccctgaaaagtgcagtgaaacagggcaacaccttcatgacgatggaagaacaacagcggtggttcagtgattaccgggaagaatttaactacgaaaggccgcatgaggcactggcgggtgcaacgcccggaacggtatggcatccctcgaaccgacactgggatggcagtgttcctgactatgcttatccggaaggaggtaaggtctacagagtgaaatcgagggggacactctatatggggaaaaaggggacggtgttcctgagcgaagcgctgacggatgagtacatcatgctggaagaacaagatgatggccttgaggccatcatctttaacggaataacgcttgcgtactatgaccggaaaacccagagtgtgctccggatagactaa

SEQ ID NO: 157754 - DNA, 816 bp, Enterobacter cloacae
atggctaattcagttgtaacaaataaaaatgggaaagggatttttaaacgagatgaatggattaaagagtcaaaaagtctttatctgtctgcaaagatactacgtagtcaaggagatgagagtaaaaggaaattctctgatgctaataaaaatgataagtctatttatgaattgatagacatagcgactgcaacagataaaagcagtcgtcttttattaggttatgcttttgaattgctattaaaatcagcagttctacttatgaattatggcgctactgaaaatacaatctctcaaaaatttaagttttacagccatgatttgctatctatgattaaagatttagaactatctttatcagattatgatttaaatttattggatcttttgtctcaagacatagtacagcaagctaggtatccaataggaattataaaagatgagctttatttaaaaacgattaatgaaagaaatgctaacctagcaaataataagttgtttaatgaaatggtttccttatacgataaaataaagtcaatggtggtgaaattagataatgatgtggagaattgtgctcatttcaattcattaacttttaaagatctatcattttttatgagaggcggtggaggattaaatgctcgttgcatcgtaatttattcctctgattatcctcaagagaaaaaaacaaagtcttatttaaaaagcattcttgaccgaaatccaaatgggataatgcgttggtatacagtttattgggatgaatacaacttttttgaagatacaggtaaaaaactaattccattgaaagattaa

SEQ ID NO: 157755 - DNA, 717 bp, Enterobacter cloacae
gtgttactaaataaattaactgttgaaaaattccattcgataatggaaagtattcttgagcgattagagaaagatgactatctctcatgggattttatcaatcggttatctaaaaatggatgggttcccccattagcttttgattgttatgattactttcaatgcccgtcatcagaattatcagataaagaaattgaattagggttcatgagtttttttgaaattaattttgaaagcgtgtttttcaaaataataaatcttgaagaggaacaaaatccttttatccacaagatgttattagaggtaattcaagcatacaggcaaggattttatcaaatttgtattccttcattgtttgcaatacttgaaaggtatttggctgatctttcaaatgatggtgacttaagtaatgtgaagtatagtatgggtttggcacgaaaagtttggattgaaaacgatgagaacggtcaattcattgaaaatgatagtgaaattccttatcagtttgtgcagagtatctatttaattaaacaattcttagataagtattttatcaagattgattttgaaagttttgattcgttgaataggcacgcatttgcccatggaagacaacaatactatgcaactcgtgttgatgttgtaaagttaatttttgttattacaagcattattagtatgtattatgaaattgaattcattacttctgaggaatag

SEQ ID NO: 157756 - DNA, 219 bp, Enterobacter cloacae
gtggcggggtggttatccctgcccgctatcctgctgttaagtatcccctttatcacgctgattagcgtcacgccctggcatcatctgaagctggcctggcgcgacgacagcgccattgccgtctctatgggactgggtgtgctggcactcggaattatcattcttatcggcatgccggtggcatggtggctgtcacaagcacgggtcgaaaacgattga

SEQ ID NO: 157757 - DNA, 378 bp, Enterobacter cloacae
atgaacttagatactcttgaataccttctgcgggatggtgaagaaatcatccgggaatctgcacgtgaaaatggagtaaacgaagaaagtgcaattggggttgccaaaaaagttataggtgaacggagcgctgttggccttatcggaaagcaaccctacgtttttgaaaaagcaatattgccactaattgaaaatgtttcatgtatcggttggttcgacgaatacgatggcgataatggttctaattttgattgtaaggctcacatcgaagaagcacgactaactcactgctatcgtgaagaccgtatgctctgcgaaagctgtgaggaagaggaagactatcgcgcagcaagaaaagctgattacatgcgagaataa

SEQ ID NO: 157758 - DNA, 1134 bp, Enterobacter cloacae; identical to SEQ ID NO: 115412

SEQ ID NO: 157759 - DNA, 1449 bp, Enterobacter cloacae
atgaaactctctaagatcgcgctggccgttgccacattagcggttgcgtcttccgcacttgcacacggatatatagaatcccccgccagccgcgcttatatgtgtaagctcggccagaatattgactgtggctctgtacaatatgaaccgcagagcgtagaaaagacctccggcttcccgacgggcgcaatgccgcctgacggccagcttgccagcgccggtattgccagctactcccagcttgataagcagagcctgaacgcctggactaaaagccccatgacggcaggcccgcatgaatttgtctggcaccataccgcgccgcataaaaccaccaactggcgttattacattaccaaacaaaactgggaccccaataaaccgctgacccgtgaccagttcgaattaacgccgttctgtactattaacgggaatggtcaggcaccgtccatgacaaaatccaagacctgtaatgtcccggaacgtacgggctaccaggttatttatggcgtgtgggaaattgcggataccacaaacagtttctatcaggccattgacgttgatttcggtaacggcggcaacgtcacgccggacgataccccagcggtaatatcccagtggagtaaaaccctgagcggacagattgccgggaataacctgaacgtgggcgataaagtgattgcacgcttcttcgacgccaacggggaagttgccgccctgcgtactgaaatgaccatcggctcttcagaacaaggcgacgctaaccagtggtcctacgatctggcgcagaagatcaacaccgctcatagcgatgtccgcgtcggtgtgaaagatgaagccggtgaaattagtccggttcacggcgccaacagcgtattcgtgaaagacggcagcacgctgaaatccgttgccatctcttatgaagagcaaaaagcgcaggtgagcgagaccatcgccgtttccgatctgcaatacagcaaaatcgaacatggcaatgtgattgtaaccttccatgtgaacacgcagggtgacgttaattttgaagcgcacgtgatgaaccaccacggtgccgaaaaaggttacctgaagcaggatatgaataacgtcaatcaaaacgtgaccatgacgctgactgacgtcacggcgggccaccatatgctgaaatactacgccaccaacaaagacggcaccctgttcgcgcaggacgtgctaaacctgatgctggaaagcgacgcggcggacagcagcggcccgcatgactttatcttcccggacagcattgcctcttacaaagcgggcaccgtggtgttacagcctaaaaacggtaagacctacgagtgtaaaccgttcccgtatagcggctactgcgtgcagtacagcccaaccgcaaaccagtttgagccaggcgtgggcgcgcactggagagaggcgtgggtgctgaagaactga

SEQ ID NO: 157760 - DNA, 714 bp, Enterobacter cloacae
atgaaacaacacacactgagcctgtggctcggtggggtgttgttcggcctgttaacctccgccgcgcaggcggagccgtggacgctcgaacacaccctgaccgaagcccagcgctactcggcagaactctctgccagccgtaatgaagcgcaggcgctggatgcgatggcggattccgccacgcaattacctgacccaaaactgaagttcggtatcgaaaacgtgccggtacagggcagcaacgatcggcggctgacgcgcgaagggatgaccatgcagaaggttggcatcatgcaaagctacgtcagctcagagaagcgggaacgtaaagcgcagacctttcaggcgcaggcgcgaagcgtgctggcaaaatccgaggccgtccgcgccgcgcttcagcgtgataccgcccaggcctggctggatctggcgctggcccagcaggcgctgaacacggccagaacgctggtccgcgaaacggaacgccagcggggcgtgcagaaggcgagcgtcggggcgggaagcgccacgccggacagcgtactggccctgcaaatgatcctcagcgccatgcgcgacaaagagacgctggcgcagcgggatgtgcagctggcgcaaagccgtctgctggagcttacggggcacgcgattacggcggttcgcggtccgctgccgcgctatcagcgtcttcctgccgatgaaaaaacgttgtag

SEQ ID NO: 157761 - DNA, 447 bp, Enterobacter cloacae
atgaaaacacgactcctcctgtgcgcgggcttatttgccgcctccagtgcccatgccagcgccctctatttttatgaagccggcaccgaagataccgcgcttgccggagcagggcaggcggctcgtgcgcaggatgcctcgacaatcatgaccaaccctgctggcatgacgcgcctgccggatcatatggtcactggcgggttacaggttatggatggctccatcgacaaccagctggataaccatgcccatcaaagccccggcgacgtgatgaaaaccatcccgaatgccagcgccttttatagccagaagataaacgatgatctttatgccgggatcgggctttacggtaattacggtctggggatcgattacggtagctgggcgggcgacaggctgattaaaaagggctatttgcaaactaaggttggaattccatcattctag

SEQ ID NO: 157762 - DNA, 330 bp, Enterobacter cloacae
atgcaaaccttatcatcacacccgacacgggcgactcagcccaatctgtcacccgttgaaacctggcaacggctgctgactcatcttttatcgcagcactatggcctgacgttgaatgacacaccgttcagtaatgaaaccaccatacgagaacatattgatgctggagtatcgctcagcgatgcggtgaactttcttgtcgaaaaatacgggcttgtccgtatcgaccgaaagggattttcgtggcaagaacaaaccacgtatatttccatagtggatattctgcaagcaaggcgctctaccggcttgctaaaaactaatgtgaaataa

SEQ ID NO: 157763 - DNA, 366 bp, Enterobacter cloacae
atgaacaatcactccgaatccggtaccaaaccggagaatcccgcctgccagcagtggggactaaagcgcacaatcacaccctgttttggcgctcgtctggtgcaggaaggcaaccgggtgcattttctcgctgacagggccggattcaacggtactttcagcgacaacgatgcattgcgcctcgaccaggcctttccgttgatactcaaacaactggagttgatgctcaccagcggagaactctctcacctgcatcagcactgcatcacgctataccacaatggactgacttgcgaagctgacacactcggctcctgtggctatgtctacatcgctatttatcccgaccagcctgaaccccattaa

SEQ ID NO: 157764 - DNA, 624 bp, Enterobacter cloacae; identical to SEQ ID NO: 34655

SEQ ID NO: 157765 - DNA, 213 bp, Enterobacter cloacae; identical to SEQ ID NO: 34658

SEQ ID NO: 157766 - DNA, 726 bp, Enterobacter cloacae
atgaaaccaaacgatatcgaactgctgtttaaagaaatgcgtggggtctatgaaaatcaactaaatggtcttaaggcaatgagaccgtctatcaaaatgttggaacagtacaacagtgaagctcagcagtggttagataacctgagggcacgttttgaaaatgagaaagacctttgtcttagtgaatgtgaaagcttaataagagaagatggagatgatatttggcgtagagcagcatggcacggagagtttgataaatatctttatttatcattgtgttattatcattttgctatatttaagcaatttaaccatcgattgagcgaagcatgtctgcatctccagaatgcacagtattattgcgggatatggaaaggtgcacgggatcggctggattggattacccatagcgaaaaaaaacaaatagaaagaactgaaaaggcaagaaaggcgggtttaaaacgcggtgagaagctatttggcgcagttaaaaccgaagcaatccggcttctcaaagccaacatgcctaaaaatgggtggattgatccaactgaagcctttgattgtattgacgatgaattgtggttctttattgaggaacaaacaaaaaaaggtgaagaaccagtactgatttatgatgaattagagcgcacagtgcttaggtggttagcagaggatgaaaatgtgaaagccgcttttgaagaagtgattattggcaaacagtga

SEQ ID NO: 157767 - DNA, 3783 bp, Enterobacter cloacae
gtgggtaggaagtcacgtgaaaagcgggaaagaaaactaacagagcaaaaggttgattatgattctttgctacacgatatgtccagatatcgtgaattgtttacgaatggggtaggtgaagacacatacttttgtaagcatctggaagccacccagaatttatttcgccgatacaaaaccctcgacgtagcagttgcattatttacttccgaactctggccagccaatacaggtagccccataaagcatatttttgcttggtgtgtccttttagagctgccatttgagtctcaggtaggtatatcgattgatagctatatagattttaaagtatttacaacagaattatacgcatcatggcctgaattcccaatgcttgaggatttttcccccgaggctgattgggggcaaatcaaagtacggcttggtcaagacttcgtccctatgttctacgggagttgcattgagagaatgtctgacttcgtagaagcatttcgcattacctatgcgcatattccagaagcacaagcccatatggatcttgccattgcgctgcaagcgcagatcatcgaatcgattcctgagttgatgctctctgtcaacaccgaggcccaatgtgctgatgttgaactagctactgaagacttttggttgacttgcaagtctttgcttcaacaacttggcaatgagctagcgaaccgtcggaagaaagcagggtgtacgttcgatactcttgttggcaccttcaaagcaccgctgaaaccggatgcgttcggaaatgcagtgatgcaaggcatggcgctacccttccttgctgtcgagatggatgggttatggataccaatgtcagtacgcagtgctccgggtctcattattgaccattgggctaacaaaaatctgaacgggattagcccctctacacacaggaaacttgcagagttcgtcgctgagcgattccaaagaacccttatggggcctttgactctatatgttgacggcaccgcctgcaaagacctgcctatcagttgtattataccgggtaattctgggatatatctcatttgcacatgtgaccacacatcgaatgaccgtctgtcaaacgcagcggaaagcatatacgccaaggtgagttgtggatcgccgattttcttccgtcttgatgatggacgtttcctttctctatctagagatggtgcagaacctggcgtcgacgagcttcacatcgttgttgtcgttacactcgcgggtactgcgtttaattccatcaatctcccctcaaagccaactcgtttgtttccattagcggatttcatcacgatttttgatagtctcaaagatctggaggaattagaatgttattggaaatttgctgatgctcaagaggggacgctcagcccattttcccgtggaacagtagacttgtttgcatcattcaaagacatgcatggtgtacttgtcgaaggtgcgattgcacctaacttcattgggctagaccctcactggggtacttcttggcgcttcaagatattgacagaattctggtctcgcgcacccaaggtatttccagacagctctatcggatgggcgttgagttcttcaactgaaggtgtcgttcgacttgaatcgcgtcatcacaaagcgatggcatactcaacatcgattggttcctgtaccgtccaaacattaatagaaatacccaaagaattacgctttgaagatggacgtttgataggcctttttacccaacttctggccgactgtagctatcgctgcagaaaaatgatgtctgatatctctctatttaggcagccgcatgttttgttttcctgctcccctgatccatctagtctggttaaagctgaagagagtccttcttctttagacgaatttaaacacgtggtgacttcagtcatcccggattcccacaaccccgatgtatttcacgttcaagttgatacacgtgcagtgcttgccgggttaaatctttccaaggatggatcattcgaggttcgttgcttactggaaacgcttgaaaaatgtcatgcagtacttggtttgcagatgcctgatgaatttgctcaacgatttactcatatagcgtcgcaagcggctcgttatcatttaaaagtcatgacccgtaatattgatgtccccgactatgtataccctataattccttcgcctaccgattacaagcttgcacgtagaagactggccgcagaaatcatggggcttgggtttattcctggcaggtatgaactgtcagatgccaaggccaggattgatccttccagtgctcgcatgcgtcttcacattgagaatcgacttgcagcatttgataggcatcagcttctgcaggcattcatcgagcaacacgatgccctccttgttactgagaggactagaatccaacgagcccggttgagtcttgctcatgaagttgagtacgacagacttgatgcgattgaacaggcacgcaaagaattcggagatatggctcggcattatcgatatctgttggaaaagaccgtcagtttatcttcaaacggtgtagatgacgttacagaggatgtactacgggagttagtaggtttggttgattggttcatggtgctgactggtgccagtgatacccttcacaatggcatagatgtggggggagttgaaatcgacgactcgtatattccagaagttttctattcggcaggttttgatgatcgtgaggcggtttttgcaagggagtacgcaaaatccagactgggactcggtgcaaatgacaaggatgctgtagaaggtgaatcggtagatttactgtcgtcagagaaactcaaagaggcttttataaccgatttgggcttcgaactgcagaacatgctcactgctctcgctgttttatcgcaagctcaacaatatgggtttggcgacgaactttcactgtcttatgttgctgcaccggatcgcctcgcgcaagtattgtctgacagtatcgatagacttgactattctgaggcccaaaaaatcgttgcttttctgactctttcggaaacaggtgttcgcaggcttgctggacgggatatcgatgagggagatatcccatactgggagcgtaacaagcgaatcgaccgatacacaattaagccactggtaattgatggtaccgacctgcgttggggggccgaatcagcaagccgggcaatgtatatttggatgtcggcggtacgagacggttatttgccagcagaatttgattggcctcatgttaagcccgtcattcgcgatgttaaggaaagcattgaaaagcgcctcgagcttcgtacagaggagatttttcgcagacatacaccatatgttctgcgaggtatcgatttctttagaagattccgtagagagaaatttgatgacgttggcgacttcgatgtcttcgtatactggccggaagataatttgcttgtgacggtagagtgcaagtacaaccagccgccatatacaatgaaagatagccgtcgtcttcgtgatcggatatttggcaaggcagagaatgacagggcaggacaattcagtcgtattttagaccgcagaaaatttctcgaaactcaccgttcaagattgcttgaactgctccagtggccacagcatgagagtgtacctttaaggaatattgaactctatgtaagccgcgatgtgtactactggatggttcatccgccatatcctgttccgacccagtttgtacgtgtagacactttggacacttggatcaaaaccgaactaaacatcccttga

SEQ ID NO: 157768 - DNA, 4428 bp, Enterobacter cloacae
atgagtgaagatattaagaaaaccgccatcactgcagctggttatatttatcaaaatcgtcagggccttaaggtcctgtgcgattggcttgatgcaccgacgcgctatagccgcgtgaaatttgaatgtgataatgaaaacgaagcaccacagggactagatgatatcgtcatcgaacgaagtgatggctttgttgaccttcaacagatcaagttcactccagattctgacacgcatcttctatcttgggattggatgctagagaaaacgggcaaaacggaacggtctagatcgatgctacgtaaatggttcgatgctttcaaacagctcgatccagcacgtattggcgaaatctcgctaataactaaccgtcgacctgatgcagcgattgaagcttgtctggggctagataggattcatttttccaagatccctgagcctcagcgctccagagttgaaactgaactcggtagcattgaggaatgcgaagcgtttttcaaccaattacgcattcgacacagcgataagggctatcttgcattggagcatgaagttgatgctcgccttcgactgcatggtacgccagagggaatcgctaatctaaaatatgtggcactgaattgggcgacgcaaaaaaatctccctgcgccggatggctggatcaaactggcagaggttggaactatcttgcgagcttcacctccagctcctttgccagaggattttgttgttccagaaggttatgaggttcctgatgagatattccatcaagaatttgtccagagcacaattaatgctaccgggaagtcaattgtgctgactggtccaccaggacgcggaaagagtacttacctgagcgcactgtgcgacacgcttgcagaaaaaggtatcccaacggttcgccatcactattttctgtcgacaaccgagcgaggccgcgaccgggttaatagctacgttgtcgagcaatccattctggcacagatccaacagtttcacgaggatgttccgaagactggtggaggcttacatacacaattggaggcatgtgctgcccactacaaagtactgggaaagccatttgtgctcattcttgatggtttggatcatgtctggcgtatcaacgctgaggataaacggccactagatgaccttttctgtcaggtaattccctgcccggaaaatatggtactgctcgtcggcactcaaccggtaaatgatgaacagttgccagcggatttgctcgcctttgcaccaaaatctgagtggcacacattgcctgcaatgtctgagagtgcagtactttcttatctacgtagaacagttcaggaaggctggcttacaactggttttgaaagtgaaggacaaattgaagaacaactacagagtgcagcatctgctcttcgtaagaaaactaatggccatcctcttcacgttatttatgcaacttcagaattgaaacattcgggccgcagactatctagttgggatattgagcagttgaagggagacttgagccaagacgcccgattttactatgcatctctatgggaacgtctcgctccaagccaaaaggatgcgctaaggcttatctgtgcctttacttttttctggcctaagacagccttctcagagattgctaccaaaattaaggcggtggaaccagatgtggataaagtagagcacttgctccattcgtctgtggctggtcttaaagtcttccatgaaagtttggctgttttcgtacgtgcaactgatggctttgagagtcgaatcaatgaattaatgcctgttattgcagactggcttgaacaccaggcacctacttcactacgagtgaactggttatggacagtccaagcgaagcttggtaaccccaacaatcttattacaggtttaactcgtgactggatcatgagtcgcttaaaagaaggatattcagaagctttatttgagatattattgtcagaagccctgagcgctgcgcttgaaactgcaaatttttcagatgcctaccggttagcgcatctgaaagctcgtatggttgatggtagtcaatttcagatgcaggatagcgatctagctaggctcatatcttttacactgacactaacctcagaggaaagtgtgatacgagagtctatagcctccaggcatgaaacggatattttacacgttgctgcacttggtctggccttactgtctcgaggggatattattcaggcagaaatttgcggtgaagaagcctttcatcggttcagagccctatgccaattttccaataaatataattcaagggctggttctgatgaactcacgttttttgccagtgcatttacacagcttggcgttatcgctgatacatctgaaaatctcgcttggttagtcgacaaaaatagcccggacatatggttacctcgcgttcaaatgctgattcaaaaaggtaatttggatgatttaatgttgctcgcagcttctctacccgacggacagaaaaagaacataattagcgatgcttgtatacgtgcggctgcgactgcaggggtggtagtgaccgagcgagaggacttcgacgaacttgtcagaactccatttgtggctgcaatagaggccgcgttaatcaaaacctcaactccttcgagccaaccaatcccggtgaattggataagcgacagctattacaaacaaaaagataatttggcgactctcacgcatcactggctatttggcgctgtacatctgaatctttgtatgattgcagaagggcaaacaaacttcgagcacatcaaagcccctgtgtacgaagatagagaagatattactgattatctcaatgtactgtccggaattggtgcacaaatagcccaacgatggtggtgtggggaattcattaacttccatgagctgtatgaattactcgagcctgttgaatcgcgacgatttagacaaagttattttagaaaatcggcaacagaggactttcaagcggcactacatcgtattgcttgcgatatacatattggtagtgttctgctttcggggactagtgctgcgacactttccccagcgaccattgatgttgcgttgcaatgcgcttggttcgatagtgcgtcattccgcactcagtacgcatctggttcattgatcagaatggccgacgaagcggctatcacatttattggcgctcaacgtttgttacttgatgcagacattcaaaatgagactagtgtacatcttcaaataccattacaactctgtgcgatagcgatcttccatcgactgtattcggaggctcgtgagctttgcacgcagacgtgggaattgaccactggatacggacatcgtaaagacccgacactgagtaatacggttgatgccatcgcttatttggttgatgtagtgccgaatgaagcttgtcgattactggctaaaattgctccgcagatacatcatgttttggattacaccgatggtaagggtacgagacatgttcttgctgaagcagatcggctactggcaaagctgaagccttccgcattggtaataaaatttgaagagcatatatgtgtgggtgactgggctttggctgagggcagcatgcaggcctacatcaaacagggaatcatcgaagagtggcctctggatgctctaatgcgcacaggccttcatcccgaaattcgggatgcactgcaacaacttgtagaggatggttgtgcagctgcttccgagcggcttcgcattcttgataagcacaatggatgggatattggttgtttacagcgccacgaaaattcaagtagtgatgctgacaacaaaccttatgaaggtgatgtgacggtctttagacctgagcaattagaagacttgctcaaagttctggaaccatattacaaagagcgtccaaaacttctccgtacttggtatcagcactgggaaagccaaaagcaggggcgaaatttactcgtcgaactggataagattctatttacagaaaacaacaaatggatgagggaagctctacaactttctgagtttgcctttcaaacaaaacgtagatcaagtggtttaacagcggcctggaagtatcttgttcatgcacagatccgtaatgggggatggattggttacatggagaacgtggatgtgacttgcaacagactcgatctggttgcccaaaattatccgcagcgctgtgatgaatttgtgaccgtaacaacctacagcatgtttgatgacccggtgtcgtcacgcttagccccatcggaagtcatggtctatttctacgttaagcaaaatcgcatagatgaagctataaagttcacggagacgatggtcaattgtgtgattgaggatactcgaacgttgcccttggaaccaccttgctggatgtcagagctgctcgaacctgtcggcctggaggttaaatga

SEQ ID NO: 157769 - DNA, 1449 bp, Enterobacter cloacae
atgaacgatcttcgcattcttattgcccgtcttggatggcctgctacgtccgcccggtggtggactattcaggaacttgccgctcgactgggagagcctgatacgaaagctgaaaccgaatcattgctgcttcaattgcttcgctcgcgcaaacttgaagctgaggttgtcgaagtattatgtattttctggatggcaattaaagagtttaactactttcctacgactttgttggcagagaatattcttctaccctcaccactctcagcattgttgatgaaagattttgggttatcgattctgctcgtgaatactgatttggaactagctccagaagacttcatcattcccgatgactttgatagtgttcaaggtacggatttgccaagaatcttccatacaaccattagcaagttggaaacttttacccgctgtccgtttattcgacaaatggccttcgaatggacaaaaaaccggacggcatatccaaatgcacagtaccaaggggatgcaggatatttcattcggcccttgggagagggctttgcccctcatttttcctctcgaacagcccttcgcgtaatttccgcttatcttcgcacgttagctgtggctagacacatctggaggataccaatggagttgaccgagcaacaatctctcttggcgttgcctatccatccaactttggcttttcttcgacctaatcgtcccgaatggctctcagtatcgactgaattcaaaagtgatagtaaggcgatcgaggcttcattgcgaactttctttgctcaagtagaggcggcaaacccaggagacgagctaattgcatttagctcgcccatttcaatgtcaatggaacagtgcgtagagttgtcgattgttcggtggtcacaaactgtaagtagtgataaggaaggagcggactcgttgacatcccatcttgaatcgttctggacacgtgaacaaatgctttctagccaagctccggatccactcagtacaacaaccttaataactccaccaacttttgaacaactggtgaataaaacttgtatggcttggccattggcgggaacgctcgattttggtcggataggatacctacaacatgatttgtatccatcccggctatttttaccgacgatgccaggcatagaaaattctcttgaagtcatcccgcatgatgggcgtctacaggctaagataaaggaccaggtcgttgcagagctccattattggaatgctggatgggggcctgctaggctgtggcagattcaaggtaattgcgggacagccctcatatcgcgaggcactacatatcgcgagagaaacataacaaataccgggtcattgcactcattttactcttggcaagtacgtagattatatcgtaatggaagttatggcagattcagtgaaaaaattacgagaggggtggtgtttgtttga

SEQ ID NO: 157770 - DNA, 1698 bp, Enterobacter cloacae
atgagccaatttaaattcacagaacttcatgctatttcggaaaagccacagaatgatgatgccgcttggttaatagaggctgaaagttccattaaatttctgaaagaaaatgctcaaaatgatgaagtagtcatctacgcgattggaagtagtgtcctaattcatggcgcgctagccctagagaaaagtgttactgcagcagatagatgggcattgcagaatatgcgtatggatgttgagtattgttggaaaattcaaaagtcatggggtggaggtcaaggacatcgtatttatcttgagccacctttagatggggtgttcaaagggggagaagcattaatttatcgtcgtaggtttcatggtgttgaagaaggccgtacacctatcgaattgagtcagaaacttgtgcatagccttgggttatattacttgccagaaagaaatgcatattgtcgtctcgatgatcggggtgatattgaggatgtaatcaggataattaacaaaaacatttcatctccttttaaatatctagatatagttactattaagcgaaaggacttggatacatttatggctttatccaaaacatgtcttgttttaaagtttgattttacgcgtgtcagatggggtaattttgctggctgggggaatatcaacagatatactaaagatgaaggggatcttttttatcatggtggtattaacgtggaagccagttactgtaatggtgtaatgattattcgccctcaagtaactgtacgcagtctggtaaaagcatggaaggatgaagataatccatctaagaggaaatacgcaacctttaaaatatacgatcgtaaaaatagctgcaacgttgaaacatcttgcgggccagactcaatatctaactatttccaagaaaataaattaccatgggaagtttcacctgccttttttagagcagaagtgttacatcgtttcaaggcggatccagaaaaatatactttagaagaaagaagtattgcttgtcgaaatgcttggtatttaaaatcctatgatattaatgaggccgggcaagttcatgtatacattggtgatttggctcggttaccatatgaagaacagctttattggcaagccttcaatgaatggccaaaaggaacaatttctaagcgtgcatttcagactgatattgttggggaatggtatctgtcctatgaaccattgttggcactcaaacacaaaatttcgctaatggacaagaatcctcccatctggtggaagccacggggtacagtattgagtgacgctgttcagtatcctgcaacggattcaatcaaagagtggggtgatgaaatccttgcgcttgatcagtatttagttgagggctttttaccaaagccactgagtgaaattgctaaatatgagggccgaaccattgaacccaaatggggatccttacgcatactacaagaagctcttattgctaaaagcgcaacagtagatgaagcgaaaatgttagttcagcctatgcaaaaactgcatactctacgaaccgaagtacgcggacatgcttctacagaaaaaaagaagaaggcgatattagaagcgcgtaccgatcatgaaaatctacgtgcacacttcactaaccttgtggggcaatgtgaagcatcatttaatgatattttaaggatttttgattttaaaatagatgattag

SEQ ID NO: 157771 - DNA, 1296 bp, Enterobacter cloacae; identical to SEQ ID NO: 115407

SEQ ID NO: 157772 - DNA, 792 bp, Enterobacter cloacae
atgtctgcaaccgcacaaaaatggctgctgcgcgccgcgccgtggtttctgcccgtcggcattgtcctcgtctggcaactggcgtcttcaactggctggctgtcgagccgcattttgccctctccggagggcgttgtggaagcgttctggtcgctaagcgccagcggtgagctgtggcaacatcttgccatcagctcctggcgcgcggtaattggcttttcgattggcggaagcatcggcctgacgctggggctgatcagcggcctgtcacgctggggtgagcggctgctggatacctccgttcagatgctgcgcaacgtgccgcatctggcgcttattccgctggttatcctgtggtttggcattgatgagagcgccaaaattttcctcgtggcgctgggaacgttattcccgatttatatcaatacctggcatgggatccgtaatatcgatcgcggtctggtggagatggcccgcagctatggcctgtcaggttttgccctgtttacccatgtgatcctgccgggcgccctgccctccattatggttggggtgcgttttgcgctcggcctgatgtggctaaccctgatcgtggcggaaaccatttcggctaactccggcattggttatctggcgatgaacgcccgcgagttcctgcaaacggacgtggtggtggttgccattatcctttatgccctgctcggcaaacttgcggacgtcagcgcccagtggctggaacgtagctggctgcgctggaacccggcctacaccgctcaggaggcgaaagcatga

SEQ ID NO: 157773 - DNA, 240 bp, Enterobacter cloacae
atgccacgcacagcagacataaatgccgcttttatcgcggcaatagaggttaacccaaaagggtaccgctatctacgaacagacagcttcatcaaaaagctgcgggggtttaactggcacttcagccgtgcagaagcaaacacatggatagaacgctatcaacccggttttgcagataagacaactgacggcagtgataacagatactggatcctgcgtaacatggggagagttctctaa

SEQ ID NO: 157774 - DNA, 1830 bp, Enterobacter cloacae
atggaatttagaaaagacataaacgctttgcgttctcttgctgttttagcggtaattatttttcattttaatagcgactacctcccgggtggttttgctggagtggatgttttcttcgtcatttctggttatctaatgacaaaaataattttatctggaatcgacgaaaataacttcagtttaaaaagattctatctggcacgtgctaggagaataatcccagcattgacaattatatgtttaatcaccatattgattggctggctttttatcaagccttcagatttttatgaaatgggtaaggatgttgcaagtagcatactattcatttcaaacttcctttattggtcaagatcaggatattttgacaactcttctgttaataattttcttttacacacatggtctctttctgttgagtggcaattttatattgtatatccattattgttgttagctgtttcaaagatattgggtttgaaagcggccaaacattctatccttgtactttttattttttctttctttgcatctctatatggcacttataattatgctgaagcaagttattttatgtttcctactagagcctgggcaatgcttgctggaggattagtatatatcatacctcctctgaaaattttgaaaagaacactgagtcttgtgggtctctcaataataattacaagtttattcataattaataaagaaacgccatggccagggttaatggcaataattccggtttttggggcattcctgtgtatatattcaaatgctactttacgcttttttgatttgaagcctttacaatacatcggtacgatatcatatgaagcctatttggtccactggcctcttttagtatttattcgcaaaatcagtctggatattaactttgcatggtacgcttttgttaccttagccctttcatttattttaaatatatccttgcagacttttaaatcaaataaaaaacttccaataacatttttcgcatgtcttgcatcttgcttgttggtaataacaaataatggatatacaagcagagttccggaacagtacagaatcaccaaccaagaattccataaaaaatactatggtggagctgattatccttctaataaggtattctatataaattctagcgaaagtaaatttgattacatcataactggcgatagttttggtttgcaatatgctaagtcatttgatgaacatgaagtagaagcagcagctctttttgatcatggctgcctaatatttcctaattattcaaggtacttaaataataaagaagacacttcatgctctgaagaatatacaaaattaaaagctcttatggataaggaaccacaagcaccccttgtgtttgcaagctcctgggatacttacgatggaatgcttataaaaaaagggggggatacgccaattaaaaaagataaagattcatattacaccatagtgttaagtgaaattttatcggttattcaggatggcggcgacaagcgtatgtatttcataataggtcgtccccaaccagcaagagttgatggcttcggttgcctgactggtgaaagccttataggatataggttgatctctaactgtcaagaatggcagaagaaagaaaatgtagatataaacctttacctacaaaataaattggctcatattaaaaatgttagatttatagaccctaatgatgctctttgtgataattctcagtgtaagataatttacaaaagagaacctatttatacagatggcgggcatctttctatttacggcgcggaaatagtcacaaagtatattattgaacatctttag

SEQ ID NO: 157775 - DNA, 657 bp, Enterobacter cloacae
atgcccgttgatggtcgccgtgatgctgtttacctgcgtggccatagcctgctggtaatccgagaacgtctggttaaggctgttgatggatgccttgttgccgttcacgtcagtctgcaaactcagcagcgaacgcgccgttgcctccttctcgttgacgatcacctcatcaatgcggtccagttgcgcgctgttaccggcgaccgatgcagacagtgttttgcgcgccaccacctgcgccaggttgccctgaataatcgcgatggcggagttcttcactccccccgccatgccgtccatagacacgttgatgctatcgatacgctgacccagtgcggtatcggccgtcgccactgtctgctcaagctcgttcagagaagaagacacatctccgaccttgctcgacaggtttgtaacgttggtctgaacctttccgatatcctgggcattttgggcaattttctgcgcctgttgctccagttcgtcgttggcctgtttgatgtcgttagccatgccagcaattttttcattgctgtccaccgcgttctcgatcaggtctttgaacgtatcggagcctttcatgtcctccaggattgcatcggtgatgtcggatacatcgatgctggcctgcccgcgcacaaagtctgtataccctga

SEQ ID NO: 157776 - DNA, 450 bp, Enterobacter cloacae
atgggaggagagatagctcagcacattaaaactttgcagcttttctgccatttgctgccaggtcaaatccatatcggccagacagtccaccgctttcgccgcctgctcctgatagtcaaagttgatcatcgcatcgaaaccgtggcggtaataatcgctctgcatcacgccgtggccccaggattcaccggtcatccagaatggcgcattgtcgagttttttgtccgggttggcggctttccacgcggccagcgcctggctggcctggtttttcagttgctgccaggcttcaggctcaacgtgcttagcggtatcgacccggaagccgtcgatgccgtagtcacgtacccactggctgagccagtgggtcaggtaatctcgcggcgtgaaattcgtcatcactttcgcgttggtgtcgggcttgtgttgataaaagttcggcaaacctga

SEQ ID NO: 157777 - DNA, 894 bp, Enterobacter cloacae
atggtgcgtaatcttaagagtaatgacgaattttcgcgtgaactgtcttttctttttcacaggtctataaagattagaaattcaggtttcgcaatttttggtgcaggtctattgataatgatttttagtgtttgtgtgtggttgttgtcattacacttctcaccttcagttctggactttgatattgatgtgcccttgtcattaattgattcacctgagggcgaaggtaaattaatgattgagggtattggcgattcatttggaggtttctttactacatactctaagttgttattagggattatgggtctatttttagtgtattcaactgtttttaaaattataaagggaggggaaataggcgagatattcccgatgcttataattggctctgcttttcttataggcatgtcagtttttacatctgctttaggttctgatgagactgatgtcaattcatcctcgacggtaaattttatcaagaaatatgtaaaagatgagaattacgataaacttgttgcatatttaaatgatagtagttggccctcaggtgaagatgtatctgtgaactatttaaaggcacagttgcatataaaacttggcaagccagatgtaaagctaacacagaatgttgtggagacgtatacgtctggtttattgcagtctaatattcccgtgaaagttcgttatgcattggaaaagacagctttagataaaaccgtctcaccgcttgcgattcgttatgagcaaaaacgtattactaaatcacataactttgcaaaaatgtcggttaattgtcttaaagtaggtagtccggtgacgttcgttggcgttttgttcgctcttcttggtataagaatcaggcggcgggtcagatttattgcatcacattaa

SEQ ID NO: 157778 - DNA, 177 bp, Enterobacter cloacae; identical to SEQ ID NO: 128515

SEQ ID NO: 157779 - DNA, 756 bp, Enterobacter cloacae; identical to SEQ ID NO: 116343

SEQ ID NO: 157780 - DNA, 393 bp, Enterobacter cloacae
atggccagcgagcgcggactgaccaacatccgcttcttcccgcttcagtcttatgacgcgctgcccgcgctgctgaaaatggcggattgccatctggtggtgcaaaaacgcggcgcggcggatgcggtgctgccgtccaagctgaccaacattctggcagtgggcggaaacgcggtgattacggcagaagccgcaacagaattaggccagctgtgcaacagctacccgggcattgccgtttgcgtggagccggaatcggttcctgcgctggtgaccggaattgagcaggcactcgccatgccaaaagagaacacggtggcacgtgaatatgccgaacgcacgctcgagaaagagaacgtgctgagccaatttattgcagatatacggggataa

SEQ ID NO: 157781 - DNA, 411 bp, Enterobacter cloacae
atggggatcggcgtggagaatacgccgtcaggcatgcagtcgcaggttatcttcctggctgaccgcttcgccgttactcaccaggcaggagcgaccgttacgcttccgttcgttatccagaacgggcagaccataatccgggacacggtcattggagacgggacgattggaaacgccaaaatcggcagctatatccaatcttcaacctgggacggcaccgggaacgttggctggcacatcaacaaatctggctacgcgacgtttaacaacgtgaccgttcgcggctcgatttacgccacaaacggtaatttttctttcaatggctccggcaacacaacggtgattaatggtaatggcgtaaccattaatattccgggtggcggccgcatcgtactggggacgtggacataa

SEQ ID NO: 157782 - DNA, 468 bp, Enterobacter cloacae
atgcctgtttttgaactcaaccagtggtatgtttggggcagaatttacagtaaaaaaattattaattgtgtatattttgaagatgggcgtcgatacgaagatattatgtttactccctatctttacctgaaggcaaagattatttatagcataaataagccattgattggttataggcatactcctaatagtattaccaagagtataaaagaacgtgattaccttgatataatttacgcattgcaaaagtttaaaaaccatgcaaacaaatttattagtaacaatgttaatggatattttagaactttagaagaaacaaaacgcattgcaaatgatattttaaatgataataattctttggatgtaaaatatcaaataaaatggtcaaaattaataactgtaaaatactatcgattatcaagcacattttcatggttcaaaaaaaaactcaaggccgctctcaattaa

SEQ ID NO: 157783 - DNA, 285 bp, Enterobacter cloacae
atggaagaaaaaatgcaatatgcggctgtaccgcagaaatttaaatttagcctctcgcagctggtgaatattcgtattagcgatgaatggggagaggtgcaggcccgcgctcaatatgcaaatagcgagaatcaatatctgattcactaccaggcagcagacaaatgcgcccgtactgaatggtttactcaatcggtactggatgcggtggaagacgataaacatcctggttgtccggtatttggtgctgttgagttaccaaaaggtgcagtagctaaagagtag

SEQ ID NO: 157784 - DNA, 531 bp, Enterobacter cloacae
atgagctggctactgtcccgctggaaatctgtgctgatcgcggcgctctgtggtctggctgtctggtggttcagccatcagcgttatacagccgggtacagtgatgccagcgcagagtgggcgctgaaatggaaacagcgtgatgctgacgatgccacagcactggctaagcggcaggcagaggccagggaagaagaacaacgccgacagggtgaagttgatgagatcagaaaacaatcccgccagcagcttgctggcgtcctggctgatgccgatcgtgcccgtgctgcttctcgtgggctgcacgacagggccgataaactcgccaggcaactggcagaacgtgaacgcgcctgcggtgccggtactcccggcagaagcgaggcagaacccagcggagccgtattgctcgccgacctgttccgccgcgctgacgagcgagcgggagagctggcaagagaggctgatgaggcaagagccagagggctagcctgtgaggctgcttataactcaataagtaaggaaaagtaa

SEQ ID NO: 157785 - DNA, 441 bp, Enterobacter cloacae
gtggaaatgagtaaaaacggactggccctgctgaaacgctttgagggctgtgagcttaccgcctatcaggatgcagcaggtgtctggactattggctatggctggacgcaacccgtcaacggcgtgccggtcggtaaggggatgaccatcactcaggcaaccgccgacaacctgctgagcagcggtgtggtgcagtatgaaaaaggcgttacaggtctggtgaaggtcgctgttaatcaaaaccagtttgatgctctcgttgattttgcctacaacctgggcgttaacgctctggcgggttccacactgctgaaaaaactgaatgccggggattataggggcgcagcggatgagtttacgaagtggaacaaggcgggcggtaaggttctcaacggtctggttaagcgccgtgccgccgagcggtcactgttcctgtcatga

SEQ ID NO: 157786 - DNA, 2466 bp, Enterobacter cloacae
atgagcacaactaattcgaacgtgcaaataaacccggatatatcagtagcctgcggccgtaatgagaaggtgaattacgcctacgcatggaattcgccggattttgatgttgccactgccaatgggctgacaccagaaccggcacagccagcggctgatgataccgctgttatcagaggctttaattacctcaatcccgaaggggagcggagagcgctttctggcgatgacattattgaactctgcccaccaaccggacagggagcgatagagcgtgatcgtctcacacacgaacgccgggtaatgcatcttcgacgccgcctccaggcgttgcccgcatttatccgttaccgtttctcccggcaactggaggctctgaacgaccaggatccagccagagcggttaaatggttgtttggcacatttgagcgccacatcctccgccgcattgaggcagtcaacgcgcagtacctgccgcaggaggcgcttccgtctatcctgctgccacttcgcgaagattttcatttgctaccttgggctaacaaaaaacgcctgaaacgattggcttataagcttgcgaatttgatgaaaagcgagtttatgcgcgagtttgattttcagatttcgcacactgacgatccggtgtttgcaaccctttactcctatggtgcggttgccagcaaggccagacacctgaatattcccattccggggtggaatgcctactgcaatgaatcacttgaggcggaagatgcacttcgcgccgtggctcgcctccagtcggaaaagtggtggtctggcaagctgaagcgcgcacatgaccgctggcgcgaacacctcatgatagcaacgggttatgtcagcaaacacgcctctccgaagtgctcagaaccctgcctgaaagagtgggctgcgcaaaagaaagcaaactttgagtatctcagcgcgatggagcttgaagaccaggataccggggagcgctcgtcattgcttgacaaggtgatgtcaagtacagccaacccaaagatagcgcgtcttgagctgaccacccgcgcagccggttttcaggaaatcgccgatgaaatggggctggttgggatgttctacacccttaccgccccctccaaatgtcatgccatgcatatcacctctggcaagcgcaatgataaataccggaatgcggatcccagatcgacccagaaatatctctgcaaggtctgggcgcgcacgcgggccgcatggaagcgccggggcattcgtacgttcggttttcgcaccgctgaaccccatcacgattcaacaccacactggcacctcgttctgtggttccgccctgaagacgtggaagaagcaaccgaggttttccgcatgcacgccctcaaggaagacggcaacgagccgggcgcggataagtaccgttttaaggctgaacgggaagacaagagccgtggccgcgcaatcggctatatcgtcaaatatatttcgaaaaatattgatggttacggcatggatggtgaggtggataaggaaaccggcaaccccatcaaagaagaagccagacgcgtaagggcgtgggcttcacgctggggcattcgtcagttccagcagattggcggcgctcccgtcacgacatggcgcgagcttcgtcgccttggaagccgcgaactggtgctgcacccggagattgaacccgttcgcgcagcagctgacggcgcaagctggcaggactacgttcagcttcagggcggagcgtttgttgagcgcgaccagttgaagatccgcctgcactacagcaccaccgaaaacagtaatgattatggtgatacggtctcaaaaatcgaagggatctactgcccgcttgcgggcagcgacgccatcatctacacccgcaccgcacagtacaaaatcgtaccgaagcgcaaaaccccggaaacaaagggtgttgaccttgattttccaggcggcaacgccgccccttggagttctgtcaataactgtacgcgggatcccgcggcaggtgctgacggtgttgaacatgccgccagcgaagctaaagggcagtcagaaatgactgtgccagctgagggcgtgacggtgaattttgatgcgctttcccggcaggaaaagcgcgagctggcgcagcggcttagtgacgatgtgcgcagtaagcgtaaaaagcggctaccggaacggaaagacggggccgagctatccgtgaaagagcagcagatcagtaaactgctggcgctacgtgggattgatgccagcgccggaatggtcagatcgatgatggccggtgcgtcagtggcgtgcggcgatcttgttatgaccgtgcaggacgggcggctggtatcgcgcaaccgcgccgcgtcggggctgaagaagctgccgtcgcaagtgatggcggcgaagcaaaaaacaagcgctcttgtgaataggatgaaagcagcattttcgcggaactaa

SEQ ID NO: 157787 - DNA, 399 bp, Enterobacter cloacae
atggaacatcggtacacgcgggaatgcgaacgacctgattacgatgacaagatcagccagtggcttgagcaacaaccggaagacccctggggttccatgggatatccggtagccctctaccacaatggctttatctaccggtctataacaggatccggcctgggggattacgtcggtatttgcgagtttcttaaaaggcttggcctggtcaatctccttcccgatgacggtacttttcgtggctatgacgctgttttcgcaattcctgccgttaagacggatatcgctaaaggaaaaatgaaactggcagatataccgagaaacccgccaccgccaaaacctgaatatgatgacgactttttttggagtgatgacgaccctgaggatgcctctcagtag

SEQ ID NO: 157788 - DNA, 174 bp, Enterobacter cloacae
atgaacacagttgatgcagtggtaacgcgcgtgcttgatgttcgcccatatcgtgatttctggatcgtggaagtagaggtgatgagctggggtgcatgtagtcagaccacgctcatttgtaataccgaaaaagatgctcgtcaggttaagcccggcgacactgtgacggtttag

SEQ ID NO: 157789 - DNA, 966 bp, Enterobacter cloacae
atgattaaatcacctcttaaatgggctggcggcaaaacgcgcgttatgccgcagctgctcaggcatttgccgaaagctgattgcctgattgagccgtttgttggtagtgggactgtgtttatgaatacggaataccgccgctatgtgctttgcgacagcaatctgaatttgatcaactttttccgtcaattaacaggccgcctggaagatacgattgccggttgccaatggcttttcaaaggcggaaatagtgccgatgaatattacaagcgacgtgcagagtttaatttactggctcaaaaagcggactcagatccagacgcagcactacttcttgcttcctatttcctgtacctgaatcgccacggatataacgggttataccgcgttaatcagaaaggtgaatttaacgttcctttcggcaagtatgccgagccttactttcctgaagcggaaatgcgcttattcgccgaaaaggctaacgatacaaaagcgatctttatccatggtgattttcgtcaaaccatccccgacgttatgcggctcgcctacgatgcagtgatctactgtgacccgccttatcttccggttagcgacactgccaatttcactgcctacggcaagccattcaccctggatgatcaccgcgctctcgtggcggctcttgtggctgttaaccgtcagtacgccacccgctcgatcatctcaaacagcgatacgcctgaaacacgcgagatttattccgacttcaaacttcactccctgagtgtccgtcgttccgtgagcgccaaaagccgcgatatggctggcgaggttattggcgttcttcgggtgtgtgatggctgcgaccgcgctggcggtggttgctgcccggattgtgggccggtaatgggtgatgcgacttacgccggtatgtttttaggctttgaccctgcccagggctgtgaaatgcaggagcctttctga

SEQ ID NO: 157790 - DNA, 549 bp, Enterobacter cloacae
atgaacaacgtcatgttagatattcgcgcgctggggaaagcgccagactcgccgatctttgccattgagtgcgttttcttcgagccatcaacaggaaaattaggtccgcaatattatcgggctgtagaccttcgttctgttgaatgcatcgatccagaagcagtgctggaactgcttaaaggagatgcccatcaacgagcagaagttgtctctgcgacttgtactgaacttaatgcggtagcagggcttttttccttcattcgcgaaaatgcttccctgcataccgagttgaattgctgggctttgggtgctggtcgagtgccgtcgtggttaatccatgcggcaaggaggcacgatttgggccatcagttcgtcgcattcaaactgcgttgccttgcctctctgatcatgcttgcaggcgataccggttacgcccctcacccgcgccgttcgacagcaacctacatgttgactgatgccgcctatcaagcagaacaagcttgtgagatctggcagcggctgaccagtccacatatcgaatcgttgtga

SEQ ID NO: 157791 - DNA, 225 bp, Enterobacter cloacae
atgtcggtcaagtcaataaagctggatagcgagataagcgatccagagtttgtggcaataagcgccagcgcccgcaagggtgaacgcgttcaccttcttggcatgctgcgaattcgcatggcccaactgaaaaaggaaagcgccacctctgaagagattttttcatccgtcgagcagtggatctgcaaccgagaaataaccagcagtgaggacaaaaaccaatga

SEQ ID NO: 157792 - DNA, 273 bp, Enterobacter cloacae
atgtttactgaagagaaaacatcttgggagcgagaaatgttgatccgcgaatcaattgaaagtgccgagaagggttttaccgtccagcttaaaaatggttcgcgtatctatataacaccagacagcccgacaattgatttgattgtctatggccttgaaaagtcaatcaggggaaatcatgagcgtgcacgtatgacgttcattgattttctttattactggcatgaaaggctgttcagacagataaaaagaaaacctcgcaccacttattaa

SEQ ID NO: 157793 - DNA, 228 bp, Enterobacter cloacae
atgaacgataacgccccatcacttgccagcctgttaaagcacggttgtcaggtcacgcactatcgcaatactcgcggctggattgaatgcccggacggccgcttctttaagccggagccgaacaaggtacgttttattaagggcatgaataagccttttgtttatacgagtaagataaataaagggctgttagcaactctggtcagagcgttaaagaaactattgtaa

SEQ ID NO: 157794 - DNA, 261 bp, Enterobacter cloacae
atgaaaaagcgctattcacaacatgggtcacatgctggaagcattccgggtttggttcaggtaagcaaaaacgtttacgtctttaacggtttcactatccgcaaatcaccgcgcaatgcttttaacagaagtaattcatatctgattaataagcgcgatgataacggcaatgttgataattattttggccgtgactttgccttatctgaagcaatgcgaacaattgaacgactgaatagcggcagaaatcatgaaggttga

SEQ ID NO: 157795 - DNA, 162 bp, Enterobacter cloacae
atggaaaaaataaagttaaaaacttaccagttaacactcgcattgagccttatctctttagctcttgtccttgttaattcagggaaacaacgagagtttttctatattgcaatatatgcaagtatcttgggtttggtgtttgagtataaaaaaatctcctag

SEQ ID NO: 157796 - DNA, 225 bp, Enterobacter cloacae
atggatgtaacagaacccgccttgtgcgggttttttattgccatttatccctttacgaggataaatcttggcttatcccttatcagggataaatatgaaaagcccgccatgtgcgggttttttatgcatgtttgcaagtggtggcaggaaaaacaccgccatttcatcgccattaaaaatagcggtaataaaaaagccacccgagagagtggcttaattatatga

SEQ ID NO: 157797 - DNA, 441 bp, Enterobacter cloacae
gtggatagagaactgagcgagcatgtcatgcttgaaagagtagagttgattgcccgtctgacaactgagggtgtatgtcaggaaagggatcgtgaaatcgctttaaatttaatagccgatttggctaaacagaacatgctgaaaaataattctttttctgttgtgttttcggcacaaccaattaaccaacgaataaaaagagaaagtaaagtgagaataaatatcacgttggataaagagcagaagattggacagcaggtcgttgacgctttcgaaaatgagctgaaccgcagggttaaaaatgcgtttccatcgtcccgcattacagttaaaaagggctcaatgactggggtagaaatcatgggctttgatagcgaatctgaccgggagcggctcgacggtattcttcaggaagtctgggaggatgagagctggcgataa

SEQ ID NO: 157798 - DNA, 357 bp, Enterobacter cloacae
atgtcgtctactgcttcatggtcatacaacaagccatgcacgatatggcgcaagggagcgggcggtaatgacgagtggggcgatcctgtcgacccatatgaaccgcctgaaaccatcatgtgcgactacatcggcggcctgtctgcaaagatcggctccatcggtaaagaggttgtcgtaaaaaacaccttctttactgcgtatgcgttagctgatgagggcgattacatcctgattggtgttagtgctgagcaggatccggtcgtagcaggtgctgatgaggtccgtcacgtgacgcgctggaacgacactctcgacggtctggaagatgactgggcgataattacgggagtgtag

SEQ ID NO: 157799 - DNA, 408 bp, Enterobacter cloacae
atgggcataaaagtgaagggcgtcaaagaggctaaagccaatctggatcgctttattggtgacattcagagcagaaaggttatacgagccataagatcggctctgataattatagcgccggaagctgccagaatgactcctgtcggcaagacatcaaacctcataaactctcagtttttggatgtgaaggttaacggaaccatggttactggccgtgtgggttattccgccaactatgcggtatatgtgcatgagtctaaaggcactttaaagggaagaccaagaccagtatcgcaaggcggcggtaattattgggacccatccggcgagccgaaattccttgagagggccgttgataatactcgctcagacgttgacagggctatcaagaaggaactttcgctatga

SEQ ID NO: 157800 - DNA, 2628 bp, Enterobacter cloacae
atggttccggacggtaagggtggcgatggaacagaaccacgctatacctgcaacgtgtacatccaggaccgaaacgacgcttacacagtcctgcgtgattttgcggccatattccgtggcatgacgtactggggtggcgatcagatcgttgctctggccgatatgccccgtgatgtggattacagctacacgcgcgctaacgttgttggcggtcgcttcacctattcaagcagcaccacgaaaacccgctacactacagcgctggtttcatggtccgatccgggtaacgcctatgctgacgcgatggaacccgtattcgagcaggcgctggtggctcggtacggcttcaatcagctggaaatgacagccatcggctgcaccagacagtcagaagcgaaccgaaaggggcgctggggtattctcaccaacaacaaggatcgcgttgtttcgttcgatgtcgggctggacggaaacataccgcagccaggctatatcatcgctgtggcagacgagctgctttccggaaaggttatgggcggtcgcatcagcgccgttaacggtcgcgttatcaaacttgaccgtgtagctgatgcagcagcaggtgatcgtcttatcctcaaccttccctccggagcgtcacagagcaggaccattcaggcggttaacggggaatcggtcacagtaaccaccgcgtacagtgagacgcctcaggccgaagctgtctgggtggttgagtcaaacgaactctacgcgcagcagtatcgtgttgtgagcgtcgctgataacgatgatggcactttcaccattaccggtgcatggcacgatccggataaatatgcccgaatcgataccggagccatcattgaccagcggccggtgagcgtgatcccgccgggcaaccagtcgccgcctgcgaacatcgtgatcagctcgttttctgtggtgcagcaaaatatcagcgtcgaaacgatgcgcgtgagctgggaccaggcgcagaacgctatcgcctatgaagcgcaatggcgccgcaacgacgggaactgggttaacgtgccgcgcagctctacaacgtcattcgacgtaccggggatatatgccgggcgctacctggtgcgcgtgcgcgcaatcaatgccgcagaaatctcgtccggatggggctattcagaagagaaaacgctgaccggtaaagtgggcaatccgccgaaaccggtcggcttcatcgcttccgataatgtggtatttggtatcgaactgagctggggatttccggcgaataccgacgacacgctgaagacggaaattcagtacagcctgaccggtaccgaagacgatgcgatgctgctggcagatgtaccctatccgcagcgcaagtatcagcagatgggccttaaggcagggcaaattttctggtaccgcgcgcagctggtggaccgcagcggaaacgaatcagggtatacagactttgtgcgcggacaggccagcattgatgtatccgatatcaccgatgccattctggaggacatgaaaggctccgatacgttcaaagacctgatcgagaacgcggtggacagcaatgaaaaaattgctggcatggcaaacgacatcaaacaggccaacgacgaactggagcaacaggcgcagaaaattgcccaaaatgcccaggatatcgggaaggttcagaccagcgttacaaacctgtcgagcacggtcggagatgtgtcttcttctctgaacgaacttgagcagacagtggcgactgctgataccgcgctgggtcagcgaatcgataacatcagcgtgtctgtggacggtatgacgggaggagtgaagaactctgccatcgcgattattcagggcaatctggcgcaggtagcggcgcgcaaaacgctgtcggcatcggtcgccggtaacagcgcgcagctggaccgcattgatgaggtgatcgtcagcgagaaggaggcaacggcgcgttcgctgctgagtttgcagactgacgtgaacggcaacaaggcatccatcaacagcctgaaccagacgttctccgattatcagcaggccaccgccacgcagataaacggcatcacggcgaccatcaacgggcacacttcagcgatcaccaccaacgcgcaggccattgcgaacgtcaacggcgacctgaaggcgatgtacagcattaaggtcgggttatccagcaatggtcagctttacgcggcagggatggggatcggcgttgagaatacgccgtccggcatgcagtcgcaggttatcttcctggctgaccgcttcgccgtaacgcaccaggccggagcgaccgttacgcttcctttcgttatccagaatgggcagaccataattcgggacacggttattggagacgggacgattggaaacgccaagatcggcagctatatccaatcttcaacctgggacggcacagggaacgttggctggcacatcaacaaatctggctacgcgacgtttaacaacgtgaccgttcgcggctcgatttacgccacaaacggtaatttttctttcaatggctccggcaatacaacggtgattaatggtaatggcgtaaccattaatattccgggtggcggccgcatcgtactggggacgtggacataa

SEQ ID NO: 157801 - DNA, 276 bp, Enterobacter cloacae
atgactcaacaggcaacaacggtcgatgaactgacctttacccagccgaatggtgaacaagaacagcaagttttgacggcagaagcggtagagtttctgactgaactggtgactcgctttacgccacagcgtaataaactgctggcggcgcgcattcatcaacagcaggagatcgataacggcaagttgccagggttatttcggaaaccgcttccattcgtcatggtgaatggaaaatccgcggaatccctgaagatttacaggatcgtcgcgtag

SEQ ID NO: 157802 - DNA, 870 bp, Enterobacter cloacae
atgcgtcaactcacccgaacgctactcacactgtttgctgctgttctggccctgtggctggtcgtgggtttctggccgatttccaccatcagccgttctgtgctcagcgtctgtattctgctggtctgcggtgcggcgctatggcatcggtggcggcgtcgccagttcgtcataccggtaacagagcatgtcctgcccccggaagattttcagggtgcggtggtgctggtctgcggcgatacgaccagcctgttccctcccgataccgtttatcgtgaaacccgtcagggctggtacatacacgcgcaaaatgcagaacagctgccgctgctggcgcagcatctggcggctgtccgtccggcgctgatgtcgcaggtctcggtattgctggcgctgataccggaacagcagacgtcggaagaggcgttggcgcagacgctccgtggctggcgacgcagtataacgcagtgccggaactggctgaacggtgttccgccggtatggagcgtggcctgggtgtcgccacctgaccttcaccctaaagaagaggcgcagtggtttaccgtcacaccggagttaccgggcgtgcgggtgcggcaaaacggacatgtcaccctgccggtgacggactggcagtgggagagcggcagccgcgcctcacgcctttatgacacgctgtggctggacagcatactggcgctgatggcgcaccacctcacccggccactcagcgcccgacagggtgagcttccgcagctgaaactctgcgcggcaggtatctgtctgacaccgatcgccgcaatagaggataacctctggcaacagcagatagccggtatcaccacgctggtgatgctgccaacttactga

SEQ ID NO: 157803 - DNA, 357 bp, Enterobacter cloacae; identical to SEQ ID NO: 120278

SEQ ID NO: 157804 - DNA, 504 bp, Enterobacter cloacae; identical to SEQ ID NO: 52325

SEQ ID NO: 157805 - DNA, 339 bp, Enterobacter cloacae; identical to SEQ ID NO: 151695

SEQ ID NO: 157806 - DNA, 159 bp, Enterobacter cloacae
atgcgggataaacagcacctgcgccccggaaacataaccggcaatatcagcgtacttggctttctggtagccactgtcaaagttggctccaaacgacgggcaccgcaggcccgccgttatctccatgcgctttccaccatcattaagctctatcaataa

SEQ ID NO: 157807 - DNA, 483 bp, Enterobacter cloacae
atgacggacgtacacaataaagcgacgcgcagtaaaaacatgcgtgccatcggcacgcgtgataccgccatcgaaaaacggctggcggaattactgacgcaggccggttttgattttcgcgtccaggatgcctcgctcgccgggcgtcccgattttatcctcgatgcgtatcagtgcattatctttacccacggctgtttctggcaccatcacaactgctacctgttcaaggttcccgcaacgcgaaccgatttctggctggagaagatcggcaagaatgtagagcgggataaacgcgatattgcgacgctgctttctcagggctggcgggtattagtcgtgtgggagtgcgccctgcgcggcaggctaaaactgagcgatctggacttgacagagcggctggaagagtggatctgcggcggcgcggaggccgcgcagatcgatacgcaggggattaaggtttctccacctcgcacggcgtga

SEQ ID NO: 157808 - DNA, 1701 bp, Enterobacter cloacae
gtgcagcgcgatacctatgttgtaaaacgatctcttcagcaatggctgcatcagcgtagcaatcccggcctgattgttaatctctgttttattattgtcctggtcttttccacgctcctcacctggcgtgaagtggtggtactggaagatgcctatatctccagccagcgtaaccatctggaaacggtcgccaatggcctggacaggcagttgcagtacaacgtcgataaactgcttttcttccgtcatagcatgcgcgatgcgctgcaaacaccgctggcattcggtgtgctgcacaatgcggtgacgcgttttaataccctgcggaacaccacaaactggcaaatcgcggtggacgaaaatcgcacgttacccatcaacggggtgtccgatgcgtttgttgaaaaaaccacgctgctcaaccgtgataacgatcgcctggcaaacgaactctctgctgccctcgaagtagggtacctcctgcgtctggcgtcatcgcacagcagtaacgtggagcgggtgctgtatgtttcccgcgcagggttctttatcgcgactgatacgcctgcacaaccgagagatatttctccccgctattatcagctggtcacgcagccctggttttcacagcagtctgagcgtgaaaaccgcgcacgtgccgttcgctggtttatttcgcctccgtcgtcttttatcgggaacaagcggcttattaccgccagcgtgccgatctattacgaccatttctggtatggcgtggtggcgatggatatcagcgttgacacgatgaaacagctgctggtggaggccatggacaaccattcagaaggcgaataccagctttacgacacgcgcctcaatatgattgcgacctcagaatcacctgaaagcacagttaaccacttcgatgcaagcgagctggcgcagatagctcacgctatcgagtccgacacggagggggggattcgtctgggtagccgttttatcagttgggaacggctcgatcattttgaaggcgttgtcctgcgcgtgcatacgctacatgaaggggttcgaggggacttcggcagcatcagtattgtgctggcgctactctgggcgctcttcaccgccatgctgctgatctcctggctcgtgatccggcgcatggtcagcaatatgtatacgcttcaacactcgcttcagtggcaggcctggcacgatccgctgacccgcctgaataatcgcggggcgctgtttgaacgggcgaatgcccttgcgaagcaatgccagcagcagtccctgccgttgtctgtcatccagatcgatctggaccatttcaagggtatcaatgaccgcttcgggcatcaggcaggggataaagtgttgtcgcacgccggaggattgattgcgagtgcgttgcgcgccaatgacgtgggcggccgtgtgggtggcgaggagttctgtgtcgtgctccctggcctgacgcttgaggaagcggcaaatgttgctgagcggatccgcgcacggatcgacagcaaagagattctggttaagaagagcgtcactctgcgcatcagtgcctcactgggcgtcagcagcgcgcaggagaagggtaactataattttgagcagctgcagtccattgccgatgcgcggttgtatgaagcaaagcaggggggacgcaactgcgtcgtctggcgcgatcacaacaagaagtga

SEQ ID NO: 157809 - DNA, 801 bp, Enterobacter cloacae
atgccttcgcttcagaatccactgctgattttcaccgatctggatgggacattgctggatattcatacctatgactggcagcctgccgccgcatggctggagcggctacgggataaacaggtccccgttatcctttgcagcagcaaaacggcggctgagatgctcgacatccagcaggagttgggcctggaaggactgccgttcattgcggaaaacggggcggtcattcagcctgatgttcgctgggatccccctgcccggcgcatcacggggatgtcgcaccctacgattcgtcacatcatcgagcagatcagacggcaaacgcacgttaaattcaccacctttgatgacgtgaatgaacgggtaatcagtgaatggacgggactgacgccttcccgttcgctgcttgcgcgcaggcatgaagcgtccctgacgttaatctggcgcgacagcgatgcgcaaatgatgcgctttgaagaggcgctggaaccgcatggcctgcagttcgtacagggggcgagattctggcacgtcctggacgcgcgctgcggcaaggatgtggcggtaaaatggctgactgaacagtattctctgcaggagcgtgttgcgtggacatcccttgggctgggcgatggtcccaacgacgctccgctgttagacagcgtcgactttgcggtggcgatcaaaggcattaaccgccagggcatttcgctacagaacgatagcccggaacgggtttatcacacgcagcatcccggccccgcgggctggcgcgaagggctcgatcacttcttgttgtga

SEQ ID NO: 157810 - DNA, 1224 bp, Enterobacter cloacae
atgatcacactgcaacaactgctgatgaccgacagcgacctgtcaggcggcacgcaaacggggaaaggcgccgagggtgcgcaagactttctttctctgctggcgggcgcgttgaccgatgcgcctggtcagggcaaagatgcgccgctgaccctggctgatttgaaagccgctggcagcaagctgtccagggtagcgcaacaggacgcaggcgagaccaccctgcaggcgaaaattgccgacctgctctcacgccaggagacgctgaccgccgacgatgacgcggcgaagaccactgcgctgcaaacgctggtgtccgggctgatgccgacgacccacggtgatgtgttaaagacgctgacgcacgcgtccgcaaaagatgacagcaaaaccgacctcagcgaagacgaactcgcggggctcagcgcgctaatggcgatgctgccgcaccagcagacggcaacaccggtgacgacgcaggcaacccacgtcgacggcgttaccgctcagacgtccctcacctcctctcttccgcaaacgctgaaaaacgcgctgccgggcaaagagaataaccagcctcaggcggcgtctcagcctgtggcacaaacggctgacgcagccctgccagccagcgtacccgtgacgcctgcggtcgcggcggcggctgagaaacaggacatcgcgagcagcgcgacgacaacctcgcccaccgcaaccctggcaccgatcctcagcagccacgcgacctcacagcctgctgcaaccgttgccaccgcgccggtattgagccagccgctcggcaccagcgaatggcagcagacgctgagccagcacatcacgctgttcacgaagcaaggccagcagaccgctgaactgcgtctgcacccggaagacctgggccaggtgcaaatctcgcttaaactggatgataaccaggcgcagctgcagatggtgtctccgcacagccacgtgcgcgcggcgctggaggctgctctgccggtcttacgcacctctctggcggaaagcggcattcagctttcgcagagcagcgtcagcagcgagagcttcgccggacagcagcaatcctcatcacagcagcaacagcaggcttcccgctcgggccagcacggcgcgttcaatgaagagagtgatgagttattgccgatccctgccgccctgcaatccgccgcgcggggaaatggcgcagtggatatcttcgcctaa

SEQ ID NO: 157811 - DNA, 504 bp, Enterobacter cloacae
atgactacccaaacgatgatgcaaaaactgaatgcccaaatgaacctggagttctacgcctccaatttgcacctgcatttgagcgcgtggtgctccgaaaacagtcttaatggttcagccacgttctttcgtactcaggcgcaaagtaacgtcacgcatatgatgcgcgtctttaactttctgaaagctgtaggggcgaaccctaccgtaaaagccctggacacgatcgacgataactactcttcgctggaagaattgtttcagaaaacgcttgaagagtatgaacagcgctgcagcacactcagcaagctggccgatgaagccaaagcgcagcacgacagtgttaccctgaaattcctgcgcgatatggacaaagagcagcagcaggacggtacgctgctcaaaacgcttgcggacgaactccgcaacgcgaagcatgccggtttatgcccggagcagactgaccgtcatctgctggacattgtcaccgttcagcgtcactga

SEQ ID NO: 157812 - DNA, 558 bp, Enterobacter cloacae
atggcgaacgttgcggtgctgctggcacctggttttgaagaagcagaagcaattattacgattgatattctgcgtcggttgaatattgaggtggaaaccctggcttgcgcagaatctcgggcggtggtgagctaccataacatcccgatggtggcagactgtacgctatccgagcgtctgaacacgctttacgatgcggtagtgttacccggagggccgcagggaagcgtcaatctggccgcaagccgggaagtcatccattttgtgtccacacatgatgaaagtggaaaattgatttgtccgctctgttctgccgcagcgcgcgtgctgggcggtaacgggttactcaaaggacgccgttacgtctgctcgggagatttatgggaaaccgtaacggacggtgaatacgtggatgcaccggtcgtcgaggataagaacctgatcagcggtaaaggtctgggccacgcgtttgactttgcgctgaccctttctgctcgcctgttgggtgacgaagcgcctgtccgcgatcacgcggatcacatctattacgcctggtaa

SEQ ID NO: 157813 - DNA, 1167 bp, Enterobacter cloacae
atggcaactatcttcatgaaacaggccgtccgggccttactgactacggcattaagcctggctgcgaccaccccgtgccagggcgcggtgacgttactccacaactgcttcggggcgccgcaaacctacaccacctcgttcgaccatgaattttcgtccagcgataatattgccaatcatgattacgatgtgcccgaccatctggtcggcaatggcccggacagtgtggccaactgcagttgcccgggaaatctcttttcttccagcacaatctatgaaaaaacgctggctggcagcccgctgagtccgggaacaaacggctatggctatttgaccgataaaattgatgccgatatcaccggctacgccgacgccatcaactctccagacggcagttttttgactccgctaactatcaatgattacccgacacccaggggtagcatgcatagcgttaccgaaagctcactatccaaaaccgagggtgatgccagcgtctgcagcagtgacacccggccgaccggcgctgccgcggtaaagcgcaatttccgatggaacgtcgtggcgatcgtgctgcacgtaaaaaaacccatcctgggacaagaggcgatcccgccaacgatcgtcgcgcaaaactacgcctgcctttatttcggcacgggggcaagctgcgatcccgcagaggcggaacatgtctcagatatctggtttagcggcacgctatcggcgccgctaagctgcaccatcaacgcggggagcaccattgaggttgaattcggcagcattgtcagcaagcaattcatcagtaaggggcagcctcctaaaggctatgccctcaaaaatgtcgagattgcttaccactgcgacgataacgccgtcgggaatacggaccggataaagctcacgctctcagcagaccagggcgtggcagatagcagtacgccgtacattgcgaagcttctggaaagagacgatctcggcgtgcgggtgtacgatgaaaacagcgagaacgtcgcgctggatggcacctatgagtttccggtgacgatggacgagcagggaaacggcgtggtcaacattcaggcggcgccagtgagcaccacaaatgccgagcctgagccgggccgctttgagggtaacgtgacggtgaagatggatcttcgctag

SEQ ID NO: 157814 - DNA, 2520 bp, Enterobacter cloacae
ttgtcacacgggcggatctttagactgaatccgcttttgcgctgccttggcggcgtcttgcttatggcgagctgctcgtcgcaggcccgtgagtatcgcttctctccttcatcgctcgaaggggatatgctgtcccaacaggatatcgacctgtcacttttttcaaagtcgaacgctcagcttcccggcacctggtcttcaagaattcaggtgaatgaccggcgcctgagggacgccactgtcacctacgtcagctctccgcaaggggcactgataccacagctcacgccagatatgctgcgcgcctgggggatcgctgtcgatcgttatcccgaattgcaggcgctgccagccagtgagcccctgcccaacacgctcggcagctacatacccctggcgtccgcgcagcttgatttctcgaccatgacattagcgctgagcattcctcaggccgcgttaaacgggtccggccgtgattacatcgatccctcgcgctgggacgacggggtgcccgtcatgttcagtgactatgcgttctcagggtcaacaaataaggacagcgagaacaacagcaccaccaatcagtacctgaatttgcgtaccggcgccaatctgggcggctggcgagtgcgcaactattcgacgtggagccattcggacagtgaaaaccagtgggagaccatcaataccttccttcagcatgacgtcgatgcccttagggcgcagttcaccgccggagagagcaacacgcggggcgaggttttcgatagcttacagttccgcggcgtcaaccttgcgtcggatgaagagatgctgccctacagccagcgagggtacgcccccgtcatacgcggcatcgccagctctaacgcggaagtctcggtgcgtcagaatggctatcttatctaccagcaaaatgtcgcgccgggggcgttcgagatcaatgatctctattccaccaccaacagcggcgatctggacgtcacggtgaaagaggccgacggcaccgagcaccacttcacgcagccctactccagcatcgcggtcatgctgcgcccgggacggatgaagtacgaactgacggcgggccgttaccgcgctgacagcgggagcgatcaaaaggagcccgactttctccagggaagcatgatttacggtgtaaacaacctgctcaccgggtttggtgggctgacgctatcgcaagactatagcgccgccaatgctggcgtcggcctggcgcttgggcaactgggctcgctgtcggctgacgtcaccgtggccgatacccggctcgacgatgacagtcagcatacgggccagtcatggcgtctgctttataccggcaaactggattcgaccaataccaacttcagcctgggcagctatcgctactccagccgtggatactacagttttgccgatgctaaccaaaagcttgacggccacgaagacgacctgctgtttcgttacaataagcgcaaccgcattcaggccagcgtcagccagaccctggcagggctcagcctttatcttaacggctatcagcaggattattggggcacctcaaataaggagcgcagtctgtcggttggcatgaataccgttattgccgggacgagttaccatctggcctatacctacagcaaaaccaacggcgaagagtccgacagaatgatctctttcgggttcagcattcctctcgccagatggctgccccgcgcctggagcagctataacatcagcaacaccaaagacggctatacgcggcaaaaccttggcttcagcggcacgctgctggatgacgagcgcctgagctactcgctgcagcagagccactccaaccacgacggagaagataccagcagtgtatacggcagctaccgctcgcaatacgccaacctgaccgccggttattacgcttccagtgatacctctcagcagcttaactacggcattagcggcggcattgttgcccatcctcagggcgtcacgctggctcagcctttaggcagccagtttgccatcgtgagcgccaacgacgcttccggcgtccgcttccagaaccagcgaggcatacagaccgactggcagggcaacgccgtcattccgtcgcttaccccataccaggaaaacaatattcgtattgatacctcgagcctgccggaaaacgtggacagcagcaataccgccatcaccgtcattccctcgcgcaacgcagcggtgctggccagattcgacgctcacacaggctatcggatgctgatcaccctgaagcgtccaaacggagtgctcgtcccgttcggtgccatcgcgaccagcaacgccccagtgatgagcggcattgtcgatgataccggcaccgtctatctggccggtattggggaggctgtagaactcacggtgaaatggggtcatgccgcaggccagcagtgccgcgccagcattaccccatcgtcagccagtcaaactgaaagccctaacggtattcgttcggttagcgcactttgtcagcaggaataa

SEQ ID NO: 157815 - DNA, 693 bp, Enterobacter cloacae
atgcgcattcccctcaagctcttattatgcattcctgttattgcgagtaccctttgccacgcagcaggcgttcagataggtcgcacacgcataatttacgatgccgcaaaaaaggaagttgccctgcctttacaaaataaagatcgcgaactgccctggcttatacagtcctggacggacacaggtgatggaaaaacgcacgggccttttattgtaacaccgcccctctttcgcctcgatccgcaaaaagagcaaagcctgcgcattacctggaacggcatgtccttaccgggcgataaagagtcgctgttctatctgaacgtgcgaaccgtccccgccacggcggcggatgaggaagacaaaaacgtcctgcgtctcatctataaaacgcgcctgaaactgttctggcgtccggtcgggctgagcggcactccctccgaatcctgtaaaaacctgcgttttgttcgtcatggacaacagctcaccgtcatcaacgacggggcgttctatagcgtctttgattcacttgcgctgggcgcgcaaaaagtcgagaaagccgacatgattggccctaaatccagcgttgccattccgcttccaaacggcgcgcagggtacgagcgtcacctggcgctgcatcaccgattacggcaacgcttccgaaaaatacacttcccccctggcgcaggattaa

SEQ ID NO: 157816 - DNA, 576 bp, Enterobacter cloacae
atggacttaaaaaataatatttttgcgggcatagcgctcgccgcagtatcgatgaatagtttcgccgcagaaatgaatgcgggcaccattcacttcacgggtgagattattgaaccaagctgtacgatcgagggtgacaatggcacggacagcactattccactgggcacctatcctaaatcagtgtttaccgaggttgggaaagaaaccacgtatatgccgttcaccattacgctggcaaactgtccgttaaaaagcgacggcctcccggcagtgcagctaaccttcaacggcccaacgacgttgaccgggaccaatacgctgctcgacgtcagtaaaatcaccaccacgggcgacaccgcagccaccgggatcggcgttgccgttagcccggcgggtaaagatgaccaactgattaccatggacggtgcggaaggccaggtctatatcgagctggcaacaaaatcgtcagacactattcaggcggattttaatgcccgttataaatcctttgctgccgaggtcaccgccggtccggcagacgcggatatgacggtaaatattctttaccgctaa

SEQ ID NO: 157817 - DNA, 372 bp, Enterobacter cloacae
atggatttctcctcttcccgcgcggtgcgcgcgctcactttattgatcgcgtcggcagtgacgcccgccgttctggcacacgcgcatctcaaacagcaatccccggcggccaatactcaggtggcggccccgcagacccttacgctgaacttctccgaaggtattgaaccggcatttagcggcgttgtggtgaccgatgcgcaacagcaggtgatgaaaaccggtaccgtgaagcgggatgaaaaagacaacgcccggctggttgtgccactggaacagccgctggcggcgggcacctatcaggtggactggcatgtggtctcggttgacggccacaaaaccaaaggcagctatcactttagcgtgaagtaa

SEQ ID NO: 157818 - DNA, 870 bp, Enterobacter cloacae
atgctggcgctggtctatgtggcgttacgcttcatccatttcggcgcgttgatgctgatttttggcaatgcactctacagcgtctggtttgcgccgtcgtcactgcaacgcctgatgctgcgacgctttcaggcgcagcagaaaatggccgcgttaatcagcctggtgaccgcactcctgatgtttgcggtgcagggtggaatgatgggcaacggctggcccgatgtgctgagtacggatatctggcggagcgtgctggggacgcagtttggcggtgtctggctgtggcaaatcattctggccatcatcaccgccggtgccgcgtggctggcaccccaaaaaggttcgcgtctgttgctgcttgcgatggggcagtttgtcctgctggcgggcgtcgggcatgcggcaatggatgacggagcgcctggagcactgcaccgccttaatcatgcgatccatctcctctgcgcggcaacctggcttggcggattgctgccgctgctgttttgcatgcgtctctcgagcggacgctggcagacggcggcggtctataccatgatgcgtttttcccgcgtggggcactatgccgtggctggcgtgatattcacgggtatcattaatgcgctgtttattaccggcatcaatgtgccctggcagacgggctacgtaaaaatgttgttgttcaaatgtgcgctggtggcgttgatggtggtaattgcgctggcgaatcggtattttctggtgccacgctttcgtccggatgccgggtgggagcaaaccctttttatcaggatgacacaggcagaagtggtgctgggcgcgttggtactggccacggtcagtctgtttgcgacctgggaacccttttga

SEQ ID NO: 157819 - DNA, 996 bp, Enterobacter cloacae
atgagaggtctttacgtgtctaacatacacctgcaaaacgatgtgctgtatccctgtcgcacaaatatcatctccgagttggtgaaaggaaaacgcgttccgggcccaatctggcagaaacgcgactaccggctgaaatttcttctgcgctcactgttattccgcgcttccacccagcgcatgctggacacgctatcaggacgcgatgattttgacaggctgctggcatcgcaaatcacgttaccgagtaaaacccaccgccagtacttgatgcgcggcctgcgtcctggcgatcgcgccgacgctgttgtcagtcactatcactggatcgatagcctgaagaacagcgatcttggacacgccctgacgagcccgcacgagcagtgcattgtgcaatttcaggcaaaaaacgacgtgacctataccgtcaatgcttcctccgccggcaaagccgagcgtgaaggcgagagtacgctgtggctccatgacagcgataacaccttgctcgccagcctgacgttttgcgtcgcgcgcagccacggtcggccagtgctggtcattggcggacttcagggaccgcgccgcaacgtatcgcgggaggcgatcaagcaggccacccgagcctgccacggcctgttccctaagcgcgtcctgatggaagtgattttccagctggccgcacaggcgaatattcacgccattttcgccgtcagcgatgagggacacgtgttccgcgcgttgcgctatcgcctgagcaaaggtcgacatttccacgccagctatgacgaattctgggaaacgcttagcggccgcaagctctcgcctttctgctggcagctccccctgcaggtggaacgaaaatctctggaagagattgccagtaaaaagcgggctgaatatcgtcgccgcttcgagctgctggatgatatcgcgggatcgatgagttctcgcttccagactactgagggctttcgccaactacgcacaagaatttaa

SEQ ID NO: 157820 - DNA, 639 bp, Enterobacter cloacae
atgtatcagaaaatagaaggtgaccgctggcgtcacgtctgggtcgttagcgatatacatggctgctatcaatggcttatggacgcactgaagcgtctacatttcaatccttacgaggatcttttgatttccgttggcgatattatcgatcgcggccccgattgcgtgaaatgtttacagcttatggacgaaaaatggtttcgggcggtgcgaggcaatcatgaacaaatggcgctggatgcaatagaaaataatgattttgcgctttggatgtcaaatggcggcatatggttttcagcgctcgaagacaaacggaaggctctgaggctactcaacgcgtgtcgggacttaccgcatattattgaaataacctgcgcaaacggtctgaatgttattgctcatgcggattatccggcagagacgtacgtctggaacaaaccggtgagcctgcagcgtgtgctgtgggatcgtgaccgtttaatggggtttatggtagggaaagggcaggggatccagggggcggatcatttctggttcggacatacgccactggataaacgctatgactttaacaatctgcactatatcgacaccggtgcggtgttcgatggcttccttacgctggttcaactgcagtaa

SEQ ID NO: 157821 - DNA, 291 bp, Enterobacter cloacae
atgggtgagttaatgaattcagggctgctaaatctggcatccctgatggtctcgttggttattctggtcgcaggactggtcatttggtttttcgtcaaccgtgccagctcgcgcacgaacgagcaaatcgaattgcttgaagcgctgctcgatcagcaaaagcgccaaaacgcgctgctgcgccgtctgtgcgaagcaaacgaaccagaagagaaagaagcccctaaagaagcggtcatcgcagacaaagaagacgaagacgactttatccgtctggtggccgaacgataa

SEQ ID NO: 157822 - DNA, 990 bp, Enterobacter cloacae
gtggtctggaaaaatccctggtatgacccctcccggatccatcacacgccgaatggctttcgcaatactgcacctgtaggacatcagcccggcgatgttgagcgctggcgtaaggcgcggaaagcggcaggtttacctaaaccgcctgcgctgggatatgacgatttcatacgccagtggtggcagcctgttgagctgaaacagccacaaggcgacggggtctggtggcttggacacgcgagtctgctggtgcagatggacggcaacaccattctgaccgacccggtcttttcgcgacgcgcttctccgcttccttttgcaggaccggtgcgcaaaacacctcctgcactgtctgttgaacaacttgtgcagcttgatgcagtggttatctcgcataatcactacgatcatctcgacgatgcaaccattcgccgtatcctgaaacgttttccagacgtaatgctgtttgttcccttaggtctggcagactggtttcgccgtcgcggagccaggcacatcgtgcaactcgactggtggcagagcataacctggcagggaatcaccctgacagccgttccggcgcagcactggagtatgcgtaccccctggaatcggaatcgttcattatggtgtggttgggtctttgagggacgaaagcaccgcttttggttcagcggtgatacgggctattcgccggagctgttaacgatacccgaacgtctgggcaaaattgacgccgccgcgttgccgattggcgcgtatgcaccagaatggttcatggcggtccatcacatggacccgcaatctgccgtggcgctatggcagcagctcggccaacccctggcctttcccatccattggggcgtgtttgaactggcagatgaatcccttgatgaacccgtccttgcgttaactcaggcactgaataatgtagcaccggttaataattccttcaggatactgaaaattggcgaatatttatccttttaa

SEQ ID NO: 157823 - DNA, 816 bp, Enterobacter cloacae
atgtccttcagttgtcccctttgccatgcgcatctgctgcgctcagagaaaagctttacctgtccgcagggacatcagtttgatatggccagggaagggtacgtgaatcttctccctgtgcagcacaagcgctcccgcgacccgggtgatagtgcagagatgatgcaggcacgccgtgcgtttctggatgcaggacattaccagccgcttcgggacaccgttgcgcaggtgctggcgcatcgcctttctgataatgctaccgctgtgctggatatcggctgtggcgaaggctactacacggcaacgtttgcagagattgcccgcgagaagggcgcagagacttttggtctggacgtggcaaaagtagcgattcgcgcggcggcaaaacgctattcagccgtaacgttttgtgtggcatccagccacaggctgccgtttgacgacgccagcatggacgccattatccgcatttatgcgccctgcaaagcggaagagctggcgcgcgtggtgaaaccgggtggctgggcgatcaccgtcacgccaggaccacggcatctgatggaattgaaagggctgatttacgacgaagtgcgtttgcacgcgcctcactctgaacagctgccgggttttatgctgcaacaggaacacactgtggcgtatgaaatggagctcaaaggggaggaggcagtagcgttgctgcagatgacgccgttcgcgtggcgggcaaaaccagaggtgtgggaaacgttatcaaagcagaccgtttttcgctgccagactgatttcagtatccacgtctggcagcgcgaggtttaa

SEQ ID NO: 157824 - DNA, 1599 bp, Enterobacter cloacae
atgcaaaaagcacaagcgatcattaaagattatcgccgaaaacgcgttatcgtctgtgtcacggttgcgctccttacgctcatcctgacgttgggcattcggtttatttcgcagcgtaacgtcaatcaggagcgcatccagaattttgccgaccatacggtacactccctcgaaaaagtgctgctttcactggaaaaccgccgagatgttttacaggccctggttggacagccctgcagccaggcccaactggtattacgcaaacaggcggccattctgcagaccgtccgctcaattgccctgattaaagatggaattctctactgctcgagtattttcggttcacgcagcgtgcctgcaagcacgttcctgccgatttttcccgcgcaagaaccccggctggtattgtcgaccgaccagtggttgctgaagggcagcccgatcctcattcagtggtatccggcttcaggtgacggcgaggacggggtgatggaggttgtcaatatcgaccttctcaccagaatgatccttgaaccgcagcgaccactgattaccgatgtgggtttatccgtcggtaatcattacctgcgctacggtcagcaggttacggataccctgacgtttgatgatggcgatgtgcttctgtcgctggcatcaacgcgctaccccttcagcatcaccgtgagcgggccgggtccaggctcaatagcactcaaaaatctgccgacacagttaccgctggcactgatgttgagcatgctgctgggctacattgcctggctggccaccgcgcgtcgaatgagctttacatgggaaataaacatggggcttgcggcgcgggaatttgagctgttttgccaacctctggtcaatgcccgcacccaggattgcgtcggcgttgagatcctgctgcgctggaataaccctcgtcaggggtggatctcgccggacgtatttattcctctggcagaagaacacaacctgattattccgctcacccgctatgtcatcaccgaaacggtacgtcagataggctacttcccggccacgtccgattttcatatcggtattaacgtggccgccagccacttccgccacgccgccctgctgcaggatctgaatcaatcgtggttcagtgcaaacccggcccagcagctggtggttgagcttacggagcgcgatgccctgagggacgtggattaccgcatagtgcgcgagctgcatcgaaaaggcgttaagctcgccattgatgattttggcaccggcaacagttctctctcctggctcgaaaagctccatcctgacgtgctgaaaattgataaatcctttaccaccgccatagggaccgatgccgtaaactcaacggtgacggatatcattattgcgctgggccagcggctgaatattgaactggtggcggaaggagtagaaaccgaggaacagtcacggtatttacgtcgccacggggtgcatattttgcagggatatttctttgcgcggccaatgccgctgcgggagtttccgaaatggctggcgggaagttctcccccgccagcacatcacaatggacacatcgtgcccttaatgccgttacgctga

SEQ ID NO: 157825 - DNA, 984 bp, Enterobacter cloacae
atgacaggcggaacggcatcggaaggaatgagtcactatttacacccgcaacagcgagaacatattcaccagcttgccacgcggtttctgtggcgaagcgagcttcccacctggctgttaattatcgctatctataccggctggtttaccaccctggcgtactggcacacgatcggtttactgcctgccacggtgctgctgatctggtttaccgcgtggtatatgtcgcttcagcatgagctgatccacggccatccgacacgctttccccggttaaatcagcttttcggtacgctgccgctggcggtctggtatccctatggcctgtaccgcgactcgcatctggcccatcaccgcaacgatcatctcacggtaccggtggacgatccggaatcctactattttaccgaacagacctgggcgcgttttatgccctggcagaagcgcattattcatgtgcgtaatacgtttctggggcggctgttactggctccgctgctggatatcgttcagacgctgggaagtgccgtggcggcgtttcgccagctgcacctgcgggcgatgttgatgtggctggtgcatagcgtgctgttggcagggttgtttgtctggatgcgccatgttggtttttcaccggtctggtttgtgctggcggtgagctatcccgcgctggcgctcaccaaagtgcgctctttcctcgagcaccgcgctgcagacgatcctctcgcgcgatcggtcattaacgaagccgggatcttctggcaggtgttgttcctgaatctcaactaccattcagtgcatcacgatctgccaggcgtgccctggtatggtctgaaggcgctctaccagcaaaaccgcgcggtgtatcagcagcggaatcacggttttgtggtcaagggatacggccaatggctgcgacaattttgggataaggccgtggatgtcacggttcatccggggataaagcgagaagagcatgagtaa

SEQ ID NO: 157826 - DNA, 759 bp, Enterobacter cloacae
atgagtaacctgctggcgtttccgatgtatgccgtcaatcgggctgataacgacgtgctgtggcgagctgtgcacgctttgctgctggcacgcggtgtgccggtgggcgatcttgtgccgggcattccggaagagaacttactgacgcactggcagcagcctggactcatcctaagccagacctgcggttatccgctggtcacacagttgccggacgtgcaggtcgtcggctgttttcattacgcggcgccgggctgcgaagggatcgcttaccgcagcctgctggtggtgcgtgaagaagataaacacctgcgcgttgacgatttccgagggcggcgggtggtgtgtaatgcgccggattcccagtccggttacaacacgctgcgaagacgagtggcacctgatgcggtcaatgactatttttcacgggtgattttcagcggcagccatcgccagtcgctgattgatgtaaaagacggggtgggggacattgcggccatcgactgcgtaacctgggcactgttgcagcgccatgagccggaacggctcgcggggctggtggtcattgaccgtacccctctgacgccaggactgccgctgatcacctcgcaaaacacctcgcctgaaacccttaacgccattcgcgatgcgctccgcgcgctggtgagttcgccggaacatcgggagagttgcgacgcggtgctgatcggcggttttagcgtggtgacgcgccaggcctacgcttcattgactgcgtga

SEQ ID NO: 157827 - DNA, 405 bp, Enterobacter cloacae
atgaagttacttaccctacatgttttgctgtttaccggtctgttgggagcgacgccactatgggctgctaatggccagaatgactcatcaaatcttctacgcgaccctaatacgctgtcccgtaatgatgtacgaatgagcggggaaaagtttcttttagcgtggctcgcaaaagataacgagcaggagcagcttaaagcgaatatgtacctgcttggggtaatggatgcgacggagggcaaatcctggtgtggatatacggtcgcgttgcccggttcattacgagagagcatttacagctatttcagaaaattgcctgaaaaccgtaagaaagaagctgcatcatcattaatcaccgaggctctcgcgcaggatttaccgtgcaaaaaaggagttcaaccatga

SEQ ID NO: 157828 - DNA, 483 bp, Enterobacter cloacae
atgattgacttaaaatttaaaccgattacaggtgaactatatcttgatggtctgcctttggaaattgatactgaagaaggcttttgtaagtgtgatatataccacgaattagtaaagaaaaaagctataaagaaaaccatgccaaatcactaccttgttgactcagtagcgtttttcgacaaagaattccaagttaatatacggccagtatgctatggctttccttttatgcttcatcttgttgataaaaacagtcaatactataacgcattaaatgattggaatgctcgaactaatattcacatgctaaataaatcagtgaaaagcttgtctgattggttgaatggatcactaaacctggacacgcctgatattacggaaacagacatcattaggtggaactatgagtgggggcgggtttcagtctcatatgagacaaagtcatttaatcatgggatgtatatagtttggaatacaacgtag

SEQ ID NO: 157829 - DNA, 1185 bp, Enterobacter cloacae
atgacattaatggcgggcagttcacccgcggcgaccgagtggttccagcgcgcgacattacttcgccgggagcaactcagcagactggctgcgttgggcgtgctggttaacggcatcagccgccttgtgcatatgctccagtgcgagcgcggggcatccaacgtctggctctgctctcagggtaagctgtatgcccccgaatgcaaagccagtcgtgggctggtggatgaaaacctcactgcgctgcaggccatgctgaaagcacaattcccggtcacggggagcggcgtttgtgagcgcatcgcctgtgcgttactcagcctggaaacactgcctttgctgcgtgacgggataaacagccaaagcataacggcacctcaggcaatggatcattactgccggatgcttcgccatctgctcagtatcgtaccgcaactcaatgacagcattgacgatccgcaaatcgcgggccgttttgtcgccctttatagcctgatgcagggcaaagagctggtggggcaagagcgggcactcggggcgataggcttcacgcaggggtttttcactgatgaaacccgccagcgactggtagacaggattgacgggcagcaggcctgttttgagatctttttatcccacagccacgctgaggtgcaggacacctttgcccacaactgccagcccgatcgagaaacagagcaactccggcgcgtcgcctgcacccgtcagcccgccgccgacaatggcaataccgcgctgaactggtttgccctgcaaacctcgcgtcttgaacatctgcgcacgcttgaagaaatggtgattgccgatctgatggtggcggtggatgacgcgattcaggcgtccggtgaagccacgatgagtggcgaagagcgtgacgatcctcttgcgctttacccggataaacccttgctgctgctggttcgccagcaggcgcgagagatagaccagctctcccgtcaactggcatcactccgcgatacgctggaggagcgtaagaccatcgataaagccaaaagcgtgctgatgacgcatcacagcatgagtgaggaacaggcgtggacggcactgcgcaaaatggcgatggacaagaaccagcgcatggtcgatatcgcgcgcgcactgctcacagtgaagaatctgtggcagctaacaccaaaggagtag

SEQ ID NO: 157830 - DNA, 1407 bp, Enterobacter cloacae
atggttgtatcgtcccgcattcatttgctgtttttgctctcccttcttacggccggagccgttcacggtgcgccgaattcctttatgcatcaggcacagaacccctttgataataacggggatagtttgcccgacctcggcatggcggcgccaacgggtgaaggggagaagcacctggccgaaatggccaaggcctttggcgaagccagtatgaccgacaacggcctgacgacaggcgagcaggcgaagcagtttgcactgggtcaggtacgggatgtggtgagcggggaagtgaacgagcaaattgaatcctggctttccccctggggtaacgccagcgtaaatctgctggtagatgatgagggcaatttcaatggcagcagcggaagctggtttattccctggaacgataacaatcgttacctgagctggagccagctgggcctgacgcaacagacggacggtctggtgagcaacgccgggattggccagcgatgggtcgccggagactggctgctgggctataacaccttttacgataacctgcttgaggaaaacctgcagcgcgccgggctgggggcagaagcgtgggggcgaaatctacgcctgtcggcgaactactatcagccgttcgccagctggcgcgacagcgcggatctgcaggagcagcgcatggcgcgcgggtatgacatcactgctaaagcctggctgccgtggttccatcatctgaataccagcgtcagttttgaacagtattttggcgataacgtcgatctgtttagcagtggaaccggctaccacaacccgatggcggtcaatctgggactcaactatacccccgttccgctggtgaccctgacggctgcccataagcagggagagagcggcgtcagccagaataacctcgggcttaagctcaactatcggtttggcgtgcccctggtcaaacagctgtccgccagcgaagtggctgtgacgcgttcactgcgcggcagtcgctacgattcgccagagcgggagaacctgccggtcatggagttccgccagcgcaaaacgctgtcggtctatctggcaacgccgccgtgggatctgaaagggggcgaaaccgtcatgctgaagctgcaaatacgcagcaaacatggtattcgccagctgcactggcagggggatacgcaggcgctgagcctgaccgcaccggctgacagtaccagcagcgacggctggagcgtcattatgcccgcatgggataacgctgagggtgcaactaaccagtggcgtttgtcggtgatcgcggaagataaagacgggcagcgcgtctcttccaatgagatcgcgctaacggtggttcaaccgctggtcgcattgcccaacgacgatccacggtggaagctgctgccggatgagtaa

SEQ ID NO: 157831 - DNA, 153 bp, Enterobacter cloacae
atgaatctggcagcgatagtagcaccgccaactaaacactggaaaagcaatctcaagaataaaactcaactgcttattccgtggacaacattaagcgcaaccgcccgccagcaccccaaatttggcactgccaggaggaacagcgatggctaa

SEQ ID NO: 157832 - DNA, 411 bp, Enterobacter cloacae
atgaatggaaaagtggtcgcggtacttatggggatcgctgtcctcagcgcttgcaacagcaataaaccctcacctgaaagacatgcctattatttcgtctcgcatcaatccaattttacgggcgggaattatacctccagtatttcacaaaattaccgtctcaatgtgccgcagtttcgtgagctgtataagcaggggaaagctgaccgcgccgctgggcaaccgccgtcttacgctcagcagtatgcacaggctattcgcgatcggttgaaggaagaggccaaaacggagcacgccttcacggggaatagtgaaagcaaatggacctcggaaatggagccgaaggatgccattttatacggcaacgaactggccacgacttatcttgacggctataacggcgtacaataa

SEQ ID NO: 157833 - DNA, 1170 bp, Enterobacter cloacae
gtgagtcgagactcttacgagatccttcatgaacagatacacgcttggttgcatagaaaaaatatcgcttcatcagtgcgaagagtgtctatgctacctgcagctattgctacagacataggtctagtcaggaaagagaaccaagaccgggtggctgtattaaaatttcgtccttttagtaagagtaaggacatgattgtcatcgcgttagccgatggcatgggtggaatggaagggggggctaatgctgcttcactgaccgtatcaaccttttttactgagataattaaacattcaggtttgccaattaggcaatgtcttgaaatagccgttttaaaagcaaatgaatcagttttgaatgtatataaaggtaacggtggagctacattatcagctttggctgttgatgaatctgataacattaccgcaataaatgtcggcgatagtcgtatatattccattaacgctgagcgcataatccaaattagtgaagatgatacattagctgtattggcaaagaaatacaatgaatatcttggcagtgagtcaggtgctattgattctaggctaggtggcgagttagtacagtttataggtcttgatggtgtcctggaaatacattttcacgatattcgactttcccctgggggagtggttgcattaacttcagatggtgctcataccattgatagtaataatttgagaaaactatattctcattctaacaatacgggtgtgtttgctaagagagttatagacttagctagttggtttggtggttttgataatgcatcaattgcggtagttgaaattgcgaatatactgagtgcgttggatgtttcatctggggatgttattaatttatgggatccttttggtgaaatgaaagtaattagtgtgcaatctgcaccgctaaatatttccaactctgttcctgttaaaaatgttggtgatagtaaagatactgatttagaatgcaacaataaaattaccagtaaaaaagatgtatctaaaaggaaaacccgggcaaagaaaaaaatcactaatattaaaggcgatgaagaaaggaaaattatagaagccaataataatgacaagttggaaaatatttcacaattagatatttcattctctgagaaaaactccacaaaaggagataaagatgactaa

SEQ ID NO: 157834 - DNA, 1065 bp, Enterobacter cloacae
atgactaattttactctcccggcaagatataagaggactgaagaagagtcgtcaggaggatttggttgcgtgatcaaatgcttggatactcatctcgaaagatttgttgcaataaaatccataagtgaccctgatgattctcctcgaatgaaggatgagttatcagctttaatgaaattaagatcgaaacatgtagttgagctttatgatgttattaattgtcagggtaatgggattgcaatagttgaagagtacgttaatggaccttcattggtagaaatacaggacaggatattagattctgaagatttaattaaaattctgtggcaaatttcttcaggtatttctgagatacattttcatgacattattcatagggatatcaagcctggaaacatgaaaattgattctgagggagtagtgaaaatttatgattttggcctttctagaaatgttgaagaagctaatacaataggtttcaaaggaactcctatatatgctgcacctgaattatttttacatcaagtagcgtttacgaaatccatagatacatatgcatttgctgtaacggcaatgtttttggctaagacaccaataccagcggaaatgagtgttttaccaaaaaaattagtctctaatccttttgataactctaatatacagttacctgcacagctaaaagaattattttttcaatgtttaaatacgagtccagatgaaagacctgatatggctcatgtatgccaaactcttaaaaaatttgttcttttcaattctcatagggcattgctaatttctgataatacttctcctattattgtttcttcaaaaaacaaatccgcaatatttaataattcaggtgtcgggagtgttgaggttaaatattctggatcagagttttacatatcgagcttgagtggtgaggtttatgtgaacaatataactgcaaggcaatataatattttgcctgattcatgtgtcattatattgggggcatcgtctaggccaagaagagagagggtttttattacttttgatctttctcatccggaggttgtgttatga

SEQ ID NO: 157835 - DNA, 1065 bp, Enterobacter cloacae
atgataaatttgactcaaggaactcaagttagcagatatacaatcctgagagaaattggtgagggggggatgcaaaaagtttatttggcaaaagataatattctttcaaggcatgtggctctcaagactccaaaaaataaatcagcagaaaaaagatttcatagaagtgcaatactagcctcaagagtaaaccatccaaatgtggcgaagaccttagattatttcattgacgatgaaggtagagaatttctaacggaagagtttattgatggcgtggacttggataaggctattttagacacttatacaagtgttgatccatatttaactgctaaaatatttcataatttagctaaggctctatctgcttcgcaccatgttgacgtcatacaccgagacctcaaaccctcaaatataatggtcggcggtggtatcaatgctactgagataaaaatcacggatttcggcatctcaaagatggcgggtgatgaaatcgatgaggctgcaagaaatggccaagattcaataagttcttcgcaaactgctatcggcgctttaccatatatggctccggaaatcattcagagtcaaggtaaggtttcgaaacccacagatatttgggcattgggtgcgatgatgttcagaatacttactggtaaatacccttttggtattggttatatggctataccaaatatactgtctggtacacatgcaccttacccagactttatattttcaaatagacagtatgcgccattggcaaatgaaataatcaaacttatagaagactgtttaaaattggatccttctaagcgccctacagcagacgaattggtgaagcaatgtggcgaactatgttatccagtgagtacaagggtctttggggtcatcggtgatactaaaatgaagtatggattcatccgtgtgcctaatcttccgcaagtttttttccactatgacagtgtttatggtcaaaaaccttttactaatgaaaaggttatattttctaagcatcgtggcggtgggcatgatcgcgcgcatccggttgtgaaggcaaagtaa

SEQ ID NO: 157836 - DNA, 450 bp, Enterobacter cloacae
atgagtgaatttaagccctttgacgacaggctcaacggtctgattgctgctctttcaccggcatcgcgccggaagctggccggggagatagcaaaggagctgcgcaagtcgcaacagcaacgtatcaaacagcaaaaagccccggacggctcgccgtatcagacgcgaaagcgtcagccgctcaggtctaagaccgggcggattaaacgggcgatgttccagaaactccgcacgagccggtacatgaatgccactggccgcgaaaacagcgcggtggtggaatttaccggcaaagtgcagcgtatcgcacgtgtccatcagttcgggctaaaagaccagccaaccccgcatgcaaaggaagtacaatatccagaaaggcaattgttggggtttaacagcgttgctatacaactgattgaagagaggatattaatagccttaagaaaataa

SEQ ID NO: 157837 - DNA, 738 bp, Enterobacter cloacae
atggaaaagaagtttgaactattgaggaaacgaatcaaagaatcccagcggctagtaatggattcggtaatcggcgatcacaatgttgatatgtgcatgctgtgtggttctacaaaggaaattacgcgtgagcatgtaatccctcagtgggcgtttgagtcaaatccagaaaaacacttagtcaacaagaaaaataatcagcctgttaattatatcaaaactactattcctgcatgtaaggaatgtaattctgaattgttgggggcattcgaagacaatcttaaacggatgttgctgggcaaaaatgcatacgaactaacatccaaagatgtcgactgcattatatggtggttgcaatatctaggttttaaattacagcttatggatcttcgaactcgttttctaaggtttaaagacaaggaatacattcccttcttgtcaaagataccaattgctatgttttggggggatatagatacaacgccaaataaagttttcagaatcatcaggaagacgaggcgcgctttgatgagaaagagaaagtgcgatatgcataactctctattgatttttgagacatcaaacaacaattttcacttttttcacaaagtcgatgagtttatttttatcgagctacctcatgtaaaaaaagcttttttctttttttacagtaaagagtttgaaaatcatgacgagtcactgaaagagggtatggctgttatcgagaagcactattaa

SEQ ID NO: 157838 - DNA, 429 bp, Enterobacter cloacae
atgagcgaaatgtatttttatagtgctgagaaaaacggtttttatgcgggatccatgcaggacgattataagcgcgcggggaaatggccgacggatgcggtagaaatctctgaacgctggtattcatatttgctggaagggcagacagagggaaaggtagtcgcgcctgatgaatataaccagccggtgctcgttaacccgccagagccaacgcaggcagagctgattagccaagcggaagaaaaaagagcggagcttatggtcacagccagcgcagctattgccccgctggaggatgccaacgaacttggcattgccaccgatgatgaaaaagaagcgcttacccgctggaagcgttaccgggtgacgttaaaccgactcgatatcagcgctgcgccatcaatagaatggcctgaaaaaccagtctga

SEQ ID NO: 157839 - DNA, 1008 bp, Enterobacter cloacae
atgcctagttccttcattcgtataattagtaagctaaatccttttggatacgtttttttaattacaggtgttggtgtttattctataagatatgatttaagtaaatatttttatgtggatgatcgattaacatttttactctcagttggacttattgggtacggtgtcgcgatcatcttacttaattatttgaagggtgacaaatatcaatccgcagaagatggcctcttaatggatgaattaaaggttttgcggaatgagttagttcactctcaaatttctaagagtgaacttgaagagactaagaaaaaaatccatgcattggaaaacttaattaaatacttaaaggaagagaaatatcaaataacttcagatgaacggcatgaaatacttgagagtctgaggagtaatatacttactgaatcttctagtgctttaatgaaagaaattgaacttaaatattctgagagtattaaggcagataatcaattaaatagagttcgcgagcaattagaaggtacaagattaaggcttaggggagagattgcagcactaggtcgtcgagggaatgtcaatcttgtaataggtgtattaacaactattgttgcggttggaatacttgccaatacagtattaaaccttgagttgaaattgccgagtgaaacgctaatagcgcatctggcgcctagaataactcttagtctattcattgaagtcttttcttttttctttctgaaactctataaatctggtctttctgaaattaaatactttcaaaatgagttaactaacgtcgaaatgaaattcatctcgctagatatttgtttgcggggtaaaaatacagaattaattagtgatgtcgtctctgagttttctaaaacggagaggaattttattttaaataaaggccagacaacagttgagattgaacgtggtaagttagataatgaagttattaacaatgctgtgtcttctttctcaaaatttgttgaagtaataaaaaaataa

SEQ ID NO: 157840 - DNA, 954 bp, Enterobacter cloacae
atgcatactgaaccccctgtagttagcgacattcgcgttgcatcacgtctgatggtcagagagctgggctttatggcctccacgttggcctctacgcattactcgccctcggccgtacacaccctcgtggaaattgagctgcataaagagatgaccgcaggtcaactggtgcaactgttgggtctggaaaaatccagcgtcagccggatgctgtcgcgccttatttctgcaggcgaactggaggagggtgtttctgcgcaagatgccagggccaaaagtctccggctgactgcaaaggggcgcaagaccgttgagcagattaatgcctacgggagcgagcgggttatttcagcgatacaatcactggatcccatacagcaggaaaccatctctcagggattgtcgctctacgccaacgcgctgctggcctgccgggagagcggcgctgagcgacagcctacggccccagtgattgtttcaggctaccgtcccggcatgattggccgcatcgcggaaatgcacggcagctattacgcacgcgagcataactttggcagcttcttcgaagccaaagttgctgcggggcttgctgaatttagcggacgcctcgcgaagccgtgcaaccaggtttggctggccgtgatgaacggcagaattgtaggatctgtcgccatcgatggcgaagatttagagccgggtgaggcgcatctgcgctggtttattctggacgatggctgccggggtcatggggttggcaaaaaactgttgagcgaggccatgacgttttgcgacagcgagggcttttctgccgtgcatctctggacgttcaataaattgaccgctgcccgacgcctgtacgaatcctttggctttacgctagcgaaagagtgggagggcgatcagtggggcagtcgtatcattgagcagcagttcacccggttcaaacaggtttag

SEQ ID NO: 157841 - DNA, 645 bp, Enterobacter cloacae
atgctggacataacaaactttgggctttttgccctgtctgtttttcttctttccatcaccccagggcctgacatggcctacgtgataggccaaagtgtggctaacggaagacgagcggggatcatctctgctgcaggcgtggctttaggtagctgtacccatgctgttgcaagcgccgtgggattaactgcattgattacagcttctccactgatgttcaccatcattaagtatcttggtgcggcttatctgatgtatctcggcagtaaaatggttttgggaacatttgcaaaacaaaccgtcaatcaccatgaagctgaacccgtgaggacaaaatctactcttacgaatctgctttctaaaggctttattacaaccttgaccaatccgaaggtgctcttattcttcatctccttcttcccccagtttgtttcaccagggggtgaacatcacaccacttctttcctggttctgggtatggtctacgcgctgatagcatttttgacagatatggcttttgctgttcttgcaggtagcgccgccggtgcagtttctcagaatagaagattgcagaaaatgctggatcgcattgttggcgtaacatttatagggttaggtctacgcctggcattgactcgccgttga

SEQ ID NO: 157842 - DNA, 2385 bp, Enterobacter cloacae
gtgtcaaaaactagagataatcattatgtacctcaatggcatcaaaaaggatttatggaggaacgggaacaacaactctgtcacttaacacgacgtgaaatcaatcttcccggaggagagacaaagttagtcgagtcaaaaaaatggcagactccaacccaacgattttatgaggttgatttatactcaactttttttggctctgaaataaatgatgacatagaacgacaattatttggccctatagataacaatggctcaacatctattcgagcttttctcggagatgatcaagctcagtggcataatagttttcttgatttgtttacgtacattgactctcagaaattacgaacacctaaaggtctggattggattaaaagcaaatactctgagttaaatcaaagtcaactcatgatggaaatgcaatcacttagaacaatgcattgtacattatgggccgagggagtacgggagttagtttcagcatcagaatctgaaaccaaattcattctttcagaccatccagtaactgtttacaactatgcttgccctcccgattctgaactttgtgtttatcctaatgatccagacattacgcttaaaggctcacaaacaatatttcctctagacaaaaatcgctgtttgattctgacaaatcttgaatatgcacaagatccaaaaaatacaaacccaattcagcaacgaattaatgccactcgacaaagaaatagtatggttaacaccattaatttcattaatagccgaaaacttactgatgatgaagtaaaaaaaataaactacatcataaaaagcagatctaacaaatccattgccgcaggtcgagaagattggctttatcctgaaaaagacattaagaatgattgggctgaattacgccatgtgcttttaccatcattgaatggggtaatgggttttggaggagaaatgtatgttaagtttgaggatggctcagtacactatcaagatgcatttggtagaacatctagcgcacacgaatttcttcagaaaaagacaagcaaagagcgaataggtcgtaactctatttgtggatgtggcagtggtagaaaatacaaatattgttgccttaatcttgctaaaaatttgcgtacatcatgggatgtattaagtattagagaaaggaatctcgcattttgcacttgcattaaagatgttttgggtctaaacaaaggtaagacgtggtcagacgtcagaagaaatctttccgaagatgatattataaagatatatgaattctattcagtcttatggcctgctgatacagatatatatgctctgctaccaaaatcggatggaaaattacgaggtttatattccgggcctgtagatatccgaaccataactgaaaatgctgtaccaatggcatcattatttgatgaatttttgattgagactccaatatttaaccctaacgttataaatccagaattcagccccatcaaatccccatcacaatataagtatcaatcactcaaggattttttatttttccttcagatggaaccatttattggacttggtttaataaacatcattcctgaaccggtcgaatttgatactgagctcatgcgtgcaatgttaggcatggccagggaaagaggccaaagaaatgagcctatacacaaacaagatttacaacgacatttcatattatcgactcaggacttactaaattcaacggcattaatgcctagagacatgagagttaatttccttgtaagtcagtttggtttaaatgaaatgtcagcaagtgagataattactacatctgaattaaatgcaggttcatcacctctgacattattacaaaaaaaatcagtaggtagtggcgggcaattaatgatgtcgcggaatggacctaattatgaaatggctttatttatagcgcaagtaacaggctcagttattgtgaccgatagtatttccagatgggaacagttatattcagcacaacatcgcgttcaaggaatatcttctttcccatggggtaacgcacttgatgcttttaatattgtacctcttgaccttcagtttgaggacacgttcaagaagtcccaaggaccattctccaaggcaagaaacttgcttaaagaagttgaccaaaccattttgagtaataatcgtacacaagcacatatacagctcctaactactaacatcaatgacttaatcaaacaactaaatgcagataataagtcattggtccttaaaaatatgatgatatcttctccggagggtgggttttatgacaggaatgttcagcgattgctggcccgttcaagttgtcttaaatatgatgataatgttaggtcaatcttaggcattgacattgcaacgatgtaa

SEQ ID NO: 157843 - DNA, 1098 bp, Enterobacter cloacae
atggggaatgaagtttacgagagtcaaaagtgtatcttaaaattttcaaaaacccttattgataaatcagctcaaaatatccggcacggttgtgatggtgaagagaaagaacttgcaattgcaatgattcaaaatttccgtgaattgcatctttatccgttgatgctaatgaaaaaccatcttgcccgaacggcagtcaaggttgataggaaaacaattgtagcaagacgattaaaacggctttctacaatcatcgacaaattagagcgaccaagtttagataatggaaaaacacaaaatgctataagggttactcggatgcaagatatcggtggttgccgtgctatcgttaaaaatcttgagcaactaaaagcattaagagaaaaattgttaaaaagccgctccgtacataaaatcataaaagaatccgactatttaacaccgaaggaaagcggttatgggggtatccatttagtatatagctgctttgatggtcttgatgataaatttccctggaaaaaaactaagatagaggttcaattacgaacagagcttcagcacgcatgggcaacaagtcttgaaataatagatacattagaagatataaaattaaaaacttcgagtgaagggcatgatgattggcggcgcttcttctatctcacaggttgtttggtcgcgcatgatgaaagagcttgccctttaaaacctgaaactgtatctgtatatgaagatgaactaaaagtccttgaggaaactttagcagttaggcgcaagcttggaacatacgccttagcaataaatatgactatccatgacaagataaaagcaaggctacccagaaatcataaaggacattatttagttacaatgcgtgtcgtagaccttgagcaaagaaagatggctgtaagtgttaaagcctatcgagtgagcgaagcagatgctgcgctggccgcgctaaaagaaagtgattcagatccaaacatacatattgcggttttgcttgcaactgataacgtgaaatctctgaaaaaagcatatcctaacttctttggatcgacgaatcagtttactcgtttcttggatcgacatataaaataa

SEQ ID NO: 157844 - DNA, 183 bp, Enterobacter cloacae
atgtctgacattgatgcactggctgtggcacgacgtattgatacggtgctggatatcctggtagcgggtgattatcactctgcgatccgtaatcttgagatcctgaaatcagagttactggctcacaaagattccgaatccgcgccagaaagcgctcagccaaaagccccgtgggaagtttga

SEQ ID NO: 157845 - DNA, 987 bp, Enterobacter cloacae
atggaacaacgccgcttttccggcaaaggccactggtatcatgaaacccagtccaaccactcgcaaacggatgtcctgcctttggtgcccgaagccgctaacgtcgacgatcgttttttgctcgatttagaactccctgaaaagattgtcaccgcctgccatggctggctcgctcccgccagggccttgtgccaccttctgttcccgctcaatattgaggttaaccgactacacacgcttagtgcgtacgacaggctcagcacggcgttgacggtcgctcaggcctgtggtgttcagcgactctgtaaccactacgctgccctgctcgccccccttcctggtcctgactcctcacgcgaaagcaatcgccgcctggcacaaatcacgcaatatgcccgccaacttgccagctcaccagacgtcattgaccacaaagcgcagctacagctcgatgaagtgggcctgacaacctatgacattgtgctgatcaaccagattatcggctttattggctttcaggcgcgcgttgtggcggtgtttcaggcgttactggggcatcctgtacgctggttgcccggacaccatattccgccgcattccttaccggtgactattcgtgtctggacccctgtactgcccgtcgtcgaactgcgctacgcgaccccattccagcttgagtcgctttcacgctggcaagcagagccggaacttcaggcgctcacgccggtgctgagccacgaacctgcgctactcaacctgacgggcgagattctggtcaatcaccgtcaaagcgagccacaaacgcacggggcgcttactgcggcagtagagctactgacccgttcaccggatcgttttagcgcggcacaattcacgccgctgattgatgctgggatccccgatatccgcgccatcaatctgcttattcaaagtgcatttactggctggctcgaccgcctgcgagtggcgcttggcaaagcggaataa

SEQ ID NO: 157846 - DNA, 387 bp, Enterobacter cloacae
atggaactctctaaatatttccaccctaaaaaaatcggcatatattccctgttcctgatgctgtcctggggattattatatatttggctggtgctgatacacagactggacgaaaaagtcgcctcgacgctaccctcctcccccattatgtatggctgcatcgcactgtcagtggtctttttatcaatccaaaacaaagctggcgcgctgactgaactacttgtcatcgccttctggttaatggtgatttttgtttacctcattattacgttcaccgtgctgttaaatgcgatgcccgacatcgaagatctgatcttttattacgagtgttatttgattattttttttggcggaacaccgctgtacctcattatgagaatgatttga

SEQ ID NO: 157847 - DNA, 1698 bp, Enterobacter cloacae
atggaaaacaaagtgaacgcaaaaattaataaactcattgatcttatttacggggaaacctttactgatacacatcgcaaggtgttattggaaagaatcggtaatgccgcttctcttattacggaaaaacgtaaatccgcctgggatgaaaaagatgtcgtcctcattacctatgccgatcagttttcggcagcaggggagaacgcgctgccggtgtttacccgtttttataataagtggctttctcattccttttctcatgtccatcttctgcctttttatccgtggtcctctgacgatgggttttctgttatcgattatcatgaagtggcaccagaaaccggaacctggagtgatattgctgaattgaaacagtccaccagcctgatgtttgattacgtgtgcaatcatatgtcggcaaaaagccaatggtttgctaactatcttcagcaaacgcctggctatgaagatttctttatctccgtcgatccgaaaacagacttatccgccgtgacgcgcccacgagcgttaccgcttctgacgccttttacgcttcatgacggcagcgtccgccacctgtggaccacctttagcgaagaccagatcgatctgaactttgcttcgccggacgtgttaattgccatggtggatgtactgcttcattacctgatggaaggggcgaattacatccgtctcgatgccgtgggttttatgtggaaaatccccggaacacactgcatccatctggaacaaacccaccagctcatccagttcttccgcgcgattactgaggctgtggcgccgggaacggtcatcatcaccgaaacaaacgttccgcataaagacaacatctcttattttggcaacggcgaaaatgaagcgcagatggtgtatcagttctctttaccgccgctggtgttgcatgccatccatcgtcaggatgtccacaccctgagccagtgggcctcatcgctggaactcccttccacgaaaaccacctggttcaactttttagcttcgcatgatggtatcggcctgaatccgttacgcgggattttacctgagtccgacatcctttcgctggtggaaaaacttcagcaggaaggggctctggttaactggaaaaataaccctgacggaacgcgaagtccctatgaaattaatgttacctatctggacgcattaagcccaaaaaatgcagctgataacgaacgtattgcacgatttattctggcgcatgcggtcttattgagtttccctggcgtgcctgccatttatattcaaagtgtgctgggctcacgtaatgattatgaaggcgttgagcgacttggatataaccgcgcaatcaaccgcaaaaaatacattgccggtgagattgattcagaactttcaaacacaacaggcattcgccataaaatattcaaacagctaagcgaattgattgcgattcgcagagcggaacaggtattccatccggatagtcacgcacttttcgaaacatccggcaaacatattcttaaaattattcgcgtggccaaaaagggtgagcgaataacggcattatttaactttagtcaatatattcagaccgtgaattctgaagggatatccggtacggagctgattgcgaaagagaatattagcggtacgactctgacccttaatccatggcaggtgatgtggattaaagaaaactaa

SEQ ID NO: 157848 - DNA, 1914 bp, Enterobacter cloacae
atgagatttgtaaaagcgacataccatcttgaaactaagacggttgagtacgaagctggtgatggtactcgtttgctaaaaactgctggtacattgagttggcgattcaacaatcccgggaatattatcgcattacctgatgccagtaagcaaaaagggagaataggtgccgggactgtgtataatccgaaaaaaaatacattcgtgattttttccagcattgaagttggggagcgtgagaaatgtgcattattgaagcgaaaatatcgaaataacaccatatctgaaatgatgtcgcagtatgcgcctgaatctgcaggcaacgatcccgtagcttatgccaattttataagctcagaaagtggagtttcaaaagataaaaaaatatcagatctgaatgataatgaattcgacaaagttgtggctgccatcagtaaaaaggaaggtagtttaaaacccggaactgaaaaatgggtgtatgtgacaaatgtgactgtttctgatggctcccgaccagttgctgatgtgccatttaaagtgacactgggaagcactacctacgagtggaaaacagatgcttacggcaagctcaagacgatcatccatacgaaacagggaatggctattatcctcaaatatacaaattctgctggaaaagaggatgttgtttattctgctgttgctggggatgaaacgaaaaatatactacttacgagaaacttttcgcaattctctgcaaaaacacttgccgaaacccccaaggtcccacgtgagaagagcactcagaagccgatagagtacatagtcatgtcaggagactctctatcaaaaattgccaaacgttataagacaagcactgatgaaattgccaaaaacaataatataaaagatgtaagtaagatctttcctggtcagcatttgacgatatatggtttcaatgctaatagccctacgatctataccgtttctccaggtgatactttggagaagatcgcagaaaaaaatggtgtgaatgttgaaggtattgcgcggcagaataatatatcagaccctaataaaatatacccgggacaatcaatttctataagtaaaaatggtagcaatactgcgggtgagtccgaaaaatcatcagttaatcatccaatctcaaaaacaatgagtaataaactactgcaaaataaagaagtaaatgccaataaaaaaacgctggaatcggttgggggaaaaaattctggcaatccgattgcgttactcccacatgatcagagagaggctccatggatggcagtggcaatccgtgaagcaaagcaatggcacggaactggggagaagagtatacaagataattatcaccatttaattagctctaaaggttctttatcaaatacagcatggtgtgcatcatttgttaattattgtttaaaaaaatcctcgtatgattattctacggcttatcctcagtcttctcagttcccggcatacgataaagcaaaatttattgaagttgataaaccagtatatggggcattgatggtatttaggacctatacggaatcaggagatcgctttactggaaatgggcatgtttcgttagtttatgggaaaactataaatgatgatattgctggccttggcggtaatcaaggcggatctagattcggtggtggaacaataaaattgtctatgtatagcacaactgatgtagtatctaggtttagaatgacagttaatggagttaaaaacgttcccgtgtaccaaaagttttttaagttctttgtgccagtggcatataaggattattcaaaagaaagtagggccgagttaacagtcgtagatgttgatgatgttaataataatttatttggtttttgtaataaagaaaattcctctcaagatgaaggtggcggtcgatga

SEQ ID NO: 157849 - DNA, 519 bp, Enterobacter cloacae
atgaaaaaattaatccatatacttattttattctactcagtaaatgttttttctggtgatcctggtggtatcgctctttatgttaaaccattgtcatcggcaatggattataaatatataattgatggtttttttagaagttattatggtgttgataatattaataccccagcatgcaactcaggtgactacactccatatgtagatgagatctatctaaatacacccttgaaaggtgtaggtgagcaggacctccttcaggctatatattctcgtgactcccgtgtgaaaatctctaagattttgtcagagtttaaagatgatagaatttctggctttgatgggattatgttttatgaatttaaaaatgatgaggtggttatttatacatttgattcaagaaatcccaatgtgatttacacaactaaaatcaagactggtgaattattgtctaaaagattacttggcgaggcaatatgcaaggcaattagttccaaaatacttccttcttcgccatga

SEQ ID NO: 157850 - DNA, 552 bp, Enterobacter cloacae
atgttatttaatatgtccagatttttcaagtttaatttaatttttattttatttcagacgagcactgtttttgcacaaaaaccaatcattattaaatcttgggtagacggttctggtaagcatagtttggtggtagaaaaggaaattaccaaggatcaaacgggagagcatttgtcagtaaagcagttgacgaaggataacgttgactggattcttaacgattatgttaatgactgtgatttggatataaagttagatattgtaactgattcggttgaggtgaataaaacgttttatgatggagtaggaacagttttatttgcctacaagattgggtgtgttggtggactcgacccggtaactgtcaagtattttgcatataaaaatggcgtgaagaactctttaagaggagaggaacacatcattattggggatgatggttacggcggagaaatactacccaagccagattttaatctcaaaagtgataaacctcttcttgactacatgttgagtaaatggagttctgtttcagtgacaaaaataaattaa

SEQ ID NO: 157851 - DNA, 1209 bp, Enterobacter cloacae
atgtcatatacacttaaaaattttccagaacgctatcccaggccgaagcctcttaaatttactcgttggcttattgctctggttgccatgctttcggtcagtgttatcttaatgcgtatatttgggcgttatgttgaaaacctgtatttttggaaattggctttaggtgtgcctattgttttgtggagtgttccgtttgcttcttgtctgcttcagtgggcattgcaggatagcaaagcaaatgctttcgacaaacaacgagaacaatggattcttcgagaaacccgtaaggcacgtcgtgcactgcaggtgctgaatgcaacattcattaccggccactcatcagttgctcagaaagatacagctattgcgatgcaaaataacgatagcattattgtttcgcaggtcgatcgggatggtaatgaaagctccaggatgagccaaatttcttccagcccgcaggactcgctaaaattcgtgataacgaatattttttcgaagttgattgctggcgttcctttcgcacatatccctgacaaagtaccactggtagtattttttgatgtaacaacatcgctgcctctggagagtattcgccattactgggatgagacctggcaaaaaaacaatattactcttcctgttgaatatggtgaggggagtgggctcagtgtaatcgaccgctggttgaatgaacgtattaaagataaagcaatgctattgattgtgggtctccagttaaagcctgccgaatctgacaacacagctgaagccggtgtagcactgcttcttggcaaccgcctgacccagaagtcactcgaacccctcgcgttgctgcaccggccagatgcttcctctcctggtaaactaagcgaggggatgaacatggccgcctggaacgtcccgctcagaggacatatcgttaaaaatttatggcttgccggactgacgggtgagcagcacgcagaagtgatcacgtgtcagaatgcacatcctgcgcagtctgtagcggacgactccgtcatttcactcgacaggtctatgggacgtgccggtgccgcagccccctggcttgccatcgctgccgccactgaaatcgcccaacaaacacagtcgccacagatgattatctgtggcgataccacaaagaatgtgctgtggagcacgctcattaccccgattgcttctcgacaggagatggatccgtga

SEQ ID NO: 157852 - DNA, 1602 bp, Enterobacter cloacae
atggacactttacagaatctggttgacgcctgtcaggcggatgaaaccctgcttcgccagcaggcgcagacacgtacggaaaactggcagccctggcttgccccgatcagtgctacccgtccagcgggtgaagacccgggatatgacgatgatttccagcgtatccgggaggaggtcaataagctttccggtattgataccgggctgatatgcacgcttgctgaaaagctgctgaccattaccgccaaagatatccgggttgccacttattattgctgggcacgcctgcaccaggacggcgaaaccggctttgccgaagggcttgagctgctggcgggattgctgcagcgctatggaacacagcttcatccgcagcgtgagcgaagccgtaaaccggcgctggagtggctcgcgggctcgcgtgtgctcgacagtctgtctctctggccggaagtggtccgggatgatgccctgcacacggctggtgcgctgctgcttatccgcgacagtctggagaccgaggcggaagcgtcacggccgaaaatgaatgccttgtacagtgctctggagtcccgcctgatgaaggccggtggcatggatgcggtggtaccacagaacgccagcagtcagactcgcatgcagccggtaccccatacgacagaacaggatgcgccggtgctgagtcgcatcacctcgggtcaggatttactcgcccaggctcgaatcctgacggactatctgcgccaacaacccgatggctggcttgcggcgcaccgtctgatgaaaagcctgcgtcatgacacgctgagtgcgatcccggcaccggatggcgaagggaaaacacgcatcgcatcgccgcgggctgacgagcgggccatgctcaaacgcctgtacctgcagcagagctggctggagttactggagcaggcggacagcaccttctcgcgtggcgccagtcacctctggctggatttgcagtggtatatccatcaggcactgatgaaaacgggacaaaatgtgctggccgacatcatcgccgccgacctgaaagggctgctgagccgcctcaccgggcttgaaaccctggcctttaatgacgggacgccgtttgccgatgaggtcacgctgaactggataaaccagagcgtgctggacgatatgtccggctggcacgatgagccggccagaacagtcagtgagacggacaacgttattctggcccttgagccggaagcgctggagaaagcggacacggatggtctggatgccacactccactggctgcagacgcgcccgggcaccgactccacaaaagacaaatggttgctgcgcctgctgatggcccgcgtggccgagcaaaaaggcaaaaatgaactggccctgcatttgctgggtgaactcgatggtgcggcacagtccatcaccctcacacagtgggtgccgacgctgttgtttgaagtgaaatcgcgtcgcctcaggttgctgcgcttgaaagcttcccgcaacgagactgataaagcgcggttacagccagagatggatttgcttctgtccggtctgattgcactcgatccagcaggcagtgcggtgctttgcagttaa

SEQ ID NO: 157853 - DNA, 423 bp, Enterobacter cloacae
atgcttgaagaaaaaatccgatcttttcttgctatagtagtaatctttggcttatctgtgctgagtatttatcttggaaatagtatatttcagtcatacttctctttcgaagatagcattgtattctcatggttaagcattgcattaattgctttgcctgttgtgatgatttttccacttatttattttattctgatggttgttaaggggaagaattttgctttcaaaaaaatggataattatgtttcttatttgaagtggagttgcattgctatcgtagtgttaggagtgttattttcctgtttgtaccccaaagaattgctcagcaagggatatgtccgttgtaatggtgttccatcaggctggatggcaggaactgcaacccgctacgttaaagatccatctatctgcttcataaattga

SEQ ID NO: 157854 - DNA, 216 bp, Enterobacter cloacae
atgacgcctggagcgattagtgacgatacggtggacgacgttacgagcatgcaaatcggctttgctctgttccatcaacacgggaaatatgcagacagtttgactgtgattaatatgcttgacgcactcgagcaaacacctgatgtgctactacctcactcaaaagaaaaatactggtgctggaatacggataatccaaataagattgaggaatga

SEQ ID NO: 157855 - DNA, 471 bp, Enterobacter cloacae
atgaaaaagaaaataattctgggttacattgtattcttttcgggactgttggtgctaattgttcacatcttcccgatacgacctttcgttacgattacaaataatactaacaaacctcttttcatatatgctggcgagagtatctatggcgtcgaccccgggcctgaagaagttgagcgaattgtaaggtcaaaacctaaaatcatagctccaggcgagaaaggtgaatttactgcttcatttatatctctgattagaagagacgcagcaatcgatattggttggagggtcggtggccaatatgaatataattcaactggtggtggaggtcagaatttcattctttcctcaacagcaggtgcgtgttctgtgtcaatcaaagtaaacgatgggtttaataatgaggttctggagaatgctcctggtgatttgtgttttaaaaaaataaaagcattcaagtacaaatattga

SEQ ID NO: 157856 - DNA, 1755 bp, Enterobacter cloacae
atggacgatttaaccctgcgttattacgacgccgaaatgcgctacctgctggaagccggcgaagaatttgcccgcgctcaccccgagcaggcggcaatgctcaacctcgataaatcgggcgcgcgcgacccgtacgtcgagcgcctgtttgaaggctttgccttcctgatgggtcggctgcgcgaaaagctcgatgacgacctgcctgaactgaccgaagggctggtcagcctgctgtggccgcattacctgcgtaccattccgtcaatgtcggtggtggagttcacccccgactggcgtgagatgaaagagcagatgcgtatcgtcaaaggctttgaggtgaactcaaggccgatcggtgaaaagggcacgtgttgccgctacaccacaactaaagagatcaccctccagccgctgtcactcgagcacgctcgcctgtcgaccgactctgacgggcgttccgtcatcagcctgcggtttaactgcagccatctcgccgactggggcagtatcgatctcagccagctcccgttctatttcaacgctgacgcaccgctggcctgcgctatgcatgaagcctttaccatgaacactgcgcgtctgtggctgcgcatgccgggtgacacggacagaagaccgctggacgggtatttcaccgcactgggatttggcgatgatgacaggctgtggccgaagggggacagcagtttcagcggttaccagttgctgctggagtacttcacctttcgcgagaaatttatgttcaccggcctgcgcgggctggagaccgtgttctttccggctgagctcccgtggtttgaaatcgatgtggtgctggcggagcgctgggaacatgacttcagctttaccgaaaagcatctccgcctgaactgcgtgccggtgattaacctgtttccgctggaatctgacccgctgacgcttaattccctgcagaccgaatacatgctgcgtccgatgcgcatgcaggatggccataccgagatatacaccgtggattcggtgatgtcatcaaatcagcatacgtacgtgccgttttcgagctttcgccataaaggcggaatgatgcgtcatgaagccccggaatattactaccacacccgcgtgcgccgtggcccgtcagggctgcatgacacctggcttattcttggcggcgaagcgtttgataaccataccgtgccggaggatgaaagcctgtcgttgacgctcactggcaccaatggccagttaccacggcgtgcattgcagagcaccgtgcttgatacagtgatgaaaaccacctcggccagcatcggcgtgcgtaacctgtgcgcgccgacgctaccttgctatccgcccgcgcaggaccgttttcactggcgtgtgctgagccacctcggcagcgggttcttgtcaatgatggatagcgctgacgtgctgcgcggcaccctggcgctgtacgagtggaccgacagcgagatgaaccgccgtcgcctggaagccatcattgacgtaaagcactgtgagaccgaacgctttgagcagggctacctggtgcgcggtgtgcagattgaggtgacgctcgacagccatggctttgccgggcgcggcgacatctgcttgtttggcgagatgctgagtcgtttctttgcgctctacaccgacatttatctgtttaaccgcctgattatcatcctgcaaccgaccggagagcgcctggaatgggaagagaagcacaaccgccgtattcccggctga

SEQ ID NO: 157857 - DNA, 546 bp, Enterobacter cloacae
gtgttacgtacaaatttaactaaaatcgcgcgctggctgttaccactgctggcattcagcctggaaggttgtggggtgacacaaagcatcacagacagcacaaaatcggcctttaacaccgtgttctacaaaaagattaaggagctacatctggatttcacggcgcgtaaggcgctgaacaccgacgctcgcgaaaataactcgctatctgaacctgtcgtgattcgggtttaccagctcaaagaccgcaaaacctttgataagacggtttaccagcaactgcttcaggatgatgcaagcattctgaaagacgacatgctgaccagccgtaatgtcgtggtgaagccggacggtgacgctagccttgatatgccgatggaagaagaggcgcagtttgtcgcggtagtgggattattccgccatccggacatgaccaacgacacatggaggcaggttatcaagcgcagcgatctggatccggataatccgcgcattttggaagcaggcgagaaccacctgacgctgcaaccgtttaaggacgagtga

SEQ ID NO: 157858 - DNA, 1314 bp, Enterobacter cloacae
atgacaacataccctgagcgtcaccttaaaaccggcggtgacccgcgcacgcttgccgattatgtatccctgcgcgatgaaatgagcaagctgacgcatccggcacgtccggacgtaaactgggcgcacgcggaaacgctctgcctttcgctgtttgagcacaacggggtggaactgcaaaccactgcctggtatacgcttgcacgcacgcatttgtccggtttgtacggcatgaatgaagggctggcgattctggatgcgcttctctcacgtcagtgggggaacatgtggcctcagccggtgcatgcccggatggaaattctcagttccctcagtaagcggttacagcaggtgatgcgtaccctgacgctgagctatgccgacctccgccacctgtaccaggcagaggcatatttgaatgcgctgggtgacgtgttacagcgtttggagttaaagcataccagccagcttgatgacctgcgcatactgatccataacgcagcggtccggctggaaaacagcgaaaacgctggcgtgagcctcccgggtgaggccgtgtccgttgcgcaggcagagcgagtgaagcgggtgtacgttattgaacctgaccctcagccgcatgtgcaaatggagacggaatcttcagcgcccgtaaaaccctggaagccgtttatcgccggaatgctgagcatgctggtactgtccggcacgacggtcctgggatggcagataatgcataagcctgacccagcacaaatgcagtttgcggcaacgcttgccccgttacccgcagcgctttcggatgaacaaatccggcttttccgtcaatccattccttcgcctgatacgggcatcaggcagacacagcagcagctcacgcggcttgtgcagttaaaaccggactgggccatcagttatggtgatgaacttctgaagcaggcgctgatgctgtggccagaacaggcgaaaccggtggtgcagcagtggcagcgacaaatcgcgatcgcggcatttcctgaggacaatcttaatggttggcatcagggaatgacgcagctagagcagctggcgaagcggctgaatgcccttgatgaacagaggggcaagtacatgacggttagcgagctgaaatcggccgtgtttgccatgtcgcagtcgttcaacagcgctgtgccggtcgaggagcagctgcgtcagctgtccgcgttaccgcaaaatcaaccctggcctgcagcgctgcagagccagacggaacagcatcttcaacagctgattacccgctatgctgcgctgaaacaaaaaacagtggaatag

SEQ ID NO: 157859 - DNA, 480 bp, Enterobacter cloacae
gtgtcagccagagaccggtttttcaaaagagtacagcagaaaaatgacagtatcccgcccgatcacgaatcagctgagggtgaaatcagggcattccgtcagcggatggatgcgctggcacagcagatttgtgtgtggtttgagggaagtggaattgaggtcattgtgtcgacaaagcatattcatgacctgagtactcttggttacagccttagcagcggcatatgccggtatgacatcaccaccatccggctggtgaacggagattgcagcgtgagtattatgccagagcaactctgtcgtagcgcggagaggggctgtgtgacaatgcgggttgatgcgcccggcatcagccaggtgttttgcctgagcatggcaccggaggaaggctggtttatccggcgtgaacagcagggcgtaaaagagaatgccattatgacggaaaatcattttttcctggcagtggactgtctggcctga

SEQ ID NO: 157860 - DNA, 1233 bp, Enterobacter cloacae
atgtcgcaatattgcttcgatgcgctgaatgttattaaaaacccggtgtggctgatttcacccgtcgcggaaaatattctatttgccaatactgcggcgactaaacttatgggtgataaaacgttgaccgagatgcgcactgggatctattccgctaatgcgcaaaccgctctctcaatgtatgttcccgaacttaaaagcgaactggatatcatcgaaatactcaccgtctggcgtgacaatcaagagagtacgctgagctgtcgtctgacgcttacgcatctggcaccttatggtgatgtgatcgtgtttgaggggatttcgcagcaggcgccttccggcctgaaagccagccgttcagcaacctatcagcgaaaaaaacagggattctacgcgcgtttttttcttactaacagcgcaccaatgttgttaatcgatacggcacgtgatggtcacattgttgacgccaacctggctgcacttaatttttatggctacacccatgaggaaatgtgccgtaaacatacctgggaaatcaacacgcttgggcgcgacatcttgccaattatgacggagatcgccagcctgcccggaggacataaaccgctaaattttgtccaccgactggcggatggttcgacccgacacgtacagacatacgccggacccattgagatctatggcgataagctgatgttgtgcattattcacgatatcactgaacaaaagcggctcgagcaggagctggaacatgcagccctgcgagattcaatgaccggcctgcttaatcgccgacagttttacaacatcacagagcaaaccacactttctcacctcccggcacagcagcagtttagcctgatgctggtagatactgaccatttcaaaaacatcaatgacctcttcggacatcttaagggtgacgaggtactcatttcgctttcgcgcacgctggaagcctgcagccgtcccgatgactacgttttccgctggggtggcgaagagttcgtgctcctgctgccgcgaaccacgcttgaaaccgcgatgcagatagcggaaaccattcgcgccgcggtagcgcatattacgatccctggattgccccgcttcaccgtcagcatcggcgttgcacgacacaaccagggcgaaagcattgatgacctcttcaaacgtgtcgatgatgcgctctaccgcgccaagaatgacggtcgcaacaaagtgctggccgcatga

SEQ ID NO: 157861 - DNA, 2130 bp, Enterobacter cloacae
atgctcaacgtatcgtgggaccctgttttaatagccatttcttatttggtggcgttcatcgcctcatttgtggctttagacagcgcgggtaaaatccctcttgccgcccgtaaggcagcactgttctggcgtgtggccggtggcgtgaccttaggtatcgggatctggtccatgcatttcatcggcatgctgtcgatgaaaatgccgatgattatgagctaccacctctggctcaccgtcggctcgctgggtattgccgtcgttgcttctacacttgccattaacatcgccgttcccgagaaatcgctctccccttatcgactgatcctcgccacgctgatcctcagcgcgggtgtcgtttccatgcactatgtgggcatggccgcattaatgctgaagggcagcattatctgggatcgacgcattgtcctcttatcggtgctgattgccgtcatcgcgtccggcgcggcactgtggctagccttccatttacgagaaaaacgtaaaggcgtgtatatcaaccgccttgcggctgcgctagtgatggctgcagccatttgcgccatgcattacaccggaatgaacgccgcgcatttccacgaaatggaaaacacattaccgggcggtatcagtgaactgggattatcaatttgggtatccgtcaccacattatgtttgctcggtgtgatgttgattatctcgctgatggattcacacaggcggactaacaggctgacggataatttgcgccagctcaacagacagctggagttgcaggcacgttttgatgtgcttaccggacttgccaatcgtcaccagatggacgtgcggatgcaggactgcctgcacagcgcactgctgagcaaaaagccgtttgcggtgatatttttcgatattgaccatttcaaacggattaatgatatctggggtcatcacgttggcgatgaactgctgataaacgtggctcatcgcgtgactgcacggttaacacgcgaaatgacgctggcacgcctgggtggtgatgctttcattttgctggtcccagaatgcgatgacgacaagctgaacgcgctgctttcacccctgctggacgatatccgccgtccactttccctttgcgggcatacgttaaccatcacgctcagcgcaggagtaagcctctatcctcaacacggtgaaaccctgcatgagttaaagcttaaggccgatgcggcgatgcataacgtgaaaaagcaaggtcgtaacggctgggccatttatcgcgcagagatgtcgacgacggttccggctgaacctgcctttttgcaggagttatccctggcgctggaacgcgatcagtttgaaatgtggtatcagccaacctggctggcagaagagaacaccattcacgggtttgaggcactgctacgctggcgtcacccggaacaaggtgttttactgcccagtctctttttaccgtcgctggaacaaaccgggttgatcattcccgttggtaactgggcgattgaagcggcctgtaaacagctgagtttctggactgaacagggattcagtcaatggacattgtcattcaacctgtcgccgatgcaatttgagcagcaggatatctttcaggttatctcgtccatgctgcaaaaatataacctggccccctcccggttgatccttgaagtgacggaaagcacggcgctaaaaaatctcgatcgcagtattgaattgctcaccgcgttcaaccaggcagggattaccgtttcgatagatgattttggtacgggttattcgaatcttctcatgctcagcgtcttaccggcgaaagagctgaaaatcgacaaaagtttcgtcagttcaatgcttgaaaatgagaaaagcagaaagcttgtagaaacgataattaccatcgcccggactctggagatgaatgtcgttgcagaaggaatagaaaccgaagcgcagcgggcaatgctggtgagtctgggttgtgattatctccaggggttcctgtactcccgccctttacctgcagaacaggttccgtggctgctgctgcaaaaaacgtctgaaagacagattataccaatcggtaaaattcaggcggaatccccttttatttcacaaaaaaaccacgcctga

SEQ ID NO: 157862 - DNA, 1137 bp, Enterobacter cloacae
atgctaagaaatattagtgtcagaacttttattgtctatttccttttatgtctctttttggttaataacggagtgattgcattgtttgctaatggcgtgtcactttttattgccgtgaatactgcacaactcattgcactgcttttactttgggcgtacatgacaaaatatcttgtgacgccgatcaatactgtgaaaaaaagtattgaagaagtgacgtcgggcaatcttggcgtctctatccctgaatttggcaacaactgcgccgggcgtttgattccagggattaatagcttgtccagtaacatcgcaacgctggtcagcgagatcagatcctcttcacacacggctatgacgcttgcggagcaactctcgtcccgcagtgcagagctgtcggtaaagagcgaacagcagtcagcgtcattgatccagacggcggccagcatggaacaaatggcagcgagtacccgaaacaatgcagacaatacccgtttagccagtgagcaagcgaatgccgcgacgttacaggcacaaaaaggcggacaattaatggggcaggttgctaacaacatgcagtctataaccgaatgtgccctgcaaatgacggaaattatttcccttatcgatggtatcgctttccagaccaatattctggcgcttaacgcggcggtagaggctgcgcgcgcgggcgatcatggcaaaggattttccgtggtggcgggtgaagtccgtaatctcgcacaccgaagcgccgaagcggcgaaaaacatcaagttgctgattgacgtgaccagcaataacgtgacgcagggcgttaacgttgtctcgcaagcggagagaaatatgcaggatatcgtggcgggctcgaacaacgtcagccggttaatggacgatatttctgcctccacgtcagagcaggaaaaggggatttcgcagataacgcaggcgctgtctgaactggaacgcgtgacgcagagcaatgtcgccatggtggaggagctcaacggatcctccgatgtgctgcgtaaccaggtgattgaactgcaaacccgcacgcgtaatttccggcttgaccagcgacatctcgcggatgagccctcagcgcgacgtcaacgatccccgatcccctccctctga

SEQ ID NO: 157863 - DNA, 183 bp, Enterobacter cloacae
atgagcatgctactcgcgctgcaattcatgaatacacgacagtccgatccggtacctaccgacccaacgccgatgcccgatcccatcccgcgtcctcagcctatgccggacccgccgcctgatgaagaaccgattaaaatgtcgcatccaaccctgatatctgcgaggatacgcgccatctga

SEQ ID NO: 157864 - DNA, 849 bp, Enterobacter cloacae
atgatttatgattgttttttatactacgatgaagatatgctgcttgaacttcgcctcaatacgttaaacgaagtcattgataagtttgtgattgtagaatcaactcactcatttactggaattccgaagcctctcaattttaatatcgacaaattccctgaatttaaagataaaatcatttacgttgtttacgattcacttcctaagctgaaaaatggcgtcgaaggggaatatgatgcctgggctaacgaagcagcgaccagaaacgcaacaatgcgcggacttcgtgatgctaaggacgacgatattattatcatctccgatgtcgatgagatcttcacccctgaagccattaagcaaattaacccgaagaaattatgtacgacctttcacatgaatttcttcaactatcaatttaacctgcaagtctttaataaagatgactctccgcgcctgtgcacacttccgcgcgcgacaacgttacgtaatcttagagaccgttttggcggaaacgcgtttgactttagaaacgttaagtccactaaaatttataaagactttttgtcaagactgacattcaaatatagaaacaagattgtaaaaaatgcgggttggcacttctcatgggttatgtcgcctgaacgcatctcaaagaagatgtctacgatctctcatactgaacacgatacgccagaattcaataatcctgaacacatcatgaaagtgattacgaatgctgaggacatctggggtcgagacagaaaattagtcaagcaggatcttaaaaaccctgagtttccagcttacttagtcgataataaagagaagtttaaagagtttattatttaa

SEQ ID NO: 157865 - DNA, 378 bp, Enterobacter cloacae
atgtggcatctgaatacgctcaacattcccgtggtcactgctatgacgctcaatcgtttttgttatctgcttctgttttccgctgcgactggcagcttttttacttcgaatcctcttgtcatgtggttcgtgctcatcaatgtgctgacgatggcgatatatggcgcggataaaatagcggcgcgaaagggcatgcgcagagtcccggaagccactttgctggcgtttggggtgacaggcggttggcctggcgccattctgggtcaacaactgtttcgccataaaacgcaaaagcagccctttaaaacctactttatgctaagtgtcatcctgagcatcgcagcgatggcggcggtttatcacttctctgcgttatga

SEQ ID NO: 157866 - DNA, 438 bp, Enterobacter cloacae
atgaaaaagctcgttgcagtaacttttctgagcctggccctgacgggctgcgttaacccgggtaaagcgtccgttcagccggagcagcttcaaaaccaccgttttgtgctggaaaacgtcgatggtaaagccatcaccaaaacggcaacgcagcctgaaataagctttagcgcgctgtcagatatcagcctgattaaaaacatcactgtctcaggcgtgatgtgtaacagctataacggacaggggaaattgtccgaaggcgcgctcaccgtcaaaacgctggcgatgacccggaaactgtgcactgacccacagcttaacgaactggatcaggccatcggcgacatgctgcgcaagggcgcacaggtcgacctgactgaagaccagttaacgctggcgacagccgaaaaaacgctgatgtttaaacgcgttgagtaa

SEQ ID NO: 157867 - DNA, 126 bp, Enterobacter cloacae
atgcagatttcctatgatgcggcgctgagggatattcgcagcgccgtcataaagataaggaaggattatttaaaagccgactacgcgatttattccagcatctcgctaattaattttcccaactga

SEQ ID NO: 157868 - DNA, 2175 bp, Enterobacter cloacae
atgactgtgacgactgccaccactcaggccttaatcgggtggattaacgacacgcgcctgcacgctccaatgctggataacgatgctgatgccctgctgtcacgggtcacgtccgcccaggcgcgtgagcaggccattgaccgtgccctcctgagccagagcagcatcgggctgtacggccattcccaggcggcgaaatcgcatttactcacgtcattgtgcggcagcggtaatggtcgtctgaatgtgtcacccggccagcgcacgttcgactatttttcgcatatcaatcccggccatgcggcaacgaatatggccattcgcttcacccgcgaacagcgggatattgccgatgaggcgtttccgctgcgtctgcggctggtgaccgaagccgaactggtccagctgtttattactcgcatcaccctgcacccgcagatccgcccggtggataaatccgtgattgaaacgcggctggagaagtggcgcgccttgcgtcaaccgcagggcgttccggggatcaccgcgcaggaagtgggcgcaatcgcccgtttctggcagagcaccgtttccggcgggaaacagcacatggacgatgccctgtggcaccagttcgcactgctgatcccctcgctcgatctcagcactcgtgccagcgtctggtcactgctgtggggagaacagcaggagttaacccaacagtggcttaagctcgcccacgttctgcatcaaaccagccatgccacgctgcttgcggccccccttagcctgctggtggataattttggtctgccgagtgaaggtttcctgactcacggggcgttaaccgcgccggaggcgcaggaagcgctgctgcacccgatcagcgacggtgacgtgctaaatgccatcagcattcccgttgatatcctcgccttccttacccgtgagctggtgctgccggtagagggatgcgtcattgataatgttgatattattgatattcctgcgctgtctgacgacggagcttcgttgatgacgcaggccaaatgcctgtggctgctggaacattatcgtcaacagctacagcccgatgtactggtcatctgtaacgccaccgcacatcatcagcagacggcaaaagctgcgcgaacccttcagaactgggtcaaagagacgcagcctgcggaagaatccgctctcccgggtctcgtgtgggcaataacgccgcacgacgcgcgttttacgacgaaacagaatctggatgaagccgtccagcacctgctgggccagccgggtctgcgctggggtacgctgcaggcgctggacagccacagcatgcagcgcatgattgagtggctttctcaggccacgctgccgtctcagcgtcacaagcggctccataagctaaaaacgcttttacaacaggatctggcggcactcatgcaaccttatcttgcccctgtcactcaggatgcaggggaaagacgtgctcaggccgaaaatatggtgagaatgctgcaaagcagcgccgctcgccacggtgaactgcttgaagggcttttaccgccgctcaaagcctttgaaacgctgctggcagtacagcagccgcgcgaggagcaggtcaacgggttgttcaccgacgttattgacctgttcgcggaaaatatgcaggaaagcaccggtaccgttcagaccaaagataaagcacgcctcgcgcacaaggtgtggattaaccatctgcgtcaatggagtcgcaacgatgccgccgccgcccggttaggccttgaaccggcggttttacagcaggttgccgatgtactcgtcgtcgccagttatcgtctggatttacctcagcaactgcagcggatcgttgagacggataaaagtagcgccgcgcaactgcatgcggtgatgggcaatttcattggctggctgggttacgataaaatgccggttaccgggcgtcctgcaagccgcatccgtaaaggcaaggcaatctttgttacgcccatcgtgagcagtgccaccccgcgtctcgcgcgtctgggcgagcaacccgtccatgccgcaacggcatatgtgtacgactggctggttgcgctttatagccgcgcgatagagaacattgattaccaacatccgcatgatgtccagcctggcgcgcgtcaggccttatacgcattattgcgctga

SEQ ID NO: 157869 - DNA, 1335 bp, Enterobacter cloacae
gtggcaaaaacacttttacgcagcggtaatctggatgattttcaggccgttggcggcggcggacaggccgtttttgaatcagcgttgcaaatccgtgaagcgcttcggctgcgcaaacagcaggctattgtcgactgcctggctattcctcaggtgaacgatggcggcgatcgcgttgactggtattcccccgttgacggaacggtatccagctggaaagccgcagaggaagatgaacgttaccgcgccctgcgctacctggaaaacaccctggccagcgtggaatcgctgagtaaaaagtgtcttcagtcaccgaaaaccgcgcaacagctgtttggttccctgctgtcaaaaaccttccagttccccggcgaaaacttcctttatctggtcgatggcaaaccggtgatctgcttctggggcttcgtgaaccttaacgagaacgcccgtgacgacgtgcttgattgcctgagggaatcactgatcccggagccagcgcccgttgtcattgacgatcccgagccagagcccgaacctacgccggtgattacctttgaacaagccgatgagccgctcgtgacgcccgcgaccagcgtgcgcatcaccgaggactcgctgtacgaaccagaaccgcctcgcgtgattgtgccgactgtagcagaagaaccggcccccgaaattgtgccgaaaaagcgccgcgtccccctgtggtcattgcccgtcgcagcggtgattgttgcggcaatcgcgaccccattactctggccaaaacaggccccctctgctgaacctgtcgccgtaccggcagcgcctgttgccattgcgccaaaacccattaagccggtagaacagcttgccatgaacctgcctctgcaccaggccgaagtgctggagccgaaggtacaagcgcccgtcgcaaaaccagagcctgtcgtgattgccgcgatcccgaaagatgccatggtgatggaggccaatcaggtcaaagcaggctcgacacggttcctgaacggaacctggcgcgcccttctcgacgtgaaagatccggtcaccggcaagccgccgtcactgcgctaccaaatacagaataataaaggcaccgcgcgcgtggttcacggcgacaacatcgtttgccgcgtcgaggtgttctccggactgcacagcaacggtgagttactgattaaaacgcgcggcaacgcccgctgcacggacggctcacgctatcccatgcctgaagtcgcctgcaaagcaggcaccagcgatgtggcggaatgtagcgcacgttatgatgccaacaccgtcgttccactgacgttcaagaaagcaggtgcgtga

SEQ ID NO: 157870 - DNA, 915 bp, Enterobacter cloacae
atgttaaaagacaatttcaacgatctgctctcgtttatggtcgtcacgcgcgagcgcagctttacacgagccgcggcacagctgggcgtctcgcagtcggcactgagccatgcaatgcgcaatcttgaagcccgactcggcgttcgcctgttgacccgaaccacccgtagcgtggctcctaccgaggccggcgagcagctttttatccgcttacgtccccacctgatggagatcgagcaggagctaacggcgctgcgcgatacgcgcgacaggcctgcggggaatatccgtattgccgcgggtgaacatgccatggagagcgtactttggccggtgttaaaaccctttatggcgcaatacccggatattaacgttgaagtgacggtggataacggcctgaccgatattgttgatgggcgtttcgacgcgggcgtgcgcctgggtgaacaggtggcaaaagatatggtggcggtgaggatcgcgccggacatgcgcatggccgtcgtcgcgtccgaagattatctggagcgctttggcgtgccggaaaccccggagcagcttgcgacgcaccgctgcatcaatatgcgcctgcccactcttgggggattatatgcctgggaatttgaacgcgacgggcgcggttttagcgtgcgagttgaaggacagcttacgttgaacagcctgccgcagcgtatcgatgccgccgagaatggtctcggtttggcctacgtgccggaaacgtcggtcagcaaggccgtgtcagaaggacggttagttcaggtcctcgatgcctggtgtccgacctttgaaggatatcacctttattatcccagtcgtcgccagcacgcgcacgctttcaagctgctgctggatgccctgcgtcagccgtcatcgatacccacaggtaattattaa

SEQ ID NO: 157871 - DNA, 453 bp, Enterobacter cloacae
atgaaaaaagccttatttattttacttctgggctcctgctcagcgttggcgcaccagaacgatcccgttcaacaggctgttaatttcaataaatggtatgttaatcaaattagcaaggatgcctttccaataactgacagccgcgagatcgataaatttgtcactgcatccacaatgaaaaaactgcgtcatgctcaggatcctaactacgctgatgatgacttttatgacgcggatatttttttaaaagcgcaggatattggcgatgactggcccagcaatgtagccgcaattgcaggtgacacagatcctgtatgcgtaaatgtatatatcgcatttggaaaaaagcaggagcacatcgtcattgactgcatggtcaaagaaaatggagcctggaaagtacagtcagtctccagggtagaattttcaagaaatgttactgctacaaaatga

SEQ ID NO: 157872 - DNA, 576 bp, Enterobacter cloacae
atgtccgacaagtatcaactggttgatgtggcgaagacgtttcccgcgctgcatatcgatcttaaatacgccaccgatgacaacatcatcggcaggccgatttatcaggaagcgcgatgcttgctgcataccgatgcggctaccgcgttagcgaaatcgatcggcattgctaccctggccggactgaaactggtggtctacgacgcctaccgtccgcaggaggcccaggcgcagctgtgggatgcctgcccaaacccggaatacgtggttgatgtggccattggctcaaaccacagccgggggaccgccatcgacgtcaccttgatggatgaacggggtcacgtgctggatatgggcgccgggtttgacgaaatgcacgaccgctcgcatccgtatcacccttccgtaccgccgcaggcacagcgcaaccgcctgctgctcaacgccattatgtttggcggcggattcgtgggcatcagcagcgaatggtggcatttcgagctgccaaacgccgcaggctacccgctgttagacgatcaatttccctgtttttcgaccacacacgctgcacgttaa

SEQ ID NO: 157873 - DNA, 1476 bp, Enterobacter cloacae
atggcgaattggccctggcgtgtcagcgtgcggctgatcgcgttcgcaaagaaaagtatcctggtgttggggattatcctgtttgtactgctcgccgtgcgggtttatctctcgcagcaggggccggaactgcaccgctggcatacctggcgcgcggatgaaatgtccgtccaggagatggacaaggcaaatttcgcccagtacctgacccgcgaaaacgccattttcagcgcgctggaaaacgaggtgacggcgaaaacggaagcagaagagcagaccccccttaaccgctacaaccgccagagcctggtatggccaggacagttttcacccgatgccaaccgttcatttgtgctgatgccaaaaggcaaaccacgcggagcggtggtgctgcttcacggactgacggattcgccttacagcgtaaaacaccttgcggttaactatcagcagcacggctttgtcgccgttgttccgcgcctgcccggtcatggcaccgcgcccggtgcgttaacggatgtcgactgggagatgtggatggcggcgacgcggcttgccgtacgtgaagcgacgcgtctggcgggagatgcggtgccgctgcatctggtggggtattccaacggcggggcgctggccatgaagtatgcccttgatgcgctcgacgccccaacgttgcgtaaacctcagcagctggttctgctgtcacccatgattggcgttacggcgttcgcccgttttgccggattcgccggactacccgcgatgttaccggcatttgccaaagccgcgtggctcaacattgctccagaatataacccttacaaatataattcgtttccggtgaacgcggcgcgacagtcgtggttactgacgcaggcgttgcagcagcagcttagccatgatgcgcagatccaccgcctcgaccagctctcgccggtgatagcgtttcagtccatcatggactctacggtcagtacccgggcggtggtgacggggctgttcgaccagcttccggcaaacggcagtgaactggtggtatttgatattaaccaggcggcgagcttccgtccgttgtttaaaccctcttcatggacagcgcttgccgatctcctgcctgcggcaaaaaggcgttacagtgtcacggtggtgacaaatcgcagggcagacagtgatgacacggttgctaagattacgcctgcggagagtacgcgtgaaacggtagttccgctctccacttcgtatccgcaagaggtctattcgctctcgcatgtggccatcccgttccctcctgaagatgatctgtatggccgtcatccggaggtcaaaaaccgctatggcatcagcctggggaccattgtgctgtggggcgagacctcggttcttagcgtcgggaaggatgcgctcatgcgggtcacgtcgaatccgttttacgactatatgcaggagcggattaacgggcgcattgaggggaattaa

SEQ ID NO: 157874 - DNA, 891 bp, Enterobacter cloacae
atgaaaaagatctgggttcttggtgatgccgtagtggatctcctgccagatggggaaggcaggttattgcaatgccctggcggcgcaccggcaaacgtggcggttggcgttgcgcgactggggggaaacagcgcgtttatcggcagagtgggcgacgatccttttggccgatttatgtatcagatattagctgatgagaaggttgaggtgcggcagatgcgccttgaccctgcgcatcgtacctccacagtggttgtcgatctggatgaccatggcgaacgctcgtttaccttcatggtgcgcccgagcgccgatttgtttctggaacccgccgatctgccgtccttcagcgccggtgagtggctgcacgtctgctccatcgccttaagcgcagaaccgagccgctcagcggcgtttcaggcgatggcctccatcagggaagcgggtggttacgtcagtttcgaccccaatattcgccctgatctctgggctgatgagaacgaacttcgccgctgcctcgaactggctttgcagcacgcagacgtggtcaaactctccgttgaggagctgacgtttttaacccacgacgctcaggtaaaaaccgggctggagtcactcatgcgccgctgtccggcccgtctggtgctggtcacgctgggcaaagagggcgttatcgcctggcatgatggcaccgtgaaacactatccggcaacctccgtggagtgtgtcgatacgaccggagcaggtgatgccttcgtggccggtcttctgtacggactggccgccggtcaggaacttgtcccggtcatcggactcgcgcagcgctgcggcgcgttagccacgacggcgaaaggcgcaatgaccgcgctgccttaccatcacgaactgtaa

SEQ ID NO: 157875 - DNA, 1407 bp, Enterobacter cloacae
atgaccttcgcttcccgctggcctgcgatattgcaggccgtcatgaagggccagccgcgcgcgctggccgacagccattaccccgcgtggcacgccgcgcccgtgacggggctgatgaacgatcccaacgggtttatctggttcgccgggcgctaccacctgttttatcagtggaatccgctggagtgcgatcatcgctacaagtgctggggacactggagttcagcggatctggtgcattggcagcatgagccgctggcgctgatgccggatgaagaatatgaccgcaacggctgctactccggcagcgccgtggacaacggcggcgaactaacgctgtgctacaccggcaacgtgaagtttggtgacggcagccgcaccgcctggcagtgcctggccgtcgaacaaccggacggaagctttaaaaaacggggcccggtgctgccgctgccggacggttataccggacacgtccgcgacccgaaggtgtggcaacaggacggggagtggtacatggtgctgggtgcgcaagacgtgcaaaagcacggcaaagtgctgctgttcacatccagtgatttacagcgctggcagccttgcggcgagattgccggtcacggcgtcaacggcctatcggacgcgggctatatgtgggagtgcccggacctgtttgccctcgatgggacgcacgtgttgatctgctgtccgcaagggctggcgcgcgagccgcatcgctatctcaatacctatccggcaacctggatgagcggggcgtttgactatcagcgcgcgacgtttgatcacggcgagttacatgaactggacgccgggttcgagttctacgccccgcaaaccacgctggcggaagacggacggcgtatcctcattggctggatgggtgtgccggacggggaagagatgctccagccgacgcgggcccatggctggatccaccagatgacctgcccgcgtgaactgcggtatcgcgacggcaggctatggcaaacgcccgttcgtgaactggaaacgctgcgcgagaccgaatgtcagtggcagggtgctgcccgcggtgcgcccgttctgaatgcgacgagtcttgagtttgagctggaaacggcgtctgtgaatgtggattttgccggcgcgatgcgccttcgctgggatgagaaggggctgcgtcttgaacgcgccagcctgaaaaatggcgaaaccttgacccgctactggctgggtgacgttaaccatttacgcgtgctgtgcgaccgttccagcgttgagattttcatcaatcatggcgaaggggtgatgagcagccgctattttcctgctcatccggctcaggtgcgcttcgaaggtgcgtccgacatcacattacgctactggtcgctgcgccgctgcatgatagaatag

SEQ ID NO: 157876 - DNA, 777 bp, Enterobacter cloacae
atgcttcaactgcctgcaaagaaaaaagtgctgttacttgctgctctgatggtttctggggggctcaaagcggaagagacgctgcctgatgccgtgaagaacttcagtgagcagcaggatatcaagatcctcaagaagattgacgccccaggcggcgcacctgcctggctgggacaataccaggacatgggcgtcaccctttttttaacccctgacggaaagcacgtggtttcggggtatctgtatgatgataagggaaaaaatctcagtgaggcctatttccagaaagagatctacgcgccgatggggcgtgaaatgtggaaaaagctcaatgcagcacatccgctgaaagagggggctgacgctgcgccgcgtaaagtctttgtctttgccgatccgttctgtccgtactgcaaaaccttctgggccgaagcgcagccgtgggtgaaggcgggcaaggtccagctcaacacgctgctggttgcgtttctcaaccccaacagcgggcgtaacgcctcagccattctgaatgcgaaagatccggtctcggcctggaaagagtacgaactttccggtgggaaaaaattgcctaaaccagacgctgcggcgacgcgtgaaaccgtcgagatcctgcagaagcatcaggccttaatggacagtctgggggggaatgccactccggcgatttattatctgaatgaagaaaacgaacttcagcaggtaatgggactgccgaacgagaaacagctggtagagatgttcgggccgaaaccctga

SEQ ID NO: 157877 - DNA, 2469 bp, Enterobacter cloacae
atgatcccttccgccacgtaccgcatacagtttcgcaatggcatgacgtttgaccgggtggttgcgctgatcccgtatttccgcgatctcggcattagccatctctatgcgtcacctgtttttaccgcgacaacggactccacccacggctatgacgtcaccgatcccaacgaaattgaccccgcaataggcgggcgagacggttttaaccgcatggccgcggcgctcaggcaggctggcatggggctgatactggatattgtccctaaccatatgtcgacctcgctggaaaaccgctggtggcgagacgtgattgagcatggcaaacagagccgctacgcacgttatttcgatatcgactggtcgcgaccgctgacgctgccgtttcttggcgatacctttgaggcggagctggagaagggggcaatcaggctttatcgtgacagtgtcacgaataaggccgcgctggtctattacgacaccgcctatccgcttaacccgggtacctgggacgagaacaaaagcatcgccgaactgcacgaggcgcagagctggcggttgatgtcatggcgcgaagcgccgaagcagctttcgtggcgacgcttctttgagataaccgggctggtcggcgtccgggttgaagacgaacaggtttttcacgacacgcaccgcctgatcctcgagctggttcacgacgggaccgttgacggcctgcgcattgaccatattgacgggcttgcggatccgcaggggtatctgcagcgcctgcgccaggccaccgggccagactgttacatcacggtggaaaaaattctcgcgaagggagaacagctcccggccgagtggcccgtgtccggcacgacggggtatgaattcatcgcgtcgctggcggaggtattggtggatgacaatagcctggcgcgtctggagaaagtccataacgagacgctgggcgttacggtcgatcggcaaaacgcgctgcgggatgccaaagggctgatgaccgaccgcaacttcgaaggagaattcaccacgctcctcaacctcgcccgcgatttggctcagcacaatggggttgagatacagacggatgatattcaccacgcgttacgcgaactgcttatcgcctttccggtttaccgcacctacgggaccgcggaggggttaacgccttctgacgttacgctattgagccgcgttgtcgccagtgtgaacgcttcagaacccgcgctaagcctgatcgtgcgtattctgaccggcgatctgccggagcgtgaccgcgatgcggccatcctgttcaggacccgtttccagcagttgaccgggccgctgatggcgaagtccgtggaagacacgctattcttccgccacaacctggagcttgcgcttaatgaagtgggggccgacccgacgccgcgcgccttctcgctgtcgcgtttccatcaggagatgcgcatccgtcttgcccgtcagcccgacgcgctgctgggcacctcgacgcacgacaccaagcgcggggaggatgcccgggcgcgcctttacacgctgaccgaagcgcccgagcagtggggcgaaaatctggcccgctggcggcagatgaaccagacgcacgtgcgcttccttaacgacggcaccgcgccgaacgccgctgatacctggatgatttatcaggcgctggctggcgtctggcctgccacgctctcacctgacgactgggacgggctgcaaacccttgaagcgcgtttcctcggttttattgaaaaagcgttgcgcgaggccaagcagcgaaccgactggatagacagtaacgagagctacgaaaacgtggtgatggactatgttcgtcatctgctgtcgcccgacaacacgctgttcctgcatgatttcagtgaaaccttacagccgtttgttcgcgcggggctgatgaacagcctgagccagacggtgattaaacttaccgcgcccggcataccggacatctatcagggcagcgaagcactcaactttagcctggttgacccggataaccgacgcgaaccggacttcgccgcgctggtgcaaaacctcactacggcgaactccacggtatttaacgacgaacagtgctggcgggacggacgcgtgaagcagtatgtcactgccacgctgctgcggctgcgtccgcactacccggcgctgttccgctacggcgactggctgccgcttaaagtaaccggtgagcgcgaggagcatctgattgtgtatgcgcgcgttaaggacgacgaggcgctgattgtcgctgtgccgcgcctggttttcagtgtcaccaggaacgaaaaactgtgggtcaatacctcggtagccatacccgaagagctggtcgggaagcgctatcgcgatgtgttcagcggtgaaagccgcgttctgcaagagacgctggatctaacgtcagaaaagggatgtgcattggttctgcttacctgcgaataa

SEQ ID NO: 157878 - DNA, 1386 bp, Enterobacter cloacae
atgacgctgttttcaaaccagcccggcgatgagggattaccgggacatgaacgtgctcgggtcatggtcgcgctgatgaccaccacgctgatgggcgtctttgatggcaccatgattaacgtagcgctgccctccatggcgagcgcgatgcaggtctctgcgaatgtcgcagtatggtttgccaacggttacctgctgtcagcggcgatgacgctggctatcttcgccgcgctggcagcgcgcatgggctatcgcccggtctttctggcgggtcttgcgacgttcacgctcacctccctcggctgcgcgctggcgacgacgccggacatgctgatcgggatgcgcgttttgcaaggcatagggggtgcggccacgttgagtatcgccccggcgatactgcgctccgttttccctggacgactgcttggccgcgttctggggctgcacgccctgctgattgccgccagcacggccatagcgccggtgctgggcggcacgatcctagaggcgctgcgctgggaatggctgtttgcaattaacattattccgggaagtgtcgcactgctgctggcctggaaggcgttaccgcgcggttcggcttccagtaaaacgccctttgacaccgcaggtgcggtgctctcggcgattctgctcggttcgacaatcatgaccgcgaacagtttccagcacgtcagccatgaggcggtgttctgggcgggtattgccctgctcagcgccaccgccttcatctggcatattcgccgcgtccaaagccccttgctgccccccgttatcttccgcaacggccgctttacgctcgccgcactcacctcacttgcgtcgtttgtcagccagggcatcacctttatcgcgctgccgtttctgtttcagagcgtgtatggctacagcccgctggaatcggcccttctgttcaccccctggccgattggtatcgtgttgattgccccccacgcgggccgttgggcagatacgatttccgcgccgctgatttccaccatcgggctgatgatttttgccgttgggttgatcctgctggcaacgttacccgcaagccctcctatatgggatatctgcctgcgcagtctggtatgcggtattgggtttggctgcttccagagccccaataatcgggaaatgctcgctaacgtggcgcgggagaatgccagctatgcgtccggggtattgtccatcgtcaggaccttcgggcagtgtctgggggcggccgtggtgggtgtttggctggccgcgacgacgggctcggaccaggccgttcactttgcgctgtggactgcggtggtcgcctctgccgggtcggtgttgtttagcctgagccgactgcgcgccgccgttcgggcatcagcctga

SEQ ID NO: 157879 - DNA, 342 bp, Enterobacter cloacae
atgcgtaattccattaaagccgttgtatttggtgctctctctgtgatgttttctgctggccttcaggctgaagttcatcagcatggtgaaatggctgctgccagcgacgccgcttcagagcaggtgattgaaggaaccggtattgtgaaggacattgatctcaccaataagaaaatcaccatttctcatgatgctatcccggcggtgagttggcccgcgatgaccatgcgcttcacctttacccaggctgacgagagtattacggcgttaaaagtgggtagccaggttaatttttcgtttgtgcagcagggcaatatctctttactgaagagcattaaatag

SEQ ID NO: 157880 - DNA, 588 bp, Enterobacter cloacae
atgtttaaagtcttatcccatcgcctgcaacactgtaacgaggtggctgccagtatcagcaaagccagcccggttcaactgcaacagataaagacacagcttgccgatcagattgagaagccagttgggctacatactatgggcattccggcggcggtcagtaccctgggagtgattatcagtttcgcaattccacagttgtggttggggtatggtgtaatcgccgcacttaaccagccaactgaacgcgtcttcgtgtgggttgtgctggtcgccctgctcttcgctggaatcaacggcttaacgatgttcatgattggtaaaggcagcatgcgtgccgtacgtttacatctcacacttgcggttataagcctggtattaacggcagtctatttgctggccgcactaagcggtacgccgcttccgggcgtgagtctcactgcggcgctggtgagtctcgtcatgttactccttagcggaagctgcattctttctacgtctttctataaaatgctgttattcactctgcataatcgagcctggcgcaagctaatcatccagactcgtgaagctcacacgcctcgctaa

SEQ ID NO: 157881 - DNA, 126 bp, Enterobacter cloacae
atggtggattcgatgcctggtaatgtgggtttgggcacgttcgttgacgaggacaaggatgaccatgaaattctggattttgccttaatctatgtcggtgcgcataatgtatattatgttaaatga

SEQ ID NO: 157882 - DNA, 381 bp, Enterobacter cloacae
atgtttgaccatgttaaattcggcgtaagtgattatgaaaaaagtaaaaccttcttcctcgaagcccttcggccgcttggcgtaaacattatcgatgaaggcgcaccagactacggggtcgaaatgagttccggcgatgtttcactttgcctgtatcagacacatgataagccagcaccattacatatcgcctttgtcgcaacaacgcgtcagcaagttgatgacttttacaatgccgcgctgcgtacgggcgcgcaagataacggcgcgccgggattacgatcttacggcaaaaattattatgccgcgtttgtcattgcgcccgatggtcataatatcgaggcggtttgtcatgcccctgaaaacggcttattggactga

SEQ ID NO: 157883 - DNA, 363 bp, Enterobacter cloacae
atgactcaacagctgattttaatcgccggaccctatcgtagcggcacggatggtattcaggaacgtatcgatgccaatctggcaagattggaaaacgcagcgcttgcggtgtacgaacgtgggcacatcccggtcattggtgaatggctcgccctgccgctggcgaaggccgcagggtcaacctcgttgcatgatgaaatcagtgaagcgatgctttatcccgttgcccatcgcctcattggtaaatgcgacgcgatttatcgcatcgaaggtgcttcaaaaggcgcagatatggatattgaggtcgcgcgcaagcgtggtcttcaggtctacaccagcttagagagcattcctcaggcctga

SEQ ID NO: 157884 - DNA, 1293 bp, Enterobacter cloacae
atggcagacatttcagttttaacgttcggggcagatccgagtgctgaacgtatttcaacgacggctatccagcaggctattgcgaaagcgcagcctggcgacagcgtggtgatccctgcaggccgttatcttaccggagccatttttcttaaaagtgatatcacgctgcatcttgcgcaaggcgcggtgcttttaggcagccagcaccttgacgattaccctttaatcgacactcgggttgccggcattgatatgcggtggccagcaggcatgatcaacgtgattaacgcgcagaacgtaagcctcaccggaacgggtaccctcgacgggcaagggcggatctggtggcagcgattctggggagatgatgaacacggcggcatggttggggactacagcgccagcggtttacgctgggtagtggactatgattgccagcggccacgcaatgttctggtgtatgaaagtaagaatatcctgctcaaggatttcaccagctgcgagtccggtttctggaatgttcacctttgttattcccgcgatgttgcagtcgagaacctgagtatcattaattctgcgggaccaagcaccgatggaatcgacattgattcttgcgaacaggttcgaattgagcgctgtacggtttcctgcaatgacgacaatatctgcattaaggcgggccgcgggcgcgaggccgcgcaaaaagcccgtacggccagggacattgtcattcgcgaatgcgtgttgaacaagggatccggcattaccctgggcagtgaaacctccggcgggatcgagcacgtgctgatcgaaaacaaccgttttaacggcacgggggttgggtttcgcattaagtcagcccgcaatcgcggcgggtttatccgccacgtcacggtgcggaatttgcagctccagaacgtacgctttcccatactaatccaactgaactggttcccgcagtacagctacggtgatagtggcaacctgcaggataagccggagcactggcgcaaactggctgacggggtagaaggagaggcgggtctgactgaagtgagccacctgacgcttagcaatatcaacgcgcgccgttcaaacagcaacttattctctcgtgcgttttttatcgaaggctatccggaccgtcctgtctgcgggttaacgctggacaatatttccgtcgatgccaccgagtttgggaaagtatcgggtgttgaggggttgcgcttcaataatgtcctggtcaccgcgaataaactcacgcaggacatcaatgatagctacgaacgctga

SEQ ID NO: 157885 - DNA, 774 bp, Enterobacter cloacae
atgctcaccagtcagcgaaaacaattgattctggaaaaactcgaagcggaaggtcaggtacagtcgacggcactcagcgtccatttttcagtatctgaagacaccatccggcgcgatctccgcgagctggcggcagaagggcgtttgcagcgcgtgcacggcggtgcgctgccggcatcgtcggcggtagtaccctttgccgagcgtaaaaccgtgaaaatggatgcgaagaaaaacgttgcccgaaagggcgctcagcttatttcggcaggacaagtggtgattatcgacggtggcacgaccaccgctgagttaatcacgtttttgccctcagacctgcagattaccgtcgtcacgcatagcccgagtattgcgctgggtctggtcgagcaccctttgattgacgttatcctgatcggcggacgtctgtacaagcactcgattgtcaccgtaggtgcggcagctatcgaaggcattgggaacatacatgcggatctgttctttatgggggtgacgggcattcacccggaggcagggctgacgaccggcgatttcgaggaggcatgcatcaaacgtgcattttccggcagagccgcggagaccattgtgctggcttctcctgaaaagattaataccgcctcgtcatttgcgattggcgaggtgtcgctggcgaatacgatggttgtggaagatggcacggatcgggcctggataaatgcgataacagagaagggcgtgacgatcgttaaaaccgctgatcggacacatgaataa

SEQ ID NO: 157886 - DNA, 1296 bp, Enterobacter cloacae
atgagcctctggccgcgatcgctgctgacccggctgctgattattatgctggttgggctgctactggctaatgcgctcagcctgacgctggttatggtggagcgcatgcgcagcgcccgcacggtgatgttgggtaacctggaatatgatgttgctaccagtgtcgccattcttgaccgtcttccggcgaatgaacgtccggcctggctggcgcggcttgaccggggaaattaccgctatattcttgggccgggcgaaccgggtgcggccccgcaggacaagcggtcgcaagatgctgtgcgcaccctcaaagagacgctttctgcagactaccccctttattttacggccgttgccgggccggtgtcgcacattcaggcgcatatcactttaagcgatggtgcgccgcttacgattgatctcattccccgcatgccgccggtcgccagctggctacccgtggtgctgatcttacaactgctgcttttggccacctgttcgtgggtagccgtgcgtcaggtggtacggccattctcgcagtttactcgcgcggtcgactcccttgacccgtcatcacatgccgccatgcccgagcaggggccgatcgaggtgcagcgcgccgcgcatgcctttaacgccatgcagtcccgcattcaggcttacctcagcgagcgcgggcagatcctggcttccatttcacacgatttgcagaccccgataacccgtatgaagctgcgcgttgaaatggccgaacaacctgaacttcgtgacaagctgcttaacgacctcgacagcatgtcgcgtttggttcgggagggtattgcctatgcccgctcatcagaaattctggaagaagccacggtgaagatggagttaaacgcctggataaacacccttgccagtgattatcaggacatcggtaagaacgtgcagtttcaggcaagcgacgaaaggctgcccatcgtcactcgcccccaggcgctgcggcgggtaatgaccaatttgttggacaatgcgcttaaattcggtgattacgccgagattgaaattgagcctcaggcagaacaggttgttatccatatcaaagacggcgggccgggaattcctgatgccgaacttgatgcggtattacagcctttttatcgtattgaaacgtcccgtaaccgcgatacgggaggaaccgggcttggccttgccatcgcggcgcagctcaccgcgcagctggacgggaaacttcacctggcgaatcgcaccgaagggggactggaggtttccgtcgcgctgccgcgccgttga

SEQ ID NO: 157887 - DNA, 441 bp, Enterobacter cloacae
atggctgtcacggtaagatcgttgcgcgcagatgactattcccagtggcgaccgctgtgggatggctatacccatttttatgattgctacctcgatgaatctgttaccgcatcgacgtgggaaagggcgctctcagataactcacccctattttgccgggtcgcagagaaggatggacaggttatcggtttcgcgatgtgtattctgcatgaaggtacctggtcgacagcccccatctgctacctggaagatctgtttgtgaatgctgcagagcgcggggcgggagcaggaaaggcgctgatagctgccttgattgcggaaggccagcgcgaagggtggtcaaaactgtattgggtcacacgggagagcaacccggcgcgtaaactgtatgataaatatggtgaggctgacgattacgtccgataccgcataaccctttaa

SEQ ID NO: 157888 - DNA, 471 bp, Enterobacter cloacae
atgaaattaagacaggctaaaccgcaggaagccgaaatactctgggatattcgcaatcaggcgattcgtcacggctgtaaaaccagttacgacgaggatgtgattgcgcgctggacgcccgaccttatgcccgaacactatcgaaaaatggtcacagattaccccttttatgtggtggaagatgaaaagggtgacatcgcggcgacgggttatctcgatcttgatacgcatagcctggaggcgatattcaccttaccttcagcatccgctaaaggtatggcgacacggatcgtcgaggcactgatcaacgaagcccgcagccgtggaattacgcgcttgctgctcgattcgacgccaaacgcccggtcgttttatcataagctcggttttgtcacgctgggcgaaaagcatcatcactcgcgtatggcgggtgctgatttacgctgttttgaaatggcaatcacgttgtaa

SEQ ID NO: 157889 - DNA, 528 bp, Enterobacter cloacae
atgaactctccactgcatattaaaaccctctcccgggacgacattctgtcccacatcgatgcgctggccgatatcctcgaaaactgtgttaacggcggcgcatccgtcagctttatgctgccttttagtcacgacaaagcgcgcacgttctggcgcgggattgctgaaagcgtgggccgccatgagcgtaccgtactggcgtgcgttgatgagcaggacggcattattggaacagtacagctcatcaccgatcagccggaaaatcagccgcaccgcgcggacgttgcaaaactgctggttcacgaaaaggcccgccgtaaaggggcggctatggcgctgaaggagacccttgaagcgattgcgcgcgaaaaagggctatcggttctggtgctggatacctccaccggtagcggcgcggagagcttttaccagcgggcgggctggcaaaaagtgggggagatcccgcgctacgccctgatgccagacggtgcgatgacggccacatccgtcttctataaagtcttgtga

SEQ ID NO: 157890 - DNA, 1056 bp, Enterobacter cloacae
atgaatgccactgacaaacttagtcccaagcctcgcttacccggtcgtcggtttgtcaaacgtatgtatctcatgcgtttactcggcacatttctctgttttattcctgtcctgtccgtattgattgaacaccatcgctcggtctggctgatgatcctgctaggggtgaatgcctttatttggccaacggtggcctggctgcgggcgcgtcgttcaccgacgcccctggcgaccgagcaccagcacctggtgctggatgcaggcgccgggggcttttggatcgcgatgatggcggttaatccgcttacgtcggtcgtgattgcgaccattttgctttcggacaggctttctgcaggcggtattacgctgctgaaaaaggccgccgctctgatgctgggcgtattcctggtgacctggctgacgcaggggatggtggtagacgggtttgtttcccagcggacaatgtttgccaccttgccgctgatcgccatctacatgctggccatgagcatgctgactgacagtattgcgcagcgcttacggataaaaagccgcgagctggagcggatcgccatgatggatccgctgctggatatcgccaaccgtcgtctgctggaaaaacgtatcgatcatgaactgaataaacttcgtcagacgtgccgtgaatctgctttgatgtttatcgatatcgacaactttaaagatgtaaatgaccgctttggccataaggtgggcgacgcgatgctggcaacggtatcgaagatcctgcatctggccacgcgccctacagataccccagcgcgtctggggggcgatgaatttgtcattttgctcccggataccagcgtggatgaggcccagattgtggctacccgcattatggacgcggcggcagtaatgaaggatgtggcgcaagaggccttgcattgcaccctcagtatcggtatcgcctgcgcaacgcgagacacaagcagcgtggccgactggctgcaggccgccgatagtgccctttaccatgccaagcgtgaaggcaagaacagaatattcgcacactga

SEQ ID NO: 157891 - DNA, 357 bp, Enterobacter cloacae
atgtcgaacctggatccgttatttgcgcgcctgtcgcgttcgacgtttcggtcgcgctttcgactggggccgaaagagcggcaatactgctgggaaaaaggggctgagaccatcgatcgccatgcggcggattttgttgctcagcgccttgccccggcccatcccgcgaatgacggtaagcaaacgccgatgcgtggacatccggtgtttattgctcagcacgccactgccacgtgctgtcgtggctgcctggcaaaatggcacagcattccgcaggacgtcgagcttacggcgcagcagcagcagtatatcgtcaccgtgatccatcactggctggtcatacaaatgaatggctga

SEQ ID NO: 157892 - DNA, 1011 bp, Enterobacter cloacae
atgcgtccgcgtatgccagaaaacagcaaaaagatgacaaacttaagacaggtttctcctcccagagtggtcgttctggcctatgacggtttgtgtacctttgagtttggtgtggccgtggaaatctttggtctgccgcgcccggaaatgggcgagacctggtatcggtttgcggttgcaggtgtggatgaaggcgagttacgggcaacggggggcatccgtattctggccgatggcgatctgagcctgcttgagcgtgcagatttaatcctcgtgccgggctggcgcggtattgacgccgccgtaccggacgcgctttgtgatgccttacgcagggccagcgcgcgcgggtgccagctgttgtccatctgttcaggggtctttgtacttgccgctaccggactgcttgacaggcgcaaagccaccacgcactggcgctacattgaggcgcttaaaacccgttatccggccatcgacgtagttgaagatgttctgtatcaggacgaaggcgatattctgacctctgcgggcagcgctgcgggaatcgatttgtgcctgcacgtggtgcgtcgggattacggcatggaagcggcaaaccgcgtggcgcggcgtctggtcattccgccgcatcgggacggttcgcaaacccaacagttgagccgtccggttgcccagctgcgggaaagccagcgtctgggccagctgtttgatttcctgcaccagcatctggctctggcgcacaccgtggactccctggcgcgtcgggttggcatgagtcagcgcacctttctgcggcgctttcaggacgccaccgggaccacgcccacgcgctggctgttgaatgaacgcctgttgcgcgccaaagattatcttgaaaacagcaaattaagcatcgacagcatcgctgaacagaccgggtttggccaggccgctaccctgaggcaccatttccggcagcattacgccctttccccggcacggtaccgtaaacagttcgcccgcgcgggctga

SEQ ID NO: 157893 - DNA, 363 bp, Enterobacter cloacae
atgaaaaaaatattacctattgcgctcgtggtggtttctgttggtgcagttgcagggataggctatacccgtactggcgccccggaatatatccagtcggccgaatcccgtgtgggctcctatttaaccagcgattacggtcgtgtggcgtgtattagcagccaaaagagcgagcagcgctgggaattagattgcaccaatcaggcaaaagggaagtcattccagtttgccgtatatccttccgaaaaggcgccctatggcgtatcacgctctttttatcttgaagcgattaatgatgacgctaaacagagcgcggaacagggactgatgcgttacctgcaaataaatacccaggcaggttaa

SEQ ID NO: 157894 - DNA, 204 bp, Enterobacter cloacae
atgctggtctgtgcactgttttccgggcagctgatggccgggcacaaaggacatgaatttctgtatgtgaagagtgtggagcatcagcttcggcatgaagccgacagcgatgagctgcgtaccgcagcggaggagtcagcggagggtttgcgcgaacaccaccagtggcagaaatcgcgcaaaccagatacccattttcgctag

SEQ ID NO: 157895 - DNA, 1047 bp, Enterobacter cloacae
atgccagcacaacggaaagccgaaagtttgctacgtttagtggagacgctcaccagggataacatgatgaacaaataccgccttagcgacgagacccgcctctggcagtggaaaaatggcgagacaacccactcagccacgctgcggcagattatcgccacggcggattttaacgacgtaacgaccggcacaaaaggcggctggattgacgacgagagtgccctcgcgcaggacggtgactgctggatctacgacgagaacagcgtggtatttgcgggcgcgacaatatcggataacgcccgtcttacccagccttgcgtcgtgagccaccatgcccgcgtcggcggtaacagctggctggacaatgcacaggtgagccatgaggcaaaaataagtgacaacgtcaccattcagcaatccaccgtgcgcggcgaatgccatatttacggtgatgcccgcgtgatgcataacagcgtggtgattgccgcaaaaggcttaacgcccgaccaggaacagatcctcaaaatttatgaccgggccacggtgagcgaatcgcgcattgtgcaccaggcgcaaatctacggcgacgcgctggtcagctatgcctttatcgagcatcgagccgaagtcttcgacagggccatcctggaaggtaacgatctcaacaacgtctgggtctgtgactgcgccaaagtgtacggcaacgcgcgtcttattgcgggctttgatgacgacgctatccccaccgtgcgctacagctcgcaggttgcagaaaacgccgttatcgaaggtaactgcgtcatcaagcatcacgtgctgatcggtggagaggcgtggctgcgcggtgggccgattctgattgacgataaagtcgttattcaggggcgcgcgcgcatcagtggcgacgtgtttatcgaacatcgggtggagattaccgacgatgcggtgattgaagcctttatgggcgagaacattcacctgcgtggggaaaaggcgatcaacggcgatacgcgcattacccgcacgccgctgcttggcgcgctatag

SEQ ID NO: 157896 - DNA, 540 bp, Enterobacter cloacae
atgtcttcagaaatcatccccgtttcacagcaaatcgaactgcgatccgtcgaagagcggtacaccaccgacctgcacaacctcgtcatcaaaaacaaaatcttcctgcaaaccgcctttgactgggcgcagcacgtgggcagcgaagaggatacccgccgcaacgtgcagagtaaccagatgctgcaccagcgcggctacgccaaaatgtttttaatttttcatgacgatgcgctggcaggtgtgctgtcgttcaacgccattgaacccgcgaacaaaacgggctatatcggctattggctggatgaagcgcatcagggaaagggcatcctctcccgatcgctgcaggcgtttatgcgccattatgttgaactcgggaccgttcgccgctttgtgattaagtgccgggtggataaccacagcagcaacgctgttgcgctgcgcaacgggtttatgctcgaagggtgcctgcgggaggccgaatacctgaacggccgttatgatgatgtaaatacctacgcgagactgttcccgctatag

SEQ ID NO: 157897 - DNA, 504 bp, Enterobacter cloacae
atgcgtaacgttcttttgatgtgcctgtttctgacggggtgtgcaacacagatggttacacctgaaaaacgtacacatgacttttatacgttctacctcatggctttcgtcacagacagcaaagaagatgatctggattcactaaaaatgcgtgactatattgcgcaagacacgctctcccgactgcagaaaatatcctctctctatgagcaggaaattatcggttccgactattttacctatacgcaggactatgcggcggagtggatccctgacctaagcgtaagcaatgcgattaactatgcgtccggaaaagttgttaacgttcagctgggtgtggggcatgagcggaaactgcagctaaaagtgtatctgcgcagtgaagacggtaaatggaaaatttatcgcgtaactgacgtgagccatcatttcgaacagtatatttttgacgacagggcgattgctgccgcacaacgatatgcggccggtattacctctccataa

SEQ ID NO: 157898 - DNA, 792 bp, Enterobacter cloacae
atgacactggcactttttccttctctacccggctcgacgcttaatgccgtcaacaccgtcggctcgtggcttgcgcaggacgatcgtcgcagtcagcctgttgataccgtgatccttgcagggaatgcggtcatccctgcaatcgatgccgcctgtaagatagcggccgaacaggccatccccctgctgatcagcggcggtatcgggcactcaaccaccttcctgtatgccgcggtggcgaaacatccgcattataacacccttcccaccaccggacgggccgaggcggcaatcctcgccgatatcgcacgtgagttctggaatatcccggcagacaaaatcctgatagacgatcagtcaacgaactgcggcgagaacgcccggtttagctggcacatgatgaagcaaaagggtctgaacgccgggcgcgtcctcgtggtacaggacccgaccatgcagcgccgcacgatggcgacctttgctcgcgtttgccgggacgaggccgtttcgccggagtggattagccatcccggcgtgacgccggtgctgcaaaacagtgaagacggcctggcgtttagcggtgccagcgaaggactctggccggtggaacgctatctgtcgctggtgctgggggaactgccgcgcctgcgggacgacattaacggctacggcccggcggggcgtgacttcattgcgcacgtggacattcctgacgaggtggagaacgcgtggacccttctgcgtaatgacgccatcctcaccgacgcgctggtcagccgttctctgctgtag

SEQ ID NO: 157899 - DNA, 687 bp, Enterobacter cloacae
atgtctgtaatcgtcgataattttattgccccaccttgtctcgatgagattgacattctctggcaggacgagcacctgctgctaatcaataaaccttccggcctgcttagcctgtcgggcaaaaacccgcaaaacctggattccgttcattaccgtctggtgcaaaacttcccgggctgcacgttggtgcatcgccttgattttggcacgtccggtttaatggtgattgcgcgtaataaagcgattaacgccgcgctttgtcatcagttcagccagcgcgccgtgaagaaggtgtatagcgccctgctttgcgggcatgttgaaaatgacgaaggggtgattgacgcgccgattgccaaagacccggcgctgtttccgctgatgtcgatttgcgccgtcacgggcaaaccggcgcgctcccgctaccgggttatcgaacgtttttatcaggcgacgggcttaccgttgacgcgggttgcgctcacgccggagacggggcgaacccatcagctgcgtattcactgccagcagttgggtcaccctattttgggctgcgatttatatggcggccttgaatggccgggcgccgaaacgacgccgcggctgatgctgcacgccagcgggctggattttgtgcatccggtgagcggcgagacgattaacgcccgtcacgccgccccgttctga

SEQ ID NO: 157900 - DNA, 486 bp, Enterobacter cloacae
atgagacgttacgtgcaggtgttcctgatggcgattgcgttcgatctctactggacgctggtggtgctgtttcgcgagcgggggctggtcgtctggctcgcgctggcgatccttgcctgcctgatgctgtcgcctgcacaccgtatttacgccattttgctggcgaccgcaggcagcttgctggacgccctctgggcggtgacggggcttattgccttcacgggcgactcgctgatgcccctgtggatggtggcgctgtggctgatgttcgccaccgtctggacccggctgacgtgcaccacttccttgccgggctggatcttaacgctgctggcgaccgtcggcgggcccgtggcctaccttatcggtgagcggctgggggcaatgacgttcctggaacctggttttatcgtcgtcagctggatggcgccgggctggctggtattaatgctgtttttccacctgctgatggggagacaacaatga

SEQ ID NO: 157901 - DNA, 720 bp, Enterobacter cloacae
atgaaaacggtgctcattaccggcgccagctcgggcattggggccgggctggcgaaatcctttgccgctgatggctaccaggttattgcctgcgggcgcgatgcgtcgcgtctggacgccctccagctgcacagtccgaacatcacggtgcgccgcttcgatatgacagacagggacgcttgttgccaggcattgaaggactgtaacgccgaactggcgatcctctgcgccgggacgtgtgaatacctcgatcgtggcgtggtggatgccgcgctggtggagcgggtgatgaagaccaatttcctcggcccggtgaactgcctcgccgcgcttcagccgcagcaggctgcaggtcatcgcgtggtattggtcagttcgatggcgcactggcttcattttccgcgagccgaagcctacggcgcgtccaaagccgcgctcacctggttcgccgacacgctgcgtctggactgggagccgaaagggattggtgtaaccgtggtttcaccggggtttgtcgatacgccgctgacccaaaaaaatgattttgccatgccgggcagagtgaccgttgacgaggccgtgaatgcaatacgcgccgggctggcgaagaataaaaaccatatcgcgtttccttccggattcggcctgatcctgcggctgctctcatggcttccgaccctgatccagaacgcgctgctgcgcaggatggtgcgctcatga

SEQ ID NO: 157902 - DNA, 435 bp, Enterobacter cloacae
atgagcatgttgcccgccgttgtcagtcggtttgttgattactacgccacgctggacgctcagccgccgtcggcgctggtggggctttatcacccggatgccacgcttgtcgatccgtttggcgaacacaacgggctttttgcgctccagcgctatttcacccatttgctggcgaacgtcgaaaactgccgttttaccattgatgccccacttctgagcgaacgccggtttgtcgtcacctggacaatgcactggtcgcacccgcgcattgccgggggggagccgctcggcctgccggggtgttcagtggtggagacggaaaacgatctcatcacgcgtcagcgcgactactacgacgcgggggagatgatctacgaacaccttcctctgctgggctgggcggtacgcggcgtgaagcggagggtcaaatcatga

SEQ ID NO: 157903 - DNA, 579 bp, Enterobacter cloacae
atgaaaacagaacccgcaggcaacgatactaaaattagcgtcagagataagatattactcacggcgcacgatctgttttattccacaggcttcagggcgacgggggtggatacgctgatcaaagcgtcaaaagtgaccaaggtgactttctatcgtcattttccgagtaaaagtttacttattctcgcctatttacactatcggcatgaaatatggattggctggtttgaggctacgctgcgtcgacatcttgacgaaggcgaaataccttctcaggcgatatatcaaacgctttacgaatggtttatttcgcccgagttccatggctgcgcgtttattaatgccagcgcagaggctaaatcggaagatattgaaagtgaaataaaagagatatgccgggaccataaatcagagacaaagaaaacaatcgtcacgctcaccggtataaatgatgaagagaccgtcaatgacatgatgatgctcattgacggcgctattattcatgcgcaaatgggtatggatccagaaagggtggtaaaagcgttaaaaacgggcttagcgaaactgaccggtcagtga

SEQ ID NO: 157904 - DNA, 615 bp, Enterobacter cloacae
atgactaaaaatttgaacgtcccagttacacgtggtccacttgaccactccgtccgagagcagatcgtcgaagcggcatttgagcacttcggtcactacggctatgaaaaaaccaccgtggcagagcttgctaaatccattggtttttcaaaggcctacatttataaattttttgactccaaacaggctatcggcgaggtgatctgtgctaaccgcctggagctgatcatgaccgcagtgcattcggcgcttgccgatgcgccatccgccagcgagaaaatacgtcgtctcttcagggcgctcactgaggcaggaagcgaactgtttttccacgatcgtaagctctacgacatcgctgccgtggccgcgcgggaaaaatggccttcagcagaaaggtattcagaacacctgttaaaactgattgagagcattattgttgaaggcaggaaggccggtgagttcgaaaggaaaaccccgctcgatgaggctacgctcgcaatatatctggtgatgtgccctttcattaaccccattcaactgcaatacaatctcgaaaccgcgcccaccgcagcgatccttctcccctcactgattttaagaagtctggctccctga

SEQ ID NO: 157905 - DNA, 1098 bp, Enterobacter cloacae
atgctcaggcttacttcagcccgttgtctcgtttcactcctgccgctggccctcgtggcctgcggcgataacgcggcgagtgacgatccgcgcacgcacccacctctcgtcagatccgcgtccgttgaattcgcgaacgcgacgtctcgcgcatttaccggcgtggtggttgccagaacgcaaagcgatctcggtttcagggttcagggcaaagtccttgagcgccttgttgatacaggccagagcgtaaaaaaaggccagcctttaatgcgcctcgatcccgttgacctgacgttacaggcgcaggctcagcagcggacggtggatgccgcccaggcgcgtgcaagaaaagcgatcgctgacgaaacgcgctatcggggccttgtggctacgggcgctgtgtctgcctccgagtacgaccaaattaaagcggcggccgacaccgccagagcggagcttagtgccgccagggcgcaggccagcgtagcgcaaaacgcgacgggctatgccgtactgttggccgattcagacggcgtggtgatggagaccttcgctgagccaggtcaggtcgtaagcgcgggacaggcagtgatccgcctggcccgcgcgggacaacgtgaggcgctggtgcaacttcctgaaaccctgcgtcccgtcgtcggtagcgaagcgcaggcgacacgctatggcaacgaaaaacagcccgttaccgcaacgcttcgtctgctctctgattccgccgataccaccacccgcacctatgaggcgcggtatgttctggcaggcgcgctggcagacgcgccgctgggtgcgaccgtcacgctgaacatagggagtcataatgagaaaaaccaggtcatgcaggttccccttgcgtcgctctacgatgcgggcaaagggcctggcgtctggcggatctcgactcaacccgccaaagtgacctggcaacccgtcaaggtgcttagcgtgagcgatgattccgcccaggtaacggggggcgtgacgcccggtgaaaagattgtcgcgttaggagtgcatcttttgcatgaaggcgaagtggtccgcctcgctcaacagcgcacggagagtcagccatga

SEQ ID NO: 157906 - DNA, 471 bp, Enterobacter cloacae
atgacactcgatgtcttatttcatttaatggaaattctttcaccagaaaaaaacaccgcggatgaaaaaatccctgcgctaattacgcgattgtcgtcagaaaaccatcgttcagatgcgctttcgccctttgtacatcgactgcatcttctgtcttttgcccaaagcaacccgggtaacgccgaggagctgctcgctgcccatttgccaaaagaagatggaacgcttcccctgcttgacttcgccgagtggccccaggtgcggtacgcaacgtcgggcgaagcgcaaacgcctgaatcagaagcgtacttccataaaatgaccgcggctgccaatgtattgcgcgaggcgctgatcgatacagagcgcacaaagggtacgcctgcgctttatattctggataaattactcaacctgaatagcgccctgccggaaagatataagaagatggcaaatatcccctacgcataa

SEQ ID NO: 157907 - DNA, 1455 bp, Enterobacter cloacae
atgtcgacacagaccctcacgcaagccgagccccgtcgctgggcaatgtttattatcctgctggttggcgcatttttgcctccgctcgatttttttattgtcaatgtggcactgcctgcaattcagggcgagctgagcgccacgtcctctgctgaacagctcgtcatttcgtcctatgctgccgtttactcggtaacgttaatcaccggcggacggctgggggatatttacggtcgcgggaagatgttttttctggggctcatcggttttgctgcggcatcgctgttgtgcggtttagcctggtcaccgtgggttctgataaccggacgcatattacagggcgctacggccgcgattatggctccccaggcgctggcttccgttcaggctatttttccggaggcggaaaaaccgctcgcgctgagtatctatggcgcggtgtttggtctggcttccgttatagggcaggtattgggcggagccctgctttcagcggatctgtttcatctgggatggcgggttatttttctggttaacctgccggtggcgatgctggtcattctttttggactgccgcttataaaagagacgcgcgcgcaatctgcacagcgtctggaccccgtcggaatgctgctggcaaccgtcacgctgagtgcgctgattgtgccgttaattgaaggccgcgaggcgggatggccctggtggacgtggctgtcatttcttgctgtgcctctgctggccaggctgctgtggcgttatgagcggcatcttagccagaacggtggttcaccgctgctcgatccttccgtgctgcgcgcgccggggctggggcgggggctcacagtcgttttgctgttttattcgattggtgccttctttctgttattttctgtttatctccaggatgcgttgcatataaacgccctgacggcgggactgatttttctgccctttggcatcggctttctgatcggaccgttgctgacgccgtacctgaggcgttttgtcggaaattacttaagcgccatcgggatgggctgcgagacggtggggctggcaggccttgcgtggctggttgcccacacgctgacagggcgcccgccagccatgttgccgctcgcggcactgctttttgttaccggtcttggacaggggctggcgatgccgacgctggtgcgcatggtgacaggccgcgtggcgcccgcgttctcaggcacgatcgctggcgtgaccagctcgactctgcaaatcagcaccgcgctgagcgttgccatcatcggcggcattttttacagcatgttagacgctggaaaaagtgaagccactattacgcacgcctttatcgtctcccttctgacaatggcggtatgccttgccataggcgcaggactcagcgtccggcttatcaggtatgcttcgtggggacgttttcctgagcataaatcaacgtgttaa

SEQ ID NO: 157908 - DNA, 747 bp, Enterobacter cloacae
atgaacaaattaaaagacaaagttgccatcgtcaccggtggctccaaaggtatcggagcaggtattgctcgtcagctggcggctgacggcgcgaaggtcattgttaattacgcctcaagcagaagcgatgcggataaggtcgttgccgatatcgaagccgcgggtggaaaggccatggcggttgcggcggacatcacctgccagaccgaagttgaggcgctaatcaacgcggctgtaagccattatgggcggctggacattgtggtgaacaatgcaggcgtttatgccttcgcgaggattgaagagagcaccgaggcgctgtttcacaagcagtttgatatcaacgtgctgggcccgttgctggtggctggggcggctgcaccgcatctgacaaaaggcagcagcatcatcaatatcagctcattcgtcacccgggtctttattcctgagagcgccatctacagcggcaccaagggcgcgattgacgccattaccggcgtactctcacgcgaactcggcccgcgcggcattcgcgtcaacgcggtcaatcccggccttatcgaaacggaagggagtcatagcgcgggcgcgatgaactcggatttccagacatggaatgaaagccagacgccgcttggccgcatcggccaggtgcaggatgtggccccgattgtttcatttctcgcctcagacgatgcggcctgggtgaccggtgaggtgattctggcctctggcggcatgcgttga

SEQ ID NO: 157909 - DNA, 540 bp, Enterobacter cloacae
atgaaacaggccgtctattttcatccggctctgcgcgtcctgcactggctgatggccgcagccattctcatgatgttgtttatcggtgttgctatggtctcgaccgtctcctccgcgcacagcctgctggtgtcgatccacaagcctctcggggtgatgatattgcttctggtcatcgtgcgattatggctgcgattcacgacggccaagcccgcgttgcctgcctccattccggcctggcagcgcggtatggcccatctctcgcattggatgctctatctgatgatggtggcccagccgctgatcggctgggcaatgctatcagcagcagggtatcccgtcacgctgggtaacggcatcgttctgccgccgatcatggacatcaataatgatcggtatgcgatactgcggccgcttcatacctgggttgccctggcgttattcgcgatgataatgcttcaccttgccgctgcgctgcttcacgctttcgtgctgcgtgacggtgtcttcagcagtatgactggccaccgtaaaccctag

SEQ ID NO: 157910 - DNA, 1056 bp, Enterobacter cloacae
atgaacagtaaagtacgtttaaacagacaaacggttgtacgtctggcgctggtcggcattattcccctgatcctttttttattattcctgtggacgggcggttggctgacgcctcaacgtctgacgtcggataagctcgttgatgtattacagcagtcgggtggagtacataaaggttatcgccgtaatcatgctaaaggcatgtgtgtgctgggctcgtttatatcaaacgggaatgccagcgtgctttcgcgtgcctccctgttcagtaaaggtgaaaccgctgtcacaggacgttttgccattgcgggcgggaacccggctgcaccggattatgccgtgcccgttcggagtatggcgctctcctttcagcagacgaatggtgagcagtggcgcaccggtatgaacgccatgccatttttccccgtcagttccgttgagagtttctatgaactccagacggccaccctgccggatgccgcaaccggaaaacctaacccggaaaaattacgttcctttgtcatgaaccatccggaaataaaaccgttttttgcgtgggcaaagcaatacacaccctcctcaagctgggccagcgatcgctttaacagcctgaatgcttttcgcctgattgataaggcaggccatgaacaactggtgcgctggagcatggtgcctcatgccggatttactcccataagcgacgccgataaacagaacagcgatttcctgcaacaggatcttcagcatcgtctggagcagggcgagctgaaatgggatttagtgttcacgcttgctcaggcaggtgataaaggcgacgacgccaccagggcatggccagccgacaggaaaacgattaatgccggaacgttagtcttaaacaaggctatccctcaacagcagggaccctgtaatgacatcaactatgacccgctgattttacccgacggtatggctccgtcctctgacccgatacttaacgcacgctcatcggcttatgccaaatcctataacctgcgcacccatgaacaggcgcaacagaagggagagacgttatga

SEQ ID NO: 157911 - DNA, 573 bp, Enterobacter cloacae
atgtccgacactatccaccacgggaatcagcagaactggctacaacagtattattttatccggacggctttctctgttttatgggttattgccgtgttcaccgctggcctgtcttcgcctgttggcgcatcgattttgctcattctttaccccgcatgggatgcaatggcgaattatattgatgcaagaaaaagcgggggatttggccgcaaccggatgcagaccgttaatattatcgttagcgttataacaacgctggctgtcgtgttggctcttaaaagcaatgtaaatgatgtcattcgggtattcggctgctgggcgatattatccggtctgctgcagctgggcgcggcaacacagcgctggaaacattatggtgcgcaatggagcatgatattaagtggcgcacagtctgcacttgcaggcgcgttttttatctatcaggcccggacgcctgagccaccgtcaatagcaaatatcgcggggtatgctgcgtttggtgccgtctatttttgcctgtcagccctgacgttaacattccgacaaaaaagagaagcgaaacggtcatgctga

SEQ ID NO: 157912 - DNA, 585 bp, Enterobacter cloacae
atgatcgaacgttcgccgaaagcgcgcgaaattatggcaaatacgaggcagctgcttacaacgggtgggtacaaaagctttagctatgccgatcttgcggagcgcgtgggtatccgcaaagccagtatccaccatcattttccgggcaaagaagatttagtcaaagctgtagtgcaggaataccgcgcagaagcacggagtggcatggaagcgatggatcggcaaacaaaagatcccctgaccaaagtgaaaggctatgctgatttctggtcggcctgtattaaagagggggcttcaccattttgtatctgtgtgatgctggccgttgaacttccgacattacctgcggatattgccgcagaagtaaccggccattttaacgatctctctgactggctgaccgcagtactgagtgctggcgaagcgcaaggcattttcactctcagcgaaagtgccgaagtcgaagccagggctctcatggcgggcatgcatggtgccatgctggcagcgcgggcgtttaataatccgcacgtctttgagcagattgcctatccactgatcgataaggttctcaccgcagcctga

SEQ ID NO: 157913 - DNA, 252 bp, Enterobacter cloacae
atggcagttatcccttttccggacaggcacagcccagcggctccagtacgtaacgttcgcgaattatccaacgtcattcacgcgaatgaagatcgcggccgcacggcgtgcgtagagaacaatgatgccgttcgccgtttcgcattaagcgttgccgcgaagctattaagcgatcgggagcttaatcaggctgcgccttttatgatagacagaattgtcaggctgctaatgacagaatccaaaaacagttaa

SEQ ID NO: 157914 - DNA, 405 bp, Enterobacter cloacae
atgaccaaaatcttgatgctggtagcaatgatagcaacccttgctggttgcactccattaaccccaaaagattgccagaagaaaagcgctcttgattcgtgctcttacaaacgttcaggaaaagtaaccgataaagacatttatggcgaacaagcatcaggtataaaaaaagcactcgatgcagcactgaccaaaccccatgcctggagtgggaaaagatgtaatgtgcatctggatttcaatatggacggcaccttgcagaatttcatcataaagagtggagataaggattactgccgtgctttagctgaagcctccaggcaagcaaaattcccatcatttactaaccagcatgtttacgacgacatgggttctgcccggtgggaaatgcacggacaaccatga

SEQ ID NO: 157915 - DNA, 819 bp, Enterobacter cloacae
atgaaatgtgcattaatttatgattttgatggaactttagcagaaggtgactgtgcccaacacggacttatgcctgctttaggaataaatgatgtggcttcattctggcagtccgttaaacaacgggcgagatctgatgatggtgatgaaatattatcttaccttgggcttcttgctgagaaagccaatgcaattggttctcaggagttaacggaaaccaatttgaaaaaacatggagcaacaatacctttatttcctggggttgaaggctggttcaagagaataaatgaatatgctagtcagcatggcttggaattatatcattatatcatttctagtggattagatgcgatgataagaggtacatccataggatgtgaatttaaagatatctatgcatgtaaatatcattattcctccaatggcagtgctgttacatggccagcgcaagcaatcaattacacaacaaagactcaatttttatttagaataaataaagggattcataactcatgggacaatgctgccatcaataagttcattgaacctgaagatcgcgagatccctttccaaaaaatgatatattttggggatggtgatactgacattccagcaatgaaaatggttcgatatcaaggtggagtttccttggctgtatttgataataagaaatggaataattttgcgacgcaagaaaaagttgagaaattaattgctgaggaacgggctaattatgttgttcctgccttgtataatgaaggggggcaactggatgttactgtgaaaggattgttgcaattattcaagagaaagggttaa

SEQ ID NO: 157916 - DNA, 444 bp, Enterobacter cloacae
atggctactatcccaaccctgacttatcttccgtctgacgaaaacgtcattctgcaatttatctcccgaccgcttccggctgatgccgatctatttgacgtcgccgacaactgtgccgtgctggtcgaaaccgatgatgccacgagccgtatggcgctgtgcgagcgtctccttcaggccctgcgcaggctgcgtaaactctgcgatgtcgatcttcctccccatctgatagaacagttgatcatgggtgagaaactgaactcctgcgtgccggactgctggcaggacacgctgactcaggtggactatgttctggcgctgacgcaagcggtgatggggggaacgctgctcagccacttagcgaaagagctaacgggcctgctgcacgatatggtgtggctgctggctgagtttgtggaggaaccgcgcattactgcgcattaa

SEQ ID NO: 157917 - DNA, 1524 bp, Enterobacter cloacae
atgcgtaacgcttttgtgcctgtcgcagcagcagtagccatttttattgcgggtatttttatcctcaatattcaactctggtattcagcacgggccgacagtcagtcgggagcccgatacgcggtaagcgatattaatgacattcttgacgaggcgcgcgttgccgcccgaacggcgacggaaattatcgtcaaggggtgcgatgcagaaggccagtaccagctgggtacggaggcagcgcttcagccacatctcagaaccatcgtcatcatcaggcaggggcagccctggtgttcctctctgccgggaaatcgcgtgttattgcggcatattaatacattacccgatactcccttatttcttgttccggcaagcgatacggtaaacgggcagccggttttgctctttcagacccggtttgcagaaaaccgtattatcgtgacgatcagcgatcgtcatatccgggatgcgttaagcacgccgttaaagcacgtgaattattcattagcggtgggcgggagcgcaattgacgcctctggcgaactgcacgtcacgtctcccggcgaacgtcaggccagacaggtttactctgaacaatacgcctatagcatccgatacaaccctgcgccttttttcagcccgcaaaggctgcttcgtcaggggggcggcatactccttttcgtactgctggttgccggtatcgcggcttatgttctgtataagtacctgaacaaacacacgcttcctgaagaaacacttcgcagtgcgattgcgaagagagaaatcattccgttttaccagcccgtggttaacggcagggagggcacgctgcggggcgtggaggttctggcaagatggaagcaccccaaagcgggttatatttcacccggcgcattcattccgattgctgaaaaatcggggctgattgtttccctcacgcaaagcctgatggcgcaggtggtgacgcaaatgaatgccatctccagtaagcttccggaaggttttcatatcgggattaacttcagcgcttcccatatcgcgatgcctggcttcgtggacgaatgcctgaagtataaaaatagcttcgtcagaaaggatttaaaccatgtgattgaggtgacagagcgagagccgctggatattgatgaacgcctcgtgcagaccctgaacgtgcttcatgaaaatggttttgccattgccctggatgactttggtaccggctattccgggctctcatatctacacgatctgcatatcgattacatcaagattgaccacagcttcgtcagcagagtcaatgaacacgaggactccacccggatcctcgattgcgtattggatttggcgcgtaagctctccatcagcattgtggcggaaggcgttgagacgaaggcgcagttagactatctcaaccggaataacatcgtataccagcagggatactacttctttagaccggtcgcctttaccgggcttatccatattttgctgtctaaacccaaggtgaaggtcatggtggagtga

SEQ ID NO: 157918 - DNA, 1362 bp, Enterobacter cloacae
atgcttgcgatgagtcgttttgtaaaaggtcgttatatctcgttctgtctcggttgcattgttgtcatcgggatattacaaacgctatttatcaaactggtgggatggatcccttccttttcaccgtttctgttcccgacgctcaccattttcttgcttgtatttcacctgtttattgcctgttttatgctaatgaaatactggtgtgacaggaaacggttgtatctggtagcgatcgccttcgcctttgccggttcggcattattgatgattggcacgctgtcgagtttcccggcctggctggatctctatcaattcaatgtcgtcaactataacgatgcgatgatttactacatgttccgccatctgttaatggcgatactgatcatcgtctcggcattactctacatcacgcggagtcggccactgtcacggctggcgcatgtttcaattattagcgggttatttgtctttaccttttgtgccgtgtttctggcctgggtctattcaagtcattcagatttgttatcaattgacctggtggataatgaaacccgccagtttatggttctctggagccagtgcattaatatttcattaattgccctgtggatagtgacattagcaacgctgatgtttattacgcgcgtacgcaatcttttctgggtcggagggaatttcctttgcgtctgttatgtggtcacgctatcaatgctgttagtgggtgggcatgccgaagatatctcctggtatcgcgcccgtttatttgaaactgtcgcgacgctgcttattatttttgtcctgctttacgatgttttcaatttgtatcgtgaatcacatttaaagtatcagcagtcttatcagaactcgattcgcgatccgctgacgcgtctttataaccgcagttatttttatgattcattaaatcaggcgctggcaatcgccaaagccaaccgtccggtttcggtgattgtcagcgatctcgatcgcttcaaacgcattaacgacaactacgggcacttgcagggcgacaaggtgctgcagtttgtctctaacctgctgatggattccgtgcgaccgcaagatatcgcggcacgcatcggcggcgaggagtttgtcctgatgctggaaaatacctcttcagaagaggcacgccaggtcgctgaacgcatccgtataaagttaagcagctttgataaagccagcagtgaggggcaactgcccgagccgattacgatcagtatgggcgtcttcacggcaacatcgccggacataaccgccgagaagtgtgtagaaagtgcggataaggcgatgtacgaggccaaagagactggccgaaaccgcgtggtgattttccagtaa

SEQ ID NO: 157919 - DNA, 1596 bp, Enterobacter cloacae
atgaagaaaatcgcgattattggctccggcccaacagggatttacaccttttacgcacttcttaaaaatccgcagccgctttcggtctccgtctttgaacaagctgaggaagctggcgtgggtatgccctataacgacgacgaaaactctcgtctgatgctggcgaacattgcgagcattgaaatcccgcctatttttatgacctatctcgactggcttaagggccagagcgaaacccatctggcgcgctttaaggttgataaagcccgtttgcatgaccgacagttcctgccccgactcctgctgggtgagtatttccgcgacagctttcggtcaatcgtaaaagaggccaaaaaacggggtttccagattgatgtccatgaatctgcccaggtcaccgatatcgtgcccacgaaagaaggcgtcacgctttccgtcaacgacaacgcctttcctgaacgcttcgaccttgcggttatcgccaccggccatgtctggccagacgaagatgaagccacgcgcacgttcttcccaagcccgtggtcaggactcatggacgccgaaatccgcccctgcaaggtcggcattatgggaacgtctttgagcggcctggacgcggccatggcggtggtgatgcagcacggtgagtttgtggacgacgcgttcattctggataaaggaagcgaggcgctaaacattgtcctgatgtcccggaccggcattttgccagaggccgatttttactgccctattccttacgagccgctgtcggtattgaccgaatgcgtggttcaaaacgagattgccaaaggagcagacggcttgctggaccgcatctttgccctgatggttaaagagcttgaacttgccgacccggcgtggtgcgaggccatatcgctgaggcaacgggacgcagacagccttcgcgaggcgtggtttgaagagcgtaaacagcacggtccctttacctgggcagaagagaatcttaaagaggtcgagcgaaacaaacgtgaacggcgcaccgtagcctggcgctataccatacttcgcctgcacgagatcgttgcagaaatcgtacccgccctgaacgaaaaggacagagcgcggttcaaagccgggctggagcgcgtgtttattgataactatgccgccatcccccctcagtctattcgcaggctgcttgccctgcgcgaggcgggcatcataagcgtagtggcattgggtgaagattacactctggatatcggtagtgctcaaacggtcattaccaccaaagagcaccgctaccgcttcgacgtctttattgatgcgcgcgggcagaaacccctcaagacaaaagatttacccttcccgtccttgcgtaaactgctacaaacgacaggcgacgatatacccgatgttggtgaagattacacgctgctggcgcccgatacgcttcgcggacgtattgcctttggtgcgataccgtggctgatgcacgacagcccctttgtccaggggctggcagagtgcgcagagattggggaagcaatggcaaaagcggcaaataaacctgcgtcggttacgcgcaaaaagttaccttttatggataactga

SEQ ID NO: 157920 - DNA, 783 bp, Enterobacter cloacae
atgattatactctgtaaagcctgcgggacctcgtatgcgtatcaacccgacagatgccctgtctgcgaggatgaacgccagtatgttccagttaccgggcaggcgtggaccgaacttgaaaccgtcactgccgcgcataccaacaaatggcagcagcttgaaccgcagctctttagcatcaaaacggtgcccgcctttgccatcaatcaacgggcactgctgctgcgcaccccacacggcaacattttgtgggattgcatcgccaacctcgacccggcaacccgaacgctgatcgccgtcctcgggggtatcagtgccatcgccatttcacaccctcactattacaccaccatgcaggactgggcggagacgttcgacgcgccggtgtatcttcatgcgagcgatcgggagtgggtcatgcgcgacagtccggccattcacttctggcaaggcgaaacgctggagattgtcccctccgtgacgttgctgcgtctcggcggccactttgcgggcggaacggtgctgcactggcaggagggcgatggggttttgctggcgggggatattctgcaggtcacgccggggaaagacgccgtttcgtttatgtggagctatccgaatatgcttccgctacccgcccacaccgtagcgtccgtcacccatcgccttgaaggcagaaaatttgagcgtctgtatggcgcgttcgaggggcagaacatccaggctttcgcggatgatattgtgcagcggtcgggccaaaaatatattgcttgtctgaagtaa

SEQ ID NO: 157921 - DNA, 612 bp, Enterobacter cloacae
atggataatatcatctggctgatcgatgacgatgaatccatcagagagtcgatggcatttttactttcgggcatgggctgggaggtgaagacattcgggagtatcgacgcgtttacctcggcccatgttaaggactcaacgctcgtcggctgcctgctgctggatatgcgcatgccgggaaaaggggggctgacgtggctggaagagggcgaatggccgtggccgctgctgccggtgattatcatgaccgggcacggtagcgtcgacgcctgccgccgggcgttccgtaacggcgtctttgagtttttcaccaagccgctggatgcggacaagcttatcgagtccgtggggctggcgtgtgaggagagccagagacgttttgccgcctggcaggcgctctcacgcataaaagcgcgctttgaacaactcaccgcgcgggaacgtgaggtattggcggtgttgatggaagggctcagcaataaagaggtggcggcgcggcttaacctgtcgccgcgcacggtggaagcgcatcgtgcagccgcgtttgccaagctgggcgtcacgagcctggttcaggcaagccgcgagtacgataaattgcaatccgtataa

SEQ ID NO: 157922 - DNA, 1350 bp, Enterobacter cloacae
atgacggtgccagttaacgcgatgagtataaaaaagatgataaagcgcagcatcgccgtatgggtggcgatctgtctgataagcagtgtgttgctgtatgcggaacagatccgccgtcagttctgggagcgcgatcgcgagtattcggtgctcttttctgagattagcgccgtccttacgcagaacgagtctgtattgccgctactgagcggtaatgaagacatcacggcactgaataaaaaattcccccatcttcttgcgctggagaaaacaaccggacgcgcgctggacgccgcccgcgttgagcccgccagcgatcgacaatactggctctacaatccctggcggcaaatccgtgtacgggttgatcttgccccgctactcaatacgcatcatgcctttgagcgcctcgacgtctatttttcgaagcgaagcgaaccacgctcttcagatgccttctggcactgggcacgctccttcccacaggtaacgcaacccttcgtgctttcagctgatgctcagccggactggctcgggattcagtggtttatcttcctggccgtctttctcggatggggtatggtcattgcggtgggcagcgtggcgctgtggcagcgcaaggcaagacgagacgcagagcagcgcgccttgtattaccagcatgcccgactgaacacgctgggggagatcacggcgggtattgtccatgagatcaaccagccgctcacggccgtgcagacctggatccagggcgcgcagcgacagcaaaagctggacaatccacaggcggtatcccaggcactggcagcagcgctggtgcaaacacagcgtatcagcgctctgttaacccgttttcgtgaacatgtggtgcaggagaaagtgacgctgcgcgaaaccgacctggcgcaatgctggcagcaggttgtgaatttactggagcacgagagacgcgctgaacatattatcgtcacccatgcgtttacaccggaggcaacgacggttctggctgacagactctggcttgagcaggtactgcacaatctgctcagcaatgcgattcaggctcaacaggcgaacgcgcagggttgggtgcggattgaaagccggaaaggcgcaaatggcattcaggtcatcgtgacggatggcggccccggttttagccctgaggcgctacagaatgcctttatgccgttttacagcggcagagaagagggaattggcctggggatgaccttaacggagtcactgatgacgcgcatgaacggatcgattacgctggggaattcgccggagggaggggcgcgaatcgtcctgcaactggctaatggaaaggagacgacgcatggataa

SEQ ID NO: 157923 - DNA, 267 bp, Enterobacter cloacae
gtggccacattaaaaaaccttgctcgtagggcatgtaaaattatttattttctcattttattactcactgtaggtcatatactaccaggccctgagatatatattaactatgatttagtcagaacaacagccatgattatcaccggaaatgagaatgcagaatcaatgtatgacgcctactcatttattgactggattataatgctaattatcatcatccctttttatattataacaatgaatttaatcgaaaaaataaggaactaa

SEQ ID NO: 157924 - DNA, 513 bp, Enterobacter cloacae
atgaaaatatcgcacaagaaactggcctttctcgccttattgagctggagggctttttccgccgataacgtgaatcttgacgtgacgggaaatattgtggcctcgccctgcatatttaatggcggaaatacgcagctggatattaatctcggcaatattcaggcgacaaacatggtgacgccaggatcatcctccgacccagtgacgtttaatctgcagtttacgcaatgtcccgcggggacgcgcagcgtgacggtctccttcaccggaaaccccgatccggtagccggggcggactactacatgaacagcggctcggcaacgaacgtggcggtggccatgcgtgaggcggggaccggcacgctcaaaggaacgggctccagcatgacgcaaaatatcgccgccgaccgaacggccagcatgcccatgcaggcatcggtgatatcccaggccggtggcgcgacgccgggaagcatcagcgcggttgttgtgatgacgatgcaatacaactga

SEQ ID NO: 157925 - DNA, 951 bp, Enterobacter cloacae
atgaaattcattcaggctattttactgctctgtttactcaccggctggaataacagcgtgcgtgcagggacctgcacgacaataacaccgcaagtgtccacgctgtcggtgggcacgattaatgtccagcgcgatgcacctgtcgggacggtgatattttccggcgcggccacctatacgggatcctatcttaccgggtgcagtaatccattaatgctcggatttagcatgcgctataacaacgccacgttgagcagctatggcaaccatgtttacaacaccaatatcagcggagtgggtattcgtttttcttcgaataactactttgagaatccgaccaatacgttttcttataatgcgcagacctcctatgttgactggtacggcggtagagttgagctggtggtcaccggtcaggtatcgtcaggtgccttaacgccgggagtcataggcgtagtgacgcttcaggggagcgacggcgtctaccgcgacggcctgacgacccagctcaccagcgggacgattaacgcgcttgcatgcagtattaccacgcctcagctgacgttccccattggcgatatctccgcctcagcgtttggcacggcgatcggcaccacccccacgggcgcgcagaatacgcaaaatctggggttaacctgcacccccggaaccaatattagcgtttcgcttggtggaattcagaacccggacagcaccaataccagcgtaatggcgctaacgggacaggggatgaccggtacggcaaaaggcgtgggcgtgcaacttttatataacggaacgccgctggtgctgaatagccgcctgctattaaaacaatcttcgggtggactagagacgctgccgtttacggcgcgatattaccagacgttaacgtctgtcgaatccggcgcggccaatgcctctgccacgcttaatttgacctaccagtag

SEQ ID NO: 157926 - DNA, 2538 bp, Enterobacter cloacae
atgacaacatcaacgcatatgatacggcctgctcgtctggcgatatttatcgcctgcgcacttgccggttcatcaccggcactttatgccagtgaaacgtttaatacggaactggttgagctggataatcctggaatgggcaaagcagacctgtcggcgtttgaaacaggctctcaggcaccgggaacgtaccatgttgacatcattcttgacgaccagttaatggagacccgcgatatcgcctttgccgcagtgaaaagcgacgacggtaatgagatattgcagccttgcctgagcatcgaccagttaaaacagtggggagtgaaaaccgcgctatttcctcagcttgcttcgggaaaaagtgactgcgcggatcttcaggccattccgcaagctagtaccgattttcagtttggcgctcagcgccttttgatcagcattccacaggcggcgatcgatctgcccgcgcgaggctatgtgtcgccagagatgtgggatgaggggatcgcggcggccatgctcaattacagcctgagcggcgcgaacacccgggcgaaccacggtgaaggcaacagcagcgacagccagtatgccaacctgcgtccggggatcaatatcggtccgtggcgtctgcgcaattactccacgtggtcacgggacggttccggtcaggacaggtgggacaccgtctatacctatgcgcagcgtgccgtgatccccctgaaagcacagctgacgcttggagacagttctgcaccggctgacgtgtttgacagtatgccgtttcgcggcgctcagctggcatctgatgacgacatgctgccagattccctgaaggggtatgcccctgtcgtgcggggtatcgcgcgcaccaatgcgcaggttgtggtgcgtcagaatggttatcagatctaccaaagctacgtagcacccggtgcattcgagattacggatatgtatccgaccggaggggctggcgatctggacgtgacgatcaaagaagccgacggcagcgagcaacatttcatactgccgtacgcgtcgttgccggtactgcagcgcgaaggccgtctgaaatatgccctcaccggggggcaatatcgatcctataaccacagcgttgacaacacgcctttcgggcaacttaccggcatttatggccttaagcacgggattaccctctatggcggagtgcagggctcaagcaaatatcggtcgctggcgctgggggtggggaagaacatgggcgatttcggcgcgctctcagcagacgtcacgcagggctggtcaacgccggataacacagccaaaaccaacggtcagtccttgcgcgtgagatatagcaagaatttcgtgaataccgggacgaacttttccatcgcgggataccgctattcaacccgcggttattacgggatgcaggaggtgctggattcttacggagacagcagcgcgcttcaggaaaggcggcgtaaccgcgcagagctgacgatgagccagacgctgggcggcgaccttgggtctctaacccttagcgcggcgcgggaagattactggaacaccggtaagtcgatggcttcctggagtgtcggatacaacaacgactggcataacatcagctacggcgtgacctggacatacagcaaaaatgccagcgctgcggcatacggcagcgggaaaacctatgaccatgaccagcaactggcattcaacgtcagcgtgccgctggataaattcctgccgcagacgtgggccaactatgccatgagcgccagcaagaataatggcaccacccacaacatcggcatgaacggtgttgcgctggaaaacagcgcgcttagctggaacgtgcagcagggttacggcacgaacggcatgggttacaccggcaacatgaacggtgattacaaaggcacctacggcgaactgacggcgggctatggctacgacaaaaacagcgagcgtctgaattacggactgcaggggggcatactcgcccacgccgatggcgtcacgttttctcagccgctgggtgagacgaatgccctgataaaagcgcccggcgcgcggggtgtcgatatccgtaatcagtccggagtacgtacggattatcgcggttatacggtggtcagtaatttgtccgtgtaccgaaaaaacgatctcatcctcgatccggaaaatatgcctgacgatgttgaactggagatcaatacccgtacggtcaccccgacgcgcggggccgtggtgagagcagactacctttccagagtcggacgccgggtgctgatgaccctgacagacaacaaccatcccgtcccgtttggggccgtggtcaccctcgcgggtgaccgtaacaacagtttcattgtgggcgatcgcggccaggtgtatttaaccggcatgagcgagcaggggacgttagttgcgacctggggaaaccaggacagccaacagtgccgtgctgatttcagtctgccgaaacaatcaacctacagtggaataaccgacgtgggtgccacgtgtcgccaggagcattaa

SEQ ID NO: 157927 - DNA, 678 bp, Enterobacter cloacae
atgcgttttattagaacaacaggactggcggtggcgctgttaccgttggcattaatgacggccaatgccggggtgattattggtggtacgcgcgttattttcgagggtgcgaagaaagaagccacaatcaatattactaaccctgacaatactccttatttaatccagtcgtggatagatatgcaggatggggtgtcgggtaaaacgccgtttattattacgccgccgctgtatcgcctggacggtggacaaaaaaatcttgagcgtattgtaatgacgggctccctgcctcaggagcaggaaagtttattttggttgaatattaaagcgattccctcagcctcaaaacagatgaacgccctgcaaattgcggtaaagacgcggattaaattaatttatcggcctgatggcttgagggagtcaacgccggaagaacaagcgaataaattaacctggcaacgatccgggaatgcgattcaggtgaataatcccacgccctacgtaatcaatttcaatgagattaccctggacgggcgaaaacttgatgatgtgacctatgttttacccggcgcatcagcccggttttcattacctgaaggggtgagtgttcattctctcacatttaaagtcattaatgactatggtagtcctggcaccgcacatcaagccagtttctga

SEQ ID NO: 157928 - DNA, 627 bp, Enterobacter cloacae
atgtcttcagcacaacaacatcgcggctctccctacgcccaggaactgatctcttatttagagccgtactgcaccacgcgcagaacaggccgtggcgaacaattcgatcttcaggtcgacggcaaggggatctgttatttaattctggaggggacaattgccgtctaccgcagaagcgatgacatgatgctctccaccgcccgcagccctgctctgtttggtctcgcgaatctgacggacatttatttcaatgattacatcaaaaccgtgagcccatgcctgattggcattctccctaccgagaaggtcagtgaaattattaaagagaaagcattatggggcctggtttctaaccagctgatgtttgtctatagccgactgtataataacgtaatgccacaaggcgcaccgacggcgtatgagatgattcgccagcagcttgttaagctgatggaggaagatgaggcttatcggctcggcgtgacggcagaaaggtatatcagggaaaaaacgcagctttcgcgcagtggcgttatgcgcattctggccgatctaaaaacaggtgggtttattgaaatcgatgaaggcaggctgataaaaatcaataagcttcccgccaaatactga

SEQ ID NO: 157929 - DNA, 189 bp, Enterobacter cloacae
atgtcacgtacggataacagcgcggcaacgccaataaaaacacacacagcgccttcccccacctccaccgatcgccgtatcgacagcaaaaccctgctcggtgatgaggggcgggtcattatcgagcatgacggccagcactatcttctgcgccagacccatgccggaaaactgatcctgactaaataa

SEQ ID NO: 157930 - DNA, 780 bp, Enterobacter cloacae
atggctgaccgctattgtgctgaaaatattgtttttcaggcgggacgacgcacgataatcaacgacatttcgctgtcattgtcgcagggtgaactgatcgcgttaattggcccgaacggtgccgggaaatcgacgttattacggctgttaacgggttatctcaagcctgccagcgggcactgtcttctggcggggaaacccctcagcgcatggcgtccggacgcactttcccgccagcgggcggtgatgcgacaaaacacgcagctgggatttgactggccggtggaggccgttatcggcatgggccgcgccccgtggacgcgcacgcctgaagcggcagtgattcaggaaatcatgcggatcaccgaatgtttaccgcttgccggaaggcaatttgcggcgctttccggtggcgaacagcagcgtgtccagcttgcgcgcgcgctggcgcaactctggtgcgacggtgctccgcgcggctggctgttcctggatgaacccacctccgcgctggatctctaccatcagcagtatctgctgcggctgttgagatcgctgacccgtcaaaaggatctgcacgtctgcgtagtgctgcacgatctcaatctggcggcgctgtgggcagacaggatcctgctgttgcataacggcaggctggtcgccggaggcacaccggaggccgtcctgcaggccgatgcgctggcccactggtatggcgcacagctgcacgtgggtcaacatccggctcacgccgcgccgcaggtgtttctcgcccgctag

SEQ ID NO: 157931 - DNA, 756 bp, Enterobacter cloacae
atgacgttgctgatgcagctcacggacgtcgccgataagggacgtctggagccggtaaccggtgctatcaatgccggagaaatcctgcattttgttgggccaaatggggccggtaaaagcacgctgctggcacgcatggcgggcttgacctctggtccgggtgagatcgtgctgcaggggcacgcccttgccgactggtcaccggtatcgctggcacatcggcgtagctatttagttcagcagcaggtgccaccgtttgcgatgccggtctggcactatctgatgctgcatctgcatgataaaaacagccccacgctgctctcggatgtcgcgacggcgttagggttagacgataaactcacccgtcacgccagccagctctccggtggggagtggcagcgcgtgcgtctggccgcggttatcctgcagatccatccggcaggaaatcctcacggacgcttgctgcttctggacgagccgatgagcggtctggatgtcgcccagcaggcggcgctggataccctgctaagcgggttgtcccgtcaggggatagccgtcgtcatgagcagtcatgacctgaaccacacgctgcgtcatgcccacagggtctggctgctgtcgcgaggcaaaatgattgccagcggcgcgcgtgaccaggttcttacgcccccaaatcttgcccgcgcctacaatatgtcgttccgcaggctggacatagaagggcataagatgctgatttctaccgcgcaagagtaa

SEQ ID NO: 157932 - DNA, 204 bp, Enterobacter cloacae
atgatgaaaaaaatcaaaactgctgcagcagcaatggtgctttcagcactctcttttggcgtattcgctgctgatcgcacgggtattagcaccgcctctgatgttgaagcgggttcaaacatcgccccggcgtcacagtctaccggtcagtcaatgaatgatgcgtttgacgtgcatacgctggtagccggtgagtggtcctga

SEQ ID NO: 157933 - DNA, 966 bp, Enterobacter cloacae
atggaaaatttactggcgctgacgctggcagacgaaacgcccgaacagactgagggcgatggcccctcattccactggcgctggctgggacggggcgtacttgaactgacgccgtttgcgcagagcgacgtatcgcttctgctgtcgagcggtattcacggcaacgaaaccgcacccgttgagattgtcgatcggctgctgcgcgcgttgtaccgtggagagattacgctcgcgtgtcgcgtgctggtggtgtttggcaatccgccagcgctggcgcaaaacaaacgttacctggtgagtgatatcaaccggatgtttgggggccgctggtcgcagttcccccaaagcgatgaaacggcgcgcgcgcagtggctggagagcgtagtgacgacgttttttgtcaccgcgggggggacgcgctggcacctcgacctgcatacggctatccgtgcctcttatcatgtgcgttttggcgtcctgccgcagcgcagtcagccctgggatgaaacctttctgagctggctgggggatgcggggctggaagccctggtcttccatcagtcgccgggcggtacgtttacccattttacgtgtgaaaacttcggcgcgctggcctgcacgctggagttgggaaaagcgctgcctttcggggaaaatgatctgacgcgctttgctccgacgcactctgcgctccgggcgctgctcggcggcaccgccccggaacatgcgcaggagcccgtcgtgcgttatcgggtcgtgcagcagatcacccgtcgcagcgatgctttcctcctccatatggcggcccacacgctgaacttcacgccgttccgtcaaggggcactcctggcagaagacggtgacgagcgatacgaggtgcagaaagccacagagtatgttttattccccaatccgtcggtggcgtttggtctgcgagccggactgatgctggaaaaattagcctga

SEQ ID NO: 157934 - DNA, 684 bp, Enterobacter cloacae
gtgaacattcaaaaaacacttttcctgtgcgcccttctgggcgcctttgcgctggcgttcttactcctgccaccgggtacgctatccctcgacgtgataaaaactcaccagcaggcgttgctcacgcaggtcgaacatgcccccctgcgaagtgcgctcacctattttgttatctatgtcgtggtaagcgccctgtcgatccctggcgcagccatcctgacgctgttgggtggtgcacttttcagcttgtgggaaggcgtactgctggtgtcgtttgcatccacgctcggtgccacgctggcgatgctcgccagccgttatctgcttcgcgacggggtgcaacggcgttttacgctacagatgaaaacggtcaatgccgggatggcacgtgacggcgcgggatacctttttgcccttcgcctgatgccgctgtttccgtttttcctggtgaatttgctgatggggctgacccgcatcacggtgcgtcgctactggtgggtaagtcaggtcgccatgctgcctgcaacggttgtctttctcaacgccgggcgcgagcttggaagagtgacatcgctgcgcgatattttgtcgccgggcctgctgttcgcctttacactattggggttattcccgctggccacccgctggctcttttcccgttacacctcttcgttcaaaaagtga

SEQ ID NO: 157935 - DNA, 1170 bp, Enterobacter cloacae
atgcgccgtgtgcgtttttgcgcgtttctgacaagcctgctgctggcgacgccagccttttctgcagacagctggcaatcccttcaacaacaggcaaaaggccagaccgtctggtttaatgcctggggtggcgatccggcggtaaaccgctacctggactgggttagcggcgaaatgaaaacgcactacgccattgacctcaggattgttcgtctggcggatgccgccgatgcggtaaaacgcatccagagggaacatgccgcagggcgaaaccacaacggctcggtcgatttactctgggttaacggagaaaatttccgcaccctaaaagaggcgggtttgctgcaaaccgaatgggcacagcagctgccgaactggcgatacgttgatacgcgtaaaccggttacggaggattttgccatcccaaccgagggagcagaatcgccgtggggcggcgcgcagctgacctttatcgcccgtaaagcaagcatgcctgcgccgccagatacccctcaggcattgctggcctgggcgcagcagcatccgggcaacgtcacttatcctcgcccgcctgactttaccggcacggcgttcctggaacagctgcttctgacgctcaccacgcagcctgacgcgctaaaaaaagcaccggatgataacttccagcaggttaccgcgccgctgtggcgctacctcgacacgctgcatccactgctgtggcgtaaagggcaagattttcctccctcgcccgcgcgcatggatgctctgctcgccagcggcaacctggctctgtcgatgacctttaacccggcgcatgcccggcaaaaggtcgccagcggtgaactgcctgccgacagctacagcttcgggtttaagaacggcacaatcggtaacgtccattttgtcgccattccggcgaatgccagcgccagtgcgggggcaaaagtggtggcaaacttcctgctttcaccgcaggcgcagatccgcaaagccgacccggccgtgtggggtgacccgagcgtgctggacgcgggaacgctatccgccgatgaggcgaagcggcttcgcagccacacgccagaagcgttaccggcagtgcttcctgaaccgcacgccgcctgggttaacgcgctggagcaggaatggcttcgccgttacggcacccgctaa

SEQ ID NO: 157936 - DNA, 1536 bp, Enterobacter cloacae
atggcttcgccgttacggcacccgctaagcgcggcgatctggctggtaatggcggtgatttatctcccgctgcttcctgccgtcgctatgctgtttactccggcgctgtcgctcgatagctggaaggcgctggctaacgatccccagctgccgcaggcgtttgccgccacgctggtctcgacgctgttggcaacgctgggttcgctggtgattgccctggggttcatcacgctactgtggcccggcgaacgctggcgtcgcttgtgcgcgcagttaccctggatgctggcggtgccccacgtcgctttcgcgaccagcgcgctactcctgtttgccgagggagggctgttttatcaggtctgcactttctgctcaccgcagctcgatcgttatggcatcgggctggggctgacgctcgcggtcaaagagagcgcgtttgtcctgtgggcactctatgccgcgctgcctgaagcgcagctggcgcagaagagtgtggttttgcgtaccctgggttacggacgccttcagcgcctgtgctggctggtcctgccgaccattgcccccgcgctgggtgccgtgatgctggccgtgctggcctggtcgctgtctgtggtggatgttgccattattctggggccaggtaatccccccacgctggcggtgctggcctggcagtggctcagccagggcgatgcgcagcagcaggcgcagggaacgctcgtttgccttctcttactcctgactctgactctgctggccggcgtgggattcggcatctggaaagcctggcgacgcaccttgccgaacctctccggcgtcaggcgccgcgcgtccctgccggtcccggaaaagccgctcgcctggtggctaccgggatgtgggatcctctgcgccatcgtgctgctcggtttagcgcgtcccgaagaggccgcgctgtccccgttaaccaccagccttacgctggggatgctctctggcgtgctggcgcttgggctgagttttctctggctcgaatgggggcccagaagaggcgcgctgtgggtctggctgccgctcgcgttgcccgctctacctcttgtctccggtcaatatgccgttgcgctcacgctgggcatcgacgggcagttcgctgccgtgctctgggggcacctgctgtgggtactgccctggatgctgctggtgctgcaacctgcctggcaaaagctggatccccgactgttcctctccgccagaacgcttggctggggacggatgaaaatattctggatgctaaaatgcccgctgctggtacgcccggcgttactggcttttgctaccgggttttcggtgagcatggcgcaatacatgcccacactgtggctgggtgccggacgttttgccacgctgaccactgaaaccgtggcgctcagcagcgggggaagtcttccgatcctggcgacccgcgcgctgggattactgctggtgacgggcatcgtttttggcatcgccgccctcttatccagactggcaggccgctaccgtcgaggattacgttaa

SEQ ID NO: 157937 - DNA, 621 bp, Enterobacter cloacae
atgttaaaggtgcaaaatctcaccattgaaccgcttttccggcaggtcaatttttgtgtaccgcgcggggagatagtgaccctgatggggccgtccggtagcgggaaatcgacacttttctcctggatggtgggggcgttatcttctgattttaaggcgcagggagaactgtggcttgatgaacgccgctgtgacaccttgcccgtggaaacgcgtggtttagggatcctctttcaggacgccctgctgtttgaccacttcagcgtcgggcaaaacctgatgctcgccctgccttcccgcattaaaggcgaggcgcgtcgggaacgcgttgagcaggctctacgttcggccgggctggcaaattactctgccagcgaccctgctacgctttccggcggagaacgcgcccgggtcagcctgctgcgcgccctgcttgcggagccgcaggcattattgctggatgaacctttcagccgcctcgataaagcgttacgaacgacgtttcgaacctgggtgtttgacgtcatccgggaacgtaatattccggtggtactggtcactcatgatgaggaagacattccgcccggtggcgaggtgatcgagatttctcgctggcaataa

SEQ ID NO: 157938 - DNA, 570 bp, Enterobacter cloacae
gtgaaaaagaccaccacctgggttgcccccatcgaatcccttcccgccagccttaagccgattgccgccatgcagaaaaaacattttggcgcggtgcttaatcccactcgctggtggggacggatgccgcgtctgttctggctggtggcgctgtttgtcggttatctggagcgccgcaaggcacctctttctccggtgctgcgttcactgctgatgacacgcgtgtcgcagctgtgtcactgcgcattttgtattgatgccaacagcctgcggcttgccgagcgggcgggcgcgctggataaagttcaggcggtgagccactggcgtgaaagcgatgtattcagcgacgaggagtgcgctgcgctggcgtacgccgaagccgtcagcgccacgccgcctcaggtggatgacgtggtcaaagcgcagttgaagtaccactttacagacgacgcgattaccgaaatgacggcgttgattgcgtttcaaaacctctcggcacgttttaatgccgcgctcgacattcctgctcaggggctgtgcgcgacctttaaagagaaaccccatgcttga

SEQ ID NO: 157939 - DNA, 345 bp, Enterobacter cloacae
atgattcagtgcaagcgcctgtacgatcgggccagtcaggacgacggttatcgggttctggtggacaggttgtggccacgcggggtgaaaaaaacagacctcgcgtatgatgaatggtgtaaaacgctcgcgccttcaactgaattgcgcagagcatttcatagcgaaacgattgatttcactgccttcagtaaggcgtatcgggaagaactggcgcagcataaggacgaaggccagcgtctggcagctctggcaaacaggcagaccttaaccctgctctacggcgctaaagacgaggcgcaaaatcatgccctggttttggctgactggctgagccatctgtaa

SEQ ID NO: 157940 - DNA, 306 bp, Enterobacter cloacae
atgtttcagttaaagccgggcagcctggcgataatcattggcgcgcgtacgccagctggccgccgcaacgttggaaaatcagtggagctgtttggtctttgccagccaggtcagcgttttgttaatccagtaaacggcgtgatgacgcagctgcctgcaacggcggaccgtgcgctgtggctggtgacgggagatgtctatgcgtttgataatcagcatggctttgcgtttgtccgcccggaacatctgctgccgctgacgccggacgaaacatcgcagacctgtgatgaactgacgatcggttga

SEQ ID NO: 157941 - DNA, 252 bp, Enterobacter cloacae
atgattatgaacaacgaaatcccacttaaattttatgacatcgtcgatgaatactcgacggaatcggctgaaactgtgagcgactctgagcgtgacggcctggcacattatttccagctgttgcttacccgtttggcaaataacgaggagatcagcgaagaagcccagcaagagatggccagcacagcagggatccgcacgatgcgtatagatgatgttgcgaacttccttaaccagtggggcaacgagtaa

SEQ ID NO: 157942 - DNA, 825 bp, Enterobacter cloacae
gtgccgttacgcaacaatagctgcacgcgtgacgagattctgacgcgttattttcctcagtatcgccttatcgcgccgcaggcccactccgggcttggcggcgcgagctgcatcattgagcagggcgaacatcggctggtgctgcgacagcatcacgatctctctgcccctgcctcccactttcgccgacagtttcgtacgctgaggcgcttgcctgcggatctcgtgccgaagccctgtttttttacgcagggctggatggcggtagagtatcttgcgggggagatcaaaagcacgcttccgcatactcccacgctcgccgtgatgctgtatcatcttcaccgccagcctcgcctgggatggcgggtcacgctgttaccgctgctggaaaaatactggcagcaggcctcgcccgacagacgaacgccattctggcttgcgcagcttaaacggatgcgaaagcgaggggaaccgcaacccttacggctttcgccgttgcatatggacgtccacgccgggaatattgtacacacgcccgcgggagccaggctcatcgactgggagtatgccggagatggcgacgtggcgctggagctggcggcggtctggatgccggatgatggctcccgtgagcagcttatactggcctatgcccgtgaagcgcaaatggatgcgttgacgcttatgcgtcaggtcaggcgctggcgaccctgggtattcatgctgatggcgggctggtttgaaatgcgctatcagcaatcaaacgacaaacactttattacgctggcagatgacgtctggcgtcagttacaaactaaaggataa

SEQ ID NO: 157943 - DNA, 2190 bp, Enterobacter cloacae
atgatgtctttcattaatcataccagggatgggcaacgtcagcctgttgcaacgccttcgttgctggcagcctgcattgctatggcactgatgccaaccgtaagtttcgccgcaccaaacgaggaaacactcgtcgttgacggtacttcccagccagacgcgtccagcgaagagcaggattacagcgtcaaaaccaccaccatcggcaccaaaatgcagatggtccagcgcgatatcccccagtcagtctccattgtcagtgaacaacgtatggaagatcagcagttgcaaacgctgggagatgtgatggataacacgatggggatcagcaaaaacaccgcagactccgatcgcagcagctattactcacgtggtttcgagatcgacaactacatgattgatggtatccccacctatttcgaatctcgctggaacctcggggatgccctctcggataccgccctgtttgagcgcgtggaagtggtgcgtggggcgaccggcttgatgacgggcacgggtaacccgtcggcagcgatcaacatggtgcgtaaacatgccaccagccgcgagttcaaaggcaatctgtctgcggaatacggcagctggaacaaacagcgttacgtcatggatctgcaaagcccgttaacggatgacgggaatgtacgcggtcggatcgtggcaggctaccaggataatgactcctggctcgataactacaatcagaagaaaaccttcttctccggcattcttgatgcagacctgggcgataccacctcattttcggctggttacgaatatcagcgcattgacgtgaacaaccagacctggggcggcttaccgcgctggaacacggacggtagcgtaaggcattacgatcgcgcccacagcaccgcgccagactgggcctataacgacaaagaattcaacaaagttttcgccaccttcaagcaacgctttgccgacacctggcaggccacgctgaatgccacccataccgaggccaaattcgacagtaaagccctgtaccttgacgcttatgtggacaaatcaaccggcatgctggttgggccttattcgaattatggaccggactacggctacatcggcgggacgggctggaacagcggtaagcgtaaggtagacgcagtcgatctgtttgccgatggtggctatgacctgtttggccgccagcataccgtgatgttcggcggcagcttcagtcgtcaaacgaaccgttacaccaacgcgtgggcgaacgtatatccggacgaattcggtaatttctacgactatgacggtcatttcccggaaacaaactggggatcgcaggcgctggcccaggacgacaaaacgaatatgaaatcgctctacgccgcgacgcgcatttcgttggccgatcctctgcatttgattctcggtgcccgctatacgaactggagcgtcgacaccatgacttatggtatggaaaaaaaccataccacgccgtatgcgggtcttgtctatgacattgatgataactggtctgcctatgccagctatacctccatcttccagccacagaactaccgtgacagcaccggcaggtatctcgacccaatcaccggcaacaattatgaagtgggcctgaagtcggactggatgaacagccgactgaccacaacgctctctgtcttccgcatcgagcaggataacgtggcgcagagtacggggcgcgtgattcaggggtcaaccgataccgcttatgaaggcgtagacggcacagtaagtaaaggcgttgaatttgaaattaacggcgcgctgacggacaactggcaaatgacctttggcgcgacgcgctacctggctgaagacagcgacggtaaagacgttaacccttatctaccgcgcacgacggttaaactgttcaccagttaccgtctgccagcgatgcctgcactgaccgtgggtggcggtgttaactggcaaaaccgcgtttacagcgacgttgccacaccttacggaacatggcgtgcggaacaaggcagctatgcgctggttgatctcttcacccgctatcaggtcacgaagaatttctctctgcaggggaatctgaacaatctgttcgacaagacttacgataccaacgttcagggctcactggtttatggtgaaccccgaaacgtcagcgtaacggcaagctaccagttctga

SEQ ID NO: 157944 - DNA, 810 bp, Enterobacter cloacae
atgtttttgatcaatggccttgagcaggagaatctgcctgccagcgacagagcaacgcagtttggtgatggctgctttacgacggcgcgaattattgacgggcaagtatgcctgcccgacgcgcatatccgccgtctgcaaacggcctgcgaaaccttaatgatcccctttcagcactgggacacgctgcgacgtgagatgagccagctggtgtcagagaagagcagtggcgtgctgaaagttatcatcagtcgtggcagcggagggagggggtatagcggggccagctgtgagaacccaacgcgcatactctccgtatccgcttatcccgcacattatgaaagctggcgcaaagacggcgtcacgctgacgctgagcccgatacgactgggccgcaaccccatgctggccggaattaaacacctcaatcgccttgaacaggtgctgattcgtactcatcttgaacagacggacgctgatgaggcgctggttcttgacagcgaagggttcattacggaatgctgtgcggctaatttactctggcggaagggccgtgatgtcttcacaccttcactggagcaggctggggtgaagggcattatgcgtcagttttgtttgcaacagttggcacactcgggttttcgcgttgtcgaagttagcgaaagggaagaggcgctactgaccgctgatgaagttattgtttgtaacgcgttgatgcctgttttacccgtccgcgcctatggccaacaggtctggtcatcgcgcgaactgtttcagtttttagccccgttatgtgagcaaaccagatag

SEQ ID NO: 157945 - DNA, 936 bp, Enterobacter cloacae
atgaagcgagttgagcgtatagacagggtggaactgatgcgaacttttgttcgcatcgtggaaaccggctcgctctcggcagcggcaaggcagctttcgacgactcaggccacggtaagccgacgtttgcagtctctggaaacgttgctgggggctcgcctgctgctgcgaaccacccatgccaccaggcttactgacgacggtgaacgctgctatcagcatgcccggcgggtaattgatagctggctggcgctggaagatgaagtcgggcaggcggaggatgaaccggttggggtattgcgggtgcgggcaccgcacgcctttggtcaggaacagctcctgaaaccgttgacggaatttttgcagcgttatcctcagctttccgttgagtggatgttgaacgataagtcggtggatttcctcagcgacaatattgattgtgcgatccgcgtgggtgccgaggtcgatcccgccacggtttccgtacagctggcagaggtgccgcgctccatcgtcgcctctccggcgttgctggcacgcttcccaaaggttagcaagccagaggatctgcaggcgctgccctggattgccatcagcaccttctaccagcggcacgttgagctgtttgatggtgcagcgcagccgacacgcattgccattacgccgcgtctgagcacggacagcctgtacgtggcgcgaaatacggccctgaccgggctgggggtggcgctggtatcaagctggacggtgaaagaggatattcaggaagggcgcttaatccctcttctgcccgagtggcaacccacggcactgcccgtccatctggtttatccgtggtcgcgatactatcctgcgcgcttgcgacgttttctggagatgatgaagcaggtgatgccgggtatagccggaatgagaaagccagcaaatgcgcaataa

SEQ ID NO: 157946 - DNA, 321 bp, Enterobacter cloacae
gtgaccaaatctaccgctctgctcatctcaggttttagcctgatcgtctcggcttatatgacacccgcattttcagcaacgattgttgaaggcggtgttatccatttccgtggtgccattgttgccgatccctgtgagattacccctcaacatcgtcagcttgcgatgtcctgcccggaaaataaccgtatccagacccggatggtcagctatgaggatgcactgaatgggcgctcagcctatccaggactggcaaccgtgagtatgcagtacctcaatcctgaaaaaacgctagccgttgttaaggtggaatatcgctag

SEQ ID NO: 157947 - DNA, 333 bp, Enterobacter cloacae
atgaatacgttaattctccttgccgcgctttccagccaaataacctttaaaacatcgcagcagggaaatatgaccaccattattccgcaggtcaccctgacacacgcgtgcgattgtcaggttcaaattttgtccgttcgccagggggagggaggacaaagtacctcacgccagcaaaataccttttctatacccgctaatcagacgattgatttgatgagactgagtttaaatattggcacaggggatacggtgaacattacggtcaccgtctctgacggaaaatcgctgcatttatcacaacaatggtcgcctgcagaacgctcgctttaa

SEQ ID NO: 157948 - DNA, 501 bp, Enterobacter cloacae
atgaagaaacgttattttgtgtatagccaggtccagggtgacaacatgaaaaacagaacgttatttatgatgtttacattactgggtgtgcctggatttgtaaccgcaggcggttcggacttagccggttctgaatataactttgcggttaatgaattaagtaagtcctcctataatcaggcagccattattggtcaacaaggttcaggtaattctactgatattcgtcaggacggttccaaattaatgtccgttgtctctcaggagggtggaggcaaccgagcgaaggttgatcaatcaggaacttataaccttgcttatatcgatcaagatggaaatggtaatgatgcgagtattaagcaggacgcttttggtaataccgcaatgattatccaaaaagggtcggctaacagagcgagtattacgcagtatggtacgcagaaaacagcagttgtagtgcagagacagtcacaaatggccatccgcgttattcaacgttag

SEQ ID NO: 157949 - DNA, 1611 bp, Enterobacter cloacae
atgattacaaaagaacttgtagatgaaagtctcaatattcaccgactggttgattgtggtgattttgacctggcataccagcaatccgttgtattcctggaaaaactggagaaaataacggtcaagggcgaaaattattttatagtgctggggaatgtggctggcggtcttgttgatattgggcaaatgagcaaccataaaaatgcagcagagcttggttttaagctgatggacgataacaaggaagcattagcgcatgtacaaggagagagccatttttattataattatgctaattctttgtctaatttgataactgtcaataaccctcacaatcatacctttcaatcaatagaagaactcgtttcgttaaaaaacatctattggcgagccttcaatttctcttcacaggagagcgaagaattccaggcagaactgtcagttaatctggccaattcactaagaagccaatttaggatgagtgaagcactgagatattatgatctcactaatcgcaagggattagatataccacagtcttgggttaatcgttctgctgcgctcattgagctaaaccttgtttcatcttcatactcgattaagcaattaaaggagatacgaaaagggtatattaatgcatctgtttccaaaaaaatccctccacaatgggaatcattttatcttgggcgtatagcacaaacgaacgaagaaatagaaaaatgtgtatcagcagacggcgaaacggacgagcaggatgacatgctcacgcaacaggagtttgacgcattgagtgcatacaggcaattctgcctaataaatcatctgacgctgtccgagcacggtctttattgcccctgtgtggggagtgccaccgataatcttgtcatctcttcttctggtgtaaccggtgattttattattccaatggagatggcattaaaccgctttaaatcggagttttcacttgcccgccatctttattttgaatacctttatcctcaggatacggatgaaattaaagaagaatgccattttttagagttacataatgacgagatcttaggcattgatattgagaagatcagaacggcatttcgtctctgctttggtattctcgataagattgcggtatgtatctgtgaacttcacaaagtttatccacctgcaaagaagggcgggttacagaaaaatatctattttcaaagcttctggcagttagacgttgataacagaagacaacggtttgaagatataaagtcacctggacttttagcattgtacagcattgctactgacttgaataaaaataaaggtggcgaattggctttttataaagagtggcgcaatggtctagaacataaatttttggtagtacacaaaagtgataaagcagaagatctttaccaatcttataaattgattaaagatatattttttatcaaagaggatgagtttattcaccatttcggtcagttgattcagattacacgttcagcaatattttcatttgcttttatggttagacatgaaggtaagaaacaaaaaaaagagaatattccttatattaccaatgaactgcatatgaaaaagtattcgtcagaacctaagtaa

SEQ ID NO: 157950 - DNA, 4071 bp, Enterobacter cloacae
atgctaaacaggaaagtcaggcaaatctatcctcaacaggataaagatacccaaacggtggtatttagtgattattctcactttccgaacattgttctgcttggtgatcctggtgctggaaaaacgcacctcttcaaacagtttgcggcattacaagaggcaaaatatctgacagtacgtcatttcttaagtggcgtaccgattgataatcagaaaacgttattcatcgatgcattagatgagaagaggagtgccagtaacagtagtgatgttgtagatgagatcgtccgtaggcttttttcccaaacgccacaaaatgtcagaatttcttgtcgctctcaggattggttaggcgaatcagacttgtcagcatttttaccctattttgagcagacgggaggctatgttgttttacatttgcagtcgctctcaaaagaagagcagactgtgattctacaagctaatggtgtagaacaccctgaagcgtttctggctgaagcagaaaaacatgccgccagcgaatttctttacaacccacaaaatctgctaatgctggctgaagcagttaaagaaggaaattggccccgtacaaggtctgaacttttccactctgcaacacagttccttttaactgaacatagccaagagcatacgcggctaacttcaggaatttatagctgcgacgaattagagtatcctgctggatcaatttgcgcgttgtgcatattgagtgatgtttccggggtttctctgcttccgaacgatattcgaccagaataccccagttacagaaccatctcgttcttctcacatgaaataattagagcggcgttatcgaggcgggttttttctgccggagatgagcttgagactgttgggtacagccacaggacaattgctgagtatttagcggcaaaatggttagccgggatcgttgacaaagggctacccatgggacgtctgagaagtatgctgggatttgagggatatccgtcttcagaattgagaggtttacacgcatggctagcggtctttttaccgcaatatgcccaagtcttcattgaagctgatccttacggcgttctgacctatggcgatgcagcttcattaccgacagtggaaaaacaaaatttactagtggcgttgtcaaaactttcagaacgtgatccttggtttagaaatcacggtctcaattcatatctgaatggcttcgtgacagtagaaatggaaactctgttgcgacagatagtccgcgatcctcattcgtcattttctctgcgcatgatcgttttggaatccttatcggtaacaacaccgatagtcgcactgggtgatgacttaattaatattgcaaaatcgaaggattcctcgtatgcggaaaaagaggaagcaataacggcattaatccattttggagtgactggtcagaaattttcggtaagtttttttgcggaattaaaagacaaaaatcacgatagcatccggttgcgtaaccatattattcagttgctctatcaagattactttgtaccgcaggatatagcacaattgctggttgatacattaaatataaccaacgaacgattaccgataggatcattatggcgactgaatgatattgtaccgacagctgatctgctcgctatctttgagcatctcgatcggtaccacaccgctcacagtaatgactggtattcttcagctaaaaattactctgagattgtgcattttctggaagctggattattgcagatactaagcgagaagagtggttacagcgcatctcagatatggttgtgcctaaaagtgttctatagctactcccataatcaccactatcgcagttatgacaatgtgcagaaatctatcgttcaggagataaaaaatcgtagctggcaatatgaagatattatagacgccgccattatctcatttacacgctatgatactcgatacttgttcttacatgaattttctgaaagcaccttccatcttgtccctgataagcttttgctggctcgttttatccactatttatcccatacccaaagtgattcagaaaaaatcgaatgtatttatcgactggcatttgcaactctttatcgttgtgacacgcccccccaagatacgtttgattttctttctgcatattgccattcaaatgagcagttacttactgtgtttggcacttccatcatctgcgaaattgatgattggcgaataaagcagaaccttagccgaatagaaaataagaaaaaacaggaagaggttcgttgtgaagatagactcaattttgagttatgtcgtcaagaaattgtgtcgggccaacatttggagtggctcaaacatatttcctatatttactattcaaaatacagcgatgttgatgacaaattgacgccaatgcagcgctgtgcagagatattaggtgccgaaaacgtcactgatgcgatatccggtcttttagcgattttaaatcgttcagatctgcccacaattgacgaggtgaattgtgctttgttgaagagggagtattacaaatggtggtatgcggtactggcaggaagcgatgagttatttaaaaaacatcctgatgttacacaatggaacgaagatttgttaacaacactattggcgctggatgtgatattagcactttccaccaaagacaataatgttgtaagtaattattcattaccgtggaaaagggatgtgatacttaacaaaacagcatttttcatcaaaacctattaccacattatcaatttctgtattaataatcagttgcaagatatccgtgcacttaactatctgttaaatgatacctacattccaatcgactatgtcgttcctttagttatgagactagctaaagagcaccctgatgatgttcttcatttacaaaaactgatggggtggttgttagggcatcctgagagtcatgcagagttgttgcagttatctgagttgatgatagcgcaaccctcaaaacttaaaaagccaacttatcaaatttggctggtatgtgcttatttattcgctccagacaagtgtcaggatctatttttatctgaatcaaaatccacggctgaaatgatagcgcttattcgtcaactatctggtaaggcgaaaagaggccgtgggagtaatgagcagcgtttatcactaacacaattggaagcgatcatcactgtctctgctactcattttcctaatgcagatcgagttgcaagtaacgactctaactcagaaaacaattgggagtatgctgattttatcaaaagattgattgatgacgtttcttctctttcctcatacgatgccggtgaagtatttgaacgtttattattactgccagaatgtacaagttatcgggattatctcttgcacgcccaaagcaaccagaaggtgcggtatcgggaatcacagtttcaacacactaactggaagcaagcgttgaatacgctgaaaaatgagaccccagctaatgtaatggatctctatgcgttattgttagatcatttgcgggatatcgctaaccgaattatttatgaaaataccgatatttataaacagttctggaatgagaatggcaatggtcaaattttagtgcctaagcctgaagagagctgtcggaatttttttctggagctgcttagagcacgactccatccgttacaaataacctgtgagccagaaggccatatggtttcgggtaaaagggctgatatcatcatttcacttccaggaataaagatccccattgagataaagcgtgattatcaccgggacgtctggagcgcgcttaacgagcaactggaccaactttatactaccaatcccgatgccgcaggctacggcatctatctggtcttctggtttggcgcttctcgaccaaacgctatccctcgcccggcgaaagacacgccacccccagtaaacgccacgacaatggaggacattcttaatgaagctgtgccaatggttaagcgagagcgcctgtctgcgatagtaattgacgtatcaggtgaggctaattcgactattgaaacgcaaaaatcatctaagtaa

SEQ ID NO: 157951 - DNA, 903 bp, Enterobacter cloacae
atgaaacatgagaaaagccttaaaactgcaaggcaccattggtggccacaaacaatttctaaatactgggaaaactcaagaggcttcattaatagagtgaacgcaaagggagaaagtaccgaagtaaaaccaaaatccttagctgtaataaaaaatgggcatataattaaactcagcgataatccagaaaaaagatcggattttgatcaaaatttcgaatatttctttgatgaagcagacagtaattcaaacgcaataataaagttattatcagaaattcggattaagcactttcaatgtgagaatgaaagctctaccaaatctaatatctgttcaccaaaagaacatgaattacttatagaaataattgtttccctggcagtaagaagcccaatgtatagggatggatgcatagccattgctgaaaaacttaggggagagatacgggcgctagagaaggatagattgatcgctatcaatatgagagatgctcttaaaaatgttacaaaccatataaaaaacgaagcatcaatttatcttcttctaagtaaagaaaaagagtttatctttggtgatggattttatcatgacattccaatagttactataccaagtagatcaccaacattagtatgtccacttacacctcatatatgtgtcattattgatgcaaaagaaagaaaaaaagatgattcgttaatatcagtagcaataaatgaggaagaagtaactatctgtaacgacaccgttcagatatattcaaaaaatgaaatattctatagagaggataagccaatattatctgagcactttaaagataatataagaaaacaatattacccttatgacaacccactattaaagttacttgaaaaaatcaaggcgcaaaatcattcaagttag

SEQ ID NO: 157952 - DNA, 171 bp, Enterobacter cloacae
atgacagatgtaattaacggcaagaataggaaacggcgcgccagtctcaaagtggttttacccatctttactcagcacgttagcgctgatgctggttatttcttctgcgaaaatcatttcccacaggatgaacagcggattacgaattttattcagatcaacctcttatag

SEQ ID NO: 157953 - DNA, 888 bp, Enterobacter cloacae
atgccaccatcagattatttcttcgaaaaactggaaacgaaagccgggttaaattacatattacgcgcacaggaaaaagtgcctgaaggtggaatgtacatcaagccacatatgcatctcgaacatgaaataatgtggttttacaaagccagaggcagctatagtattggccgtgaaaaattcgctctccagaataatacgcttgtctacgtcagcccactcacgctgcatgatatggaactggattttacggcagaccatgaacgttttatcttacaatatgatcatactgcgctcagcaatctgaaatatccagtacccgccctggaatcacatacgggtgtcgtttcctgcctggaggaaaaggatgcagaaagattacaatttattttcaaatggttctcagaagtcaatgagacggcctattctgaaaaagaaattaagccgttaatgattttgttactcagcaccgttctgcagcatgccgaaaacgcaaccaaaatcgccacagagacggatcatcaatccatctttgcggttattatctcttttgtgatcaacctggaaacgcaaacctcatttacgatgagtttgaacgaagccgctgaatcggtcggactctcacccagtcatttttccagaacgtttaaaaaaattatgcaggtgagttttaaggaatatcttctgcgaaagaaaatcgccctgtcaatacagctgttgcgtaatacagaacttagcatcaccgacattgcttacaaatgtgagtttacagatgctgcgtactattgcttccagttcagaagggttatcggcgttacacctaaaaaattcaggaacagcaatctgacatcagaacagttaaaaaccggtcataacgtgcagctttaa

SEQ ID NO: 157954 - DNA, 1314 bp, Enterobacter cloacae
atgagaaaaataggattcaaagaaaagattggttatgggttaggtgatggtgcgtccaatattatctggcaaacgataatgcttttcatggcctacttttatacagatatctacgggctaagcgcttttcatatggggaccatgttcctggtcgtcagagcgtttgatgccattgccgacgtgtacattggctatctggccgaccatactcagacccggtacggtcagttcagaccttatctcctctggttctcgctgcccttcggtatttttggtgccttgacgttttatacacccgattttggcgagacggccaaaattgtctatgcgtatgtgtcttatactgccctctcgcttttttattccctcgttaacgttccctactgcgcgctgattaataacatttccagtgatgcaaaagaacgggtttcaatgcagtcttatcgttttgccttcgctgctttaggagggattattgtttccgtcgtggcgctaccgttaaccaaaattttgggtgaaggcgatctacagaaaggctattttctggcgatggtgattatgggggcgatcagcactatcatgttttactgttgctttgccatgaccagggaacattacacgaaagcggtggataaaaaacgtaacttttgtggtatctatgatgatctgactgtcgtggtgaaagatcataactggcgctgtattttcagcctcaatattgcaagccttatcgctggcatcctgaaaacgggcggagccatttacttcgttagctactatctgaaaagacccgatttagtgggacttgtgcttattattattctctgcacccgatttctgggcgcattgtcgacaacgctattatataaaaattatgaccgagtattgtcatataaagtttcgttaattatacaagccattatcttaattattcttttcgccattcctgcagaatacatcctgccggtttgcctggtgatctgtctgattcatttcatcgacgccagttctgcccccctgcaatggagcctgctcagtgacatcattgataacgttgaaaaacagtcaaacatttcactgagtggcttagttttctcaaccaatcttttcgctataaaaattggcattgcggttggcggtgccatcattggctggctgctcaccgtgggcggctatgtgggcagtgctgcgatccaaaccgatctcgccattctgattgtgcggcttatctttacgcttattcccgctgcttttgtcttcatgatgtacctcatcatgaggcaataccggacccataatgcgttacaggcctga

SEQ ID NO: 157955 - DNA, 1602 bp, Enterobacter cloacae
atgaccataataactaaccccattatcccaggctttaatccggacccctccattataagagtgggtgaggcgtattacttagcaacatcgacatttgaatggtttccaggtatttgtttgtataaatcatacgatctcaaaaactggcggctgatttctcatcccttgaagcggaaaagtcagttgaacatgcgcgggaatccgaattccggcggaatctatgcgccatgcctcagctacgatgccggaaaattttatctcatttataccgatgtcaaaaacgtgagcggtcgtttctgggacccgaataactttatcgtgaccacggacgatatcgaaggtgaatggtctgagccaacgtatctcaatagcagagggattgatccctcgctgttccaccacagtgacggtacgaaatggcttgtgagcatggagatgagctacagagacggcggggaggcaggattccccaagtggaatggcattatcatccaacaatacgatgagcagaagagtcgcttaaccggcgagtgccgtaaaattttcgccggtaccgcgttgggcatcaccgaagggccacacatttatgagttgaacggctggttctatttgttagtggccgaaggcgggacgttttataaccatggcgtcacgctggcgcgctcccggcatctgtttggcccctacgaaaccgatcccatcgggcaaatgatgacatctcgctttgattgccgtttacctttacagcgcgtcggccatgcggatctttttgataacggtctgggcgaatggtttattgtgcatttatgcgggcgaccgttgccctcaaaaggacgcagcccgatgggtcgtgaaaccgctattcagcaggtttactggacggaggatggctggctgcgcttaacaaataacagcattacgccagaattaacggtgcagacgcgcctgaaagaacgtccgtggccaacgccgccagcccgggatgagttcgatacgccggagctgccccttcactaccaatcgctacgcatccccttaagcgaggaaatgtgcacgcttacggaaaggcgcggatggttacggttgcggggttatgaatccctgagttcacagcactatcaaagcctgctggcaagacgacaaaccgattttatatataccgctcagacatgcgtagattttaagcctcactctttccagcagatggccgggctggtctgcttttatgacaccaccaactacgtttatctgaacatatcctgtaacgacgcgggagaacggacggtcaatttgatggttaatgacctgaaccgattctccttaccgacaggagaaggggtaaaaattgcggcagaaggtctggtttacctcagagtctgcgtcaaagatgatggtgctcttttttactattcactcgatgaaaaaaaatggatcccgattgggggttatgttgaatacagcaaactgtccgatgaatattttaaggaacgtggcatagagcgcttcaccggtgcctttgtcgggatgtgctgtcaggatttcacgggggaacatatcccggccgattttgactactttgcctatttcccggaagatttttag

SEQ ID NO: 157956 - DNA, 2265 bp, Enterobacter cloacae
atggggatccacattgtcagtgcttgcgccattctggccattatcccactctattggttacctgttttaccggaaccagagagcgtctggatgatgattgccgcagggatcgcgttagccgcgcagcaaagacgatggctaacgttctcaggcatcgggttgctctttttttgctggggcgtattagcggcgcaggagagcgtttggcccttgaatcatctcacgacagggccgcagcaggcggaggtggtcattacagcaaccgacggcgcaacaatgcatcagggaaacattgtcagcctcaacggaaaacgctggtggggcgttactggggtgacgctgtatggcaattacctgccccaaaaggtgtgtgccggtcaacgctgggccatggtgctgcgtcttagagcggtacatggtgaattaaacgacggtggctacgattcgcagaaaaatgcttttgcccgacatcaaacgctgagcgggcgttttacgcatgctgaggctgttgacgcacgctgtagtctgcgttcacggtatctgggctcactgcaaaacgcactcacagcataccagtgggggccggtgatccttgggctggggatgggggagcgcctgaatgtaccgcgtgagataaaaaatctcatgcgcgagacagggacaatacacctgatggctatttcgggtctgcacatcgcactggctgcgtccatcgtctggttactggcaagagggttgcaatatttcctgccgagccacgctatctattggcagtttcccatgcttgcaggtctgtgctttgcggctttttatgcatggttaacggggatgcagccgcccgcaatgcgcacggtggtctctctcatggtggtggctgcgctgcggattagcggccgtcaatggtctccctggcagatctggttaacctgcgtggcggcaattctgatttttgaccctgtggctgttctgtcgcaaagctttgcgctgtcggcgtttgcggttgcggcattaattttttggtaccagtggctaccgcttccgaacgggctctggatccgccgactaaaacctctggcaaatctcatacatctgcaaacagggatgctgtgcctgctgcttccactgcaggtgctgatatttcatggtttcagcctgtcttcattcctcgcaaatctgtttgctgttccgctggtcacgtttatttccgtgcccctgatccttctcggtatgctgctccatctttttccgctggcgttactggagaacgctgtctggtatgcggccgataagtctctggcagggttattcgggttgctggctcgcttgccgaacggctggcaggatgtcgatgaacgttggcaatacctgacgctgctaccctggcttgccattatcggctggcgttttcgaagctggaaagttctaccggctgtttgtctgacagcaagtattatgctcgcacttcctttgtggcgaacggataaaactgacagctggacgctgcacatgctggatgtcgggcaggggctggcaatggtaattgaacgtcaggggaggtctattttatacgataccgggctggcctggccggggggcgatagcgggcagcagttgatcattccatggttacgctggcatcatctgaagccagaaggggtgatcctgagtcatgagcatctcgaccacgcgggaggactggcatcgctgcaaaaagcctggcccgaaatgtgggtgaggagtccgctgcaccaggatggacatcttccttgttttcgagggcagcgatggcagtggcaggggctaacgttcagcgttcactggccgcctgaagaagggcacgccaaaggtaacaaccgctcctgcgtggttaagatcgacgacggtgagcagagcatcctgctgaccggggatattgaagcacaggccgaaatggcaatgctgagccaccgctggcgccatcttgcgtctacactcattcaggtacctcaccacggcagcaacacctcgtcttctatgccgttggtgcagcgtgccgaaggggaaatagcgctggcctctgcagcccgctataacgcgtggcattttccatccgcgaaagtggtgcggcgctacgggaaagagggatatacctggttagacacccctcattctggacaaatatcggtgacattttcgcaacataacaggcagatccgacgcctgcgtgaacacaatttaccgcgttggtatcatcagtggtttggcgcgcccgtagataacgggtag

SEQ ID NO: 157957 - DNA, 1311 bp, Enterobacter cloacae
atgaaggaaggaacactattctcatttattacagctttcattgccggacgacggcaaacaaagctggaagcatttgataaagaggccgcaaagcgcagcgatacagatagcgcgacgcttgcggcagaacgccgggatatagaacttcgctatgagccgaaagcatggctgacggatgccgcgaagcgagccggacaaattaacctcgtgacccatgcggcgaagttcacccacggggattcaaaaagtagcagtatttacagcgaggcagtggccagagaagggtatctcggcagtacagcgttgtcaggtctggaaccggacgccgtgggcaatgcagctgcactggatgtggctaagctcatgcaaacgcgtactgcagatggcgattcccttctggcgagcctgaaacggggtgaccacgctgcgctgtcggcatttaccgacgatgagaatcaggtaagggagtgggttgcaggattctcgagagccttcgctcccggaaaacctgcatcgcataagcttgcgaagcaaggctattttcctgttggcgatagttaccatcttttaagtccgctgtttgccacttcgctcgttcacgcggcacaccaaaaaatggttgccctgaggtttggggaagagatgaaaaacatctggaaagcgcggcgcgagaaatcctggcaccccggtacgctaacgcttttcccagattcagcggaaacgcactttggtggcaccaaaccgcagaacatttcctatctcaacagcgtgcgcggtgggcgtgtctggctgctttcctgtcagccgccgcagtggaaaaaagcggaaaagccgccgacgacgttacgttctattttcacttcaggtggtcagtttgatcgacgtgcaaacagcactgttcaactgcttgtgtctttattgaccagaaccggtgattacaccaacgtccgtattcgcgaagcacgtgatgaatacattgatgcgcttattgacctgctgtttgttgtggcgtcggaactacagcgtgatacgtggcaaaactggacaatctcgtgccctcgattagccagtcatcaacaactctggctcgatccctggcgcacaaaaaacgatgaagtctttcgtctggaacgggataaagacgactggcaggctggagtcgcagaggattttgccttgtggctgaatacaaggttgcgaaaagggttgaaggatattggaaaggtggaagagcgtgagtggcaaacccgtgaacatttacgcaccaacctccgcgaaatggaaaaaattatccagggggcgctgaaatga

SEQ ID NO: 157958 - DNA, 957 bp, Enterobacter cloacae
atgtcttccatagtcgatacaccttattctaatctgccgcagcctacgtccggctgggcgctttttaaaagtctggcaaccggtgccatcacgcccggtctggcgtggcagaacccctcatatcgacgcaaatttatgttacgttccctggtttcccctttcagcaccgctcgcctgctggcaagcctggcaaagcaaccgcgtctgatgcaaatcttgcaggtccagccagggttgccgtgccggctgcatcgtccgtggctgacggtcagtatgaaccgccggaacgcgctgaaggcgctaaacgggcactatcagacgatgagccaacacctccccgccacgctgctcaagggctatctttcaagtcagggaatgacgctgctgacgctaaccggaaaggacgagcagcaattcacgattcgcctgtgtgccgatgcctttatggacaaagagggtgaagcgacccttaccttctgcaaccatcagaacaccgtgctggccgaaatgacctttacgctgtgcccgtttgagggaaaatccacgctgttcatcggcgggctacagggcgctaaagcgcacgttccgcatgagttgattcagggcgcaaccaaagcgtgccacggcctgttcccgaaacgtctgctggttgaagcggtgatgacgctgggcaccgcgttcccggttgaacagatcctcgccgtgagcaacgccacccacatttaccgtagctggcgttaccgcaagaaaaaagaggggaaactgctggcggattacgacagtttctggcgctccctgggtggcgaacgccgggagagcggtcatttcgcgctgccgttaaccatgccgcgcaaaccgatggaagagattgcgagtaagaaacgtgctgaataccgccgccgctacgaactgctggatagcctgatccaacaaatgacgcaggcgacccaacgttaa

SEQ ID NO: 157959 - DNA, 1287 bp, Enterobacter cloacae
atgatctcacccgctatcgcacaagccgtttcaccgtaccgccagctgctggtggggtttagcggtgggctggattccaccgttttgctcaatcgccttaaattctggcgtgaccaggagcctgacgtccagctccgggcgatacatatccaccacgggttaagtcctcatgctgatgcatgggtggcgcactgtgaagcactctgtgaggcgtggagcattccgttgatggttgaacgcgtgattctccacgaggaagggctgggcattgaggcgcaggcgcgcaaggcccgctatgccgcttttgctcgcgccttacggcccggtgaagcactcgttacggcgcagcatcttgacgatcagtgcgaaacgtttttacttgcgcttaagcggggcagtggtccggcggggttatccgccatgcctgagcgcgcgcgttttgccggaaccgaattaatccgcccgctgctgggtgaaacacgtgcttctcttgaatcctgggcgcatgaatatcagctgagctggattgaggacgaaagcaatcaggacgacagctacgatcgtaacttcctgcgtctgcgcgtcttaccgctactgaccgaacgctgggagcactttgctgaagcgacggccaggagcgccacgctctgtgccgagcaggaaagcctgctggatgagttgctgagtgaagagctggccgagctgatttcctctgagggtgcgctggcaattgcgccgctggaagcgatgagtgcggtacgccgtgctgcagttttacgccgctggttggcctctcatcatgccgtcatgccgtcgcgagcaatgctcggcagaatatgggatgaagtggcgaaggcgcgagaagatgccacgccgagcgtttacctgaacggcttcgaggtcaggcgctatcaggggaaactgtggtgggttaaatcccgttcttctctttctgatgttgttctcgactggccctgcgtggtggaagcgctgatattacccgctggcgcgggtagtgtatccctgacgaatgccggtcacgtgcgtctgccagaagcggatgagcccgttacggtgcgttttaaagccggtggtttgctgcatatcgtcgggcgtaatggcggacgaaagctgaagaagatctggcaggagaacaatgtgccgccctggctgcgcgataccacgccgctgctgttttatggtgagacgcttatcgccgctgcgggcgtgtttatcacggaagaagggtggacagaaaagggcgtttcgtttgagtggaatgcgtaa

SEQ ID NO: 157960 - DNA, 1008 bp, Enterobacter cloacae
atgagccaacgtatgacgatacactccctttgcgcaggggttgcgctgctgctcgccaccgtttttctgcatccggcgtatgctaactgcacctttacaggcgaggggggaaaggacggggtggttacgttccaaatcccacccgcgattgttctcgatcccgatacgccggtggggacggtgatttatgataacaacgcggaaagcggcgaagtcagagtagattgcggcggcgctgacgcccagattcgacgagggtatttgacgctaacggagggggatgctcgcgaagatgtgttgccgggagtgtataaaacgaacgtgccggggattgggatccgcgcggcctcttcttccgagcaatttccggattatactgaagaaaacctgactcgcccgtggcatagcgttggatcgattcacggctattctcattacacatccgtttttcgtgccgccgcgcagctcatcgtcattggcgatattcaggagggggatctggatacctcgcggttaaccgctcaggatacgttagggggagtcgtgattggtgaaatgcgtttttcgcccaccagcgttcatatcaccaccaacacctgtaatctggtcgaccgtaacatctatgtgcccctaaaaacggttaatgtgcaggattttaacggacaatactcagacattctcaccgacggcagttttaagattgaaatcaccgactgcgcggcggggacaaaggttgattatcagttcaccagcgcgggttcgacgggggtgacgaacggtaatatcctcggcattgccgcaggagattccgccgctgcgggtgtcggcatccaaattctcgacaagaacgatacggtgctgcagtttgaccagaactacacggcgataaccagtacgcaggacaaagtccccgttgaaatcccccttaaggcgcgctacgtcaaaacgggggaggttaaagcgggcaaagtcgattccgtcgccacgttcgaagtgttttaccgttaa

SEQ ID NO: 157961 - DNA, 576 bp, Enterobacter cloacae
atgggaaataatatgaagaaacaacgttgcggttattcattaatcgcattagcaatgttagcgatgacaggatctgctgcagcaaccgatctgaatgttaatttcacggccaatattcgcgaaaccacctgtgatatgaagctggttggcggtgaaggttcagatacccagcaaacgctgactatcggtactaacggtcaggtgcgtttagatgatgtcaaagccggtacggcaaatgccactttcaaaatcgtgatggttgaatgcccggcgtcgctggcctcattgaaaacaaccgtaatgggaaaacaatcgggttatttgccatcagggattattaaccaggcagcaccaggcgctgcagattacgcttcagtcgaaatcgccagagcgagtacacctgaagccccatttgtcgttaactctaaagaggatgcagagcgcctggtctggagcccaacagaactccagaataaggaagttgctctgatggccaccttacgtgaaacccaaccaaacaaaatgacaattggcgattttcaagccgtggcgacttttgaattcagctacgaatga

SEQ ID NO: 157962 - DNA, 441 bp, Enterobacter cloacae
atgcttggttgggttataacctgtcatgataatgaagctcagaatctgatggaacatctggaaaaaaggtatagtccgctggtgcaatgccgcgcggttaactacgagtgtgggctaagcaccaatatgctcagccgcatgatgtgcgatgcgctgcatgaaaccgacacgggcgatggcgtgatctttctgaccgataaatccggggcggcgccttatcgttccgccgccctgttaagccacaagcacgataactgcgaagtcatctccggtatcagcttacctttactcgaagccatgtacccgctacgcgcttcgttaagcagtgctgagtttcgacatgccatcgtggcacagggcgttccaggcgtcagcagcttgtggcatcagcagcaaaaaaatcctcccttcgtcctgctccacgacctgtataagaattaa

SEQ ID NO: 157963 - DNA, 1320 bp, Enterobacter cloacae
atgtcttgggctaataatgaacgaaaacttgttgcattagataaaaatactctggagcctgtagtcgttgattggtgttatgaagacgcccctggagttaaatttactggcagtatatttgctgatacaaaaccgacgaaaagactgttagtaaattcggaactctatgtacgaggtagtctggtaaatataagtaatgtcggcggcgcaggatcttcattcgcagccattcaggataacggcaaggtggtagcatgggggctaccaggagaggctgactccacaccaactaatgaacgtaaccatgatgttagggttgtctatggctcagaagatacgtctgttggtattaataatctcaatcaaatttttgtatggggaaaaacgtctgacgaccccataccgaatgatgtggccgcgcttaatgatgtcagcgtcgtaaaatgtctcacttcagggagtgatggcaaacgcgcattcattgctttgcgcgaaaataagcaaatagtacaatggagtgatcctggttatcagtggcctatgcccacgcacattgcagaaatgactgattttgttgcgatagaagcaactaatggagcatttgccgcgattaaagaaaatggccacatcgttgcatggggagatccattaaagggaggtgagttacccgagcatttaaatgatatttctgatgcaaagagaatatttggtaacagtgctgtttttatcgttttgcataaaagcggaaaaatatctgcatggggtaatagtgagaaaggtggaacgctaccagagaatatcgccaacctggatgatataatcaatgtctatccatattatagtggttttgcagcacaaagagtcaataatatgcttgtcgaatggggaaggaataaagatattgttccaccagagatagccactcggactgatattattgatgttcagatgggagaaaatcatactggtgccgttctgcttccagaaggaaaagtatactcctggggcgaattttccaatccttactttgtgcaacaaccagacgatctcaccggagtgatccatatttgcgcttcggcagactgcatggctgcattaaagaacgacggtagcattgtggcatggggtcatcctgatcaaggaggggataccacgcctgtagccagtgaactatatgatatccgcgctatttacggatcaacttttggtttctgcgccctacgtaatgatggaaaggtgatcgtctggggcgaatacggtggcgaaatgagcaacgtaccgccagagcttcagaacaatatcacttacgcctgggagtga

SEQ ID NO: 157964 - DNA, 792 bp, Enterobacter cloacae
atgaaaagtaaacttctttgtggaatggcgttattcatgctttcggccaccgcgatggcacagcaatcgttcagcacgccaggccaggcaaccgacgcgctggtgagcgccatcagtaagcatgatgaacgtgcaatgagcgacctgcttggggagaactggcgcgacttcctgccgcctgaaggggtcgacccggatgccgttgatcgtttcctgagagactggaaagttcgccatgataccgccatcgagggcgatgtggcgcatctggttgttggagagagcgactggcagttgccgatcccggtgatgaaaaccgctaccggctggcaatttgacattaaagcaggcgccgaagcgatcctcacgcgcgagattgggcgtaacgaactcggtgccatcgaggcgctgcatgcctatgtcgatgctcagcagagctattttgcgttgaaccagaagtatgcgcagaaaattgtcagttctgaggggaaaaaggacggtctgtactggcccgtctcgccaggcgaagcgccaagcccgctgggtccggcgttcagtccgaaagagccaggagcaggctatcacggctatcgttttcgcattttgccggataataacggtttcgccatgatcgcctggccagtcacttacggtcagacgggggtgatgagcttcaccatcaatcaggacgacaaggtgtaccagagcgatctcggcagtgattccgcgaagaaagcaaatgccctgaccgcataccctctggataaaacctggcaacccgtcgccccgtaa

SEQ ID NO: 157965 - DNA, 1185 bp, Enterobacter cloacae
atggctgttaatcaactctggcgatggcgggcgcttactgcggagggtgaaatccgcacgggcacgctttgggctatcagtcgagaagccgcttgcagcagcttagaacaacggcatcttcatccgctggcgctcaatcggtcattgcagcgtcctcgatggcagcgtcatcactgctacgatatctttcgccagctcgcgacgctgctgcaggctggcctgacgttgtcccacagcctgcaaatgctggcggaacagcatccgttaaagcattggcaggctctgcttcacagccttgctgacgatctcagtggaggctgttccttttctgcgtcaatgaataaatggccggaagtgtttagcccgctttatgtctccatggtaaagacaggcgagctaacggggaagctggaggagtgctgtcgccagctcgcacagcaacaaaaagcccaggagcagctcggtgcaaaagtcaaaaaggcgctgcgctatcccacgatcattctgacccttgcagcgctggtggtgctggcgatggtgacgctggtgctgcccgagttcgccgcgatctataaaacgtttaatactcccctgccctggctcacgcaggctgtcatggggttagccgccgctattcaggggcacattgtcacgctttttgccctgcttcttattttggttgttgccgcctgtaagctacgacggcatccgcgctggcagcgcatgctgctgcatctgcccgtaatgggcgtactggcgcgtgggcaaaaattggggcagatatttaccgtactgtcattaacccagcaagccgggatcgcctttttgcaggggctggaaagtgtggaagagacggttgaaagcgggtactggcaaaccaaaatgcgggaggtacgcggacatatcgagcaaggaatgcccgtgtggtcagcctttcagcaggcatctgtctttacaccgctgtgcatacagctgattcgaaccggtgaaatcgcgggtgcgcttgatgtgatgctggcgaaccttgcccgccaccatacggaacagacatttcaacaagcagacaatctggctgcgcttctggagccactgttgttgattgtgacagggttgattatcggcacgctggtggtcgcaatgtatctgccgatattccatctgggggatgccatgagtgcgggatag

SEQ ID NO: 157966 - DNA, 789 bp, Enterobacter cloacae
atggcgacacgtaccgcacaagccgttgactcacttctctggcgagcccctctctccacagggagcgctacgcttgcggatgctattcgggacaggattgccgatacccgcgcccatctgctggattttatcaagctggatgagcctcacccgcataacaccatgacgcttgccgaatggcagcgtccggcagaacgccagtcattgctggcggcgtattccgaccatatctatcgcaatcaaccgacccttgcgcgggaaaataaacccctgctctctctttgggcgcaatggtacatcgggttgatggtcccgccgatcatggtggccttgttaacacaggacacgatgctggatctctccccggaacatttccacgttgagttccacgaaaccgggcgtgcggcctgcttttggattgacgttcacgaagatatgcatgccgggcaacgctcagctcaggagcgcatggaacagctcatcactcaggcattgatgccggtaattgacgtgcttgagcagacgggagaaattaatggaaagcttatctggagtaataccggttatctgatccactggtatttgacagagatgaaaccgctgctgggcgatgagaaagtggatgccctgcgccagtcctgtttctttgcaaaacagctttctgatgggcgggataaccctttattccgtaccgtcgtcccgcgtgacggccttctggtgcgccggacctgctgtcagcgcaatcgcctgcctgacgttcagcagtgcggggattgcacgctgaagtag

SEQ ID NO: 157967 - DNA, 687 bp, Enterobacter cloacae
atggaagagaccgcagcaacaagacatatcgccgtcatcgaaaattgcgtaatgagtgctgttgggctgcagcatatttttgctttgccggcattcagcagctatcaggtccacctgtttagtcgattcgccagttttaaagaggcactttcccagaccgcgttttattcggttatttactcattatccgatgcgcgtgaggagcgtcgtaactgtcttgcgagtctgcgtgatctgatgttctcacacggcaatatccagcgtattgtcctggcgtccgatgatgtagaagcgaggctgatttgccatctttctccggcacgcctgcacgggataatcagtaaatcggtgtcgcttgagcagttgatcgaaggcatggtgacctttcttaacgaaacgcatcgtgtaaacgacaacatgtacaatcactggtatgtgaatcagaaccgcatgttgagccccaccgaacgggcaattttgcgttatatgtcgtcgggctattccatccctgaaatcgcgacacagcttgagcgcaatattaagactatcagggcgcacaagttcaatgcgatggtaaagctcggggtcaattctgatgtgggattactggatgcagcagatatcctcgctcatcttcccgcccgggagccgcgtcgctcggcgttgagtgttccttcattctcttag

SEQ ID NO: 157968 - DNA, 735 bp, Enterobacter cloacae
atgttgccattgaaaggtaaacacggagttgtgattagtaagataccggttatgcaatccgggcttggtggggtgatggtacgccatttccccgagtatgaactgaccttttgccgctcgattcaggagctaacactgctgcaactccgccgcgccagtgtggttgttgcggatatttctggtgattatcgaaatcctcgcggtacgctcgagcaatattacgggctgctgaatcagtatcgggatatccattggatctttttagtttcccgccccctttaccctctggcggtagaattactcatgcgtcctgaaagcaccttgctgtcagatatggaaccgatcgacggggtcattaatgctattcgtgccggaagtgaacgcgcagaacgcattagccagacgttgttaatgccagacactccagagcctgaagacgagtccgagagctttatcgcgctaactcactctgagcgcaaagtattgcgactgctggggaaaggctggtgtattaatcaaatcgcgacgttattgaagaagagtaacaaaacgatcagtgcacagaagaacagtgcgatgcgcaggttgtccctgcgaagcaatgccgatatgtatgcctggatcagcagtacacaggggatgcgggaactgagtttaatatcggcctatggagagtttgaggaatggaagagaccgcagcaacaagacatatcgccgtcatcgaaaattgcgtaa

SEQ ID NO: 157969 - DNA, 552 bp, Enterobacter cloacae
atgactctctcacgcagcacccacgtcgactttcacgtcatcgttctgagcgataactatttcctgtggcttggtctgaaaacgctcatttcgatgatgatgacgccgcgtcctgatattttctggctcaacagcgtcagcccggaaactatcttgcgcatgcgcgagcaaatcatgaaagagaccaccgataacggctggcttatatttacggacgaatgccgcgtgaacgacatcaacgtctatctgcctgccgggcgcgtcagggtgctggctggaaacatctcgattatccagctcagccagcatttgagaaacgccgatttcacccagcgctaccgtcctgatgctaacctcacccgctctgaactgcgggtgtgtaccctgctcagtaaagggatcagcctggttcgcattgcgcaactgctgaataaatcccccaaaaccatctatacccacaagcgtaacgcgatgaccaaattccgctgccagaacctggcggagtttcaccgaaaaatctgcctgctggaacagcaatcgttctacctctga

SEQ ID NO: 157970 - DNA, 744 bp, Enterobacter cloacae
atgaaatacctgctcgctgataccctcgtctataacgatgaagacggttccgtttcacttgttgctacgccagatgtcgaaccccaggtgatgacggcaaccgccaacagcattatgaaaatgctggtgctccatcacggtaacgtcgtcgaacgcgaggcgttcctgcatgacgtgtgggatgagcgcggcctgcagggctccaacaattcacttaatcagtacatcagtatcctgcggaaactgctggcaagcctcgtgcccgagatgttgtttattgtcaccgtgcccaaagtgggctttatgctgagcgcggacatcacggtccattcccaggctgaaaaatctgattgcccagcctcagccagaaggccgcatcattttcagcctcaactgctgttctgtagcgggctgacgcttgtggtgctggcgctgtgcatctggatagtcgcgatcaagcaaaaccagcagcatgcagaaatgcatcttctgacacatttcggtgaatgtccggtctacaccttctcgccgctggcagatgtgtttcgcaacaaggcaatagcgctggcacaagcgatacagcgcgacggcaacctgccgtgcctgaaaaactccctcttttatctgcacattcagaacacgctcttctacggccatgaaggaaggatggtgctttcgcaatgctccctgtcgaatgagaacaccgccagcgcctgccgcacgctttatgcctacgaatggtga

SEQ ID NO: 157971 - DNA, 474 bp, Enterobacter cloacae
atgacacgtaaaaaaacagggctggttatcgccttcaacctgctgttaatcatcatggccgtggcatggtaccgacatacaccgcccctgcccgtcatttgcgaaggtaacctgaccttcacgcagcagcgtgacgacaacaacttcacgttcgacggtgagatcctgatgcgatttcaccccgacggcacgggttacttcacgctcaacgggaatgtgcagaatatccggcagggctgggaagtctcccgtcaggaaacgtttaactggcggcacatgcacgacacgctttttgaaatcgccattatcaaggtcgagcgatttagccacgatgaattacccgatggggtatttgagaaatacgttgctggcttaacgccgggacagaaaaggctactgaccatcgaacgcacgccggaagaggcgatggtgatcggcaatttctactcgccgctgctgatctgctcggaataa

SEQ ID NO: 157972 - DNA, 510 bp, Enterobacter cloacae
atgaaaatcaccttccgccccaccactacgcatgacgttgccagtctgcccgccattgagcgcgcggcaggccagcgttttcgagcctggcctgaactggcctggctcgctgatggcgacgtcatttccgttgaacagcatcgcgactatgtcgaacagggcctgagctggctggcgctggcagcggatcgtcctgtgggttttctcctcgcagaagcccatcctttgtcgttgtttatcgtggagctttcggttgatctggactggcagggaaaaggtataggtcggcagctcatcgcctgtgcggctgagcatgcccgtaaaaaggggttaacgtcgctgacgttaacgacgttccgggacgtgccgtggaatgcgccattctatacgcggttggggtttgaacgcgtaacggcactcacgcctgaactgcgtcaaaaaagggaagaagaggccgcgcacggtttagcgtatgaaacgcgctgcgccatgcgcctgcctctgagttaa

SEQ ID NO: 157973 - DNA, 1311 bp, Enterobacter cloacae
atgaaaaatattacggtgacaatgcaaggttcaaaagcaattccagctggctataaacagacggagttaggtgtaattccggatgattgggaggtaatgcttgtaggtgaggcttttgcaatttgcaataacttaagaatgccgatcagctcaactattcgtgacgggatgaatggcgattacccgtattatggcccaacaaaaatacaaggttacattaatgaatatcgagtaatgggagagtatgctttaattggagaggatggcgatcactttctaaagtatgaatcggttccgcagactcaacttgccattggaaaatttaacgttaacaatcacgctcacttgattaaagagaaaataggttctgcccaatggttttattggttctataggaatcgggatatatctatctatttaactagacaaggagctggacggtttaaactaaacaaggcctcacttcagaggattccatgtattattcctccgattgcagaacaagcagctatcgccagtgttctgtccgactctgaaaaactgattgatgctgtagagcagttgatcgccaaaaaacaggccataaaaactgccaccatgcaacaattactgtctggtagcactcgcatgccacaatttgctcaatatcccaatggtacccctaagaactataagtccagcgagttaggcgtaattcctgaggattgggaagtcgttcgtctggcacaggtagcaagagttattgatcctcatcctagccatagagccccaccagaggagtcttatggtgttcctttcgttggcattggtgatttgaatgaatcaggtgaactaatcaattctgaagttagaagagttaatcaaagtattcttcaagaacattcagaaagatataacttaaataatcagcctataggtcttggtagagttgcttccattggtaaagtcatccgtttgcgtataggaaaggaaccctatgctatttcaccaacattaggtgtaatagatggtttcgcctgtaagaatgattttttattttattatttgaaatcagagtcagtaacagagcagttcagtcgggtaatgagtggttccactagatcctctgtgggtatgaacgttctaaaagagatattagtcgtaaaaatatcaagtcaagaacaaatatccatcgctacaatcctctcagatatggatgctgaaatcgggaggttgaaacagaagctttctaagatccgagatataaagcaaggaatgatgcaacagctactgaccggccgtatccgtttaccgttggaacagcagccatga

SEQ ID NO: 157974 - DNA, 1317 bp, Enterobacter cloacae
atgtatacactagtaaatgcaaaaataaccggagtctggggatggaacaatattgagactaacttctatgaagatgtaagcattttcattggggcaaacggcacagggaaaacgacattcataaatattcttgttgcaattttaagagtagatgtggctgcactagaggaattatggttcgatagtgccacattgattttcgaaggttatttcgacggtaaaaagaagagaagaacattaactattacaagacaatcagagaataaacacagtgacgaatctgtttcttataaaatcagtagagttgtatatgatcttccatttttaaatggaagaaatgttcgttcaattcacgttcaaaggcgaatactacctgtagtggaactaattaaaggtaaactacaagaaattatatctttttcaagtttatctgttagtcgtgcaggcattagcgatattgatgatctagagtatttagattcaagaaaggatctaaatcaagtgaactccatcgatagtattcttacagaattattaaacaagctaaaagtttatcagctaaagaaagctcaagaatcaaaagaaattgctagagagtttcaagaagaggttttaatttcagtgctttacgatgcggatattgactcatcaattggtttgaatgaactagctcaaactgattttcaagaagaaatgaaaaatttcaccaactcttataatcagcttggcatccaaagtactctaagaaaaggtaaagctaaagaactaatcagtaaacatttcaatgcaattcaggaaagcgtaacatatttacaggaagcgattgcagaaaataaaggagtttttgacgttgacaaaattttcgcctttccactcctaaaaagaacaaaaaaaatattacaggcaggtaagtctgctgaaaggagaagaaaaagactttttagaccacttgacatatataaaaaagaacttcagaaatactttaatggaaaaacaataactttattatctgatggtggtttatatttcaaagacacaaatagaaatagcagtgaatatgatttcaaaaaactttcatctggtgaaaagcagatcctaatattattaaccgaatcacttcttcaggatggtgaatctaaattattcattgctgacgaacctgagctttctttacatatcgattggcaaagtaaaatattaccatctataagaatgttaaacagaagcgctcaaattattgtagcaacgcactccccagaagtcgcaggtgaatacccagaaaatattcttgatatggaagatatctgctatgagtaa

SEQ ID NO: 157975 - DNA, 852 bp, Enterobacter cloacae
atgagtaaaggaattcctcgcggttcaaaagccttagcggtgctgaataagttcaaaagagttaacgctatcctgtatgtcgaaggaccaactgatcgcgttttttggaaaactcttttagactccaaaggagtgaatggtatatctattgaaattgcgggaagctgtacaattattgatgattacattgataaaatattgaaggaaaatcttgaaattttcgtagctagagataaggattataaatatacattgaataaaatacctcaacatgaaagggtactttttacctttggtcatagcgttgagaacaccttagtttacaatgatgccatcgtaagtataggaaaatcaattggtggcgaagaagaatactgttcattatcagtccagcattggcatgaatacattataaatcaactacaaccattagttattcgtgagtttgcgaatgaggctattggctccggcctgaatatattaggtgatcatggagatagtttatttggcaaaacatggaatagtgataaattcccagccgaaagaatattaaaaaaaatagaagaaatagacaaaataattccaccgcatgatatacaagtagctgcaagtgttgtagaggagagatgcaatgatatttattgctatattaggggccattttcttttcagtttagcactaaaattcgttaaagaaatgatgatcacactgctaaataaaaagtcagttaatgtatctaatgactccttgatgacaatgctttcaatggcatttagaggtgctatcgattcaggaatgcatcctcatagagaacattatatgactgaactagataaattaataataaattga

SEQ ID NO: 157976 - DNA, 174 bp, Enterobacter cloacae
atgagctgttcaattaatcagcaatggtcatatcttatttctgaattacgttattttgcttttgtgacgccgacgatatatctcaacttattgtttatattattaaataacaaaaacaacaaagccgcccgcgggatatttcccgcagacggttttatctctgaaaataattaa

SEQ ID NO: 157977 - DNA, 207 bp, Enterobacter cloacae
atgctcatcgtgacagtatgttgtgaagagccaggctattcaaccactcccaccataaatgatagggtgtcttttctgtttttaatatccaaatcaaaaagaatgggatttttcttaaataatacgtttgtgccgattttaaccaaagaaataaaaaagccccgacatgcggggctttatcgacaggcagtaagaattacttcttag

SEQ ID NO: 157978 - DNA, 723 bp, Enterobacter cloacae
atgattgaactcgaaacgcgacgccttggtgaccgcgaaatattacatgctttccccaccggaaaaagtgagcagccgctgccagttgtggttttttatcatggatttacctcgtcaaaactggtttatagctattttgctgtggcgctggcgcaggctggattccgcgttgttatgccggatgctccggatcatggcgcgcgattttcgggcaacgagcaggcgcggctcggccagttctggcaaatcttgcacggtagcctgacggaattcgcagggctgcgcgatgcgctttttgaggccgggctggtggagaacgatcgcctggcggttgctggggcttcaatgggggggatgacggcgctggggatcatgactcatcattcggaggtgaagtccgtcgcttgtctgatggggtcgggctacttcacttcgctctcgaagacgctgtttccctcgcagaacccagaagatatcgacgcggcgctggcggagtgggacgtcacccatgcgctaccgcacctggccaatcgcccgctgctgctgtggcacggcgatgcggatgatgtggttccgcctgacggaactttccgtttacagcagtcgttaaagaatgaagggctggacggcaatttaacctgcctttgggaggcgggcgttcgtcaccgtattacgccgacggcgctggatgccacggtgagctttttccgccagcacctttaa

SEQ ID NO: 157979 - DNA, 741 bp, Enterobacter cloacae
atgaaacacgtttatggcaaggcagcactgctggcgctgagcatggtctcggcttccgctatcgcatcacactggagctatcaaggagaaggcgcaccggagcactggggcgaactggacgaggcgtacaagacctgtaaaaacgggatgaaccagtctcccattaacatcgattccaccgcgaaagcacacctctcccccctggaaacacactatattgacggccccgttacgctgacaaacaacggacatactattcaggccgttgaaaaggcagacacccgcgacagcattaccctcgataaccaaacctggaccttacagcagttccacttccacgcaccgagtgaaaacacggtgcacggtaaggcgttcgcaatggaaatgcatctggtgcataagaacgagaagggtgagctggtggtggttgccgtgatgtttaatcaaggtaccgctaacgctgagctggataaactctggggcgtgatgccgggccaggttgaccagaacgtcagcatcaagccaaacctcgacatgaaccagctgctgccaaaagataagacgtactggcgctttagcgggtcactcaccaccccaccgtgctccgagggcgtcacctggattgtactcaagcatccgctgaccgtctcagcagaacagttgggtaaattcacccacaccatgcatcacgataataaccgtccagtacagtcactacatggccgcgtcgtcgttgaataa

SEQ ID NO: 157980 - DNA, 861 bp, Enterobacter cloacae
atgacgacgctggcaattgatattggcggcacgaagctcgctgccgccctggttgaaggggacgttctgttgatgcgcagggcgtgcccgacccccggcagccagacgccgggcgcgcttgaggaggcgctacgtgccctggttttacctctggttaggcatgccgggcgcgtggcggtggcgtcgacagggattattcataacggcgtgctcacctccatcaatccggccaacctgggtggcctggaacactttccgctggtcgcctttctggaagctgccacgcaattaccggtcacggcggttaacgacgcgcagtccgccgcatgggcagagttttgcgcgctgcccatgagggacgatatggtgttcctgacggtttcaactggcgtgggcggcggcgttgtactcaatggaaaacttcagacgggcagcggggggctggccgggcatcttgggcatacgctggccgatcccgccgggccgctttgtggctgtggacgaagaggatgcgttgaagccattgcctcaggccggggcattgctgctcaggcgcagggcgaactggcagggctagatgcaaaggcgatattcagccgggatacaccgcaggctcgcaggctggtggcaaattcggcacacgcgctggcgcgactgatcgccgacgttaaagccgttaccgactgtcaggttatcgtggtcggcggcagcgtggggatggcggaagggtatctccctctggtgaaagcctatttatcgcaggagccagaagtgtatcaagtgccccttcgggcggcgcattatcgtcacgacgccgggctattgggcgcggcgctgttagctacaggagatgcattatga

SEQ ID NO: 157981 - DNA, 468 bp, Enterobacter cloacae
atgatgatgggagagctgcagtcactggcatcgtcgggcctgcccgccgcactggtgaatgctctcacgctggcggttgccgcccggccaaaggagaaagcgccgggtcactacgaactgcagggtgatgctatctttatgaatgttatgcagtttgctacacaaactccggagctgaaaaaggcagagctgcacgcggagtatattgatatccagctcgtgttagccggtgaagagcggattctgtttggcgttgcggagtccgcgcgcgggtgcgaggaaatgcatagcgccgaggattatcagctttgcagccgcatcgaaggggagcagtcggtagcgttaagaccggggatgttcgtggtgtttatgccgggggagccgcataagccagggtgcatcaccgactcggcgggagaggttaaaaaggccgtggtgaaggttcgcgccagcctgttaaccgcataa

SEQ ID NO: 157982 - DNA, 654 bp, Enterobacter cloacae
atgaaaaagattggtgtcgtgctgagcggttgtggtgtttacgacggttcagagatacatgaagccgtattaacgctgctggcattatctcgtcagggcgctgaagcgatctgcttcgcgccggataaaagccaggcggatgtgatcaaccatcttacgggcgagccgatggcggaaacgcgtaacgtcctgattgaagccgcgcgtatcgcccggggcgctgtccaacccctggcgcaggctgatgcctcaacgctggatgcgttgatcgtgccgggtggctttggcgcagccaagaatctcagcacctttgcttcagaaggggcagagtgccatgtcgaccccgatttaaaacggcttgcccaggcgctgcatgcagcaggcaagccgctgggtttcatctgtattgccccggccatgctgccccggatctttgacttcccgctgcgcctgaccatcgggaccgatattgataccgcagagatcgtcgaagatatgggcggcgagcatgttccttgtccggtggatgatattgtggtcgatgaagacaacaagatcgtcaccacgcccgcctatatgctggcgcaatccatcgctgaagcagccacgggcattgataagctggtggacagagtgctggttctctcgcaatga

SEQ ID NO: 157983 - DNA, 144 bp, Enterobacter cloacae
atgttattttgtgattggtatcttaaaaatgaaagaatcgaaacgaaagggaagaatgcgaaagaaatgaaagcaaaaaaaagcatggccgaagccatgctaagcgaggtttacagcaaactcacgtcaccggtgccgggttaa

SEQ ID NO: 157984 - DNA, 1335 bp, Enterobacter cloacae
atgattctggataccgttgtagaatcgaaaaagggtgtacccactcgctatttaatattgctgattatttttatcgtcacggccataaactacgctgaccgtgcgacgctgtcgattgccggtacggaagtggcaaaagagctgcagctcagtgccgtctcaatggggtatatcttctctgcgttcggctgggcctacctgctgatgcaaattcccggcggctggctgctggataagttcggttccaaaaaggtctatacctacagcctgttcttctggtcgctgttcaccttcctgcagggctttgtggatgtcttcccgctcgcctgggcgggcgtgtcgatgttcattatgcgctttatgctcggcttctcggaagcgccgtcttttccggcaaacgcccgtatcgtggcggcctggttcccgaccaaagagcgcggcaccgcgtctgcgttgtttaacgccgcgcagtatttctcgctggcaatcttctctccgctgctgggctggctgaccttcgcctggggctgggaacacgtctttaccgtgatgggcgtgattggctttgtgctgaccggcgtatgggtgaagtatatccataacccgaccgatcacccgcgcatgtcagagcaggagctgaagttcatctccgaaggcggcgcggtggtggatatggaccacaaaaagcccggtgcacaggtcgcaggcggtcctaagctccattacatcaaacagttgttgaccaaccgcatgatgctgggcgtcttttttggtcaatactttatcaacaccatcacctggttcttccttacctggttcccgatttatctggtgcaggaaaaagggatgtcgattctgaaagtgggtctggtggcctccatcccggcgctgtgcggttttgctggcggcgtgctgggcggggtgttctcggattatctgattaagcagggtaagtcgataaccctggcgcgtaagctgccgattgtgctcggcatgctgctggcgtcgtccatcattctgtgcaactacaccaacaacaccacgctggtggtagccctgatggcgctggcgttcttcggcaaaggcttcggcgcgctgggctggccggtgatttccgacaccgcgccaaaagagattgttggcctgtgcggcggggtatttaacgtctttggcaacgtggcgtccatcgcgactccactggtcattggttatctggtcagtgagctgcattcgttcaacgcggcactggtattcgttggctgttcagcgttgatggcgatgttctgctacctcttcgtggtaggcgacatcaaacgtatggaattgcagaaataa

SEQ ID NO: 157985 - DNA, 1422 bp, Enterobacter cloacae
atgggagtcaagggcaattatcttttcaggggtgacaaaaccgcctgtggcggtgtaatcatagatggatgtcctgaccatcagcattttgggaaagacatggtctgcgaaggtcacagggcaacctgtggcaagcatgaagggctataccgtattgcgggagggattcgcgacactatccacggtaagagaattgctggaacgctgcacagccgaagttcttgcccatgtagatctcgccttgtcccctcaaacttctatgatagttacgagcttgataatgaagtgattccaaccagtattggttcacgggagattgccggtcttcctgaacagcccgaacccgttcagcacgcacaatctacaaaaaaagatccaaaatctgataaacccaaaggtatcgatgcaggttttaccattatcccgtttggcggtacaacagaagcctggcaacgtctgttattcacagagaacccacctgcaggtgtaaaagaactcttttccacgttgaacggcccggatgaaagatacaaagccggttctattatgctggtagttgatcctgataaacaggacgacgaacagatcgcccacatgcaggccgcgaaagcgcgaattgatgcagcgttagctcctctctccattcagcaagccaactttctctacaagcacaaagacaccattgagatgttcgctgctgctgtaaccactgcaaacgacgctgctggaaatgtgggaagagcgacggaagcagcgaagggatatttcgaacgagtcgaaaaaattcttgtcgagatcgagaagacatacaaacatcagtacattaccagcggttcactgatcggcgagcaattttttgttgagcgccgccgcttgtttggtcaacttgatagcgttcttaagatgttcatgaagcatcgcttcatgttcaaagagtacgccgatctgaaaagtgctcttggcctctccagccgttcaatcacgcaccgctggaacgaaacaggcgttagcgatattgaaggttacgcaacccatatcgagaagctggcgaagtacgttaagtggatggaaaccgccgggaagatcggtattggtctgtccgctttggataccgcagcgaagatcacggaagcctgtaccgtggggcgagattgtgcgaaaacgtcgtttacctctattggtgagttttccggtagcctgatcggcagtgcgatagctggaaaaattgcgggtacagccgcagcaaataccgtctgtgcgatagtgcttggcgctgcaaccatagaagccgcaggtgccggagcattactttgtacgcttggggtaaatggcgctattgcatatgggagcgataaagccacatccgcgttcggtggcttcgttggtgaatcgctatatgaggttacaagcaatgactattga

SEQ ID NO: 157986 - DNA, 417 bp, Enterobacter cloacae
atgactattgatgacctacttagcgccaaggcaacagtaattattggtgcacttgctttcggcttcggtatagccagtatcatagcctcagttctgaacagggatagatttaaagagatctgcatcctgtacaaagaaagatacggtagtttgcctgatgctgtattgctgttcgagaacgtcaacacgctttatgtcaaagtggcatacagcacaaaagtgagttttatatacatgccgctgttgtggaataaaagctcaatcctgaccaaaaatgatgacaaggactttattcgtgggctaccaaaacggcttattggtccattctacgcggagatatacctagcggttgtcagtctgttgttttttatcgttggtgtgttacaaatgttagctattaagcatggttgggtgtga

SEQ ID NO: 157987 - DNA, 765 bp, Enterobacter cloacae
atgacatcaacccgttaccctcaacgtgtccgcaatgacctgcgctttcgcgagctgaacgtgctccgcgtcgagcgcgtcagcgctggcttccagcgcgttgtcctcggcggtgaggcgctggaaggctttagctcccgcggtttcgacgaccacaccaaggtctttttccctgcgccgggcgcgacctttgttccgcccgttgtcaccgatgaaggcatcgagtggggcgacggcgtgcgcccgcaggcgcgtgactatacgcccctgttcgatgaggagaaaaatgagctggtgctggatttcttcgttcatgatggcggcgttgccagcagctgggcggtagcggccaaacctggcgacaaactcactatcggtgggccgcgcggatcgctggtggtgccggaagattacgcctggcaactgtacgtgtgcgatgagtccgggatgcccgcgctgcgccgccgtttagaaggcatcgcaaaactgccggtacgcccggacgttcatgcggtcgtgaccgtgggtgacggatcttataaggcctatctggcgcacctgagtgaattcgacatcacctggattgtgggccacagtccgcaggcggtggccgatcgtctggcgacgctggccgtgcccgaagaggattactttatctggctgaccggggaagggaaggtggtgaaaaacctgagccgccagtttgaaaccgacgcgattgaccaacagctggtgcgtgccagcgcatactggcacgctaaatag

SEQ ID NO: 157988 - DNA, 315 bp, Enterobacter cloacae
atgaaaataaaagagagagatggaacggtaataaatgtttttgctatttattggcttaaagatgagacgctattcttggggttccccaagaattatggaggattgctcgcttataattcgagaaatgtcgagatagttgattccacactacatggtaaatttgagtatttctcaacccatataaatggtctttatcactgggctctaattaaagagtttttattagacgatatattagagcgagatgaaactgcctacaaacgtttcctcgagatactgaaaacagaaggtctggtagatcaaggtttttattaa

SEQ ID NO: 157989 - DNA, 357 bp, Enterobacter cloacae
atgaatatgaagcttttcctgttttgcgaacatacaggattcagtaaaaaggattctcctttgtgggcagatgtctgtgatgcgcttcataagctcagaactcatactggaagcgtaaatattgaaagtgttgataataaaacaacgctcagcatacattctgatagtatgcatttcttactctcattaattgagtgtaagggtgatgaaacaaaaataaagcatatccagaatacctgtttttcaaggggagggaatgttttacctgttttctggagtcgctctcatgaagtgacaagtgattttgattttgtcactgaggtgaccagaaaatttttcattaagggacaggcttag

SEQ ID NO: 157990 - DNA, 159 bp, Enterobacter cloacae
atggtctttcacaaccaacatcaaaaaacatcatggcgggtgaaccgaataacgatcgatagcctgagcgtgccagaaaatacctcgctggatgtgacggaactggaaacggttccgaccgatggcacgattgtcctgctgcgtttccccaaccaataa

SEQ ID NO: 157991 - DNA, 1995 bp, Enterobacter cloacae
atgaaccagacacgaacggcgctggcgatgtcgctcgccctcgccacccttcctgcggcggttttcgccgaggaaactcccccggcagatgaagatcagcttgtcgtcaccgccaccggtttcgcgcaggaacgccgcgaagcaccggccaccatctctgtcgtcggtgaaaaagagcttaacacccgttcgaaccagaacgtcaccgaagcgcttcgtgagatgcccggtgtattagtgggcaacggtaacggaagcctggccacgggtgatgttcagatgcgcggcatggactcgacctatacctcttacatggtgaacggcatcaaacagggtacccgcgaatcccgcccttacgggcaccacatcggcaccgaagcggcctttttacctccgcttgccgctatcgagcgcatcgaggtgatccgtgggccgatgtcctccctgtatggctctgactccattggcggcgtggtgaacgtcatcaccaaaaaaggctacaacctggatacatggaccggcgtactggaagataactacttcctgcaggagaagagcgagtacggcaacaccaaccagaccaacgctttcctgatggggccgattattcccggcaaactcggggtgagcgtggcggcggattatctggaccgtcgcgatgacgacagccagaacgatgagcgctttgtaaagcaccaggccggaaatctggacgcgaccatcaacatgtcgccgaccgatacccaactgtgggatttaaatgtcgttaaagggcatcaggaaaaatcacacaacgataaagcctgggaatgggattttgaccgtgatgctgcgtcgctttctcagcacgcctggtacggtgacgatttgctggaagcgaagaactttgtcagctacgagaacgccaaaaccgaatatcgcgttccggggatgagctcgcagttcatcaaacagcgtaactacgaggccaatagcgcgaacacctttacgcttggcgatcacaagctgacgctggggattaacttcacccgcaacgagctggacgacaccttcggtattgcagacaaggaagtgccgggcgtcacgccagtcagcaaaatcacgcgtaacggctgggcggtcttcgccgaagacgcctggatgatggtgccggacttcaccctcaccacctcagcacgtctcgatcacgacagctattttggctaccacgtgacgccaaaactctacggtaactggacgattgatgaaagctgggcgctgaaaggtggcgtctctgcgggctataaaaaaccggatctgcgccagaacaacgaaggcttcaccagcgtttacggttcgtatccttattcctatattggcatcggtaacaacgacctgaagcccgagcagagcgtcaacaccgaactgggtgtttactggcaagaggatgcgctggcattggatgccaccgtgttcttcaccaaatttaaagacaagatcagcgactacaccatctgtaccgcaacggctacgcagaagtgtgtgtacaacggctatgaagcggaagaggtctcccagtacttcaacgtcagcgacgcggaaatttatggtctggagctgaacggtgactggcaggtcacgcccgggctgaaggctaacgcgaactacacctatacgcacagcgagcaaaagagcggtcagtacaagggtgaagcgctgaacgaattcccgagcagcatggccaacctctccctgacgtggaacgcgcttaacgatcttgagctgtggaccaaagccagctggcgcagcaacacgccgaacaccgggaaatcgacatcgacagaggcctatgcgctggttgatttaggcgcacgctaccatctcaacaagcgcatcacgctgatggcgggggtttacaacctgttcgacgtgaacccgatctacaaaacgtcctataaccagtcttcactgctggaaggacgccgctacaacatgggcgcacgcttcgagttctga

SEQ ID NO: 157992 - DNA, 1050 bp, Enterobacter cloacae
atgaatttcaatacattaaaaaatcaatccctctgtgcgctcgcgatttccctggcacttcacgcgggttctgttttggcaaaggacttcacggaagatcagtttacctctcagccgctgggtcacggcgtttacgaactggcttatgacgctggacaaaaggcagtctacgcggcctctgccccctctttcgagaaagacaaaaccgccggtgaagtgttccagcttgcggtcgattcactaaacgttaatgagcgcattactacccagcgccgcccgtttgcggtttcactggatgatgccaatcatatcctgtggttaggcaacgcgcttgatggctcactgacactgctggatacccgcactaacaaagaagtgaaaaccctccagcttgcggatgctgagaataaagcacacgtccgcgaagtggttcttgataagaaacaccaccgcctgtatgtctccggcatcggcagcgaaggcaaaggcgtgctgtgggtcgtcgacacgcaaaaacagacgttgctgctgacccataaacagatggatccggtcggttttgcggtcgatgaagcaggcgataaagtttacgctgtgaccggcaaaggcgagctaattaccctggatggcaaaacctctcaggttctctcccgcgtaaaggttgaccccgctgaacctaaacactacttcctgaacatcgcgttgaacactgccaaaggcgttggttttattgcggataccaacacccgtgacgtactggttgtccagctcgactccggcaaaattgttcatcgcgttccaacaccgaactcgattgccgcggtctacaaccctgcgcgcgatgaagtgtatgtaacccatcgcaatgcccgtcagataagcgttatcgatgccaacacctacagcctgaaacacaccgtcacaacggcggcgatgccaaacagcatggtgctttcccctgacaacaaaacgctgttcgtcagcgtgaaacaggatgaaaaggccaacaaggctgactatgtgctcaaactcgatttaaccccattctga

SEQ ID NO: 157993 - DNA, 1815 bp, Enterobacter cloacae
atgtgggcggcaaacaaagaaaaatcaaatccgttgtcttcacgccgggacgtggtggcgtatttaaacgggatgctgggcgcgctggataagcagtttccgccgggcagttcacgtttttcgctgggcgagacctgcgcgcattacgcgacggatatcgcgcagatggaagggctttcccgcgcgctgtgggggctgtttccgctgatggcgggcggcgagggcgagtcgtggagtgagaaatacctggacgccatcaaactgggcaccgatccgcaaagcgcgggctactggggtgaaaccggcccctacgatcagcgtctggtggagatggcggcctacggtctggggctgtctctgctgggtgacaaactcctcgagcgcttcaccgagcgcgaagtgatgaacctccacgcctggctcagccagattaccgacgcgcagatgccggacagcaactggaactacttcgccatcatggtccagcttggattcaagcgcgccgggctgccgtatgatcagcgcgccatcgaccgtcgctttgcgctgatggacgcgtactatctgggcgacggctggtattccgacggtccggggcgtccgaaagattattacatttcaatggccttccacttctacgggctgatctacgccgccctgagcggcgacgaggcgagggcggacgtgctgcgcgagcgctcgcgtctgttcgcgcaagactttatctactggtccgctgctgatggtgcctcggtgccgtttggccgcagcctgacctaccgttttgcgatggtcgcgttctggagcgcggtggctttttccgggctggatgtgttcacgccgggcatcgtgaagggcattattctgcgccatctgcgctggtggcagcagcagccgattaccgatcgcgacggcattttgaccctcggctttgcctatccgaacctcgcgatgtgcgaggactataactcgcccggttcgccgtactgggcgctgaaaacctggctcattctggcgctgccggagacgcatccgttctggctggccgatgaagagccgctgcccgcgctggctgaaaagcacgtgattccgcatgcccggcagatccttatccatgcggaaaagtcgcagcacgtcaccatgctcaccgccggtcagcttgagctgaataactacgtcaataccgacgccaaatacactaaatttgcctactccagccgctttggtttcaccattgagcgcgggcgctttggcctgaagcatgcggcctgtgattccatgctgctgctggcggatggagacgattactaccgcggtcgccgcgaatgcgaagcggtgcgggtggatgaaaattacctctactcgcgctggtcgccgtggcacgacgtgcatatcgacacctggcaagtgccgttcggggaatggcatctgcgcctgcaccgcatcaacagcgcacgcgcgctgcaaacggccgagggcgggtttgcggtgatgaaaaccgaacaccagatccgtgagcgcggctgttatctggcagccgagaacggcagcagcgtgattgtcgatctgtcgcccgccatcacgcgcctgccggacagcatcgttacgccgccgaacagcagcatcatgttcccggcgtgcgccgccattccgctgttaaaaaccgatatccctcaaggcgaaagctggctctgctgcgccgtctttgtcagcgaaaagcaaaaacttgcggccaggccgcacctgaatatcactcaaaaccaggtcgagatccgcgaacctggaggcgaacgtctactgtcgttcacattataa

SEQ ID NO: 157994 - DNA, 405 bp, Enterobacter cloacae
atgctgcccgacagtctcgtcccggctaagtaccacattgcgcctgtggaacagcaaccgacgaaagaagaaaaagaggctaattttactcagggaaaaagaaagctctccgatttcgagtctgacatattaattggtgtttcccgaacgggcaaatcccgtaatatggtattggaggagcacgaccgccatattaaagaccgtttatttcgcgctgtgaaaattgaagccttagcgcacctgctgaatgacctgcaagccgaaggtgaaatagatgcccagcagctcagtcaaataatggctgaaaagaccaaagaaataaacgaaatgggtaatgaaatttggcttaatttaattactcgagaaaaaaatgccccaattttttatgacttcggggaagattaa

SEQ ID NO: 157995 - DNA, 717 bp, Enterobacter cloacae
atgaagctgacccgacagcagaacattcttgaactgctgggctgctgcgactggctaaccactgacgcgctggcagaaacactcgccgtcagcagggagacgatccgtcgcgatctgaatgcccttcagcagcagggtaagatcctgcgccagcacggccgcgcgcggcttatccatccgaacagccgcgacagcggagagccgtttggcgcgcgcttaaaaagccattacgccgataaagtcgatatcgcccgtcacgcgctggactggatcagcgaagggatgaccatcgccctcgatgccagttcaacctgctttcacctggcgcgccagctcccggatatcgaactcaccgtctttaccaatagcctgccgatctgtcatgagatggcaaaacgcgagcggatcacgcttatctgctccggcggcacgcttgatcgcaagtatcgctgctacgtcaatccggcgctgcttacacagcttaaagggctggagattgacctgtttatcttctcctgcgaaggcgttgatgagcagggcacgctgtgggatccggtggagcataacgcggtctttaaatcactgctgttaagccgcgcaggccagtcgctgctgctgattgataaaagcaaattccagcggtcaagtgaggtaaggataggccagctgtcacaggtgacgcaggtgattcagcgggatcgtctttcagggggataa

SEQ ID NO: 157996 - DNA, 1056 bp, Enterobacter cloacae
atggcacatggagattataaacccatatctatgcgggcctccattcagaatgtcggcatgctgttgggagtggttgctgcatattattataataattatctattacttgcatggggttttacaggtagctatataatttttagtatctgggcgcttatccgtgcaagaaagggcactattctagccctccctggtcgttttgatgcggccgaagtcaaattggtaatgaagagtttttggataacgcttcggcccttgcttatactacctctaatattgcaaggtaatattactctggaaagggcactagcatcattaatcagtattgatgtagtgtccggactcgattatgcccggtttattactgacactgttgtttttattttgtctgtgccaatagcatttgctggattatctgaatggtcatcgcagaagccagaagttgttcgagataagataaggtttatttataattggctggcactgcttgttataaacatgtcttttttcatttttttctatgcaaaagacatcgttattctactgtttatgcgtggtgcatttgatcagcactccgtaacggtaacaactgatattattcaaggaatgtgcataggcctttgggctcaggtgataggttatatattcattaaggcattgagcgcacatctcaataataagaaagtattggttgtgatgatggttgcattgctgagtaatgcggttgtcaacctggcgacgtataaaatgtggggtgcatttgggttagggctagggaattcgatatacagtttaatgatgtttatccttagcgcgtgttacttaagaatagcaaaagatctttttcctgtgttaattaaaatttctttgggattaattctttatacatctattatcttgactcttgggcattacattattcaacctgataatgttattttccgactcttgattaatggcgcaatatttgtgatgtttagtctgttatgggcaatgttattcccattgtaccgaaatggtattaaagggattttcctaaaaaagggactgagatag

SEQ ID NO: 157997 - DNA, 1851 bp, Enterobacter cloacae
atgagaagagttctgacaacgctgatgattttgctggtggtactggtggctggcctttctgcgttggtgctgctggttaaccccaatgatttccgtgcttatatggtgcggcaggtcgaagcacgcagcgggtatgaactgaagctggacgggccgctgcgctggcacgtctggccgcaactcagcattctctcgggtcgtatgtcgttaaccgcgccaggggcgtctcagccgctggtgtcggcagacaatatgcgccttgatgtggctttgatcccgctcttctcgcatcagcttcaggttgaccaggtgatgctgaaaggggcggtgatccagctgactccccaaactgaggctgtgcgtaaagcggatgcccccgtcgcgccacgcgaaaataccttgccggatgagccgtctgataccggctggtcgttcgatataggtaacctgaaagtggccgatagcgtgctggtcttccagcatgaaggtgacgagcaggtcaccgtgcgcaacatcaacctcaagatggagcaggacgccaaccatatcgccaccgtggagttctccgggcgggtcaaccgcgatcagcgcgatttgaacctctccatgaacgctaacgtgaacgcgtcggactatccccatcgtctgacggcggatgtccagcagctgaactggcagctgacgggtgcagacctgccgacagcagggattaccggtcagggtacgctgcaggccgtctggcatgaagaaaacaagcagctggagctaaacgcgctcaacctgcaggccaacgacagtaccctgaaagggcaggcgagcgtctcgcttgctgaaaaaccgaaatgggtttttgacctgcagttcgacaagctgaacctggaaaacctgctgccaccgcagccgaacgctgcggctgacggcgatgtcgcgcagacagggcaaagccaggccgcgaaaccgcgtccggtgatctcctcaaatctcgatcagcccaattacaacggtctgcgcggatttaccgccgatatactgctgaaagccaacagcgtacgctggcgcggtattgatttcaccgatgtcagcagccagatgttcaaccataatggcctgctggtgatctctgaactcagcggcaagatgggggcggggaacatgtcgctgccgggtacgctggacgtgcgcaaagacgtggccagcgccgaattccagccacgccttgaaaacattgagatcggggcgatcctcaaagccttcaactatccgattgacctcacggggcagctgacgctggcgggggatttctccggcacgaagattgacgcggaggcatttcgccgcgactggcagggtcaggcgcacgttgagctgaaagacactcgaatggaaggcctcaacttccagcagctggtgcaacaggcggtagagcgcagcagcaatgtcaaagcgcaagaaaactacgatagcgcaacgcgtctcgataactttaccagtgagctgaccctggataacggaaagctgtccctggacgagatgcagggaacatcttctctgctgtcgttgacgggggagggcaagctggatttagtgaaagagacggcggatacgcggtttaacgttcgtgtgctttccggatgggaaggcgaaggcgagcttatcgatttcctgaaagagacgccgatcccgctgaacgtttacggtaaatggcaggcgctgaattacagcctgcaggtcgatcagatcttgcgtaagcatctgcaggacgaagcaaaacgtcggctgaatagctgggcggatcgcaataaagattcccaaaccggcaaggacgtgaagaagctgttagataagctttga

SEQ ID NO: 157998 - DNA, 435 bp, Enterobacter cloacae
atgaagaagttaatgatgattgttataagcgcgactatggccgcggctccggcctatgcgattaatgctcactatcgcgcgcagctggagcgttccggatgcacccaaattaccgatggcgatggttcttgcgatatcaacaaaaccaaagcggaaaacgcggcgcaacacgaacaaacgaaaaccgttcacgatccgatgcgtgaagcctcattctcgtctgatacggttaacgccacaatttcaaacggcttttttagcgccacccttaacggcaagaaagcggccgtaaaacgtctcaatgcgactttctacgagattcacggcgaaggctttgttatatcgtttagccttgatgagaacggtattaccgatgcctcctggaataaaacgaaaggtcgcgaccacggcattttgcaggtcaggcagaaataa

SEQ ID NO: 157999 - DNA, 2199 bp, Enterobacter cloacae
atgccatcttatacttcagagacatatggtgcagcggcaccgcaaaataatgaaattgatcttctgcaactgcttgccgagatattcgatcatcgggtgatgatagtcctggtaacactcctgtttacggtgtgcgcgggactctatgcgttttctgtcccccctgtctatcaggctgacgcgcttgtgcagatagaagcgaagcaggataactcattgctgaaaagcttaagccagttcggctccgatctttcgccagacgttgcaccggaaatcttgctgataaaatcacgaatgatcctcgggaagaccgtggatgaattggggctaacgtacagggttaagcgccgcgttactccgatcgtggggcatctgtgggcacgttttcgccccagcaagccaggtcacctgaccatcggtgaacttaccatcccccgacaggatggcaaaccgcaagtgcttgtgctgaccgtgctggagcagggagggtatcaccttgagggcgaaagcttcgaggctgtgggtaaagtcggaaaaacgctgctcaaagacggtgtctctcttctggtgacatctctcagcgctgcaccagggacgcagttttcactcaaaaccatgacaaagcttgaagccatcaacgcgctgcagaaacggctcaccgttgcggaatccgcgaagcagagcggaatgatcgcgttaacgctaacgggcgaagaccctgacaagattgccgtggtactgaatacgattgcagaaaatttcctcaatcaaaatattgagcgtcaggaagcccaggatgcccgtagcctgacctttttacagcatcagttaccgaaaatcagtcacgagctggatcaggccgaagcgcgactgaatgtataccgtgagcagcgcgattccgtcgatttatccctggaggcgaagtccgttctcgatcaggttgttaatgtggagaatcagctcaacgagctaacgttccgtgaagcggagatctctcagcttttcaaaaaggatcacccaacctatcgcgcattacgcgaaaagcgccaaacccttgagaagcagcgtgttcgcctgaacgatcgcgtatcaaccatgccctccacgcagcaggagattttgcgattgagccgggatgttgaatccgggcgcgccatttacctgcagttattaacgcgtcagcaagagctcaatatctctcgctccagcgcgatcggaaacgtgcggatcattgactctgccgttacgcaacctgaacccataaaaccacgaaaagcacttattatcgtgcttggcatactgttggggctgatattctccagcggctgggtattggttctcgctgcctttaaacgggggataacctcgtctgagcaactggaagtgcaggggatgccggtcctggcgacgctgccccgctcggtatggctctggaaaaaaacgcatctgcgcaaaatgagtatcctgggttcccgctggagacacaaaacgtcgaatgtgcccttcctgcccatcgaaaggccagcagatatttttatcgaagcgatgcgcgggctgcgtaccagtctgcacttcaccatgatggacgccacgaatcagattgtcgtcattactggccccacgcaggattgcggcaaaacgctggtcagtaccgcactggcggcgctggcgtctcaggccgggcagcgggtgctttttattgacgcggatatgcgtcaggggtacgtgcataacatctgtaaactgaacaaccattgcggattgtcctccgtccttgagggagatattaaatggcaggatgcgctccagcgctttgagcagggtggatttgatgttttaacctgcggtccacagccttcacttcctgtagagttgcttatgggggaacgcttccagaacgccatgtcgcagatgaacgaacgttatgacatcgtgattgttgacaccccgccggtgcttgccgttacggatgccttactgattgccaaagcggcggcgaccaccttactggttgcacgctttggtaaaaccagcgtcaaagagattgagcactgtctgaagcgtctgcagcaaatgggcgtgcaggtgaatggcgctattctgaatgatatcgtgaagtccgcctcgctctattacaactcggggtacagccattacgactacggctataccccgaaggaaaagcggcgtgagagttag

SEQ ID NO: 158000 - DNA, 441 bp, Enterobacter cloacae
atgttcaactcaatcttagtggtttgcacgggcaatatttgccgctccccgatgggggagcggctgttgcgtcagcaattacccgggaaacaggtgacctcagcaggtattttcggtcttgagggacatccggcagatgcggttgctcaggatgtcgcctggcatcatggtgtctcgctagacgatcacgtggggcgcaagctgacgcgcagcttgctgcaaaaatccgatctgattctggtgatggagcctgaacatcttcgttttattgctgctatggccccggagaaccgtgggaaatcactgctatttggacaatggctggagacaaaggatattcccgatccctaccgcaaaagccgtgatgctttcgaatatgttttcgggcagttgggaaaagccagtcaggaatgggctcgtcgtttgagtcaaaaggaataa

SEQ ID NO: 158001 - DNA, 486 bp, Enterobacter cloacae
atgccgatggaaaaatccataaggcctataacggagatatcttctatcaccgctaatacgatcctggttcgtgcctggcaggagagcgatcgtcctttccttcgcacgatttacctgcatgcccggcgtgacgcctggccatggttgaacggtgctgaatggcggcttgaggattttgacgccgcaatcctggacgaagaggtttgggtggcggtgcaggacgggcatcgacttggcttcgcctccgtctggacgaacgataattttctgcacaacctgtttgttgacccgcagtatcagagcctgggcgtcgggcatgtgttgctggagcaggtacagaagacgtttaccagtacgggttcgcttaagtgtctggtcaagaatgcgcgtgctattgcgttttaccagcgacacggctggcacatcgaggcgacgggtgattctccggacggagagtattatctgatgcattatcggcttgggtaa

SEQ ID NO: 158002 - DNA, 1389 bp, Enterobacter cloacae
atgaacgcgtttttcctgaaaagtattcgcccgtactttaatttcccgggtttatcgctgccgaccgcgctaaattccggcctctatcttgaggagaagcttgcctctctgaagcagagcctgtcggtggaagtggcggattatctcgagcgttacccacaaaccaaacacatcgatgtctgtctcaacgatattaacggcattatgcgcggtaagcgactttccgtagacagcatgctgagtctggagaaaggctgctattttcctctctcggtctattcgatggatcaaaaagggaaagtcgccgcgtcacgtgacgatgagccagaccgactttgcatgccggttgccggttccctccgcccctcttcacacgatccgctgcataccgcgcagatcctcctgacgatgaaggacagcgacgggcaaccttgtccccttgagccacgcgtcatattgcagaacgttctggcgcgttttcatcagcacgggctgtacccggttatggcaccggaaattgagttctacctgacggggcctggcacacaggaacttcagaatcagggctgctttcatatggatacgtcgtcagcccacgctgcgctgtttgacgagctggaacagctggcacaccggcagcatatccccctgaccggcattgtggcagaggctgaatcaggtcagttcgagttaaacctgaagcacagccatcgggtcgtggaggtatgtgacaatatcctggcactgcgtcggttaacgcggtttgtcgctgaaaagcacggccttcaggctaactttatggccaagccgttcagcctcttgtccggcagcggactgcattttcatttcagcctgaatgatattcacggtgaaaacgtatttgcctcaccggctgatgaactcaatagcatgatgcgcttatgcatcgcaggtcagctggcgctgatgcccgcctccatcgccattctggcccccggcgttaacgctttccggcgccttcgtaaaaacctcacagagccattattccattcatggggttataacacccgcactgccgcgctgcgtatcccctgctctgatgagagcaaccgtcgtattgagtaccgtctggcgggcgctgatgccaacccgtatctcgttgcagcaaccatcctgacaggtatgttgtacggtctggaaaatgtcgatgaggatgatttaccggaaccgcagcgtgatgagccagaacttccactgttccagcagcaggcaatcgaggcgttttcccgctgccagtatctcaccgacagcttaggcgaagccttttcagaacagtggatagcctgcaagctttctgaacttgactggttcgagagcatagtcaccggacaggaatccacgctagcgtaa

SEQ ID NO: 158003 - DNA, 708 bp, Enterobacter cloacae
atgctgaacgttatgacgactcgatttcccttaatactgctgctgaatgctgccggtctggcactctttttatcctggtatctgccggtgaaccatggtttctggttcccgctggattccggtattttccacttcttcaaccaggcgctggtgaagagtgaaaccttcctgtggctggtcgcgattaccaacaatcgcgccttcgacggctgttcactgctggccatgggctgcctgatgctctctttctggctgaaagaagataaaacaggacgtcgccgcattgtgatcacaggcctggtcatgctgctgactgcggtagtgattaaccagctggcgcaacatttgatgccggtaaaacgcgcaagtccttcgctctatttcccggatattcaccgcgtcagcgaattactgcatatcccgactaaagatgcgtctaaggacagtttccccggcgatcacggtatgatgctgcttattttttcagcattcatgctgcgctattttggcaaaaaagcctttgcgacggcgctggtaattgtggtggtgtttgctttcccgcgcgtcatgatcggcgctcactggctgacggatattgttgtgggttcgctctctgcggtgctgattggtttgccatgggtgctgatgacgccgttaagcgatcgattaatagccatttttaatcgttacctgcctggcgataagtaa

SEQ ID NO: 158004 - DNA, 1554 bp, Enterobacter cloacae
atgttcacccgctacttttccagtcatcgcaagatactgtttctcagtattgtcacagggctgtttgtcgccctgctcctgggctcattgcagtttttctggagttaccacaagcgggaagtcagattcgataccctgattgaagatgtgagcatctacatggagagctacttcggggagctaaaagagtctatcgatctcctccagccgcttacgctgaacaattgccatgaggttaacgctgaactgacttcacgcgctgccttcagtattaatgtgcgcgccttcctgctggtcagagacaaaatagcgttctgctcttccgccacagggccaatgaattccccgatggaagcgcttatacccgagctgcacatcaacaaaccgatcgatattgccctgctgtccggcacgcccatgctgccgaataaaccggccattgccatctggtaccgtaatccgttggttaaggacggcggcgtctttacctcggtgaatctcaatctgacaccgtacctgctctatgccgcgcgtcaggacgagttcgcgggtattgccatcatcattggcgacaacgcgttgtcgacaatgtccagcacgctggttaaggcggaagatctccatgaacacgccgcccgcaccgccacgctgaaagacattccgctgaccatcaagatctatgccgaagcctggaccagcgaggaaatcctcttcgccctcttcttcgggctggtgtgcggcatagccgccggaacgctcaatttttatatcctgaccatacgtctgaatccgggtaaggaaattttaaccgcgattaagcacaatcagttctatgtggtgtatcagcccgtggtcgatgctaaagagctgaaaatgcgcggtgtggaagtgctaatgcgctggaagcacccgacgatgggcgaaatcccgccggatgcgtttattaactttgctgaagcgcaaaagctgattgttcctctgacgctgcatctttttgatctcattattcgtgacgcaccggtattacaaagcgtattgcctgcgggagccaagctggggataaacattgcgccagggcatttgcatgcggagagttttaaagaagatatgcaaagcttcaacgcctcgctgccgcccgatcatttccagacggtactggaaatcaccgagcgcgacatgattaatcagcgcgaggccaaccagctttttgaatggctacacaatgaaggctttgaaatcgcgattgatgatttcgggaccggccacagtgccctgatttatctcgagcatttcacaatggactacatcaagatcgaccggggttttgtcaatgccattggaaccgaaaccgttacatcgcccgtacttgatgccgtattgaccctcgcaaggcgactgaacatgtccaccgtcgccgaaggggtggaaacgcctgagcaggcggcctggctgcgcgagcatggcgttaacttcctgcagggatactggatcagccgccctatgccgctggcgcagtttcgcacatggcaacccaatatgatgtccggtgaataa

SEQ ID NO: 158005 - DNA, 1059 bp, Enterobacter cloacae
atgaaaaacgtaacctttactaccgatgaagatcgctggcaagccgtgcttggccgcgatcctcgcgccgataatcagtttgtctttgcggttcagacgacggggatttattgccgtccgtcctgccgtgcccgccacgcgctgcgtaaaaatgtccgcttctatcctgatgctcagcacgctgttcaggacggctttcgcccctgcaaacgctgtatgccggacaagctcaacccacatcagcagacgctggcgaaagttgaacaggcctgccgcctgctggagcaggatccggcgttaacgctggaggcgttggcgcagaaggtcgccagcagtcctttccatttccaccgtctgtttaaatccgtgaccggcatgacgcctaaagcctggcagcaggccgcgcgggaacatcgtctgcgcagcgcgctggcgcagggggataaaattaccgacgctgtactggcggcagggtttcccgatagcagcagctattaccggaaagccgatgaggcgttggggatgacggcgaagcagtaccgcagcggggatgtctcggttcgttacgccatcagcgactgttccctggggcgttgtctggttggcgaaagcgagcgcgggatctgtgcaattctgctgggtgatgacgatgcgactttagaaggggagctgttgacgctgtttccccgcgcggagcgagaagtgcttgaaggtccgttcgcgcagcgcatccagcaggtgatgagcactattgacagccgctcggtgccgctggcgcttccgctggatatccgcggaacggcttttcagcagcaggtctggcaggcccttcgcaacattccctgtggtgaaacggcaagctaccaacaggtggcaaaggcgatgggtaaacccaatgccgtacgcgccgtggcaggtgcctgcgccgcaaacaaactggcgatcgtcattccttgccatcgcgtagtgcgaaacgacggggcgctttcgggttatcgttgggggacggcacgtaaagcgatattgcttaaacgtgaggcgagtcgccgggaggattaa

SEQ ID NO: 158006 - DNA, 1362 bp, Enterobacter cloacae
atgagttttaccgactggccgtggcagcactggcgcacgcagcgtgcggaaaaacccgcgctgcgcctggacgacgatgttctcacctggcaacagctttgtgcacgcatcgatagccttgccgccgggttccatcgtcagggcgtgcaggagggcgacggcgttatgctgctcgcccataaccacccgcaaacgctgctggcgtggcttgcgctgctgcagtgcggtgcgcgcattctgccggtcaatccccagcttccgcgccccttgctggacgtcctgctcccgcagatgacgctgcgccatgcgctggtactggatggcgcgtttgacgggctctctgcccttagcctgtcagaacacgcaggggaatatgcggccgcgtggcagccggatcgcctggcttccatgacgttaacctctggctcgacggggttgccaaaagcggcggttcacacctgcgcggcgcatcttgcgagcgcgcaaggcgtgctggcgctgatgccctacggcggggacgacgactggctgctgtcgctgccgctgtttcacgtttctggtcaggggattctgtggcgctggctgctggcgggcgggcgcttgaccgtgcgcaagaagcagccgctggagcaggcgctggagggctgcacgcacgcgtcgctggtgccgacccagctgtggcgtttgcttcatactcaacaccacgttgcgctgaaagccgttctgctcggcggagcggcaattcccgttgaactgaccgagaaggcgcgggagcagggcattcgtaccttctgcggttacggcctgacggagttcgcctctaccgtttgcgcgaaagcggcggacggtgagccggatgtgggaaccgccctgccgggtcgggaagtgaagctggtcgagggggaaatctggatcaaagcgcaaagcatggcggcgggctactggcgagacggtgcgcttcttccgctcactaacgcgcagggctggtttgccactcgcgatcgcggggaatggcgcaacggtcgtctgacgattttaggccgtatggacaacctctttttcagcggaggagaggggatccaacccgaatcgctggagcgcgttatcgccacgcatccgcagataagccaggtgtttatcgtcccgctggacgacgccgagttcggacagcgtccggtggcggtggtggagtgcgagccgggaacagatatcgcgcaattccctgactggatccagggcaggctggcgcgttttgaacagccggtacactggctggtgctgcccgcagcgctaaaaaatggcgggataaaaatctcccgccaggcgttaaaacagtgggtcaatgccctgctgaggggctaa

SEQ ID NO: 158007 - DNA, 777 bp, Enterobacter cloacae
gtgaccctggctggcgtgcagcataacggtaagccgggttacccctggctggtctttctgcacgggttttccggcgattgccgcgaatggcaggctgtcggggagtctttgcgcgattatccccggctgtatctcgacctgccgggacacggcgaatcagccggtgtcagcgtcgccgggtttaacgatctcagcgatttgcttgccagcaccttacttagttacaacatacttaactactggctggtggggtactccctcggcggccgcattgcgatgtttcatgcttgccagcagccaaagggcttatgcggcattgtcgttgaaggcggtcatcctgggctgcaggatgcgggctcgcgagaggcgcggctggcgtccgatcgccgctgggcgacgcgttttcgtactgaaccgctccctgacgtctttgccgactggtatcagcagccggtgtttgcctcgcttactgatgcgcagcgcggcgaactgatcgccctgcgtagccggaacaacggcgcgaatctggcggcaatgcttgaggccacgtcgctggccgtgcagcccgacctgcgttctgcgctgagcgcgtacaacgcccctttttattatctctatggcgaacgtgacgagaagtttgcggccatcgccgccgaactgaacgccgaacgccacgttattcctcacgccggacacaacgcccaccgggaaaactccggcgcggtcgccgcgagtctggctcagatactgcgtcttcgaacaaaggacactctatga

SEQ ID NO: 158008 - DNA, 1296 bp, Enterobacter cloacae
gtgcattcgatattcctcgcgctggagcaactgcgcacacggctggcgcaagcgttacccgcaacacccggtttacgtcatttcgacgtctctttcccgttaaacgacgcattcgatcccctggcctggctgggtgctcagcaatgctatccccaattttactggcagcagcgtagcggcgatgaagagctggccgcgctgggtgccgttatccatttttcttctctcgcgttggcctcgcagtttttgcagaggcagcatgcagccagcgatacccgcatttgcggcctgaacgcctttagcccggaaaagggcagcctgtttttaccgcgcctgctctggcgacgttcaggcggcgttgccaccctgcgcctgcagctgtggagtgaatgttcccttcaggacgatgcacaggtggcacagcgttttttaggcagtcttcaggacgccaaaccgatccgtccgctgtccgttcaggtggagcgcgaaacgcaccagccgcaaaaaccggaatggctgcgccttatacggcaggcaacggagactatcgcgcacggtgagtttgaaaaagtggtcctcgcccgcgccaccgatctgcaatgccataagccggtaaatgccgttgccctgatggcagccagccgcgcgctcaacctgaactgttaccacttctgcatggttttcgatgccagcaacgcgtttctgggctctacgcccgagcgtctgtggcgtcggcgcggcacgttgctgcgcaccgaagcgctggcaggcaccgtcgccagccacgcggatgacgctcaggcccggcgtctgggcgactggctgatgaaagacgataaaaatcagcgtgagaatatgctggtcgtagaggacatctgcgagcgcttgcagcatcacacccaaacgctggaggtgctgcccgcgcaggtcgtgcggttgcggaaggtacagcatctgcggcgctgcatctggaccgagctcaaacacgctgacgatgaacagtgtctgcatgttctgcagccgacggcggcggttgccgggctaccgcgccaggcggcgcgtgcgtttatccagaatgtggaaccttttgaccgcgagtggtatgccggatcggccgggtatttatcgcctgagcaaagtgaattctgcgtggcgctgcgctctgcacgcgtccacggcgcggcgctgcggctctacgccggggcggggatcgtcagcgggtctgacccggaacaggagtggcaggagatagaaaacaaagccgccgggctgcgttctctgctccttagggattaa

SEQ ID NO: 158009 - DNA, 2154 bp, Enterobacter cloacae
atgattgccctcgcgctatgcctgattgcggtgccattttcccgttatatctccccgcgcgctattgttaacgggcatgacgtctatttagcatggctacccttaagcgttatgctggccgttattttgttgtttggccgccgtgcaattattcccgttctgttaggttttactattactaatatattcgttgttgatttagcaccgctacaatatgcagttctcctgttttgtcagactttttcagttttcgctgtgtgtggcattatccgtcttgtgctgggcaggcgctggcgccacagcgtgcctaataaatacatcgggatccgtattttttggctgggttttatggtgccgataggtatcaaaatatcaatgtatctggcaggctatttattcgatttcccggtaacaatctccacttacttcggtgaaggcacccttatttacagcgttgtggatattcaaagcctgatctgcgcggcgttgattttcaccatgatgttctattatccattaagaatgattattaatcctcgctacgccagaaccctctggctgcggagcgtgaagccggtgttttttcacaagaaatcattgtttatatttgtctggctgatgcttctgatcgccctcatggcaattttatgtgcaccgctagagtcacctataattgcaggatatcttgtacccattatttttattctttttacgttgggcatcagctgtttaagttatgcgcttatgtcattgctctgggcggcatccgcactcctgctactgacctacaacgacaactttttgaacggggtggagtcgggtcactcgctctcctttatcctgtctgtactcatctctttcgccatctgtttgctttatatgtcgcggatttaccggcgaagcgaatggatgaagaagggctggcaggacagggcgttaaccgatccgttgaccggtttgcctaacattcgcgccctggatgactttctcctgatccaccctgacgccaaggtgtgttgtctgcgaatggataatctggagtttctgagtcgccactacggcattctgatgcgggttcactgcaagcggatgattaccgcgtcgctccagcccttactgcaaaaagatgagcagcttttccagttgcccggcagtgagctggtattggtattgctggggccgggtacgtcagagcgcctgcagcatatggtcgaccaactgaatagccgcaagatttactggaacaacactgggctggatatagagtttggggcgtcctggggtgaggttgaagatggtgagaacctgcaccatacgcttgggcagcttagctggctggcggagcagtcatgtgctgcgcataatgtgcttgctctgacgaacagcattgaagacgtctccgggcaaactaccgacagggtgctgatgttagggcgtattaaacgtgcgcttgatgctgacgggctccagctgtatgcccagtcgattcagaatgctgaggggaaaggatattacgaaatcctctcgcgcctggagagcgagggagagatgatcacccccgatcgctttattccgctgattgcccagtttaacctgagccatcgctttgatctgaatgtggttgagaagttactggtctggctgcgggataatcccgccacgcatgctggcacgcgcttctccgtcaatttgatgccgatgaccttgatgcaaaaagaggtcgccacggagattatcgcgctcttcgctcgctatactgtcccgccccaggccgtggtcatcgagattaccgaagaacaggctttctccaattcgggcagtagcattaacaatatccagcagctgagggagcatgggttccgtattgctattgacgactttggaacaggctatgccaactttgagcgtctgaagcgcctgcaggccgacatcatcaagatcgatggttgtttcgtaaaggatatctgcagcgataacatggatgcgatgattgtgcagtcgatatgtaatctggcgaaaacaaaatcgctctgcgtggttgcggaatatgtggaaaccccggcgcagcgggatatgctgctgcaccttggtgtcgattatctgcagggctacctgttaggtaaacccagaccgcttgccgaattacgggcataa

SEQ ID NO: 158010 - DNA, 366 bp, Enterobacter cloacae
atgaccacggatgaactggctgactgtctgggcgtcgccaggcaaaccgttaaccgctggatacgccagaagggatggaagacggagggtgttcacggcgtaaaaggtggaagagcaagactgatccatgtcgatgcgcgagtgaaggaacatattattagccttcctgccatccgtcaccggcaggcgatttaccaggtggccgaaacgccctctctctatgggataccgtcatcgtctaccctgctcccacaaatcatcgactcgctggagaacatgacgcaggttgaacaggagcgtcttctcgtattgctgaagcgcgaggggataaaaggatttctctcacgtctcggtattgctgaatag

SEQ ID NO: 158011 - DNA, 789 bp, Enterobacter cloacae
atgtatgttgcagtagggcagtttgcggtaacgccggactggaatgagaatgcgggaacgtgcgtctccctgatggcccaggcgcgacagaagggggcatccttgctggtgcttcccgaagcgctgctggcacgggatgataacgatcctgatatgtcggttaagtcggcgcagtcgctggacggggcgtttttacagcaactgctggcagagagcgctggcaatctcatgacgaccattttaacggtgcatgtcccttctgcgccgggccgggcagtgaatacgcttgtagctatccgtggcggcgagattattgcacgctacgctaagcttcatctctatgatgcgttcaacattcaggagtcgcgacttgtcgatcctggcgacagcgtttcacccctgctggatgtcgatggatttaacgtgggattaatgacctgctacgatctgcgttttccagaaatggcactgaatctggctttacagggtgccgacgtcctggtattgccagcggcttgggttaaagggcccttaaaagagcaccactgggcgacgctgttggccgcaagggcgcttgataccacctgctacgtggtcgcttcaggagagtgtgggaataagaatattggacagagcagggttatcgatccgttgggcgtgaccatcgcctcagcagccgaagcgccagcgcttttaatgacggagatactatcagagcgaattgcgcttgcacgtcggcagttacccgttcttcgcaatcgacggtttgcgccaccgcaattattgtga

SEQ ID NO: 158012 - DNA, 675 bp, Enterobacter cloacae
atgcacacctcccacagcacattcattctcgctaacctcaccgtccaccacgtcaccttcgaccccaccaccttcaccgacgccgatctcctctggctcccccaccacgctgagctttcacacgccggacgcaaacgcaaagccgaccatcttgccggacgcatcgccgccgcgcacgccttaccggatcactccattcccggcattggccccagcggcaaaccgctctggccggacggtatttccggcagcatcacccacagcggcacgcaggccatggcggttgtggtccgcgagcgacaggcgcttatcggcatcgattgtgaagcgatacttcccgaaaacgaagccagagaaataaaggatgggatcatcgatgtgcaggaagagcctgtgctttcccgctcgggatacccgttcgcccttgcactgacgctggtgtttagcgccaaagagagcctgtttaaagccctctttccacgggtgcaggcttatatggggtttgacagcgcccgggtgacaaagcttgacgataagacgcttacgctggcgttgactcgtcaactggcaggctttaacgaaggtgcagccttcacccttcactggcaacagcagggtgaacaggcgatcaccctgctgtcacgctctcctgccgacgggccttcacgctggtga

SEQ ID NO: 158013 - DNA, 303 bp, Enterobacter cloacae
atgttaagtgatgtaaagaaaaaattaattgataataattttgttaatattgttagagttaatatggttttcaatgatgaacagtataatgaattggtctctagtttagaggtgcttgctaacctcttgaaaagtaatcaattcatagataaagaattagctttgtatttatatacaatacctcaaatgataagaaatgcgtatgctagttttgaaaatgtggaaagcaaaccagatttggcttttaaattagaagatgcatggatagagttagactcgctagtaataaactgtttaagctaa

SEQ ID NO: 158014 - DNA, 435 bp, Enterobacter cloacae
atgaaatacccgatcgtactgctgctatctgcttttatagccccggcattcgctggcgtaactgactggtcttctgcacttaagggaatcgcctcgggtgatgcacactggattgagcaagccccagcgctggctgccgtggctgatgggaatcaggcgcagcggctagaggatgccctggccgctgcgctcacaacaaatacggacgccgcgctgaaagcgctccgctccattgacgccggaaaatggccgcacatggtaggcagcgatattgtctgtactccgcctttagagaaatcacccgccgaaatcgacgcgttttatcagcgtacccgcagggcgctgctggaaaccgtagacggtgctcaatgcctctggattctggaggccaccatggaagagttgaaagcagagaaagcccgtcaggctaggtaa

SEQ ID NO: 158015 - DNA, 972 bp, Enterobacter cloacae
atgcgcaataatgcgttggacgtagcaaaacttctagcctgtttcttcatcatagtcgttcacgtgggtaactacccagagttaccacagccctttggtgagcttttcagggcatcatcaagatgggcgcttccattcttcttccttgcctcaggttacctgatgggtgcgtcagcgcaggatgatctcggtaaaaagcttaacaagcttgtaagcatcctcttctggtcatcagttctctatataccgatcctttatagaatggttcagggtgacatttggagggttgccgggaaggtgctatctaatgacacgttacatggcgggacatttttccacctttggtttttaaatgcgcttattctcggtgttatattaacaaattattttataaaaaatgttagtgttaaatgttcattgttagtgtcagtttctattttgctagcatgctggtatggagaccttgtaaagtcactccattatgacatttatattttctacgcattgaggacattgatagccttttcacttgtctatcttggatattactttgcgaaaagcggcatcctaaatcgcatttcaaacggcattgcattatctgtcattatttttggtattgcattgatggtagttgaggtttatgtgctcggcacagcatataacgctgacatgttagaaagacagttcccacttttcgcgactccagtgtgtgttgcactgctaagtctgtgcgtgaatacaagaattgatgataatatcttctcaaaattgggaagggattattcgctaggcgtttatctcttgcacccattaatactgtacattctcacgcatgatgtaggtcagtatattgctaataattccatgcttaaattaataatcagctttatttcatcaattgctgtacttatggtagcgaaggcaattcttccaataacataccgaaagcttaacggaataggtgtgaagtaa

SEQ ID NO: 158016 - DNA, 903 bp, Enterobacter cloacae
atgttccgggatatcgaggagcgatatctcggcatcaagcgcgcgctgaaagatctgttcgaccagcgcctgatcggtcgagagcgtgagataaacagccataactggcacttcctttgccacgaccacggcgaggatatgcggctctaccaggtcaacgccggcaagttcatctacgacatgtcggcgcaggaactggctgacatgctggaggcggtgcagtcaattctcgacgactacctgctggaaggtggcgagcaaaacctgtgggcgatggattacgtcgtcgcagaagcgcagcgcggcacgctggaggcattcaacaacctctcgcagcagtcgcaggtatacgccagccagacgacgctgcagcagcttttaagcagccccggttatctgaatcagatatcggcggccaggctgacaacgttcagtgactggaaggtaatcagcgacactgcccgtggcgacctgaccaacatcatcaccgatgctgtagcgcgcggggttaatcctcgcgagacagccagcgtcatcagcaagcgcctcgatgtgtcgatgtcgaaggcaaagaacattgctcagactgagcaggtcggcgcgctgcgtgaagctcaatggaatgagacggactgggcttccgagaggctcgggctgaatactggtcttctccatctttctgcgttaaagcccacaaccagacaaactcacgcgttctggcatggaaaggtcaggactgtgcaagaggtacgcgattggtatgcagtggatggtaacaaatatcactgctattgcggccagattccggtacttctcaacgacgacggcagcatcttcaaccaggggctggctgataagctggcgaaagagcgtaagcagtggaccgcaaaggaggctgcgtga

SEQ ID NO: 158017 - DNA, 1299 bp, Enterobacter cloacae
atggaaagccaagttgacctccagataccggccaagttagtccccgtattcgcgacagaaggcatccgatatcgtggtgctcatggtgggcgcggctccgcaaagacgcgcacgtttgcacttatgaccgccgttaaagcgtaccaggcggcagaggccaatatcagcggagtaatcctttgcgcccgcgaatacatgaactcgctggaagagtcctccatggaggaggtgaagcaggctattcgctccgttccgtggcttgatgattacttcgatatcggcgagaaatatatccggacaaagaaccgcagagtcagctacgtgttctgtggtcttcgccataacctggacagcatcaaatccaaagcacgaattcttgtggcatgggttgatgaggcagagtcggtatccgctactgcgtggaaaaagcttcgaccgacagttcgagaagaaggatcagaaatttgggtcacgtggaacccggagaaggacggcagcgccaccgataagctattcagaaagaacccaccaaaaagctcgatgattgtcgagatgaactatgtggacaatccatggttccctgcggtgctcgaggaggagaggcaggaagacctggcaaacctcgattacgcagactatgcgtggatctgggaaggtgcttacctcgaaaactccgacaagcaggtgctggcaaacaaatacgtcgtgcagagcttcgaagacgatctctggcagaaatcagagcgcttgttgttcggcgccgacttcggattcgcgaaggacccaagcacgcttattcgcatgtttatcctggataacaacctctacatcgaatacgaggcatacggaaacggcgttgagctcgacgacatgtggaagttctacgccgggaaaacagacgccacgccgaagcaacttgtcgactggaaggttacagacgaggctaaattcccaggcatccctgaagcgcgtaaatggcctatcaaagccgacaactcccgccctgagactatcagccacatcaaagggcaggggttcaatatctccgccgctcagaagtggcagggtagcgtagaggacggcatcacctgcctgcgtgggtttaagaagatcatcatccatccacgctgcaaagaaacagcgaaagaggcgcggctttactcgtacaaaacagaccgtatcactggcgaagttctgccggttattgaagacaaaaataaccactgctgggatggagtcagatacggcctcgacgggtacatcaagcacaaagcgcaagtcggcgcagtattcttctaa

SEQ ID NO: 158018 - DNA, 297 bp, Enterobacter cloacae
atgaaacttgagcctttatttctgctggccttttacctcattccgctgatcgcgatgggggttatcagtcatatcaattacaaaaaaatgtcgctttcagttctcagcaatcagcaaaggaattcggtttcaaagaaagtaccaaatgctgaaaagtcttcacccagaccgggagggattatgaatttttcagaccttctctggtaccaggcagaaagcgttaagcgcgccaacctgccgccagtagcaaagcacagccagaccaaaaccaaccagccacataaggaagccgcatga

SEQ ID NO: 158019 - DNA, 753 bp, Enterobacter cloacae
atgcgagtagataatgaagttctgaacgtgctgagcgcggctgagtgtaatggcccgcaactcttccttaccggtcagcttgatcgcaacctctacacaagaacaaacaaggtactggaggcggctggaggaaaatggaaccgcaaagccaaagcgcacatttttgataccgatgcctccgatcgcatcgagcaaattattcttacgggcgacgtcgtagttccgaaggatgattttgagttctttcctaccccacctgacgttgtaaggcatgttattcacttagcggatatccgggatgggatgcgcgttctggaaccaagcgccggtcatggagcaattgctaaagcagttcatagcgcagcagcagatgtgatgatcgatatgtatgaattgatgccagcgaacaacgacattcttcacggtctcaatctccgactttcaggtatcggtaaaccgactgacttcctcactgtcaatccggatcaggtttatgaccgcgtggttatgaatccacctttcggcagacaggcggacatcaagcacgtttctcacgcactgaaattcctcaagcctggtggtctgctggtatcggttatggcttcatccgttacgtttcgcagcaataagcttacaactgatttccgccagcttatcgaggaacgcggcggtcacatagaagaactgcctgaaggtgcatttaaatcatctggaacaatggtgaataccgtcatcgtggtcattccaggctga

SEQ ID NO: 158020 - DNA, 699 bp, Enterobacter cloacae
gtgacagcgcaaaacctgacctatacgcctccccggctaaagcacatttctcatgatatcaccggcatcaaacttgagcccatcgttgccctcgcctcttcacacaggatcggcgttgaggtgctcagcgttctgtcacccacgctgcaaagtgaagattttttccgcgaacaatcggcagaacagtcgcttatgctgctggaagtgcagctccgtgtgctaaaaaacgcgctcgcctgtcacaatattttcatcaatctgccgataaccgtactcatggtgccagaactttttcagcgtctgctgcaactgcgaagcccaccgttgaatattgagattgtcgaccctgtcgactttttcacactctccgatacacagcggcaggtggtggcccagcgcctgaagcagctgaccatgaagggtcaccgcatctggctggatgacgttgacgatagcgttgtccagcccttcttatcctggccgctgccactcagcggcataaagatcgataaagaaaccttctggcgtatgcgcgccacccctgcgctgggggaactggtttcccgctgttttcggcttgccgggaaggtgcttatcgaaggtattgagactgaacgggatcgttcctgcgcacgccaggcaggggcacaactcggccaggggtattactggccatcctggacatggccggaggattaa

SEQ ID NO: 158021 - DNA, 717 bp, Enterobacter cloacae
atgggaatgacagtgcgccgttaccgtcggcgtcgtacaggaagtgacgcactgggatttacacgctcgccttttgctccccccttctttgaccgactcgaatttttgagccagtccaccaacctgacccataaaactgacgccccgtttatcattctggtcacggaagatcattacctgcgcaccggaatgctgaacgggaatttcccgctaagctgttgctctgactatccggtgctggaagatgccttaagcgcgttgaatcagtggccatccgcgcgtctggtggtcgatatcgacagccgcgccacggctctgatcgacaaactggatcagctaagacgatatagcctctacccgccttttcttaccccccatctgcttgtcagggcagatgattacgatacccgcctgttctgcaaagcggcggggccctttcatgtgcttgaacgtcagttgcccgctgcagcactgcagcagtacctgctggaaacaaagccgccgcaaggctcggtgaaagagtggttcacgcgcagcgaatggcccatactgcaggaactttctcgcggcaaaacgctgcgtcagattgctctgatacaaaaccatccctatagccgcattatctatcgtctcggctgcattttgaccaagctggggttaaaccaccgccaggaattgctgcaccttcttaataatctctcagactgcacgttttga

SEQ ID NO: 158022 - DNA, 672 bp, Enterobacter cloacae
atgaacgatcaaaaaaaacttttgcatatcagggatgttgggttcggcgtggggggaaatacgatccttcgacatgtcgatttttgtctttcaccaggcgaattcaaactaatcgctggtccgtcaggctgtggtaaaagtacgttgctgaaaatagtggcttcgctgttgagcccaacggagggaacaatactttttgaagggaaggatattgccacactttcaccagaacgctatcggcagcaagtctcttattgcgtgcaaacgccaacgctgtttggcgatacggtttacgataacctgattttcccgtggaaaatccgcagcaaaaccccagagcctgacaaatttatcgccgatttagcgcggtttgggctgccgcaggacaccctgacgaaatccattaataccttgtccggcggggaaaagcagcgcgtgtcgctgatccggaatctgcagttcttgccgaaggtgttgctgctcgacgagatcaccagcgcgctggatgacgctaacaaacgcaacgtcaacgacattattcatcgctacgcccgcgagcagaatattgccgtgctgtgggtaacgcatgattcaaacgaaataagccatgcggatgatgtcatcacgcttcagccacagggcggaaaaatgcaggaggccaaccgtgggtga

SEQ ID NO: 158023 - DNA, 1461 bp, Enterobacter cloacae
atgaatatacctggcgatgaattttataccctgatcgctgctgcgctgaaaaagcgcggtgaagagaccttgcagcgcacgctatatcttgccatgcgtgaagctgtcctgcagggaaggctgcaggctgaaagtcgcttaccgggttcccggatgattgcgcagcagctttccgtgtcccgtaacaccgttaatgcggcgcttgagcaactctcgctcgaaggatatctgctgcgcagtcgtcagggtacgcgagtggcgcaactggcgcagcgcggaaatcgacaggattttcccgagccgaccgtcacgctggctaagcgggtgacgcagctgccagtaccgacgccgcgggagacgccggtactcgcttttacgcctggcacgcccgccatcaattactttcctcttccgctctggcggcgcttgtacgatcgcgttttacgcgaggaagggagtgcattgcttggctatggcgatccggccggggaatcctcattacgtgaggcgattgcccgccatcttgccctgtcgcgggggattgattgcgatgccagccagattgttattaccgagggggctctggaaggggtgaatctctgcacgcagctattgagcgagccgggggatatcgcgtggattgaagatcccggctatgcgggggcaaagagcgcgtttgcgaaatcggaattaacgatggtgggcatgcccgtggacgacgagggaatgaactgggaagggcaacatgcagcgcgccctgcactcatctttacttcgccttcccatcagtttccctacgggagcgtgctgagcgcgcgtcggcgcttgtcattgctggcgctggcgctccaacataaggcctggattatcgaggacgactacgacagcgagtttcggtattccggagagccggtgcccgcaatgctgggaatggtcaacaacgcgccggtggtttatctgggaacattcagtaaaacgctgttcccgtcgctccgaatcggttttatggtcatcccaccgtcgctggcaaacgcggcgcgtccggccgttggtgcgttattgcgtgggggacatcgtgcggaacagcgtacgctggcgctgtttattgaagagggccattacgctcgtcatcttgccgccatgcgtcggctctatcggaaacgctaccggcagctgcgcgacgtgctcaacgcggagctacatgtcgcgcatcgtgtgctggcggcggagggcggtatgcacctgacggtggcgattgacgggattaatgacaaggcgattgttcagcaggcgagggcatttcagctggcccccgcggcgttaagcgggtactacctgacgccgaagcaggggcaaaccggtctggtactggggtacggtaatacctctgcttctcaatttgcgtcaggtatccgacgcctacagacgctgattacacagcagcaggacgggaaagcgtaa

SEQ ID NO: 158024 - DNA, 711 bp, Enterobacter cloacae
atgagcacattcaatcagtttggacaacctgttggcgatgaacttatcgactggcaaccccgcccgcacccttcccgcgtgcatcttaatggccgctactgtcggctggagccgctgcgggtggaacatgccgatgccctcttttccgcctatctactggcagaagatacccgcagctggacgtggctgcttcgcgggcctgatgccaccgcaggcgaattcgccgcgtgggtggcaagcgtgtgtgaattaccggatccgatacatttcaccgtcattgataatcagactcaggcaccggtaggtacgctggcgctgatgcgtatcgatccgacaaacggtgttatggaggtgggacacgtgcatttctccccccttcttagccgcacgccgatgtccacagaagcgcagtatcttctgatgcagtatgcgttcgacgtgctgggataccgccgctatgaatggaaatgtaacagcctgaacgaaccttcccgcaaggcggcgctccgtctgggatttcagtttgaagggcgctttcgtcaggctctggtgacgaaaggacacaaccgggatacggactggttctcaatcatcgacagcgagtggccgatgctggcaaaagcgtttgaaaactggcttgccaccgacaattttaccgtcgatggcaaacagatcagatccctggaaagttggcgtgaaacgcgcatttag

SEQ ID NO: 158025 - DNA, 3093 bp, Enterobacter cloacae
atgtctgacacatcaacgctgaccctcagcgcacttctggctcgtcgggactgggaaaaccccggggtgacgcagtggaatcgcctggcggcccacgcgccgtttcacagctggcgtgacgaagcctctgccagagaagaggcgaaaaccccgaacaaacgttctctcaacggggtgtggcagtttagcttttttgcagcaccagaacaggttacgcaggcatgggtagaagaggattataccgatgccgtcgcgatgcccgttccttcgaactggcagatgcagggctttgatacgccgatctacaccaatgtgacctatccgatccccgtcaatccgccctgcgttccgacagagaatcctaccggttgttactcgctcacatttgagatggatgacgcctggctgcacggcgggcaaacccgcattatcttcgacggggtaaactcagcattccatctctggtgcaacggccagtggattggctattcccaggacagccgcctgcccgccgagtttgatctcacggcagcgctgcgttcaggccagaaccgtcttgcggtcatggtgctgcgctggtgcgacgggagctatcttgaagatcaggatatgtggcgcatgagcggtattttccgtgacgtatcgctgctgcataagcctgagacgcagattgcagattatcatgttgtgaccgatctcaacgcggagtgcgaccgcgcaatgcttaacgtcgacgtcgcgctggccggctcctgctattcagcctgcgaagtggtcatcaccctgtggcgaaacggcgaaaaatgcgccagcatcacgcaacgccccggctctgcggtggttgacgagcgagggcgctgggccgagcggctagcggtggcgatccccgtcaaagatcccgcactgtggagtgcggaaacgcctgaactttaccggctgacaattgcgcttagggacgcacagggtgatgtgctggacgtcgaggcatgcgacgtcggctttcgccgggttgaaatcagcaatggcctgctgaagctcaatggtaaaccgctgctgattcggggcgtaaaccgccatgagcatcatccggaaaacgggcaggtaatggatgaagcgacgatgcaccgcgatatcgagctgatgaagcagcacaactttaacgccgtccgttgctcgcattacccgaatcatccgctgtggtacaggctttgcgatcgctacggtctgtacgttgtggacgaggccaatatcgaaacccacggcatggtgccaatgagccgtcttgctgacgatccccgctggctgcctgccatgagtgaacgcgtgacccgcatggtgcagcgcgatcgtaaccatccgtccattatcatctggtcgctggggaatgagtccgggcacggtgcaaaccatgatgcgctttaccgctggctgaaaactaccgatccaacgcgccccgtgcagtatgaaggcggtggggcgaatacggcggcaaccgacattgtctgtccgatgtatgctcgcgttgatcaggaccagccgttcccggcggtgccaaaatgggcgatcaaaaaatggatcggcatgccggatgaaacacgcccgctgatcctctgtgaatatgcccacgcgatgggcaacagctttggcgggttcgccaaatactggcaggcatttcgcagtcatccgcgcctgcagggcgggttcgtctgggactgggtcgaccaggcgctgacgaagaaagacgaaaacggcaaacctttctgggcttacggcggtgacttcggtgataaaccgaatgaccgacagttctgcctgaatggtctggtattcccggatcgcacgccgcatccggcgctgtatgaagcgcagcgcgcgcagcagtttttcacctttacgtgcgtgagtacctctccgctggtggttgaggtgaaaagtgattacctgttccgccacaccgacaacgacgtggcgagatggtcggttacccgcgacggggaggtgctggctcagggtgaggttgcgctttccattccccctcaggggcagcagcgtctggaaatctcgctgccgacgctgacggccgagccgggggaggtttggcttaatgtggaggttatccagccgcaggcaacagcctggtcaccggcgaatcatcgctgcgcgtgggatcagtggctgcttcctacgccgctgtacgttacgccaccgcgggcagtagggatcccgccggtattcacagagcaggatgatgtgctggacattacccatggagagcaacgctggcggttcgatcgcgcctcgggaaatctgacgcagtggtggaacaagggcgttgaaacgctgcgctcgccgctgacggataactttacccgtgcgccgctggataatgacattggcgtgagcgaagccacgcaaatcgatccgaatgcctgggttgaacgctggaaagcggccggaatgattgagatgtctgcgcgcctgcttatgtgtgaagcggaaccgcatactaatgacgtggtcgtgaccacgcgacacgtctgggagtatcgcggtaaggcgctgtttttgagccataaggtctggcggattgacgattgcggcgtgctgcatggcgatgtgcaggtgcaggtggcgtccgatattcccgagcccgcgcgtatcggcctgtgcgtccagtttgctcaggtaccggatacggtgcgctggctggggctggggccgttcgagaactatccggacaggaagctggcggcgcagcaggggcgctggacgttgccgctcgatgcgatgcagaccccctacattttcccgacagaaaacggcctgcgctgtgacacccgagagctcgtctgcggggcgcacgtgcttcagggaaatttccatttctccgtcagccgccacagccaacagcagcttcgtgagacaacgcatcagcacttgctgcgcgatgagccgggctgctggctcaatctggatgcattccatatgggcgttggcggtgatgattcctggagcccaagtgtttcaccggaattcatcctgcaacatcgtcagctccgctatagctttagctggcatcagaacgcactgtag

SEQ ID NO: 158026 - DNA, 1071 bp, Enterobacter cloacae
atgaaagcgatcacactctatgacgttgccctcctcgcgggggtgtcttaccagaccgtgtcccgcgtgattaatggcgcggagcacgtctccacccgcacgcgggaaaaggtgcagcaggcgatggccgaactgcactacgtgcctaatcggggcgcacagcagctggcggggaaacggacccgtacgctgggactgatcaccaccgatctggctctgcatgcaccctcgcaaattgtctcagcggtaaaatcccgcgcggcagagcagggggcaagcgtcttaatttcaatggtggagcatgttcagcaatgccaggctgcggtgcaggaactgctggctcagcgtgtggaagccttactggtcaatgtcccgctggacgatcctgacgcagagcagcttcagaaaatggctttgcctgtgcctgttctgttcctcgatgtttccccttcggcgcaggtcaacagtctggtatttaatgccgggcagggggccgcgctgggcgcggaacatctgatttctctggggcatcagcgcatcgctcttctcagtggaccagagagttccgtttcagcgcgtgcgcgtctggcggggtggaaaacggccctggtgcaagccggtcttgaagccgctgacgaggttcatggcgactggagcgccgcctccggatatgaaaaaggccaccagcttttatccggatcgcaactacctgacgccattctggtcgcgaacgatcaaatggcactgggcgtgatgcgcgcctgcgttgagaagggcattgctataccgggccaaatatcgattgtcgggtttgatgatacggctgacagcgcctggttttcaccgccgctgaccaccgttcggcaggcttttcgtgaggcgggcgagcgcagcgtggaatggctgctgaagccggcgaggagtgaaaaatgctggcaagagcagcttcccgtcacgctgatcgcgcgtcattcgagcgcccgtcgcgcagccgatcgggttgatcgggaagagcttgcccatcaactgagaaatctggcattgctggctgaaaaaatcgcgcggggataa

SEQ ID NO: 158027 - DNA, 126 bp, Enterobacter cloacae
atggaaaatgatacagcagcccacacccgtggctgcatccaggcgcgcaagtataccaccatcgcgctgctcgcgttatttgataattgccccgagtccgttaccatgatggggcgaagaatataa

SEQ ID NO: 158028 - DNA, 261 bp, Enterobacter cloacae
atgaagaatctcattactgagttgttggttaagcttgcacaaaaggaagaagagtcgaaagaattggtcgcccaggttgaggcgctggaaatagtcgtcaccgcgctactcagacatatggctgcccaggatcaacaggcgttaattgacagcattgaaagcgcgctggacaacgccaaacctgattcacaggttccacctgaggacgccgaaatgctccatcaatacataaaaaagctgttaaggcatccgcgcagctaa

SEQ ID NO: 158029 - DNA, 711 bp, Enterobacter cloacae
atgttttggggttatcgtggggggcgcgtgaaaggaaaaagtctgctaaccgttttcattattgtggctgtcgcaacggcgggttaccgctggttgccgtctcattacaacccttttacgccgcttacccttgacgatcctcccggaaaaatcacccagtttaagcttcggcgcttaacgccggaggcctgcgaaagcctcctaaccgaagcaaatctaagagcgcttatccgcacgcagccggtggctgacagcgcgggagcatgcccgctcagtaacgtggtgcgcgtgagtaatttcggtccggtcagcctgaacagcagttttctggccagttgccctctggcattaagctctgcgctgtttgtcagtcagcaggcccggccgctgacgaaaagctggatgggcagcgagcttacgcgcatcgaccatctgggaagctatgcctgtcgtaatatttacggccgcccggatgcgcgtcgcagtgaacatgccacggcagaggcgctggacatcagcgcatttcggctggcaaacggtgagcggatcaccattctgaggggctggtcatcggctaaaacccagccgtggcttcaggctctgctggcggcgagctgtgggtattacggtaacggtctggggcctgaatataacgcggcccacgctaatcatttccatcttgggatgcgcggcttcggcctgtgtcgctga

SEQ ID NO: 158030 - DNA, 1785 bp, Enterobacter cloacae
gtgcgaatcgccacgataacaaactgggcctacggtgccacggtgtgcctgaccctcgcttctggcatcgttatgctcctggcatccaacgccgatagcgttgaacgtcaggccgttaagcaacggcaggtgtttgatcggcttacggaagagatcgagacacatacctggatgctctctgatttagcgcgcctgttcgtcatcaaaaaagaaccctctattcgggaagaatatcggcaaaaagagagcgaattaaaaagcatagagcaccatctggtgcagttaaaagataacggcgcctccggcgaagagctcatgctgcttcaggaaggattaaaaatcattgatgaactgcaggacgagcagcaaaccgcactcgacagcatagcccgtggcgagcaacagcaggccgttgccctgctttatggccctgtctacgaacaagagatggagcgcgcgcagagccagattgatcatttccgccagatactggataagcgcatcattgccgacgtacaggcggccaccaaaacatcgaaagcactgcgcacggtgtcggaagtgatggtcggcctcacggccctgctcttcctgttcgtgatgggctttattctcaagcgtcgtgtacttcacccggtggttcggctgagcgacgtcgtacaccggctggcttcgcaggactatgccgttgaaacgccaaactttacccagattgatgaaataggcgatatggcccaggccatccgcatcttccgcgagaacgggctggtgcgacagcagctggaaaaagagcgcgatgccgactgggcgatccgcgagctgctggctcgtatgacccagcggttgcagggctgtgaaaacctcgccgacgttattaatgtggcagagctgtttgcgcccaatattgcgccgggcgtttccgggcggttatatatttttgatcgcgaaccctggcagatgcgctgcgcagcagaatggttgtccccggagggtgacacacccgcattccatccggatgaatgctgggccgtccggcgcgggcagagccatcccccggtgaacggtgaacctgacattggttgttatcacctgccagaatcgcaagcacacaggtccctgtgcgttccgctcattgcgcagggcgaagccatcggcctgctctctttccagaacatcacccctgaaaccgccccctcccgcgcttatcttgaacttatggctgaagcgctggggctggcactggccaaccagaagctacgcgatgctctactggaaaaagcgctcttcgacccgctcacgggtttgcgtaaccgtcatcacctggaagatacgttgcggacgcaaatggcgcaggccatgcgaagcgagcaaccggtaagctgcctgatgatcgacatcgatcacttcaagagcattaatgaccgctttggtcatgaagcgggtgaccaggtcattaaaagcgtggcgtcgattgttcagcgcgccacgcataatacgggtatggccttccgctacggtggcgaagagttcctggttctgctttccggtgccggtgaagaagaagcgcatgcctgtgcgcagaaaatttacaacggcgtgcacgagctgtcgcttcgctatgggctgaccgagattggtccggtggatgtatccattggtattgccagctacccgcaacatgcccaaagtgacagcctgctgcgcgctgcagacgtggccttgtatcgggcgaaagagctgggccgctcgcggattgtgagctttgggatgctggaagcgagctaa

SEQ ID NO: 158031 - DNA, 510 bp, Enterobacter cloacae
atgaaaaaagatagctatgcctttctgatcccactcatcgttggcgggttggcgttgatatttggttttgttgtctggtcaagccagatttatcgcgtgacctttctcaccgtcctgggagaacagattcttgcggttggcgcattgctgctgccgctggtggtgatggcgatgttcatcgcgaagagagcgttcaaaggcaaaaccgttgttgacgttgtcaaaatttacctcggcctcatcatcatcagcctgccggtggtcattttcgtcatcgttaccgcggcctggctactgggcggagaatactctacctggagtcaaccttaccggtatgaatccggcagccgaaaaagctgttcgggggcgaaagtctatgagccggaactcaagagagagatccgcatctgttacccgcaggggaattattttatcgacagcaccctgtacgtggaaaagcggagtaattcgctgggcatggtggtgctttgggcaatcacacggccctga

SEQ ID NO: 158032 - DNA, 663 bp, Enterobacter cloacae
atgtacagtgcgactaacaacccaatctatttatcttccactgatagactgcccgtctgtcatacgccatctatgcattgctatggttgtgataaaaaatgtcattttgacaattccgcactgcatgaaattaaagagtgcacgggtcttgagtattacatctggcctgacaataatagttttcttgttgaaggcattcgtcatcatttcactgacgtaaatgataaatacattactcagcctgtggtgattattgattttagccataaaaatattaattacttcctgtcagacaactggctggatcagttcaagaacatgagactgattcttgtcaccgataaaaagatgaccgccattgcccattactggttttacaacgacacatccgagacgacgataagctcggtgatcttttacgacgacacggccgaggaggtggcaacaaaactgcagaaaaccttcctcgcgaaaacgattaagcccgcaggcagcaggccaaaactgagccagaatgaatacagtctgtttgcgtttcttttcaacggatggacacccaagaaaatcgcataccgaaacggaaccagtgtcaagaacacctatgcgatgaaaaacagaatcgaacgcaagctgggtgtgtcaattacgcgactcgcaagctga

SEQ ID NO: 158033 - DNA, 1749 bp, Enterobacter cloacae
atggttaaggcacgtaaagagcgtcgttgggccagggtagccactgcggttgcactctgtttgccctgctcttcttttgtcattccgctccacgcggctgacgtggcgcaggttaaaaaagacctgtcctcgctgccgccgatgcgcacgcagtcacagttaacccgcgccgcgcagacgccagcgcagcctgcggtacgcgcgagcacgccggggacggttcaacggacttcgctgccctcgatgcgcacgcagtcgcagtacgccagtacgcataaaaccgtacctacgcaaacgtaccccgcatcacgaccggcaagctacgccgcgacgcagcaaacagtggcacctgagccgaagctcgagaacagtacgagtaacaaagcggcactgaaaacgaattacgatttcttcccgcccgttaaagaatactataagcccgaaccggcctacgcgaacgttcgccaacagggcgcatcggcaagcccccgcgccaccagcggcatgtcgcaaggctatttcaacggtgccagcaccaatgattcgcgggaattcctgcgcagcatggtggcaagagcgctggcgtacagccctgagctgcgtgcggcctcctctgaggttctggcctcggactacatggtggatcaggtcaaaggccagcgtatgccgcaggtgcggctgggcgtaacgtcgccgctgacaaccgtggggggagaccgccagtcgtccaacaatacgcatatcagcgactccagcgggacggtatccgtcaacacccccgtgatcgactggggacgaatcagccatcaggtcgataactcgctggaaacggcaaaagcggcccgctattccaaagagtattctcgcgagcagctggcctataacaccgtgtccgagctgatgaacatgagtcggtatcagcaaagtaaacaggtggcgaagaactatgttggccgcatgaaagagctggtcaacatgctgtcgcaaatcacccaggcggaccgcggcagagaaagcgaactggtgcaggcgaaagcgaaactcatgtccgcacaggcgagtctcgacaacatcgagcatcagctgagcgccagtaaaatcaagctggtgcgcctgcttggcgcagagcctgtgctgccagagaatttgagctggcaggatacaattatcccggcatcggtcgccatcggctcgctggacaagaacccgatgatgcttaacctgcagtccaaagtccgcgcggcggaatcggaagcagaaagcattaaatcggctgcgctgccgcaggtaaactgggtggtctccaagagcaccgccaaggacagtaacggtaacgaagcgggctggtataccggccttaacgtggagtgggaggcgtttagcggcggctctcagcgcgccgctcagatgacggcccgcgcaaaagccaacgtggcgcagcagcagtatgaggtgagctaccgcgatctggagtatcagattaactatcaggtgcaggtgcgcgactcatcattcctgcgtgcagatgattacgagcgtctctcaggcgaaactgaccgcgtgcgccagatgttctaccagcagtggtatcacctgggaaaacgcacgttgcttgatgtgctgaccgctgaaaacgaccactttaacaaccagctttccgccattaataatcgttatgacgggtacatttccaacgtgaacgtcattgccagcgccgcgatgatgctcacctggatgcggatagcctga

SEQ ID NO: 158034 - DNA, 1002 bp, Enterobacter cloacae
atgattccagattatttaacgttcattcgctttcaggataaaaggaaccttctttttatctctatcgtgaccttgatcctgatgggtttttactggaaaaacgccgggttctcctttacccggcaggatgcctggctggcgagcggtatttttgcgctgatcctgtatagcttcattgccgatctcaaggcgttctgggcctataagtgcgtggtcaaaaatgtcgatttatctgtgtttctgcagaaagagaataagccggtgaatgcgatgattgtcgaaccggtgatggtgctcgcgatcgccacgctggttttcgcaggcattattgcgctgatgctcaccctggctcagcctgggatcgtgctgctgacgctgaccatcgtcgcgccgctcatcgtctggggaatgtttgcggcgatgcgttcgatctacatccgacaggtcatcgcctcggcgcgggacaaagggaaatataaacgtctgtcccattatgtcgtcattgccgtcgtcatgtccgtcctcatgaacctgctgacaattagccccttaaggaacagtgaacagttcgatcgctatggccgttacttcaccctcgagtccatcattaccatgctggtgctctgcgcggtggtgctggccattaatctgctgtttttacggttcacgaagcggtatatcttcctggggcatcttttccttaacgagatcgacctgtttttctccccgacgatcccctggcgcagcctgtccgaaaaacctttgtggctgaggctggtgatgctggtgggtgtggagtttgtctggtcggccgtggtgggattgctgctcacgctgctggggtggaaggtgtggtttgaggtgtacttcctgctgagctacctgccttgtctggcctattataccctccacgcctggtggaaatggcataacgatttcatgatgtcgagcgacatgtatctgcgctgggcggagatcgataaagaaaacgccctctggtaa

SEQ ID NO: 158035 - DNA, 1389 bp, Enterobacter cloacae
atgaagcgcacgttaacaggcttaaccctgatgctcgccgcgctgcccgtcagcgtattcgcggattgtctgtccggcagtgacgttgcaaagaacacgtctgtcacgctgtatgagcaggtgtctgtcgttaaaaaacagatttcggagtggcgaatcaatggccgaaacccgtacacccgacacaatatctacaacgatgccggggtgaatgtcgcaagccgctgttcgctggttgaggatacgctggaactggatttatccctctatgggctaacctggtattccccgcgtaagctcggtgcgtttgaagaagatgaccgccgttcacgtttgttaattgagcgccttaagctggtctacaccctgtcggacagcctgcagcttgaggtcgggaagcttccgtccaggccggggctcttcttcctgcgctcgccttcggatctcacgccgcattattacgacggtgcaaaaccgacgcggctttacgatccccagctccgctcggcttatcagtcttcctcctgggctgcaacgctgacgatggataaccgggacgagtcgctttcgctgacgatgatcccgaagctggcgacggtggatgaatactatctgacctccgggaactggtctgcgaatcagcgcggcaacagcagtgaatcctggctgctgagctattcctcccatgtcttccgtgaccatacgccggggatgcgcgtcctgatgggcgactcgctgtcgctcgcgctttcagacagttacaactatacccctcagctcacgctcaatgccgacgtggcgtggcatgcggagcagcgctggcgtcatctgtctgaagagaaaagcgcggagctggagcggtatcagttccccacctcgctgtatgaaacaaaagagaaacagggcgttgagctggccgtgggcgggcaatatacctctgataccttcaacgttttcggcctggaatactactaccagagcgaaggctattcgcgatcagaatggcgcaagcagcgcgatctgatgacctttttgaacaccggcacaggctatgcaccgctcgacagggcatatgattcctataaatacctgatggcctccgagataagcaatacggggaacaaaggcatgctgcagggaaaacattatctcaacgcctggtccagcgtgcagttcacgcatcagattaccgcacagccctatttcatccttaacctgatggataaaagcaccatggcagggctacacctcagcgcaccgctgacgtttattgatgaccagctggaagcgtataccggcgtctattccgcactgggtagcgcaaattctgagtttgcattcttcggtgatgtcgccggtggttatgttggctttaagtattatttataa

SEQ ID NO: 158036 - DNA, 789 bp, Enterobacter cloacae
atgaaacgcagtgttatggcctcactctttttgggtgcctgtctgttttcggcaggggcgtattccgcctctgccgatgacaaagcggtggatattattcgtcgtgcggatgaagtccgttcgccaaataaaccctttcgctacaccctcaccatccatgagtttaaaacgggcgccacgcagcccgacaataaacaggtgctggatatttccatgcgctttatgaagccagaaggtgagatgaaagcggatgcccgctccctggcgcgctttatttatccgccgcgcgacaagggaaaggtgctgctctctgactggtacgatttatggttctacacgccagaactccgccgtcctgttcccgtctctcgccagcagcgtctgattgggcaaatttccaatggcgacgtcattgtcaccaactttgaatatgcctacgacgccacgctgaagggtgaagagccttgcggcgaaacgcagtgctataagctggagttggtgcgtaaatcggctgaagtgacctggccgaaggtggactattacgttgaaaaagagggggataaccgtccttataaagcagcctatttctctctggacaataagttaattaaagaagtgctgtatcaggatttccagatggtattaggcaaaatgcgcccgatgaaaattgtggtgaaagaggcgcgccacggcaagagttattccgtcatgacctacagcgatgtgcgttatgaatcgttacctgaatcggcgttcacccgcgagtctattcagcgaggcgcgaaatga

SEQ ID NO: 158037 - DNA, 2148 bp, Enterobacter cloacae
atgtataacaaacacgttagcaatccccctcccgatcctgttcagcgggaggaggacattgatattgttcaaatccttaaagtactgttttacagcaaagtctggatagcggcgacgaccattctgtttatcattatggggattattattgctaacatctcgacgccggtttacaggagcgatgcgttaattcaggttgagaagaattcctcattaagtattttaaacaagctgtctaccatgctcccggaaggctccggagtgagttctgaatccgaagtttcaatactcaaatcacggttagtgatgggtaaaacggtacgggatttgaagctggatattgtcgcaagagaaaaaacctatcctgttgcgaatgccactctgcagcgtctgttgggtcatgaaccggcgacgctcgatattgcctatttgtccgtaccgaaaaaatggatgaatacccccctgaatctggacatcgcggtttctggagacttcgccctgcacgtgggggatgccgtcgtgaaaggtaaagtgggtgtacctgttcaggccagcggtattgagcttctgatcgaatctgccgaactcacggaaaacaccgcgttcattgtgacgaagcgcaatgagcattcggtcattgaagagctcaaagagcgcgtctccattgataccaagtcgggggggaatggcatgctacacctgagcatgatcggccccgacccggtgacgatcagccagatcctggacagtattgctcaaaactatctggcgcaggacgttgagcgcaaatcagcggaggcaagcaaaagcctggcgtttttaaataagcagctgttgcagatcaaaagcaatctggttaacgccgagagtaaactgaatgaattcagaaagaataatgagtccgttgacctgtcattagaagctaaattcattctggataacgtcgtctctattgatacgcagcttaatgaactgacctttaaagaggcggaaatttccaagctgtataagcgtacgcacccggcctataaagcgttgtctgagaaaaaagccattctggttgcggaaaaagaaaagctgaaccagcgtattagcgcgatgcccagcacccagcaagaaattttaagcatgacccgcgatgtccagatgggtaacgatatttatatgattttgctgaataaacagcacgagcttaatatcagtaaggccagtaccctggggaatgtgcggattattgaccatgcggtcacgcagcagaaaccggtcaaaccgaaaaaaatattgattgttctcttatccgccttaatggggttcctcttttcctccggggttatccttgttcgcaacatgctgataaaagggatccggcaacctgctgagctggagaaacgtggcattcctgtccttgccgttgttcccctggcgcctgagttaacgaagcgcagacggtgccgcgccattccaacctaccagtctgacgagctgctggcgaaatcgacgccaacgtcgctggcggtcgaagcgttgagggggctacgtaccagcctccattttgcgatgctgaaatcggacaacaaaatattaatgatctctggtacgtcgcccggggtcggtaaatctttcgtgagttctaacctcgccgtactgatggcgcaggcgggtacgcgggtcttgttgatcgactgcgatttacgacgagggtatttgcaccgtgttttctctgcggcagaaaatggcgcagggcttgcggattatttatctcaggacgttaatatttcgactgttattcagcacacggaatacccggaagtggattttattggtcgcggacgaatgaccaataatcctgctgagctttttatgtctgagaaattcaagacgctgctcacgtcgtgctcaacgcaatatgacgtgattatcattgataccccgccgatcctgagcgtgacggatgcggccattgttggccgatatgcatcaacatccctgatggtggtgcgctttgagcagaactccctgaaagaggtggaggcagggctgcgccgcttcgatcaaaatggcatcgccatccagggcaccatatttaacggcgtagagaagcgcgccgctgaaccttacacctacggcgactattcctatcaggaataa

SEQ ID NO: 158038 - DNA, 297 bp, Enterobacter cloacae
atgcggcagtcggccagcaaacagggtttttctttagagggccatcttgcccgacagcttacgcctgctatgtgccgtgaatacgatctgatcctgaccatggataagcatcatattgaagcggttacacaactggcgatggaagcccggggtaagacctttttattcggatattggctccagcagctggaaatttcagatccttatcgccggggagcagaaatatccgacatcattttcaaacaacttttttccgctgccgaagaatgggtcaaggttttccagcaggttaaataa

SEQ ID NO: 158039 - DNA, 1140 bp, Enterobacter cloacae
atgaagaaaatttcagttctgtttattttaacctctattattttgcttgcaggctgccagattgcaccgggtagccatattgatacgtccgggaaaaacattgttcaggcacaggatgataaaacgctcaacgacgtcgatatcaatgtgtatcccgttacgccagccctgatcgagcggctgcgggaaaacgtgatggttgcgcagggtaatgccgagctgaacaagcgtctggacgcgtatgagtaccgtattggcgtgggcgatatcattatggtgacggtgtgggaacacccggagctcaccacgccgtcaggccagtatcgcagcgccagcgacaccggcaactgggtgcattcagacgggaccattttttatccttacatcggcaaaattgccgtgaaggacaaaacggtcaccgaagtgagggagatgatcaccgagcatctggctaaatatattgaatccccgcaggtcgatgtggggatcgccgcattccgctcgcaaaaagtgacggtctccggcgaggtgaatcaatccggccaacagcctatcaccaacgtgccgctgaccattattgatgcggtaaaccaggcgggcgggctgaccgagaatgcagactggggcaatgtggtattaacccagggcggtaagaagtcgaaggtctccctgcaggcgctcatgcagtatggggatttgcagcaaaataaactgctctaccctggcgatattctctatatcccgcgcaatgacgacttaaaagtctttgtgatgggggatgtcgtcaagcaaaccaccatgaaaatggatcgttccggcatgacgctgacagaagcgctggggaatgctgaagggatcaatcaaatgacaagcgatgccagcggcatatttgtcattcgctctgaggcaaaacctgatgcagaagcggggaaacaagcggctatttatcagctcgacgcgcgtgatgccaccgcgctggtattaggcacggaatttaagcttaagccgtacgatattgtctatgtcacgacggcgccggttgcacgctggaatagggtgattaaccagttaatgccaaccattaatggtatctacagcctgacggaaaccacgcgctttgtcagaaactggggtaactga

SEQ ID NO: 158040 - DNA, 696 bp, Enterobacter cloacae
atggatacctccagagttattttatcccgatgtaacttcagtaatatcggcctgagtcacttgctatccggcacattcagtaaagagaaaatcatctcgtttgatgaccaaagaaacttgtttgcctgggcgaaggagatcaggagagggtctttttatacgttgtacctggttttacctgattccatatacagcaatattgtttatttccactggttgatttccctacgtagaaaaacaaataacgcagccatttcagaaatcattattgcttatcactcggacatttttccggagctgttttcctgcatttgctcccattacaagcatcgccttgtgaatatcaacaatctcacgaacgatgagatcataaaaaaaatgcatacgcagcgccacccaagcaaaaacaagattatcaagaaatacatcgaactgacgcatatggagttctctgtgttaaagctgatgattgcgggttattccattgatgatatcagtatcgtgcacaacattaagcccaaaaccacctatacgtacaccaacaacataatgaaacagctgggctttaactctttaaagaaaatatactcctgcggcgagatcattaaagcgtcaattgagcatgagataatcagagaaaagaaaaagcagtacaccaatgcgaagatcaaaacccacgaaccacagtttgcatga

SEQ ID NO: 158041 - DNA, 996 bp, Enterobacter cloacae
atgatgcgaaaacccgcatgcgccacgctggctgtcatgatgagtttgctgttcacgcctttctctcaggcaggccaggcctgggagagttacaaagcgcgcttctttaagccggatgggagaattgtcgataccggcaacggtgacgtttcccataccgaaggccagggttttgccatgctgatggcggtggcaaacgatgataaagcgacctttgataaactctggcactggaccaacagtacgctgaagaataaagagaacggtcttttttactggcgttataaccctgctcaggcagacccgactgccgacaaaaacaatgcctccgatggcgatgtgctcattgcctgggctctgttaaaagcgaacgcgcgctggcatgacaaaggctacagcacggcatcggatgccattaccaaagcgctgcttgcccataacgttatccgctatgcgggttaccgcgtgatgttgcccggctcacaagggtttaagctggacaataacgttgtgcttaatccttcctacttcgtgtttcctgcctggcaggcatttgctgaccgcagccatttgcaaatatggcgtcagctcgcgcaggacggacagcggctgctgaagaaaatggggtcgggtaaagccaatcttccaaccgactgggtctctctggacacgaaagggacgctggcccccgcaaacgcctggccgccccgcatgagttatgacgccatccgcattccgctgtacatcagctggtccaacgcgaaaagccccttgctcaccccgtggcgcgcctggttcggtcagtttccgcgtgaacaaacacccgcgtgggttaacgtcacgacgaatgaatacgccccctacatgatggcaggcggtctgctggcagtgcgtgacttaacgatggggcagacggtcggcgagcccgatatcactgcaaatgatgattactattcggcaagcctgaaaatgctggtctggatctcagaacaataa

SEQ ID NO: 158042 - DNA, 195 bp, Enterobacter cloacae
atgaatctcagcgatatcattcaactggtcgtactgtgtgcgctgatttttttcccgctgggctactatgcgcgccattctctgcgtcgtattcgcgatacggcaagattgatgtttctaaaaccccgctaccttaaaccagccggaacactgacacgcgctccgaacgtcaaggcagaccgaaaacatgactaa

SEQ ID NO: 158043 - DNA, 1107 bp, Enterobacter cloacae
atgaaaggctttcgctggtgtgtattcgccgtgttgatgctggcggcaacgaatctacgcgccgcctgtagctggcctgcctgggaacagtttaaacaggactacatcagcgaaagcgggcgcgttatcgatcccagtgacgcgcgaaaaattaccacctctgaagggcaaagctacgcgctgttctttgccctggcagcaaacgatcgtaaagcgttcgatttgctgctggcgtggacgcgcgataatctcgccgggggcgatttagcgaccaacctgcctgcctggctgtgggggcaaaaggacaaagagacctgggcggttatcgacccaaactccgcgtccgatgccgatatctggattgcctggtcgctgctggaagcagggcggctgtggaaaaatcaggactacacccgcacaggcaaggggctgcttaaacgcatcgtcagcgaggaagtggtgaaagtgccgggtctgggcttcatgctgctgccgggtaaaaccggatttgccgaagagaacgcctggcgctttaaccccagctacctcccgccacagctcgcgaactatttcacccgatttggtacgccgtggaccacgcttcgtgaaaccaatctgcgtttattgctggagacggcaccgaaaggcttctccccgaactgggtgcagtaccagaaaaacagaggctggcagctcggtcaggataaatcgctggtgggcagctacgacgccatccgcgtttatctctgggtgggcatgatgaatgataaagatccgcagaaggctcggctgctggcacgctttaagccaatggcaacggtgacggcaaagcagggtgtaccgcccgagaaagtagacgtggcaaccggaaaatggacggataaaggcccggtcggtttttctgcctctctgctcccttttttacagaatcgggacgcgcaggcagcgcaacgacagcgcgtcgccgatcgttttcctgataataatgcctattacagctatgtactgaccctctttgggcaagggtgggatcagcatcgttttcgcttcaccacacagggtgaattaataccggattggggccaggaatgcgcaagttcacaataa

SEQ ID NO: 158044 - DNA, 603 bp, Enterobacter cloacae
atgcgagtaatcatgtttgacaggcagtcgatatttattcatggagcgatacagagtctgcaaaagttaattccggaaatagatatgacggggaccagtcaggctgatgaattatgggcgcagttgtccgcgtcacccgccgctatcgtgatgattgacggggatttaattcagaaagagggcatcgttttcctggaggaaatcatacatcgcttcccggcacttcgcgtggtgatggttctggcgaaaaaagagagccgatggatcgaacaggtgaagcagcgaaacgtgatggcgattattccccgcaatgcgaacccggagcgattcgccgccgtgctggattccgtgtccagagggatgatctgttttcccggggagtggctcaggcagcaggcttcgcaggaggctttattaacgctaagcgagcgtcagcgtgaagtgttgaaacgcctggctgccggggagtcaaataaggaaattagccgcagcctgaatatcagcgcggcaacggttaaagcacatctggaagcgcttttccgtcggctggatgtcaaaaacagaacgcaggcggccatgtactacacccgttcaacggcctga

SEQ ID NO: 158045 - DNA, 339 bp, Enterobacter cloacae
atgccaggttctacgctaaagatatcgtctgctgcgattgcgttaattaaaaaaaatcaggggctttccctggagaaatatcgtgacataaacggaatatgggttatcggatatggtcacatcatccacccgcgggaagattttcgccgtcttatcacccccaccgaggcagaatatttactccacggcgatttgcaattatgcgaggcgctactgcgggaaaatgtgacgatccccttaacccaacagcagcatgacgcgctgatattaatgatattcagcttcggtgaaataccgacgcgggtaaaagcatggcttcaggccgttgaacgggtgtag

SEQ ID NO: 158046 - DNA, 540 bp, Enterobacter cloacae
atgcccgtattaacgaccgcgcgtctcacctgttcaccgctgcacgagcaggactggccattttttctcgcactacagcacgatcccaacgtgatgcgctttgtggcggaaaaccgccctctggcagagatccgcgccgcgttcgattctcgtctcgtcccatggtcgccgggcagcgcgcactggctttgcctcaccgtgcgtgatacggcctcgcaggctccgctgggcgtcacgggttacattcatcgggaagaagattgtgccgaagtcggattccttttcgcacctgcggctcacgggaaaggttacggcttcgaatcgctgcgggcgctttgcgattatgcctttcttcagggcggtattcgtcggcttaccgccaccgtcacggcgggaaatatcgcgtcaaagcgtgtactggaaaaaacaggttttcaactggaaggcgaactgcgcgagaattatcaccttggcggtcagtggcaaaatgactggctatttggcttattgaagcatgaatacctgaataataatccctga

SEQ ID NO: 158047 - DNA, 954 bp, Enterobacter cloacae
atggcaaacaaaaaggtagtcattgttaccggaagcgacctggcggagcaggccatggaaatgttgcagggttttgaggtggtgtttgcgggtcgccagcccacggaggatgggcttattgcgctctgcgagcagcataacccggtggcaatactggtacgttacggcaagataaccgcgaaaatcatggatgctgcgcctgccctgaaggttatttccaaacacggaagcgggatcgatgtgatagaccaggcggcggcggccgagcgtaacattgccgtccgatccgcgccgggggcaaacgcagcggcggtggcggaacacacctgggcgttgattctcgcctgcgccaaatccgtggtgtccctggacacgcgactgcgcgaagggcactgggacaaggccacgcataaatccatcgaactggaagggctaacgctggggctgatcgggctgggggcgattggctcgcgggtggcgaatatgggtcacgtctttggtatgcgggttctggcttacgatccctacgctaaatcaatgccttccgtctgcgagcgcactgataccctgactgaccttctttcccgctccgatgtgatttctttgcattgtccgctcaccgacgagaatcggggcatgatcaatacggagacgctcgcgcacgttaagcgaaacgctatcctggtgaacacggcacgcggcggcttgattcacgacaggtcattgttcgcagcgttaaaggatggaacactgcacagcgcggggctggacagctttaccagcgaaccgctgaccgcgccgcacatctggcagggcgtcgataacatcattatctccccgcatattggcggcgtcagcgcagcgtcatatataaaaatgggaaccgttgcggccagaaatattgtagacgtgttgaatacggctgatgaaagaacgcttaccgtcagccgctag

SEQ ID NO: 158048 - DNA, 447 bp, Enterobacter cloacae
atgttgtcaatgaacagcgagctgtcggcatccccggcaacgtccgggctgatgcatcagcaaacgggtccgctacgttcccgcattctcgatcaataccagaaatggaaagggacccactaccggtggggaggaaccacgcatcgcggggtagattgctctgcgctgatgcagcaccttttcagtgatgccgcccatctggagctgccgcgcaccacgagcgagcagatccatcgcggtgtgcaggtggcacaataccgtttgaaggccggagatttggtgtttttccagacgggcccgaaccgaaagcatgtgggtgtttacattggtgatagccagttcattcacgcttcgagcagccagggcgtaacggtttcaatcctgacggataactactggcaggaacatttcatcaccgcccgccgggtggcgggcgctgcagcctga

SEQ ID NO: 158049 - DNA, 1656 bp, Enterobacter cloacae
atgaaagcagcccgttatggcgtagcgcttctcgcactgtttattgtttactacgttatcccagtcgatctccgcctgttgtggcagccggacgagacgcgctacgcggaaatcagccgtgaaatgctcgcctcaggcgactggattgtgccgcattttctcggcctgcgttactttgaaaagccgattgccggttactgggttaacagcatcgggcagctgatctttggtcactccaactttgccgtgcgcgccggggcgatcttctccaccgggttgacggcgctgctggtcatctggctcgcctggcgcctctggcaggataagcgggtggcgattttctccggtcttatcttcttaacgctgttcctggtctacggcatcggcacttacgccgtgctggatccgattatcgccctgtggctggcggtggcgatgtgcagcttctggctggctgcccaatcgaaaaccgtggccggaaaagcggggggctacattctgctggggctggcctgcggcatgggcgtcatgaccaaaggcttcctggcgctggcggttccggtgataggcgtgctgccctgggtgattgcgcagaaacgctggaaagaggtgcttgttttcggctggctggcgatcctgagctgcgtgcttatcgtcctgccctgggggctggcaatcgcccagcgcgaaccggatttctggcgttacttcttctgggtggagcatatccagcgttttgcgcagagcgatgcccagcataaagcgccgttctggtactacctgccgttcctcgtcgcggggagtctgccgtggctggcgctgctgccgggcgcgctgcgcctcggctggcgtgagaggcaaaatgagggggcagggctttacctgctgggctgggtggtgatgccgctgctgttcttcagcatcgccaaaggcaagctgcccacctatatcctgccgtgcttcgcgccgctggctatcctgatggcgcgctacgcctgcacgatggctgaaaaaggggcccgcgtgctgcgcgtcaacggcggcatcaacctcgcgtttggcgttatcggcgtggtggcggcgctggtggtgtcgccgtggggactcgctaaacatccggtctggacatcggttgaactgtacaaagtcttctgtgccgcgatcgcttttcttatctgggccgcggtgggctggattacgctgaagcagagcgcgcggcgctggtggctcgcggcactctgtcctgccggtcttgcgctgctcattgggtttgccatccctaacctggtggtggattccaaacagccgcagtcgctggtggataccgtgcgtatgccgctggaggagagccggtttgtgctggcaaacaacgttggcgtggcgtcggggctggcgtgggaactgaatcgtcatgacatcattctttttggccagaccggggagctgaaatatggcctcggttacccggatgtgaaaggacggtttgtgagcaatggtgacatcgcacaatggctcgaaacgcatcgtcagcaggggccgatatcactggtgatcctgctttcaaaaaacgatgacgttgcccgcgccgggctgccgaaaccggacagcctgacgattcaggggcgtctggcctacctgcaatatctgccgcaatga

SEQ ID NO: 158050 - DNA, 327 bp, Enterobacter cloacae
atgatggcctggatctggctggtactggcaagcctgctgagctgcgcagggcagctgtgtcagaaacaggcaacccgggcgaagggcggtcagcgaactgccctgtggcttgggctggccttgctgacgcttggctgcgggatgcttgcctggctggtggtgttgcagcttctgcccgtcggcgtggcttaccccatgctgagcctgaacgttgtctgggtcacgctggcggcgaaaatcgtctggcatgagtccgtcccgtcacgccactggctgggcgtcgggttgattatcgtcgggattatcctgctgggaggaagcctgtga

SEQ ID NO: 158051 - DNA, 405 bp, Enterobacter cloacae
gtgaaaggggcatgttgggcgttatgcagcgtggtgttggtcagcgtggcgcagctggtgctgcgccacgccatggtgacgctgccgccggtgagtgacgccttttttgctgccctccggcacgccgcgcccggcacgggaaccttgatgctgggtctaacgggctatgttgcctcgatgggctgctggtatctggccctgcagcgcatggcgctcagtagagcctatgccctgctgagcctcagctacattctggtgtggggtgccgccgttgtgctgcccggctggggagaacacttttcctggcgcgggctggcgggcgttggcctgattattctcggcgtactgacgatctttatgccgcagaggtattggggtaagaaatcgactcggcggtcaaggtaa

SEQ ID NO: 158052 - DNA, 474 bp, Enterobacter cloacae
atgaaatatttatcccccgccgagtaccttcctcacgacgcgcccatgatgctgctggagaccgtcgagagcgtcaccgacaatggcgcagcgtgcagcgtcacggtgagcgggcacggcgtgctcgccccgtttctgaacgccgacggcgacctgccgggctggtttgcgctggagctgatggcgcagaccgtcggcgtctggtctgagtggcatcgcctgcaaaaagggctgccgcacagcccgctgggcatggtactgggcgcgcgtgaactggtatgcgccgcagggctgtttaccgcaggcaccacgctgactatcaccatcgaacggctgatgcaggatgaacgctttggcagcttcgagtgcgtcatccacgcggataacgcctccctcgccacgggccgggtgaacaccttccagccgagcgaagaagaattaacatcacttttcaatcagggaacgccatcatga

SEQ ID NO: 158053 - DNA, 579 bp, Enterobacter cloacae
atgatccgattttaccgcctggcgatatgtcttctggcgctgctgctggcagggtgtagccattcgccgaaccgcgatgacgcgcggcccgaggcctggctccagccgggcacccgcgtgatgctgccgccgccgggtatcaccccggcaatgagctcgcaacagctgctgaccggcaggttcaacggacacacccagtcgctgctggtgatgctgaatgctgacgagcaaaaggtgacgctggccggcctctcctccgtggggatccgtctgttcctcgcgacgtatgacaataccggtatccataccgaacagtcggttgtggcgccggagctgccgcccgccagccaggtactggcggacgtgatgctcagccactggccactcagcgcctggcagccgcagttgccgaaaggctggacgctgaacgatactgacagcagacgcgagctgcgcaaccccgacggcaagctggtcacggagattgtctacctgaaacgcaaaggcaaacgtgagccgattagcatcgagcagcatgtttttaactaccacatcaccattcaatatctgggtgactga

SEQ ID NO: 158054 - DNA, 354 bp, Enterobacter cloacae
atgaagatccatgaaatcgaacgccgccagcccgatgcgacgcatctggagatcgacctctatctggagccggccctgctctggtttaaggggcatttcgccgtacagcccttgctccccggcgtggcgcagctcgactgggtcatggactacgccaccacgctgctggcaccgggctaccgttttcacagcattcagaacgtgaagttcgcggccccgctgctgccggagaacagggtgacgctgctcctggcctggcagcccgaacgccagatgctgaccttcagctacctgcgccatgccggtgacgaacgccatattgccagcagcgggaagattcgcctatgtcagtaa

SEQ ID NO: 158055 - DNA, 1350 bp, Enterobacter cloacae
atgcataaaccgcttccgctcagccagtggctcagtgcgccccgccctgacgatacgccgatagcctggcgcgacgatggcgtctggacgctcggcgatctgcgtcacgacgtgacgcagctggttaacacgctgcgtcaggaagagggcgagcgctggacgctgtgttttgaaaacggctatctgtttacggtcgccctgctggcgacgctgcacgcgggtaaaacgcccgtgctacccgggcacagccgggccgcgcagcttaacgaacagcgggacttgttcagcggcgtcctgagtgacacagcgctcgccttttcagggcgacagcggttggtggcctctaccccgcgcacagacggcggtttttccccgctgccagccatagacgatacgcgcgccatcgagcttttcacctccggctccaccggcgcgccgcagcgggtggttaagccgattatcagtctggatcgtgaagcccgcttgctggcggaacagtttggcgatcgccttgcgggctgccatgttgtcgcctccgtggtgctgcaccacctgtatggcctgacgtttcgtgtcgtcttacccatggcgctcggcctgccgtcacggaccaacctgctcaactatgccgagcagctctcagccctgccccactacaaacgctatctttttatcagcagcccggccttcctcaagcggctggatacagcactgacgccgccccccgttgccctgctcatttccgcaggtggcgtattgccctggcgggatatcaccgcgtttcagggttggctcaacctctggcccgatgaaatctacggcagtaccgaaacgggggtcatggcctggcgtcaccgtcaggatgagacaacgcgctggcagccgttccccggcgtgacgtttcacgacggtcgcgtcacgtcgccgctgatccacgagccggaaggcgtcgtgctggatgataatttacacttcacggccgacgggcagttcagcatcgttggccgccgtgggcgggtggtcaaaatcgaagacaaacgcatttcgctcgatgaaattgagcagcggctgctggcgctggacggcatctgcgacgccgccgcgctggcggtgacgcgcgggggacgtcaggccattggcgtgctgctggtgctcagtgacgacgcgcgaatgcacagagaaagcgtggggaaaaatgcccaggaatccgcctggcgccgcgcccttcgcccctgccttgaaccggttgccgtgccccgctactggcggatcgtcgatgaaatcccggtcaacagcatgaacaagcgtgtgactgcgcagctacaggagttatttcatgaagatccatga

SEQ ID NO: 158056 - DNA, 600 bp, Enterobacter cloacae
ttgtggaacagctccagcgcgaagcgtaacgtgcctgcgattccattcatcccgatactgacgggattaatgctgctggcatggccttttctgattggcttcgggctggcaaacaacaatttgcacgggatactgcccgtgatagcgcttgtgctgctgttgcgggtctggcaggtgcgccgtcagagcggccctctgcgcaacatgatcctgggcgttgccctcacgggcgtggcgctgtgcgcggcgagctatgtgctgcacgctcaccagtgggtgttgttttatccggtggtcgttaatctggtgatgctggtggtgtttggcggatcgctgtggacaaccatgccgatagtagaacgatttgcgcggctgcgtgaaccgactctctcgcccaccggcgtccgctacactcgcatcgtgacccgggtgtggtgcggcttttttatcggcaacggcgcgatggcgctgtttaccgtgctgcacgccgacatacgcctgtggacgctgtggaacggcatgattgcctacatcctgatgggcacgctgatggcctgcgagtggctggtgcgacaacgggtaatgaaaaaagatgcataa

SEQ ID NO: 158057 - DNA, 675 bp, Enterobacter cloacae
atgctcgcgaatggagtcgcgcccatttctatggaaaggaaatatctcgccttaaacagtgcgcttctcttctggttgctttcgcttgccgcctggtgcttcgccgcccgtcaactcgcatggctcttcgcagcattctctttattggctttcacgcttcccctgcttatcaacctgggtaatgttatgtttaaaaagaataaaattaatgaaatcaaggtgccaactgcccttcccccggctcctgtcatggaaaaagaacctaccgccaccgagaagcacggcaccacggtgattgccaacgacgtccgcgttgaaggcaatatcgtttcgacgggtcacgtctatgtgcacggtgagctcatcggcaatattgcctctgaacagagtctgatcaaaatcatgcgcgggggacgggttgagggaaatatcacctgccgcgagctgattattgacggggccgtgactggagaatgccacagcgatgccattgaaatctgcgaaaacggtgaggtaacgggaacgctttcctaccgggcgctggccgtcaaaaaaggggggatgttttccggtattgcagagatgctgcctgccgctatcgaaaagaacaacgtcgttggcctgatcaaggacagcaccgctgacgctcctgaagcgtgcgagcttgccaaataa

SEQ ID NO: 158058 - DNA, 684 bp, Enterobacter cloacae
atgctaacagtgcccggcttgtgctggctatgccgaatgccgcttgcgctcagcgcgtgggggatgtgttccgtctgtacccgctcgctggaaggacgaatcgccgggtgtccgcagtgtgggttaccggcagccagcctggcgatcccctgcggtcgctgcctgaaaaaagcgccgccgtggcaagcgcttgtggcggtggataattatgttccgccgctcagttcacttatccacgcgctgaagttttctcaccaaagcgtactggcgacgcctcttgcccgcttgctgcttctcgccgttttgcaggcacgacgaacgcgcgcgctgccgcgggtcgacatgctgatgaatgtccccctgcaccaccgtcgccactggcggcgcggctataaccaaagcgacctgctctgtcgtccgctcgcccgctggctcggatgccgttacgctgcctcagcgctcagtcgcgtgcaggcaaccgcaatacagcatcagctcagcgcgcggcttcgcaaaaggaacctgaaaaatgccttccgccttgaattgccggttcacggcctccatatcgcgcttgtggatgatgtcgtcaccacgggcagtaccgttgctgaactttcccgactgcttttgcaaagcggcgccgcgtcggttcaggtatggtgtctgtgccgtaccttgtag

SEQ ID NO: 158059 - DNA, 1758 bp, Enterobacter cloacae
atggaaaacagcgaaacgttatccccttctacgcgcgtcgctatcgtgctggcgggcgcattacagggagtgatttgctatttaatcacgtggtatatcgactacgcgaaattgccctcagatacgctgtggttactgtgcgtgatacccgccaccgtgatgatgaccaccacgttctcactttcaattacctcgatcagaaagccgcttttgtggctggcgctggggattattggtgtggctgtcgcgggtatggggggctggcttaagtggagcgttgccgggctggagagttgggatatcagagatgccgtgctctttttcggcgttcaccttctgctgatgacgcttttcctgctgccatggcttcaaaggcgtctggagcccgcgtccacggttccgttttacagcgatttctacgataaaaactggcataacgccctgacattactcctcgtttttgtttcgaatggcctcttctggctggtgcttttcctctgggctgaactgttcgaactcattggaatacgcttttttgatcgccttttcttcaatactgactggtttatttcagtggcgattggcgtggtttcggcaagtgcagcagtgctggcccgcgtccaggtacggctgattctggcattgcagaagctgctcacgcttattgcaactggcctgcttcccctgatggcagcgctggcgctgctctttattggcgcattgccctttgttggctttgaggccatttcagcgcggatatccgcagcgggattgttaaccacgctagcgctattgctgttatttctggtaacaatagtctggcatccgcaacgtcaagcgcttccttacttcgcaccccttcgtggaatggttcgacttgccgtcgctatctcgcctgcttatcccgtcctcgcagcctgggcactttggctgcgtatttcacagtacggctggtcgccagagcgtctttacggcgtgctgataacgacggtggcgctggtatgggccgtcggtttttgcgtcagcattgtgtttaaccgccgtgaaccgcagaagattcaggcgtacgttacaccggccgctggtttgctttctctcgccttcctgattttgatccacacccctgtgcttgacccatggcgtatcagcgttgcaagccatatggcccgctatcaggacggcagaataaccgcggatcaggttagcctgtacatgctcagcaacgccggacgaaagggtcgagaggcaatgctcacgcttcaaaacgatccgcagtttatcgctaacccaaaacgccagcgtgaggtaaagggtctgctctcaggaagccgtgacggggcagggaagatgaccgccgcgatgctggaaaaacagatccagcttgcgccgggaatggcccgtcctgataaggcattgtggcaagccatgctcagcaatcagtatcgctttgagagctgcgatagcgcccagagtaattgtttactcatgccgctcgatctaaacggagacggcaagccggaagccgttctatatcaatttaccgatcgcaccataatggcctacacacgaaccgacacaggctggaggatcgccggtgacgcgtggaaaatgcctgaggggttgaccagagaagaacttgaccgcgcattacggcaggggaaggtgaaatctgtcgtgaagccctgggcggatattgagattttcggggaacgtgtcgatatgagttacgacagttacaacaacgcgcagtggcgttag

SEQ ID NO: 158060 - DNA, 777 bp, Enterobacter cloacae
atggctttcaaaacctggcaaacgggcattcatattcaacaagatagggtgcgcatcgtagcgctgaccaaagagaagtcagggtggcgtttacggcgctggtgggctgtttccctggcagacgggattatccgcgacgggaaaattctcaagccagagcatctggttgccgcgttacgcgactggcggcgggcgttgccccattaccaccgggtattcctctcatttcccgctgcgcgcacgttacaacgctcgctgccgcgcccgtccatggcccttcgtgacagcgagcaggtttcctgggtgggttccacgctgtcccgggagctggagatgtccacagacgggctgtgctttgactatgtggaggacacgttcagcaacacatttcatgttacggcggcgcaaaacaacgaagtcgatgcccttttgttgttggcaaaaacgctgcgcttgcggttagcggctatcacgccggatgcaggcgcgttagggaatcttctgcctgccgttgcccctgctcagtgcgtcgcctggcgggatcggcaccagtggctgtgggcgatgcgccaccagtggggacggcgctacgccacagaagcgaaagatgtcatcgagctggcggccctgcttgcactctcttctgatgacatcgttcagttcgatgccacacgtgacccctggaaactgctggtcagttgccagcctcccttacccgagtgcggtgctgattttaccgtcgcgctggcgttggccatgagtgaggtgcctgaatga

SEQ ID NO: 158061 - DNA, 495 bp, Enterobacter cloacae
atgagcacggcgaattttttaccgtggcgacagcagcgccggatgcgctgcctgcgcttctggggcgtgctgtttatcgcttcattgctggtgacgctgaccctcgggcttggcctgcggatgaatcatgacgtgaagctgcgtgggctacagagtgaactggcgggaatcaacgcggtgcagcaaatactgaaaacacgtcagcgcccctctgcacccccagcaacgactgaggtggaatctcgtcccgtcgcatggcaaccggcactggagtcactctctgccgtgatgccagcgcaagcctggctttcagcgttacgttatcaaccgcctgtgcttacggtgagcgggtatgcctccgccctcccggcgcttgtggccatgacggatgcgctgaaacaggtggcagggtttagcttcgggtctgctggtgaactgcagcaggatagccagggccgctgggtgttcacttttcagcttaagcgccgggggtag

SEQ ID NO: 158062 - DNA, 258 bp, Enterobacter cloacae
gtggctccagcccggcgcgagatgccgcccgttcagcccttctcgccgctggattttcaggacaagagaaccgcgctggtgcactggaaaccgcagcagaacggcggggaactggtgctggatgcgctatggtcagatgtcccagcgctgttttcccgtctggcgcagcaggcggtgagcatcagagcattttaccttgtccctgaaggcgcaacgctacgcctgagcctgcagctggagagcgatcatgcgcagtaa

SEQ ID NO: 158063 - DNA, 300 bp, Enterobacter cloacae
atgactgaacttgaacagcttcaggccagcgctgagcaggccgcagcactgatgaaagcgatgagcaacccgcacaggctgctgatcctctgcacactttgcggctcaccgaataccagcgcgggcgatctggcgcgcgcgacggggctgagcgcgtccgccacgtcccaacatcttgcacgcatgcgcgaggaaggcctgatcggcagtacgcgggatgcccaacgcattctctacgccattaagaatgacgctgtataccagattatcagcaccctcaaacacctctattgcccgtaa

SEQ ID NO: 158064 - DNA, 522 bp, Enterobacter cloacae
atgcctcttcctctgattacgccacagcaggcaactgcgcttattgctgaaggcgctaaactgattgatattcgcgataccgatgaatatgcccgcgagcatattgccctcgcccactccgtcccgctggattccttacccggcgcacttcaggctcaggcaggggaaacggtgattttccactgtcagtccggtgcgagaacgtcgaacaacgccgcgcgtctggtacaggcggcctctcccgcgcgggcatacgtcattgaaggtggcattcagggctggaaaaaggccgggctgctgaccgtcgaagataaatcacagcctttgcccctgatgcggcaggtacaaattgcagcggggctgctgatcctgctcggcgtggtgctgggctacacgctctcagacggctttttcctgctgagtggttttgtgggggcgggcctgctgtttgccggtctgaccggtttttgcggcatggcgcggctgctgaagatcatgccgtggaaccgtcgtacctcgtaa

SEQ ID NO: 158065 - DNA, 180 bp, Enterobacter cloacae
atgttttctgttggtgattatgtgcagccgcgtcagggcggtccaaaactgaaagtgctcgacgtgaaggacgacagcattgtggtcgtgcaggccagcaatgaacagggcgagacatttaccctgaaagccgcagaggtgacgttatataccgaagccggtgattttggcgtctgctga

SEQ ID NO: 158066 - DNA, 405 bp, Enterobacter cloacae
atgtctttgacgttacagaatcttaataatatccgtacgctgcgtgcaatggcacgtgaattatccgtcgacattcttgaagaaatgctggagaaggtcaggatcgttgttgaagaaaaacaacacgagcagtcggaattcgagcagcaacgtgcagagcagcagaataaaattaatgcgttgctggaacggatgaaagccgacggtatttcaccttccgatctgctcggtactgaacgcgtgcaggcgggcaaaccggcgaaaaaacgcaaagtgcgtgaagcgaaatatcgctttatcgatgtgaatggcgaagagaaaacgtggaccggccagggccgcacgccaaaggcgattgccaatgcgctggcaaacggtaaaacactggatgattttctgatttaa

SEQ ID NO: 158067 - DNA, 345 bp, Enterobacter cloacae
atgtccggtaaacgcatcgcaagagaaaaagtgacgatcgacaaaatgatcgccttatatgagaaaaaatgtcctcaggcttcaacagaggaggggcattatcaggcgcttagggcatatgccgataagcgtctcgataaatgtgcgtttggggaagaaaagccggcctgtaaacagtgtcccattcactgctaccagcccgcgaagcgagaagagatgaagcaggtgatgcgctgggcggggccgagaatgctgtggcgtcatccgattctgactctccgtcatctgattgacgatcgtcgtccagtaccggcgttgccgcaaaagtatcgtccgaaaacgtaa

SEQ ID NO: 158068 - DNA, 231 bp, Enterobacter cloacae
atgcaagcgattaccgctacaaaaacgtaccgtcatttaaaagtcggctattttagaaagcgccatgaagatcgtaaaaccaagatcccgcgccgatacagtatgcacgctgccctgagtctcaaaggcgactggcttgaaaaagcgggttttacgacccattcacgggtcagagtgggcgtcgaacaggggaaaatcatcattgagctggtggaagaagacgggaaataa

SEQ ID NO: 158069 - DNA, 483 bp, Enterobacter cloacae
atgacgaaaaggacaatcgctatactgtgcctggtgttttttgccgcgggcgcgctgatttcctggctttatcatttgcgcctggaaaaaatggaaaacacggaagcctgttcggcctctatcgtcgtgtatcacgagaatgcacgtgccaacataacgctggacttcatgtatacgatgaagacgcaaaccggcatcgtagcggtaagcggtacgtattataagaacgataaagtgataggggttatccgcagggatgtctcctatgtctggacggaaaacaaggactccttccactttacgtcgctcaatattcatcatgtgaatgatgatgaatcactgcccaatgacgttatcagcgatgttctgcccgacttctttgtttatccgaataaaaaaatgaattattcaattacaaaacaagggcctaaggggtttatgttctccgtgggtaagcgcccaatattcttctgcgcgcgctga

SEQ ID NO: 158070 - DNA, 828 bp, Enterobacter cloacae
atgttttggataattaacgataatattaaattttgtcctgacaaaaacgtccttgtctcgttgaataaacctgaattaagcgtaattctgacaacgccagcaagtcgttgtctcgcgcttttactggaatcctcgccagaggtggtgaaccagaaagaattcttcgataaagtgtggggcgaggacgggatgatcgtcccggcaaatacgctttatcagaatatctctattatccggcgcggtttgcgttcggctggagaaacgagcgacacgctggttgcgacggtgccgagaaaaggtttccagattcataaaagcgtaaaggtcacccgcgttgaaacggatggggtggatacagaagaaccagcagaggtttcgttgcccgaagtgcctctgacggtgcctgtcgaacaactggcggtgaatacgtctcaggtgctggtcgaaaaaaaatcgccgcgtaaattacgtcgcctgttttttcctgtgctcttaatgattatctcctttgcactgggctatttcatgctgcatcacatcttccgagataatccggataaagattttttccagaattacaccattaaccgaaccgaaaacggttgccactatttctcgcaaagtgatgatattaaaagtattggtaatttctcgcgctttattaaaattatcatgaaaaccgggcttgattgtaaaaagtatccgtggatttatttctcttcttccagcaatgcgcctgccctgtccgtgctcgcctgcagaaagccttatgaagcagaacccaatgcagaatgcacggcattgtatttcaggggatatatgcaatga

SEQ ID NO: 158071 - DNA, 888 bp, Enterobacter cloacae
atgtttactctacagcgtacggcgatgtttatcgcagtcgcggaggcgggcagcttcaccgccgcggcagaggcaatggggctgacaaaagccgtggtgagtttcaacattcgccagcttgaagacgagctgggcgttacgctgctgctgcggtcaacccgccgtctgaccttaaccgaggcgggcgcgctttttcatcagcgaagcgtcgcgcttctgaaggaggcagaacagctgcaggacgatgtccgcgcgaatcatgcgggactctccggagaattgcggataaccaccacgcccgagtacggctcgcaggttgtggtgcctttgctggcggaatttagtcagcagcacccggaacttcgcgtgcgccacgtttcgtcctctttgcatgccgaccttatctctgagcgctttgacgtcgccatccggctgggaacgctcgccgattcacgctaccacgccgcgatgattacctctttcgccatattgccggtggcagcgccgaactggctggctaaccatccggtagagacccttgaacagctggcgaaagccgactggatcatccacgagcgcttgccctctccactgcgctggcaggtgaaagcgagcagcggagagcttgtctcgtttgaaatcacgaaagccccgcgtctgtatgctgacagtgctcaggcgctgatggctttcgcacttgccggaagcggcgtggcgttactgcctgaatggcttgtgcgaaatgcgctggatgcagggcaactggcgtcggtattacccggctacacctttgcacagcagggtatctatgcggtttatcccgatgcccaacacgtgcccgcgaaagtccgaaagtttatcgattttatgcgtgcgagggtgaattag

SEQ ID NO: 158072 - DNA, 378 bp, Enterobacter cloacae
atgacgctttttgaacacgacattatcgacctccacattgcgcttgaaaactggttaggcaaaggtgaaggtgaggctgaaaccttgctcacccgctttcgaccggattttctgatgataccaccgggcggcgcacatcttgactatcacgcccttgcccatttccttgatacccagcgtggaagccgacccggcctgaaaatcgtcattgatgaactcgccacgatagaagcctgggataacggcgcagtacttcactatcgcgagacacaaacccgccccgatatgccgctaaacgtgcgctggtcgacggcggtgctgaatcaggaaggcgacagaattacgtggcgcctgctgcacgaaacggcgcagccgtag

SEQ ID NO: 158073 - DNA, 276 bp, Enterobacter cloacae
atgccccaaaccacgtctcactcccccttcaatgttgtgtcgatgcacggtgaggaagagcgccactccttcatatacttttctcgtcagttacccaatgaggcagcgcttcaccataaaacggccttcagccgtaccaaaactgccgaacacttatctctcattctgattaccctacaggtgctgtacagaatgaaccaggcgaaagctatgattcaggagtgcaactatgagttcattaagccaggcggcgagcagcgcagagaagcgcactaa

SEQ ID NO: 158074 - DNA, 324 bp, Enterobacter cloacae
atgccagttgccgtaaacagagaaaaaggatttagcctggttgaggttctgcttgcgatgatgttgctggtgataatcgtcacggcactgtcgggttatcatcgggcactggcgacgcgatttaccctgtttaaccagtatcgtcagctctggcatcatgcctggaatcaggctcagctctcaacacccatactccccgaaggctggcaggccagtcgggtgcagacaacgcacgccagatgtgtcagcatcacggttacacttatttctcctctggggcggcgcggcgcgatgacgcgtctgcattgcccggttagccagtag

SEQ ID NO: 158075 - DNA, 555 bp, Enterobacter cloacae
atgaaccagcacggtttctcacttacagaggtcttgattgccacggctatcagcagccttttgctcataagcgcatcccgttttttaccgggtttacagcgggcggtattactgcagtccggtcagcgggaggtggaagaagaggtctggcaaagactttttgccctcggtaaacagctgcagagagcgggatattgtgcgggtaactgtccagggcaaggcctggtgacggcaaggcaggggagctgcgtcattgtgcagtgggatgcaaacagtaacggcatctgggatgcctctgcagcagaaaacgacagcacagggtttcgtcttgagtctggtgcgctagaaacgctgcgtggggcgacatcctgtgaaggaaaaggatgggaaaagctcactgacccgaacaggctggtgatccagcactttagggtggataaggtggaacacgccggtttcgcgcctgagctgaatatcgaactggccgccattcgccagggtgaaaagggtgagcccttccaggctgtttatagcgtcacggggtataacttgtga

SEQ ID NO: 158076 - DNA, 477 bp, Enterobacter cloacae
atgacgatcctgccgctgtacgccgcgccgcagtttgcggagcaggcgatcgactggatttggcgggccttcggtgacggcctgccgcgtgaatttttccagagcgttatcgatcacagccagacacccggcgcgctgccgctgacgtttattgccgttgaggatgaacggcttctgggcaccgtcggattatggcgctgcgatctcatcacgcgtcaggatctttatccctggctggcggcgctgtacgtggatgaggcggcgcgaggaaaaggactcgcggggaagcttcaggagcatgttattgcgtatgccgcgcaggccgggtacaccgagctacatctgtggtctgcctgccgcgacttctacgaacgctacggctggcagtacattggcgatgggctggaatacccgaatacgcaggttcacctctaccgttattcgctctgtgcttctgcaagcgacgcaacggaatga

SEQ ID NO: 158077 - DNA, 1434 bp, Enterobacter cloacae
atgatgtacaccatttctaacgcagaacaggaactccaggctaaacgcgaggcgctgaatctgcgctggtatccgcgctaccacctggccgcccgtgcgggctggatgaatgacccgaatgggctggtttggttcgatggctggtaccacgcgttttaccagcatcacccgtattcaaccgaatggggaccaatgcattgggggcatgcgcgcagtaaagatctggtgcactgggaacatttgccggtggcgctggccccggaaggcccggaggacaaagacggttgcttctccggttcggcggtggtcgatggcgatacgctggcgctgatttacaccgggcataaatttcatggcgatcccagtgatgaggccaacctttatcaggtgcagtgcctggcgaccagtcgcgacggtattcactttgaacgtcagggtattgtggtggacaccccggcagggatacatcatttccgcgatccgaaagtgtggcgtgaaggggatgactggtacatgatcgttggcgctcgcgacggtgataccgggcaggtgcggctatatcgatcggccgatctccgccagtggcaggacgcgggtgtgcttgatgaagcggaaaaagagatgggctatatgtgggagtgcccggattttttcaccctcaacggcaagcgcgttctgatgttctctccccagggactggaggcaaacggctaccagaaccgcaatctgtttcagagcgggtatctgctcggcgaatggcagccagggcaggcgtttgcccgcgagggcgactttgttgaaatggatcacggtcacgacttttatgcgccgcaaagtttcctgacgccagatggccgacgcattgtcattggctggctggacatgtgggaatcgccattgccggagcaacgggacgggtgggcaggcatgctttcactgccgcgcgagctgagtctgagtgcggacaaccgcctgcaaatgcgtccagccaaagaggtcgaggggatgcgcggtgcctggttcccgtggccgatcgccaccgttaaaaaccagcaaagcgttatgatggaaaacggcgaggcgctggaggttatccttcactgggactgcgcaaacagcagtgcagaacagtatggactccgtttcggtaatggcctgcgcgtgtatgttgatgcgcagatgcagcggctggtgctggagcgtcattatccgcagtatggactgtgcggcgtgcgcagcgtgccattaaccgccgggaaggcgctgacgctacggctgttcttcgacagttcgtcagtggaagtttttgttaacgacggtgaggcttgcctgagcagccgtatttatccggatgccgaccatcgggatttagcgttattcgcctggagcggtttggccgttttaaccgaggctggagcctggcaacttgagtaa

SEQ ID NO: 158078 - DNA, 996 bp, Enterobacter cloacae
atggcatcgcttaaggatgtggcaaagctggccaatgtgtcactgatgacggtatcccgcgcgctaaacagcccggaaaggctaaaaccggagacgctggcccgggttcaggccgctattgaacagacccattacgtgcccgacctgtcagcgaaaaaaattcgcggggctcacgccatgccgaacaccatcggggtgctggcgctggatacggtgaccacgcccttttcggtagacatcacgctgtcgattgaagaaaccgcgcgggcgcacggctggaacagctttgtggttaacatgtttaccgacgatagcccggagaccatggtagaccttctgctctctcatcgcccggacgggatcatctacacgaccatgggactgcgcaaggtgccgctcccgtccaagctgctaacccttccctgcgtgctggcaaactgcgaaagtttgcacgatccggtggccagctacatacccgatgacgagcagggccagttctctgcggttcaggctctgctggctgcgggctaccgccgccccctttgcctgcatctgccggctaaccatctggctacccttcgccgtcgccaggggctggagcgcgcctgtcaggaagcgggaatcgacccaaacaccctggttcactgctatatggaatatggcgatgagcactatcgcgatattccggcacgcgttctggcgcatattcagcagcaaacgccgctgttcgactccgtgatttgcggcaacgaccgcattgcgtttatggtttatcaaacgctgctgggacatgggttgcgcattccgcaggatgtggccgtggtggggtacgataacatggtggggatcggcgatttgttcttaccgcccctctcaacggtgcagttacctcattatgaaatcgggcgcctgagcgccctgcatattatcaacggtgacagccatcgtgagacggttcgggtcgccagcccgtggctcccccgggagtcgctataa

SEQ ID NO: 158079 - DNA, 669 bp, Enterobacter cloacae
atgcgtagcgtgaactgggatcgctttcaggacttaatgattaacgccaccctggaaaccctctacatggtggcgctggcgacgctctttacggtagccattggattgcccgttggcgtgctgctgtttatcacgcgtcgggacggtgtgttacccaaccgggcggtggcggttgtgctcaatagcctcgtcaatattggtcgagccttaccctttgttattttgctcattgcccttatcccggtcacccggtggattgtcggcaccacgcttggcagcaccgccgccgtggtacccattacgcttggcgcctttccctttttcgcacgcattgttgaaagcgcgctggatgaggtggatcgtggccgcattgaagcggtggagtcgatggggggcagccactggcatattgtcagccgggttctcttacccgaagcgctgcccgcgctggtggcgggaattacgctgaccattgtgatgttgatcggtttttccgccatggcgggcgtcgtcggcggcggcgggctgggagacctggccattcgctatggctatcaacgcttcgataacaccctgattgccggcacggtcatcgtattgctgctgctggtgcagactatccagaaacttggcgacagactggtacgatcgctcgcttaccgacgctaa

SEQ ID NO: 158080 - DNA, 789 bp, Enterobacter cloacae
atgattaaactcgagcacatcagtaaacagtatcccggcgcaaccgcgccggccttgacggacatttcgctgtcgatagaagaaggaacgatctttggcattctcgggcgcagcggggcgggaaaaagcaccctgctgcgctgtctgaatcgccttgaacagccgacgtcgggtcgcgtactcatcgatggccaggatatcgccacgctgggcgtggcgcagcttcgccagcagcgtcagcagatgggcatgatcttccagcacttcaatctgctgcactcgcgtaccgtcaacgacaatatcgatctgccgctggagattgccggtgtcccgcgcccgttgcgtcagcagcgggttgccgccctgctcgaactggtggggctgggaaattttggtcacgcgtggccctcgcagctctcaggtggtcagaagcagcgggtgggcattgcccgtgcgctggcggtacagcctcgctacctgctgtgcgatgaagcgaccagcgcgctcgacccggaaacgactcgcgctattctcgatctgctggctgatattcaacagcagctcaatatcaccattgtgctaatcacccacgaaatgacggtcgtgaagcagatctgccatgcagcggccctgctggagcagggggcgctcattgagagcgggtcgctttcgcaaattatgtcgcgtcgggaagggcggctgcgtcaaatgctgctgcaggatggcgaaaccgatcgtgctttcctggcaaaatatgcgtcagagacgggggcgagatgcgtagcgtga

SEQ ID NO: 158081 - DNA, 807 bp, Enterobacter cloacae
atgatgaaatctgcattctttacgctggctgggctcgctttactggtttcacaaacgctgcacgccgcaccgttacgtatcgccgccgatcctattccccatgcggaaatcctggagtatgtgaaaaaaatcgatcctaaactcgatctgaaaattatcgagatgagcagcggcgggataaacccaaatgagttactggcttccggagaggtggatgccaactatttccagcatctgccgtacctgaaagatcaggagaaggcgctgggaaaaaccttcagcgtggctgctgaagttcatattgaacccctgggtatctattcccgtaaggtgaaatcactggatgaattaccggaaggggcaagcattgccgtgccgaataacgccactaacctcagccgttcattgtggctgttgcagagcaaaggcgtgctgaaactgaaggccagcggcgacgcggcctctacgctggtgacgcctgctgacatcagcgacaacccgaagaaaatcaagatagtggagattgaatcgccgcaaatcccgcgtgcgttagacgatgtggacgctgcggtgatcaacggcaactatgcccttgaggcggggctggttccggcgaaagacgctttagggctggaatccgccagcaacaatccttatgccaacctgctggtcaccacgcctgaattgctgaaggacccgcgtattgccgaactcgcgaaagacttaacctccccgaaggtggcagcctttatccgcgagaaatacaacggctcggtgatccccattacggcgccacagcatgattaa

SEQ ID NO: 158082 - DNA, 1029 bp, Enterobacter cloacae
atgagcacagcgcataaactctccttacctgttattgaactctcccggttgcagggcgatcctcaacagcgtaaagcctttcttgaagacctggggaaagcagcccgcgatgtgggtttcttttaccttaccgggcacggtatttctcaggcgttgctggacgacgtacagcgcgtctcgcgtgaattttttgccctcccggagcaggagaagctgaaggtcaggatggccaattcaccgcattttcgcggctataaccgcgcgggatcggaaattacccgcagccagccggactaccgcgagcaatttgatattggcgctgaacgctctgccatcgaaagcagcactggcccggtatggcaacgcatgcagggacccaatcagtggcccgaagcgctgccggacatgcgtgatgtgatcactctctggcagcagaaaatgaccgacgtggcgcttgaacttctacgggcttttgccgaagcgctgtccctgccgagaaacgccttcgatgacctttacggcgactatcccaacgagcatatcaagctgatccgctatccggggcgcagtgaaaatgaatcccgccagggcgttggcgcgcataaagattcgggtttcctgacgttgttattgcaggacgagcagggcggtttgcaggttgaggtctcgccgaatgaatgggtggacgcggtgccgctgcctggcgcattcgtggttaatatcggcgaactgctcgaactggcaaccaatggctatctgcgcgctaccgtacaccgcgtcgtctccccgcaggctggccgggagcgcctgtcatacgctttcttcctcggcgcacagctgaatgcggtcgtgccggtctttcaactgcccgactccctcgcgcggttggcacacggacccaccagcgatccgcttaaccccctgttacgcgaagtgggctggaattatttgaaaggccgactgcgttcacatcctgatgtggcaaaccgtttttacgcggatcacctcaacagcgaaccacagttttaa

SEQ ID NO: 158083 - DNA, 513 bp, Enterobacter cloacae
atgcataatctggagcatgataaaaatcaaaccgtcggggagttaacgaaaaagctggcgacaaaactcacggatttagggctgcgtttgaccacggcggaatcctgcacgggcggcaatctggcggttgcgctctgtgccgaggagaacacggcagaattctatgatgtcgggatggtggtgttcagcgatgaggcgaaagagaggatcctgggcgttcgtcatgaaaccctcgcacgcttcaccgccgtcagtgaacaaacggtcaccgaaatggcagcgaaaattcgcgatattgcgcaggccgatatcagtatcgccatcagcggatatgcggggccagaaggcggggatgacggtacggcagcaggaaccatctgcttcgcctggaatttaggcgagcgaacggaaacgagcaccgtgcacttttccggtgaatgtcaggatgtggtggaaaaagcggtccgttatgccttatctgaactgatcgagaagctatcaggcttgaaataa

SEQ ID NO: 158084 - DNA, 504 bp, Enterobacter cloacae
atgaatcgtaaaaatgaaaagctgcccgggataaatgaaagttatcgtttgctgtcgttcgagtatgcatttcggcaggtcggttttatcctgttgctggctattattatcgcggcaattgccggtctgttttcgagcggggcggtcagtgatactgagaaaatcaattcggcaaaaacgcttactctcaactatgagcgttttggtcgccgggaaacagagtttccgctgcagatcgccttcccggtaaaaacccagggggaatatgtcatcagcatggcgagcgagagcggtgatgtctatgagccgggcagcatctggccgcagcctgacagcatgtacagccggggagatacgctgtttttcgtctataacaacctaaaatataatgaaaaattcaccgtcagactatttctgacgccatcgaaggcggggaagtgggcaaatgcaattcgtgtaaacaacgagccagaaattcgcttctggcagttcatttacccttag

SEQ ID NO: 158085 - DNA, 1983 bp, Enterobacter cloacae
atgaaactgaaaattcttgttaacgcaatgaccgttgccggtctgttatccacctcgctggtggccgctcctgccatggcgcagtcaacggcaaaagaagctaccacccataccaaagcaaataatgatgcgctgtatggccagctgccattttttgataaaaccgatttcagcaacgcccataaaggctttattgctccgctgtcacaggatgttattaagggtgaaaaggggaatgttatctggaacccgcagcaatacgcttttatcaaagaagggcaaaaagcaccagatacggtaaacccaagcctgtggcgtcaggcgcagctgattaacatcagcggcctgttcgaagtgacggacggcgtttaccagatccgtaacctcgacctgtcaaacatgaccatcatggaaggcaaagaggggatcacggttatcgatccgctggtctctgccgaaaccgccaaagtggggatggatctctattataaaaaccgcggtaaacgtccggtggtggcggtgatttatacccatagccacgttgatcactatggcggcgtgcgcggcgtggttgacgaagccgatgtgaaatcgggcaaagtgaaagtctatgccccggcgggctttatgaaagaagcggtctctgaaaatatcatggccgggaatgcgatgagccgccgcgccagctacatgtacggcaacctgctgaagccggacgcaaaaggccaggttggcgcgggtctcgggacgaccacgtctgccgggacggtgacgctgatcgagccgactcattacatcaccgaagatggtcagaaagaggttatcgacggtctgacgtatgactttatgatggcgccggggtcagaagcgccgtctgaaatgctgtggtacgttgaagagaagaagatgattgaggcggcggaagatgtgacccacacgctgcataacacctactcattacgcggggcgaagatccgcgacccgctggcctggtcgaaatacatcaacagcgccattgagcgttggggtgataaggctgaaatcatcatggcgcagcaccactggccgacgtggggcaacgacaacgtggtgaagctgatgaaaagccagcgcgatatgtaccgttatatcaatgaccagacgctgagactggcgaacaaagggctgacgcgtgatgaaatcgcggccaattttgcgctgccggacgggttagccaaatcctggtcgggccgcggctattacggctcggtaagccatgacgtgaaagcgacctatgtgttttacctcggctggttcaacggtaatccggcaacgctcgacgaactcccgcccgtcgatgccgcgaaaaaatatgttcactatatgggcggtgccagcgccatccttgaaaaagccaaagccgattatgcgcagggtaactaccgctgggtcgcgcaggtggtaagcaaggttgtgtttgccgatccctcaaacaaagcggcgcgtaatctggaagcggacgcgctcgaacaactggggtatcaggcggagtcgggcccatggcgtaacttctatctgaccggcgcgcaggaacttcgtaacggcgtacagaaattgccgacgccgaataccgccagcccggatacggttcgcgccatgtccccggagatgttctttgatttcctcggggtgcacatcaacggcgtgagagcggcgaatgcaaaagcggtgttcaacgttgacctgggtaaagatggctgtcagtacaagctggaacttgagaacggcgtgctgaatcatagcgcgaatgcggtcgcaaaagaggcggatgcctcaatcacactcagccgcgatacgctgaacaaaatcatcctcaaggagaccacgctgaaacaggcgcaggagaagggggatgtgacggtgacgggcaatcaggcgaagcttgatgagctgctgagctatatggatagctttgatttctggttcaacatcgtcacaccgtag

SEQ ID NO: 158086 - DNA, 399 bp, Enterobacter cloacae
atgaagataacgccgctttttttcgttatatttagccttagcaccttaaccgcctgccgctctgctccacccgataaagtcgaacagattaaccatttgcaggttcctttaattttacctggcgagaaaccacccgcagtacaaacgtcacatattgcgtcgctctaccaggagaataaacaccaaattgattcattaacacgcaaccttaaatcacagtatcttcaggatgcctcggcaaaagatatttttaaagaggacagtccagtccagcgcgtttacgcctccctcacgaaactggagcagttagatatggtgaaccagcaatacctgaaggataaaaatgaagctggtctgagaaatatcaatcttgcccttaaacccttaataacgggttaa

SEQ ID NO: 158087 - DNA, 327 bp, Enterobacter cloacae
atgcatattttaccgcctgttcgtcctgaacaatcgattgaacgactgaccgcgatccttgagccgatagcggagaaaatgaaagttgtgccgcgcaagcgcgtgacgtggaagcataaaggtcggcagcaaatgtatctctttttagagggcggattgtccctgctgcgcgcgtccgacggcctgctgctggtcacggtatacgaaccccatctcttcggtattgcagaaatgatccagccgacgcaggggcatattctgcgagtggaaaccgagtcgacgcttttacgggtggatgccgaacgtgcggcggaacgtttccgctag

SEQ ID NO: 158088 - DNA, 1176 bp, Enterobacter cloacae
atgaagatccgactactcctgtgctctggcttagtggccgcctcatgcgcccacgccagtgccctctatttttatgaagcaggcaccgaagataccgcacttgctggcgcagggcaggcagcccgtgcgcaggatgcctccacaataatgaccaacccggcaggcatgacgcgattacccgatcgtatgatcaccggtgggctacaggtgatggacggctccatcgactaccagctgaataacgatgcgcagagaagccccggcgatgtgatgaaaaccgttcccaatgccagcgccttctatagccagaaaatgaccgacgatctttatgccggtattgggctttacggcaattatggcctggggatcgattacggtaactgggcgggcgaccggctgatcaaaaagagcaccattgtagccatgacgttcagtccgtccgtggcgtacaaacttaacgatcgcctctcaatcggggtttccgccaacgttaactacggttatttttcattgacccgcaatgtgaatgacgacgaccgccagcagcatgaccatgactgggcgatgagctatcgcctggggctgttgatgcagctgaccgaacagacgcgagccggtatcacctggaacagcaggacggactatcactacagtatcgacggcaaagcacgtttgccgagtggcgcatacgatctgccggtgacggcacaggtgagtgcgccgcagcaaattatgctcagcgttgtgcatgatgttaaccagcaatggtcggtgatgggcgatctcggctggcaggactggagccagttcggcgcgccgcaaatcacggcgagcgggcagatgcttaacaacgtcagccgcatgaaagatacctggcatggtgcgctcggcgtgcagtatcgcccaacagaacagtggcgattgaatgccggtgtcgcctttgatagctcgccgtaccagagccagagtgatgtggcgataaccttaccgaccggcgacgaatggcggttcggtacaggcgcgcagtatcagatcacgccagccagcaatattggtgttgccgtcgagtatcttcacatgcagtcatcgcatgtgaaatcacccgctgtctttgcgggaagctatgataccccccatctttggtttgccagcgtaaactatagctatcagttttaa

SEQ ID NO: 158089 - DNA, 414 bp, Enterobacter cloacae
atggaatcaaaatacattctggttgacgcggttccacccgcggaagatttttgccgcttgcgcattctagccggtttaacacctcgccctcttgaagccgcaaaacatgcgctcccaagaagttgtcacggtgtatacattgaatattcagggctcattgtcggtatgggaagaattatcggtgatggagcgctcaactttgaaatcgtagatgttgcggtcgctccagaacatcaaggtaaagggctgggctggagaatcatggaagcattaatgtcgtggcttgggcaacaagcccccgttggagcatacgttacattgatagcagatatgccggaactgtatgaaaaattcgggtttaaatgcgtccgtcctgaaagcgaagggatggcacttatttggggatcgcattaa

SEQ ID NO: 158090 - DNA, 330 bp, Enterobacter cloacae
atggaacaaaccgtcgaaatactgcaatacactttacgcaaaggcagcggtgccgcttttcacactatcatgcaggaaatcagcgttcctctacaccgacaccacaggatcgatgttgtgtcgtttggcaactcgcttcatgacccggattgctactatctgattcgtgcctttgacagtgctgaaagcatggctgcggttcttgatgccttttatgcgagtgatgactggcgcagcggaccacgtgaaaacattattcacagcatcgaaaccagcatcaaaacagtgatttgcctaccatcggaaagcgtggaaggactgcgagtgtaa

SEQ ID NO: 158091 - DNA, 603 bp, Enterobacter cloacae
atgagagcctttattgctttgcttatgctgtctttatccacgttcagcgtcgccgcgccgtcggatgacgcgtccagtgaccagctggctaaactgctgttcaacgaccccaatagcccgcgtaccggcgcgaaagcgccaaagctgattattgtctctttcacagactacaactgcccttactgcaagcagttcgaccccatgctggagaaaatcgtgcatgacaacccggacgtgcagctcatcgttaagctgttaccgttcaagggccaaagctcggtgaatgcggcaaaagcggcgctttcggtttggcaacaacagcctgataaattctgggcgctgcaccagcggttgatgatgaaaaaagggtatcacgacgatgccagcatcgcagcggctcagacaaagaccgggacggacagcattaaggcggaggataaaaccatggactctctgaaaatgaacctgatcctgtcgcaggtgctgaatattcagggcaccccggcgaccatcattggcgaccagatggtcgcgggagccattccttatgaggatctggaggcgctggtgaaagaacagctgacgcaagcccgtggccagtaa

SEQ ID NO: 158092 - DNA, 501 bp, Enterobacter cloacae
gtggccagtaagctcccgcgcctggtgcgcgaactcgcaatgtggctgctgatcggcgttgccgtgagcctggcggtagattatttccgccagcccgcgctgccgcagaatttcgcctcagccgcgctgcaaacgctcgacggtaagcccgtcgaccttattgccatgagtgaggaacgtccgctgctggtgtacgtctgggctacctggtgtggcgtatgccgctacaccacgccatccgtatcggcacttgccgcagagggcggcaacgtgatgtcggttgcactgcgctccggtgataacgacacgctagagagatggctggcgaagaagaagatgaccctgccgacggtcaacgacgccagcggaagcctgtctcgccagtgggacgtgcaggtcacgcccacgctggtggtgatctctcacggagaggtgaagtcgatcaccaccggctggaccagcaactggggcatgcggctgcggctgtggctggcgtcgtag

SEQ ID NO: 158093 - DNA, 822 bp, Enterobacter cloacae
gtgttcaccatgtccccgaacacctgtctacctgaagttcgttcctacatgtgcgctctcttttcctggggtatgaagtctgataaatcgcctgttatggatgttgtacaaagcaagtttgatatcccttttaaccctgttactgccattcctacacttgcttgtgagagctacgtaggtgagcgctacctgtcttttgatgagctgggtcagctactgaaagatgcgcattcaggcgaacacttcatacatgacataagtgtgtttttaaagcttgttttcttttgttgtggtcaacgtccatacgaaatactggcagcaaaaaaagaacattataatcgggatgcgcagttactttcgatccctcctgaaattgcaaaaacaaaaaaatggtatcacatcgctttaagccccagcgcgatagaattaattgatgaaatgtgtttgcgttatcctgaaagtgaataccttttccctgatatacgttatgaatcaaaaatggagggatggattacaaaagagaaggaaggaaccctgaaaaagaactctgtaaaacccactcctttcatatcaacaagtattctcagtgaaaatattcgtcgtgagcgtgttgatatgcaatcatttacgccacgcgatttccgtcgaacttttaaaaccctcggaggacaaataaaactgtcaaaggaaatcagggaccgcattcagaatcataataaaagtgacgtgtcttctaaacactatgatcgctatgattactttgaagagaagatggaagcggttttgaaatgggaatctgttttactgaatttaataaattaa

SEQ ID NO: 158094 - DNA, 702 bp, Enterobacter cloacae
ttgaacgatatttatttttacaaaccggatgataagattaaatacatcaatgaatgtgatttatgggttatcgccaggctagttgatgtagttaatgagaagaaggaagttaaacaggggatggaacctttctggctatctacctccgatcaaaaaggtattgcaatatttgtttcacggctggatgcggaaatatcagtgcaatatatgcaaaggaataatgaacgatggaaagtctatccacttaataattttgacattcaagaaatgatggttaattgtgaaaaattatccaataacagcaggtacaactttatttattcatttggattctggagtgatagcgagggtaacttaattaataaaaaatattgtttaagccagtgccctgcagttgaggggttcactgttgacagcagatatgagggtgatgaagacattgtaataagattcagtaaagaaacattgaattttatctattcatgctggaacaataaaatcagtgatagcgctgactacaggaaatatcttgagtcagttaatgaacttgatgatgtaatctgcaagaaagaagcaatccttgctctcgaaaatatcaattcagcagaaaccaatagagatttcaatcctgacattgcaacaatatggtctatgccggaacaaaaatggatttactcaaatttaaataaccctatcaattaa

SEQ ID NO: 158095 - DNA, 1446 bp, Enterobacter cloacae
atggctacgggatattttttaacggttggtgataagacaacttgcgggggcagaataataacaggctgtgaaaatcattcattttatggacgcgccactgcaaggaatggagataaatacatttgtggtgaagatggaaaaatttaccatattgctggcggcataccaaattatataattcatggagtaagtgctgcgggaaccctacacagcagaggtacgtgcggctgcaagtgccgcttcatcccctctaactggaatgatagctataacttcgaatctgaaagtaaactgcaatcagccaggccagcaccaaaacctgttgccagcgccaagcctgaagttcagccgaaaaccgttgcacaacctgctccagccccagctccagtagcccccagcgagccaagaatccctgtagatgcgggttactgcattcttccctatggcggatctgctccagcgtttgatcgctatattttcgataatccaccagcgggtacacgcgaactatatcgttcactgaacacgaatgtttcacgaaaagcaggttctatcttccttctggttgatcctgataagcaggacagcaagcagatagagcatatgaaagcagcacaggagaagttagataaagcattagcccctctgacagaccaacaggcccgcttcctctataaaaataaagatactgttgaaatgtttgcagccgccgccagtacagcaaacaacgtgtacagttattctggacaagctacagaagccgctaaacgttactttgaaagagttgagaaaattctcaaagagatcgaaacaacctacaaaaatcagtacctcaccagtggcacactgatcggcgaacaattttatgttgaaagaggaaggttgtttaaggaacttgatagcgttctgaaaatgttcatgaagcatcgcttcatgttcaatcaatatgcagacctgaaatcagccctgggcctttcaacccattccataacacatcggtgggatgaaacaggtgtcggagatatcgagggctacgctactcatattgagaaacttgcaaagtacatcaaattgatggacgtggcaggaaaaatcggagttagtttatctgcccttgatactgcttcaaaaattacagaagcttgcacagtgggccgggattgtgcaaaaactgcttttacctcgattggtgagttttcaggtagtatgtttggtgggatggtagcttcacaattaattgataaaggagctgcaactgccgtctgctcattagttctgggagctgcaaccgttgaagcaggtggtgcgggagctttgctttgtacgataggcgtagctggaggaattgggtatggtagcgataaattttttggttctaccttcggtagtgttggagagtatcttggtaagatgcttggcttatatgagataacaagtgatgaataa

SEQ ID NO: 158096 - DNA, 399 bp, Enterobacter cloacae
atgaataacttacagtacgctatagcatatactggtattatagctatgctgttgtgcataatcagcgctattctagggagagtgaaccgtaaatattacaaagaaatctgcgccttatataaagaaaagtatggtaaacttccttggatgactcaaatatatgacaacattaacagtttatatgttaaatccgcttacggctttcggatggattttattttcagaccattgatatggaataagaaatctagttcttcccaaaatgatgataaagatttcattcgtggattacctttacgactcagaaaaccattctatatagaatacggcataacagttacggcattttcgtttatggtggtattagggatattagtgctgattgataaatatatctag

SEQ ID NO: 158097 - DNA, 1134 bp, Enterobacter cloacae
atgaaacaggtcctttttgttcgtcccgacagccgcgagggcgggaaaataatgtggtgtgtctccggcagcgagcaggttgaggtgctggagagcctggacgcgctggtggaccatcctctggccgcccgcgtttgtttgctgctgcccgcctgcaacatgatcttccgccactttacgctgccgaagaaagttgcctcgcaggcggcggcattctcgtggatggcggaagagacgctgattggtgacgtggataaccttcactggacggtgctcaacaaaaagggcgccgaggtcgatgctgtggcgattgatgccgatctgctgcgcgcatggttaacccgttttcatgccgctggaatgaaggtgattcaggcattgccggatgcctggctactgccggtggctgaagggggaagcacgcttgtccaacaggatgaaagctattggctgcgtttatcccctcacaccgccggtgagatggaggccagcctgctgccgctgctgatgcaaaaagcgggcgagggcgaggtgtgctgctacggcgcgcagcctgagggggttgacgttgacctcctgcagccctggcagcacccgctggtcctgattcagccgcagtggcaagccagccgcgtgaatattatgcacggtgaattcagtgcaaaagcgggcacggataaagcctggaaaggcatcaaagcggcaatggtcgcagcgggcctgctctctatcggcctgctgctgggcccgcgcgtcgccatggcctggatgctcgttcagcaggagaatgccattcagcaggagattgttcaggtttatcagcaccatttccccagcatgcgccagcagaccaacatcaaataccactttggtcaaaatatgaagaaacagaccaaaggggtatttttgcagcttgaagcactggagaaagccaggcaggccgtaccggcgatggagatcgatctgctggaatacgatgctcaacagaatacgctgacgctgagcgtcagtgcgcaaacccaaaccgcgttgcagacgtttgtgaagcaggccggtgaaaactttgatttcaccttgcagcctgtctccaccgctgcgccttataccgccatgatcgcagggaaatataaatga

SEQ ID NO: 158098 - DNA, 774 bp, Enterobacter cloacae
atgaggttctcatttctgtcacggtgggtaacgccttgcattatgtttgtgctgttaattttttgcggcgagcaagggtatctgacgtttaaagattataaaaaagttacgaataagttggctaatgctgatgcgcagccgctgaaaaaacgtcatgacgaaaagccattcacccttttcacggcagcggtacgtcaggacaacgcggcaacggcggtaaacgtcccgctggcagcggaaatagaaggcattgttcgcagcgatgacgcctggctttcgttcgccgttatcaaaacgccgggtggccagaagagctaccgtgaaggcgagccgctgatcggttttaacgatgcttttattcaggaaattaataaagacaatgtggtggttaattacgaaggtgctacgcaggtactggcgttaaataaacctgattattttaaaggcggcgttgacagcggcccggtgaccaaatcgacgaaagatgcaggcgtggacagtgtgcatctggatgattatctggtgttaaagccgttaatcgaaaagggccaactggaaggctttaatattaatccacggaatgcgtctcctttttacagcgatacagggctgaaaaaaggcgatgtggtagtgaaagtcaacgacgtcgatatgacgaaagaagcgcaggcgaaaaatatcatcgctaactggtcgaaaatgaaagaggcggaggtcgtcgtcaggcggcacgctcaccttgaaaatattcgggttaatgttttaaacaattaa

SEQ ID NO: 158099 - DNA, 1566 bp, Enterobacter cloacae
atgtatcagagccactttaattttaaaaatccgccctttcggaaaataacccggttatccggggattttttggtgccttatcatcaggacgcgttcaacctgctgaaagagaaaacccaacgggcgggaattatcgggctcttttccaacgatgccccgctgctgggccagttcaacagtgccctgaaatccgctaatgctggcgtgcttgccatcaacgcgtttccaaaactgagtgccagtagcctgctgtacaaactcaatccgggaacgaaagagagcaagaaccggcttcaggcggtggatgccgttctgcgtcagtggcaggaggggaaagcgaatgccaaagtgctggtcatcgcccataccgaagcgatgaaagacaactgccgggaagtcctggcgatgttgctcacccgcgctcaggagctggatttccggttgtccgtggtgttgatgggcgcggcggatcaggaagccgttctgaagcagcagcctgaactgcgtgaatacacgcacacacatcatgccttgcgtcccctgacctgccgcgaattcctgagctatgttcaggcgcagtgtgaggagcacgggtgcgagacttcgcccttaacgccggcgcgcgtgcgcaagatgcatgccctgaccaaagggagtatcagcaagctgaacgagctggcgcacctgtcgctgctggccgcctggaccgaacgggcaagacaggtcagcccgcgtcatttacgcctggcggcaggtgagatcctgcccgcggaaaaacacggtaagcgcctggcaaccgtgggattattcgcgtccgtgctgttcgccgcctgcggctggtatttaacgtcctctattagtgcaagactgccggttcaactgcccgttcccgttagctggcaacacccgacgccaaaagtacaggcgcccgtggtaccggttatcgacaacgacgtcgttaatcagccggacgccatgcatcagctttatcagatgtgggggtatgacgcctcggcggaagatgccctgtgtcaaaacgccgcgaaggtgaacctgatgtgtaaacaggggaacgcctcgtcggatgcgctggcacaggaaggctatccgtgggtcagtgaactgaaaaccggcaaccaccttaattacgccgtggtcgcacgcgtcggggagacctctctcgatctgctgatgaacaaccgtacctggcaggtgagccgcagctggtttaatcagcatgcgaccggcaactacacccaactgcaccgcctgacgccggacggcaaagacgccatcagcgccgccagcgatgcaaaagacatgggctggcttgaccagcagctgagcgtggcccttagccagccggcaacccatgcccagacctggacggcggagctgatgaaacgcacacgagagttccagcaaaaaatgcatctgcacgtggatggcattccaggggaagatacgctgatgcagttaatgcgtgaaaccgataccgcaccgagcgtattaatacaggcctcgcgttccacaccggacgcgaaaaagcaggagaagcattcctga

SEQ ID NO: 158100 - DNA, 627 bp, Enterobacter cloacae
atgtctaccatctgtcttgcggctcagcgcagctacactaccggggaggcggtctggttttcgtaccgcgtacccaacctgagaaaagtcttcggtaaaacctttttatgcatgctgggtctgtgcgccatggtaatggcagggctgtacgcgcacatttactggaacctgcgccaccctgcgccagaaccggtaaaagtgagcgtcgccaaaccggaaacgcagctttcggatatgcattatgtgtatgtgagcaaaccgttcccacatccgcagccgaaacctgtccccgtgcataccgacgtcccggccatgcaggatttgcccattaacagcgatgatgccgactggcagcaggcacccgatggcgccgttccgcacgatacctcgcgggataccttgccgggaaccgaagcgcacgatgttgcgcccaccagcgcaggcggcgatgattcatcattaacggcgttatttaagcaggcgttaaaagaacaagagcaggattattcccaaggcaaaattcccgcgccgccggtagacgaaacgcaggaaaatcctcaaagcagtatgctacacgaaaataaggcgcgatctcccttaagtattaaaggagaccggctggagtaa

SEQ ID NO: 158101 - DNA, 375 bp, Enterobacter cloacae
ttgaacattaaacgaaactgggcgggcgtggtcagctgctttttgctgtttacggtcgtttgcatgtcgctcgcttttaatgtgaagggggcattcagggcgtccggccatccggaactgggtttgctctttttcatcctgccgggcgccgcagccagttttctctcgcgtaaaggagaggtgatcaagcctctactcggggctatgctggcagcaccgctgtgcctgctgatgatgcgtctgatgtatgtcccgacaagaagtctgtggcaggagctggcgtggttactgagcggggtgttctggtgtgcgctgggggcgctttgctatctgtttgtgcgcagcctgctgcaccggcgcaaacatccgcaataa

SEQ ID NO: 158102 - DNA, 729 bp, Enterobacter cloacae
atggcctacaccttcagcccttcagaattgtctaacttgccgacaaataagacaaaagacctttaccgtttgcccctgcgcttttatggttatcagcttttcgtgctgattgtcctcgccgtcctgtttacctggctttcacgcgacgaaacgctcgacagatggatcaccggtttctggtatgacgcagcgacgcgccattttccgttgcagcaaaacccgatgctggacctgctcaaccatcggctggcgaagtatgtctctatcaccctggctgcggttgcgctgatttacggtgtcgtcaagcgcaatgcccgcctggtcacggctgcgcttctgatggggctgggtgcactggttgtcggcgtgctgaaaagcattagccaccatagctgtccgtgggatctggtggagtatggcggaaaggcggtttcttaccccctgtttagcacggtaccggcagacagcggaccgggccgttgcttcccgggcggccactcgtcaagcggctttatggtgatggggctgttttttgccttctggcgcgaacgtccacgtctggcctggagtttcgtcgtgctgggtgcggtattgggtctggccatgggctacggtcaggtcatgcgcggggcgcattttttctctcacaacctgtgggctgggtggtgggtctggttttcccaggtggtggtctatggccttgtttccgcctggtttgcgaaagagtga

SEQ ID NO: 158103 - DNA, 609 bp, Enterobacter cloacae
atgttagagaatctgaactacggactgttttatttcatcaacgccacgccagcctcgccggaatggatgattgatttcgccacctttgttgccagagatttgatctcgattgtacctgtactggccgttgttctctggctgtggggtccacgtaaagaggtcactgcacagcgccagctggtgatcaaagtggcgatggccatcggtgtcagcgtagtgaccagctatctgctgggacatgccttcccccacgaccgtccgttcgtcgatcacgttgggtataatttcctgcaccatgcgcctgatgactccttcccaagcgatcatggcaccgtgattttcaccttcgccctggcgttcctgttctggcatcgcctgtggtctggcgcggtgctgatgggtatcgcgctggccatcgcctggtcccgcgtttatcttggcgttcactggccgctggatatggtgggcgggttcctggtggggctgatcggctgcgtgagcgcggcgatcctgtggagcctctttggcccggcgctttaccgcgggctgtctcagctgtatcgcgtgctgtttgccctcccgatccgcaaaggctggatacgtgactaa

SEQ ID NO: 158104 - DNA, 963 bp, Enterobacter cloacae
gtggattatcgcaaaattatcaaagaggtagggcgaggtaaaaatcacgcccgtgacctggaccaggaaacggcccatgcgctgtacacccatatgctgaacggcgacgtgccagaacttgagctgggcggcatcctgatcgcgctgcgtattaaaggtgaaggtgaagccgagatgcgcggtttctatgacgcgatgcaggcgaaaacgatgcgcttaacgccgcccgttacgaagccgatgccgattgttattcccagctataacggggcacgtaagcaggcgaacctgacgccgctgctggccattttgcttaacaagcttgggtttccggttgtcgtacacggcgtcagcgacgatccaacgcgcgtgctaacggaaacgatctttgcgctgctgggtatcgaaccgaccctgcatgcgggtcaggcgcaggcgaagctggacgggcatcagccagtctatattccggtacgcgcgctctgcccgccgctggaaaaacagcttgaaatgcgctggcgtatgggggtgcgtaacagtgcccacacgctggcgaaactggccacgccgtttagtgaagacgcggctctgcgtctttccagcgtatcgcacccggagtacgtgacgcgtgttggcaagttctttgaggacattggcggacgggcgttattgatgcacggaacggaaggagaggtgtatgccaacccactgcgctgcccgcaaatcatgttgattgattctgctggctcgcgtgcagtgcttgaacgaggggaagagaacagggatgtggccctgccacaggcaaaagatccgcacaccaccgcgcactggatcgttgagtgtctggcgggcaatgtccccgttccgcacgccatcaggttgcaaatggcctgttgtttgctggcgacgggtgaggtggactcagtggatgccggactgcagcgcgtggcgcagtcgttttaa

SEQ ID NO: 158105 - DNA, 939 bp, Enterobacter cloacae
atgacactgtggcggtccacatcaccgcagatctggcaggggcgcgacgacagcgctgaagccactaatgcaaaacgcattttccagactattcagcaacgtgaagcgttttcaccagcgccttcaggcattggcctgataggctttgaatgtgatgaaggggtgaagcgcaatcacggcagacccggcgcggtgcaggcacccgatacacttcgccgggcgctcgcgaacatggcaagccatcagggacatgagcggcttgtggatatgggctcaatttatctcgagggcacagatcttgaagccgcgcagcgggcattaagcgatacggtggtgcaatgccagcagtccgggatgcgtacgctggtctttggcggcggtcatgaaaccgcgtgggcgcacggccgcggcgtgctggacgctttcccgaacgcgcgggttgccattatcaaccttgatgcccatctcgatctgcgcaaagccgatcgggccacgtcaggcacgccgtttcgccagctggcgaattactgcgatgagcgcgggcgggaatttcagtacgcctgctttggcgtgagccgggcggcgaacacgctggcgctgtgggatgaggcggaacgtcttaacgtcacgctggtggatgatctgcatttcaggcgtgatgcgctctcttcactggaaaaggtgctggcgcaggccgatcgcgtttatcttacgattgacctggacgttctccctgctggagaaatgcccgccgtctcggcccctgcggcactgggcataccggcgctggagcttatgccggtcatcgaacgcatctgccgcagtggaaaactgcaggccgccgatctggtagaatttaacccgcagtacgaccgcgatgggcaaggcgcaaagcttgccgcccgtctggcctggcaaattgctcactggtgggcataa

SEQ ID NO: 158106 - DNA, 699 bp, Enterobacter cloacae
atgatgataaaaaaaatcagtggtcgccatgctgtttctggcctggtggggatttcagcgtggttgtttttttgtcacacagcatctgcctggcaacaggaatatatcgtttcagacgcacaaagtaatacggcggaacgctatacatgggatgcggatcaccaaccgcgttatgaagacattctggcagaacgtattaagacttcgcaaactggacctgggcttgccctgaattcgccttccggcccgacagcggaaggcagtatgagcgtgggctggaattttccgctggcgggaaatataacaaccggcccggtgatggcgtggcgttacgatggcacggcacccatgatgattaatgaattcggtgatagcgtgacgacgcaggggctgaccgatccgctctggcatgccagcgtgagcagcctgggctggcgcgtggatacgcaatatggcgatcttcggccctgggcgcaggtcagtttcaatcagcagtttggcgagaaccagtggaaatctcagttcggcatgtcacagacgcctgctattgcacaaaacagcagctggatggacgtgaccgtcggaacggatatgccgtttacaacccatatggcggcctatgcgtcattggctcagggggaaaacaccacgacgggcgaggagttcatgtacaccctgggcgtgagtgcaaacttttaa

SEQ ID NO: 158107 - DNA, 1620 bp, Enterobacter cloacae
atggctcattttgcgcagtccccttcttttattttgcatcaggtcacctgtcagtttgcgacgggcgatacccttttcggtccgctaaatcttacactcgatgcgtcgccgtgcgcgctggttggccgcaacggcagcggtaaaacacgcctgctgcgtctactggcaggcattgatgaacctgaaaacggccatattgagcgtttcggtacccatgcctatgtggcgcagcagcatgatatttcctcgcagaccacgcttgcggaactgctcggatatgacgcgattttcgccgcccgtaagcgcatcgacagcggtgactatcagccagaggatctggaaaagctcgacggtaactgggatttggcggaacgcctcagtgaagcgtttatgaacgcgcacctcccgctgtttgatcccgataaaccggccagggaactcagcggcggtgagcgtattcgcgccttgctctgcggggcattgagtgcggatgcggattaccttctactggatgaacccacgaaccatctggacagacaagggcgtgaatggttttacgaccagcttttccaccatcagggcggcgtgctggtggcttctcacgatcgtgaattgctggcacaggtgccgcgcattctcgagctgagcccttttggcctgcgcagcttcggtggaaactatgctgattatcaaactcagcgcgatacggagcagcaggctgcccgcgccgcgctggagcacgcggccaccgagcgcaaacgaatccgcgcgcggatgcataaagagcacgacgacagccagcgacgttcagcaaaaacgttgcgtacggttgatagcctcaatatcgcctcctttgagcgggtgaaatacaaaatggcggcaaaagagcgcattggctcgtggaaaaaacagcacagcgaacagaatgacgcgttaaataccgcagtaagcaacgcgcgcgagcgggtagaagacgataacccggtcatcttcaccctgccgggcagtcgcgtcgcggaggggaaacaggtactggtgctggaggcgctggcgctgccgcatgtggatattccgccgataagctggcgtatggacgggccaatgcgtgtcgcactccgtgggccgaatggctgtggtaaatcgacgctcttgaaagtggtgtccggagaggaagcacctctttcaggatcctgcacggtatcggtcacctgcgcctatctcgatcaacagctgtcgcagttcgatctttcacagtcggtgatgacgcatctcaacctcagtaactcgccgcttgaagaaggcacgttgcgtactcgcctggcacagcttcagcttggcgcagataaggtctcgctccccctggcggaactgagcggcggtgaacgcctcaaagccgcgctggccattgtcttatggcgtgaagaggccacgcagcttttgctcctggatgagcccactaaccatttggatctggcctccgttcaggccatcgaggctgcactggcggagttccctggcgcgctgctggtggtgtcgcatgatgaaacgtttttgaagggattaacgctgacgcataacctggtgtggaatgaggcgggatggaattgtgtaagcctgtaa

SEQ ID NO: 158108 - DNA, 678 bp, Enterobacter cloacae
ttgagtcaactcaacggcgtgctggaatcccttgagtgggaaagcactttttttgcccggccttcggcgattgttcgtctgcgtgacgatgcgcctgctttgcaggcgtccgacttcgcggcttggccgcgcgtgcaggcgaagatcccggcgggccgtgccgatctgctggatgcgctgcagcaacatggttttcagctggtcgaaggcgaggttgatctctccataacggtttcccgccacccgtcggcaggcgcagaaattgcagcagagcaggacattcccgtgctgcgccagatggcggcgcaggcctttgcccaaagccgctttcgtgctccctggtataagcctgaagacagcggccgtttttatgctcagtggattgaaaatgcggtaaaaggcacgttcgaccacgtgtgtctggttttccgcgcggtggatggacagattcagggctttgtttccctgcgtaaggtaaatgagcaggacgcgcgtatcggcttactcgccggacgcggcatgggtaagaaactcatgcaggccgcgctgcactgggctgagcaggaacagttatcgacgctgcgggtggcgacccagatgggcaacaccgccgcgcttaaacgttatattgcgagtggggccaacgtcgacaccaccgcttactggttatacaggtga

SEQ ID NO: 158109 - DNA, 909 bp, Enterobacter cloacae
atggcttttcttagcgtcattattgccgcgcataacgccgaagatacgcttcatgctacgttagaaagcctgcacgccgcgattgataatgcgggtgatgctgttgaagtcattatctttaatgacagttccgatgatgccacccaggatattatcgagaaatggttgcctgcgttcccgcacgcgcaatcccggtacgttgagtaccgtaacgtcggtcatgttcggaacagtgcagtgtctctggcatcaggcgattacatcacgatgctggatagtgatgatcgactgaagccttgcagcctcagggacgcagtggcttttttgaaagcacagcgtccagatatgctcctgacacgcttgctggaaattcgtgatatcaggaaaatcaccgcgttctggcagggctttacacccatcgctttatcacagaaagaggcgataaagcgtttcttgcagcataaagagtttcaggcacatctcatcggtcaatttattcatcggaagttgtacgagagcaatcccattccatcgatggtctgttacgaagactttgcggtatttcctgccatgctcatgcaggcagaaaaaatcagctatcaacgccagggccattactattacatcaaacgtagcgacagtttgtcgagtcgtctagacgccagtaaaattacgacacttgttgaatgtacattaaagatggaaaaaacgtttccgcaagcgtttaaaaatctgattaattgtcactggtttgatatctacagtaaccatcggcaacaccttaccgatcagcagctcaaattcgttaaatcacgggtaaatgcgctttattcgctatcatttttcttatccagcgatgttcgtttcagctataaaaaaagggttattgaggcattatggaaaaagtaa

SEQ ID NO: 158110 - DNA, 1212 bp, Enterobacter cloacae
atggaaaaagtaaagttaagactttatcagttaacactagtattgagccttatctctttagctctggtacttgttaactctggaaagcaaagagagtttttctatattgctatctatatcagtatagtcggtttagcatttgaatataaaaaaatattctggcgtccttttagcatagcttatcctgtaatgttagtagggttacttaatctaatttggtattttacttatgaactacacaatgagggccttaatgcttacagcgattatcttggagccagtaaaaaattaattctatccagtctcttaatcttttatcttgaccgttttaaaggttatgtaaaaaaagaagattttgagaaatattttttagtcacaacggcgttcggttttatcctggctacaggctatggtatttatcaggctacacaagggattattcgtgtagagatggctataaatcgcccaaccatcgcagcttatatctactctgttctatcattagcacttgtatattgcttgtaccttaagaaaaatgtgacgttttatgtattggcgggcttcgtcgtcttgatatcgttcttcctgattctattgactgctacgcgcgccgccatgggactttatctcatactggctatttttctcaccctctatcagttcagaaaaatacatcttaattccttgatgatttttttatgcatagttgcaggcatcattattgttagttacaagccgctcatctcccctaaaataaaacaaacagtaggtgaaatagagaattatcagaaaggtcatgatgcaacttccctgggtgctcgtttttcaatgtggaatgttggtcttatgactggcattgcgcatccactgggacagtccattgaaagtagggagttgtgggctcgggattacgtcaaaaatggtcattctcatgtagcagcagcgcttggttacattaaaattcatttacataatgaattcatagagagattttcgctgcagggaataccaggggttgtaatattgtgtttcttctttttttccgtcatcgcttatgcgatgagaaataaaaatggcctactgctgacaaccatgctcctgcttttactgtatggcctgaccgacgttatattgttgagctcagaagccttgatcttctttgttaccctgtttgccttgagtacacccttttcgcaaaccagacaacgctga

SEQ ID NO: 158111 - DNA, 1671 bp, Enterobacter cloacae
atgtggcgatggatgagcggattactggtgttgtggtgtggctatggcgcggcggtgtgtccggtatggtcgcagacaaaagcagagaaagagattgcgtcgttaagcgcgcagatcaaacgctgggatgatgcctactggaagcagggggtaagcgatgttaatgacgacgtgtacgaccagcttaacgcacggttagcccagtggcagcggtgttttggcagcgagccttcagaagagaaactccccgcgctgacggggagcgtaaaacatcctgttgcccatacgggcgtgcataaagtgaccagcaaagaggagctgagacagtggatgcgtgcccgacagcatctgtggctgcaacccaaagttgacggtgtggcggtgacgctggtctatcgtgacggaaagttagcccaggctatcagtcgcggtgatggcctgaaaggggaagactggaccgggaaggtgcgtttaatcccgtctgtgccgcaaaagctcaccggcacgctggcgaatagcgtattgcagggcgaacttttctggttacacgacaaccacattcagagccagatgggcggaatgaacgctcgcgcaaaggtggcgggtgcgatgatgcggcaaaaggataacgcgctcctgagcaagatcggcgtattcatctgggcctggccggatgggccgaaagatatgaagacttcgttggttgagctgtctaaagccggtttttcgctctcagcgcggtatacgcttcccgccgaatctgttgatgccgtcgaaaaacagcgcgcggcctggcacgagaccggattaccctttgccacggatggcattgtggtgcgttcggaggatgaacctgcgggcgaaagctggttgcctggtgaaggaaactgggttgtcgcgtggaaatattctcctgtttcgcagcttgctgaggtaaagaatatccagttttctgtagggcgaacgggcaaggtgtccgtcgttgcagggcttgagcctgtgcgactggatgataaacaggtgcgacgagtcagtctggggtcggttgggcgttggcagagactggatatcgcccaaggcgatcaggtgctgatcagtctcgccggacagggtattccgcgcctggataaggtggtctggcgaggggcggacagacaaaaaccgcagcctcccgactcgcaataccattcattaagctgtttttatgcctcgccggactgcatggagcagttttttgcccggctaacatggctcagttctaaacaggggctggatattgaaggtttaggggagtccggctggcgtacgctctggcaggctcatcatttcgaacatatcttttcatggctgttattaacacaggcgcaacttcaggccacgccggggttttctgcggcgcgcgggcttgcgctctggcatcgttttaatcagatgcgggaacaaccttttatccgttggattagcgcgatgggcgctccgctatccaaatcgacactgaacgctatcgatgggcgatcgtggcaggcaatgagccagaaaagttctgccgactggcaaaccttgccgggaactggagaggagaaagcgcggcaaatcatgaactggatgcacgcgcctcaggttgacgtgctggcgaagtggctcactgagcagcacatcaacggattttga

SEQ ID NO: 158112 - DNA, 843 bp, Enterobacter cloacae
atgtataaatatctccctccggaaagaatcgatatattacaaaataatttaatctgttttaataatcctttgaactttaatgacccatttgaattcaacacctcttttaaattaaataatttcgaatcaactttgcatgactcattaataacaacggacctttttaaagagttacctgccgatattttaaattctatagagctactaccaaaagaaaccgtctctaagataatagaggaagcaacaaaagaaatattatcattctatgaactagcaaagccaaatataataaaaacaaccgaatccttaatgcaagaatttaactcaagcctgataagaatgacaagaatattatcattatcagataatcctactaatattcttatgtggggacattacgctcaatctcatagtggtttcgtgattgagcttgacacaaatcatccttttttttcacaacgtcgtagccataaagacgaatttggttttttgcgaagagttgtttatcaaaaagaatatccatctcttgacccattattatcagaaaatacagaaagtcattttttaataaaaagcagtgattgggaatatgaaaacgaatggagaatgttgttaccacaatccagctctgataaaacaatcaacattaatgggaaagaatatgatctctataaaataccatcaagctctattaaatccataatttttggttgcaatgcctctgagaattttagaaaggatgtgttcaagctcatacgttcacgaaatgattacagccatgtcattttcatgcaagctataaaatcaaacaccaaattcgaaattgaattaaatatgttataa

SEQ ID NO: 158113 - DNA, 780 bp, Enterobacter cloacae
atgaacattactcagattcgcaatgccactcagctgattacctacgcgggaaaacgttttttagttgaccccatgctcgcgccgaaaggggcttacccgggtttcccgggtacggcgcatgcagatattcgtaacccgaccgttgacctacctgttgaggttactacgctgctcgatgccgacgcggtgattgtcacccacacgcacgacgatcattgggatcaaaccgccattgcactgatcgccaaagacaaaccgatttatgtacaaaacgacagcgacgccgcgctgctgcgcagccagggatttacccacctgacggtgatgaccgaagagaccgcatttgatgacgtaagcatcgtgaaaacccacggcggccagcacggtactgaccgcgcttatgccgtgccggacctggcggagcgcctgggcgaggcctgcggcgtcgtcttccgtcatcctgacgaaaagacgctttatatcgccggggataccatctggcgcgaagaagtggcgaccgacatgcaaaagcaccagccggatgtcgtggtactgaacgccggttacgcgcatgtgattggctttggccccattatcatgggcgagcaggatgtgctgaacgtgcattttctgttgcctgaggcgcagattgtggcgacacatatggaggccatcaaccactgtctgctgacccgccgcgcgctgcgtgaatacgccgaagccaaccagtttagcgatgcgttgagcattccccaggatggtgaaagcgttatattctga

SEQ ID NO: 158114 - DNA, 420 bp, Enterobacter cloacae
atgcagttgagcattactaaaaaagtcacacccgaagagaaagaagagttatttgtagggttaagagcttataacgggcagtttttagatatgtcgaactttagtggcgacattggcgtttacgtacgtgacgataatggcgccatgctgggcggattaatcggcgtgcgcaaaggtgactggctgaatattgactatctctgggtcagcgaatccctgcgcggctccggcgtgggcagcaagctcatcaaaacggcagaagatgaagcccgacgtcagggctgcaagcacgcgctggtggatacggccagcttccaggcacgcccgttctatgaaaagcagggctaccggctgcagatgtctttgcaggattacccccatgcgggcatgcagcgccactatctggcaaaggcgctttaa

SEQ ID NO: 158115 - DNA, 1059 bp, Enterobacter cloacae
atgaagagcttatttatcgctggcctgctgatacttgccagcccgacggcgttcgctgaggtggcaggaacctgcacgaccatttcaggcacacatgtgcttaacctgaattttccgcaaacgagtattagcgcgaaagataacgttccgggaaaaacgatggtggatatcgccgaggcgacggccagcgacagctatcaggtcaactgttcctgcgattcaaagcaccggcttaataagggattttcggcaatctactacacagcggatccaactggcggtctcgtatttgataaaaagattggtgaggtctcttattacaatcttaatgaatatctcgatgtcggcgtaaagatcttcatcaaaaacgtgggttacactgcaattccttttgagcacgtttcgaaccgcagtacagcctctcacacctgtggctcgtcaaacgatattacgcttgataccggaacgtcttcgatgctctcgttttatattcgaaaatcgatcaccggattggtcacaattcctctgaccgatgtcgccctcgtctacggcggaatatctaatgatttgcccaggggagaggcgatcgcaaaagtcaggatcaaaggctcaatcattgcgtcccagcagtgtgaaattaacgacgggcaggtgattaatatcgattttggtcagatccccgcctctgaattttccgccacgcccggcacatcgataaccagtaaaaaaattgagaaaaccgttacggtgagttgttccggcctggaccgctcgcaaaaggtgaacgctgattttaacgctacggcagccagcgccgacaacatgatggtttctacgtcaaacaacaacgtggggatcaaaatctacgatacaaacggcgacccggtgatggtgaacggcggcgcgctcaaaacggagatgggttctacaagcattattggcggaaaaagtaacggtactattacgttctctgccgccccggccagcgctaccggagccagaccgacgcccggcacgtttaacgcagatgccaccataaccctggaattttcaaactga

SEQ ID NO: 158116 - DNA, 2520 bp, Enterobacter cloacae
atggccggttcacctgttcacgttctctttgcctccggggcgctgctcctgctggcttgccagctacaggcgaaagaagccttctttaaccccgccttgctggagattgaccatccggcgggtattgatattcatcagttcgatcgtgcaaacacgctgccacccggcacgtacaaagtggatatccttattaacgggaaaaaacgtgagcgccgcgaggtcacatttatagcggataagcaggagggggagatccagccctgcttcacccacctgtccagccagctaaaagcgttcggtgtaaaagcggatgccatcaaagcgcttacaaacattgatgacgatgcctgcgtcgcgccggggccgcttgttgaaggttccgtatggcagttcgatacggacaaactgacgctcaatattgtgataccgcagatttggctggacaactatgccatgggctatatcagccccgaacgctgggaccaggggatcaatgcgctttcggttaattatgacttttcaggctcccataccgtacgctctgattacgacgacacggcggatagctattacctcaacctgcaaaatggtctgaatctcggcgcctggcgggtacgtaactacagtacgttgagcgctgaaggcggcaatgctgaatatcactccgtcagctcgtggctacagcgtgatattcccgggctgcgcagccagttcatggtgggcgatacctggtcggcaagcgatgtttttgatggtgccagactgcgcggggtgcggctttacaccgatgatgacatgctgcccgccagcatgaacggcttcgcacctgtggtgcgcggcgtagcgaaaagcaacgccatggtgacgatcaagcaaaacggttacgtcatctatcagtctgccgtaccgcaaggagcgtttgcccttaccgatctcaataccaccagctcgggtggggatttggacgtgaccatcaaagaagaggacggcagcgagcaacattttatccagccttatgcttcgctggccattctgaaacgtgaaggtcaaaccgacttcgacgtcagcattggcgaaatgcgggaagacaatcgctttaccccaaacgttatgcaggcgcaaatcatgcgcgggctgccagccggcatcacgctttatggcggcgtgcaattggcggacgagtaccgcgcggcggcgctgggtgtgggtaaagatctgggcgcgtttggcgcgctttctatggacgtgacgcaggcgaaagcccggtttgatgacggcgatgaatcccaggggcaatcctatcgtttcttatactccaagcgtattgatgccaccgacacgaatttcaggctggtgggctaccgctattctactcagggtttttataccctcaacgagtggtcatcgcgtcagggggatgaaagtaatttttgggaaacgggcaaccgccgtagccgtctggagggaacatggactcagtcttttggacgcggctgggggaacgtttatctgacgctgagccgtcaacagtactggcaaacggaggcggtagaacgcttgatccagactggctacagcaacaatctcggcatggtttcctggaacgtgtcgtggagctacaccgatagcgcgacgcaccacgacagtgccagcgaagatgaggataacaacgggggcgaaaacatctttatgttttctctttcggttccgctgtccggctgggtgaaaaacagttacctcaactatgccatgacgcaaaacgacagcgcgcaggcatcccatcaggtggggttaagtggaacgctgctggagcgggataatctctcgtataacctgcaacaatcctggacaggcgatagcgcagcggatgccagcaaccttgcgatgacctataacggcacttacggcacgctggacggcagctacgcctacagtgcaaatgccgaacaccttaatttcggcgcgcgcgggggcgttattgtgcacggtgaaggcgtcacgttctcgcagcagcttggagagacggttgcgctgatcaaaacgcccggtgcgtcggggctagccgttgaaaacacctctggcgtggccaccgactggcgcggttatgcggtgaaaacccagcttaatccttatgacgaaaaccgggtggccatcgacaacgactatttctcccgagccaacgtggagcttgaaaacagcgtgatcgatcttgtgccgacccgcggtgcgattgtcaaagcagagtttctgacccacctgggttatcgggtgctattcaacgtcatactggcaaacggcaagcctgcaccgtttggtgccgtcgcgaacggcgaaagtaaaggtgagctgctgacgggcatcgtgggagaaaacgggcagctttacctgtctggcgttccggaagagggatcttttgcgctgcggtggggggcgggtaacgtcgtggaatgccgggcaccgttccatatttctccccagaccggagcatcgctggtccaacaaaccgtcgtatgtaactaa

SEQ ID NO: 158117 - DNA, 687 bp, Enterobacter cloacae
atgttgtgcaactttattaagtcgctgttcgttgttatttgtcttttgaatatgtctctatcctacgctggggttattatcggcggcacccgcgtgatttttaatagcgatcgcgctgatgaaacgttttctatcttcaataaagagacaaacgtcccctacctgatccaggtttgggttgagccatttgataaaaaagagactaccccacctcccttcacggctattccaccggtttcacgtctggagccgcagcaggaaaaaatcctgcgcattattaaaaccaagggagcgcttcccgaagatcgggaatcggttttctggctgaatatcaaaaatattccgccatccgggagccgtgcggatagcaacacgatggaaattgccattaaaacccgaatcaaactgttctggcgcccggtggcgctcaatatgacgcccgaaaaagcgtatatgaaggtgaaatggcagcgcgtaggaaaccatctgcaaatagaaaatcctgctccaattcatatcaacgtgatggacgtgttcgtcgacggcaaagaaattccgctcaatatgcttaaacccttcgagaagctagcgctgcctttacccgcaggcgcggctggtaaagcgcttcgttggcgttttatcaatgattacggtgcgattagcgagcctctgaatctctccctttaa

SEQ ID NO: 158118 - DNA, 573 bp, Enterobacter cloacae
atgaaacgtaattggattacaggttcttttgttctgtgctcactgtttatggcaaaccaggcgctcgcgtctgatggcgtggtgcattttaccggtgaggttatcgacagcacctgtgaagtcaccacggatactattggccagaccgtcgccctgggtaaggtgaaccgatcggcttttggctcgatagtaggctccactgcggccccaaccgaatttagcattaagctggaaaaatgtccggccacgtacactcaggcggcagcgcgttttgacggcaccgaagcctctgacggcaatggcgatttagccattggcaccccgataactgcatcgactccaggcgactataccggtgagggaacagagaccgcggcgacgggcgtggcaattcgtatctataaccgcgctgataattcacaggttaagctgtacaaagattcctcttatacaaccattgattcaggaaatgctgagctgaaatttatcgcgcgttatatcgcgacttctgccgatgttacgccaggcacagctaacgctgattcacagttcaccatcgaatacatgaagtaa

SEQ ID NO: 158119 - DNA, 342 bp, Enterobacter cloacae
atggttggtgtcctttccgtccaccagcaggagttgtcatacgattcgccggtgtgggtgccggtgctggactgcccggacgaaatgctggaattcaacactgtggacagtgacgatgacggcgtcggcgtgcccgatagcgtgctgatactacgtatcggctcgaccggcatcccgcgcggttcgatccttgagtttgaagaagagataaacaacggcgaataccggcgcgtctggtggtacgtcctggacattcataactacggtaccgtgggcgtcggaagcctgtactactgcgttccatgccgctcatttgaagggattctcgatggcactgcttaa

SEQ ID NO: 158120 - DNA, 780 bp, Enterobacter cloacae
atggcactgcttaactctaccctactcgccaggctgtataaggagcatcttgaacccaccggtgttcgtgaggtttcagatctcaatgacgttgacgtggcattttgcaataacctgcttagagcctttgagggcgtggtggtttcagacctcaggcgagaaaccaaaccgtttcacgcgtggttaaaccgcgccccctcggaccagatcatcttcggtgagtttgacgatgttccgagcttccttgacgcttatcagaagagccaaacagggcgcaatcaggagaccggcacacgtaacacattggccctgccgatcataaacgtcagccgttccgtcgaattttctctatataccggcgagatcactcgcgacatgccctggtgctcaacgctcgttaatgcttccaatgagacatacgccgttttgagcaaaactcacgcggagataagttacaacgtcacgattattagtgatgagcgttacacgttaagcaggatgagcaccacgcttggatcgtggctctgtctgctggcgacgcacggtgtcaccaactttaatgccaagacgaagctggcagatgctgaaatcgagctgggggttgagttaactgatcctaaaagcgtgatgttcagtaatgtgtccctcccccaatcagagaaccgcatttatgccacgcaagcgatgatcaccgtcgttgctgacgtaatggtcgcctatggcgtgaaatcttcaacgcggcgcatagacgtgaaaatgggggtgaacgatggccgataa

SEQ ID NO: 158121 - DNA, 984 bp, Enterobacter cloacae
atggccgataagcagcagctgttcctgcaaaagctcatcgtaaatggtcacgatatcccgttagagctgctggtcacattcgcttatatcgaggccagtgacctttcagggccacaaatgatagcgaccttacgcgatatgaccggcacgctggtggacaacgtgggactcaaagagggtgcaatctgcgtatgcaatatgggtgacccggatggattaggcggcgttttgtttcaggagacattccatgtagtacgggcaccggccatgcaggaccaggtaaccatcatggcgttcgctaaaaacgtattcgacatgaagcagccagccggtgccgcccggttctttaacgatcgcggcgcagcaacggtcatcgcagctttatcgccaggcgtaaagctggaggccgactgctttaaacgtcaagggacctggcatctgaacaacgggcagaccccttcacaactgtttagggagatagcgcgagatcacggcgccttgttattcagctgtcggggtaagctgcacgccaaaagcttggcgaaccttggccgcgcgaaaggctcactgcgctatgaggtcaacaaccccaaagcgcagtacacgttgtcccacttcgccaacgtcagcagtgattacgaatacatgcgcgcgcatgacacgcggccagtcgggtattcaatgacggatggatacagggttgcccagggagaacggaaccagcccgtatcgctatatccagtctcgatgcaaggggcgttgaataaccagaacaagtacctacaacctcttttcgacgctgagtgttcgggtaatggcacccttatgcctggaatggttctcgatgtcgttgttaaccggtatagcgatgaaaacccgatcgatgaatcgctgcccccgcgaatgatcatcgaccgcgttacccactatcaagaccgcttcagctatcaatgccgcatcattttgggagaagtgagaccatga

SEQ ID NO: 158122 - DNA, 780 bp, Enterobacter cloacae
atgaatggaaaattacacggtacttatcgcgcgcgaattgtcgacgtaaagcacccgaaaagcctcatgatggccagggtacgcgttgacgcgctgtggcacggtgtaccggatgatgcctgcccatgggccgagtacaagctggaagtcggcggggcattcgcaccctgcaaggtcgatgacctggtctgggtggactttccatacgagggcgactctcggcgcccgcgtattaccggcgcgtgtcaggacgcccctggcggtgagccaaacgtgccacctgaaagctggggaggtggagatgcatataagccacccgaaattgaagatgccccgccactgcgcgagcttacacccacggaggattatgtctacaaccgcaacgggctgcttgagatcagaacgggaggcggtggctggagcgttactcacatagatacagacaccacgatgggcatgaacgagagtgggcagatctacataatcagctcacaaaacgtattcgtgcagggtgccactggggtgaaagtgaagtccggggcagatttggaactggaagctgtcggagatatcaagctgaaggctggtgggatggtcgaatcggcagcaggtagcgatacaaaatttacatctggaggttcgtttagctccaccagcggggaaaacaccaaaatcacttctgaaggctcatttagtgccaccagcgggaaaaacactgagatcgtatcgggcatgtccctcaattcgacaagtaaactcgtcactttcatgcagggatag

SEQ ID NO: 158123 - DNA, 681 bp, Enterobacter cloacae
atgtctggcgactataaagccccatgtccttcatgccaccgcgagtgcaataccgatgttattggtcgaaaagaacagatatgggaacaagattttgacgggaacagagtttatggggaagttgcccatttgctgcttgaatgctgtgggtgtaacacaatcttttatctaagaaaatcatgggatactgaaggtatcacacacgataaggtcgattacgaaatagttacttttccaacccctgtctcaccaaaggcaaaacctgaatggctggaccaagtctatttgaaagataagcgtctgtatcggatcttaaatgaggtttacgaagcatatgaaagagaatcatacatattagcttcaatcggtttaagaactgctttcgattgtgcgactgaggcattagacatagaagctggccatccgatgggaaagaaggtagagctggttttcgaaaagggattaatcggaactgaagaacgtaaacagttaatgattgtaaccgaggccggaagtgctgcggctcatagaggttggcatccctcggaagaggaatttacaaaattattgaacgttctcgaaagcttcttacaaagagcttttttaaacactgacaatctacagtcaatcggtgaaaaaatccccaaaaaacagaaagtagagaagaaagttaaaaaataa

SEQ ID NO: 158124 - DNA, 234 bp, Enterobacter cloacae
gtgattgaggagatcattgaacagtttgaaaggacggtcggccagtttccgttggggtgccagatttgccccgaactggtgaaaataggatgtgcgaagtaccgggagttcaatactgcaagtagctatcgtgtgctgtattcagttgaaggcgccacaataacagcgcacgctgtgctggcacaccgacaggacattcagcaattgctattcaaacggcttattcaggcttga

SEQ ID NO: 158125 - DNA, 669 bp, Enterobacter cloacae
atggatgacattaaacaacagattgatgatgttcttacatcagcctttagcagggagttttggctggatctgcatgaggagctatcaataacctatgcagcctgccaagccgtagcaacaggtaatacgctgaagctgggtgaaccagaactcattagaactagagcgcaaattagacattacggcttaaactcagccttaagaagagccgctcaacgttctggctatgcttcattcgacgccgagaccaatcccaagggtgaaaactatgtgattgtaagttctcaaggtgtccgtgcaagccggattggtgttaatcacaacaagctagatataaaagctgcaaaacatcgctctttgttagcggagctcaaccaagaccttgaagggttcacacctgatatgttcaacttggtctcccaaaagcgtcctgcggaagaaaaaggcagcttgggtgtgctttttttaaacgttaatccacctcttaacgttgggcaagacagaatgcttgacttaagggtggtagttcctttcacaaatttgaaaggctctcactataatcgttcgattgttgagatccttgagctatatgcggttgaaagggaagttgtcattcctgacttagcgattccagtactaaggaagcgtctaagggaacaagaaggttaa

SEQ ID NO: 158126 - DNA, 1221 bp, Enterobacter cloacae
atgagagtgggtatttctggattccaaccagagcgtctaacacaattacgagaggctagaggattgtcaaaaatcagcctcggacggttagttgagcgctctccctcgacagttacgaagtgggaaaatggaagtcattctcctgatgcagaggtgttgactctgcttggtcgggtattgaactgccctgttgcatggttcactaagccactgcagaaaaaggagaataacccagtcttttttagaacgctgtcaacgacggcgaaggatctttgcatcgcttcagaaaagtacatggagtggttacaagaagcagcagactttcttcaagagtacttagacctaccagcagtaaatgttccttgtattcaagtagatgattaccgagcgatagatgatgagactattgaggtaatggcagctaaatgccgagaaacatggggacttggaatcgctccagtaagcgatttaactcttgtactagagaatgctggaattatttgctctcgcttcgagcaaggtagtgcaatgatggatggatattcgcagtggaatgagactgagaagagaccttatatcatccttgcaacagataaagataattattacagaagcagatttgatgctgcccatgaactggggcatattgtcttgcatcgcaatattaagcgattagacaatgttaactttaagcctattgaggaacaggcacataagtttgcagcttgtttcatgttaccagaagaatcattttcaattgagttacccccataccctaccttggaaaattttgtgtcattgaaagcgcgatggggtatgtcagcacagtctatgattcatcgtgctaaatcgcttgaactcatctcacctattgagtatcaacgtttgtacaagagtgtctcagcccgaggatggcgaaaaggagaaccgctagatgatcttcgtaagccggagtcagtaagacttcttccgcgttgcgtcaatcttttaattgatgcaggcgtatttactaaaagccagcttttggaagggttatgtatgtcaagatctgatgttgaggatctcttttctcttcctcgtggatatttgacagagtcaaaaattatggaactagagagtcggataaaaataaaaaccacacatccgtcagatgagaaaaacatagctaacggcaacatacacaaaacgaatgttgtcgatttattcaagggcaaaaagtaa

SEQ ID NO: 158127 - DNA, 762 bp, Enterobacter cloacae
atgggaagagttacggaaaccttttcagaaggaagatataaaaatgctatagaatctgcattttgtgaaacatgcagaagaaagacaaaacatttaattgttacgtcctatgagcttacaggccaagaagaatgcggacctcatggctatacaattgactggaccagttcatatcaagttatccaatgccgtgggtgtgaggtattatctttcagaaaggaaaattggttttctgaagaaatgtatttacttgaagatggtgagtaccatgacggaacaacagtcactctatatcctaaacgctcagaaaccactagaacgcctaaaacatttttagaagtacctcgtagattgcgcaatctttatatcgaatcagtagacacattcaataatgattcctatatactcactgctgcaggattaagagcattgatagaaggtttatgtgcagaattaaaaataaaagatgggcctgttgaacgaacagagaagggtgttactaaaattgttagggctcgaaacttagaaggtaaaatagcaggtctgaaagaaaaaggaatactcactgctgctggggctgttttcctaaatgagcatagattcatgggtaatgaagcagttcattctttaaggaaaccatcccgcgaagatatttcgttagcatttgatctcattgaacattgtttcgaaactatattcgtgatgcctgctaaagcaagtgagctagaagagtcccgtagaagacgctctggtacagaatga

SEQ ID NO: 158128 - DNA, 477 bp, Enterobacter cloacae
atgatgaaagaaaataatgaagtaaatgagaaaataacattaactcaacagtgtatgccgctcaaaactcaatcacgcctaaaaagcattatatatgtcataagtttttttatgttaatatttgttattgccgcggagaaatataacataccacaccgtcatattttgagttctattaccataacttcaagcgttgcatccatctatttattaactatttactttcagtatggcactagaccagaaagacaaaagcgattgaaagcttacatagatgcctttgctaatgctttagcattggttgctatagtcgttacatttgtatcatttattgtctatggggaggtgagtgctttatataccaccttggcctcgtctaaatcacctgacgttatttttggcgttattattggcgtgttattttcacgagtcctatttcctttttgggatttgtattcaagatataaaaaaacatga

SEQ ID NO: 158129 - DNA, 690 bp, Enterobacter cloacae
atgtgcggtcgctttgctcagtcaatgtcacgcgatgactaccttgcttttcttaccgacgagcaggccaccagctctattcctcatgaccctgagcccatcgggcgctataacgttgcacccggtacccgggttttactgctgaatgaaagggatgacgaactgcatcttaatcctgtccattggggatatgcacccagctggtggaacaaacctgcgcttattaacgccaggggagaaaccgccgccactaaactcatgttcaaacatctctgggagaacggccgcgcgatctgtttcgccgatggatggtttgagtggaagagagaagggcagaagaaacagccctatttcatccatcgcaaagatggccagccgcttttcttcgcctgcatcggcagcgcgccctatgaccgcggcgatgagaatgagggatttgtcattgttacagctgctgcagaccaggggctggtggatatacatgaccgtaggcctgtcgttcttgcgccggacgaagccctcacttggatgagtcagtccaccagctgtgaaactgcaactgaacttgtgaagagtgggaggatatctactgataaatttacttggcatactgttgcgctggcggtcggaaacccaaggaaccaaggggctaagttgatagaccccgtggaacataggagtttgaaataa

SEQ ID NO: 158130 - DNA, 573 bp, Enterobacter cloacae
gtgagctttctatctactcggcaaatccatgagcactgtcttgccactacacaagaggctattgaaactattgggtggaccaatatctctgtaggcatactgagtgaagaagataaacgcgagctcgaagaagctgattttgacagccccctggactggcgttgggcgatgcaggcttatagcggcaatgctgatgacggaatactggatatcactttaaagctgatcgaccgcgacgagccagaactgctacagggagtcataatttgtaagtacgacactcggcgtgaccaattttcaatttgcatgttagaaaacttcatttcatttgaagaaaccgatctgacaggcaaggtgttaatcattgctctcatttacgctacaaccttctgccagatcgctgaacttgacgatgtgtacattcaagatccgaccgaagatgcacaaccacgttataggagctacgggtttgcccaggtatgggatgaccacagtaagatgtcggccgatgtacgcgagatactcgacaccatacgtatgaaggtaaatggcattgaccctgatgacgaatga

SEQ ID NO: 158131 - DNA, 174 bp, Enterobacter cloacae
atgattaagcaaaataaaagaatcacttctgataaagctatggctgccgcgaaatgttcactcgatttctggacttccatcgacggcaacaagcttgccaaggttggccggaaggaaaaagacatggatatggtcgggccgaagaaaggtgtaaagccagtaagcctcggataa

SEQ ID NO: 158132 - DNA, 651 bp, Enterobacter cloacae
atgaacgagcgtacgaaccagattatatatagtaaagaaagcgctattgtttttcttgcagtggttgttatatcaaccatggtaactctatccccagccattatgctacgctatgtcggactggatactgctttttccattgtattcattacagagattctaatttcaactttcgcttatttcgtttacctgaaaaatatccctggttgtagaataaaagtaaaagcaagttcagactcggttaggttttcagtcatctcatttcttgtaattatttttatacaacttactgtttactgctacagagactatttataccattacgaaccatcacagataaactggataacagttttagtgatgacactagtagtaccgtattatgaggagatcatctacagaggttgtgccttcggagttgtatgctcaatttacaggaagaatttgatcattccgtgtgtgataacatctttgtttttctgtctaatgcatggccagtattataatctgctggatcagatgatcctttttgttgtgtcgatgttattgcttgcggttaaaataaaaagcaggtctcttttctatcctatattaatacattcaggtatgaatgggttcgttatactattaaatgttcagaatattttataa

SEQ ID NO: 158133 - DNA, 381 bp, Enterobacter cloacae
atgacaaatatcagagaattaagttttgatgagattgcgttagtcagtggtggtaatgcaaacggtaattatgaaggtggtggtagccgtactagcagcagtagtagtaattctaaaactggagcacgtaacacactggcacgtaacgcaccgacacatatttacagtgacccggccacaactaagtgtggtgatgctgtctttagtgggatggtcggtggtgcaatcaaaggtggccttgttggaatggcaagaggaactattggtggagcagttgtcggccagtgtctttccggtggtgggaatggtaacggaggaggaaccaaggctggttccaataattgttcaggaagtgacttcggtgggacctgtaaccgataa

SEQ ID NO: 158134 - DNA, 282 bp, Enterobacter cloacae
atggctgactacatcgaacatggcattgatcgccgcatcctgaagcagctcgtcgccgcacaccgcattaagcgtgtcgtactgctgggaaccgcaactaaaaacaagatcctgtattcagcgcaggttgagctgaagacatcacctctaaaacatcacgtcacaggaaaaaacggcgagaaacgggtatgggcgttagcgggccacgcactcgacttcttattcaagctcggcatttctgagatcgacgtcattttcgtgaacggggctcacaatgagtaa

SEQ ID NO: 158135 - DNA, 909 bp, Enterobacter cloacae
atgagtaacttttttagtaactgctgcatttacaacatttcccgagatatggcatttcccccagctgaagagctggaaaaactgttggctcaatatgtctttaaaccgtgtggttccaacgagattgcctctacgggctggttcgctccagctccatgcggaacgttacttcatcacccaatcggcaaaggctttatgctccagcaccggcgcgaagcgaagatcatccccccggcgtacattcgcgaaatgacggcgaaacggatcgagcaaattcaaaacgccgaagggcgtccgctcaaaaatgcagagaagcgcgttataaaggacgacgtgatcatcacgctcattccacgagcctttacccgtatcgttaccaccagcatctgggtggaagcagagaatggccgtatctgggtggattcctccagctcaaaacgcgctgaagattgcctggcgcttctgcgcaaaacgctgggctcgctgcccgtggtacctctcaccatggaaagtccggtggagcttacgctaaccgaatggctgcgtgctggtggcgcgccgcgctcattcaccttcggcgaggcagcggaaatgaagtccttactggacgacggcggtatcgttcgctgtaaaaaggtcgagctggaaagcgatgaaatcaaaacgcacctggaggccggtaagctcgttacaaagctggccctcgactatatcgaccgtgtgagcttcgtcgttaccgacagcgccacgctaacgcatttgaagtttaccgacgagctgcacgaacagaacggcgacgtcgaagaggatataccgcgctatgacgccgacatggtgttaatgacggcggagttatccgcactccttaaagccctggtgaccagcttgggcggagaggcggaacggtga

SEQ ID NO: 158136 - DNA, 2571 bp, Enterobacter cloacae
gtgagaaatttaacttacggctcagtatgcagcggcattgaagcggcaagtgtggcgtgggagccgctcgggtttaaagctaactggtttgctgaaattgagccgttcccgtgcgcagtacttgccgagcgctggcctggcattcccaatctgggggatatgaccctgatagccgagcgcatcagagcgaaggagatctcagccccagatatcctcgtcggcggtaccccttgccaatcttattcaatcgcaggcctgcgcgcaggccgtaaggacccgcgcggggccctaaccttttcatacctggatttagcaaatgcaatcgacgaagcacgaagagacgacaacaaaccaccagcagttgcagtctgggaaaacgtcccaggagtcctgtcagataaagacaacgcctttggtcagttccttgccggtctggctggtgaagatgcagagttcgaacctggtccacgacctgaacgaggaaaaagcagccgttactggcgctggaatgaaaaaacccgtaagcatgttgcgtgctggccgcagcgcggttgtgtttttggaccacagcgcaaagtggcctggcgagtcctcgatgcccaatactatggagtggcacaacgacgcaaacgcgtgtttgttgtcgcaagtgctggagacgggttcgatcccaccgaagtactatttgagttcgaaggcgtgcgcagggatattgcgccgagccgaggcccggaaaaggcagctgccgcccttactgcaaatggcgttggagtccgtggcgcagacgataatcaagcgcaagcaggacacctccagccagttgtcggagctatagcagcgcactcgtttactggtggcgcaggaggtaggcctgagggtgctgcagctggtcatttcattcccgtaagcattactggcaatatcagccatagcttaaaagctgaagggcatgacggtagcgaagacggaacgggaagaggaacaccgataatctcaacttaccgcatgcttgcttttggtgaatatgcggacgatgacaccgcatcaaccatcaaagcgcgtgacaataaagatgcaactgacctcgcagtaatctcaatacacggaacccaagatcctgacgtgaaaattggtcttgctcatacgctagggcgcaatcacgggcaagaaaatgcctgcattgcttttagctataaagaccacggagcagatgcgacagtgaatatggcaccgacgttacgcgctggcaatcacaacttcagccatgcaaacagcggtcaaccacctgcaattgcttatgcgttcaaggccggtcagggtgccaaggcgggtggaattggatatgcagaggagcaatcaccaacattgacctctacacaaagcggaacaaacctagctccaacaattatgcaaagcacagcggtccgccgtctcaccccacgtgaatgcgagcgcttacagggctttccagacgatcacacgctaattccatacggacgagcgatccgcccggagaaaatggaccgcgattacgcgaaatacctcatgcgtggcggtaagctgacgttcgaagaatgctgtcagttggctgctgatggtcctcgctataaggccattggtaacagcatggccgtacctgtcatgcggtggattggtaagcgtattcatgatgcgatcgcctcttccggtacagtgcaggcgctatcgctaaagcaaccggtgagtggacctgttcgtgtgccgaaaagcgatgaggaactatcacggccgttcctgaagtggcccgggggcaaattcagcgccttccggacaattgagggctactttccttcagccggtcggctgatcgagccgtttgccggtgcgggttcgatcttcctgaatgcgggcttcgcatctaacatcattgctgacctaaactctgacttgattaacacatatcgggcacttaaagagcacgcgcactccctgataacgctcacacagcgtttcttcaatgactatggtactgaggaaggttatcagatggtcaaaaataacttcaacaagatgcactacacccgccttgagcgcgctgctgcattcatttttatcaacaagcactgttttaatggtctggtacggtacaacctcaaaggtgagttcaatgtcggctggggtgcccccaaaagggcgcactttccgctcgctgagatggaacatttcatttcggtcgcagatagctgcactttccagtgtggtagtttcgaaacaacgatctcccaggctggcgctggtgacgttatcttttgcgatcctccatacgaacccctgcctggcaaggatggatttacgaattactccggtggttcattcagttttgataaacaagagctgctggtggagcatttaaaagcggcccaccagcgcggggcaacggcgatcataacgaatagcggtgcaccaagcatatacgagctgtatcgcgataatggcttcacggtgtgcgaattcgataatcagagaaagatatcctgtaaaggagatacgcggctgcgagtgaacgatgtaattgcggtactaaatacttga

SEQ ID NO: 158137 - DNA, 285 bp, Enterobacter cloacae
atgcccatcatcgccattcaaggcgcaatctgttctggccatgaaggcttcccgccccgccctgccgtcgctggagagccgttctttaccgttaacggcgtacctgcgctggtggacggcatgccatttgacaagcacagcgacgcaaacagcacgcatgacggcgtcgctatctcttcccgcccctggttcaccataaacctcaggggggttgtatgcgtgggcgatccggtctcctgcggttctgtggttgcatccggcgatccgcttatcttcatcatctga

SEQ ID NO: 158138 - DNA, 789 bp, Enterobacter cloacae
atgcttgaacaacagtaccagatcgacgctttcaacgcgttacgcgcagctggtgggcttaccacgcctgaatccgctacgctgtaccggtctgcagttacacgcattaatcagcttatttcggagctgaacgcgctattacccgaggctatcacctacccttcaagcctggctggggtcatttcaacgctcgacggaatcactgaagacctcactgatgcctccactcttttcgagtcagtgattacgctgattgagatcaatgccgatacgtccgcgctcttaagactgcaaataggctgggaaatttactgccgattgactggcgaagccgggaagctacctcctgcgattatcgagctcattgcagatgtcgccacgcctcaggctgttgtctcgctcgttaacagcctctcaacttcggatctgaaaaccgccttcaccattctcaataacatcctgatcgcggttggcacctcaaacccggcaactcccggggtgccggtcgttatcccagaggatttactggacgatgtttcagatgccgttgaagcctttgccgaagatattgcccctcttctctctcttattggggtcgtaaccacagataaacaaaacgccgaaacaagcgtggcgcttgcgatgagctattaccaggacgccatcactatcagcctgctggattccctcacacgcggtgaatacgtttccccagccgttgcatgcattgcccctcagtctgtcatcgacgccctggcgaaggggcagttctacgtccgcacgtcgtaa

SEQ ID NO: 158139 - DNA, 1824 bp, Enterobacter cloacae
atgtcagatatcaaaccatatatggatcaagtcgcggatattcgcttacgcgctggtcgtgtactcgcatttgcgagtattccgcagtttaaagacggctccttcatcaaagaccgcaaagcatgggctcgctcggtcggtgatgcaacttaccaggatccattattcgaatcctacggcccggtagtttctacgattgtgggaacggcctgggcaagcgcgctggctgagtacacaaatgaacgtggcgaaatgccacgtgacgagattcttgcggccgcgcataaagcgactgaaaacctgctgctggaaggcgcgagtaaattccagaacccaagcgttcgttttcttcttgaaagcgcgcagaaagactttaacgagaacagccttcttctggaatcagctgactcaatgccagacctgagcacctcgcagggcgttatgcagctcgcaactttcgttgccatgattctgccggtggcgctcggcgcgcaaaccagtgacgcctgtactttcgtgccgtgtgaaaaagaccagaataagatcttcgagattctgaacatcgccggtaacagcttcggtgatctgaaagcaggccaggaaatcgacatgaccacagccgggtattactcccagatgggccgtgtccgccttttccctgccgatcaacagccgaaaggaactaagcagaagctgacctttaaagtggctgacgctgaaggggttgctgcgccgattcgtccgaagcgtactgttctgtacatcaaccgtaagccgacagatccggataccggcaataatactcttcatcacagcttcgtttacaccgatccaaccacgaaagaagaaacgtcagtcaccctgacctgcacgatcaactacgacacgggcgaaatcggcgttacaccatctaacccgttcccggaaggttatgagctgggcgttggttacgagctcgacgtagagaaaaaaccagatctcatcccgacgattaaccacaaaatgaaggattacctcgtttatccttcctactactaccttgctgctgagcacacgctgcaggccgagcttgaaatgcgtcgcgagttcaatttcgagctcaatccgctttcatatcgcagcctgcgcgactttatttcgcacgagatcgatatgatgcgcttgagcatcatgatctggcgctgcgttcatggctcaacgtatgacgttgcactgccggatagccagctgttcgagtcctgggcgggcctgctgcgtaacaagttcaaccagatttcagctgacatgatcgaccgcacccgtacaaccggtgtaacgggtatgtttgccggttctgaagcatcaaacttcattaaagcgctgccgcccactctgttccagcccgcgccgaactaccgtcagatgccatacgtgcattttgcaggcacgctgttcggcgtttataaggtcttcgaagtaccacagccgatctgcgtctctctgactaagagcctggagaagcaaggggctaaattcaatactaacaacattctctgctacggccgtggtgatggcattgcacaggctggtttcatcgccggtgatgccattccgctgatcccgcttattcacgacaccactccatcgctgcgcaaccgtacgaccatgtttggtagcgcgctgaacacaattcacccacgtcgtggcgaagactacttcgaaatgctggagctgaccttcgataagaaagtcggagccatcgacacccgtagcgggctcattgttcaggaccaaactcctgctgaaccagcccccgctgaacaggttgaagatacaactgcataa

SEQ ID NO: 158140 - DNA, 1752 bp, Enterobacter cloacae
atggaaatcccgttcagtcagtcgaacgtgagcgcagtatctattgctcgcgttaacgctgaaaacacaacgatactcaactcaggcggcaacagctctgtatttgccggtattgtggtctgcgaaaaaggcaatccttacgaaatcctgaatatcaacagcaacaatctgtattcaaagctggggagcccgctgcatccaactgcaggtatctgcgccgaacctatgcgccatcttgaagaagccgtgacaggtggtgaaggctacgtcgttcgcgtcacgccggataacgcgaaattcccgttcattcgttggattggtcctgcttcagtgcagggaacggtcagggcaactgactcagccgcaactgattcgactgcaactaaaagcgatactgaagtggctgagcaaagtgacgtcgcagctaccgaaggcaccaccaaaaaagttaaatcatcgggcaatttgaaggcaacagcgttgccataccagaccggtgccggtgcgatgcaattcggttcagatccgtcgactgagttcagtgcgaacgatgtcgtgatgctgtatgtcattgatggcaatccgtcgacgaaccgccacgtgcgctttactgcagatcctgctaatgctaaacgcctgattctgacgttgaccgagacaaactcgcttggtgttgtgacgacgttagacacctacacggtctctctcttcactgacgttactgacgattatggttcccctgcgtggatcgaaacgcagctggagaataagtcgaagtatctgcgcgcgatcgccagggcaaaccctactggtgcgtttaaagacgctaccgcacgccttgccgctgacacagggcctaaagacttcatcggcggaacggccggagatatgaataatatctcggcggacagctatgaaaaggcattaacggtcctccgcaattcgccggtgttcttctcagcgatccttggtctgggctgctacgaccgctcggtgctgaacagcctgagcgagatcgcacgtaaccgccgtatcgatgcgttttttgatatcgatcctcgtctttcctacgccgatgctctgaataaaagcgatgagtatggttttaacgaccacgagcacatcgcgttttaccacttcccttacacgtatcgcgacaagacgagccgtgcgactaccgttgctggcctgtccggtacggctttccgcgcgaaagcactgggcgtgcagaaggtcccaagtatcggtggctggcactactcaccagctggcgaagagcgcggcgttatcagccgagacagtctgaaatgtgccagctgggcgggtgagcctgattacgaccagatgtacacaaagcgcatcaacaaagtcgccagctcacgcaccggcgtgatgacgatcgacgattcactgactgcatatcgtcgtgaaaacagcctgcgcctgcagcacgtcaactcaacaatgaacgccatcgcacgtgacctctacaacctctggggcacgatcaaacatcagcctgataacgaggtagaggaatgtcttacgcgtgacaccccgcgcgtatttgacagctacgtggcttgcggcgcgctggtatcaccaacccaggacacaggaagcggcatagagccatacgtcatttcgtacaagcaagtcgaagatgacctctgggaagttgagtattcatgctgtgtcacaggtactgcccgccgcattgctggtatcccaattctgatgagaaaaggataa

SEQ ID NO: 158141 - DNA, 777 bp, Enterobacter cloacae
atgaataagtttgaaagcggcgcattccagcagcgcgtgaatttgctggtggagagcgtacgccccaaagaagaacagcaatcgcacgttaaaccggctcccattgtcaatgtgctgaagacccaggaggaagcagacgcagcttttaccggtcttctgcttgaagcggtagccaaaaaatccaaccaggatgagcgcggcgcagcagctgcagcggtgatcgaatgggctcagtccggcgatgcaagctgggatgcatttgaatcgctggctttcggtctggccctcgaaaatctgggtatggaaccagacgatatcgaagacgatagcgacatcacggatgaagtgatcaacgaatttaacagcgtcctggcagtgatggccgatgccgctgtcacattcggcgctgatagtgacgccgtcgccaccatgatcgatgaagaagatgacgacgcggcgacggaagtgatgaacgcgctcggggatatcgatgacgatgaagcggaagagctaatcgccacgttcacagtaggagaagacctctatgagtctatcaagcaaacagaaacagacgattctcaaatgcttcttgaagctactaaaaaagtggttcgcaacggaaaagtcaaactgatcaagaaacgcccgcgcccgaagaagctgaacagcgcacaacgctcagctctcaaaaaggcgcgacgcaaatcgaataccagcgctgcaaagatgaagcgcaaaaaatcgatgaagattcgtaagaagcgtttcggtaaataa

SEQ ID NO: 158142 - DNA, 576 bp, Enterobacter cloacae
atggcgcagtttggtgcggttttccccgatggcataagcgattatctgaagctctatatcacgtcagaagatctctgtgtcgttggttatattggcgaaggtgcgtcagcgcagttgtcggccaactggacatcggcgtatgaaggtgactctgtgggctcggtagctggtgaaacgctcgcgaacatggcccagtctttgtcgaatcagacaagcattacgcgccttaactcgctggtggtctggcaaggatcgcagccctttgagtttacccttcccatttatctgcatgcgcgatacgacgcgaacattgaagttaatgccgccatcgcagcgctttgcgcgatgcaggcgccggagcttaatgacataacgccagctggtcgacggccgtatccgtgcgttttggatattggcaggcgcttcaagatcgttgatgtcgtcattcgcgatgtccagttcgaactggacgccccgcgtacagccgatggtttctatacgcataacaacgttagcctccagtgcagcgcgatggctgtcactaaccgttccgaaatgaaaaatctgtttttataa

SEQ ID NO: 158143 - DNA, 504 bp, Enterobacter cloacae
atgagtacgtcaggacattttaactctcgcggaaacgtcggttttctgcgtgaaaagtacgaccgcaaccgcctggctggggaaaagctgatcggcgcggaatttgaaatgaactttgaaggctaccaaaaccttggagtgctggtgcgcagtacccagatgccggaaatggcgcgtcaggacgttgaagacgtcgggccgatgggcttgctcttcaaccagcacggttcactgaaaaacagcggtgaaatccaggtgcagtgcgttgagacaatcaccggcgctgtgtcggcgatggtcatctcccacgttaagaccaaaaattacgtgaatatcaccatcaaggcttcacctgagtcattggccggtgccgcgccagcgtctctcgtacgtcgtatgagcgactgcaagatctactgcgatcaggtcgatatgagtaccgaagataacgctgcgctggttcgcccgtccctgcgtatcgtctacaactgggttgatttatga

SEQ ID NO: 158144 - DNA, 558 bp, Enterobacter cloacae
atgacgccactcgctctacttgaggacgtcaaagggcgtttccctgtattgctgcacgacgatgaagacgcgttaaagcgtcttctcgttcagtcgctgggaacgtaccaggaccgcgccggtgtcattcgtgcaatctacctgcagtatgaaaacggcgaggccacccgggaactgcccgctgattttctggcccaggtgagcgtcaccgataagatggacggcttcgtatgctcgtcggtgatcgacggcaaactggtgctcgacttatgcggttgcgagagctggccactcaagtttcgctacctggtaaacctgcgggatatggacatcgagaacggcgatgtaccgccgaatctcatcggtatggtttccgactacctggaaatcctcatcaagatacctaacaccgatcgcctgcggaccgtttccattgccggtaagctcgacgtatcaacactgccggacgaagtaaccctctacgagcgtaagcggcagttagaagcggacatagccagtcagcgcgagatcttgccgatgttgtcgatttacccgtag

SEQ ID NO: 158145 - DNA, 627 bp, Enterobacter cloacae
atggctctaatttataacccctactctatggtgcaggccattcccggcgctggccgcattctgggcacgctcgatcgtgcggttggcctgaaaacgctttttgagtccgtcgtcccgacagctgagcagatctatcttcgccagctggcgcaccagctcgtccatacccgtttcgcccagggctggcagtgggcggtaaccattgacgagtttccccagatcgatatcttcgcgaaggatgtcacctaccctatcgcgtccgtcgagctggaagagaagaacctgggtgccggtttcatcaataaaccgatacgccgtaacaccggcaccgttaccatggttgtacgtgacaccatggagggcgcaatcctgcaatgggctgctggtgccataagccgcgtcactaaccctgacgggaccgttaatctgccctcggcatatctacagacaatccgtatttttcatattgccaacggcgcgctggtaccggaatccgttcaccacgtcataccgactgaaatcggcgaaattactcgcgctcgcgatcaggtcagtgagttccactccttccccctgacattcaccaaatacacgtcctttaacgggcttgaaatagggttaccctga

SEQ ID NO: 158146 - DNA, 849 bp, Enterobacter cloacae
atgcctatagcagacttccccctcccctctcagccggataaggtcatccgtttccgtgaccccacggttgccgacagcatgaagttcgctgatatcggcgtggcgtttgaggagcgtacgacgaccgaatacctgaacacgctgcagacgggtgctatctctgacagccggttctggacagctgcagaccgtaggaccgcgctttggtggatctacatcttctccaaggatgacccggtcataacggcaagctacgaatgcatgcactgcggtgatatgcactattacgactgcgacatgcgcctgctcgatgaagaggcgtccgtactcgggcgtaagccatcgatagaggtcaccctcaacgcagctggggaagaatacgaatggcagatcgtaccgctcgacggccaggcgatggaaaacctggaggtgatgcgcggccgtttgcctgaagatacagcctcacaggaatataccagctcgatggcacagctccggctctgggagatggtttatcaaacccgcctcttctacgacatcgacctggaatacgacgcagcggcgaacaagcgttacgacctgattaacagcatgcatctcagcaaagagtttccgctgctggtggcgcgcattcgacaggcgcaggacgtactgaagcacggtctgaacatccagtttacagacgggctggctaacctgctgctcccccctcacccatgccagaatgacaaggaggcaggaacgcgggccactcgcctcctgctccactttcggaatagctacttcatgccagagtctggattcgattggctggcggattttagtcaacaacctgacgttgtacggtaa

SEQ ID NO: 158147 - DNA, 1041 bp, Enterobacter cloacae
atgacagataatacggatgataaaaacgataaatgggaagactacgcattcaatgaagttcattcgcttatccgatcgcttaatattacacagtctcaccctctcgacgttaatgcaaaagagcttagatatcttgccgctctttttgccgagatgtcttaccatttgctacctgattgggaagtcgataagcgtaaacgcgcgaagctctatagaatccccagttctggttatcagacgctggtggataagggtatccgaggggcagctaacgtcttacaagctttcagcgaagcagatctaccgaaacctttcgttacctcatctgctgggattgtagctgttggggttgtaatcaatgggatcatgtttgttgggtttcgcggcactgcacttttgtttgattggaaggttaatattcgtgcagaacttgttcgagttgattcagcccaccgtaaatctgagcatcatgtgtttgaccattgcgtcattgaagataagaaggttttatctggtggagtacacagtggttttgctgaagaagccattcgaataacaaagcgcgttttggacgctattcctgcagctgaccgttcatacatcaaacacgttgttcttgctggccattcattgggcggagctgtggcagctatatcgaagtatctaatacaggagtggccaacaacagcgtttttatttggagctccaaggtatgcagatgcaggattttatcttaatgctttcgacaattttcctactcaggtgcgccgaactggtgatttggtgcctactgttccaccgcgttcatatggtttttgcgatcatcctcatgagcttgctactaatggcgaggaatacatagattccagcttaaattcatggttccccagtgacatttacaactgggctaaatttctttgttcgaacgctggcgctcataaaatggaaaactaccgcatggagataggtgaatctgttggagctaagctggcagacaagccgctgacagaggcactcaagattacaaaagaagacatatag

SEQ ID NO: 158148 - DNA, 750 bp, Enterobacter cloacae
atgaagctctccagtgaagtacgcatgaccagccgggaaatcgctgaacttacgggaaagcagcacaaaaacgtcatcgttgattgccggacaatgttcgatgcccttgatctgcaatcggctgacttctcagccgattacgtcgacagtcgcggacgtactcaaaaagagtttttgttagatcgtgatctgacgatgacgctcgttatgggatatagcatacctctgcgccatcgtgttgctcgtcgattacgggaacttgagtcgatgcagcaacccgcgccagcgccggttccgtcgttccccagcagcgcagccgacaagatcgccgctggtggcgctctgctggaagtgagcagaaaattactccacatatccgaaagcagcgtgctggcaggcctgcggaaactgcaaagcgcagctgggctaccggacctgctacctggctacgccatcgatgcgccgccagatgccaccggaggcagtagcgaaccaacggccagcctccgccagctgcttgtggagtacggggtgaagatgtcagctcagaaggcctacgcccgcctggctgagctggggattgtcgagcagaagacgcgaaccagcacgcggggcgagaagcattactggtgcctaacagagaaggggatggagtacggcaagaacctgaccgcgccgggtaacccgcgatctactcagccacatttctatctgtgccactttaaagcgctatctgaagtgttcatttaa

SEQ ID NO: 158149 - DNA, 276 bp, Enterobacter cloacae
atgatgatgactaggacggcaaacggctttattgatactcaggagctgctgaagcttgttaaccatgcgcgtaaatcatgcggcgagccgagtattcgtaataataaattcattgagaaagtaagagatgaacttgatggggagacctacacaaaaagtgtaggtcgtaagaatggcgctgatattgatcttatctcaatgtcctttaagcaagccctccgcgtcgccgcccgcgagtctaaggcagtacgcgtctttggtgaggtggaagtatga

SEQ ID NO: 158150 - DNA, 480 bp, Enterobacter cloacae
atggctaccatccctacccagactttgccttcagatagccaactatcatccctggcgcttaacgcgctgcgtttctcgatgtacatcagcctgtcagatccggcctgcgccgaagcattggcgacgcgaatccttgcggtcaattcatcaggaaaactttccacattaagcgaaaaccagcttcagctcgatgccgtgaagcgcgccatctggcgtgcatgggatatgtcgccggttgtcacagactaccggcgcgcctggctgcaggacgacgatctggacctgtcgccggacgaggcgcttcccgttctctttgcgaagttctcccagctgcgcacgttgatcagctgcgcagaaaggctgctggagccgctcggcaccaatacgtatcttgaggacgttcgccagctgctcggtaccgcgtcggacattgccggtggcgcgctcgtgatgtctgtgtttgatggggaggcagcatga

SEQ ID NO: 158151 - DNA, 3717 bp, Enterobacter cloacae
atggccgaagaccaaaacaagactgtcgcagacgacaagctcagcgctcttaaaatcatttcaacgatcgagaagaccagcgccaaagagctggacgtattgctctctatcgataagaagctggatggcagggcaccggctgggaaagcggcaccaacaagcccaaagcgcgacgacaacgcccagcggcccacgtcgcggccgtcacgtagctcgcaacctgaacaggaaaatcttccacgtaaaccgagaacccgatcacatacatcgacttcagggttaggggaggagcgtgacgacgggctgcgcattacccgccgagcaccgcgacgcggcaggcaaggtaaggatcaggaaaatattccacataagcgccagcagccctcagccgccacggtaccggaacagccagccccgcagccaaaaccagaaacaaccggcgagcaggttcgcaagcgcgacagcagcgggcgcttttccagctccgccgataaggctaaggagaagcgggaagacgcgcgccaccaggagctcatcgacgaagagaagaaagggcagactctgtttcaaaagctctctggcttcatggagcgtcgcggtacgaaggagatagagggtaccgccattgatgcagctggcgcagctgctggtggctcattctggaaagcgggtaaggaggcctgggagctcgtcagcaatacccacgaaatgctcaccaagggcaaagacgatgatgacgacgagaagaaaggccggcctctgtttggcaaggctaaagggctctttcgtcggaaggggtctgcaccaccagcgccgggaacggcgactggtgatattcccgtgccatcgcttaagaggaccaacagcgcaccagcgatactgaaagctgcacagctaacctcgaccgtgcgcggattcgggatgaagggcgctcagcagtctaaagcctcagctggttcgcttgatgttgccaaccgaaacgtccaaaaggccgtcgtaacaaagacggaagagcagacgcaggcaattcaggaaggcgatcgtctgatcatcgaacgcctcgacgagctgctggagaagaatggctccggtaataaaggcggtggcctgctgggcaagctgcttggcgggaagataggtaaagcgctggccggtatcgcaggtctgtgggtagcaaaatacggtaaaaagctgttcagcgccttaatagctgctatcactgctgctgtaggtctgggacggggtaggggagtgggcgggcgtgatgcttccccggatatcgacattgatcgcaacaaaaaaccaggcagcaagaagaacaaaaagcccagctcaaaaccaaaagggaatagctgggttaagaagctactcaataaccccgtaaccaagaccgccgctgctacagtggcgaccggcgcggcggcgggcgcggccgttaaagcgatcgatgccaaacccgtgtcagctgcagacgctgccaaagaaagcgctcagaaggccaaagccaccacgccgaagaccggtgataacgtgaaggttggccgtccagttgctgctgaagaacgcgccgcccaaaaggctgagaagtccgtcgctacgaaagcaactgcagaagcgactgagaagggcgctatcaaagccgcagcgaagggtaccgcaaagatgggtatgcgggcggttccgttgctcgggtcattaataatggccgctgtcgatgcgtacgacggctattccgatgaagaggcccagaaggaggccttcggggtagaagagggcaaggaggtcactaccggcgaaaaagcggccttctccgcagcgaacatttttgatatgggtggcctggtttccggtgcgtccgggctacttgcaagtggcgcccgcgcgatcggtatggatggtgtggcggactcactcacgttcgataccggcgatatcgccaaagggatccacggcgcggcgagcggcgcgaaggatgccgtcacctcgttattcagtgggccaaaagaggctgattccaaaactgaagctcaaacgaagcatataaccgacacgctcaaagagggcacacaggacacgatcaaaacgctggaagatacctcaaagcgtttgatcgacaccatcaccgaaacgaacccactcggtgatgctgaggttatacctttgaagggagtcggtgttggctcgattggccctgccgtttcgtcaatgcagggaccaagcgaaacgacaatgacgtcggatcttaatgtcggtggcagcaaggctaaagtccgttcattccgtaacaacaacttcggaaatattacattcgctggccaggctggcgccgtgctggagaagaaaaacgcgctcggtgagcaaagattcgcacgctggaacaccccagaagaagggctccgcgggacggctaaccagatcatgttgtaccagactggtaaatccagatggggcaagcttgaaacactggacgagatgttcgataaatttgcccctccggatgagaacgacactgaaaaatataagcaaagcctggagaagcaactgggcatcagtcgaaacgacaaaattgactggtccaaccctgacaaaatacgtcccttagtccgtgccatcggtacagttgagggcggcggcgctatccagatgtcagacgctgatatggcgaaggcaatcggccgttataacttcgagactaatcgctgggagggcgaatttaccgatcagtccctggaaaaaataaacactcaacgtgctaaaacaggcgaggccccactcaaggctacagaccttttcagtattggcaacccacttaccgggcgaggggatatcccaaaagcgaatggtgtaaatcagccgtcacctgctgacgttactcccgttacgccagttccagcccccgagcctgagcagcacgcccaggcggcaaaaaagaaacaggaaattactccacctcaaaatgcaacgacggcgaaatcggcctccagtgagggggtgcctgctgaatcagtaaccgacgccattgcagcaggcgcaacggagatcgccgggcatgcgctggccgatgttgagggcttgcgccagaagggtgcccctgcagaggttacgcacaaatcagctgagataagcaaagagaagcgcgaagaagacgctcagcagcgtattcacgccagcatccagaacggggagcagtacacagcagcaaaactcccgtttgaaggcactccgataattggcgatctcattaaacaatttggtggtgatcatgttgccaatgctgaaggcctgcgccaccaggcggcgccgggctcaaatgccatggaccgcgctatcgcctctcaggccggtaaaggccagccaacacccgtcattccagccaaaacgagcgcggcccagcaaaccatcaccggcgttgccagctattcacacccgaaagagctgtattccgtgaccgatcttcaaagtgctacgccagccatgccaacagctggagataagccagcagatcgcaaagcgggcagcagcactggcgacgtcgatatgaagatattggcagcactcaacaaaatggttggattactggaagacatcaaaaaagacggtggcagtaaagacaccccgcgcttcacttctgttaaaaactccccgcaaccggctcctcgcgcaacgataccgctttcggtagccgatccaactatgtccagtcttgcgagcaaatga

SEQ ID NO: 158152 - DNA, 354 bp, Enterobacter cloacae
atgatgaatgaaattgacgccctgctcgaaattggtccgaacgggataatagtgcatgacggtgacgaagccgccctggttgaacgcctggatgagtggttatgtacgccgcgcggggcgatctacggttacccagactggggcaacaggctgtcacgattcaaacacgaaccgcccgacacgcccacagcagtgcagatcgagaacgatattatcaacagcctgcgcgttgatataccggccctgacaatcaacaaaatcgtctgttcaccagtcgcatcagctcccgaccgctatgacattgcggttgttctgggaagcggtgccgtgatcgagcgagagatctctctatga

SEQ ID NO: 158153 - DNA, 1422 bp, Enterobacter cloacae
atgaaccagaaagatattaacgatcagtttaacgccctgctgaaaaaagacagctggtggtcaaagtatgcggattcgcagtttgtcgccatgatcgccctttttgtcggtcagatggtttaccgatgctggcagtacgctacgcgcgccctccaagagggctttatcagtacggccctgaagcggtcctccattcttgcagcagctgaggacagagggtatgtcgggcgccgcatcgcaccgtcaactggcctcgtatcgataacgaacctgacggcggagcgcctgcagttaccaatttactcaacattcgagagtgaggatctggttcccgtcctgctgaccgacgctgttgaccttgcggcaggggagacaaagagcgtttcagcgagccagcttgaggtgtactccgttgagaaaacggtagacgcagcgcagccgttcttcaccgttatgctgtcaaaagagatgaccgcaaattgccatagcattgacgtttacgtcacggagccggacggcacgagcgagctgtgggcaaaatccttcatgttccgcaacgcgaacaacaccagcaacgtttacaccgagttttataaacccactgagcaaatcgggatccgctttggcgacggttcaacgggccgcatcccgccaaccggcagcgtcatcagtctcgatgtctggtgtactcagggccaggtaacgattgttgaagggcagaagcttattccggtggatgacctggcggactacgagcagtcgataagcgttttgacggcatcccagatatctggcggcaccccggctgaaagcactgaagaaacccgcgcccgggcgcaatacttcgtttcatacgatgagcaaattgtctggggtgacgattacgtcttctacctcaaaaatacgatcgggggcatgtcctggctacgctgctggggtgaagaggagcaagagtcatataccgggtacgacatacgaaacattaaccggattttcctgtgtggccataaacccggtatcgggcaagagcagctgcacctgctattccttgagcgcctggccgtcatcccggacaagatgaataagcgcttctcgctggtgccagtgaattattcccctatctcgattcgattcatcggcaaggtgccgtcaacatccgtgcctaacgaggttgagctgacgctgaagaacgatcttgatgtccagttcggtcgagactccttcaaattcgacaccggcagcggctatgagcccatcacgaaagacaagctttgggccttcattgaatcgctcgggatctttaccgaatatgagcttgaggtagagggttcgctcgtggccgcgaaccttgaagattttatctatctggacacctctgcctcgacgttcgacatagctttcaagaagaacgggagccagtga

SEQ ID NO: 158154 - DNA, 1107 bp, Enterobacter cloacae
atggagcaaggatggttccgccgtagattgacgccagaaaagcaaaaatcgccgatgtgggcagggctggccgacgcgatcgaaacgctggttgtgagcgtcgttgaaacgctcctgcagcgcaacgataaccgtaaatcgttctatacgatggcagaggaagatcttgacctccgcattagcgagctggggcaatttttcaatattcgaacgagcacgaaatcaagtaagccgctgctgctagcgcagcgtttggacgagatccaccttaagaataccgaccagcctattatcaacacgttttggcgtgaatttgggaacatgacggtccagtggatgcctatctgggtgccggttgaccaggaaagatacccatacggctcgctttttctcacgcaagacgctgtagatctcagctgcgacccaccagttgatccgatatatggagaattgttcctgacatcacgcggtacgatatcggtgccgttggatgagatctaccgagcatattgcggtgagggtggcgtcgacctttccatggcggttgccgaattgctcaaggattttgagctctacattcaccccctgataccccagcacatcgtctttgacggtgtggcgataacgctcaacattacgttggtggaagacgctgaagcgatctggctggattacattgaaagcgacctgcgcgaccctgtcatccttcgtgaaaggggagaatacctatcgctcagcaccgcaaccgaaatcggcgatattcctgtttcgccctgcgatcgtactcatgaagacactgctatccgattcgacgatatcccagccgacgattggataactgatatctggcgtgcgcccgacttctttgcttctggcgtttacttcatggctgaaccaggcgcggtgcactttgaatacactcccgaaaatgatggtcaggaacatcaatacgcggttgcggaaactcttgaggaatcacttaagatcgaaagtcacattgagcattacttcgatgtgagcggcacgagtgacatcgaatccagcgacttttccccgcgtcttgatacgttcccggctgatgaaatccttacagatctcgggagttaa

SEQ ID NO: 158155 - DNA, 477 bp, Enterobacter cloacae
atgcctcaattaaacgttgctgtaggggctggcagtggcgatgtcagtgatgacggcgtgctgtataaagccagcttactcgactattactatgagcggcgggcaacaagctctatcaacgtcggcgagcgatttgtaatggctaaagcctggtttggcacgagcgatcttgtaaccgctaatcctgatggcgcgggctggcttatcgacgacattccgggcagcttctctaacgctgactttaaaaataagtttgccgagagcgatcttatctgcaactacgccgatggtcgcatcacgctgcgcgcagagctgcaggataagaacctgccagaaaacaccccgtatgacttcaatacgctcgtcatcgtggatgccgaggacaacgtctgtattgcgctatgtattcaacaggacacgctctatcgcggtaagaaattcatcgcggtcctgaccattgaaacaaggattgcatga

SEQ ID NO: 158156 - DNA, 1599 bp, Enterobacter cloacae
atgccggatgttcagcctattcatgcaaacagtctggctacggtaccggacatttctggctttcccctcgttgccgatgtccaatatcgcgagccttacgtctccagttcgttaaaccgtaagtttcgggggatcgtctctccaggattttataacggtttcctgcccgttcccggcgcaggcctaagcattgacataacgccagctgaagatggttacggtaccgcgtcaaacaccttcggtgagtatcaaatcaccgttcagcagcgtagcacagtcaacgtgccgctggtggctggcaatacgcatattattgtccttcagacttcttatgcactcggccaggaaacgaaccaggtcaatacgaagtctgcggtgaaagcagctgaaattaaggctgtcagtgcgctgggtttaaaccaactcgaaatttgtcgcgtcacgatccccgcaggggcaacagaaatcactgaagaaatgatcgacacgtcatatcgactaaacgtagtactgggggtaacgcttagctcggctattgatagtaagagagaagatatcgcggcaaacagcttagctgtgaaaaaagtgaacgataaggtcgagttgcgtgctgtggcagcgagcccgggcatatcaatcggtggttctgcgggatcgtggaaaacgtctgatttcctggcctggttagaaggtcagggtgcttttgagcacacattttggatgtgtcgtggagcgtggcctcaaccgagatccaaaacgattactgataccggctgtggtgatgttccgctaacgggcgcgaccgtagaagtaatgggcacccgtagctgtaaaaccattcgtattaccaccgcatcgtcaaaagatataagcgactcaggcctgattaacgccgaatttatctacgtcgataatggtccaaattactcaccgggctggcgcagattgttcaactccaaaaatcttccggaggagagctatcttgttggcgcaccaatcccttggcccagcgacgtcattccagccggatacgccaccatggtcggtcaatccttcaataaagcggcctatccgaagctggccaatgcatatccaaacggcattattccggatatgcgcgcgtatacagttaaaggtaaaccagccagcggtcgcgctgttctgtcaacggagttggacggaaataagtcgcataatcacaccacatcagtgagtgggactaacttgggaaccgttgtttccacaagtacggacctgggaaccaaaaccgttacttctttcaatcatggaaccaagacaaccggccttggtggcaatcattcccattccgttcccatctcacgaggcggggatggtggcaatggtagtgatggcggtcaagcctacgcatcaatgcaagggtcgacggctacgactcaagggggaaatcattcccactcagtcaatattggcacgcacaatcatactgtggttatgggttcacataaccacagcattccgatcggctcacatgctcacacagtcactgttaacgcgaacggaaactctgaaacaacggttaaaaaccgcgcttttaattatatagtgaggctcgcatga

SEQ ID NO: 158157 - DNA, 708 bp, Enterobacter cloacae
atgagcaactttgaattttctaatgaaccgcgtaattttcacgcgtttaattactctgctaatgagcaagaatttttgggtgaatgcgatattctggttgagccagatacgggtttaccggcgcattgcactttaattcgccctcctgagtgcccggctgggtatgcgttagtgtttcgggatgaaagctggcaagcggttgaagaccacagaggaagattggttatcgatacggctacaggagcagaaattcttgtcactgagcttggcccgcttcccgaaaacaccacaaccattttaagggacaatactttctcaacgtgggacggtgagaaatgggttcctgatttagctggtgctaaacagcacctaatctccaatattaagacgcatcgcgataatctgagcgcagaccatatcaacattgatggctaccattttcatagcgatgtcagcagccgaatccagcagcttactctttcaaaaatgggtaaagccggtgctgtgcctgccggggtgatgtggcagacaaaaaataccggtttaatcgagctaacaaatgaaattgcagcaaaattcgaagatgtgacaatcgctcacgatatgcgtctatttgctacggcgctccagcacatcaatgccgtcgaagcactggaaaatgttaatgacgttctggcttatgattattctgaaggctggcaaccatga

SEQ ID NO: 158158 - DNA, 459 bp, Enterobacter cloacae
atgacggtctacctagcattttataagggaacaactgagcataaaggctttgcccgactgagcgactggttaacgcgcgtcatcaccaggggaccttactcccattgcgagctcgccgtatctttgccttctggggaatatacttgctattcatcttccgtccgtgatgacggtgtccgcagcaaagtgatgccactccccgcagataaatgggatcttgtgccggtatccattgagcctgcgcttatcgatgaatacttccagcagcgcaaggggatgccatacgactggtttggcgccatcggtttcgtaacgcttagccgcggacgggtagataagtatttttgcagtgagttctgcgctgaatgccttggcctgcttgatgcctggcgttactctcccaacctcctttacgcgatcgcaaccagctcaaacgccctccactctgtgacagcataa

SEQ ID NO: 158159 - DNA, 261 bp, Enterobacter cloacae
atgcttaatgcagacccacgggctcgttacgcgacgatgcgccatctacaggaaattgccgcacagtacgggtgcggcatccgttattctggggcctataaagggttgttcacactctttaaagtcgatgctaacggagagcaaatcggcgacgatatctggctgagagagatgcaggacggccggattgtcgataaggttcgcgcgatcacgcttgcggaatggcaggactttatagccgagaaatccaaacagctttag

SEQ ID NO: 158160 - DNA, 432 bp, Enterobacter cloacae
atgacaactttacacgacacgatcatgccggatgaggagtatctctccggtttcatggaagaagcactggaagggcgcagcgaagatcagtacgtagttgagtatatggcggtactgaatacccgactgagtaaggatttacgctgttatcgttcatacgggccgttctggcccgctatcaaatcaatgctgcaggcgcgcggttacacggttgccggtcgcgagaatgatggtccggttgcatctctttacagctacgaggaagaagcgctaacactcattgccgctacgctctactctaatgagcgtcttgaatccggtaactactacaacgctgagcatttgctgccaaccaagcctgacgttgatgaagaggtctatccctattacagtgacgatacggagatagaattaagggcgaccaatgcttaa

SEQ ID NO: 158161 - DNA, 6852 bp, Enterobacter cloacae
atgagaacgacaaaggcgcttaacaacgccaccaacatgatcgaatcggcgacaacggttgacgaagtctgccgtgcgctaatgcaagcaatcaaacgagcaccagcaacgtttggcgtcacaaagcgcgccggtgtgtcgattgagcgtgagcggaaaacggccaatgccgccgctattgagctgctgaaccagttgccggatggcacgctgcttactgacgaacagcgtcagatcctggcgcgctatacgggggaaggcggtattggagcaaatgaacacgaatactacacgccgcaattcgttgcggagggtatgtgggatctgatgcagttatacggctctccaaccggtaactggctggagccttcctccggcaccggcgtattccacgaaacgaaacctgccggggctatcatgacggcgactgaaatcagtccgatctccagccgtattaaccgcctcctccaccctgaagacaaagtgtccaccagcgcgttcgaaaggctggctgcatcgtcgccggatgacatctttgacggggtggtgggtaacgtcccgtttggcgataaccgaggcgagttcgcgaacatggatccggcatatgctggtgagcgcaacataggtcgatactttatcctccgcctgctcgataaagttaagcctggcggttatgtctgtatcatcgtgccctatggcatgaccagcggtagctcacataaacggctacgcctccaggtttcccgtaaagctgagtttctcggcgcacaccggcttccctctggtacgtttgaagagaacggcacggccacagctgtagatgtctgggttttacgtaaacacccggaagatctcgcgcagcgcatggttggagaaaaggacacgcttctcaaagaagctatggtgctctgggacacgtacatcaacggcaagtggtttgagcaagacggtaaacgtttcgtgcatggcgaggtgctggaaggctatcgcatgaccgttaagaacgacacgatcacaagcggtgagatcaagacgaaacttctccacaagttccatagccgcattaactgggatttgcttgcgcttaccgaacccgttgaggtgctggccgtcgaaggtgatcgccgtttgattaacgatcgttggcatatttatgatggggagcgttgggtcctggataactctatccctaagcaggatctcgatgtttctcagtatggcgccggaagctacacagaattacaggctctgttctccgatacgaattccgctgccgtcatgggcctctcatggtcccagctgcaggccgtatattctcgcttccctgaagtcgtaccggccccgcacaaaaatgctattcagtttgctgccagccagcccgcagagctgcgtgagcgcgttttccgtggcgcgcttattggctcccgtatcgccgtgatgcaggactggatggcccaggggtacccagagaacgatattaacgatgtccggaaggatattgcgcgcatggtgtcagccgaataccaaaagcacgggcacccgggcaaaggcaaagccggacgagtacgcggcaagaatgctgctgactggctgaagtttaaaacagcgatcaccgaagacggcgagctggctccgctcattgccggtacgctagatacacgccccgttctcgcgtttaactcgtctgatgcttctcaggttgtaaatcacctcttcagccagattgacctggtacccatcgacctccaggagtttcgggaagtctttaccggtgatgcacctgacgatgacaacgagctgctggccatgctggcgagcaatgaggcgatcgcgatcaccggcgatgggcacttggttccgatggaccgcgccaccagcggcgatataagcgcgatgacgaaaagcctgatggctgctattggcgttgagacaaacgaggcgatcaagcaaaactacatccgccagctagaggaaattaagcgtaagcggaaatggacagatgttgatgctatcgacttcaacatgaacgcccgatggttcgaccgctcgctcattcttgaatacctgcgcgagcaggggtacaccgacttgcagtacgtaaaagagatccaggtcgaaaacggtaccctggtttcagaccagtcgtacaaaggcgctgaaggggtgtttgctggctaccgatacggcaccgtcgtcagcaaaaacaaagagaccgggcaaatggagtccgtctataagcgcgtctcgaagaaggatcccttcctcgctcagctggaaggctatctcaacggcaataaaccccgcggcgttttcgccaaccagtatatggagcgaatccgccagcttgaaagcggctttaatgactggattcgtcagcacgatgagatcggggatctcgttcaggaatataacgatgcatttaacgcctacatcccttacgaacagtctgacgcagctcttgaactgaaggggatctcagggaaaacagtaccgtttggctaccagaatagtgagatccgccgtctgtctgaagatggcaaaggtatttgcgggttcggtaccggtctggggaaaaccactgtaggcctcggactggaggcgtataacttcgagaacggccgttcaaaaagaaccgcaacggttgtaccaaaatcggtctaccaaaagctgtatcacgaggcgaaagatttttatgacgaagcctcattcaagaacatgctgttcgtcgggctcgacattgttcgtaacgacgatggatcaatccgccaggtacccgtgctggatgaaaacgggcaacagaaaatcaatccacataccggccaggttctctatcgtgacgctgtaactgaagcgagttcagacacgatcaaagagcgcatgaatgctattccccagagcaactggcggcacgtcttcatgacgaaagagcagtatgcgcgtatcccgatgcgcgaagagtcgatcagggatcatgcttacgacgtgctctatgccaatgctgaagctggccgtgtaaacctcgacggcacaaagcatcgtgacgctaacaagaaatcccgcattcttgatgacgcctccgacaccggctcgaagaaagagcatgagtatccgtatttcgaagatatgaacttcgacaacgtgatcgtagatgagggccataactaccgtaacagctattccgctggtcttgaatcgtcccgcctggcctatttgccaaccgcgccggtggctcagtcagcacgtgatatggcggtgaaaaacgcttatctcatggctaaaaacaacggtcgcggctgcgtaatgctcacggccaccccgctcgttaactcccctatcgatgcattcaacatgctcagccacgtggttgagaccagggaatggcatcgaatggggatcttcaccccagatgacttcgttcgcgtgttcggccagatcgcaccggtcacggttcagaagctctcaggcaaggtcgaagtcaaagatgggctagtgggcttcaaaaacctggatggtctgcgcgggatattccatcgctggaccgtgatgaagacatcacaagacgtttccagcgacgtcaagatccccgaactggacgagaaaagtgtcgaagtgccgctgtcgcgggagcagatggacgtctatgaaactctgcgcgctcgcgccgatgcgctctcgaacgtcaataacccgctcgcgcaggtgctcggcgggaaatctgacgatacccctctcctcgatgctaacggcaatgaaattaacccggaggatgactccacattctccatcattcgtgacatggaccgcgttacgacggatatggacctgtatcgccgccagatgacctttaacttcccggccatttacaaagagggcctggatgctctggttaacgatttgcctgccagccttcaggttgtagaggatgaagacggtgaagaggatgaaatggcagtgccggtcgatgcaacggtcacggttaaaggcaaggtcgcgcaactggttgtgcccgagtcgtacgaacacgaggtgctttcgcggcttgagaaattcggcatatcccgttctgacctgtcgcacccggtaccgccaaaatactcagccctcattgagaacctcaaagcaggtcttaaggatggcaagcagatcatcttctctgatgagaaaagtcagcacggtaagttacgccggattattgctacaggcctgggtatcgacgagtccgaaattggtattctcaacgccacgacggtcgccgatgcaggcaaaaaaggacgtaagcctaagcgcgttaaagccccgcctgagccgaaagaggatgcttcacccgagcagctggataagtactatcagcaaaaggcgctctatgatgcctatgttgccgcgcagaatgaggtaagccttagcggccttgagtccatcgcagctgactataacgaaggccgcacgcgtattgtcatctgcaacaaaaaggccgaggtcgggattaacctccacctcggaacggccgatattcaccatctcacactgccttggacgccaggcagtatcaaacagcgaaatgggcgtggcgcgcgcgtaggctcgaccaacgatcgcgtgcgtgcgcactattactgcggcaaagattcattcgatgacttccgcctgtccgcgcttcagagcaaaaaagactggatcggcaatctgatgtccagcagcgaatcacgcatggccaacgccgatgccaatgatgccgtggaaatgaagctgatgctggctcgtgacccggaagaacgtgcccgtcgcaatgctcagctggtggaaatggcccaggagaaagctcgcgctgcagcgaaaaagcgtgcggatatcgacctgagcaacttcttgaaggcccagcacgcgattaactgtgatgtgacgaaagagaatgacctgcttcagcagcttcaaagcgcgatgacggatgccaatgaccgacttcagagctgccaggagctattagctatcgcccagacgaaactgaagcaggtgagtgagaatagcgaggaacggtgggttgtaatgggggccgaacgagacctcagaaacgcccgcgactatcttgaagatgctaaagccagtttcactaaagctaagaccagctttaacaagcaagagcgtaaagttaaacgcctgaaaagcgctgaaggcgaagccaagcgtctgcgccccgctattgaaaccgctattgaaaaagggctggtggatgtggatcgtgatgttctcgaccgtggcgataaatatctggtttctacggtaacgggcaagacctaccgagtcggccaaaccttccatatcggttacagctctgcaactgaagatccaaatgccctgtcacgtatccaaagcttcgattttgatgcacgtacggcgaaaatggagatgatttatgccaaaacgattaaccgatctgttatcggtgcaacgcgcgtaattgaggtagataagcttcctgacccggtttcagtaacggaagacgaggtgtccctccgccagtggttgatcggcggcgtgtcgatggcggacgttgctgaccgcatcacaaagcaggaattccacaagtacattcaggacggtttactgacattcagcgatggcggtgtaccctattttgctgctgagggcttcaaaattttagggaaaagccattcgatttatggtcgctctccagtgcttgaaggtacctcacttaagcgtctggcaaacgatgttatctacccagatggctctgacactgtattgaagacacgtgttgctgcgtggttccgtagtgagcctggcgcgctacaggatctgcctgcgtttgctaaggccatgtttggggaggactacaaatcccgcatcaatgactacggcgaaactgctgatacgacagtgatcgaaacgtggatggccgagtttatggccgcgtacgataccagcagtgataaatatctgtccggcgatcgccgctcgcaggtacaaactttcctcgataccggcgaactgccgaccgtaaatactgatggtttcaagcgccaggcgcgtgagtctatccctggcgaatacacaaacagggatgattttgaagcggttatcactcgcgcagcggataagctgcagatgacggcggcggagaactgtaagatcgcagctcgcgatatggcaatgacccggcatggcctctttgaagctgaagtgaaaggcatcggtgactatgtgctgggccgcattcaaaagctgataacgacaactcctccacttcactcgctctatagtacttacgctggctcaggtatctcgtattacgtgttcctggcggatgcggtaaacatgggagtcattgaagaacgtgaggtaaccgtcgatctcctcgctgactatatcggccagcgtgatttttcctatgctacttatgaccgcatcaagggccagatcgcccaagagagggccccagaactacttcagcatgcgcgggaaagagcgggcaaaacaacggccgaagacatggccgaggtaagtgccaaaaaggttgagctggaaactgaggccagtacgaaagagtcagcgattgacgaatctggtattcaaatcaaaacgaactccactgccgtgctgagccgctggcgtggccgcgtaatgtataaatttgacgctggtgaatgttatggcctgcatgacccattcggcaaaaaaggggcgctctttaaagcaaaagatgatttaaagcagcatttcgacgcgaagtattataatggcgaaaattcgggcgaagagtttgaaggctcatggtggctcatctcgaccgagcacgatctcaataatgttctctcagtgattcacagagcttaa

SEQ ID NO: 158162 - DNA, 1731 bp, Enterobacter cloacae
atgagtgagcaaattggcgatgaaaaaaagggcgtgtttaaagccctgcggcagctatttggcggcagcaaatcatccgatcagagcgattacagtgcgggctatatcaccggtggcgcgggcacgcttgtttctataaatgcgagtaacttcaaatttgctcagaaagataacgatgggaccagcgctggtgggtttaccacgtgcggcgctgatatgaccgatgacctcaaactgccggaggatcgcttcgctaaatacccgttcctcgaagagatggcgaagtttccaaccctctcagatgctatcgatatccaccttacgcacgctttatcgaccgacaaaaagacaaaccgctcattcgtgattaccgctaagcaggggaaaaacgataaggaaacaaaggctaaccaggcggtagcagaggccctggaaaacgagctggggcaaaccctcaacgaacagatgcccggctgggcgaaagtgatgtgcatctatggcgtgaactatatccgtccgtacggggagcagggcgccgggattaactcattcgagggaagctattacacgctcccgtgctgggtgcgcgagtatgttcgcggatccgacttggctggctttaccaacgagtggttctggcgcggtgccgagaaaaacaaaattcttgctgaaccctgggcgctgattccgctcaagatcccgtactgggttccgagccgcacgatgattccggttacgaccggcacgcagggttatgcgttaatggatgatcccctggagcgcgtgccgatggagacccaaaactacggcaccagcctccttgaaaacagctacggcccgtaccagaaccttgtcaacgccctgaagtcactgaaagcgagccgcaataacgccagcaagatagaccgcctgattggggtgaacacaagcaacctcgatccagttaacgcagcggcctacatcaacaccatcacgacggcgtttaaacgaaacgctgacatgatgaaaaagcgcgccattcgtggcggttatacgcctaccgtcgttaacaacgtcatcccgttgatgggcgacggcgggaaagggacgatgactatcgatacgcaggccaccacggcagatatcgggcagatcgaggacatcatgttttatcttcgccagctcgccgccagcgtcgggctcgacgtcacgcttttgggctgggcggatatgatgagcggcgggttgggtgacggcggatttttccgtacatcggttcaagctgcgatgcgcgcgcaatggattcgaaacgccgtcagcaccttcgtataccgggcgatagacatccacctcgcctggaaaaccggcaaagtctacctgccagaagatcggccctacacagtccaattcaactcgcttaatacggctattcaggaagaagagcaggcggagcaggaaagccgcgccaattacgcctcgatcattacatccattctcgacgcagtacaaaacagtcctgcgttggctggctcacagacgtttatgcgcctgctgtgcactgacgtcctccatttcagcgaaaccgtgtctgacgcgcttatcaaggagctgaaggggaaagatggcagcggcatgccaaacgagatcgacgacgagcaactaatggaatctttacgtcggcttcccccagaagaacggcagcaactcatatttgaatgcgtgagaagcgcagaggaagactatgtcgcataa

SEQ ID NO: 158163 - DNA, 1032 bp, Enterobacter cloacae
atgtcgcataaatcattacgtacggtcactgaccgattcaatatcttcaaaaactctcgcaagctgggcgggaacaagcgtaactacgttctcgccgcggtaaagcagctcttcgaaagcgccaatacgcgggagtctatccaattgggtgagctgtatggctactacggccacggccgtcgccagatgaacggccgtctcgacatacccgaagtatcggtgatgatgctggagggaaagcccgtggttatcgagaacgtaccgtccaacaggaccgtagacgttagcatcgatgacgaagggacggtaacgcatacgcaggaaatttttgtcactgacccgggcaaaattgtgtcagggctgattgactcaaaggcgggcggctggagctgggcgatgggcggcgcggaagggcgctgggttataccccgcgagtttagcggcttcgactatgtaggcgcgccgaactacattagcctcgatcacccctcgtatttgcttgaatcgggctcctcacgtgcgcagcagcgcgaaatgctgctggagtcgctgcaacgccagggctacacgccgaacgccgccaaaacgatttcagagcactttgatgcaatgctggatatgaatgtcgatatttcatccatggaagaagatgttttattgctcgaaggcctgctggtggagagtaataccaaaattagcgatctcgaatctatgcgaaacgaccttactaagaccgtcagcgagctggaagagaaaaacgcgtcccgccgaacgatgcttctcgaagctgtctcagctttacctgttaatcttaatgacgaacaaattgaggcgttggtaaatttgaacagtgcagacgatgcaaaggttgtgactaaactatttgaaagtgtcatcagaaagaattttaaagaccttccgctgcgcaataacgaacacaaaccatcaccagtgaaaatagataacatgattgatattcatagcaagaacattgtcactttttccaacaacgacacattactgttcaaataa

SEQ ID NO: 158164 - DNA, 1029 bp, Enterobacter cloacae
atgacgatactaatatcaagaaaccctctttgcaagtcaaataacaaaatttccggcatcggtttaaaaaaagtcatcgaatcattaccagcatctattatttccagagcatctagaagtattctcgtatgtatttgcgaggtagcagccagcagctcggaatataaaatatttaaatccaaaaaacgtatggccctggagtgcggagtcaccgttgcgacagtacgccggaatctcgacctggcggttaacgctggcatcctcacccgctctttcgtattcgatgacgtcaaagggcagtgcccaacagagtatcagttcactcgcgagtttatcgagatagcgcgcctggcatgcgacttcattgttagtaaagcaaaagacgctgccgctaagctctcggcactctatagtcagtttgctcttcaactatcagcttcacatcggcccgggatgagaatcggccagctgctacgccagcggtcaaaagcacacagggaaaagggtttgcatgaaatacccccagatcaaatttctcctcccccccctgatcattttgatcgggaaatagagaaaggtgttgaagttgagaaggttaaaacatattccccagctcgcgccgggaaaggtgtttatggcgcagtcaaaaaacttaaagacgcagtagctgagcgagcaaagacccgctccgccgatcttgccgagcgaaaaaaccaggcttatcaggagcgagggcaggagattcaacgtatcgagtgtgaagtacggcgccgtgcgtatatcatgaacaaagccagcgaaagggccaccagcaccaccttcccagcaggacgtttcagtgcagcaaacaaagcccacgaagcgaatcgtgaacaaacagccgcagatttacatagggcgcaggaaagcggcttcaatccgctctcgttcatcgctaatttgcgccaaaatttgagccttagacggagagaaccaacatgttcaccgaacccagaattatcttcatgctcggattcgcaggaggaatag

SEQ ID NO: 158165 - DNA, 129 bp, Enterobacter cloacae
atgttcaccgaacccagaattatcttcatgctcggattcgcaggaggaatagcgttcacttacagctccgttttgctgtcccgggctttaaagcgccgcgccgaccaggcaaaacggaacggtaattag

SEQ ID NO: 158166 - DNA, 486 bp, Enterobacter cloacae
atgcatccgaatatgaaggctatattggacacaattgccgtaactgaaggcacttctacacacaagctaacgaagaatgatggctatgacgtcatcgtcaccggcattgacggccagccagagatttttactgactacagcacgcatccatttgcaggcgggcgtccaggcaagatcttcaataaggcaggacagcgctctactgcgtcggggcgttatcaacatctggtcaaggactgggagcattaccgcactcagctgaagcttcctgatttcagtccggcgtcgcaggaccgatgggccatacagctcattaaagagcgaaaagcggtgtcagacatcgagaacgggaacatagaatctgccattaagaaaatctgcaatatctgggcttcgcttccgggagctggttatggccagcacgagttttcaatggcgaaagtgattcagatttatcagtctaaaggcggtaccgttgccaaatga

SEQ ID NO: 158167 - DNA, 642 bp, Enterobacter cloacae
atgccaattcttgcaattgctcaagggaaaggcggtgtaggcaaatcgacgacaagctataacgtcgtatgtgagttaaagccgaataagaccgttgatctcgatatcgctggtggtatctcaatcatcaacaacttccgcgccgacaacaaaaaattaccgattacgatcccccaaacaactgaagaactcattaatcttctacgggaaggagagtccccggataagcttgtggtagtagactgcggtggttttgactcccagttcactcgtatcgccattgctgcagcagaccttgtgattgcgccagcaaacgagacattcctcgatctggttgggacacaggaatttaaccagacgttgcgtgaaatcagcgatcaggtaggcagggaaatcgtcggctacgtgttcttctgtaaagtgccatcatccaaaaagcacttccctaatatggaagacatgatcgcaaactcttcgaatttgaagttgctcgaacatcgcataagcgcgttgaacgaacaccatattaatcagttccgtggtcttggcgttactgagctcccggcaacagccagctcacgcgcagggaaagaagtgcgggcattatgcgaagaagtgcatcagctacttcatcgccagtaa

SEQ ID NO: 158168 - DNA, 315 bp, Enterobacter cloacae
atggcaaaacagccaaaagtaaaaaactgggatttgatgagccgcattggcagctccgcaccgcttaaagaaaacgggcagaattctgccccagcagcagaaacaccgacccctgcagccgaaccggtgccaactaagccggttgaaggcccgaaggtacagcgcaaaatgctggcggctatgccgactgaatatgtcgaagcgcatgagcagctgcgtgaaagcggacgcacggcgatgaacctctcttcttacatctatgaagcggttcgtgaaaagctggtgcgtgacggcgcttttgaagcgaagaagtaa

SEQ ID NO: 158169 - DNA, 543 bp, Enterobacter cloacae
atgcagacctctacgcacgaaccaagcgatgagcataaagattctgaggacgatacttcagatgtggaagtagaagagctttcgcatgagatcttaagccgtcctcaggttttgcttcatgcacttgatcgtcctgaaatacaacagatcatcgttgcccacgaagctttctccggccccttccctcatcctcgtcatctgaagggatatgaagacgttttacctgggtcagcagagcgaattttcagcatgaccgagcgagaaatggctcaccgtcatcgcatggaagagaaagtattggattccgctgttagccgggacaggagggggcaaatcctcggtgttatatctaccctggctgctcttggtgcagcatcgtacctatcgatgcataagcatgatggcgttgctatcacgattattggtgtaattgttgcagttgccggtatttttgtattgagaaaataccctctcggacgtggtcgggaacaagtcaacaaccaagacaatgaagaagatctgaaggacaatcaaaaccagtaa

SEQ ID NO: 158170 - DNA, 483 bp, Enterobacter cloacae
atggcaaatcaaaaaggaaaggccatctttaaccttgatgaagccattgaggcaggcaccccccttggtatcagtaaaaccagtaactaccaagtcgtctcaggtcatcacgtgccagataaatggaaaatacgcagtgattttgaggctgtagggcgagatctatgggcggttggccgcgaccagaaaatgcaggccacgaagggttctccacgtgcatccagtgcttcgaaacccatggttggtgataagcaaaattggtctcgtatggagcaagcacatagaagaggcgttgaggccggttcgaaaaattctgtatctggttcgtcaaaccagcgcaacgtacaaaaagaaatggtgggatcgcgcgtaagcgtgaatgaaagggccagaacggatggacaagttaaaagcaaaaactcatacgcagaatacccaccatacggaaaatatgcagacctctacgcacgaaccaagcgatga

SEQ ID NO: 158171 - DNA, 1023 bp, Enterobacter cloacae
atgcggggcgcgggtgcaatgtcgcaggaccaagacaataatctcacagtggtgcaaggcaatgatctgcttgaggggacgtatagcgttaccctggatgagatgcgcctgctcaatatggcgctgtcccagatcgatagccgtaaggcccagcctgacacgttatatagactgttgccgaaggactaccagcgcatatacaacgttaacccgacgagcagccatcggcaacttcgtgatgcagctgaaagcttgatgaagaagcccgttgttatctataagcccgatcgcaacggcaagatacgtacggttcagttgtcgtggttctcgcgactcgaatacgtgaataatgacgatcacagtgctgttgtgcttcgcttcggccaggacgtagctccatacctgtacgagctgaaggaaaacttcacgaagctcaacttcacgaatctggcccgcctagatacgccgttctctatccgtctttatggctggctgattaaggcgcgcaaccttcggtcttaccgaaacggtgacaccattgaggtcacgctggagctggattggatcaggcagaaagccggtattgtcgacaagtattcggattaccgtgattttagacaaaagctcctgcagcctgccctcgaccgtatcaacgcagtgacggacatttccgtcatctgggagccagtcaaagcgggccgtacagtgaaggccatcaagttcgcttacgtcgacgagtcagctccaattacggttaaacccgttcgtccgcgcctgcctcgtcgtccgcacgtcaccaaaggctctgatgcggaaggccagtgggcgcgcaagtgcatcaagattcttcttgattacagggagaaattgacaacatatgatgtccaagagaaagtgagcgtacctgatctacgcaagctggccgggtggtataagattatcggtgacagcattgcggaaaagaacgttcagaatgaaatcaaagcccgctcgcagcgcgggaaaaaagcgttagctgcatga

SEQ ID NO: 158172 - DNA, 1293 bp, Enterobacter cloacae
atggttattaatcaacaaatagaacaggctcagagcgtcgctgaagtgctctcgttgcttactacggctacccagcagcacgctggccgcgtcgcttatatcgttacaccaaagggcaaagaggtgaagacggcttttaaagtgattgaggccactgacttgatcatgtccaacatgctcgacggccgcattaaccctaatttcccgccagagcttcagccgcgggatcgtacgcgtaaaagcagcgttctgcaggtcaacgcgatctcaaacaacattatgccgcagcgcctagctgattcaggcttatcgagccatggctcccctatcgtgggtcatgacaacgtagtggaatcaggaaacgggcgtacgatggggatcctaaaggcatacgccgaaggaaaagctgataactaccgccagtatctcatcgataacgccactctatacggccttaacgcttccgacatatcctcgaagcagaaccccgtcctggtccgggtgcggttagataacgtcgaccgcgcgcaatttgccaaagacagtaacatatcagatcttcaggatatggccgcgagcgaaaaggcctatgctgacgcagagaacatgacgcctgaggtaatggccctcttttctcccgcagagaacggcaacctgttggctaagaccaacgacgtttttatcaaggcgttcctggcttcacttggagatactgcgactgccgggcttgtaacagcagatgggcgccctacccgccagctgctggatagaatgcaaaacgccatatttgccaaagcctacaaaaacgaaatgctggtgaagctggttgcggaagaacccgatcctgaaatacgcaatatccttactgctcttaacgttgcagccccagcttttatcgatatgcagtatttatccggtgaagttcaccggcagactgttggtgacatttgctcatctatcgaagctgtagacagtcttgataaacaggctttacgctcgctcgttgacgctgctgacctcgtcaggcaggccaagagtaatgaccaatccgttgaagagtttgttcagcaattagggttgtttgaggatgtgccagatgaagttaaagctttagctttgttcatcagtcgcaataatcgatctgcaaaacgtatgggtgttgccttcaagatcatggcagaagtcatcaacgaagagctgaaaaaatcaggggcagctgttaatgatatgtttgctgctgagcctgtagtgctcagtgatgttattgatatggttgaaaaaaaaattatctga

SEQ ID NO: 158173 - DNA, 1461 bp, Enterobacter cloacae
gtggtcatccgcacgcgggtgcgtatactgcataaaaaaaccgagatggttgaagtgatgtccgaacaacaaaacgagatataccaggcaccggccgaccaccgtgtcgatgctctgaagtcgccaccgcactcaatcgaagccgaacaggcggtgctgggtggcctgatgttggataatgatcgttgggatgatgtcgccgagcgcgtcagcgagtcggatttttatacccgcgctcaccggaacatataccggcaaatgggcacgcttcagaaaatcggctcacccatcgacctcgttactctcgctgaggctatcgagcgcgctggcttcatagattcagttggcgggttcgcctatcttgccgagctgagcaaaaacacgcccagcgcggctaacattctcgcttacgcagatatcgttcgtgagcgcgccatcgttcgctcgttaatcagcgtcggcaatgagatcgttaacgatggtttcaatccgaaagggcgcacagtagatgcgctgctggacgaagctgaagcgcggatattcaacatcgctgaaaaccgctccagcaatgaaagtggtccgaagcgcatgacgcagatgctgactgaggtcgtgaataatatcgaagatctctaccgcaatcctcatgatggcgttacagggctcgataccggatttaccgacctcaacagtaaaacagcaggcctccagccttcggacttgattatcgtcgcggcgcgcccgtcaatgggcaagaccgcctttgcgatgaacatatgcgaaaacgccgctatgttgagcgataagccggtgctggtgttcagtctcgaaatgccatcaaaccagctcacgatgcgtatgctgtcctcattctcgcgtgttgacctcacccgcttacgtaccggccagcttgatgatgaagactgggggcgtatcgccagctcgatgaagatgctattggagaaagataacattctcatcgacgacgcttcctccctgacgcctggtgagctgcgcgcacgtgcgcgccgtgtctaccgtgaacacggcggtctgagcatgatcatggttgattacctccagctaatgcatgtcccgtctctttcagataaccgtacgcttgagatttctgagatatcgcgctctttgaaggcgttggcgaaggagctgcaggtacctattgtggcattgtctcagctaaaccgttctctggaacaacgcgccaataaacgcccggtcaactcggatttgagggagtcaggctcaatcgagcaggacgcagatctgatcatgttcatttaccgggacgaggtctataacgagaactcggagtataagggcgtggccgaaattattattggcaagcagagaaatggtccgatcggcacggtacgccttactttcaacggcaagtatgcacgcttcgataactacactggcccgcagtatgatgatgactaa

SEQ ID NO: 158174 - DNA, 606 bp, Enterobacter cloacae
atgaaatgtcattttatttctatagctgtgttttttatcgcttttactactacagcacatgcagaatattgtgaagaccagtttttcaaagatatgacaactgctaacacagagcttggaaacgcactgaaatggcaacacgaagcgcaactggaagctaccaagcttgactcagcaaggaagttggagcaagacgctatcgatgaagtaacatccagcacaactttaactccagaggttcaattagcacaaattaaagctcataatgctgttgtaaaagaaataaacataaagcttgataagctagtggctgaaaactctgagaaaaataaacgcatagcagccttaaaagaaaatgtcccgaaagatttaacagctaaagcccagcaatgtgctaaagaaatcgctccgcttaatctagttgtaaatttagcggttcaggggttagctttattcttcaccgatggagctagcgtcgtacttccagaaaaagcgctgtatattgatatgggtgaaattgtccatggcaatgtaatgggaggagagcattcccttccaaatgatataaaaaacaaactcaacgaaattttcgatatacacctttaa

SEQ ID NO: 158175 - DNA, 378 bp, Enterobacter cloacae
atgagcttatcgccactccaacgactcgaccttcaggatcagcttgctgacctactcattcaacgcccaaccgcgaaagggctcgatctgcttgaattgctcgaacagattaacgatgtcctcgtgctgttgggctatagcgcagatgaggagggtaagccagaaccgagtcctgtagaaccaccaattgaggggctacctcagcttgtttctgactataaagcgggagtatacaaattggtcacggctaatgatttcatcgaaactttgcgccaaatagatgcttatgaaccagagttcatctcacttgatgaagtaaaacaaggagctattgtttggataaaaaataatacagataagctaaccttaacaaattga

SEQ ID NO: 158176 - DNA, 1965 bp, Enterobacter cloacae
atgctaactaatttgcgcatgcgagacactataactatcagggaccgcatggaccttcataactatgaagtgagcgatcagcgattcgatgagcttcaagcgaatggccagcaccatcttctgcttgagtcctgggaaatgagcgatttcgaatcgctgtatttctacgataccgacctcgatctttctgtcggtatgttactcgaagcgattaccaccagccgggcgcgtatatcgcaaaccatgcgcgcctttgttcgctcgctgaaccaagctctcacgggaacgggaatttctgctggcgtatccgatggcgcctctgtttctgatggtagccgggttttaggcggcgcggagattggcaaagcgcgccgatcaggcagcattgccctacttcccgctcagatccccttaagcgacggccagacggtcaccatcgtcttccattctccgaccggcgacacgtctaaaatcacttcaaacgatacgctggttgcgtttcgcttcttcctcaacaagcgcgacgtgactcatacagtggcgccgatgggtggccgtgatatgtcgttaaaacagacgacacagatcctatctaacctcatcgagcgaaactctgagaaattccagcgttcacgcgataaaaatgcccgcctgctggccgaaattaacgaagttgaagccacaagcacggagttggcaggtcaaattagcgcactcgtagaccaaggcgatcagctcaacgctaccggctccgagctggatacggagtacgataaataccgcaagctggcagacaagcaggcatccattaacgctgctctacaggctgaaattgacaagatgaaggcacagccacctaatcgagaccctgataaaaccccaccagccccggccccagcgaagcctgatattgaggataaaacccgccaggtaacccagaatctgcagatgggcggtcaacacactctctctaacggtgcggtaattcagacgaatacagctgaaaaaaatggtgagcttgttggctgggtgacgatcactgcgccggatggcagtgtgtataaaattgatagtccctcctcacaaggcggagcgatgcaggacacagcgaaaaagctgctgaagctgtatcgagacgggaaaaccgataagtacaaggcaaatgatatggcattaaacgatgatgttaaatcgatagtcgacgccgcgcttgctgctattaatagcgccaatgcgctaaccattaagtccggatctgaggccgttgacgaagctgctaagcagctccttcagcagcgttacgcattacaaggcgcccacgttcttgatcagtatctcgaccagctgaataacgctgatgctcaccttgttgagcttcaggaggaattctctgcaggtgggattgagctcccccagccaagacggttccttatacctgaggagatgccagatgacttgaaattggctctccaaaatcttaactatgttgctaatttatcaaatcagcccaccatggaagactggcgtgaggccgagaaaaaattaagtgaagctggcaagatcatctattcaaacgaggcctatcaagcccgttacgaagatgtatttcagattgccagctaccacacagagcaaattgctggcgcgctgtctgaaggtacgccaattttcatcacttccaccccagctcctgatatgccggaaccgataccgaacccggcagagggaaaacctgaccctgttgaacctggcaacaatgcagaggtaactggagctctcgaagccattcagaacgctgcagcgctaaatggcactagcttgaccgagataaaggagcatctgaagaatcttcgtgaagcttacgccgttctggatggtgccggtgtgctggagcagtatcaggatatgtttgacgcggccagtcagcatctgggcgatcttatgcagcaaatagcaaaggggtaa

SEQ ID NO: 158177 - DNA, 621 bp, Enterobacter cloacae
atgccagcgccgaataaacagcagtacgccgttctgaactttgaacagatcaacgaaaaaggtctgaagcccctcattacggcgataaacaaagcaggcccagacgtcgcttcagtcgattccacgaataaagcgacaaagaaagatggtattcaggtcaaaaccgtgacgctacacctggaggatcagcaagagatcgtcttactggttaacgacaccggtgacgtttcaggcttcactctcaacggtaaaaaaatgcccctgccccacgcgaagaccgtcgcggccatggggcaaattattggtcgcgcagctgagcaggcagcaccggcatttgccaaaagcctggcgaaaaaggtttctggtgccacgaaaaaactcacgaccagaccgcaggttaagtccaatgtccaacgtctttctgaagccaaagaggctgcagctacgaacaacgcaaaggtagagacgttgaataagactatcgctgaagagcagacacgtcaggctggcgttcgtagtcagttggatcaggaaaaagcccgcctggaaaccgaacgcgccatgacccggcagttaaaatcacagctagctaatctggagggcgaattgaatgctaactaa

SEQ ID NO: 158178 - DNA, 465 bp, Enterobacter cloacae
atgatcgaattaggaagccatctatcaagtcttgcagttgtagtgggtgtacttgcagtagaccgcatgatactgcgactgcgacgcttgagattacacgatatcccgctgggtgacgttgttgacgacggtgatcaattcttgtttcccctccgctacaaaacgcaggccgcaaaacacgacggcgttgttcagtatcagctcaacgataagcaacgcccggtgctggtcattcagggcaagacacgtccattggcgatgtctcgcggcatccaggaagaatatttagcgatcaacaaatcgcaggtacgccacagtggcgaatgggtattaaaggtccgtgtcatccatggcaagtcctttatgaactggaatcccttctaccgcctgttcccgttcgtcgacaacgtggagcgcacttacacgctgaacgtggggagtaatgaacatgccagcgccgaataa

SEQ ID NO: 158179 - DNA, 336 bp, Enterobacter cloacae
gtgagtatcaattttatcagcgagctcccgcaggtcgtgcttgccgtcccgctatcaatcatgagtgggctgggcggttacttatgcgatgtcagaaacggcagtaaaaaaaccaccgtgcttgagctgggtgcagacataacgatggcgatcatggtcggcatcttgaccgcattcatcggccagtggcgagaactgcccgagaagctgatctacgggttaattattttactttcaagcaacggcgacgaggtaatggctcttgttgggcctggcagcgttgagtttgttaagcgctggctctcgcactttagtaccaccggagggaagaaatga

SEQ ID NO: 158180 - DNA, 480 bp, Enterobacter cloacae
atggctaccacccctacccaaactcatccgtcccatgacgagctggctaccctggcgctcaacgcgctgcgcttttcaatgttccttagcctctcagatcctgcctgcgctgaagcattggcgacgcgaattcttgcagtcaattcatcagaaaaactttccacattaagcgaaagccagcttcagctcgatgccgtgaagcgtgctatctggcgcgcatgggatatgtcgccagctgtcactgattatcgccgcgcctggcagcaggacgacgatctggacctgtcgccggacgatgcgcttcccgttctctttgcgaagttctcccagttgcgcacacttatcagctgtgcagaaaagctgctggagccgctgggcagcaatacgtatctggaagatgtgcgccagctgctcggaaccgcgtcggacattgctggcggcgcgctcgtcatgtcagtgtttgatggggaggcagcatga

SEQ ID NO: 158181 - DNA, 765 bp, Enterobacter cloacae
atgaaatctatccacgttaacttcatgctggtaaccgaagtgcgaatgacaagccgggagattgccgagctaaccggaaaggagcataaaaacgtaaaacgggacgtcgaaaaaatgctctctgagctttacccgggagatgcgctcacttttgagcgcatctatttggacagcatgaaccggcaacaaacagagttcagtctcgatcgcctgcacgttgaatgccttcttatgggctacagtgcaaccctgcgcatgaaggttcttaagcgcttaagagagctcgaatcgctccaacaaaatgcgccggtgccgtcgttccccagcagcgcagccgacaagatcgcagctggtggcgctctgctggaagtgagcagaaaattactccacatatccgatagcagcgtgctggctggcctgcgcaaactgcaaagcgcagctggtcttcctgacctgctacctggttacgccatcgatgcgccaccgtccgccacgggcggcagcagtgagccaacgacgaaccttcgccagctgctttcggaacacggggtgaagatgtcggcgcaaaaagcgtatgcccgcctggctgagctggggattgtcgagcagaagacgcgaagcagcactcggggcgaaaagcattactggtgcctgacggccgagggcatggagtacggcaagaacctgaccgcgccgggtaacccccgtgctacccagccgcacttcttcacttcgcgtttctctggactggttgagcagctgtaa

SEQ ID NO: 158182 - DNA, 714 bp, Enterobacter cloacae
atgaagtggccaaaaaagtataccggaataggcgatactgtacgcagtgccgcattagatgaatttaacgtcgaagccattttgaaaacaactttactccctggacagcaaaagaccgcttatcacggtggcctgataactactgattattacgtatttcagttccaatctatcgctaatccaaaccagtcaggatctttttgttgtggcgaacatgctgcgcaaggctggttcaacttaacacaccaaaacacggatttgattccttcttacaaccccataactggagcgagtagcggcggcggagctggtggtggtaatggagggaacgggaacgtccaaaatcctgtaaacagggataagcgtaacctgataaagtgtcttatgacttatatttccttcactgacaatacgctcaatagtactggtggggagtcaagcgcaatcagagtattgaatggtcttctacagaacataaacatccctccgactgtttctcaaatccgaagcgtgaacacgattctggcaaaaacatttcaaaattcaaaatatgtagcgctaaatataaaaacctattctgatttggtttcgcataaagaaaaacaacacggcgtcactattaagaaaataaacgtggctcctttcaatctgcacattcagaataacagaaataatagcccaacatacacctaccgacatccggcatcattctaa

SEQ ID NO: 158183 - DNA, 645 bp, Enterobacter cloacae
atggcccaaaaagtaaaaaagccactgaaggcgtttcggattgatggctatgaatactgcatcattcgattccattcacatgcgatcgcagcaaggcgggaaggggctgaagagcttgatgaggacttcgattcagtgtcatgcaaacgagctcctgagtttgattcatacgccccgctggggaaggtgccccgtaaagctctggtggaggtccacggctggtggcaggaatgcacatattgctcaagccatgtatcagaggataacgcggcccgtgtttggacggccgacgatgagcaggtctattgctcccctgaatgcatgcacagtgatgccatccgggatgaagccgaacgtactgaaaagcttaaaagggaagcggaggaagccgaggccattgaactgaccagagctaaattcaaagggatagaaaacatcgttgcatacggccggtgccatcctcttcgagtctcctttacattcccgggcgggattggccgggtcacgtgggtccctggcgaaccttcggtcagtgtagtgccgtctgatagcgccgcctggcgcatgtttatgcaaacacagcaacaggaaggtaaagcggaggtgtgtgtatggccattcgaagtcaaccgcctgaaggtataa

SEQ ID NO: 158184 - DNA, 219 bp, Enterobacter cloacae
atggccattcgaagtcaaccgcctgaaggtataaaacagaaggcgaagcgtcttctccagctttaccgagaccggcttaagaacccgaggaagtcaaaaaaaatggcttacctttcgttcgaagttggtccccgctggcgcctgctgtcaaaagacaacggccagcactggtcattactcagtcacgctgagtacaacgcgcttataaatggcaaatag

SEQ ID NO: 158185 - DNA, 315 bp, Enterobacter cloacae
atgcacactattcaaccaggcaagttatacattgccaattcccattataacgagttcccggacgtgcttgtcactctggagctttgccgcacctgcgcgcgcctggaaggccgaaagatcgttgcatctttgcaagcctgtgccctggcattaatggcacgcgtcgagaatgaggcgctgcggaacacccttgaaactatgagcaccagccgcttccccgaatcgcagatcacgcgaatacgtggatgtatttcccgtatggaatcggtggctgggcgcaaactcaacgagataaagaggatgaacgtgcggtga

SEQ ID NO: 158186 - DNA, 708 bp, Enterobacter cloacae
gtgaaagaaaaaccgatatttttttctgaagaaatggtcctcgccgttctggccggtagaaaaacccagacgcgcaggccggtaaagttcaagttccgggatggtcaaggtgataccagtacactccaggttggcaattactgcactggacacccacgttccggttttgtcctgcgcggtggcgctggtggctgctggaaggatgtaacacacccgcttcaatgcccctatggcaacaaaggcgagcgtctttgggtgcgagagacctggagcgacgtgaattatgacggctctgaagccattgcctaccgtgctgacaacgaagtacgaatgctcgctgatgactctactttcctggacgacgaaggggtattcaaccctcacgacgagcggctgacaaagctgcacttcggcaactggtaccaggatcttgtagcaggtaccgagggccgctggcgaccgtcgatccacatgccgcgttgggcctcccgtatccagctggaaattactgacgttcgaatcgagcggctcaagcatgtcccgcgtgagggagtgattgctgagggctatccgcttgagcgtcaggagtgggcgaacgaatacgatccttttatctggttcaaggagctatggggatcgatttacggggataagcactgggacacgaacccttgggtgtgggttgtcgagttcaggaggggcgaatga

SEQ ID NO: 158187 - DNA, 219 bp, Enterobacter cloacae
atgaaaccactgcctacatgcccgacgtgtggccttcaggcccagatccgattgcgtgatcgcggtatgaacacgggcaatagtgagctgcgctgccctgagggacactttagggttggggtgacatatcactctggtatgagagcttgggcacgaaacaagctaattgacgagtgggaaaaaaaggcgaaggtagctgcggaggctaacaatgcatga

SEQ ID NO: 158188 - DNA, 1080 bp, Enterobacter cloacae
atgcatgatgaagctgtattaaaaggatttataagggaagtaagctcccacaccatgacgattatcagagatgacggtttttaccgtcatctttcgtttgggcacccgggaagcagcatttaccgcttcgacctggtcacctggcccggttatctctgcatgaccggcgacatgggaacgtggacgttcagtcgtatcaccgacatgtttgacttcttcggcggcgcctttgagcgtggcatcaatccggtctactggtcggaaaaaatggaagccggttccggttgtccacgcgatgcgatcgcgaaagagtgggatgagcaggcctactgccagcgtctcgaccacatcctgaaagagtggtgtgaagagcatgccccaagcggcggtgcgccaaaggaccagataaaagagttccaccggcaccgggagcgggtagaaggcatcattagccagatgaaagagggcagtttttcagagatggatgcctatgccgcgtatgcgagcgtagacgatcctgacggtgtgctgaccgacttctgggactacaccttcaaagaatggtcatcacacttcctgtgggcctgctacgcgatccagtggggtatcagccggtacaagaacaataaaatagcgttgtccgcgatggataagttcctcgcgatcaggagcgctgccggtgccgaatacggcgaggcttatcccgttctcgtgcagcaggccttatctcgtttactgcgcggcgagctgaaaacctatcgcgacggtctctccatcggctttgcaagcgatcacagtggcgtatgtgaggtctggggccgtgatgcgcgcgactatgagggaaaggtaatagcccgacgtctcgttgcatgctggaatgcctgcaaggggttgccgaccggcgaactggaaagcgtgggcttaaccggggcgttgggtaacgagttgcttaaactggaccgcctggagatattgcgacaggaccttattgagctgcgcgattgcttcaaggaagctggtctcccgatgaaccgtaaccaacctcatagcgttgacagcgcgaggaacggattaggataa

SEQ ID NO: 158189 - DNA, 639 bp, Enterobacter cloacae
atgtccaaaaaaggtcaaaccttaactatcaacatgtggcgtccagatcctgacgagacagctaacatgtggaaacttttccacagcgcggagcgagtacaggatcgttggtcaacaaacacggtacctcaaattgctgaggagctggcttcaacgaacctctcccgcgaagaaaaaatgttcctgctgcgcgcctggcaaatgctggtggatgacaaagcgggctttggacgcttcctgggagcctttgattgctacgtccacaatgtgcaggaccccgctgtcgagtacgtggcctataaaccagagctgaaacagtacttagaagatggtctgatctttgacgaagtgctcgaagcttaccagggcgcgcagcagcgcatcatggagcttgaggcgctcacctacacccttcagttgcccgatgctcttgacttcgactgtgagtatgagcgcggcggccatagtaccgctgatgagccgttcctgcgcgggcgcgtagaaggctggaatctggcgattggaaaagtaagccgactcaatggcgccactggccaacgaccaaccgcctggtacaccgacgatcataaaacagataaatcggccacaacctacgatccttctgtcgcgttgcgctga

SEQ ID NO: 158190 - DNA, 711 bp, Enterobacter cloacae
atgtcttgggtatgcccgcactgcgatacggctgcaattgtcgatgacgatgatattgaaatcaattattttgacttgaagtcaggagaatatgatttccgatttactactatgggtataacttgcccgaacccagcatgtgcaaaagcttgcatttggatgagcaaagagaaattggttttttatgccggagagcttaagcctgcaatgggtacaaaatcgacatggcctatcgttccttcaggtaagaaagaacgagctaaaccctatccggagtatataccgcaatctgttttggaagattacagagaagcttgcgcgattgtggatctttcaccaaaagcttctgcaactcttgctagaaggtgcttacaagggatgatccgtgggttctggaaagttgaagcagacacacttaacaaagaaattttggcaattcaggataaggttgacccattcgtctgggatgcaatagacagtgtcaggaaagtgggtaacatcggtgctcatatggagaaagacatagacgtcattgttgatgtcagccctgatgaagccaatttgctgatcgaaatgattgaaatgctaattgaagattggtacatcgctcgtcatgaaaaacaagagaagctaaagcggataaaggaagtagctgctgaaaaagcagcagcgaggaaggttaaacctgatgaaaaagctgataatagctag

SEQ ID NO: 158191 - DNA, 459 bp, Enterobacter cloacae
atggctaacgaaaggcttttgattccgcaagatgctgactacttccatgctcttggtttggcggctgtcgcttttgctcgtctggaatgggatgctgtttggtgctgcgaaaggcttcaaaaaggttacatatcaacaattgaacctaagaagaagaccgcgggggtcattgctagagatcttgaggcgttattcggccgcatttcagatcaaacgcttcgcctaaaagttgagcctgttgctacagagtttaaagttatcgttcaggatcgtaacgcacttttccacggcaaacccgcaataactaaagaatctgaacataggcttttccgttcaggtacaccttggtcaatccaggatgttaatgactttgctgaccggtgcacacgggctggtactccacttaatgcgctcctttacgatgagcttaaggaaaactgcatcgttgcgcttacctag

SEQ ID NO: 158192 - DNA, 429 bp, Enterobacter cloacae
atggacaacgattttaaccgtatgctgtttgaggagatgttacggcaaacctatcgtaacgcagctggtaagaaggcaacgcgccagatgattgaagatctacgcctcagcccgccgaaggacggatattcagatccgagcatgaattttctgtggcttggctggtgtgcggcgcatgagctgttacgtagcgcgccggtgcacatgtttaaggaattatcgccgcaggatatccccccagctgaagaagtttttctgggcttttgcgcaaaaccaggcaagtactacatgctacggatgaccgaaaaccatacgttctgccttgcccatacacccgcgatggatgatcccgttcccatgcctgatccctcgcactggatgtcattaacagaaaaaatgcctcacttcgaggccgggctcgtgcactaa

SEQ ID NO: 158193 - DNA, 324 bp, Enterobacter cloacae
atgaagaaactgaacagcatgatcagcattgcggtgtgcctaaacaaacacaccgcgaatggccagcctctccgtgtctcggatatgagcaaacatatcggtctctcgatctcatgcatcgagggttacctccagcccctaaaagcggcgggtattgtcgatagtacccgaggtccgaacggcggttactggcttgtccataacgatctgaccgtcaccgagctctatctggccgttaacgagaaggaagatgcatttgcgcctatctacgatgcattgtctcgggtcaatctgtcagcgttcagcgaggccgtgtatggctga

SEQ ID NO: 158194 - DNA, 270 bp, Enterobacter cloacae
atggctgatctgaaggttgtaccgtttaaggccaacgacaacgctgtgcaagatcgtaacgaggtcattcgtaagctggaggagtgcctggcgttcgtgaaagaggaggggcatgaccaggttgccagggctatggctgtcgtcttgctaacggatggacctgctggtggtcttctcagctgctggcataacgggaaagagaaccacgaaatgctcggggccattgagacgctgaaggtcgattttgtgcacgcatgcatatcgttatga

SEQ ID NO: 158195 - DNA, 639 bp, Enterobacter cloacae
atgagtgatttacagctgatcttgactacgactcagcgagaagtgcttgattcgttcgcaaggaacttcgaaggcctgcctaactgccgtattcaccagggcttctatcaggaattgcgaaagcatgacgcggtggtttcaccggcaaacagcttcggcctgatggatggcggtttcgatctggtactcacgcatcgcttcggagagcagctcatgaagcgtgtcatgatgcatatcgatgagcattatctcggcgagcagccggtcggaaccgcgttcgttattgaaaccggtcatccagctaccccctggctggtccatgccccgactatgcgcttacctgagctggtggccggtacggacgtcgcgtaccgctcaacctgggctgcgctgatcgcgatccacaaccataacaagcaggctgccgccgacaagcaaatcaagagcgttgtctttaccggaatgggtgccggttgtggggaaataccacccgaaagcgtgggccagcaaatggcgctggcatgggcgcgctatcatgaagtattgagcggaatggcgtacgacgggatgagccgctggcataaggcgcttattattcaacggcgggtaattggggcggttgctgggggcgaggcgtaa

SEQ ID NO: 158196 - DNA, 474 bp, Enterobacter cloacae
atgggcttcaaaatcgtaagatcgccactcattgccgcagccattgctgaagcaccaatcgcagaacacccaatctcagagttcgaagaatataagcgcatctgtattgaagagggagataacccagctccctctgaaaccgatcagcgcacctatgagtcttacctagaaactatcggccgagaccgattcatgaccagcccaattgaagccagagctgaagagctgcatcatgctcatgtctggcaagagcaatgctgttgggaagatgatgaagaagacggaatgaaggttcagtgggcctgtacgagcgacagctatgtggtgtactcgtacttcatcgatgctgacaatgatcaccatttctatatcattgactattgcaacgacggtgctcatggacttatttctgatcgcacacaggttctcgactgggctaaccaagctgaacgataccgcctgagaaatgtttaa

SEQ ID NO: 158197 - DNA, 693 bp, Enterobacter cloacae
atgtatgaggtctacatccgagacggtgagaatgtacgtggataccagtttgatggtatggagggaaacgagatcatcgttaagcggtatgacgctgaggacgatggctatcgtgaaagcattcgcctgcccattggcgaagtatccccagaaaacgtgaacggtttacacttttaccgtggttataaaattaattttgacggtctggccgagttagagagccgagctcggcggaagctacttgctggcatcaacagcgatcaaattaaagacaaatcgcagcaggatatctataacagccaactcccacgcatcaaagaccgcatgcgagtattggacattgccatagacctctacatccaaaaaggacatcctttcggtacaagcagaataggaagacaaattttctcacatcgatgggagaatcatcctcagagagaaattatcgagcgtgagcttaaattagccctcgattcattagttgctggtggggaattatccttgataaatccccaaggataccagccaacaggtaaggctttcacgacactggctgagtatgagcttcagaaccgccgacatcatgataacgccagtctgcagagaaaattattctgggcgactgtatttgctgctggtgcagctgcaggcagcgcaatcgcggctttcctaccccttttcatccacaaatag

SEQ ID NO: 158198 - DNA, 480 bp, Enterobacter cloacae
atggctaccatccctacccagaatttaccttcagacagccagctatccgctctggcgcttaacgcgctgcgcgcatcgatgttcctgagcatttcagatcctgcttgcgctgaagcgctggccgcgcgtttactggcaaccggcaatacagaaaatctctccacattaagcgaggcacagctccagctggatgccgttaagcgcgctatctggcgtgcgtgggatatgtcaccggcgctggtggattaccgccgtgcctggttgatggatgacgatctggacctgtcgccggaagacgcgcttcctgttctgtataccaagttctcacagctgcgtacgctgatcagctgcgcggaaaagctgctggagccactgggtaccaacacgtacctggaagacgtgcgccagctgctcggtaccgcctccgacatcgctggtggcgcactggccatggctgtatttgacgaggtggccgcatga

SEQ ID NO: 158199 - DNA, 843 bp, Enterobacter cloacae
atgaaaccaatcaatgtgaactttcatggcgcggagctgcttgtcatcgagcataacggcgagccgtatacaccgatgaagccgatcgttgaggggatggggttggactggatgggccagttaacaaagctgaaaaatcgatttgccaaaggtgtagaggaaatctctatacctactgccggtgggcagcagcgtatgatctgccttccgctgcgcaagctggcagcatggctaaacagcataagcgccaataaggtcaaaccggagatccgagaccgggtactgcagtaccagcaggaatgcgatgacgtcctttatgattactggaccaaaggcgtggccgtgaatccgcgtaaacaccaaacgttcgagcccgcgccggtaccagcgctcaccaccagcgccgccgacaccatcgctgcgggggtggcattgctggatggcaccagaaaattactccacatatccgacagcagcgtgctggcaggcctgcggaaactacaaagcgcagctgggctaccggacctgcttcctggctatgcggtcgacgcaccgccgtccgccacgggcggcagcagtgagccaacatcgagccttcgccagctgctcgccgagcacggcgttacgctgtcaccccaaaaagcgtatgcccgcctcgcggagctggggattgtcgagcagaagacgcgaaccagcaccaggggcgaaaagcattactggtgcctgacggccaaggggctggagtacggtaaaaatctgacgtcgccaggcaatccgcgcgccacgcagccgcatttttataatacatcctttgcgaaattattaggaaaattaacatattag

SEQ ID NO: 158200 - DNA, 183 bp, Enterobacter cloacae
atgaagagccttacttcaaaagacgtgattaaaatgctggaagaacgtggttggcacctggatcgtgttaaaggcagccatcacactttcatcaaggaaggggtaccgtaccatattaccgttccccatcccgataaagatcttgccaaaggtacgttaaacaagatcttaaagcttatgtaa

SEQ ID NO: 158201 - DNA, 408 bp, Enterobacter cloacae
atgaaatttccgatctatctccatcaggctgatagcggcagtttctccggcttcgcgccggacatcacaggtgtgttctttgccggtgatacaatcgatgatgcgattaacgacgcttacagcgcgattgatgcacatctcgatttcgtaactgagtatggtggatcagttcctgaagctaaggagatcactgcgcatctacatgatgaagactgtcaaggtgggttttgggcatttatcgatatagacatgagcaagtatgacggtaaggctgttaagctgaacatcacacttcctcagaatctgttagtgaagattgaccagtacgtggaaacacatcgtgaatatggatccaggagcggctttctggctgacctggctcgacgcgagctacagaaaagcgtctaa

SEQ ID NO: 158202 - DNA, 441 bp, Enterobacter cloacae
atgaggttttcaagcgcagtaatggcattagcgctgctggtgccggtagcagggaatgcagcgaaagatcactcgattgagctgaaatgcgacaaactgaaggtgactgtcttcgataaaaaaggggcgatctttatcgatagcatcccatccaaggacgggccgtccaagatggatcacataaagattcaacgtatagaaatgatgggctcgcctgttatcaagactcagttcgttgcctaccccgaaatgggcggcacttatggcttatacaacctgtatacgtacgatgacggtcagcctcccgttctcacctctgagtggctgaatgccgatgaccaaccaatgaggccagtagtctcttacgaatgctcgaaccccgtcgagaagatgcaggccatgccgaacatccaatccatcggtgagatgaaaggctggtaa

SEQ ID NO: 158203 - DNA, 396 bp, Enterobacter cloacae
atgaaagttccagaaaaatatcgtgttaaatccggtcctctcagcaccactgcagaagatggcaataacggcctgttcgtcatcccacgcgggaacggctcgaagcagagcctgacggtcatcgtcagtgacggcggcgattgggagcacgtctctgtttccatgaaggaccgtatgccgacgtgggaggatatggattacatcaaaggcctcttctgggatccgactgaggctgtgatgcagctgcacgtgcctaaagcgcgacatatcaacaatcaccctttctgccttcacctctggcgcccagctgctggtggtattccaatgccacctcagttcatggttggcctgcctggtgtggagatggttgcgccagctggtggaccgaacaaatga

SEQ ID NO: 158204 - DNA, 591 bp, Enterobacter cloacae
atgagccgcaaccttttttctgttgagtggctggaagggcataagcaacgcatggcgtcctccggccgtaaacgtaaagacgatataacggccatgaaaggggagcgggttccgcgtgaaagctataaccggttatcacaatcgcctcacctgaaggcgctcaacattctggagcgtaacccgggcttggtggagggcaacgccgagcattacgagcaggtgcggatcctctggcatttcgaacagcacaaccccgcgctttatgcgctgctgcacgctacaccgaacggcggacagcgaagcaaggccacggccggaaaaatgaaggcggaagggcaaaaggccggttacccggatatgtcgctggacagtccgcgcggtgcctatcacggtatgcgtttagagctgaaatatggcaaaaacagggtttccgatgaccagaagaagtggctgagaacgcttgatgccgaagggtattactgcgctgtcgcatatggccatgctgaagccatttcgctgctggtggggtactggaacctgccagcaggagccaaaatgcctgattacaagacagatcatctctggcagtga

SEQ ID NO: 158205 - DNA, 213 bp, Enterobacter cloacae
atgtttttaaagccaaaatatcatttttatctttacgtctttcatagtgacggccagctcgtcgaggcaaccctctgctataaaaaaaacgtcataaccagcccgcgcttgatagaagcaaagcgtaaagctggtgtgtctgacaccgctgtcataatgaacatttcatatctgggacgaatgacgaggcgtgattatgaactcctcctatga

SEQ ID NO: 158206 - DNA, 441 bp, Enterobacter cloacae
atgaactcctcctatgagtctctggttagtaagataacatcgaaagaaatttctgatgtgatgctcgagctacgcgaatggttcaatgctcgtgagctggccgatttattacgataccgctatcccggccgcaaggttgaggttaatgacgtatacaaacgcctcgtagagttcagcgagtcttctaatgcgcattgtaaagttgatatgtcagtccggccacgccgtttccgattagtgtctatccgggctgagtatttcaacgagctgcgacgtcagctattgcgtaaaggggtcgccgaaggggaggttaatagtctactggggaatgaggcactgacggagcaggaggtcattgacagctggaaatatgcccatgacatgtgggacgcgatgtaccgccgtaatcgcacgtgtcggcagagtgtggtgagcaaatag

SEQ ID NO: 158207 - DNA, 420 bp, Enterobacter cloacae
atgggttctaccggtgatcaggaaggtgatcagctgcaacgcatacaggcgcgtgctgctaagctgttgcggttagatagcgccatcaaaaaggcggcaccggcatcgctggccccatggtttcgcgttgccaactatcgtgacgcgacgttgatacttgaagtggccagcccagcctggcagttgcgactgcgccaggcgctgccaaaaatggagcacgagctgaagaacggcttactgccatcacttcagtcgatcgaggtgcgggttaacaatgaggtgggtaaagaagctggaaaaagaggtgacgtgagcgttttaagcgctgatagcgctgcggtgctggagtatgtcgcccaggacgctcctgaagaacttaaagcggctcttgagcgcctggctaaccacggcaaaagctga

SEQ ID NO: 158208 - DNA, 1230 bp, Enterobacter cloacae
gtgtctgacgacaagcagggttggccttttcacattgaaaactacacacaaatggcactcgataccggggtgtccattgctgcgtatgctgaaatgtatgggctcaacccgaacacctgccgccgctacctccgtaagccgaacgacacaccgcaggcaaaacccgctccaaaaaccacaaaaaaaggcctgatcactgatcgcgctgatgatctcttcatcgataaaaaggagatcaaacagaagcgcgcaaagaagcagcaaaacaaaaacacagacttaggggaagtgaaggggcacgagcgcacgttggcgggcgggaaagccatattcgacgccaacggcaagctgatcaaattcacgagagccccgcgcgggtctatcgacacccagttcaagcctggtaacaaggccaaccgcaatccgatactgcatggcgcctatgtcacgccgactgagcacgacattgctcaggctcaacacctgattgaaagcggcgttatggagtcgatagacgagtacctcatctctcataaccttgcccacctattgcttatcagccgtagccgcgaccgctcgcttgaaattttcgacgagcaggagcgtgagctgctgctcgccaatcagggcgggaagcgtaagaagaaggatgacgatgatggtccggtccgtgatgaagtgccgcctgagtttaaaaagctatcaatgctggttaatgcctccgaagcgatagccagcatcactcgaaacatatcgtctgtgcgccaggtgctggataagcgcaggaaggaagccgagaagcgggatctcgacggtgaatatcgcgaggcgattgttgatgcattccggctgcaggagctgcataactggacggccatggaaacagctgtatttatcgagcgacagggctttaaagtcccggccaccctggcgctaattgttcaaaatgagctgaaattaccgccaccagcggatgatacgaacaacattgatgaggagcagcttgatagggaggctcgcgagtaccgagacaagcagcgcgcagccgaagagttcagagctaaccggcgtaacgacgtgtctgagatcgttgataagcgcgggtatggcgatatcgatgagaacggccagaagcgagcagacctggactatggctatgacgaagaggacggtgaagagtgggacgatgaagaggatgaccagtggaacactgatgagggttctgcgtaa

SEQ ID NO: 158209 - DNA, 1500 bp, Enterobacter cloacae
atgtctcacggccggaaaaagataaggtgcgtcacgtcagatccgcgctggcatgagctggtccgtaagtaccgctatcagtgggggctggctgctgtgcagctcttcgggaaaacgcctacctggcagcaagacctgatacttgattcagtacaggagtccggtagcagaacgacggtttcatccgggcacggtacgggtaaatcggacatggccagcatcatggttatgctgtttatgatcctcttcccgcatgcccgcgtcatcctggttgcgacgaaaatcgggcaggtccgtaatggtatcttcaagtacatgcggcaaaactgggctgagtgtacgaagcgctacccctggctggcggagtacttcatccttaccgacacggcgttttacgagcgcacccaaaaaggctcgtgggaagttgtggcgaagggtttccgtctggggaatgaggaagcgcttgccggtgagcacgcaaagcatcttttctacatcattgacgaagcctcaggggtatctgataaggcgatcggcgttatcaaaggggcgctgacacaggaagataaccgtctcttactcacttcccagcctacgcggccgagcgggcacttctacgatagccatcactcgcttaaacgcactccagcctatcctgagggttataacgcgatcgttcttaacagcgaggaatctccgctcgttacgttgaacttcatcaaagagaagctggccgagtacggagggcgtgatagccctgagtacatgatcaaggtgctcggccggttcccgtcgatgtcgaacgagttcctgttggggctggatgagtgtgagcgagcagcgcgccgtccgacacgtcttaaaaagggttggggctgggttgcgtgttgcgacgtcgggaacggcagagacagctccgtgctttccatcttcaagatatcgggtaaccgtaaccggcgccgggtggtaccgcaccgcgttattgaatatgcgggcaccatcgatgcggtgaagttcgctgacgtgatcgtcgctgagtgccgcgctgatgtgtacccgaacataagcatagtgatcgatggggatggtatcggccataacacggccacgctggtggagcgcgcagggctgcaggtgcagcgcattcgatggggtaaacgcatgcacagcaagcaagataagagcagatttatcaatcagcgcgcttacgcgaatatcgcggcccgtgacgcgctgcgcagtggccggttgcggctcgatcctcagtcaaaagtagtgcagcaggcatcaaagataccggcgtcacttaacgagctggggcaatgggtcatcatgaagaaagaggtcatgcgccagaagttcaatatcaagtcaccagacgtctgggacacgtattgctttgcattcctggcgaactacgtcccggccaaccaggacgcatactatgacgacgacagagaagatgctatgcggcggttccttaaagggcaagctgcttaa

SEQ ID NO: 158210 - DNA, 816 bp, Enterobacter cloacae
atgtcatcatcggttgaagctacttataagcaattcctccagcacaaaagtgagtttctgaaagaagctcataaatgtgccaggtttgccgatgtcgatgaaaccggtgttgcatctcgaccggtcgttatcgtttctgaagcagactacatgacgtgggttgcccgcattgagaagtggaaagaattcgttgaagagctcagctcttacgacgagaaacgctttccgcgcagctcttcagacctttaccccgtaccgttcattcatgagaacgtacgcggtgcccgaatcacgttcaatactgcaacggtagtgagaaattacgtcactaccgatgtccttaagcgcatagatatggctatcaaaagggcctgtaaggagggggatagcgaactccttcaggcgttaatggctgagaaagagcgcttcgggaaatatgatcctgaccaccgcttccgcgcccgccagggtggctatcgcgatatgcaggtttatctctacgtcaccggccagtcgaagcgcgaaacggtacacgttagcgcgcatggcatgttcatccgtgaaaagaatctggattccactggtgtggagctctcaacgccccagctgcgctggtcggtttacgaccaggtagagcctgtcccgtgcattgcaatgcagagccgtaaactgtatgacctggagatcgttgacgcgatcactgctgattatgaagaacggctacgtgctgagatgcgccgcgagaacgtacgcaaggcacagcgtaagctggtggctaaacgtaagcaagaaaaggccaagcaaccgaaagcttaa

SEQ ID NO: 158211 - DNA, 213 bp, Enterobacter cloacae
atgacgacaaatacaatgaaaagaatcgattattcgtacctcgaacgtctccgccgtgacatgtttcttttaatcaatgaccgccgacttattaacgccttaaccgaccgtctctatgcaggatcgcacttctgtggttgtcccggtaagtgtgactgccgcctaaaactgcgcaaacacattcaagcaatctataagtcaaatcacacctaa

SEQ ID NO: 158212 - DNA, 1035 bp, Enterobacter cloacae
ttgaatataattacgcctgtcgtacccgggaaaaatgaagtcagcacggtagttcagggtgtcgatgctgctattgcagaaaatctgcgcaagtttgtcgaggatcgtgaagcgtattcgtcaaagacctggactcagcttgagcacgtcttccgagcctggggccgctggtgctgggaacgaaactatccgctattgccgatccacccggggcacttaagggaatatgtcctgcacctcgcaaaccactacagcgttaactccgtaaccctgcatatggcattgctggccatgctgcaacaacaagcccagctcgttccggccaacaaccatcctgacgtaaagcgggcaatgaagaaagtgcgccggttgtctgccgagaacggcgaatacaccggccaggccattccgttttcgattcacgatctgcgtacggtcgcgctggtctggcaagattcggacgacatagcggatgtaagaaacctggcgtttcttgcggtctcgtatcatacgctgcttcgaatttctgaagtttcacgcttcagagtgaaggattttcaacctttagcgaacggtatgtctacgttattcgtgggtaggacaaagaccaacctctctggcgatggtacagtcaaagcgctcggtaagtgggcaacgaagctggttcaaaactggataacaaaatcagggttggaagagtggccggacgccattctcttctccccagttcaccggggcggccgagcgcggatcaccacaagtccaatggcgataaaaaatctggagcctatctatcatgcggcctggtacgcgctgaatactgatcctgcagagacacaaaacgggcgctatgcaacgtggaccgggcacagtgcccgtgtcggtgccgcatgcgacatggccgagcgaggcgtgagtctcccccagataatgcgcgaaggtggctggaagaagcctgaaacggtattgcggtacatccgccgtaaagaggcttttagttccgccatgctcgatataacagatgaagaaagttaa

SEQ ID NO: 158213 - DNA, 642 bp, Enterobacter cloacae
atgacgaatagaaaaatcctggcggtatgcctgtcgactaaacagcccgcttacgcgacagcagcgtggcttgatgagcacctgggcatactcgactataagccgttacctccgcagcgcagcaaactcgatgccgcattactccctctcctcgaagagcataagaaggacggctatcacatgattatcgacgatgccagcgagcgtataagcgggcgttacggcattccgttccgcctcagcaatctcgataaccacggtcgtcccatgctgatatcttcacttgagctctacaaggagcttcagaatcaggcagcgattacttacccgaagggactgcagggcatgtttagcgttcctgagtcgattgtcgatgaggacaccgatccgcgcgggaacacgatattccgtatcgactgggccagtatcaccacacagcatgttttaaccctcctttgcgtgcagggtaccacttacaaccaggttggcagcgctgcgtacatagatgcgatgtacggtgataccctactaaacaaagaaaatgacccatacagcccccttcattctgttatttctgactttgagcggaggtcttttgagaatatcggctcagagatgacaggcaagaaagggatcctatga

SEQ ID NO: 158214 - DNA, 330 bp, Enterobacter cloacae
atgagcgagtattcgaggcttgatgaccgcgtcgtaaatgatgcggtcatccgcacatatctatatagagacatcacacaacgcgtcgcgggcaatgacagtgagctgatcacccgaagcgtgctggaagacgaggaataccggccggacctgctggcgtttcgggtttacggctctggtgggcatacgctgagatggttgatctcgctggtggccggaaacgaaactgaagatatgccccttccagtcggcgaaacactggctcttccccctttagcatgggtgcgtgaacgcatccggcactggtctactgttgcggagctggagtaa

SEQ ID NO: 158215 - DNA, 1206 bp, Enterobacter cloacae
atggctgcggttgaacaagacagcgctggccgctggctaacagcaggattaagcccgcgttcgtttaacacgatctttaataagattcagaaagcacagcgcagtaaccggcgcggcgcccgccgcacgttaacgcctggcatgctgcataacaaagagcttgagaagtttcttcagctggggaaaaagaaagaagggacgtttttcaccgccgacgatatgaagcaattcatagaacggcgtaaagcacatcgttccactttcgccagcgacgtcccgggcattacatggtcgcagctcgccgctcagtcaacaaaggctgacatcgaccgcgctagcaaccgggttgatgacggtaccggcataagtaaggcgatgttcattggcctccaacacgatttggcccttgttaatgtcgcggcgtcagacgtttcaaagcatcagaaccaccgcgttcgaatacggtttgagacctgggaccaggcggttgaagaggcggcaaatccagaagccgatatcaacaaaattacccgcaaaatgtgtgccgaccgcgtctctatcgactgtgattgcggccgtcatcagtattggttccgctacatggccacagcagttaattactgtgtcgccccgccgaaagaatacgcctttccgaaaatccgaaacccagatctgaagggcgtcgcgtgtaagcacgtccttcacgcaatgaatcgctttcagtcccgaacctggcagatgcagctggcgacgcagctgaggaaaagctcgaaacgggtaagcttcggcgacgatgcgaagaaaacctctcggttcttttccgaagaagaaatggccgcgatggcccgcaaccggcgcaatacgattgaccagggcgctttgcgtaaagcgttcgaacagtatcagcgcaaccaggacaacttcagcaaatcgatgaagggaaataagcaagcggtcgagaagcttagatcctccctcaagaagtccagaacactcagccagcagcagaaaaaagccctcaaagaagctcaggagctagagaaaaagctcatccaggagcgggacgcggcgaagaagctgctgcaggaccagctgaaggtcaaaaagaactcttttatcgatgcgctgcgcatggccggtaaaacaaaagttgaggcagaggacatgtttaaacaatggcttgagcagcagatgaggacacaatga

SEQ ID NO: 158216 - DNA, 777 bp, Enterobacter cloacae
atgcaaaataattatgctgggaaagctccgttttatgattataacatgctatatccagcatggaccattgcatatgaagttatgttttatttcatattttttattagcatgtgttttagccatagatatcgatcagttatttcaatgctttttttagcatttcttatgtgtgccatacaattattttttaaaggggaattatcaatatatggtgggttttctccttacgatgaacgcatggggtttatggcaccagcattaacattgctcgggtcaccattaatgattgagtttgtaattggcatgatttgctttcatgtttttaatacaggattattaaaacatagaaaatatttggcaaatatatttctaatggcatgcattacttcaatgtgtttattgtatttcatgaacctgaacatgcatgggatgacagaaaaaggcattgtagcagcattaattttcatcactatgatgctttcagaaatgtcaggaaaaaaaataaatctcagagttacaaagttcttttctgatatatcttactctctatatataactcatgcgatgattttaaaatattacataaactatttacactcaataggcgaaaaagattacccaaaagggctgttatcattttttgcaatttatattgtatgtattcttgtggcatatgtttctcatattactatcgagcgctggtttataggtattggaaaatcattaattacgaaactaaggtgtaaggaatcaaaagaaaccgccctcaatgtatga

SEQ ID NO: 158217 - DNA, 753 bp, Enterobacter cloacae
atgaatctaagtctggtgagtatgtcacacgtttttttccgcgccgcacgcgcgatgttttcccgcaataccgtacgtctaagtctgccgtgtttactgctggcagggtgtgtgacccatgccccgaagagcgcaatcagtgaaaagccggaagaaaaatggcctgaaaatcagctggcggatttcctgaccaccccctgcgagggcatctggcacttatcaggacatgaagttgataccaacccgctgttttggctacgtggcatcgattgtgcgcagcgtctggaacccgtagaggcacgggcgcaagccacgatgtggggcgacaacgcatggcaggcgacctttaaacgtgccattctgcttggcgatgccaaaatcacgcccgttgagcgccgcacgaatatcacgcgtctggacgcgttcagcgccaacattcctgcgcaggtgcggccgatatatcaactctggcgggacggccaggcattacagcttcagttgtctgaagagcgttcccgctacagcaaattacagcagtcaacggacggcgagcttgatacgcttcgccagcagcagaattatctgcgcacccagcttgagaccaccacgcgcaagcttgaaaatctgaccgatattgaaaggcaactgtcgacgcgtaaacccgcaggcagctatttgccagattcgtcgaaaggaaattctgccgcgtcgccggacggtgacgcgcagaaagaagaggatgtgaagccatga

SEQ ID NO: 158218 - DNA, 891 bp, Enterobacter cloacae
atgacgacgcttaatctgggctatctcgccacgttccgtctggtgatccagcgcggcagcttttcagcggcggcggatgtgctgggcatttcccaacccgccgtcagtctgcaaatacgccagctggagcagtttctgcaaacgcgtctggtggagcgtacggggcgggggattaaagcaacggctgccgggcaggcattgctggtacacggtgagcgcattgaacaggcagtcgatgaaacccttcgttccgttagcgcgttcaatcacgacgtcagcggcaccattacgcttggcacgggtgcgaccgcctgtattcatcttctgccgccattgctgcagcaactgcgcagtgactatccccttttacgcgtaggcgtgacgacgggcaatacgctcgatattgttcgcgctattgaagaaaatcgactcgatatgggactggtgacgctgcccgtcagcgggagggtgctggacgtgatgccggtgatggacgaagaattcgtgtttatcgcgtcgcaggcgcagcaggcgatgtttacagacttaaggcctgctgcactccatacgctaccgctgattgcctttgagtcgggcagcggaacccgggcattgattgacggctggtttgaggcaagcggcttaacgattgcaccggctatgcagctcggcagcattgaggctatcaaacggatggtgcgttcggggcttggctacagcatcgtgccgaaaatggcggtggagcagaaggcagaccgtgaaggattatgcgtcagttctctctcgcccgtactgcaacggcagctggctgtggtgatgcgtcaggataagatcctaagcaaagggatttcaggcattattcggatcctgcaacagcatccggaacgctag

SEQ ID NO: 158219 - DNA, 2304 bp, Enterobacter cloacae
atgtcaggttggatgcctgtcttcctataccctctggaacgaaagggttttaaacgggcatctatgaacattctccctatcctgaaaaaaaataaagatcgctggtgggctctgccgtttatattacccatcgcgctgttgcctgttcttagtgtggtaaataccttcgcgcaactgggcgacggtattgtgacgctctactatttacctctctttttcctgctttcactgatgatgttttttggtctggaagcccttcccgggatcgtgttagcgctgtttttccgttactacgcgtctgttgggatgtttgaaacggtcgccgggattttccattttatcatccctttagtgctcagctggggcggttaccgcgtgtttgccccacgacgcaatatgacggcctatggggatatacggctgatggcgcagcgcattttctggcaggctttctgccccgcaacactgtttttgctgctgtttcagtttgcggtttaccttggcatctatgagagccgtcagagtcttgcgggattaaatccccttaacatacgaacgctcattaactatcaggcgctgctggtcagcggactgaccggcgttccgctgagctatctgctcattcgtctgatacgccatcctcgctacattcacgggctgatgtcccaaatccgcgcccagatagacaaaaaagtgacgaccgttgagctggtgatttgggctatagcactggctggactgctttcgctgctgctgcagccgatgaatgaaaacagctcaattttcagcaccaactacaccttatcgctactgatgccggtgatgctctggggagcaatgcgttttggctataagctgatgtcgataatctggacgccggtgctgctggtgtcgattcactttttctaccgctacattccgctgcaccaggcctatgacattcagctggccatcacctcatccagctatctggtcttttcgtttgtggtgatttatatgtcgatgctggcgacacgccagcgtgccgtgaatacgcgatcccgcaggctggcgctgctcgacccggtggtgcacatgcccaacctgcgcgcgttgtcgcgcgagcttgctaaaaacccctggtcggcgctgtgcttactgcgcatcccggaactggaagtgctggggcgcaactacggtgtgctgctgcgcattcagtacaagcagcagctggcgcactggattaatggcacgcttcagcacaatgagcgggtctatcatctgaccggttgcgacctggcggtgaggctcaacgccgagtcgcatcagcagcgtattgatactctggatgaacatatcaagcagttccgctttctctgggacggtatgcccttgcagcctcaggtgggcgtcagctactgctatgtccgctctccggttaaccatctttatctggttctgggggaattgggcgttgttgccgatctgtcgctctcgaccaaccaccctgagaatctccagcagcgtggtgccgtacatttacagcgcagcctgaaagataaagtcgcgatgatgagccgcctgcaaagtgcgctcgataaaaacgcgttcactctgatggttcagcccgttcgcggcctgcgtggcgattgctatcatgaagtgctgctcaggatgccagacgagaacggggaattaatttctcccgatcggttcctgcccgtcgcgcaggagtttgggctgtcatcacgcgtcgacctgtgggtactggaacatacgctacgcttcctggcagagcatcgtgacaggctgcccggtcaacgctttgccattaatctggcccctccaaccgtgtgcagggcacagtttccgctcgaggtgagccgcctgctgacacagtacgccgtggaggcgtggcaactgatcgttgaagtgacagagtgcagcactttcggcagcgcgcagcaggcggaacagaccctcagacagctgcaaaaaatgggggtgcgcattgcaattgatgattttggaaccggctacgcgagctatgcgcggctgaaaagcgtggacgccgacattctcaaaatcgacggcagcttcattcgcaacatcgtcaacaacagtctggattatcagatagtggcgtcgatttgccatctggcgcgaatgaagaacatgctggtggtggcggagtatgtggaaactgaagagatacgtagcgcggtgcacgcgctaggtatcgattatgtacagggctatctgatcggtaagccggttgcacttgaatccttgcctgaagaagaggcgtctcaggcagacgcctga

SEQ ID NO: 158220 - DNA, 1947 bp, Enterobacter cloacae
atgttgccgtttgaacatctgatcagccagctcaggcgtaaaggtcatcgtcgtttggttgtactcagcggcgatgcgcattggacattgacgcaggcggtggccctgcgcgatgcccagcccggagactggctgtggctggatgaacacccgtcgaaagctatcagcgggctgctggggcgtgagtttcagcacgcggtttttgatgctcgcgcggggttcgacgtctcggcgtttgccgccctcagcgggacgctgcgcgccgggagtctgctggtgctgctggttccgcctttctccgtctgggcggaaacaccggacagcgactccgttcgctggagcgacagcgccgagcctatcgccacaccgcattttgtgcaccatttccagcgcaccatcgccgctgatcctgacaccatcctgtggtgtcaaaaccaaccgctagcgcttcctccgtttcctgatacccctgactggcagccagccagcggcgacccgcagcgtgagcaggctgacatcctgcgtacgctcctggccatgaacactggcgtcgtggcggtcacggcacctcgtggacgcggaaagtcagcgcttgcaggaatgttgctaaagcgtattcagggcactgcggtagtgactgcaccggcgaaaggggcaacggatgtccttgcccgttttgcgggagagcattttcactttatggcgccggacgcgctgctcgcgtcgacgctgcaggccgactggctgattgtcgatgaggcggctgccattccgggaccgcttcttgaaaagctggttgagcgtttcccccgcgctctgttgaccaccacggttcagggttatgaaggaacaggccggggttttctgctgaagttttgcgcccggttcagcgggttgcagtctttcaccttatcaacgccggttcgctgggccgccgggtgccccctcgagcgtgtggtgtctgacattctgctgtttgacgatgcgctcatcgaccagaaaccggaaggtgacgtacgtttaacgtcgctggagccgcagatgtgggaaagcaatccggcgcgtgtggtgtgcgtttatgagctgttatgtgccgcgcattaccggacgtccccgcttgatttacgccggatgatggacgcgccgggacagcattttaccgttgctgaaaccgactcaaccctcgccggtgctctctggctggtggaggagggcggcttatccccagagcttagtcgcgcggtgtgggcgggatttcgtcggcctcgagggaatctggtggcgcagtctctggctgcccacggcggctcgccactggcggcgacgcttaagggccgacggatcacgcgtattgccgttcatccccatcgtcaacgggaaggtattggtcgtcggcttatccgtagcgccagcggggaggattatctctccgtgagttttggctataccgacgagctgtggtgcttctggcagcagtgcggctttgtgctggtgcggataggcagccaccgcgaagcgagcagcggctgcttcaccgcgatggcgttgctgccgctcagcgaggcggggcatcagctgtgcacgcaggcacatcagcgtctgcggcgtgacgcacgggtcctctcggcctggaatggcgaaaagatcccggtgtcagatggctgggaagctacccttaacaatgacgactggcaggagctggcggggtttgcctttgcccatcgggcgttctcgacctccgttgccgcgttaacccgcttgctgttaaacgtggacatgccgctcccgcttttgcgcagtaaattggcgggggaaacggataacgccgggcgaaaatccttgctggcgaacctgcgcaaagaaacagcacaagcgcttgaaagtcttgatgaaacacgctgtcagaagttgaaagacgacattttgcaatggcaattttttcaatga

SEQ ID NO: 158221 - DNA, 1695 bp, Enterobacter cloacae
gtgaccgttaaacgccctctttccggaagcctggctcgggctttcttttcgatgattgtgttatccgttatgaccagcgccatcgcgctgatgacactcgccagcagccagcgagacgctgaggcgatcaacattgcgggttcgctgcgtatgcagagctaccgcctgggctacgagatgcagcgcgccagcccgtcactgatggaacaccgtgaagcctggcagcagacgctgagcgcccctgcgctgcagacgttgaaccgctggtatgtgccggacgatgttaaacagcgctaccaccagctgcatcttgcctggcaggagatgagccagcgcatcgccagcggcgacaccgcatggtatcaggcccacattgaggatttcgtcggccgtattgatgcctttgtgctggcgcttcagcactacaccgaacataaaattcagctggtgatcctgatgtcgctggcgggtggactgagcattctgctgctggcgctggcgacgctgcggcggatccgccgtcaggtggtactgccgctgaacaatctggtcgcggccagcgagcgtatcgaacagggacaatttgatacgcccgcaccggataccgccctgcccaacgagctgggccagctttcccgcgcgtttaaccatatgtcagcggaactgcattcgctttatcgctcgcttgagcaatccgtggccgaaaagacgcagcacctgaatgaggcgcaccagcagctcgaaatgctgttcaaatgttctcaggcgctgaataccggacagatagacagccattgtttcaggcatattttgcagatcgtgcatgaatacacgcagataaattatctggcgctgcggaccagtgacgactggcaactgttcgaaggcagcgaagccgaaggcgcggaactgcacagtttgcctgttctgatgcaggacaccctgtatggcgaactgcgctggcagagcgagaccgggggcgtgtcactcccgctgatgaagagcgtggcgacgatgctggggcgcgggctttacttcaaccaggcgcaaaaacactatcaacaactgctgctgatggaagagcgcgccaccatcgcccgcgaactgcatgattcgctggcgcaggtgttatcctatctgcgcattcagcttgccctgctcaaacgcgccgtcccggatgagaatgcccaggcgcagaccatcttcacggacttctcgcgcgagcttaacaacgcctggcaccagctgcgtgaactgctcaccaccttccgcctgacgctcaaccacgcaaacctgcccgccgcgctgcaggagtctctcgagggattgcaaacccagacgaaggcgaagctggttctcgattgtcgactctcatccctggccctggatgcgcaaaaacaggtgcatttgctgcagattgtgcgtgaagcggtgctgaacgccatcaaacatgccgacgcgagcgagatcaccgtcagctgcattaccgccgctgacggtacgcacagcgtggcggtacgcgataacggtattggcattggcgaggcgaacgaaccgccgggccactacgggctgaacatcatgcgcgaacgtgcagaacggctcggcggaacgctgcgcttttcacagccgaaaaacggcggaacggaggtcaccgtcactttccgttcacccgcagcgctggcgggtaaataa

SEQ ID NO: 158222 - DNA, 342 bp, Enterobacter cloacae
atgacaaccctcaatgcagtttctctgtcggcgatggaaatcggcagtgctgataacagttctggtagcaatgacattgcctcccagatcaatcggctgatgaaacagataacaaaagccactcagcaactcaaagaagtggcactgagtgatgcaacaacagaagaaaaacaaaagcagcaggagttactcgaatctcagttgactatgctgcaggcacagctggcgcaattgcagcgtcagcaggcagaagaagagatgccaaaacaggaaagcagtcagtcagtggcggaaggcgtcaacaacccttccgctgagcacaagattgatatctatatctga

SEQ ID NO: 158223 - DNA, 585 bp, Enterobacter cloacae
gtgaatgaatgccagaaaatcatcggtgtcgttctggccggtggcagagcgacccgaatgggcggagaagataaggggctacagctgctgaatggaaagcccttatggcagcatgtcgctgacaggcttgcagatcaggtgtcggcaatcgcgctcagtgctaatcgtcacatcgctatttaccaacgcagcggattccccgtttatcaggataacctggcagattatccggggcctcttgctgggatgctctcggttatgcagcaggctaagggggggtggtttctcttttgctcctgcgatacaccctttattccggcttgcctggtagaacgcatggtacaacagcgcggtgactcgcccgtggtttgggcacatgacggtgagcgcgatcatccgacgatcgccctgattcatatatcgttagtttctgacctgcaggcttacctgtctgctggagaaagaagggtgatggtgtttatgcggcaggcaggcggacatccggttgattttagcgatgtgaagccagcatttgtgaacgtgaatacgacagaaaatttgcaggcactgcaggagaagaaatga

SEQ ID NO: 158224 - DNA, 600 bp, Enterobacter cloacae
atgtctctgaacaacgttcgtcaatacgcgctgatgcttgtgttgctctgcggcgcatcgggccttccggggatggcgaaggccgctgaggaagactgtgacatgatgtcggctgtgaagaaagtcgattacgggcgctaccgtaaggaggatatgcggaaggcctccactgagcatgtgggtaaggtctataacggttatgcctcggtcacgcgcgagtttcaggtttccgtcctgtgccccgatgcgcgcaaaatgcgcatttccgttgacggtgctgcgcgacagaacatggcgtatcgctttacggacagcggcgcaatgaaaatcgaattcagggatgggcgcgttgacgggactccggtgcaactggctgcggtcgatattggtgcggttgccgttcagggtggcgcatcacaggttacgctgaagcctgaaaaagccctggctgcggttaacggcacggaagtggtgggcgagcagtttaccgccaccatgatgattacgacctatctttctgacgaagcatttggtgttaccaacaccacggattttaacgagatgcttactcttaacctcgatacacttcctgcgcgataa

SEQ ID NO: 158225 - DNA, 600 bp, Enterobacter cloacae
atgttcaaaattcttttgattgaccgttgccacttcacccgtacgggttttgaagcatggctcaatcattctggtctttttccgggtcacttcgtcgtgaccgggttgaataacctcttcctcgccagagagcatatcctgcagtggaaaccgacgctggttatcgctgacttacacggttttcgacacgattttcatcattttcagcaactctcttccctgatgattgccagcgaaacgcagccctttattttactccagtcgggcgaagaacaaggcatgacaaactacctgacacaattcccggtatgggcttcgctgttgaaaaatgccgatttagaagaagtggcgatggtgattaatgacgcgctgacgtcatgcgcaagcgttgaaatgccgcagattgccgccccgctgctgactcgtcaggaggagaaagtgctaacgctgtggatggacggcgcgagcaaccagaagattgccagccatttaagtattaacggaaaaacggtttatacctacaagcgtaatatcaggatgaagctgcatatggacacgcgctattccccgtttttatccctgcaggaagcagagaattga

SEQ ID NO: 158226 - DNA, 741 bp, Enterobacter cloacae
atgaggtacgatattgagggatttatcacttttgatacagaggatgcatctctcctgaatctgctgaccggagattgcgttgaattatcccagacttctacgcgtctgttagcagaattactcaaccaccgcggcgatatcctttccaggagtgaaattttccattcggtatttgatcaatacggtgccagagcatcaaatagtaatctaaatcaatatatctctacgttacgtagaaacctgagcgacctgggcgtagaaaaagagatcattactaccgttccgcgcattggtttcaagattgcggatgacgtcgtcatccataacgatcgcgagtatcgaaccccttttctggaagaaaaagtccccgatcccacccgcaacccaccttctccttctccttctccttctttttttgaaaggattgcccgaataatgacgctgggttttgtattaatccttttgttaattaggcctcataacgtcgattccggggaggatatacataaaatcgttgacgaccaatgcattatctttacctcccccgccctgacgctatgggatgtcaaaaatagttttaattttacaacgcaaccgttcgactgctcacagcctaaagaattgtatctttacaaaaagcagataaaaggagcgctggggaatattatacatttgcttctgattgagtgtaataacggcaactgcgaaagtttttattacagagaaaaaaccaatgtctaa

SEQ ID NO: 158227 - DNA, 468 bp, Enterobacter cloacae
atgtctaagcgcgtctttttcctgttcctctgcctcggcctctccctggcgggggggattttttcgtttaccagaccctctactttctcatgtgagtcgcagttttctgttgtacaaaacatcaataacgatactattcatgctgaaggcctgatttttttcaacatgtcgaacgataatatatttatcaatatcgatggtttactttctcataacaataaaaaccaacttatatcacgcacgctaaagataaaatataaaccgtttaacgccagtgcacatttatatcaagttacaagcgtcctcaccctgcgcgatagtacagacaatattgacgacagtgtcgccatgaacttattgtttggcaaagggtctgatgacaagataatttacctcgataaattcaataataatacaatactctttggtaaccacacattcccgcagtatggttgcaagcgaaattaa

SEQ ID NO: 158228 - DNA, 252 bp, Enterobacter cloacae
atgaaaccgtatgaaaacatctacagcaaaatcagtgaaatgattgccgatgcgaaagatatgacgctggaggcgctgacgccggacacgacgctgccgcagctggagctcgacagcctcgattatgttgaactgatggtgctggcgaaacgcgagtttgatgtgaccctcacggctgaaatatttatgaaaaagcagccgatgaccctccgcgatttgagtctgtacatcgaacaggaaatggccggctga

SEQ ID NO: 158229 - DNA, 804 bp, Enterobacter cloacae
atgatgacgctgcattacagccagcaggacgcacggttgtgggctgcattttcaggggattacaatccggtgcatttcgataaggcatgggtgaaatcgcagggcggaagcaggctcagcgttcacggcatgcgggcattgctggatgttaaacggttcattagcccggaggttcgccgctcaccctttctgaagtgtaccgtgcggttgcgcagaccgctgtggcgggacaccgattatcttctgatgcgcgactcaaataagcccgtttcagccgccgtgcacgatcttaccgcgcagaaagtctgcctctcatgcactatcgtgccggtgagtcttttcgctgtggaagaagcagaaagtcagcgagaactcggcgcgtcaacgattgccgcgctgcatcagacttttttacctctgcttcccgacgcccggcagtggcattttcttgatgcgctgctgtttcgccatcttcttcaggataccgcgctgttagatcagaaagtcattgcatcgctggtgccggctggtcgcacgctggacgccctattcacccgctatcctgttgtgcaaacccatcaggaggttgttttcgacagccatctgctcgcgccctggcagtcggtgcttttaccagaacctcttgagatcgagacattacccgccatggtggtcggcgatcttttacagggtgcagtggtgcgaattgctgcgcaaacccgctatcaacaacactacattagcagtgccgtgacgctgaaagtcggcccgctgacaaaaggaaatgcaaatgaaaccgtatga

SEQ ID NO: 158230 - DNA, 1371 bp, Enterobacter cloacae
atgacaagacacctcattttagccgcgctgctactcctggcggggtgtagcgcgatgacccgcagcgactaccagcgcccaatgctgtcattaccgacagggtggcccacgacgtcggagaaggaaacggaaaacggctggcgttttaacgatgcccgcctgtctcgggtcattgaacaggtgctggaaagcaataacgatctcgcggcggcagccatcacgctacagcaggcacgcgttgcggcagggctaacccgcaccaacgtgacccccgacgtcagggcgagcggttccgtcagcaacagtaaaacggtgcgtcacgggacacctgcacaggagagctacagcggcggtattgccatcgcctgggagttggatctgtgggggaaactggcgcgtacccgtgagcagagtgaatggcaggccagggcgagcgagcaggattaccatgcgaccgttctttctactattggcaccactgcccagctttactggcgtatcgccctgtataaccagcagatccgcaaccagcgtgacggcctgacgatctcggaacagaccttacagcaggtggcgtcgtggtttaacgccggaaaagtagggcagcttgatgttctgcaagcacagcaggcgctgctggagcggaaaaatcagctcagaaccttagttcagcagcgccagaacacacgcaatgcgttagcgctgttgctcaacagaccagccgagcaacatgcggatgaatcgatcgccctggatgtccatcagcaggtgcccatctcgcgcgcaacgccgctgcgggcgatcgctcagcggcctgacattcaggctgccgagtcgcgcctgcgcgccgcgctcgcgggttatgacgcggctcgcctgcagttctaccccacgctttctcttgatgcgtctctgaatgccggaagccaggttttcagtcagtggttccgcgacccaatcctcacaacaggcgccgcgctggccttgccgtttatccagtggaatacccgccagctcaccgttgagcaggcggatttagcaacaaaactggctgcggtcgctttccgttctaccgcctataccgcacttgctgaagttgatgaggccatggaaaaccggctaagcgcagatgagcaacgcgccaggctacttcagtcgcaggcccttagccagcggcgattgtccctcacggaaaaccgttatcgcgcaggcgcggtggatttccagacgctgctcgacgcgcaggacgaactgttgaccacagagaacgccctcgcgcaaatccaatacgactacctttacgccacgctgcagctctggctggcgcaagggggcgacacgcaatacaggataatgaaagatgaagcttaa

SEQ ID NO: 158231 - DNA, 957 bp, Enterobacter cloacae
gtgatcagattattgattgtctggagcgtgtttagtgtcaaaaatagcgcgggaaaaattgaagtcattcagcgaacgctttctcagtgcggtatttttctattgcgaaaaataatgcgatacgtgcctctccccgtgacgctggtggtggcgaagggactctgcgcatcgcggcttctcggacgcgcgtttcgcttacgaaacgcggtggctaatgaaaactatcgttgcctgactgggcaaacgtcccggctggacgtggcctggatggcagtccggcgacgcctgctggaagaggccgccacctgggggcaaaacacggtgctgcttcagcaaattcgtgcctgcgccgcggatctcgatgcggtggtcgcaccgctgcaccagcaaaacgcgccctacatcctggcaccgctccatacggtgtctgacgtgctggctgccatcattggtgccagcgtcacgccgggtaaagcgagcgtggtggtttcttccagcgctgagctttacagcgcccccgttcgtgcgcttgggggcgttgcactcgcctactgttcaattcatcaggagaacaaaacgctggccagcggcctgatggagctcatcaccgatgtcgccgtcgggcagcagaacatgattatttttcctgatatctcgcccgactatacctcgcaggcagaaggggcgcgggtggcgaagctgccatgtcgtttatttggtcgcagcgcaaagttgcatagcggtctggtgcgtctttccggcgcaattgccgcacaggtcgtgttttatcacctcagctatgacaacggcctgcgcatccacattcatccgccggtgagcagtcagaatgtcgccagcgcgctgcccgtcatcattgaatctaccctgcgaaagcacccgcaggagtggctcctctggcacagccattctctctactttatcaatcactcactataa

SEQ ID NO: 158232 - DNA, 669 bp, Enterobacter cloacae
gtgaacccattaacgcgcaaaacagcgatcggttattcgatctttctgattattatttccgtttcgattacggtgcttttctatcatatttttgtttttaattcctttgccaaagatgattccgcgacgcaggcttttcgagaggtcagcgccgaaaagtttgcgaaaagtccgataaaaaaagagcacagtattatcgaggtcatgtcttacggttgccattattgtgcggcaaacgaagagaaccttgcagaacttacccgtaaactaccgccggacaccacatttacctctattcatattgcaggtgaggataatggccttgccgcctatgcgccgatctttgccacgctggaagcgatgggaatagaaagggatgttcgcgacagtgcgtataacgccattatcacgcgaaacgtcgatctgacggatgagaaaaaactgaacggttggttagcgaaaaataatattgatgtcgtcaagtttacgacattgaggaaaagtaaaaaggttaaagaacgtctcagcgaaatggcggctattgccgattactacgatattaacgccacgccgatgtttattattaatcaacgctatgttgtcgcgcaggaccgcgaattcccggcgtttgcgcagcgcatgctggaactgctcaaagaggataaataa

SEQ ID NO: 158233 - DNA, 456 bp, Enterobacter cloacae
atgaaccgatttatcatggcggattcggaaaaatgcattgggtgccgcacttgcgaagtggcctgtgcggtatcgcatcaggaattcgtcaccgcaaatgatttcatgccccgcattcgggtggtgaaaggggattcttataccaccgcggtcgggtgtcatcagtgcgaggatgcgccctgtgcaaatgtttgcccaaccggggcaatccgacgctcagccggagcctggctcgttgagcaggcgcgctgcatcgggtgcaaaagctgtatggtggcgtgcccgtttggggcgatgcaggtacagagggtgggggatcatgcgcaggcgctgaaatgtgatttatgcgcgcatcgcgagggcggacctgcctgcgttgaggcttgcccgacccacgcgttaagctgtgtcgatcccgccagattacgcaccgaacggctgcatcatctggcgtaa

SEQ ID NO: 158234 - DNA, 216 bp, Enterobacter cloacae
atgccatcaattcacgaatcaaaggtagcccgacaccgcgaacggatgcgcgcggcggggctgcggcctgtgcagttttgggtgccggacacccgttcgcctgagttcacggcgcaagtgcgcaagcaatgccaaagcctgaagggcgacccagcagaagcagaggttttgcgcttcaccgaagaggcggcatcgcacgttgagggctgggagtga

SEQ ID NO: 158235 - DNA, 321 bp, Enterobacter cloacae
atgcagcgaggcgacctcgtgacggtttcattgcagggtgactacggcaaaccacgaccagccctgatcgttcaatcagacctactaaccgacttggaaagcgttgtgctgtgcccagtgacaagcgacctgcgcaatgccgcgtttcgcgtcaccgtggaaccgaatccagctaacgggctgcgcgcactatcgcaagttatggtggacaagctctcgacgctaccgcgcaccaaaatcagtgaaccgtttggccgcctcgacgatgagcgaatgaaagcaatagatagggcgctcctgttggtcgttggcgttatttga

SEQ ID NO: 158236 - DNA, 384 bp, Enterobacter cloacae
atgagccgcaagcaaagcagtgccttcgtcacgaccagaaagggcttttgctatctcacggtcaaagtcggcaggagcaattacaacatcatgcggattcgcaattacacgcttgagccgcaggacaagcgagacatgcgccggttgtatcccgactatctctttgactggaagaagatcggccagcagcttgccgaaaagagggaggtatgcagaacctaccgctccaagcgtcaagcgccccggagcacggaacgtacctcagacccgttcgtcatggtgtcgtatgacccaaggacgcgcacggtctacgcatccgacacctgcgattcaatggcattgcttgacgctgttctgcacatggaacgctcccgcaaaaaatag

SEQ ID NO: 158237 - DNA, 750 bp, Enterobacter cloacae
atgtcagcaaaagtagtggttataacgggtgctctttccggtattggcgaagagtgttgtcggcagtttgccaaaaatggttataacgttgtcttctctggtcgaaaagctaaacgtggtgaagaactacaaaacgaattacgaaatctcaatccccagtgtcattttgtcctcgcagacgttgtgattgaagaccaggtcgcagccttgatagaaaaaacccgccaactgtacggcaagattgacgtactgattaacagcgctggaacagagggacagcccgcacctcacgatcagactaccgttgaagactttcaccgggtatttgatgctaacgtactgggaacacagcttgtaatgaaacatacgttgccagttatgagcaaacagggttctggcagcttgatcaatatttcgtcgcaagctgggctggttggtatcccaggagggagtgtatacgctgccagcaaacacgcggttaatggactgacgcgctccgcagcgcttgaagttgcatccaaaggcgttagggttaatgcgattgcacctggtcccgtagagactgatatgtttgaccgttttgttggtcgtgatgcagccgcaaaagcagaattcctcagcagaatgccgacagggcgtatagccacaacgggagagattgcagctacagcactgttcctggcctcggatgcagcccgctcaatcgttggacagataattacggttgatggcggatattcggtcggttaa

SEQ ID NO: 158238 - DNA, 201 bp, Enterobacter cloacae
atgatttggcgctgggagtccgcaacccgttggtatgaggccgagctaataagtgacctgtttggtgactggctggttgttcgtcgatggggaggactttatagcgaacgttacggcacaaaaacggatgttgtgcctgatttgttttctggcgtagcgctgctgtttgaaattgaccaggaaggggtcggttccggctga

SEQ ID NO: 158239 - DNA, 492 bp, Enterobacter cloacae
atgagcagtcttttagcgctggcgcaggacttggagcagaaatcgaaagcgcagcggcaatctaccggcgagatgctgaaagccgcattcagcgagcacgaggcgtatgtaaatcaggaactgagcgaaagcgcgaagcgaatcaacagcgctatcctcgaccacgaccagaagctggcctccgccatcagcctgaacaccagagggatgctgaaaaccatcgggcggacgtggctgattatcgccggcgtgtcattcctgctgatctgcacgagcgggagcattctgtggtggcaggggcagaaaattctcgacaactaccaggccatcagcgagcagaaagacgcgctgacgaagctgaacgcgcagacgtggggcgtgagctttcagacgaccagcgacggacggcgctttctggtgatgcctgcaggaacaacgccggaagccattccttacaacggtacgacgtgggtacaactgaaacaggactga

SEQ ID NO: 158240 - DNA, 216 bp, Enterobacter cloacae
atgaccgaactggaaacgcaattattgagcgcattcgagcaactgcagcaggattacgcgcagcagctgagcgcgtgggaagccgcctcctcggagttgcagaggatgtttggcattacgcaacgggagaacgcggcgctgagcgagcgcgtatcggacttgagcaggcaggtgcagagtttgagcgagcagctgcgccgcttgtccgtgagatga

SEQ ID NO: 158241 - DNA, 432 bp, Enterobacter cloacae
gtggcaaaaacattgctcaacctttcacaggcagcacaggcagccggcatcaccagaagaacgctgtataaccacgtaaaacaagggaaagtgaccgtgtcacgcgacgggaaaaacaacccggtcgtggatgtatccgaactgatccgcgtatacggcaatgtgaatttacctgagaaacaaattcccagcgtttcacaccgtgaaaatacacagaaaaatttcccacatgagcagctgacagccatgcagaaagagctggctgaaatgaaacaggccatcacgttgatgctggaagacaaaacgctgcgggaaaaagaaaatcagcagcatgaggacgagaaaaaccagctgcgggaagaaatcaaaaagctcagtgaaagcctggagcaggcgcaaaaaaaagggttctggtccaggctgttcagttaa

SEQ ID NO: 158242 - DNA, 474 bp, Enterobacter cloacae
atgttaactaccctcccctttctgctgttctatttttcgctgactgcttttcttgtctatgcagatatccgctgcggcctgcttcccgataaatttctctgcccactgctgtgggtgggcctgctctttcagctctgtatccatcctgattttctgccgagtgcggtggttggtgcgatggcaggatatgtcggctttgccgttatttactggggctatcggtttttctttcgccgcgaagggatgggctatggcgatgttaaatatctggcagcgctgggcgcctggcatggctggtgcgtattaccgctgctggcgttggtcgccgcgctgatggcacttttgtgtcttctcatcctatctttagttcaccctgataaacagacattaaaaaacccactgccttttgggccatttctggcggcagcgggtttatgcgttggctgggaaaacctgattagctttccactttga

SEQ ID NO: 158243 - DNA, 369 bp, Enterobacter cloacae
atgtggttactcgatgaatgggtagagcgccatatcagcgatgcccaacgcaaaggtgaattcgataatcttccaggaagcggcgaaccgctcgtgttggaggatgattcgcacattgcacctgaattacgtgcgggataccgcttacttaaaaatgcgggctgtttgcctccggaacttgaacagcgaagagaggcagttgaacttgttgatctacttaaaagtgttcgcaaagacgacccacgacatattgagctcagccgccgactgacgctgattgagcttaaactccgccaggctggtgtgagcactgactttttacgcggtgaatattgtgaaaggttaatgcagagaatcgatgaggaataa

SEQ ID NO: 158244 - DNA, 1125 bp, Enterobacter cloacae
atgacgtcgacagagatatggttacggttaattcacataggttctctatgtggtgatgcaatgctggaaatcgcatcacagctcagtaaacagacaacgatcgatggcgtgacgcttcgagaagccggattgtcagcaacgcaggctggtcgatttcttgctttcagtgaaggtgagcttgagcgtagcctggtgtggctggaacagccggggaactatctcttaactgccgaccatctcctttatcctcctttgcttcgcacttttcctgattatcccggggcattattcgtgacggggaaccttgaggcccttaatgccgttcaacttgctgttgtcggaagtcgcgcgccctcctggtatggtgagcgatggggaaggatcctgagtgaacagctctcacaatgtggtttcacgattaccagcggcctggcctgtggcattgacggcgtggcccacaacgctgcattgtcagtacaaggcacaagcgtggcggtgttgggtaatggactctttagcatctatccccgccgccatcagaccctggccaggcggcttattcattcggagggggcgctcgtgtctgaattctcactttctacgccccccagaccggctaatttccctcgacgtaacaggattattagtgggttaagtcagggcgtgctggtcgttgaggctgctttgcgaagcggttcgttggttacggcaagatgtgcgcttgaacagggacgagaggtctttgctctacccggtccgataggaaatccaggatgtgaggggccgcactggctaataaagcaaggcgcaacgcctgtgacttgcatagaggatatcctggaaaatttacggtatggcttgcactggttaacagatgaacctaaaaagcaacattattcgtcagatcaggagaaggtggcattgccatttcccaagctcctggctaacgtaggagatgaggtaacacctgttgacgttgtcgctgaacgtgccggccaacctgtgccagtaacggtagcacagctacttgaactggagttagcagggtggatcgcagctgtacccggcggctatgtccgattaaggagggcatgccatgttcgacgtactgatgtatttgtttga

SEQ ID NO: 158245 - DNA, 537 bp, Enterobacter cloacae
atgaaaagaatcattttacctctaattctatcttttagcggaaatggctttgcaagctcactccaagagcaattgtctgcagtagctcaagctgagcaacagggaaaggctgaagaacaaagactaagcgatatccaacaagaaaagataaatgcagctgaaaggctggagcgacaaagaagagcaagtgctgttgctgaagctaacaggaaagcagccatagcctctgcagagaaaaaagctcggcgtgagaagattgaagctgaagtcaaggccgacaaaactagagatcatggatatgaagatgaactaagaagtcttgagatccaaaagcaaaaacttgctttggctagagaagaggcaagagttaagcgcgaaaatgagttcatagaccaagagctaaaaaaccaagccgcccatacagatgtaatccaatctaatgctgactcgaatagaaatatgtcagaaggtggaagagatttaatgaaaagcgaagggaacgctagagaaaaaaaagctagcggttggtttaattag

SEQ ID NO: 158246 - DNA, 408 bp, Enterobacter cloacae
atgcgcatcctaatgattattgatggtttacccggtggaggagccgaaaaaacggttctcaccctctccagcggactgacagaactggggcatcaggtcacccttttctccttacggaaggtgtgcgactacgccattccggaaggcatcgattttcaggttgtgcaggatacctgtaaaaaaccctggcggaagctgaccgagatcccgcgtcgcgcccgtttgctggatcgcgccatcgagcaggcagaacgcagcggtaaatttgacgtcgtgttctcacatctgcataaaaccgaccgtatcgtggcgcacagccgcgtgctggatcgggataaggtctggttctgcgtacacgggatgttctccttctcctatttgcgccatcgcgctttctcgctggtttaa

SEQ ID NO: 158247 - DNA, 558 bp, Enterobacter cloacae
atggagctatcccgattgggcagggcgggaccggcgcaacgaatgacgctgacgctcgctcaaacctcggtttgggagagaacaacacagccaactttggaagcctcgaaattggtgccaaaaaaccctctactgcaagctttgtggatttccatttccttggcactaacgactatgacgcgcgtattctgtgcggtggtaattctaatggcgccatggggaaaggagacttcacattttacgcagggaaatacgtttttatcggcgatagctttgaatttcgtaaccctatcacctgtcagaacagcatcagcgcatccgcaaaaattgcgaccacggctgatatggaatgcaaaactaaaattgctgttttggccccagctgacaatcaaaatgcccatgtgtggttctatggtgcaggtggggcatccaggggggttatttattccgggcaaacaggaattattcagctccgccctgataataatgataacggcgggtccaacggatacgcttttgcatttggggctgatggtaagtttacctgcgtcacgatga

SEQ ID NO: 158248 - DNA, 432 bp, Enterobacter cloacae
atgaaaaaatatttacgtccactgatgttcaataccttgctggcactggttctgctttgggggctggtatcgccgcaaagcgctgctgtcaattttgtcgctgcatgggcgctgtttggcagtgttgtctgcattacggcgagcctcgccggtgcggtcgcctatgagcactggttacgaaacactggaaaaagtattcccgtcaatacagccctaatgaaggtatttcgcgccgtcttttgccgcaaaccttcgcaggcacgcctcgcatggtctctcattattttatctgcgaccacaagttgcctgctcggtgcgggctggctcttcaccgcgttgatttacctgatttgtgttctgacgcttacggttgtacgcacctcttaccgtcagcgcattgaggaggcggggctgtgtccagaatcattgtga

SEQ ID NO: 158249 - DNA, 867 bp, Enterobacter cloacae
ttggttacttcatccgaagatgttcgcgagattctagaaagaatccttatttcttatggcgttagtacgcgtcaggcatatgctgatttagtaggaattcctattggaacagtaaacaactggctaaaaagaaacagccttcctggggattatcttgtgcaatgcgccgtcgacacaggcgctgatgtgatttggcttaaaaaaggtaatcttgcaaatgcaagttttggtgacgggcaacctagtggattatccgggatagccttaagtgagaaaatcgaagcttccggtgggaaaattgtgctccgccgtattcttgatgcttatggttttaaactccaaaaggaacttggtgatcatctcaatatcccatcaggaactatgagtgcatggattcgtcgggaacactttccaggtgaggtcgtaatcgtctgttcactcgaaacgggtgtttctctactatggctagccacaggtattggttcaatgtacgagaccaatcccgaagcaaatcagaattcgctactaagtactgatataaagcagatcgcaaaattcagcatccacactggcagcttaatcaacaatggggcgtggtattgcgacgagtctcttattgatccctctgtaaaaaatccagcgttagtggaaaaaaacagcctccgatggctggttgatctcgaagcaaaaaatattgccaacggccgatggcttatcgatgttgatggcacttgtgatgtatacgatatcgcgcgcttgcccggtaataagctggttgtgaaaaatgattcctctcagttcgagtgccttgcaaatgaagttacctgcgtaggtatggtctttctaaccttaagcaaaagtatttaa

SEQ ID NO: 158250 - DNA, 303 bp, Enterobacter cloacae
  misc_feature (223)..(232): n is a, c, g, or t
atgggtaacactcatgaagctagcgcttcggcaacaggctacctgtatcaatgccgctatgcgttactaatgggactggaagcaacactagatacgccagaacttaagatttctattgagaagtttgacgacatcgcttttgaagtcggtagtaaaccaatccaactcatccagaccaagcaccataaaaatagaacaggcaacctgactgatagtagtgctnnnnnnnnnntgctaattcagcgtcctctctacttcgcaccagtaatcgtaacgaggttgaggccgatactttgctgctaa

SEQ ID NO: 158251 - DNA, 1044 bp, Enterobacter cloacae
atgaaaataactgaaaaagcagagaatcttctaaagagttttattgaagatattgaaaataatgatagcctgagagatcacgataaaaggtttggtgcgcagagtaagagattaaaacttgagtttaaaaaacttaccccacctttgaatgtaatatcagaacggctttacacaatatctaaaaatactttctatttaatcgaactgtttgactacaaaatttatcttctggctaaggggatcctgaatagtatcgagacgagtaaccctctcacacttgccaataatacaagggcaattatcgaacaaatggctgtgtatcattactgtatttattcaattggagatatgcttgaaagtttaaaagatcagggtgtgcttgtaaagataagtgaaatcatggggaagtgcgaaaaaattttacaacgcacttacgcaggacaaggtaaatcgtatgcggaagatggtgctaaagcaatccatgtaaatgaggcaatcaaatcacttagtactgaaattaaagatgcactcgaagtatatgattacttatgcgagtttgtacaccccaattacggtagcaatattttagtttcttcaggcgatcttggtaatggaataattgctgctagaagactagaagacaaaaatgtagaaaacatgctaaatattatttgttcggttcttgaacatttaaatgtaaaaaaaatcataaatccaactgtaacatggcaattagaacattatgttgaattatgtatgatgcgaaaggcaacactaggtggtattttcgctgtaaaaaaggcaataccaattggagatggaaagagtataaaagatgcttatttctttaaaaacgcaagaacatctcaagaaggaatgcaactgatgtatcaatatttgtctgacatcggttacaaaataaatcctcaagatcggcagcaagtgattgatatagaatctcttagcttggggtatcatatagacttatgggataccccattgggtaaaatgtattttaaaacaaaaagatatgtcggcgtgtaa

SEQ ID NO: 158252 - DNA, 483 bp, Enterobacter cloacae
atgaatcaggtagaaatagaaaacttgtgtatcagaatccgtaattgcctagataaatggtcagaagatggaactttggaagcactagtaggcagttcaacaaaaaactttcctaacggctgctgtggtttaatcactgaatgcctgtcggttattctatacaaactgacaggatctcgtcccaataccgtaaccgggacatgtgatgatggtgaccgctactacaaccaattagccgcaaacagccatatctggatagaatttaatgggataaacattgatttgacaggtgaccagtttaacgacggggatatcgatatcccacctgtgtttgtttcatcgtcatcacacactttatctacaatgatgacaacaaaaacaaaaccagcctttctaattggtataactaaaccagcatccgggtttgagagtggacagttgtttttaatcgataaattaagggttgaacttaacctattttga

SEQ ID NO: 158253 - DNA, 192 bp, Enterobacter cloacae
atggtactcactgacaaacaagaaatgttctggcgcgagtacctcatcaatttaaacgccacgcaagctgatactcgggcggtatacagtgcttcaacagtagttttaccttattttaaggcttgcttagataacttgtttttgcaggttaacttggattttttcgccattaacggtgacagtttttgttga

SEQ ID NO: 158254 - DNA, 429 bp, Enterobacter cloacae
atgaagtacttacttccgatagttatttttgcgtcaacctacgtttcaggctcagttttagctgctaccccctctctttgcacaaccgtaacatactcggcttttggcgagaaagaaaaaacagtacgtgactgtgtagacaacaatacagaaaattttttcattaatgccaaaattaacaattacaagcttcccacactggctgttggcttagaaatcccatcgtgggtcagcgagacaggatacggttcaccaaaagcgttcattggtcaggtaaccaagcaaaacggcatttatatcgttagagttcaaatcgaattgaatggtaaaaagatcattacttcattacctttagaagtgggatcaacaaaaactgtcaccgttaatggcgaaaaaatccaagttaacctgcaaaaacaagttatctaa

SEQ ID NO: 158255 - DNA, 642 bp, Enterobacter cloacae
atgagcgaagaaaaagacgcatatgaagccgttaaaaaatatgatgaaatcatacatcagaatttacgaaattctttgatagatagcgcaagcctagcaactattgagactacatcaattttggataaatttagtatgtggttactagttggcgtgggtgcgacagcaacattaatgatagctaatattgataaggtgttgccttttattacacctctaggctttaaaatttccgtttttttattggctatttcctcaattgctgggtttgcatctaaatattttgccttagtagtttgttcatctgcagctgtaactgtaagaatgacagagttaatacagagtaaaataaaagaatacgaagaaagttgtaagatcagagacgagatcggacgagatgttggatatgttagtgatattgaattaagcattgattcttttacagaacaatatgttagccttttcccatttcaaaggcttaggaaaaaggtaaaaaaaggaatgaacttctactcagaaaatagatctggcaatagagcggcggtacatggcgtagtattccaagggttagctctgtttttgcaagctttatcctatattgctttcttggtagttattacttcttttataaatctacgttag

SEQ ID NO: 158256 - DNA, 894 bp, Enterobacter cloacae
gtgcgaatacggtggaaaaaaaccggtgaaaatcgctatcgcgtatggccaaacgagatgcctgcggatctctacaaagcgcgccctaacgcggcactgaaccgtaaccttgaccacaactggcagcaggcgctgctgaaaacctcgagcgaacgtcgtatcgcggtggacattgaactgggcggctgggaagagcagctgatcctgaccatgacctgtgaagacggtatcagcgtgacgcatacgcttgatggcctgttcgaggtggcaaacaacgcggaaaaagcccttaacaacctgaaggatggcgtggcgaagctggggcagaccctttactacgcgcgtcatatcgacgttaacctgccggatgccctgtttgttccgaacagcctgctgaaccagttccgccgcgagacggcagaaatgctggatgccgcccgcctggctaactatccacgcggcagccgcaaggccgaaaccgttcctgcgccggtttaccctgacacgcacttgtccttcctggcgaacgtctataaccacaaagcgcgtgaattctatcaccgtcacggcgtacagctgattgacgcagcctatgaagcgcatgaagagaagggcgatgtgccggtgatgatcaccaagcactgtctgcgcttcgccttcaacctctgcccgaaacaggcgaaagggaatattaaaagctggaaggccacaccgatgcagctggtgaatggcgacgaagtgctgaccctgaaatttgactgccgtccgtgcgaaatgcatgtgattggcaagatgaaaaatcatattttcaaaatgccgtcaccgggtagcgttgtggcctccgtgagcccggacgatttaatgaaaaccctgccgaagcgtaagggtaattaa

SEQ ID NO: 158257 - DNA, 426 bp, Enterobacter cloacae
atggataaatttgataccatgctgctcttcacccgcattgtagagcttcaaagcttcagtcaggccgcggaccagctagggatccccagagcgacggccagcaatgcaataaaaagcctggagaaaaacctggagtgtcgtctgctggagcggacgaccagacacgtgcgggcctcgctggatggcgaggcattttatgaacgctgcgtgcatattctttctgaactggacgatgcggagtcttccctgcgtcattccggcgtaagaccacaggggattttgcgcgtgaatcttcacggggcccatgcgacccgcattgtactgccccgtattgacgagtttcacgcccgctatcccgccatcaggctggttatcagcagtggggatcgtctggtcgatctgattcgggattcgggaaggcgttga

SEQ ID NO: 158258 - DNA, 138 bp, Enterobacter cloacae
atgaaaaaactttctgaaatgctgaaagcagccgcttcttctaaaaagccggcacaaaaggttaagggtaaggatctttattccggtgctggtccgagtaactccaattcccactgccagggtggtggtggctggtaa

SEQ ID NO: 158259 - DNA, 132 bp, Enterobacter cloacae
atggcgattccagcttacttgtggcttaaagatgatggcggtgcggatattaacggctctgtagatataatgaaccgagaaggtagtattgaaatcctcagtttttggacatgggttacatatccctactga

SEQ ID NO: 158260 - DNA, 480 bp, Enterobacter cloacae
gtgataatcgccagatatgctctcaatggtttgccgacatctatacttaccgtggcggggatagggaatttcccagcattctcaggccagatgtatgggcgcaataatgtgacaatgtccagccgaaaagatatcggtccaatccctcccgggcgatattttatcgtcaatcgtcaaagtggaggcagactaggtgctataacagatttcggattaaagaatttctatggcaccgatcgttccgtttggtttgccttgtataaagaagattggcaaatagacgattctgttttcgttgaaggtgttaagcgtggcgcgtttcgattgcatcctgtcggcccgcgcggcttgagtgaagggtgcataaccctttgtcagcagtctgatttcgactatttaaaagaggcgttgatgaatacaacgatgatgcctgtgccatgttcaagtttcaaagccttcggaacaataacggtgacctga

SEQ ID NO: 158261 - DNA, 237 bp, Enterobacter cloacae
atgcacaccctctatgccgtaaatactaaacacgtttgccagacgttgaatgttgtccagtggaaaaaaggctgcccataccaggccgcaaacaaaaaaccaaaatacaatttgtatgcaaaacaggaaaaaaccggtgaaaattctcatcaggtcaccgttattgttccgaaggctttgaaacttgaacatggcacaggcatcatcgttgtattcatcaacgcctcttttaaatag

SEQ ID NO: 158262 - DNA, 1011 bp, Enterobacter cloacae
atgaaagtgttgtttttatgcccacgcttttttaattatgaaaacgaaatatcagatggtttgagacgagccggagccaccgttgattatttcgatgaaaagccatttaataacgtattttttaaaatattactcaggctttggaaagaaaataactttcttaagcgcatttcagatgcgtattttgataggattttgcttcaaacttctgatgattatgactatgtcattgtcctcaaaggtgagtctcttaacagaaaaaatctacttaaatttaaagagaaatacaagaatgccacgtttatttactatgcatgggattctattaaaaattatccccatatacaggagtatttaaacttatttgatcgggtatttacattcgatgataacgatgcgcgtgagtatgattttatgaatcatctacaattattttactcacctgatttcgtaagcactgcgaaaaaaaatgcattaccgaatgttaagccgagcattgcatttctgggcaccgttcatagtgacagatacaaactgctgggcgcaatttataaaaagtataaaaatgaatatgatttgagatttgttctttattttccatcagttgttgtattggcggggtttcttgcctccaatatcaaagatgtaattaagttcagacttttcagttttacacttcgctccaggaataaaaagcagattgcagcatttttctccgatgctgatgctgttcttgatattcagcacccccgtcagactggtctgactatgagaacaatagaatgtttgcctctaaagaggaaatttataaccacaaattccagagttaaagactacgatttttattcagcgaaaaatttttatttcatcaaccgtgaaaatatctatattgactctgctttttttaatgtctcgtttgacgacacttactcagatgaaatttcgcgttatagtgtagactcttggataagcacattgtgctcagctgatatcagtaaagatgcagtttaa

SEQ ID NO: 158263 - DNA, 330 bp, Enterobacter cloacae
atgaaggataggatcgtcgaaatactacaatacaccctgaaaaaagattctggtgaggagtttcatcagatcatgcatgaagtcagtgttccacttcatacccggaacggtatcgatgtggttgcgtacggaaactctctgcacgatcctgacagctactacctcatacgggcttttgaaagtgaagaacagatggaaagcattcttgatgatttctatgcgagtgcgggttggcgtagtggcccacgagaagcaatcatcagtcgaattgaactcagtttaaaatcagttctatcactaccacaaagcgttattgatggattgagataa

SEQ ID NO: 158264 - DNA, 204 bp, Enterobacter cloacae
atgaacgaaagaaaaagatttatccgtttacctgaagtattaaatagaactggcctttgtaaggcttggatttatcgcctgattagtcgtaatgaatttccggcccaagtaaaacttggtgaaagagcaatagcattcttagagagtgatattgataagtggattgatgaaaagatttctttatcacgtaataaagtagcataa

SEQ ID NO: 158265 - DNA, 315 bp, Enterobacter cloacae
atgaatactgaagaactgaataacattaaggactcatcgactaaagcttttactgctatggcaaagaatctttatatcacaggaatacgcatatataaagaacaagaagagcatgagttattagcatccattatgttggatagcaacagaacggaatcatatatttcgcatgttaaagaatatctggcaaaacgcttcgatgaacatatggaagaagctggtaaaagagaaagacttatctatgttgatatggataaagttatgtttgaaatgagatatgtgcatactaaagcattactttttagtatgagttaa

SEQ ID NO: 158266 - DNA, 297 bp, Enterobacter cloacae
atgtctaaagaaagtattgctagtaataaatcaactgaactgttctatgatcttgcctgcaggtcgtttaccgcaagctggaatatgttcatggaagtcaatggtgatggggatgccaatgattatctggatgatcaagagtttatgagcccatttattatttatgttattgaccatattcagaacaactttgaaagattcactgtccaagaaggaaatagtggtgatattaatcaagttgactttgaactagtcgctgccatgttagttgagtattcagaatgttttagaaaataa

SEQ ID NO: 158267 - DNA, 237 bp, Enterobacter cloacae
atggcaaatacaatatctgtcgcagtaaatatgttttgtgaagaaactccaaaagtaatgaatgctattcaagagcgttatgaaatatttgttgccattacgggatattcagtagaagaaatcatggatgacagcaacttgcttgaagagttaaatcgatttattaataacgaactagttaatgatttagggttggaatatggttccgttatcataaatatcggttataacaactga

SEQ ID NO: 158268 - DNA, 351 bp, Enterobacter cloacae; identical to SEQ ID NO: 17772

SEQ ID NO: 158269 - DNA, 243 bp, Enterobacter cloacae; identical to SEQ ID NO: 17771

SEQ ID NO: 158270 - DNA, 351 bp, Enterobacter cloacae; identical to SEQ ID NO: 17770

SEQ ID NO: 158271 - DNA, 192 bp, Enterobacter cloacae; identical to SEQ ID NO: 17769

SEQ ID NO: 158272 - DNA, 396 bp, Enterobacter cloacae
atgacgataaaagcacgcattcagtcacgactgaaacgctcaaaacgctatgtattcactcgtgacgatttcaaagatattgcaagttacgatcaggtcggcagggcattgcgtgatctcatcaaagaagggcaactgctgaaggtgggctatggcgtatacaccaaagcacgccagaacagcattacaggtaaggtcatgcccgctgcgccgggcggagctgcggcagtgatcgttgaggcgctggatcgcctgaaggtacgttatcgctttgccggagcaacgcaggcgtataacagaggcgaatccacgcaaatcccggcgtcactggagatcaaaacatctccgagatttaaacgagtattagccgtggggaacagtaaattaaatgggtga

SEQ ID NO: 158273 - DNA, 894 bp, Enterobacter cloacae
atgcccgattcccccgatatattagccagcactgaaacattacgatcccacctctcattcttaccccaacatgcttgcgaccgtattctttccagactccagcacgctattcattacgaacccgtaatcggcatcatgggtaaaaccggtgccggtaaatcttctctctgcaatgcgctgtttcagcagccggtatgtctgaccagtgatctcatggcctgcactcgcgaaccgcaacgtctggtgctgaccgttggcgtacgtagcatgacgctgattgatttaccgggagtgggagagacacccgagaaagatgaaacctatttctcactgtaccagcaactgcttgctgagctggatttgattatctgggtcctcagggccgatgaccgcgcgcgggcaacggatatcgccacacatcgggctctgctaaacgccggtgccgacccatcgagatttctgcttgtactgtcccaggcagaccgggtaccgccagtacctgatggcgatgaatggcaggcacttcctgatacagagcaatgtctttctcttgccgttattagctcgctggttgccggacagctaccgtcttctttcccgataatagctgtatccgcacataccggctacaacctgtcagctctggtggagctgatggtgcatgccttacctgcgcaggccagtagcgcagtctatcggcaactgaaatccgaacataaaagcgctgaaagcgactcgtccgtacgacaacggtttggtgaaatggctggtagcgcctttgattccgtgattgacccaaactcgctgccgtcaggctggcgggctttgctattgcagttacgtgaaaaactggtgcagctagcaaccggtctctgggacaagttgttcggctga

SEQ ID NO: 158274 - DNA, 2652 bp, Enterobacter cloacae
ttggcaaacaatacgccccctttacccttcaattcgctatcggacctcattttctcaaagtcaggcctgaacaagagcaaccaaccagaaagcatggctgacgggtatttaaaccaggcccagcatgaacaggctttatctggttatcttcaattaaacacagcggaaccaagaattacagccaaaacagcctactgcgaatggatggtgggtcgttatgacgatgcaaggaaacgcctcattgagtacagcgaaaaacttgatgctgatggtatcggattgttaagcaaactcatcagcatagaccgagactatgaacgacgcgaagtagatgagaagttaatttggccacgtttacaggcagtcacttcagccagcacggtcccgcttgttgccgtttttgcacgtttccagaggatgtggcccggagatgcatgtaacccaacacagcgacttcaggacactgaatatctgctctcactttaccctggttgccagcctctccgtctttcggttcttatagatatgcaggattctggtgtttcgactgatgaacaatacgcatttttgcaaacatttcagtacccatcgctgatgccccgttacctctgggtagccgctggtattgctgcaaaggcagggaaattcgatgaagcactggactacctgagccagcttgaagtgtacgaacagcgtagcgatccaccttcccaacaggttttgtgggaaattgagcttgcccgatgcgacattcattctaaaacaaataaacttgatcccttatctggctttatacagttaagcaatgacgcttcatattcagtagaaaatcggacaattgcctgccgggcagctttagccatagcctgtgaggtggcgataaatgaaatccctgcgttggctgacaattttatcgagctactcgcaacaaacaaatatggcgtggtatttagctcccttgagttactgaatgagcctgaaccttttacgggagagcattgggataattatgtactttcatggtctgcttttgatttaaggccctataaagcgcttcttatcagtacgtcacaagggcgtgcacagagatttttccgggcaatatctgttactgaactactggataatgaattcggatttacggatagcccagaactcagtgctgaattctgggataatctagcagagagccttggtgatgtgacgctttacccggaagaatttgatggaaaactcctctctctgtataccattattcactcacatcgtgactgcccaaactgggcaaaactgggacagtattgggtcacttcagagtggattgcttatcaaaataactgtgatttaacttacagttggttaattcctgagatcgtgggtaaccatgctgactcaacccgcaagtttgcctcgggtgtgattaaatttcttaaaagtcatccaattccttcaccgacagcttacaatttagtccaggaactggttggctctctcgccgagtaccgacaatgcaaagaactttatcagcttatggctgttatttcagatggcgatgaacgagtcagtgttcagttttatcttggctggtcatctcaggaaatgaattataaggccaaagctatttcggcatacaacaatgttctcctcactgagcctgaacattattccgcaatcttcaatatgctcttactttgtacaactcaggctgatcgtccgttacttaatcaactggaacaccatgtcattcagttcagcggtaatgaggataaaaaacaaaaactcactgatggtctggcaagtgccaggaaacgatgtgaggataaaaatgcggctaaaaaacaaattattgccgggtacctttctgaattccctccactggtagaacacagcattaagcctgaagatatatccttgcgtgtcgcggttgctttgctggcactttaccgatgtgccaacgcagaaccagatgatattgaactcatttccttggatgaaagtagtctttccttttcaccggtcatcagtaacagagcaatattgttcaatctactgaattcaggacttgcctcaatacatcctgacacaaatcctgacgcattccctgtcgctgatggcgaaattgctggtgtacgctttggtgccgtcaggtggcgtatgtcccggtcatgtgaagcgctgatcgggcaacttcgcactctaaatggtaatattccggagcactggcataaagaacttcttccctttgcacgagagattgctcagggcgaaattgtggaatacttaggctcacttgcagaagaacgtaaatggcctgaaccacgcaatacggaaaacctggcagatctgacccgggagctggtaaatgagttatcggtttcccaggctttctatcttgcttatcttggcgcgatgtcagcgagcgactataaacaaaagtacccggtatccgcgcaacaggctgcggatgttctggtgaagcgtaccggagacagactagaatccgtacgtagcggaagattcccggcccagtattatgacaggccatggaaagccccccgttctgcggtcagttttgtactatggggaacaattttaaatcgtggggatgatggatttaaccaaagagtggctgatttagtgtcaaatatttag

SEQ ID NO: 158275 - DNA, 927 bp, Enterobacter cloacae
atgagagatataataaattattatcatctgtatatactcaagtctcgtcaccaacgaagttatactcctccgccgagtggaaatgatgaaaaaatgacgcttgagcaattgttgtttctggatatctgtcatttgtatccgaatgcaaagggcggagcaagttccgctaagaatctgattatagcgccttcatttattaatcgcaggaataatgatgctatcccgtatcagggacatggtttcggggggattcagtcaacgggtgaattgttcccttttaacggcagtctgtatgacagtttaattgtgcgatttggctcagaggatgtgaatgcggcattgagagaaataacaccggccaaacttttttatggcaatgttcctaggaagattgaatttggcggcattgagcaacagcttcccttgttcactttgcttcatggggaattgtggcgtcttggacatcacaggatttcagaatgtctgagcgagatccggcagctgttccctgaatatcctttgtatctggagctactggcaattgtggggtttcatgcggtgttatctggcgatcctgatcgcatcatggcgcttttattccgagtttttgataaatgttttaatatcaactcgtcattacgtgagccacacaagcagtgtatcggtctgatttatcgtttactgagtaagtatcttcgtcgttacttcagtattgaaatagacaacagggaggctgtggtggcgttctacaatgggttctattcacaggagataattgggcctggagacgctgaagatgaagttctgtgctatcgctatttcacgggcatcaaacgttttgccaccacctttttctatgtaccaccagagaagaaggaaagcgtcgatttatggcgtcttatgggagacgatctcacttttgagtaa

SEQ ID NO: 158276 - DNA, 1566 bp, Enterobacter cloacae
atgtctttaaataaaaaaacagaaaaagaaaaccttacaaccttccctttgcactgtttacctgagcaattaaaagatacagttgagcgcgtgaatatgtttacaggaatgtcaatggaactgacgataaatattattttcaccatgctttcaattatctgccagtaccttgtcggtgttgtatcgccttactcaggaatatcagggccatgctctttataccttcttacgcttgccgagtcaggtgaaggtaagacgttcctgtcacgattgttaatgaggcccatatacagccagtttgagaaaatgcagcttgaatatagagagcggcttgctcactataaaaggcagcatctcatctggaaaactgttttacagggactcaatgccaatcaacgtcaggctataaaaaagggatatggtatcgaggatgctcagactcagctggaggagcattataaacgtgaacctaaacgccctgttgagccaaagttcaactatcaggatgtgacatttaaagctcttatcctgggcttaagcctgcatgctgaagctggcattatcatggatgaagcgatctcttttttcaaaagtggattgaaaaatcatcttggactgttgaataaaggctgggatggagggaggtattcatttgacagaacggatggtgagagctatgaacttccattatgtctaatgctttcactaatgattcagcccggcgtatttattaattatttagaaaaacatggcgaaatggctaaaagcagcggtttacttgcccgcttccttgttatgaaggtaaaaagctcaatagggcaacgtaatagtcgaattgatcaagaggggttgaatgcagtattagctccgttttatagcaaaatacaggggctgttaagtcttcttgaagcccggttttatgatgacaacatcccgaaagatcaactcacactttctgatgatgcaaaaatggttcttcaggaaaaacagaaagaaattgaacaggctattttacctggcgggcgttttgtacatatccaggattttgcgtcaaaagcaatagagcaggcactgcgactagctacaataatgactttttattcaactaaacctacaggagacagttcggccgctgattttatttatacgaagattatcgatgcacatcaaataagcaatgcactgacaatggtggaatggtatttgcaacaggcgagcgacttattttatccactgtcagagcgataccagtttgaatgcgatgtccgaagcctctggagctttattgttaaaagactgaacaaaaatcaaggtataccatttcctaagtatgaactgcttcagtctggtccgggtcgtctcagacacatagataaattaacgcctgcgttaaatcagctaatcaatcagggaatgtgttgcattatacggttcaatatctccaatgctttgtacatcgcgggtatttataacggcaatgtatgtttaggcggcgtaagagagcagtatgcgattgtacagagaagaaacttcgctgacgaaaatttctggcaagttgatttgtaa

SEQ ID NO: 158277 - DNA, 777 bp, Enterobacter cloacae
atgtcactgtactatgtagaacatccatctacattaggtaaatatgcgtacagtatgttcgactctcttgagccactggagcaggtttatatcggcgagttaaaaaatgcttttgatatatggcttgatgtacttcatgccagccccccgacagaaccaacagtccttcagaagatattccttgatgagccttttcctggtctgataaaaatagacagcacccgtgtgtacgatgtcttcttcagttttatctataaaatgaaaattgatcgggaagatgtctcagctgaactggatacacttcttatcgatgataaaattccatacccatatctttttgaagtttcatgctatttttacattattgctacgcggatttttgccgacgaaaattttgataataaagagattcagttttttagagcaatgtttgaggctatcaatacgttaaaagagttcacatgtaagcatgacgcgtatctgcaagagaaaaacaagaaactccataaaaaaatatcaggtaaaggtggcgaaaacaaatggtcaaagatccgtgcagaagtcatccgattactgaaagaagaaattaactcaggcaaacatctggcgagatttaagagtaatgctgatttgactgaatatttacttcctaaggtagaagagtatatacgcacctgcgatttaaaatcaccagacaatttgttttatacgctcgaaagctggtcaataagccctaaatcagatatttcggcactgtatggattgttgatcatctaa

SEQ ID NO: 158278 - DNA, 810 bp, Enterobacter cloacae
atgaaacttgtcgattcagaattattcggaactgttatagtaccagaagactttagtgaaatattaacccttgctacttttgagatacataatgaacgaaatatttacatgtggcgagggcaaggtgatattgcatggccaatacatagttcagcatacagacgtctcatgaaggatagagaccatccattaggggagcatgtaatgcgagattatgaacgggagttattactaaatgctcagcatcaagggtatcatttcgaaaatggtagggaattaagtgattttgagttgctggcaaagcttcagcatcatggtgcagccactaggatgatcgatgtatcaagaaatatcctggttgcattgtggtttgcatgtgattcaatgcgagataaaacaggcctattatttggattgcattattcggcgatcaatggatttgaaggacgtcctgataaacgctcttataatcaagtgtttgatagaaagagtgatatatcgacaaatgaagatgatttcgataatacaccaacattatggcagcctcctgttgtgacaaaaaggattgccgcccaaagtgcacaatttctttatagccgagtcagctacgatgcaacaggaagtcttagtttcagacgtggtgaaaatatcgtgaacatgattgcaataacaccagaaatgaaaacaaaatgtttaaaaatattagagaatacttttgacatccggaggtttacattattccctgatattgacggtttttgtttttccaatagcacaaattttggatgtcacagtaatgaaagatggtga

SEQ ID NO: 158279 - DNA, 213 bp, Enterobacter cloacae
atgagcgctaaaggcaactccaacgatgatgcctgtgcagaaagaaagtttctttcattcactggagttgaatgcgtgcatggagagcgctttgtcagccgtgaactgatgcgaattgttgtgtttaattatatcgattgtgattatcatcgctggccttgtcacagtgcctgtggcggtctcagcccggaacaattgaaaaccagaacctag

SEQ ID NO: 158280 - DNA, 261 bp, Enterobacter cloacae
atgagcatagaaaagcagaagatgattgcaggtgaacattaccgccctggtgatgaaacattacgggtcgaccgattacgcgcccgacacctggttcaccgttataaccatactgcacctgatgagaaactcgaacgccagaacattctggcggaactcctcgggcaaagcgaaggggcctatattgagccgagcttccgctgtgactatggatataacatttatctgggcaaagattttacgccaatttcgattgcgtga

SEQ ID NO: 158281 - DNA, 936 bp, Enterobacter cloacae
atgcattcagtccatatgtcctcattcaaggtattactcaaagcaagggctaggaattcattcacgcttggcgctctaaataatgattcaaatataaacgcttatgagataacaaaacagatccttaataataaacttgatatacctttagaagatccagatactaaacttatagtatccattccaactggaagtttgaccttcgatgacacaaaaagaattatatatggatatgtcaatgcagggcgttatggcgaaaattatactgtaaggcaaaagttcctttcatctcccaatcataaaaaaattaatcatgatgaagtaactgaaaaaaaacgatatatttttatctatttgcctgatagtttagatacgggaattgttgcattccatgatacagctcgattgaatgccagaacgcctattaaacgtataatagaggatggcttcaaggcatataacccttcattagaagctcgcgttagacctttattacaccagaacataccacaaggtattaaaaactcgccagtcacggaaataaaagcggtaggctataaagttagtaaggatactgctgatgctatgcgattgataggaaatagaatgacagcagactttgttattaaaaacaaaggctattcaatgggtattgtatcagactacctcggcaaaaataaatcccagaataaattaatagatatattagaacctgatagtgacaaaattaagattactgcccaagtaaatggtaaagataaaatttatgagttaagaaatattttagcaaaaggtgtttctataactttggatgatacaatcctcaatatagatccgataacaaatgagcctaatttgaacgatttacataatgctattaaagaagaaataaatgatttcctttctgatatctacggaaaaggatataccatatga

SEQ ID NO: 158282 - DNA, 537 bp, Enterobacter cloacae
atgaataaaataaatatctattggttgattacgaaccatatttccagtttaaaagatgatgggtcaacacatctatcgagatcggacctctttctgcattttatattgcctttagtcgcgtctgggctaatatgtatcttctttaaagttatgccatcttctgtggtcggcataatggttaattttggttctattacaactgcattattaatgagcgctgttgtaatggtatatgatcaaaagagtaaaattattgaaaagaaagagaaagaaaaaatagctgataaaataacaacatactcaaaaaacatagctctttataaagaactatgccaaaatatttgttttgcgatattaacttcaatattgatagtaattctttcagctattctttcgttttatgacacaaagttaatagcaggttttggatattattttttccttacttgctcattcttctgctatgctttattcatttctacaatgataactttcctgatgatattaaaacgttttagtattgtattggataattaa

SEQ ID NO: 158283 - DNA, 177 bp, Enterobacter cloacae; identical to SEQ ID NO: 142504

SEQ ID NO: 158284 - DNA, 561 bp, Enterobacter cloacae
atggcactttacggctacgcccgcgtatcaaccagtgaccaggatcttaccctgcagacacaaattctccgcgctgccggttgtgaaatcattcgtgcagaaaaagccagcggaagcagccggaccggaaggagcgagttgcagctattgctggagttcctgcgccccggtgatacgctgatggtgacccgtgtggatcgcctggctcgcagcattaaggacctgcaggatatcgtgtacgccctgaatcagcagggcgtaacactcagggcaacagaacagccagtggacacgcgttcagcagcaggcaaagccttcctcgatatgctgggcgtttttgctgaatttgaaaccaatctgcgacgtgaacgccagatggaagggattgcggcggcgaaagcgcggggcgtgtaccgcggaagaaagccctcaatagaccctgcagaagtctggcgcctgtacaccatggagaagatgggggccacggctattgcccgtcaactcgggatcgggagggcgtcagtctaccgggcgctggaaaactatgagcagccggcgtag

SEQ ID NO: 158285 - DNA, 2805 bp, Enterobacter cloacae
atgagcacatcgctcttcagcagcaccccgaccgtcacggtcctcgacaaccgcggcctgaccgtgcgcgatatcgcgtaccaccgccacccggataccccggctgtcaccaccgggcgcatcacccgccaccggtacgacgcccgcggcttcctggtgcagagcgctgacccgcgcctgcataacgccggactggcgaacttcagttatttcaccgacctggccgggaacgtcctgcgcaccgtcagcgttgatgccggaaccaccgtcagcctgaacgacgccgcaggacgccactttatcgcggtcagcaacatcggtaccgcagacgatagccgggcagtgacccgcacctggcagtatgagaacgccgcgctgccggggcgtccgctgagcatcacggagcagctcgccggcgaagccgcccgcaacacggagcgctttgtctgggccggcaatacggacaaagagaaggccctgaacctcgccggcgcctgcgtcagccactacgacacggcaggactgatgcagacggacagtatcgcgctgaccggcatcccgctctccgtcacccgccgcctgctgaaggatgcggacaaccctgacgttgtggccgactggcaggggaaagacgccacagcctggaatgacctgctcacaggggagagtgaggggcatgccaccctgactacggccgatgccaccggcgcggtactgaccaccaccgatgcaaaaggcaacctgcatcgcgtggcgtacgacgtggcaggcctgctgtcgggcagctggctgaccctgaagggcggtacggagcaggctatcgtgaagtccctgacgtactccgctgccggacagaagctgcgcgaggagcacggcaacggcgtggtgaccacatacacctatgaggcagagacgcagcgcctgaccgggattaaaacggcgcggccggccgggcatgcttccgggtcgaagatactgcaggaccttcgctatgagtacgacccggtgggtaacgtgctgaaaatcactaatgatgcggaagagacccgcttctggcgcaaccagaaagtggtgccggagaacgcgtacgtctacgacagcctgtatcagctggtccgcgccaccgggcgcgagatggcaactgccgggcagcagggcagcagtctcccctcagccaccgttcccctcccggccgacggcaccgcgtatacaaactacacccgcacgtacacctacgacgcagccggcaacctgacgcaggtacgtcatagtgccccggcgacgggcaaaggttacaccacggacatcaccatcagcgacagcagcaaccggggcgtgctgagcaccctgacggacaaccccgcaaaggtggacgagctgttcacggcgggcgggcagcagaaacggctgcagccgggacaggacctggtctggacgctgcgcagcgagctgctgaaggtgacgccggtggtgcgcgacggcggcgcggacgacagggaaagctaccgctatgatgcggacagccggcgcgtgctgaaggtcagcgtgcagaaaacgaacagcagcgcgcagacgcagcgggtactgtacctgccgggactggagctgcgcagcacgcagagcgggaatacggagacggagggcctggaggtggttaccgtgggggaggcgggccgggcgcaggtgcgggtgctgcactggacctccggcaggccggcagaaatcaccggcgaccaggtgcgttacagctacgacaacctgacgggcagcagcgggctggagctggacggcgacgggaatattatcagcacggaggagtactacccgttcggcggcaccgccatcctgacggcgcgctgtcagctggaagcggactacaaaacggtgcgctactcgggcaaggagcgggatgcgacggggttgtactactacggttaccggtattaccagccgtgggcgggccgctggctgagcgcggacccggcgggcacggtggacggcctgaacctgttccgcatgtgcaggaataatcccatgacaatgcgggatatggatgggtgcgctccagagtctgattcactaaaaggtttcggtaagttggaagagcaaatgaaaaataagtctcccaaagtacagcgtaaagcaatactaggtatggcattaaccaattatcttcgcgattttgggataaatgctaagctaggtggaagcttagttgccaagttgtacggagcagatcgcgaacccaaagatattgatattgacattggaaatagtgatggcacagccatcagtacaagtaaatataaaaccaaaataaaactattggaaaataagtacataagcgtaggtaccaatttgataagaatagagtctgttgcagagcaatctggggttctacatattaaacataagatgatagttaccgaaacttcaaaaaatatcgacccttttgatgaagacgagcaggatgaggtcgatacaatattattctcgaattcacctgtgcatgaagaagttgtcgacattggaacttttaacatatttgaagttgcaggtttagttctcgattcggattccactccgcatgtgaagccagagttgttaattgcgggttttctctcgagaatggatgtagataaaaatgatcctgaacaatctctcgctctgatcaggcatctttcttcagaaggaaggagtaacgctgatattgaagctatggtgctctcgcatgttgaccagaaacattcaaattacactaagttgcttgagcgattgaaaaacactctgtcgcatcaaggttaa

SEQ ID NO: 158286 - DNA, 1590 bp, Enterobacter cloacae
atgtctttcagaacaggacgccagtatttcttttccatccttattggtgccggtattttctttgctggcgtaggaacgatgtactacgatttcgtcttatcccttaataacagaatcctgtcgaccacaaagcaggctatgggaacactggaagaaatcctgcactctgccagtacggttgcactccagtccctgcagatcaagccgctgcattgtgccagtaacgtcaacacgcttcgccagttcgtagctctgggactctatgttcgttcggtaagcctggtgcgtaacggaactatttactgttctactctttatggcgacgtgaatttccccgatatatcctctgagtatgtctcacagcggttattgcttatggagggcaacactctcaatacccatcgcccgcttctggtgttgcgccaaaacgggaatacgataattacacttgtcggtgttgatgcacaatatttggttcgggcgatgaccttacaggataaagatattgaccttctgttgattgtcggtgggaccgctctcagcagacaaggcaaattattgactcatttcgttcctcgttctgaacgtttctccttgatattgccctccgggcactacccggtttccgtccagagcagctatcccacagaaaaattctggcatgaattcttgcgtctgaacataagaatgctgatttgtctttttctcttgtcatgcggtgtagcgtttctgacgaagtggttatcgactcgcccgcattctttacgggatgagataaaaagagcactggaaaggcatgagttcatcccttattttcaaccgatttttgaatctgatactgaacgatgcatcggtgctgaggtactgattcgctggcatcacccccgggacggtatcattttccccgactgctttatcccccaggccgagtcctcaggaatgattgttcctattacgacgggtctgatgcaggacgtggcgaggacacttcggtcggctggaatgttattgccagaaggctttcatatcgggatcaacattagccctcagcatattacagcccctgcattttcagcccattgccggtcattccttcagtcattgtcccatcgtgccattacgctggttctggaattaacggagagagaacccctacagttgaataccccgaccctggctcagattgctgatttacagatggcaggtgtcattatagccattgatgattttggaaccggacattccagcctgagttatctgcaggcgttccgggttgacacgctcaagattgatcgatctttcatttccaaaatggttcaacatgcgccttcggaaaatgtgatcgacaacattgtggatttgagccagcgcctcagcctccagcttgttgctgaaggtgttgaaacggaggagcaggcgcgtcttctgcgtaaaaaaggtgttcatttgctgcagggattttattacggacggcctcagccatggcagcaatttgtttcggattatctgctgaccgctgaacgatcctgtgaacagtctgattctgaagcggccacactaccaccggctccgaaaacaggctgtccatga

SEQ ID NO: 158287 - DNA, 633 bp, Enterobacter cloacae
atgatcgaatctggtgccgctaataaccttttgccaatgaatattcttatcgtctcgccctgtcactataccagggcaggattagtggaattgctgaatttacagttttcgctttcctgcattgaacaggcgcaagatttttacgtacaccaggattacagccacgtgcagtgggtgatcatcagcccaccgggtggttaccagtcgataccctctttatggaacttcattcgttcggttttcctcagacgttcctctgatgtcagggtatcggtatttctggatggccccggttcgctactgctgcaggcactgatagatcttggagatatcaatctggaaatcctgcccgctgatgcgtcattaactgaaatcgaggactgcctcgctaaagggaactatagggctgtgccatactcgccaggattgttacagcgggaaaagcaggtgctaggtcatttacttcatggtgacacagtcaatgttatcgctgaaactctgatgctaagtaccaacacggtgagtggctataaaaatacggccttgagaaaattaaaggtaagtagtttcaactcactcactaacagacatactaaccgacgttaccttaaaattattttacagggggggtga

SEQ ID NO: 158288 - DNA, 699 bp, Enterobacter cloacae
atgacccagacaactattaacattgctattgttgaagatgaacccttcagtcgtcaggctatacagagcattttgagccactttccatatcaccccacagagccgggacggctgcttttctgcagcgagttgacccttaatgttaccggaagtgtcagtaaatcatcggagcttctgtcattaatcagcagcgatgtcaatattgacgttctgctgctggattattcgcttgttgttgtgaacacgaatgaagatgaagacctgattcaggagtatgatggtgtgacacttataaaacgcatacttcatttacgcccggaactaaaaatacttgttcatacagcgcataaaagtctggtgattgccaggaatgcctggaaatccggtgcctggggatttgttcaaaaaagtggagatatgcaggaactctactttgcaatcgatcgagtaagtaaggggaaaaaatttttcccgattgaagtggctgaaatgcccgagcaaagcactcagtatatactctcatcaagggagactgaggttttgaggcttcttcttaatgggcttagtcagaatgcgattgccgctcatttaaatatcagctttaaaacagtatcgaatgctaagatcagggctttcaggaaactaggacttaagtcgaatgcggagttttttcggtatgcaaatgaaattatcatttag

SEQ ID NO: 158289 - DNA, 867 bp, Enterobacter cloacae
atgcttccggccgatttcttgatcaagcttgccaacctactgacatcatcaaagatggcagtaagagtcagctttatgattatgggtgccatcatctctatgatgattttcttcccgtatttgcagggtcgcctacctcagccaacgaaagctgccagcgatttcacatctgagttatgccttttactagctatggtgctcggagcatgcatgggcgtagtgattttagccatgatcagttggtgcttaaatttagctcataaatgcttcacagcagcggtaacttggaaaaataaaaaaagcatggttaagcgccaagaactggcacgacaatttgaagatcaagcgtttatgaatgagttcaaaactgtttatcctcaacttgatcaggctagtcggttggttttgcactcattaaatcgaaaacaagagagttattatgtgagagctgatggaattcattatttaacatctaaacgttggataatccccaaaagtgaccttccaaacaattactttatctacgaaatcgatagcaggatatccgtggcacttaaagagattgaattggaaaaaactcacaataattcaatgcattttatcgagtcagaaaagaagggctgcaaagctgtattggcctactttctttccagccccaccgcccaacaaccatacccaattaacaagcgtgatttccttcaagctcgcttagattacaattgctgcttcaatgttcagtcagccaacgggcagcctaccctttcttttttacctgggtatcactgtttttttgaagcacattttcaaatgcagatgccgtcaaagataattctcactctgactgataaaggtgagccgattcattaa

SEQ ID NO: 158290 - DNA, 609 bp, Enterobacter cloacae
atgacaatgcaatctggagtgtttaaacaatatgacccattagaaaaatgggggaaatatactgcggcgaaggtagctaaactttcggcggaggaactcgaattatattacattgccaaatcaccggaaatgaatattgtttttctgaaagatgaaaacggcaatgactggtatcagtggcttaagacactttcagaagaaacgttgaaagtctctttctgtcctgactcgaaagaaattattcatttttcatatgacgcgagcacgatttttccggttaatcagattgtcgttgaaatcccgccggagaatgtgccggatgaatttacctctgcgggtgaaaaagcattaggcggggcatttctttttgatggcggcgagattattacagcaccagtggattatgaggaagaggctcaacgtaaaaagctggagctattaaaccaggcgaataacgtgattgccacacttcaggatgcggttgatcttgatatggccacagatgaagaggctgaaggtcttacacagtggagaaagtatcgcgtcttattgaatcgggtagatgttattgcacctgtctggccggaggtgccggaaaatgtggcgtga

SEQ ID NO: 158291 - DNA, 234 bp, Enterobacter cloacae
atgcaaaaaataaacatggttttgcccgtcaatcactctggtcatgatctgctggccatgctggccaaagctaccgaggaaggtaaagcggcatccgccgatctgtgttctacgcgtctggataagctggctacttttgccgccaatgaaggcttaagcgctgccgaaatcgtagagctgatccgtgaagaagctgcggccatttgcagtaaaggcggtgcagcatggcagtaa

SEQ ID NO: 158292 - DNA, 189 bp, Enterobacter cloacae
atgaaaactagagctgcaacacatccagataatcgttacgtccctctgaaaacattttgtgaacgtgctggcatcaaaatccgtactggtcgttattgggtgtcgattgggcgcgtaagaattctccctaagttaaaaccgaaagatcatgtctatgtcgattggttcgattgggttaacggcaagtaa

SEQ ID NO: 158293 - DNA, 579 bp, Enterobacter cloacae
atgaaaacctacaacatcaagacaggtgccagacaagcagtagaacgtatctgtgaagcatatggcttcacatcaagactccagctttccaactaccttggaatgtccgctagtgccctgagcacaagaataatgcgtgataatttccctgccgatttggtcttgctttgcgctttacaaactggagcttctattgagtggctcacgactggggaaggggtaaggtttgatccatcgaccagtgatacctgtcgtattccggcttataaaattgatggatcagatcttgttagacaggcatctttcctttttgataaggcaatgctacctaattacaaaggcgaactgcagatcattacagacggtaacaccagttactttgttgatgtggctaatcattccatcgccgatggtaaattccttatcgagtattccggagccaaaagcatcaaagagttaacacttttacccggtaataaattaaggatcgattggggtaagtatcccttggattgcgatgtttcagatgtgaaattgattggcaaagtggtagccatatacttggttagtgagtcatga

SEQ ID NO: 158294 - DNA, 1014 bp, Enterobacter cloacae
atgaccgtaagaaaaacaactgaaggtgaatggatttgtgatttgcgtccaaacggcgcaaaagggaaacggattcgtaaaaaattcgcaactaagggagaggcattagcttatgagagatacattactaatgaattagaagacaagccttggttaggagaaaagcaagataatcgccgtctgtctgatttaattgagcaatggtattcactttacggcagaactcttgcagatgcagatagaatgatgtctaaactcaaagggatttgtgcggggatgggagaccccatagcatcaagcattacagcagctgattttagcgcctatcgtgaaggaagattaaaaggggaaatacctgatattcacgggcgttttatgcctataaagccacaaacagtgaatcatgagcagagaaatttatcagcaatttttggaactctcaaaaaattaggacattggtctttaccaaatccgatagccggaatcccaacgttcaaagttgatgaaaaaatggttacatttctttatgctcaagaaatcaagacacttttgcagtatctatctgaatccaatagtcagcatgtattgattattgcaaaaatttgcctggcaactggggctagatggagcgaggctgaaaatttagaaggttctcaagttactgagtataggattacttataaaaatacaaaaagtcgcaaggtaagaactgttcctatatctaaagaactttataatgaaatccctaaaaaacgtgggcgactatttaaaccatgtagaaaaacctttgaaagagtagttgcaaaagcaggaattgatttgccggagggacagtgtacccacgttttacgccatacattcgccagtcattttatgatgaacggaggaaatattttggtgctaagagaaattctaggtcattcagatataaaaatgactatgatttatgcacactttgccccaacgcacttagaagatgcaattacaaaaaatccattaaccatgattgattag

SEQ ID NO: 158295 - DNA, 969 bp, Enterobacter cloacae
atgcctacattaattaatcactgcataatcatcttcaatataatatttgtcataacctacattacgtacttattcaaaataaaggcattcacaatgaacgccgaacctctgacacaccaacctctttttaaagcagctcttgttattccaattgtgagttttttattgttagggttgatcgtttggatggggcatagcattcaaatcgatgccgagggatttaataattttctcacaatcagtaaactacctctagcggctctttcactttgcattccttttggggttgtcgtaaataatatccatagaacaattcaaactgataaacaaataaaagaagccgagaagaaaaacactattgatggattttattctcatagaaaaaacacaattgagataatagagaatatggaattcagtaaagcatattttctaggagccaagtttcaattagaatttagaaatagctactcttgttacaaagcgttttatccacacgcaagccaatccagtgtaaatctaacaccctcgcaaaaatttatcgttgaattaggaaacctatgggtacagatggcttccttaatttccaaacctaagtgggaagaccagttacattattacacccatcttaataagattgaatattgcctttcccaaattcatatggcttacctgcttaaagatatcggaaacgataagattttggctaagaaatttactactagtgaagggactagctatgaattccgaacacttttcgcctcagaaaaagactttaaatttaccctgagtacttattggcatgcatatttaacattgatggaattattagaacatacgtataccactgattttaaggataaaacttggcaaatggttgattacattttaagcactgaagaacgctttataacttgggggagtgattccaccataaacgcaacaattcctcagatagtgaaactatga

SEQ ID NO: 158296 - DNA, 1230 bp, Enterobacter cloacae
atggcaaggcagactaaaaaactcacagacactgaaatcaaaaacaccaagccagcagacaaagagatcaatctcttcgatggtgatgggctactgctacgaatcgctccttcatcaaaaggagggaagaagaactggtatctcagatatccagtaccagtgaccaagaagcgcactaagatgagcttgggaacctaccctcacctctcattagcaaaggcaagagctttacgtgatgaatatctgtctttgcttgctaatggtattgaccctcaagcccacatcactgaaaaaactaacgctctgaaagatgccacggagcatacgctacaagctgttgcccgaaagtggttagatgagaagataaaaaccgctgaaataacggaagactatgcaaaagatatatggcgtagtcttgaacggaacatttttcccggcttgggcgacgttcctgtcaaagagatccgccccaaaatgctcaagcagcatctagacccaattgagcaacgaggtgtacttgaaactctacgccgcatcatttctcgcctgaatgaaatttttcgctatgctgccacggaagagcttatagagttcaatcctgccgacaatctcgctcagcgtttcagtaagcctaagaagcaaaacatgcctgcccttccacccgatgagctaccacgcttcatggttgctttatctaacgcatctatacggttagaaacccgtatgctgatcgagtggcaattattgacgtgggtaaggcccggtgaagccgttcgggcaagatggtgtgatattgatgaagagagcggattttggaatatcccttcagaattcatgaaaatgaaacgcccacataaggttccattgagtaaagaagctcttcgcatacttgaaaacatgcgccctatcagtggtcatagagaatgggttttccccagcatcaaagctcccctcagtcatatgcatgagcaaacagcaaacgccgccataatcagaatgggattcggtggtgaattggtagctcatggtatgcggtctatcgccagaacagcagcagaggagtctggtaagttcagaacagaagttctcgaggcggctcttgctcactcgaagaaagatgagatcgtagccgcttataaccgtgccgagtatctagcagaacgagcaacactaatgcaatggtggggtgattatgttcagacgcagaaatttaaggctctagcggcatga

SEQ ID NO: 158297 - DNA, 1158 bp, Enterobacter cloacae
atgagcaaagcacccgtagtaatagatcttttttgcggatgtggtggttttggacttggagccaagttagcaggctttgatgtcatagccgctgttgatatagatgctactttgcagtcagcttatgcccgcaattttccaaatactaaaattataaatggcgatatttcattattgggagaatctgaatggaactcaataatattgtcaaagaaaattgatggaataataggtggccccccttgtcaaggctacagccgaatggggcattctgacgttaatgatccacgccgttcacttctgagacatttttttagaacagttaatataataaaacctaaattttttgttatggaaaatgttgaaggcttaatggatgagaaaaacgtatatgaattaaaatcagcactaaagatattggatgctgattatcaagtcctagaccctatgatcattgacgcttctgactttggtgcaccaacgagaagacgtagggttgtggttataggttttattcctgaagagtttgaatgtggattaaatagtgagacgctcaaagctggtaattatgagagaaatactgtcaggaatgcgataagtgatcttcccgcaccactaatgaaatcaaaaaacaatgatataactgatttcggttggcacaagtatagagatgtaaatgtagaaaatttatcaaaatatgcaaaagaaatgagatctcttccacctaaaggcatgggatggaaaaatgccatagataaaatgaagataggtgaaataagtggtttttttaatacacttcattctccaaaagttaaagcaagatattcttcgatattaccgggaatggttgatcctgttagtaaatcgaaatgccttttgtgggatggattatgtccaacattgagggctggaactggaagtgataagggaagtcatcaggctgtacgtcctttacatccagaagaaggaagagtaattactgttcgagaagccgcccgtcttcagggatttccagattggtttgttttccatcatactaaatggcacagctttagaatgattgggaacagtgtatccccattaatgtcaaaacatatcatgggggaaatttatgatgcattaaataatattgaaacgaatgctattaaggtaggctag

SEQ ID NO: 158298 - DNA, 1752 bp, Enterobacter cloacae
atggaaaataatataatagaacgtttgtcaatagacaccggtgttagcgccacttttttggaagaagctctgacaaaagatgtgacgaccttagaagcaatatttgatttggttgataactctatcgatgcggcgagagactggttaatagcaaataaatgtaatagaggaaaagataatttacctctaacttatgatggattctatgtttgcataaggatagatgaagatagtattcgagttcttgataattgcgctggtattgatagagaaactcttaccaaaagagcattatatacgaataaaccatctcagcacgagtatggcattggattatatggaataggtttaaaacgctcattgctaaaaatgggtactgatttttctttttatgttgatgatggtattgaaggtttcaagtcgaggtttaataatcgagggatcggaggtggtaaggaagacccggtctatgctgatgttattcctacaaagaatagaaggaagtcactatttaacgtttccaatttaaaaaacgaaataaaaaatgatcttcataataatagatggttcactaatgccgtaagtgaattttctttgaggtatgctatatatgtacggaaaggatttaaaatagttcttcatcatgttaagaataatgttagagaaccgattaaaagtgtagctcctagcttaagaacaaaatgtgaatttccaccaacacaagaagtaataaaatttgatggagtagatgttattatcgaaacagggattcataatgaatatacattccccggtgaagataattatagtcttgcaaataatagaaaattaacagattattttggtatatacttttcctgcaatgacagagttatagtatctgcgagtacagagaagtcgcatggctggaaaacgaagtggcactcagaatataacggttatgtttgttgggtaaaatttgtatcaaaagacgcggctttgctaccttggaatacagctaaaactggattacgtactgatagttctctttttcttgctgtgagagatcgcttacagcctattgctgataattatagatcgatcataaaacaacgatattataacaagaaaaaagatacacctcaaaacccagtgaaaggtgataataaaggcattcccggtggcgaaggaggcgataaagtaactaatgctggtgctaacaccggacctgctgcagtaagaccaataaagccaattaaacccgttaggcccaaagctcggcctgtcactgatctaccgcgaaacagagatatctttgttgattgggggcgaaacacagtcgatgttccgaagtatcgcaataaggaatatcatatttttgtagaattgtgcaatttgagttcattagatgaacctataagctgcattgtcatgctgagagtttttttggagacaacttcgaaggaaacaatgaaatgcatgaatgctaactggaataaatcacttgcgaaaaatacagcttttatcgcacaatatctaaataaaaataattttattaccgatagtgtcaaacttttagttgaaaggtatggcaggactgatgaagaaaccctgctatccattaataatatacaatctcttgttcattctgttgattttaatactgacaaaactcttgtaaatagatactgggatgacttagaaccatttttatcaggttgttggcgtttcatcaaagaaatagatgataaaaaaaattcgatggctaactaa

SEQ ID NO: 158299 - DNA, 213 bp, Enterobacter cloacae
atgcaggagattggcgagcaggtgggggggattgcgcgggcagccagcacgattgctgaggaaaacgagcgtctgctgcgggtacttgaagcgaacggtaacctcctgaccatgctgagtgaaagcaccacgggtatggttcaggcgatgaacgccctgcatgatggccagccgctgcgcccgttcttcgaaacaactccgggcggtcgttga

SEQ ID NO: 158300 - DNA, 462 bp, Enterobacter cloacae
gtggactcgatcagggcgcgttgcgtctgtttgtcctactgcaccatcacctgggcaccgggcggcacgcaggggccattccagcgcgcaaagtggaccggcagcgggctaaaatcgacgatcccgcgcaggggcgtgcgcagccaccggcggcagttagctgctggcttcccgctcgagcagacgatagccgctgcgcgttacggcgataagggtgatgtcttcctgcagatccaactgggcgaacgcgcgacgcagcttggtgatcataacccggacgctgttgtcggtcacttccactcatgcactgcgccagccgatctacatcagctgttcctgggacagcacctcgccctgcgcctcggccagtgcggtgagacacaggcacgcgctctgggggagggtaacggtctcttgcttatccgtccgggtaagttctcgggtctgcacatccagcgttag

SEQ ID NO: 158301 - DNA, 507 bp, Enterobacter cloacae
atgagtaataaaaataaaaaggtcgccagcggcggaggttctcgctcgcttctgatgacgttcatgtttttgactgccgttgccgcgtgcggggtttctggttacctgttctgggaaatgaaatttgcgaaaccggcggtggcagtcgcggacgttaacgttaccgccgcgccgccggccgtactggcagagccactctatgcctcgatgaataccttcaccgtcagcctgaagccgacggagaatgaatcggatcgcgtgctttatctcggcctttctattcgggtggcggagcctcagtctcttgccgtgctggaaaaatatttaccggagtaccgcagccgcttatttatgctgctgaccctcgagacgtatgaagcgctggcaactgatgacggaaaacgccgcctgattaattccattcagagcgagctgaataaaccgctggcatttaaccagtctattcgcgtcaccgacgtccttattaatgaatttattctgcggtaa

SEQ ID NO: 158302 - DNA, 1053 bp, Enterobacter cloacae
atgaatattgatattgccaccctgctgctgggtggaacgcaggtcaaagcgaaagcggaatggctcgccggcgaggatttcggcctggcgctggacggcaagctggcgcaggtgttcaccggcctggatcagcaggtgctggtcgccttaccagaggcggcgctgccgttcggtatgctgccgggacagccagcggagataaccgacgagggcgatgacgaaacccccgacgcgttactgatggctccaccggggctggcagaggcgctgacgggcgttgcgatcgctgaaggcgagggagaggagagcccgcagtggcagcttcaacagctggttacccgcagcgtgacgggagcagaggcggcagcacgaccgcaggcgggcaagtcgccgacgggcgacgggtccgaggtgcaggtcgctaaaacgccgtcaccgctgagcgcaacggagaaaacgccgccggtcgcatcatcccctctgctggcgcagcctgcgccggtcgcggctgaacccgtcgcctcgccggaggtgcccgtcacctcaacggcaagcgccgtggcgctgcccgccgccgtgcgcaccagcgttgcgcatgcgccgcagcaggtggtcaccgttaaccatccgccggaaacgccggagtggaagcagtcggtcagccagcatattgccatctttagccgcaacggcctgcacagcgctgagatccggctgcatcccgaagagttaggttccctgcagatctccctgcgcgtgcagcaggaccaggcgcagatccatatcgtcagcgaacatgcccatattcgccacgccatggagcaggccatgccgcagctgcgggccgcgatggcggagtcgggcattcagctcggccaggcaaacgtcagcgcggaaggacagcagtttgccgccggtgagcagggccaaaatgcatcgggtgacgagcacggcgcgcgggaaggagaagagcagccggttgaagaggagaacgtgccgaccttattaaccaccaccccaggaaatatatacggaataaatactttcgcctga

SEQ ID NO: 158303 - DNA, 207 bp, Enterobacter cloacae
atgtcagacaacctatttaattcagggcgaacggttgattccatcgcatacgatctcgcgctagctctcgcctcaaaggacccgtcaatcaacacaccggatgctttactggaaaaagtcgaatctctcttgccagaatgcgtggccatagtgagtctcagaaaacctaaatacgcatacgggattgatatcggcactacgtattaa

SEQ ID NO: 158304 - DNA, 180 bp, Enterobacter cloacae
atgaaaaaaaacgtgattccttccagctcacctaaaagagagaagctgacaacagctactccttatggtcaaagcaatgctatctctaaagaggagggatccgtcagaaaagaaatgattaacaaagccttttcaagctctgttggttgtcatttcgatatgagaaacttcaaaaagtag

SEQ ID NO: 158305 - DNA, 1038 bp, Enterobacter cloacae
atgcttacgccataccaaaaagctgatgtgtctttcaaatacttaaaggaaattggtcaagaaggccaaaactcaaaggtatttttggcgcatgacgagcaccttgataacgagattgtaattaaacaagtagatcaaggaacaatagcaccagaagaatttttccaagaagcaaggttgctttatgctagtgcacattctaacattgtgcaaatttgctatgctgcaagagatgataagaatatttatattgccatgccattttattcaaatggatcactaagttcattaatggcacaaaagaatctaacaagtcgcgaaataattaggtacggaattcagtttttaagtggactgaatcacattcactctaagggattgatgcattttgacatcaaaccaaataatataatgttatctgacagagatgaagcccttctaactgactttggactttcagccaagatagatgacgatggcctttctagtattagtctattctatacgacacacgtaccacctgaaatactttctcaaaaccgcttcaattttacttatgatatatatcaagctggcatgactctttatagaatggccgtaggcgaggcagaattccagaatgctgtgcaagaatttttctcagaaaaagatcaagaacgtttacaatctcgcttcgcacagggagagtttcctccgaggaactatcctgtccatgtacacccagctcttgttaagataatcaataagtgtcttcaccacaatccaaatgaaagataccagtccgttctcagcgttattaatgacttagcgaaaatttctgatggatgcttggattggcgttatttaggtccagatgaagatggcaaaatactgtggataaaaccagtagatgatgctaaccttcatttaaaacttgatcctgaaaaaaatacgacagattgcagaaaggtctatagtgacggtagaaccagaaaagtgtcttcacactgtgtagacgtaacttccagtagggttttgtatcgtttaatgaagagttaa

SEQ ID NO: 158306 - DNA, 438 bp, Enterobacter cloacae
atgagaattttaggcgtacgcgcagctccgaaagagacctcttttgtggttttttgtacagaagagagaacttttaagtgtgtagatgttgttaacatacctcagacattaaatatacctgaaaagcttaagtacattcgaaatagcatactagatattttacgtgaatatagtgttgatacagctgcaatccgagttgcagaaagcaatacccaaaatttaaacattgaaagattatatattgaaggcgttattcaagagacctttgctagtagcaatgtggcccaatattataccttaagaaaaaatggaatctgctctcgacttggtataacaattgctcaattcaatgatgatgaaatcagaggaattcagctatcagattatgacgccaacacaaaagaagccatcctatcagccttagcagtggaaaattaa

SEQ ID NO: 158307 - DNA, 1158 bp, Enterobacter cloacae
atgggcacatatgcaagtatcacgctaaacggatttacaatcgaagagtggaaaaatacttggcatcgctggcatttccgtgaaagcgagcgcgtacgtgagcttgataaagattcaggcgaagttatatttcaaggatatcgttcaactgcgggtactattcgtaaacggctggcactggaaggatacacagagaaacaactggaaaatgagtttcatgacgtgcgaaaaacctggattagcaaattggaatcgtggggagaaagcgattacgaatgtgcgctaaaaattctaagacatcacactaacatcaatgagtggattcatctgtttattgacgccaataaaattggatattctgagcatgaatcacaaagtctgcacaatgataataacctactaaattttatgctttcagacgattttgatgaatacccaaattataccgctggagactttcactttccatgtaagacatccgaatgctggacagttgccattcttagctttaccccagatgatgcattggttgagttagatatgactgatctgattagtgctggctgggctgatgactttcacgacattgcggaaatgcaatcaggcaagacgtcattttatagtaacttctccagtttccttgatgagctggtaattcttcccacgaatctgccagaatttcacttaatgcaacgcttagcattcagtggcgtattctcagcattagaagcttacctgtctgacaccatgaaaaagcaggttcttaatcgccccgcagtaaagcgtcgatttattgagtctcatgacaaattttctggcatgaaaaaatttacctttaatgaaatattcaaaaaaatggatgaacttgatcagctgataattgatgaattggattttatatcctttcacaatatggatgttattcccgaactttttaaaagagtcctttttatcgactttccaaaagattgcattagtacattatgtgaagcggtaaaaaaacgtcatgacatcgttcacagaaacggcaaggatacatcggggaaattaatttctgtaactaatcaagatgtgatagctcttactgatctggttaggcgagtggtttcccatatagacaatcaaattttaaatttacaacgaaatgatatcgaatga

SEQ ID NO: 158308 - DNA, 162 bp, Enterobacter cloacae
atggcttggagaaacagcaatagtcctaatgatatgaagcggttcataaacaaaaatagcccaaagatagggaaagaatttaaaaaagaattaagtagccgtatgcgtattgttacacagcacttactggaaagagtatgtactttaactttagaaagataa

SEQ ID NO: 158309 - DNA, 447 bp, Enterobacter cloacae
atgattacgtatgatttcagaaatgaaaatcttaccagttacgcggcgattagtaagaattttatgtacaagctcaccagtccacggacgattaaatttatattgatcaccttcttttttctgaagttgtttagcaatcgtggggcatcccatgccagtttgataaagagcaaatatctctttaactactgccgctttatgattaagcacatacttatcattttctacttctatccattgaggacgtttattagttactacagtacctttgttgaatgcttgttcgcgtttcttcgcccaccctttacgaatacgatcacttttatacttagattcatcatatgcccgctgagcattcatcatcacaaaaggcagatctttagaattactacggctgataactatgttagccattacatcatgaatagctacgttatgtgccattag

SEQ ID NO: 158310 - DNA, 531 bp, Enterobacter cloacae
atgcgtaaatttttagccatcgcgggtcttgccgtgttgttatcaggctgcggtgaaaaaggggattttgagaaagcgatcaacgccaagattggtcaatcgaaaacctgtttctcactacgaaacaacgatgtcacattcccaatccagctctctaaaccgcgcttcgatgaaacaggcactggaacagggtctgtgatcttcgacggcctcgtagaacagggcttaatggcttttgtaaaaggctgggataacaatacgcttgggataacagatgaaggtaaacaagccaaaatctgggatgccaaagaaggtgtttgtattggtcgccaagttgttgatgaagtcaaagaatggactgaaccgggcaacggtaatcagaaagttgttcgcgtatcttatacatggaagctggcagatgtcccttcatgggtggacaaaagcgcgttctctggagtgaaagggatgaatgaatctgctgatggtgccatgaatcttgttaaaaccagcaatggttggaaagcgaactag

SEQ ID NO: 158311 - DNA, 765 bp, Enterobacter cloacae
atgaatgaaatagaagttgatttagatttaggcttaaaccctttttgctttgagacagagataaagattgaaacaagaaagaaaaatctaactgtttcaagaggcacagaacttatcgaaaagaaagatacaggtaaaagctacttcgccaatatcgtgcatacgcaagaggtcgataaagaagagttcattaaactctatacctctcagataaaagcatactttgatctcacgaaaactgcatacaaagtgtttttcatatttttacgaatatatcaggatgcgataggcaaagatcatttctacctgagctgtaaaaaggcaatgtctcttgcggaaaagatagatcactttgtcttgtctgaatctatcttttacagagggatcaaagaactcatcgaaaaacgtattattgctaaaaccaatgagaaaaactggtatttcataaaccctgctattgtcttcaatggtgatcgtgctcgctttgtttcagagattataaaaaagaaagaagcaatggaagaacaacccgaaagcacagttgtcaatggcggcggcaatagcacacttaaagataaaaacaggtccattgaagcagttatacaagaagttaataaccaagatgacatagatttgttaatcgcaagattgcagtctaaaaagtctcaagggttagtgaagagtcaaagtataaatgaaatcccttctgtagagaacacaagtcttgtgccaccagaagaaccgttagattgggataatatttag

SEQ ID NO: 158312 - DNA, 675 bp, Enterobacter cloacae
atggtgaagactgcatctgtaaggttcagaactgagcagggtagaaagtttgtacaaggctggcttgctgccggagaattagaaaccgggcatatgcagtctgttattgatggtttaaccacaaagctggcaaatttgagctccgctattgatacttatcaacttggcgaaaatcaagcaaatatagtggggttccgcgccccctcttcagataatacagttgcattcacattacctaatgatcctgaaaatagaatctatatcaatatgaatactccgacaggaagctctgcgcatttagtacaaacgttgatccatgaattctcacattcgtttatgggaacaaaagattactggtatcttcctgtataccacgatgagattgaggaggttataaatcaaaccgatattcaagcgcttgaaaaatttgcccttaccacatcctattcgcagcaggaactcatgacagaatatgactggaatattccgggagattggttggggaatattcctgtgactgatgaaattgcaacaagattacggacagatacgcaattcagaatagagtcaactctcgaaaatgctgattctgtaactgctctggtacttaacggcaacagaagactctttgcgagtagagtttccatgctgaatcagagcttaagggagaattag

SEQ ID NO: 158313 - DNA, 360 bp, Enterobacter cloacae
atgcaatacgccgggttgaggtcccatattgatgcccccggcataggtctcatcattacgctcgtgccattcatcatgagcaccatgctggattggggaatgtgccttgacgccataggttttggtcagagaataatttccccatccgagcaggttctccgccttatgcaatccggtactatccagcgccgtattcagaacaggaacccattcctccggagcgacctgtctgccactttcatcaagcacactgtggatatcgatgtcgccatatactgcattcccgaatccgtcgacaagggctgcctgttcttcattaatcaaatccaggcggaaaccttcccggctcagaacctgtag

SEQ ID NO: 158314 - DNA, 996 bp, Enterobacter cloacae
gtgtcagatcgcagtaatcatgccctgcttaagcagggaatgtgggaatctattacgccgcagacggttgatgcccactttgatgcagcgggaaatcaacgggcacttcagcccggacagaatctggtctggaacgaacgtcagcagctggcgacggtcaataccgtcgcccaggttggggagcagcgcaccacacaacctcaggagtactatcagtatgatgccggtgggctgagagtggtgaaagaaatcctaccgcagggacgcaaagccagccaccgcgagacggtggtgtatctccccggacttgaataccggagctgccgacagggcaacaatacaaccgagtccctgacggttattcttgcgggtaacgtacaggtgctgcactgggatcgcgaaaatgaagtaccatcagggatgagcaatggctgcgtgcgttatagcctgagcggcacaatcggaatgaacagcatggagctgaatgaaaagggaaatatcatcagtgcggaggaggcacgttaccgtacacaccgctactcgggcaaggaacgcgacgcgacggggttgtactactacgggtaccggtactaccagccgtgggtaggccgctggctctccgcagatccggcggaaaccgttgatgggctgaacttgtaccgtatggtacgaaataacccaataactctcaacgatcctgatggcctcgctccgactacaggagaggcgcgactgaagcagattgcttatgacttattcgttgataatatacgacgagcaggccttcacatcgaagaatataaagccattcaccgaattgccgtcgagaaatcgtggcatgttaatgtccgcaccggaaattctgctcgagtgtcttacgttggccgtgtggggttccggcctaaaccggcaggcgtatatcaaaaaacgttcaaaggagataacaatgaggggcttgtgctttacacgacagatcaatccgagaaagccaaatag

SEQ ID NO: 158315 - DNA, 1065 bp, Enterobacter cloacae
atggaggaatattatccgtatggcggcacagcgatatggacggcacgcaacgtggtggaagccgactataaaacggtcagatactcgggtaaagaacgggatgcgacggggctgtattactatggttaccggtactaccagccgtggtcggggcggtggctctccgcagacccggcggggacggtggacggcctgaacctgttcaggatgtgccgcaataatcccgtcacgttccgggatcctgatggactccagacaacaattgacgagcttaaagaggtcctgacttttaaaacggtggatggcatccgacgctgggatgtaaatatccaaggtgaagatttcattttacatacaagagaacataaactttcaaaaatgttgattgtctcaactcacggtttattacgaaatgcatcctcacctggagttcctgttccagaaggtaaatcatttatattttttaaccctcaccacataaggttaaggttatctattgagaataccacaataaatagatttgggataagactaacaagtcaggactctactattttaagtgatacagtaagcgatttatttgagaatagaacggaaaatgaaggtgagttctctgatgtcatgttcactaatggagttgaaaaaattggctatatggctaactactcgatgaaaggctttgaatcaaatgaaaaaggttactcagaaatagctggtgctattaattcggatcaaattgatgccgactggataaccatgacttcggaaacctctaactcttggccagacactgtatctcttcttgataagttaggtgaattaaaacttgattatgatacaatagtattctcattctgtagagagtccatgtttgtttcacctagtaatgtaagggctgtatatggaagaaatgatatcttgttgaataagacaacgctattatcaacaccaataacaacagccagacttcctgacagacaggaaaacctcgacacaaacaaaggtaatagaccaacctcaatcaaaggaataaaaaaatttaccaacctgttcaagcgaaagtaa

SEQ ID NO: 158316 - DNA, 1350 bp, Enterobacter cloacae
gtgagtatctttgcctttcgaccaaaaatatatatcaacagagtttgttatcgtgtcattcatgcacgaaaattctgggaagatatcgtcgttgatgaagattctcctgagcctgtttttaaagacccttaccgcgctccaggttccgtcctggcgaaggtgggcggtgttcaggtccgtcccccagaccggcttgtcgtccttcacgccctcctggcgctgctccacccacaccaggtgcaggcgcccgttgcggatgaccgggcggatcagcgccttaaacggcgtggccgccacggtgatctcctgccactcgctccaggccgtcgccgggaacgccccgtccttaaactggctcatgtccacgctgcgccagtagtagaccggcgtggactcgcgggtggcgccaatcagccagacgtggccgctgcggttgttcaggccgtcgtggtagccgctgataatctccaggtcggccaccttctcaaactccgccaggtaggttttaaaggcatcctccacctggtcattcgtcagctgcccctggttgagggactgctgcagggtgcgcatcatggtggtttccccggtacgctgcgtcgggtcgacgtagttttccgggtaatacgccagctgggacacgcccgcccaggtgctgtagcgtcggttatagatggcccactcgcggaagaacggacggctcagcgccccggttttcaccccggactccagatggccgagctgcatgcagcggttcacgtacagctgaaggctggccatggcctccgcaatgcgggtggtcgtgacatccgcgctgacctggctgtcaatcagcaggtagccatagaggtcatcgcgggtgcgaagcttcagttcagccggtgccaccttccccatatacagctggctcagggcggaggacaggcgttcatccagtaccgcgctgaccgccgcgcgctcgcgcccggacaggcccgcctgcacgctgccggacagggtctgccactgcgcctgggtggacaccggcttgccggcaccggccacaaagcgcatcgcgaagagctcacccaccgtggcggcgctgacgttcagggtctgcgcggcctgatgccactgcagcaggcgttcaacggcgaggaaatcgctgagtgtgcccggcccggcctgcttcgcggcaacggccagcgcctcaccgtcaagggacatgagttccgccagcagcttcaccgtcagcgtccctttctgcagggcggtcagggccgcggaggcctgctcacccagggcgctgacccagccgtggaagcggctcagcagcatcagtccgtcaaaactgcgggctacatagcgtaa

SEQ ID NO: 158317 - DNA, 360 bp, Enterobacter cloacae
gtgcggtgccagggcagaagccacgttagtgaaggtaatgacaggcttgccgtctgcgtcgacgggcaggacgacgtcattgcgcagggaaatcaccaggctgctgatttccggggtctgcaccggggtgggggccgtcagcagggcctgcaggccggcgacggagaggttctgcgcgcgcagccagcgggtggcggtccagaccttgtcaacgacggaggcaaagttctcgtcggacagcggtttggtgaatccgagcaggggcagaagggtgctgagttcggagacggtcaggccgtggatatcggccagcagcttgccgcggtagaggtgactcagacattcctgggtattaaataa

SEQ ID NO: 158318 - DNA, 255 bp, Enterobacter cloacae
atgcagcagcacctgatgatgcagggccagcagccagctgtacgacgagtggcactcagcgatgagcgtgatgccattaactttgacccgaacataactttggtcagcgtcatcccttttgtagcggagaaattcaagggtaccggcgccggggcgtgtcatcccgagggttcgaatgataccgctcctcagggcctgttcttcatcctgccagagcggggtcttgttgacggtcagaatggctgtgtcctttga

SEQ ID NO: 158319 - DNA, 321 bp, Enterobacter cloacae
atgatagagctcgacgttgtcataacgtctgaccctgtagccggcgaagatacggaacacgcgggtaaaatatgtgtcgccgccaatcgtcagggaagtacacatggcatcgtcaacatacttcaagtcggtatcaggcgcgttgagtaccgaatgggccagcgcctcttcaaacatggcctcaggcaggttatagcgggccgccagcgcgccggcactgagcagcgcctccggcggcgtgtcgccaaacaccttcttgtactcggccttcgcattctcaaacgtgatgtccgtcgtcagctgcgcgtacagcgccggtga

SEQ ID NO: 158320 - DNA, 411 bp, Enterobacter cloacae
atgtttaaatgcgccctccacctggtcctgcgtcagttggccctggttgagggactgctggagagtacgcatcatggtgctttccccggcacgctgggtcgggtctacgtagttttccgggtaatacgcgagctgggacacgcccgcccaggtgctgtagcgtcggttgtaggtagcccactgacggaagaacggacggctcagtgctgcagttttgaccccggtctcgagatggccgagctgcatacagcggttaacatacagctgcaggctggccatggcttccgcaatgcgggtagtcgtgacatcagcgctgacctgactgtcaatcagcaggtagccatagaggtcgtcgcgggtgcgaagcttcagttcagccggcgccaccttacctatatacaagtggcttag

SEQ ID NO: 158321 - DNA, 510 bp, Enterobacter cloacae
atgggcctcgcgctcggcggtcccggtgccggcgtcgttctcttcggcatagtggtagctgatgtgctccccgtccggcgaggcggactcctgcaggtaccattcggcaatctgctccggattgtccgggccggagaggcgggcgtcggcgcgctgccccagacagtgaacctggccgtccggcgtgtggcacagccagaacgggaaggcactggcggccaggggctgccagtactccatgcgcggggcgccggcaccggtgcgggagcggaagcgcgtcacgcgccagcgctgtgcgagcgtcacgccctgcgccgtcgtggtttccctcaccagaggctggccgtgaccatcgagctccctgacgagcacctcgttgtcggggccgataaacgcgtcctggtcgtcgtaggcgggcacgccctggctggtccggcggcgcacgctcatcacgcccgcctgccagcccaggccaaacgggccgttaccgccggcgctgctgtagcttaa

SEQ ID NO: 158322 - DNA, 2451 bp, Enterobacter cloacae
atgaagtactatgacggcgccagcggcaataaaaataacctctacatcgcgcctgagtaccagaaaggcacagtcaatgacatccttatccacaaaaccggcggcgatgcggacgtctggtcgctggataaaggtcacaataacggcaccttcccggggctggttcgcgtggaccgcgtggagacttttgacgagaacacaccggagccgatggacttcgccggcgccaacgccctctacttctgggagctgttctactacgccccgatgctgattgcccagcgcctgctccaggagcagagcttcgacgccgccggccgctggctgcgctacgtcttcagcccggagggctacgacggcgacaccggccgccactggaacgcccgcccgctgctggaagacacccgctggaatgagaccccgctggacagcaccgacccggacgcggtggcccagagcgacccgatgcactacaaggtcgcgacgctgatgcgcctgctggagcttctcaccgcccgcggcgaccacgcctaccgccagctggagcgcgacaccctggccgaggccaaaatgtggtacgtccaggccctggccctgatgggcgacgagtccgtcacccgcccggccgtctgggccgcgccgaccctgaaggacgccgccggtaaggtcgtgaaccgcctgcaggcaatggaggaccgacaggcgtcgccggtacgtattctgtccgcgcagccctatacggctaacgccctgaccgggctgtttaacccgcagcagaacgcccgctggcaggccatccgccaggacctgatgcagcgcctgtacaacctgcgccataacctgaccctggacggccagccgctgacgctgccgctgtttgccaccccggcagacccggccgcgctgctgagcgccgccgccgccgcaggtaagggcggcacgccgctgcccaccggccgcgagctggggctgcaccgcttcccgctggccctggaaagcgcccgcaacatgaccggccagctgatgcagttcggcaacgccctgagcggcgtgattgagcgccaggacgcggaggcgatggcggtgctgatgcagacccagggcaaggcgctgatggtccagagcgtggccatgcagaagaaaaccctggaggagctgggcaacgaggcgaaggccctggccgcctccctggcgggggcgcaaaagcgccaggactactacggccgcctgtatgacgagaacatcagcgcgggcgaaggctttgcgctgggggcccgcgtcaccgccggcgccatgcaggccgcctcccgtccgctgatggccgccggcgccgccgccaacatggcgccgaacatcttcgggctggctgacggtggctcccagtggggcagcattccgttttctatcggcatgacgctggaaagcatcgccgcggggatgatgaccgccgccgacggcgccgcgcagggggaaatgtaccgccgccgccgcgaagagtgggcgatgctgcgcgagaacgccgaaaaagaggtggagcagctcaccgcccagcaggcgtccctggcggtgcgtaccgaagcggccgggctccagctgacctatctggaaacccagcaggcgcacaacgaggcccagctggccctgatgcagcgcaagttcagcaatcaggccctgtataactggctgcgcggccgcctctcggcgctgtacttccagttctacgacctgaccgtgtcgcgctgcctgcgtgccgagaaatccttccagtgggagaccggcgatacgcgcggctatatcaagccgggcgcctggcagggcacctacgccggcctgctgtgcggcgaagcgctgatgctgaacctggccgcgatggagagcgcctaccagaaatgggacgcccgcgcgctggaagtcgagcgcaccctgtcgctcggcgaacgctacgggaagctgtcaatcggggcgttctcgctgaaagatgctattgaaacgctgcttgccggcggtaagggccaggccggcagcgatcaggacaccgtcagcctcgataaggatatcctctccgtcagcgtggagctgaaggggctgggcctggcgtcggactatccggacggcatgaagctcggcaaggtgcgccgcatcagacaaatcagcgtcacgctgccggcgttgctggggccgtatcaggacgtgcaggcggtgctgggctacacgggtgcctccccgctggctcgcggctgctccgccatcgccgtctcccgcggcatgaacgacagcggtcagttccagctggacttcaacgacgggaagtacctgccgttcgaagggattgatatctcggataccggtacgctgaccctgcgcttcccgaccgccagcgacgcccagaaggccctgctggccagcctgagcgacatcatccttcacgttcgctacaccatccgcgactga

SEQ ID NO: 158323 - DNA, 1485 bp, Enterobacter cloacae
atggctatttttcatcttgattttaaaattgtgaaacgttctgaaggtaggtcttccgttgcgaaagctgcttaccatgctcgttgcaaaatcacagatgaaagaacgggtgatacctatgattatagccgccgtaccgatttatacgggcatttcatattagcgccagttaatgctccagaacatatcgtaaaagattctacagcattgtggaatgaagttgaaagggttgagcgtcagagcaacggacaaacagctcgttatttcgatgtcgccattcctgccgagttaaataatgacgacaagaaaaaacttgttcttgagtattgccagaaaaacttcgttgataaaggcatgattgccgatatcgctttccacgatcttgatagtgataatcctcatgctcacgttatgttgacattaaaaaccataggccctgaaggttttggtaaaaaagaaagaagctggaacgacagaaaaatgtctgtgttgtggcgtgaatcatgggcatctatagctaacagctatcttgctgctgctggttcatcagaacgtattgatcatcgttctcttcaggcccagcacgaggaagcgttagaaaaagcagcagcagctttagataatgaagaaaaagcgttatggcttgctaaggccgctgaaataaatcgtcctgcaatgaaacgtatccacagcgctaaatggcgtagtaagtctgctcaggagcaaagagccgcagaacaggctgttcgtgatgcagctaagcaggaagcggttgaagtctacaaaacattcagtgaacttgatcttgaaatcattgttgatgtcagaagctttactgtggctgttcttgctgaaccagaagagatcgtattaccagaaaagcactccggctcttctactcatgaaacacaaaggcctgtattggtagcaccagttcctcataatcgtgtgcgtagtgtcaaatcttaccgtgataaatccaaagtcagtaaggtcattgctggtaagaaaccatcggcaagtatttctgattctggaacaaatactattctgaaaacatcctcctctcaaaacccaaacagggcatccagaagcgcccctgaacatattaagaggcaacagactactacacatcaagataatgtttttaaacgtatcactaccattttattcgattttatgaggggtaaattaagattgtctaaaaaagataaatctaaagttgattttatcagtgaggaacatgataaacgtattgctgaaaactacgtctttgacgaggtattaggccgtcatatttctcgaactaaatttgagaaaatgtctagtttcaattgtcaaaatgacgaacaaccacctaatgagaatcagcgttttccggatcgtcatctcaaccctatacctcctgtaaatgattttgaatgcacaccaacaagcccggaagataggaaatcagtatctaaattgaaaccaccaagatattga

SEQ ID NO: 158324 - DNA, 501 bp, Enterobacter cloacae
atgaaaaaaatagagatgatgaactcattagaagattcgcagcaagaaaaacagatgacgaaaatagtattagacgatcacctgttgaatcagatttcaataacagtagagccattgacagaatcgatgatgatattatccgaatcagtcagcacagcattaaatcagacgcaacagacattaaccagagtgaacagctcattagaagcaacaaacaaagctttaaactcagcgaaaaacataatagatcaacaagccctaaagttagaagaacaacacaaaaggctgcacaaatactcaacagagttaaaaaacaacacaataaagaatcaatcaaaacttattataaaagtggcttcagtggtaggagtaatacatatagcggcagttctattggtaggatactttatcatgcagaaacagcaaacgcagccacaaataaatttagactcaaaggccgtagccgtttcaatagtagagcagctaagatcgaagagataa

SEQ ID NO: 158325 - DNA, 528 bp, Enterobacter cloacae
gtgcagcacccgcacctgcgcacgtcccgcctcgcccaccgtgataacctgcaggctctccgtttccgcgccgcctgccgttgtggtccgcagctccagacccggcaggtacaccacccgctgcgtctgcacgctgccgcctgtcttctgtacgctcaccttcagcacccgctggctctgcgcatcgtaccggtagctctcccggtcgtccctgtccccgtcacgcaccaccggcgtcaccgcctgcagctcattacgcgcggtccagaccagcgcctgccccggctgcagctgcgtctgctggccccccgccgtgaacaggccgtccacctctgcggggctttccgtcagggtgctcagcaccccccggttgctgctgtcgctgatggtgattttcgtggtgtaggtgttgtttgtcgcaggggcgctgtgacgaatctgcgtcaggttgtctcccgcgtcgtaggcgtaggtacgggtgtagttcgtgtacgcggagctgtctgccggaaggggaaccgtggctga

SEQ ID NO: 158326 - DNA, 552 bp, Enterobacter cloacae
gtggtcaccaccccgttgccgtgcacctcctgcagcgtctgcccggccgccgagtacgtcagggaccggacgataacctgctccgtcccccccttcaccgtcagccagcggcccgacacccggcccgccacgtcgtacgccacgcgctggcggttccccttcgcatcggtggtgaccagtaccgccccggcggcgtccgcggtggtcagggtggtgtatgactcgtcagccagcgggtcgttccggacagcgatatcctctccctgccagtcagccacggcgtccgggctgtccgcctccttcagcaggcggcgggtcaccgacagcggtaccccggtcagagccacactgtcagtctgcgtcaggccggccgtgtcgtggtggctgacgcaggccccggccaggttcagcgccttctccgcatccgtactgccggcgtacacgaagcgctccgtgacgcgggcgtcttcgccggacacctgctccgtgatgctcaccgggcgcccgggcagcgacgcgtcctcgtactgccaggtgcgggttaccgcctga

SEQ ID NO: 158327 - DNA, 795 bp, Enterobacter cloacae
gtgaaaaaatatgcctttacaccctttgtctcaacagataatttggtatacgacttaattaataaattctcctattcatactctaaagatagcaagggtgactggatcacacccttatttacaggaaaggttcaaaaggggcgtttcgaaaaacaactgaatgatgagaaaggcattattattgaaatgataaagaaaacgattaatgctgacagtgatattgaatcgagtgacaaagccgaggagatttattcagcattcgtggggaactacgcagctgaaaaaaacaacggagtagtaaattttgaaggtagcgatgacaaaaccaaaatatacatccttggtcatggggctgctggcgatgatgctatctatctgtctccatattcagaaaataaaaaattcgcatttgaggttgttacatcattaagtaaacttggaattcccaatgacatggacattaatcttgacttttgctggagtgcagctgcgacacatcctgaagggataagtctgcagcaataccagcaagcgttacaagatgggagtatctctgaactggttgacggtagtgataatagttttatggacgaatttgttcaggaaattagagaaaacatgcctcattataagggaaaagtgacaggttactacggaatggttcacacgcagaagaaagtgttgaatggttttgaaaatgatgacaggcaacatttcgtcgtgtctttccctgtagaggacggcagtgaattttttgtgaaaaaaacacaggcccggaaagtcataggggtttga

SEQ ID NO: 158328 - DNA, 1065 bp, Enterobacter cloacae
atggaggaatattatccgtatggcggcacagcgatatggacggcacgcaacgtggtggaagccgactataaaacggtcagatactcgggtaaagaacgggatgcgacggggctgtattactatggttaccggtactaccagccgtggtcggggcggtggctctccgcagacccggcggggacggtggacggcctgaacctgttccggatgtgccgcaataatcccgtgacttatacggatcctgatggtttaaatcctaagcatcgtaaacccaaaagaaacaattttggtctgtttactcaaaccgtcactatgaccgagaacatgcaaagatatacgcaacaacccctcccttctttcaggcaaaacgataccagcaggcgaattgtggaactggacataaataataccctggccctggtccacggtatcaaagcacaatttagtgttacagcattaaaggagggttttttacgcagtgcatattcaagaaatggtccggaaggtcattatgcaagggatgcagatcgtaacggaggtggagctatggcggtgtatactagggctgttggtcatgcaggtgctggacagtggaaggcgcttggtaatggtgtggggtcaggtgttaacactgttcagtttgtatttaagcctgattttttgctaaatcctgaacatgtatggagagcaagcggaacggataatatgggaatagttccagggagtacccgacgccagaaaattaatgcatttgagcgatgggagcagcaaacagagtctgagcgaaatagggtttttatggattcagttaacgggagttctgctattaataatgaacaactacactgggaaatgctgtcactggaaagtctcagggttattattgttcctgactctctgcctgttcctcccgatttgattgaagctgccagcttccgacaaatcccccttattagagcaactccaaaagattctctcaggacggtactcttttcgcagggattaatagatcaaaagggaaactggatagaaccggacaggcagatggtaggcatgcttaaataa

SEQ ID NO: 158329 - DNA, 249 bp, Enterobacter cloacae
atgggtgatggttcgacacttcgagccatcaccttggaagacgtattttacattctccttctgaaagaaatcctgtcagaaaaagccaacttgctaataataaacccaacaatcgcaatgacaaataaactaatattaccagccattattcctgaactcataccgatcaaaactgataatattaaggtgctgaatactattaaaaatacacaccaacccggcggagcaccgtataatacagttgcttga

SEQ ID NO: 158330 - DNA, 240 bp, Enterobacter cloacae
atgcggggcctgcagcagctgcgggttcgcacgggtgaccgcctgacgctcgcgcgtggtgctgagcgccaggcggctgaccgcttcggcgtgcagcgcgtgacagtctgcatgaccgacgtcatcgccggccgccgccaggacctgctccagggaaaaatccccgagttccgacagcgtggtgatgttcagcttttccgcgagggccgcgaagaggggcatattctggatatgttctga

SEQ ID NO: 158331 - DNA, 366 bp, Enterobacter cloacae
atggcccgccggacggttttccggggccagcagggtaagcggggaggcctcacgggcgcgcagcgcctcgctgatgccggtaaaggcgtgatgatacggacctcccggattgctattgtcctgttccagggccgcatgcagtttttcgtaagtgtcatactggccctgctgcttcagcgtggcctgcaggatttcattcgacaggctcagggtggacagcggcgtgtcaagattgtcctggctcagcgtcagggcggaaaggtccggacggcgcgtgtccagatggtacgctttccccttctcgtgcagctgctccgcgttgtggtacatctcggtcagataggccgccggggagaacatggatga

SEQ ID NO: 158332 - DNA, 486 bp, Enterobacter cloacae
atgtgtataagagacagcagtagcagtactacaagtgacctattcaaacagagtacacaggccggatataaactacagatcctaaatgttcacgagcaaaagaatactattcgtaaacttttaaacttgatgctcagtacggaagcggagaacgcaccaattcaattacgcttttccagtactctaccatcagattactttgaacaattatcctctgaagaactaaaacctgctggtggtaaattagtatggcgactaaagaaagggcagaagagaaacgaggctctggattgtctggtctatggaatgatcgcaatcgtatattcccaatcacaattaggtacgcaaccgtttagaaaactacgcgaacataaagccaaatcattaccacaaaagataaataaaccagaagaatcacaacctacccaaagtaccagacgttctaggcgtactggtgtgggttcaaactggtttggaaaaacgtaa

SEQ ID NO: 158333 - DNA, 288 bp, Enterobacter cloacae
atgaagtatgaactgccagaattttactccccgcaaattatcgaacttgatggcgtaaaaattaactatgtccgaaagggttcaggaccagcattgctccttcttcacggttttcctggattctggtgggactggcgttatctgatagaacccctttccaactacttcgatgtcattgttcccgatttacacggctcaggcgactcgaaaagacagatctatccaggatcgaagactatgaaattgggcagcttgcagaagatcaggcccgcttgctggacgctctga

SEQ ID NO: 158334 - DNA, 1458 bp, Enterobacter cloacae
atgcaaaatactcaaactgctccgcaggcgcttaagcgtaccctgcgtacacgccatctttcgatgatcgctatcggtggctctattggtactggcctgtttctggcttccggcgcggccatcgctcaggcgggtcccgctggtgctctgctgtcgtatatcgtcatcggtcttatggtctatttcatcatgaccggcctcggagagcttgctgcattcatgccggtttccggtgcgtttgccgtctatggcgcacgctttgttgatgaaggctttggcttcgctctgggatggaattactggttcagttgggccgtcgctacagcggtggatctcgtcgccgcgcaactggtaatggggtattggtttccggagatttcaggctggatctggagcgcaggctttctgatgctgatattcctgctgaatgcgctgtcggtcagaggatttggcgaggcggaatactggttctctctcattaaggtcgccacggtggtgatcttcatcacgctgggattactgatgattaccggcattctgcgcggtgcgcctgacgccgggctgcataactggcaaacggctgccgggccatttgctggcaatatatttagtatgattggcgtggcaatgattgttggtgtttctttccaggggacagaattaataggtattgctgcaggtgaggcgcatgagccggagaaagctattccgcgagccatgcgtaaggttttctggcgaattttgctgttctacgtttttgcaattctggtgatcagcctgattgtgccttataccgatccgcacctgctgcaatcggatgtggataacgtcagcatgagcccgtttacactggtattccgaaatgctgggttattatccgccgcggcgatcatgaatgcggtgatcctaacctccgtggtctcagcaggtaactccgggctgtatgcttcaacccgcatgctctttaacctcgcgcgtgagggaaaagcaccagcgttcttttcccgcctgacgcgcaatggtgtgccgctgtttgccttgctggcaacagtcatggtatcggcgttgtgctttttatcgtcaatgttcgataacgcatctgtctatatgtggttgctgaacatgacgggaatgactggctttattgcctggctagggattgcggtcagccactaccgttttcgacgtgggtatgtacagcagggccatgatattaacgaactgccttatcgttcagcgtttttcccggcggggactatctttgccttcttactttgcctggcagtcacacttggtcagaattacaaggcgtttcttcaggataacatcgactggtacggtgttgcctccacctatattggtattccgatatttctggtgttatggacgggctataaaatgaccacccgtagtagctggataagatatgacgagatgcgttttgataagcaggagtaa

SEQ ID NO: 158335 - DNA, 492 bp, Enterobacter cloacae
atgtctacccctgtattccgtcaggccactgctgccgatgttgttcgttgctatgatattgaaattacatcttacgaaggggatgaagccgcaacgcgcgagaaaattgccacccgcattaaacgctacccggaaggtttcctctgcatggagctaaacggtgatgttattggtttcattaatgcgggttgtgcgtgggaagtcgtgatgtccgacgaagagttcaaagaactggtaggtcacgatccggatgcgcccaatgccgtgattatgtctgtcgttctgcatccggactatcagggcaaaggatattcgtcattactgatgcgtgaatttgtgggacgcatgaaagcaatgaacaaaaaaactattcacctaatgtgcaaagatcgccacgtcgatctgtacgcccattttggttaccagtacatcaaaccgtcagaatcagaccacggtggaatggcctggcatgaaatgatgatgacgctctga

SEQ ID NO: 158336 - DNA, 951 bp, Enterobacter cloacae
atgatgtcaacgttacgcaagatcgatctgaatttattgcttatattcgattctctttatcggcatggaagcgtgacggaggctgccaacgaactggcactaagcccctccgcactgagtcatgcgctcaatcgcttacgtacatcactggacgatcccttattcgtgcgcaccggtggaagcatggtgcctacgtcaaaagctgaaagcattgctgccagtatttctgctgcgctgggtggtctctcgtcctgcctgcatgagccagaacactttgagccagaaaaaagtcgggagagttttacctttgccgccacagactacactgccgcggtgatcctgccaggcttgatcgcgagggttaacagccttgcgccgggcattagcattaagcttatctactcacgcgattttaacgccgacgaagatttgctttccggaaaagttgattttgcgcttggctatgaagaagagcagaaagccccacggcgcggcattgattccattacctgctttactgatgattacgtggttgcagtgcgacgcggccatcctgatatccatgatgcccttacccatgagcgttatctgagtgccggccacgtggtggtgcgaccatggctggaatcccggggggttatcgaccgttatctggaaagccagcaggtccgtcgccggatcgttgttgaactgccaagcctgatgattgccccgatcattgtttcaaataccgatctggttatcacgcttcccaggcggggtatctcatcggtttttgatatgaaaaatctggtggtgtttgctcccccgttcccgaccccacagtacattctgaaagcctattacagcccggcactcggtaactcgccaaggcatgtatggatgagggagcaaattttgcaggtttgcgattcacaaaacccggttatgccagtaaatgtagtcgattga

SEQ ID NO: 158337 - DNA, 804 bp, Enterobacter cloacae
atggacaaagcaaaatggctcaccggtattaagaaaattgccgaaataacgggagcagcggttggtggaggggctggaattttagccaatggtcctttgacggcagcagcgggtggggcgattggagtcgtcattgcacagaccatcactgaagttgcaagccgggctttatctcagagggaagatattagaattggcttatcagcacgtatctctattgatcgtataaatgaattgctggaggaaggtcataaaccacgtgatgacggattctttgatgaggaaaggtgcattgctgaggaagtattcgaaggttgtttgatggcgtcaaaaaattcccatgaagaaaagaaagcgctctatcttggctatctgtttgcgaatctttgcttcaataataaaatatcaaaagatcagactaacagaattgtcgcaattgcgaacagattaacgtatagccagttatgtatattacgggcgtttatatttgaagatatacgctcaatacttccattgataaatcatgacttcaccaacaacaatgccactttcgagcaaatagtcgttttacaagagatttatgagctcgatgtttcaggtcttgcgataatagaagaccagcatacattctatttcaaccaggtaaccccaagcaaagtaaggacacaaggtattggagctgcattgtacgaattgatggaactgaaaaaaataccgatggaggactggattggcacaatccgccctcttttgactgatccattttttcctcataaagaatcaacaattatgcaacaatggtga

SEQ ID NO: 158338 - DNA, 582 bp, Enterobacter cloacae
atgatgaacaaaataactttaagaaaaactcatgcacaactcttttcccggaagcttaaaaagttagctatcatacaaagaattgagcacgatctagataagctagacttgaatgaaccggattcagtgtattcaattaatcaaaaaaaagaatatctttatcaatcatacatagttcatttagttgcaagttggcaagagtttaataaagatctcgtactgtattgttttgatgcattgaaaaaagatagcgataacccttcaattaattcaattgctcaaagtcgcattgatgacctgcttaaacagttcaatacgcctagcgcagcgaatgtggactcgttgtttgacaaagcttttggtgtaaaaaagacatctaagacgtggacattgggtacagcggattctcagatggctcttaatgtgctaaataaggtgctgaaaactagacataaaattgctcatacaggttatgcatctgaagaacttagttacaaggaaaattttgaaaatatggaagtgatatatgaaattgcagttgcaacagaaaagcatgtgttggcaactttaaatattaaataa

SEQ ID NO: 158339 - DNA, 1335 bp, Enterobacter cloacae
atgaccccagaatcttcagtacgtcgcacatctgaagaaataaaaaagaaaaatgatgctttgtctagtgagtgggcagccaaagcctctgaaagagaacatggaagcagaagtgatggctttcgtatagaatttcaaagggatcgagatagaattatctggtcgaatgggtttagaaaactcgctgataaaactcaattattccctcttgaagaagatgaacatttaagacaacgactggcacatagcatagaggtaatgcagctagcatcgactattggtgctgctttcggtttagataagaacttaatagaagctggctcattggctcatgatatagggcatactccatttgggcatgctggcgaacacgcaatagatcaaatgtttcgaaaattaggttttaaaggtggctttaaccattatgagcacggtgtggatgttgttcgatttttggaaggttcatatcaatacagcgttattgaatcgcacaatgggctaaatttaacaccagaggtatgtgattgcattttaaaacatacgtattgtcacaatggggatggacctagtcaagaaaatatatggagacatacaaaacatcaaaaatacctgaaatgtggaggatacagtcaccttgaaggtcaggcagttagagctgctgataaaatatcttatctactatctgatatagaggatggaataaagttaggagctatacaacttcatgacctcttaggttcaagactgtttcatcgagctccaatagactttagaatgagaagcggcgaaaatctatatggtaagtttatagagcaaaggggatctataataaaactcctgatggaagatatcattctggagtcaacaaagaggatcagtaaattaaaatccagagccgatgtttttaatgcgggccattactgtgtatttcatagtgaacagatagataatgacatgggagagatttggggtaaaattcaagtcaacaaacttcacatggatccgagagttttatctgctaatatgaaggcttcaaaaatggtaagcgagttattgttactttttacattattccctgaacatataaatacacaatttagaatggagcatgagagattaaattcaactgaatacttgaagtattatagagaccaacatcaaacaattgaaataccttatgatcttttaaaattcttgcctttggatatgatgataggtttccatccgggaaagactaaatatatagatgtatatcagttaattttggccaaggattatgttgcaagcctaacagataagaaactgaagagggtttacaacgagctattagattaa

SEQ ID NO: 158340 - DNA, 1026 bp, Enterobacter cloacae
atgactacacgcgcacatcaagaacaagtttgggagaccaacttgagaataaaaatcaaaaatctgcttaagcgaggatttataaaatttgatgagatattaccacagtgtgatggagcccaacctaaagatgcatttcgcatatttaacgaactgaaagataccaactttggaacatctactaattcgcttgactataaatctaaatttttcttcaaactccctgcggccaaccctaaatttttccaatggtggtatactcttgaatcacaggagttaatgactactaggattctggatattcataatgatcatgacattgcctgcataggcacccctactttagccgcaacaatttcttcatacaacaaagaagtaacattacttgatattgatgaagatgttgtatctttatttaataaagtatttaaaggtatatcaaatgccgaggtgtatgatgtaaatgtcggcaatattggcttgcatggaaaaaaatatgactgcataacaatagacccgccttggtacccttctgaatttaaaaagtttatttctagagcaatacagttatcaaaagatggagcaacaatctattgctctatcccacaaaatcttacacgaccagggattggagaggagagagcggaactaatttcatctttgcaaaaatgtggtcatgatatattatacattgagcctggtgtgatgaaatacattgttccatattttgaagaagaagcattaaaaaatagtggtattgaaacaaagaatcaaccatggagatcttctgatttattagtaataaaagtcaatgggactaaaacactaagctttgagtccgaagtgattaacaaggtcagatctttctctagggttgggaataatcatgtttttcgggtgttcatagaagaaaacaatgtagaatctagattcccaattagaagagttgatggcttttccaaatctattagcaatagagataatgttgaaaaagtaaacttcggaaaaacaaggattccaagttga

SEQ ID NO: 158341 - DNA, 222 bp, Enterobacter cloacae; identical to SEQ ID NO: 140385

SEQ ID NO: 158342 - DNA, 513 bp, Enterobacter cloacae
atgaacagcgtggtacgcaacatggtctactacagcctcggcgcatggtacggcgcgcagttgatggcgtggatgaaagggatgaatttgcgccgcagctggctgatcctcatcgcctctggtgcggtgtcggtggtgctgtggttcgctaacgtccctctgccgctctctctgctgtcaatcgtggttatcatgaagctcttttacagcttcgagcagcgttatgccgttcattccaataacctgctgaacgtcatcggttcaaacaccatcgcgatatataccacccaccgcattttaatcgaggcatttagcctgctcctgatccgcgaaatgaatgcggcgtactggccgatctgggcggagttaacgctgattctggtttatccatttatcagcctgctcgtctgcacgctggttgggctgggggcacgtaagctctcgaccgccctctttggcgatcttttcttctcccctcccgcgcggctttcgcccgtgcccacgacccgctaa

SEQ ID NO: 158343 - DNA, 240 bp, Enterobacter cloacae
atgcgccccctggccgacgatatactcctcgccgcgctcgcagtggctgagcagcgccaccaggttagcctgcgtgccggtgggcaggaacagggcagcctctttaccgctcagctctgccgcatagcgctggagttcgttgaccgtcgggtcatcgccgtagacgtcgtccccgaccggggcggccatcatctcttcgagcatggcgcggcccggacgggtaacggtatcactacgtaa

SEQ ID NO: 158344 - DNA, 945 bp, Enterobacter cloacae
atgggagccagttttggggtgggtctgggaggaatgagcggttctcagaaggtagaagagtcacgaaaagttgaaacagatgctcctgctcaaattatttatcgcatagataaaaatcgatacctgacgctggaaaactacatatcctgtgataggggtggacaagtatattacaatgactctcagaggggaataaaaacacacctgggatgggataacgatttttatgatttctcatatcgccggggaaataatattgcggcttatcaaggctctattattaatggggcggataatggttatctggcattccctggcgcatctaccagacaatattgtggtagtggaaggtcagaaacaggttgccctgtgtttttcttcttttcagcagatcatgggaacacatttatatataaaattgtagctatggaatacagcaccccagaacgttttagtcagcttaaagtagtagtggctaatgatggtgtttatctaagggatgagtctaaaacggaggatagctattctcgccctacaggtctcaatgaccttagctcagtgaataaattaaggttttctgacggcaatttaatcagtgtttatgatgactggcagaaaaaaattgatgagttagtgaaagaagaactgataagaaaaaaaatgccctatgcaaacgagtatggacctagatttcatatattcgactatctcagaacattaacgccaccgaaaacacatgaggaaaggaatttaatggcaaacgaattgtctgaaatccagattaggattgaagatgaagtttataaagatggaattaaatttccgaagccttcaacgtcaagtattgatgttaaatatcaatgtaataaaaatattaaagctaaagccatcacatatactaatgagtcaaatgggaaaaaggaggtggtgaaaaatgaacaataa

SEQ ID NO: 158345 - DNA, 1269 bp, Enterobacter cloacae
atggataccataatcgaaatacagagtgaaaggacagttcctgtgggttacaagcacactgaactagggatgactccagaagattgggatgttagtccattggcaaaacacaccctatttgtaggctcaggtaaaacgaatacaaaatccaagggggctttcccattatttggctctactggccaaattggtagctgtttaaatcctgaatatgaaggcgatgcgattttaattgctcgcgttggcgctaatgcaggaaaattaagttttgtatctggtcaatatggtgtctctgataatacaatcatagtaaaattaaagccacaaaataacatccatttttttaaatattggctcatatttcaaaacctaaactcgttagtttttgggtctggtcaaccacttattactggaactcagcttaaagagcttttattaccaacaccatctataaatgaacaaactgccatagccaatgtgcttttcgatactgatgcgttgatcagcaagattgagcaattaatcgagaaaaaacaggccatcaaaaccgcaaccatgcagcaattgctgagtggtcgtacccgcttgacacaattttcgaaatatcccaatggcccccttaagaactataagtccagtgagttaggactaatacctgaggattgggaagttacacgtctagcagaggtggcaagagttatagacccacatcctagccacagagctccaccagaggtgtcttatggtgttcctttcgtaggcattggtgatttgaatgaatcaggtgaaataataaattctgaagtaaggagagttaatcaaagcattcttcaagaacattcagaaagatatagcttaaataataaacctatcggtcttggtagagttgcttcgattggtaaagtcatccgcttgcgtgcagggaaggagccttatgcaatttcacctacattaggtgtaattgatggtttcgcttgtaggaatgattttttattttattatttgaaatcagagtcagtaacagagcagttcagccgagtaatgagtggttccactagatcctctgttggtatgaatgttctaaaagagatattagtcgtcaaaatatccaatgaagaacaaatctccatcgctacaatcctctcagatatggatgctgaactcacagcgctagagcaaaaactcgccaagttccgtgatataaaacagggcatgatgcaacaactcctgaccgggcgtatccgtttaccattggatcagcagccatga

SEQ ID NO: 158346 - DNA, 1464 bp, Enterobacter cloacae
atggattttggcactctggataccatgcgcacaaaccaccctgcatggaaattactacgcgcagattccgctgcacttattgccagcttcctctggcacgcttttgcattaccaaacgcccgcagtattacgcaggaagcattgacagaaaaactcgaagacacgctctatgtcttacgccagcaatacggagatgagttttatcctcgtgctgcacgggattatctgaacgactgggcagcgccagagcgcggctggttgcgaaaattttatcctcccggggatgaccgcccctggttcgatctgacacccgcgacggaaaaggcattaagctggctggataagctgggtgattcatcttttatcggtacggaatccagactggtcacgttgtttgagttgctcaaacaggtgatctccggcagtgaacataatcctgaattgcgcattcaggaacttgagcaacaacgtaacgagatagatgcagagataagggcaatccgcaacggcaaactgtctctgctggacagtaccgcgcaaaaagagcgtttccaacaaattgtgcaattatctcgtgaattactctcagactttagacaggttgagcataatttccgccaactcgaccgaaatgttcgtgaacgaattgccttgtggaatggggctaaaggcgacctgttaatgcaagtactgggtgagcgcgatgccatcacagaatcagatcaaggacggagttttcgcgcattttgggactttttgatgtcacaatcgagacaggaagaattctctcgattgctggaaaagttactttcccttgatgctattgccgaaacacagcccgattctcgcattaaacgaatccactatgactggcttgaagccggggaacatacgcaacgcaccgttgcgcagctctcacaacaattaagacgtttccttgacgatcaggcgtggcttgaaaataaacggattatggaaattttgcataatattgaacatcatgccctcgccttaaaatcagcgccgccggaaggcgacataatagatatcagtcatgctcagccacagatcatattgccctgcgaacgcccgctttacacgcctcctattaaagcccaaataattcagcaagtacttgaacagggtgatgaaactatagatatcgatattcttttctcgcaaatcaccgtcgataaatctcgcttattgcgcaatattcgcaaggaactacaaacccagacccaaatcacgttgcatgagttggtatctctgtatcccttgcaccagggccttgctgaattggtcacctatatacaactcgccagcgagtccgttaccgcaacgtttgatgaaagcagcagtgaaagcatctattggtttaccgcaacgggtgaagaaaaaatggcgcgcatcaataccgtcatttttacccgagcacaggagataattaatggaacagaatga

SEQ ID NO: 158347 - DNA, 606 bp, Enterobacter cloacae
atggaacagaatgatgcctcattttcaccagatagcgcgctttcgacgctcataatctcattactaaaaggggttatttatcaggaaaacgatcctcatctatggggagcgctactgcgtttacaaattcaggttcgggattattgtcgggtaatgaatcttgaacttcatctggacgaagcggaaggttacgcttttctgcgttcagattcttgtaatgtcgatgatgaatccgctgttcgccttatttcccgaagaccgttgtcgtttcctgtgagcctcttactggcgctattacgcaaaaagatggcggaattcgacgccagcggtagcgaaacacgtttgattcttactcaagagcagatagttgatttactacgtgtcttcctggcagaaagcaccaacgaagctcgtctggtcgatcagattggccgtcatatcaataaaatcgttgaaatgggtttcttacgcccgctacgtaaccaaaatcaaacctgggaagtccgacgtattttgaaagcgtttgtcgatgcgcagtggttatctgattttgatacgcgcttgcaggcttatagccaacacctcaggggagaaaataatgactaa

SEQ ID NO: 158348 - DNA, 3381 bp, Enterobacter cloacae
atgactaatgcactggaactcgattttagcagcgacgagtcatctgccggtttccgcctggaacgcctggaaatttttaactggggtacatttaacaaccaggtctggacctttaacctggaaggaaaaaatgcccttctcacaggcgatattggttcaggtaaatcaactattgttgatgcgataaccacattattggtgccatctcatcgtattgcctacaacaaagccgctggagcggaaaataaagagcgttcgctccgatcgtatgtgctggggtattacaaatctgagcgtctggaaaacagcatggggggaaaacctgtcgcgctccgcgatcatcgaaattattccgttattcttggtgtttttcgtaatgaaggttttggccaaaccgttaccctggcgcaggtattctcgttaaaagaacccgcaggaaaaccgatcgctttttacgtagccacggataatgatctctctattgcacaagatttttccggtttcggttccgatattaataatctgcggaaaaaactcagaaaaaacagcgccgagatatttgattcgttcccaccttacggtacctggttccgtcgccgcttcggcataaataacgaacaggcgatggagctgtttcatcagacagtctcgatgaaatcagtcggtaatctcactgattttgtccgtagccatatgctggaaccgtttgatgtagcccagcggattaagcatctgattgaacattttgacgatctcaatcgtgcccatgaatcgatactgaaagcacgtcgccaggttgaccaattaacgccacttgttgatgaatgtgacaggtatgctctgctgattcaggaaacagaaaccatgcgcacctgccgtgatgccctggcgggttggtttgccagtttgaagcaaacattgctcgaaaaacggcagcttaacctcaacgaggagctacagcgctatcaaaatacgcttacggtaacggctgaacaactccacgaaaaacgaagtcaagaaaggcaattacgcagcgatattgccgctaatggcggcgatcgactggaacaactgcgcctggatattagccaccgtgagcaggagaaaaatcgtcgtctgaaggcggcggaaaactataacgcgcttttaggcaaagttaatctctcagcggttaaagatcatgatgaatggctggcgacacgccagcttttgcaaattcatgctgacgaacttaccgaccgcgaagccgagttgcagcagcaaaaacacgagttacatttcaactttacccgtaaacgtgaaacacaccagcaactaagcgctgaaataaacaatcttcgttctcggcgcagcaatatcgatgcccggcaaattacgctgcgcgccgctatctgtgaggcgctcggtctccacgaagaacagcttccctttgtcggcgagttgatcgccatacgtgaagaggaaaaagtctgggaaggggctgcggaacggcttttacacggctttggtctctccattctggtttccgatgagcactacccccaagtatcacagtgggttgaaaatcaccatctcaatggtcggttaagttatttcagggtaaatgccggtatgcatcatgctgctttatccccgcttcctggcgcgattagcgaaaagctgcaaataaagcctgatactctctggtatgactggctggaaagacggctacaccaatttaaccatatctgttgtgacactctggagcagtttcgtcgtgaaactaaggcgattacccgtagcggccagataaaatccccaggcgaccgccacgaaaaagatgaccgtcataatattaatgaccgcagtcgctatattctgggatggagcaacctggagaaaatcgccgtactggaaaaacaggcaggggagctggagcaagagctagcagaactcggaaaagagataatctcagttgatgtaaaactcaaaaacctacaacaacaacgcgatatttacaatcgcctcggtgaacataacgattatcaggccatgaactggcagccgctggcgcaggaaattgcccggctggaaactgaaaaacgcgaacttgaagcaacctccgatcgtctggcggtgttaaaccaacgactgaatgagatcctgacggaaatccagacgctggagacaacccatgcggataaaatcgatttgcgcgggcgcacgcaggaaaaaatcgatcgcgcagaggaatacttacaggaagcacaagctgtgcaaatcacagcaaatgaacagaatatgtcacgctattattcccagctggaacaatggcgcgaagaggctctcccagacaggcaaatcagcgtcgagtcttgtgataattgtcagcaggagatgcgcggctggttgcaggataaaattgacagcgaagataaaaaaattggccgatcacgtgacaaaattatcaacagcatgacgggatataatcatcagtatccgcttgagacgcaggagatcgacgcaagtattgaatccgcccatgaatatcgtcagatgctaaacgcattgcaggctgacgatcttccccgcttcgaggctcgctttaagcagttgctaaatgaaaacaccattaatgatatcgccagttttcagagccatctcaatcgggaaagagagacaatcaaagaacgtatcgagaaaattaatgattccctgatccccattgattacaaccctggtcgctttatttcactggtggctcaactcagcgctgacgcggatattcgtgattttcagaatgaactacgcgtctgcacagagggtgcattgacgggctcagaagatgaacagtattcagaagacaaatttttgcaggtgaaacgtattattgaacgcttccggggccgggaaggattaagcgatcaggacaaacgctggaccactaaggtgacagatgtgcgtaactggttcattttctcagcttccgaacgctggcgagaagatgatacagaacatgaccattattcggattccggcggtaaatccggcggtcagaaagagaaactggcctataccattcttgccgccagcctggtttatcagtttggccttgagtggggtgaaaagcgctcgcgttcgttccgcttcgtcgtgattgatgaggcatttggacggggttcagatgaatccgcgcagtatggactggagctttttaagcgcttaaatctgcaattactgatcgtcacgccattgcagaaaatccatattatcgaaccgtatgtcgccaacgtggggtttgtacataacgaggcagggaagatttctcgtctgcgcaacatcagtattaacgtctatcagcaggaaaaagcagagaaaaagcatgagctggacaacgcctga

SEQ ID NO: 158349 - DNA, 1140 bp, Enterobacter cloacae
atgagctggacaacgcctgaggggctaaaaaaacagttacagaaactgtgggaaaaaggagtgcttttgcgtgaactagtagagaatagcggttatttcccgcgacagttggcctttaaaaaaccgacctcagacgacctctcttcgcgttttaacgaggttcgtcagtggattagcatcctgaaacaaattgaaaacaaaggataccgccttgaatggcaggaaatcaggcacagggtcattggtgtcaatcgtctgccagcaaaaatttggattgattccgcttctgacgcgataaaaattctcggcctttataagacttctgaaatatggaagtgtctttttcagcaaatcactgccgctcagcccgctctacgcaactggttaatcaagtacccgatacgcgcactggagcaagactggatgcgattactggcaattatcgcctggttacagcaaaatccgcgcccgaacatttacttacggcaaatcgatatccctgatatcaatagtaaatttatcgaacaacatcgcggtatcttatctgaattactggatctgacattaccgtcagaggccatcgatccacagtcacgaggcgtcctccagtttaaccgccgctttggttttcgcgataaaccccagcgcgtcagatatcgtttgacggatcgagacagggaaattgaaagccgcgaattcgcttcacttaatctggcgatttccaccgtgtttgtaatcgaaaacgaaatcagctttttggccttcccggtgtcagagggatgtatggtcatttttggacgagggtatggattcgatatgctcgcatcagccctctggcttcgtcacaaaaagatctattactggggtgatatcgacacgcatggctttgcgatacttagccagttccggcaactctttccccatacccaaagttttttgatggatgaaaataccttacttgcgcatcggtcatcgtgggtagaggagaacaaaccgtgtttgcggagtttatctgggttgacagatcaggagcaagaactatacctgacgctgatgcataatcgctttggtgagaagatccgactggagcaagaatatatttcggcaagttgggtttatcaagcgttgaaggcaatatag

SEQ ID NO: 158350 - DNA, 597 bp, Enterobacter cloacae
atggatacagtaaaatctattcgctccacatattcaaagccaaaagttgctgggaagaaaagtataaatgaagattctctagtatcaatgtttgtttccgctataggagcactcgttgcagctataggtacatatagtattttcaggaaaataaaaattgataaagaaattgaggctgatattacttcgggtgatgtaattaataacttggtctatccagatttaactccaggttcgaaggagtttgaaagtatggttggtgaagtacttaatgaacttggagtgctttcagaaagagttgaagcaggaaaagatgatggttatgactttgagattaaaacccaagaacagaattatattgttgaggtgaaaaggtattcaaaactactcggtttggctacagctcgtgaatttatatataaagtgaatcaatcaggtaagggtggtattttaattgttagctctggctttaccgaaagaacaaagcaacttataaatgaacataatgctttatctgaaaaccaaaaagtatatcttgtagtggctaagacaaagactgagcttaaggatatattggccaaaattttacggctatag

SEQ ID NO: 158351 - DNA, 555 bp, Enterobacter cloacae
atgccttcccccgtcgtcctgatcctcgcggcggggcgtggggagcgctttctcacctccggaggcagtacccataaattagccgcattgcttaacggcaagccagttttagaacatgtgctggaagccgttgaaaccgcgaacctgagatggcatctggtctgccctaaaggcggaacgtgcggcatgggcgagtctattgcgcttggcgttgaggccacgattcaggccctgggatggctgattttgcccgccgaccttcccttaattcagccatcatcattgcagcgcgtcgccgcagaactcgaagaatcttcaatagtcgtgcctcactaccagcattattcgggccatccggtaggattccggcaggaacaccgtgctgaattactcgcgctttctggcgatacgggagcaaaagaaatagtgagacgcgcacgacttcggggaggtgctaaagatattttcctgtcggattatggtatcactcacgatatcgataccctggcagatctacaggcagcgcaaaggctaacagacctgtcgcgagcttaa

SEQ ID NO: 158352 - DNA, 954 bp, Enterobacter cloacae
atgtcatactcgctttttgacaaagacgagcactggcataagccagagcaggcatttctcaccgatgaccgccgggccattctgcgcttcgccgtagaggcgctaatgtccggtaaaggcgcggtgctggtgacgctggtggagatacgcggcggcgcggcgcgcccgctcggggcgcagatggtggtgcgcgaagatggtcgttactgcggttttgtctctggcggctgcgtggaggccgctgccgcttttgaagcgctggaggtgatgggctcaggcctcgatcgcgaaattcgctatggcgaaggttcgccctggtttgacatcgttctgccctgcggcggtgggatcacgctgacgctccataagctgcgctcggcacagcctctgctcgccgtgttgaaccgcctggaacagagaaaaccggcgggtctgcgctacgatccgcaagcacaatcgctggtgtgcctgcccacgcaaacccgaacgggctggaatctcaatagctttgaggtggggttcaggccttgcgtcaggctgataatctacgggcactctcttgaagcgcaggcaactgccagccttgcggcggccactggctatgacagccataccttcgacctttttccggcctcagccagcgttcagatcgatgccgatacggcggtcattttgctgtgccatgatctcaatcgggagttgccagttttgcaggccgcgcgcgaggcaaaacctttttacctcggcgcattgggcagctatcgaacccacactttacgtctgcaaaagctccatgagctgggatggtccagggaggagacagagcaaatccgggcacctgtcgggatattccccaaagcccgggatgcgcatactctggccctttccgtactggcagaagtcgccgctgtacgtctccgtcaggaggattcatgccttcccccgtcgtcctga

SEQ ID NO: 158353 - DNA, 2199 bp, Enterobacter cloacae
atgaaatttgataaaccagcaggtgaaaacccgatcgatcagctgaaggttgtcggtcgtccccatgaccgcatcgacggaccgctgaaaaccaccggaacggcacgctacgcctacgaatggcatgaagaagcgcccaacgccgcctatggctatatcgtcggttccgctattgcaaaaggacgcctcaccgccctcgatacggacgccgcacaaaaagcaccgggcgtactggctgtcattaccgccagtaacgccggggaactcggcaaaggagacaaaaacaccgccagactgttaggcggccccacgattgagcactaccatcaggccattgcgctggtggtggccgagaccttcgaacaggcgcgagcggcggcctcgctggtgcaggcgcactatcgccgcaataaaggagcttactcgctggcggacgagaaacaggccgtcagtcagccgccggaagacacgcccgacaaaaacgtcggtgactttgacggggcgttcacttctgccgcggtgaagattgatgctacctacacgaccccggaccagagtcatatggcgatggagccgcatgcttcgatggccatctgggagggcaataaggtcacggtgtggacctcaaatcagatgattgactggtgccgcaccgatctggcaaaaacgctgaaagtgcctgtggagaatgtgcgtattatctccccgtacatcggcggagggtttggcggcaagctgttcctgagaagcgatgcgctgctggcggccctcgccgcccgtgcggtgaagcgcccggttaaagttatgctcccacgccccactattcccaataacaccacgcaccgccccgccacccttcagcacctgcgtatcggtgccgaccagagcgggaaaatcaccgctatctcacatgaaagctggtccggaaacctccccggcggtacgccggaaacagcagtgcagcaaagcgaattactctacgcaggagcaaaccgtcataccggcctgcggctcgccacactcgatttgccggaagggaacgccatgcgtgcgcccggcgaagcccccgggctgatggcgctcgaaatcgcgatggatgaactggcggaaaaagcgggcatcgatcccgtcgagtttcgcatcctgaatgacactcaggttgaccccgccgacccgacgcgccgcttctcccgccgtcagcttatcgagtgcttacgcaccggggcagataaatttggctggaagcagcgcaatgctataccaggacaggtgcgcgacggtgagtggctgatcggtgtcggcgtcgcggcgggctttcgtaataatctgctcgaaaaatcaggcgcgcgggttcacctggagcaaaacggcaccgttaccgtggaaacagacatgaccgacattggcaccggcagctacaccattctggcccagacggcagcggaaatgcttggcgtaccgctggggcaggttgcggttcacctcggcgattccagtttcccggtttctgcgggttctggcgggcaatggggcgcgaatacctccacctccggcgtttacgccgcctgtgtgaagcttcgcgagatgattgcctcggcagtcgggtttgatcctgagcagtcgcagtttgccgacggcaagattacgagcggtacccgtagcaccacgctacgtgaggccaccgcaggcggcagactgacagcggaagagagcattgagttcggctcactcagcaaggagtaccaacagtcgacctttgccgggcattttgtggaggtcggcgtgcatagcgcgacgggagaagttcgggtccggcgtatgctcgctgtgtgtgctgcaggacgcatcctgaatccgaaaactgcacgcagccaggtcattggcgcgatgactatgggcatgggcgcggcgctgatggaggagctggcggtggatgaccgtttgggctacttcgttaatcacgatatggcggggtatgaggtgccggtccatgcggatattccagaacaggaggtgattttcctggatgataccgaccccatatcctccccgatgaaggccaaaggtgtcggcgagctgggcctgtgcggcgtgagcgcggctatcgccaacgcggtgtataacgccaccggtattcgggtacgggattatcccatcaccctggataagctgctcgataagctgccggatgtggtttaa

SEQ ID NO: 158354 - DNA, 957 bp, Enterobacter cloacae
atgaaggcgtttacctatgaacgtgtgaataccccggctgaggcggcacttagcgctcagcgcgtacccggcgcaaaatttatcgcgggcgggaccaatctgctggacctgatgaagctggaaattgaaacgcccacccaccttatcgatgtgaacgggctcgggctcgataagattgaagtgaccgactcgggcgggctgcgcatcggcgcattagtgcggaacaccgatttggcagctcacgagcgcgtgcgtcgtgattatgctgtactctcccgtgccctgctcgctggcgcatctggtcagttacgaaatcaggcaactaccgcaggtaatctgctccagcgcactcgctgcccttatttttacgacatcaatcagccctgcaataaacgcctgcccgggagcggctgtgcggcacttgaaggctttagccgtcagcacgcggtggtaggcgtaagcgaagcctgtattgccacccacccgagcgatatggcggtcgcgatgcgattactggatgcggaggtagagaccgtcacgccggagggaaaagcgcgcagtattaagcttgctgatttttaccggcaaccgggtaaaacgccgcacattgaaaccgcccttctgcccggtgaacttatcgttgcggtgacgttacctccgccgctcggcgggaaacatgtctaccgcaaagtgcgcgatcgcgcctcctacgcctttgctctggtgtcggtcgcggcgattatccagccagacggcagcgggcgcatcgcgctgggcggagtagcgcataagccctggcgcattgaggctgcggacgctcagttgtcccagggggctcaggtcgtgtatgacgcactattcgccagcgcccaacccaccgctgaaaataccttcaaactcctgctggcgaagcgaacgcttgcctccgtattggctgaagcgagggcacaggcatga

SEQ ID NO: 158355 - DNA, 690 bp, Enterobacter cloacae
atgagcaaccaaggcgaataccccgaagataatcgggttgggaagcacgagccgcacgattttagtttgacccgtcgcgatctgattaaagtgagcgccgcaacagcggcaaccgccgtggtttatcctcattctacgcttgcggcaagcgttccggcagccactcccgcccctgaaataatgcccctggtactcaaggtgaacggcaaaaccgagcagcttgaggtggatacccgaaccacactactggacgctttgcgtgaaaaactgcatctgaccggtaccaagaaaggttgcgatcacggacagtgcggagcctgtaccgtgctggtcaatggtcgaaggcttaatgcctgcctgacgcttgcagtcatgcatcagggggccgagatcaccaccattgaaggcctgggttcaccagaccatcttcatcctatgcaggcggcctttatcagacatgatggcttccagtgcggctactgcacctccgggcaaatttgctcatcagtagcggtgctaaaagagattcaggacggcattcccagtcacgtcacggtcgatttggtttccgctccagaaagaactgccgatgagatccgtgaacgtatgagcggcaacatctgtcgctgtggtgcatacgctaacatccttgccgccattgaagacgttgcgggggagataaaatcatga

SEQ ID NO: 158356 - DNA, 771 bp, Enterobacter cloacae
atggtattcattaatttctggagttgcctaccaagtaattgtcctcttagaaagagcagtttgtgcaatacactctttgccggtgagatatcgccggtcagtgatgtggccgcatgtacgcgtgaacctttgcgcttcgacctgcaactggggaagcgctcaatgaccatcgtggacttacctggcgttggtgaaagtggtgaacgtgatgccgaatatgccgccctgtatcgtgcacagcttccccgtctcgacctggtactatggctgatcaaggctgatgatcgtgcgctggccgtggatgagcatttttaccatcaggtgatcggtgagccttatcgacataaggtgctgtttgttatttgccagtcggataaggtcgaacccaccaacagtgccaataaactatccccagaacagaaacaaaatatcagccgcaaaatctgcctgctgcatgagctgttccagccggtaaatccgatctgtgcggtgtcggtacgtttgcaatgggggctgcgggtgatggctgaacggatgattcgttgtctgccacgtgaggccagcagtccggtggcggtacagcttagtgctccacttcgtaccgatgccgttaataaaaaagcccgtgacgattttggtgaaacggtcggctcggtactcgacacaataagttccatgcccctgataccagccccggttcggacaataatccaggctgtacgcgataccgtggtatcggccgcccgcgccgtctggaatttcttcttctga

SEQ ID NO: 158357 - DNA, 399 bp, Enterobacter cloacae
atgttcagcgaacgacaatatctgcgtgccaccgacgatgagatggtcaggtacacggatatcaacgagctgaagcgcctgcaccagacgctgcgtgatggtcttatctgcctgactgggtgtggtgtcgccggaggggtggttatgcgccagtatcactgctgctgcattaaaatgcagggcgcgtttgaccacctcacggggatgtacctcggtgctgctgatggaaccggcaaacagggtttcgtgggcaatcaactggttttgctggttcaggtacagcaccataaactcttcgcgctccagtccagccattttcagtttcagccagtcacgggcagcctgggtggaggtaaatgccacacctgtttcgcgcaggtgtcggccaagcagggttaa

SEQ ID NO: 158358 - DNA, 744 bp, Enterobacter cloacae
atggagtttgcaatagcaatcatatccattgctatttcttcatttaatgaacaactagccgttgtgaatactctagttttattttcaatgattgctttttgtataataaacaaaaattcggcgaagatgccattcgcaatgttagcatgtactgcattggtactagtatacatcgctacttgccctggtaacaaagttcgttttgaccgagaggtggtaagatggtttaccgattataatgaattaggtttctttaaaaagatacttttggggttgaatctttatactgattctttatttgcgcataaatctttagtgccagcaataatggcctttagcgtttcattagtatgcaaaggaaagataaagtatctacctatgatttcaggcgtcactttaaccatctttaacttattatattcaccacctcaattgttatcaaaaatacaatttaatgccaatgacatcatatcttacttgtcatttggcaggataattttagcgtttattatatcgatgcttatatttatcccgcttgtgatatcaagtgataagagcatttttagctttatgctaccagcattgttggttggggctgttgcgtctgcatctatgttagggttttcacctacggtatatgcttcaagcgaccgagttttatttgtaacattccttttatttataatagccacttccttatgcatctcaaagtttgttatagagttcaataaagaatatacttaa

SEQ ID NO: 158359 - DNA, 516 bp, Enterobacter cloacae
atgagcagcgtaacagcggctgatgtaggttcattttttttatctttggttgtccctgttattaccggtgtcgcagcggcagggtataccgcctatttcgctttaaatagattttatagagagaaatggtgggaaaaaaaacatgccgcttacaatcagttaatcgaaaagctttttgaactaaaagatctctacgtaatagcatctgatattacagagatggaatttcaggcggacaggggggagcgagactaccctaaagctaaggtcgattggcataaattgaatgaagtcagatcacaggtgcacagactctatgttctttcacctatctccttcagtcataatgttaaagagttattggacaaccttcttacccaagatacagaaaaaaatatcagcatttatgaagaaggttgtcttgaattcattgcctatcacgaaatgtcaggcgttatacaatcctccatagatgcaatagtcgatgatgcgaaggaagagcttaagttcaaataa

SEQ ID NO: 158360 - DNA, 552 bp, Enterobacter cloacae
atgacatacccgactgttataaacggcttcgatttccgagaacttatcttcctgtccggaactgaatcagcgactgacacattcaaggtggcgaaggcattcggaaagggccacaaggatgtaatgaggaagactaggaaggtgatcagttcatgttcttctgagtttgcagagcgcaattttacgctttgctatgaaaacaataagttacagaacggtaagccccagccattttaccgaatgacacgtaacgggtggactatgctggttttcagcttcaccggtgccgccgcgtttgcattcaaagaggcctatatagccgcctttgactggatggcagacatgatcgcccatagtaagcaaaatcttgagcaagagcgaaatgcggtaatgctggagttcatgaaagagaaagatgtcgccagcatgtcagggcgtcttctgaatcgctggggaagagtgaaaaagccgctcctgattgcgaaaattgaacgactcgataagcagagtcagatcccgctaccagggttcacaaaagcactagaccaatag

SEQ ID NO: 158361 - DNA, 249 bp, Enterobacter cloacae
atgtttaaagaaaaaatgaatcttgaagctggctacactcttatggacgacggtaccttcagaagggggcatttagcgagccgcattgaccgaaattacattgtccttgacgataatcagaacaaaattggaacagccacagttactgttatcgagcagacaaagcccccatttaaggaaaatgtccatattgtgagaaaggaccttgaaggaaatgtagttttagatgtgcgatatgtcgacgattaa

SEQ ID NO: 158362 - DNA, 246 bp, Enterobacter cloacae
atgccatattttatcttttttgaacagggtaagaagcctacaaaacattctgtaagcagattccctgaagatgttaatttgcttcaggctaatggtacaaaacgccatgtctatacaggatccattttccctgaaaataaagagtatttttatgcttatgagaaaggttctgcggaaccaagcaaaaatgacgttctagacgcagctaagatattggacattcctcccgtcataagacacatctga

SEQ ID NO: 158363 - DNA, 507 bp, Enterobacter cloacae
atgagcattaacatcaatctcgataaaataaagacacgatgtggttgttttttttgcttgatcttatttagtggtatcacttggggttgttatgaagcgagcgtgccagccatagtcgaactcattcaattaagaagtattgtttattttttatggggatcgttttttgtattgtttgtttttccggtttcttgttgttttgttttagttattgcatacgtgacctttacgaaaaaaatgcggccacccaagtttgttgctaaaggaattaccattggctttcacgttatgggggcaggatttgttattggcaacattctctcgtttatcgtcatattttatcccctgggaaccaactatgtcttatgtgaacgtccagggcccttttcgggaacgtattacaccaaaacggaagagatttgcacgcaggtaaaatacttgcttaaaacaagagccagagatatcaaaaaactgaatgaccagctggacggcgtatcgacgcagtga

SEQ ID NO: 158364 - DNA, 504 bp, Enterobacter cloacae
  misc_feature (12)..(21): n is a, c, g, or t
atgagccctccnnnnnnnnnnatgcgctccatattacgagcattatctgacgaggctcgaaatcgttttatttcttggttaggattggtcgggcagaaaaacgagagtggctgggttaagtatgtgatcccattaatcagagaggactggcccaaagaacgccaatatagaaccacgagctctgtaaaagcatgggttggtttacttgacgatactggcgataagtttccggaggtttacgattcagtaaaaacatacttagtaccaatcgagacaattgatcatttgttctacagattcactcgggagctcggtggtaaaagagcaattgcagctatttttccagaaaccacacttgatttaatggacaaaataacaccacagatattcacgcgtacatcaggagagttgcagaagattcttgagctaattgaagatacagatacaagtctgatcaaggactctcggtacttacggcttattgcactggttgagaaaaattag

SEQ ID NO: 158365 - DNA, 435 bp, Enterobacter cloacae; identical to SEQ ID NO: 157262

SEQ ID NO: 158366 - DNA, 156 bp, Enterobacter cloacae
atgcatttcgttgtgctattaattcttttattatttgtgtttgagtggttccacgaggtaaagatatgtctttatgccattgaagagtatagtcaaatttatcaagtgaagagaacctgtcaatttgatcttttaacttttgcgttatttctatag

SEQ ID NO: 158367 - DNA, 852 bp, Enterobacter cloacae
atgagccttatcgatttaagtctttcaggattatcacaacctggaacaaagcttgttgaaaaagttagtgatgcgattggtgttctttatgaacctacgagaatccgcaaaaaagcaaaagctgaagctgatgccaaacgtacagagctaatttcaaggttagaacttgagggtatagaaaaacgagcagttgagcgttttctgaaacgtgaaactaaacgacaagaaaacattgaaaacattactttacaagcagcacgaaacctttcagataccgataatgtttctgacataaatgaagattggtttgaggcattcttcagagagtgtgaagacattagtgatgaacaaatgcaaactctttggagtagaattttatccgaagaagcaaaatcaaaaggttcgtttagtcggagaaccttaaaactattgtctactttaagcactgaagaagcaaatctaattacctcttttggcaaatttgtttggcaagcaagcagccttacaccgattcttacccatgataagaatggtggcacagagggaataacattcggtcaacttgcattgttagactcattaggggtaatccaacaaggttttggttacaatttgtcttttagtcaaaaaataggtcatattcattattatggaatacctgttaaagttgaatttaagaatgatgaaccatccacttggtcattttctacgggtcaagccttactctcgcctatcggtgcagaattaatgaaaatctgcgggtccactccagattttgattacttaaaaaagaccgtcgataaaattaattcagaacaaaaccaagttaatttaacaattgtcattaagtaa

SEQ ID NO: 158368 - DNA, 465 bp, Enterobacter cloacae
gtgctgggctttgaccagtgtctggatcatcatgccgatgattttgccacgcagcttcagaacgcctgcccgaacggtattgatatctattatgaaaacgttggcggtaaggtctttgacgccgtgctcccgctgcttaatacctccgcgcgggtgccggtatgtggtctggtgagcggctacaatgccaccggtctgcctgaggggccggatcgtttgccgctgttaatgggcaccatcctgaaaaaacgcattcgtatgcagggttttatcatcggccaggattacggacaccgcatcaaagagttccaggaagagatggggcgctgggtgcaggagggtaaaatccactatcgtgaacaggtgaccgacgggctggaaaacgcaccggatgcgctgattggccttctggaaggcaaaaactttggcaaagtcgtgattcgcgtcgcggcagacaataaataa

SEQ ID NO: 158369 - DNA, 534 bp, Enterobacter cloacae
atgggcaccacgctggcggtgggaggtgaagccgggctgctggatgaagagggcaatatggcaaacattaatcgcccgtttatggtggactcgattgccgccgcgattggcccgtgggtgggcattcctgccgccacggcgctgattgaatcctccgcggccgcagaagcagggggtaaaaccggcatgacggcgctggccgctgcggtcatgttcctgctgatgctgctgtttacgcccgttgcgctcatgatcccaaaagaagccaccgcccctgccctgatcctgatcggcctgaatatgttcagcggcctgcgtaaggtggatctggcaaacttcaccgacgggctgccggtgctgatgatggtaatgattacgctgattgccaacagcttcgggacagggattgcgggagggctgctgttttacatcgtcattaaagcgattgcaggaaaatggcgagaaatccccgttggtctttggatcctcgccattccgctggtgtattactttgccacgctggtgaagcactaa

SEQ ID NO: 158370 - DNA, 783 bp, Enterobacter cloacae
ttggattcgatacagacaaaactatttggaacaataaacgcgcccaaaactttagggcaactgattgaacttacagagttacattcagaaaatcggaccaatgtttatatgtggcgtggtcagggaaacgtagaatgggcaatacatagcgcagcatttcgtaggctcaagactaaaaatcgttccacaaatgagcggagaatgaggatgtatgagcttgatctgcttaggaaggctcggcacaaaggttatggctatgaggaagggcggcgattaacagactttgaagttcttgctaaattgcagcatcacggtgcagcaacacgactaattgatttttcgagaaatatgttagttgccttatggtttgcatgccaatctgaaagagggaaaccaggattgttatttggcattcactcagactctcttgatggacatgaaggagaggctgaagaacgcaattatgatgagatattttcaagggacccgagccaacaaggtgcaactacatgggagcctccagcagtaacaaagcgaattgctgctcaaagtgcccaatttgtgtatagcgtagttagcgacgaccccgctggaagcctcgattttaatcgcgatatcagcgcatacttaccaatcggaattacagcagaagcaaaagaaaatttcttacgactccttgagggcacttttgacgttagacagttaacgttatttcctgatttagatggtttttgccatgccaacacagaaagaaacgggcgatgggaaaatgagaggtggtga

SEQ ID NO: 158371 - DNA, 273 bp, Enterobacter cloacae
atgcgcgttttaaaaattgaatgcccggagtgtgactccaaggctgttatccgcaaaacaaaccggaagcaccggcagatcgcagatatctactgcgcctgtactgacgtggagtgtggtcatacgtttgttatgaatctgaccttttcccacacgctcagcccaagcgctaaaacgggcgatatgatgatgcaaaaatggctcgagtcattatcacccgatcaaaaacagatggcgtttgacctactgaaacccgccgccgttgccgtgtaa

SEQ ID NO: 158372 - DNA, 2016 bp, Enterobacter cloacae
atgactctggccattgaagcacaacatcacgccgtcgatgcctggcggcgtgatatgttcacgcccggcgttccgcgtgatgccacaatcacggagcgccgcctctggtctgttaatccagaggactacgctttccgatcgcaataccttcacgaaatacccgactggctggccgggtattttggcaaccgttacgaaaagctgtttaacggcggtgacgggcgtcgccgtgccaatacatttctgcgaaaaaccatcggtgggaatgtattgccacgtctgcgtaaagtcatggggcgttatcagctgcccgctgatgctgacgatctctccttcgggaaaatgctttcccgccttccctcgcttgaccgcccggagctgaaaaagctggccgggcaggtggcgtcatggctggcgcaggctttctatgaatgtacagacgccatcaaggccgatgctaaagacgaacaagagcttgatctccgcatggtggaggcttatctccagttaggggcgttagtcggcagcatcaatttcagcgtgccctactgggggctttatgagaatgacagccttacagcccgccatgctgagtgcggcattctgcgcatgatggccccggagtggtggtatcagcggctgaagcgctctcgtgatctccagcgtgagcacctggctattgcagtaggccaggtgcagaaagcggccagcgcttatgtgtcgcgcaaatcgctgggagagtggattgaccagaaaaagcgcaacgcagagttttttaaaaagtttgacctgattagcgaagacgatgatcgccgcatagcgctggctgacatggtttatcgcagcgttgctaaccctgcaatccgtcgctgtgaactgatggtacgaatgcgtggttttgaggatatcgccaacgagcagggcatggcaggggagttctacaccatcactgcgccgtcacgctatcacgccgtccacagcaaaggcggctttgtgtcgcaatggaacggagccagcccgcaggacacgcagcgctacctgtgcaatgtctgggctaaaacccgcgccgcgctgtcacgcgctggtctccatgtgttcggcttccgggttgttgagccgcaccatgatggtactccccactggcatatgctgcttttcatgcacccgcaggacgttgaagcggtgcgcgatatcatctgcttccatgcccgtataacagactccgaagaactacagtcaccgcaggcgctgaaagcgcgctttcacgtagagcctatcgatcccgaaaagggttcggccaccggctatatagccaagtacatctcaaaaaacattgatggttttgcactggacggcgaaaaggacggcgaaaccggggaaaacctgcgtgatatggctaagtccgtttccgcgtgggcctcgcgctggcgtattcggcagtttcagcagattggcggtgcgccggtaacggtctggcgtgagctgcgccggttgcgcgatcagcaacttaccgatcaacgcatggatgcagtgctcgctgctgctgatgtggggtgctgggcgtcgtacacccaggcccagggcggtgcactggtcgcgcgccgggatctggttgtacgcctggcatatgaaatcacggagcagggtaacgaatacggcgaagccgtacagcgcgtgcagggtgtctattcgccatttatccacgattcgtctgtttgcactcgtctggtgaagtgggcaaaggtgccgaagttggccgaagcgccagcggaggccggggtttctcgcgccaccggcgcggcttggagttctgtcaataactgtacggagggtggaagccgccgacggttaaaactggagttaaacagacgtggttttgatggttctgatgaagaaatagccattctgcaacgtggcgcagcgctggcgtacgggcgatcatcgctgacttaccggaacggtgtgttaaaagagcagcgcaatgagccacaaaatgaactgtggccagggtggtaa

SEQ ID NO: 158373 - DNA, 846 bp, Enterobacter cloacae
atggcagtaaaatcacctctaaaatgggtaggcagtaaagcccgtctcatgccgcagctgcttccccatttaccgaaaggtcagcgcctggttgagccgttcgctggttcgtgtgccgtgatgatgaacaccgactatgaggaatatctgatcggggatgttaatcccgatctggtcaatctttataaggtcatggcctataaaactgatgcgcttctcaacgagctggaggtgcttttttctgctggatcactgggagatgagcagagccgtgcggtttattactactccgtgcgggacgcgttcaaccgtgccggtaaagcttttggccctgaaagcgttgaggcggcggcgcggtttctgtacttaaaccggcacggcttcaatggcctgtgccgttacaatcgccgaggtcattttaatgtcccggttggacgctacaagaaaccctattttcctgctgctgagatccgcgcttttgcagaaaaagcgatgcgagccaccttcatcactgcgcattattccgaaacgctggcgctggttcgggagggggatgtggtgtactgcgatccgccatatctgacagaggccggtaactttaccgcctatcatgagaacggcttctcacatcttgatcaagggcgcctggcgcgcaggttacgccgtttgtcggaaaaaggggttagcgtcgttgcctctaatagcgatctggcaatggttcatcacctttatgccggtttccaggctgtccgggttaatgcaccgcgtagtgtaggtgcagcagctgccagccagaagacagcggcagagttaatccttaagtttcccgccagggccattgcatga

SEQ ID NO: 158374 - DNA, 234 bp, Enterobacter cloacae
atgcgaatgacacgacaggatttacccgcagataacgcaggcaatgacctgctggcactgctgaccagagccacgcaggaaggcaaagcctccgccgccgatctgtgctctacccgtctggataagctggccactcatgccgcaaacgaagggctgagcgctgccgaaattgttgagctgatccgtgaggaagctatggccatttgcagcaaaggcggtgcggcatggcagtaa

SEQ ID NO: 158375 - DNA, 405 bp, Enterobacter cloacae
atgacagttatttcagtaaataaagagcgtctcagcgttgagctgtcagcatggcgcgtaccaatgaactatgcagccctgtttttacgtaagaacgtggatgccgccgggcgcgtgatgctgcacccgtttttctttaacgacacggatcacatgaccagcccgcgtcactggctggccgtcagtgcggccgtatggtgcacggtatatcgggaggcagagagccgggaaagtcagcttgaagcgctggcggcgatccgctctacgttttacatggctggcgcgatgggccagggtgaaatcattgcgctgatccaggagtggtggagcgccacgtatgaattgcaccaggtgccagcgccgaatcattcagcagcacgtccgcaaacccctcagtttcactaa

SEQ ID NO: 158376 - DNA, 423 bp, Enterobacter cloacae
atggcaactaatcaggagtggttaaagcgcatccgtaatcaaatcaacgcccgtcacagcgacgcggctgattactgggattcccttaacgataagtggcgcggtgttgtgctgcacgctgcgtccatttcaggtactgagaccttccggcctcacctggctaactgcagctggcgtgagctgtatgaacgtctcgacagccgcggtatgtcgcagctacgcaccggtattcagcaggcccggaatatttttgacgggttcggggcgctgccccgcgacgggttcacccgcagaacgtccgaacgccctgttaagcagcaggtgtctttaaagctggggcctcagatggtgatcgccccggatattctcaaagtgctggatgcacgcgaacagctgaaacggcagcaggagaagcaggtatga

SEQ ID NO: 158377 - DNA, 195 bp, Enterobacter cloacae
gtgaaaccttttgtgacttaccttaagcgccagtctccgccgcagcagcttccaagctttaccaatggctggattgagctgcaaaacggccagcgctggaacccgtcccacaattacaaattcaacgcagatatgccgcgccgttcgctactggcgcgtctgctgtcagttttcagggggagctatggcaactaa

SEQ ID NO: 158378 - DNA, 504 bp, Enterobacter cloacae
atgtacgattataaagtttccaaccgttactatctggatgatgcctgccgggcttttgctctgagccacaatgttgaagcgctggcgcgagccgtaggtatgcgcccggcaaccctgcgttgcaagctcaatcctgatcagcctcatcagctcaccattattgagttgctggcgatcactgattacaccgaggatgctcgcatccttgatggcctgctgcgccagattaactgtcagccttccgtacccgtcaataacgctatccctgagaacatgcagttctgtgcgctcaccgctgcggcgagcgttggcgctatcgccggtgaagcggtttcaacagagaggatgaccgccgcccggcgtaaccaaatccttgaccgcgcaagtgatgcaatccgtagcctctcgctgatcgtccattccgttgaggcccgctttcagtctgttcccgtgctggccgctgccgtcgatatcgtgacgacaaacgccgcaggcatgatgtga

SEQ ID NO: 158379 - DNA, 222 bp, Enterobacter cloacae
atgcgtcctaacattacaatcaccatccctgttccatacctgcctttaaaagaatactgccgccttacaggaaccccagaggcgacggcgcgcgacatggttcgcgatggccgcttgccagttcgaagcaagaaagatgcgcctatgagcggcgtgcatatcaatatggcagccctgacggttcaggcgttaagcgaatgcaatatttcgcttcaagcgtaa

SEQ ID NO: 158380 - DNA, 588 bp, Enterobacter cloacae
gtgattatgttcaaaattgattttgaaggggatagcacccctgtgctggatcggattattgaagcctacggatttacctcaaagttaatgttggctcagcattttgatatggcagccagcacgctgtcgggtagataccgtagaggcggattcccagcagatatggctgctcgttgtgtggctgatacaggcgtttctcttgagtggttagccactggagaaggcaagaagtttgaagatgaccagctggatataatgaaatttcccagcaaaaaactggttgatggaaaactctatgactctggctacgtaatgtttgacaaggtcttttttagggctggaaccccgctcccttcaaatccaatctgtgtacaggatgaaaaggcgcaatacatcctcgatcagaaatttgccgaagtatttgacggggaatggctggtaaatatcgaaggaaaaaccagcatcagaacgctgacacgcatcccgatcaaaaaagttcgggtcagcggtgtaggtatggcttttgattgcgggctggaagatatcgaaattatcggccgcgtggtcatgacgataacaaacgcataa

SEQ ID NO: 158381 - DNA, 471 bp, Enterobacter cloacae
ttgccggttggcgttcccgttccgtggccagcatcaattccaccgacagggtggcttaaatgtaacggagcggctttcactgcttcccagtaccctaaattggctcaggcttatccaactttgaaacttccagatctacgcggggagtttatccgtggctgggatgatggacgtggagttgattcagatcgaaatattctttcgtcacaggggcatgctgttgggccacacactcacctttatggtttctggacttcacgactgaatgattcatcattcgccgattttgcaggtacgacaattttaaaacaaattactcctgccacacctgtaattgattttgataactacccgttaccaaactctgtaattactgagggtggcgtagtgagtgcgtccacaatgccaatgagcggaacagaggcgcgtcctcgtaacgtttcgtttaacttcatcgtgagggctgcataa

SEQ ID NO: 158382 - DNA, 600 bp, Enterobacter cloacae
atggcgaaggcagaattaaacagcgaactcattgccacggtggccgggaatattaccgtgtttaactatgatggtgagacgcgcgaatatctttcctcgtcagtagaatatctggcggtaggtgttggtttgcccgctaattcctgcaccgatatgcccggcaaaagtaaagagaattttgccatttgccggacagcagatctaagtgcgtgggaatatatagctgatcgtcgtggtgagattgtttacagcactgaaacaggcgaagcggttaccatcatggcaccgggtgattatccggttggtaccacaacgctggctcctgccactcagtatgataagtggaacggcagcgagtgggtggccgacacaaaggcactgcacgaggcagcagtgacagaagcggaacagatgaaaaccgcgttattggcggaggcgacagcaacgatcgccccactggcagatgctcaggctggcggctatattgacgacgctgatataccgcgccttgctgagtggcagcggtaccgttacaaactgactaaagtcgataccagtaacgcgcctaacattactcttccaccgaagccgggggtgtag

SEQ ID NO: 158383 - DNA, 1743 bp, Enterobacter cloacae
atgagtacttggaaccaggcttacacagcacgagaggatttgaaagaatatggtgataatggtttggctttgtttgctttagctttgcatttccgaatcgatgatattgatagcgttgcagcagagtccattactgatgggcacgatgataagaaatgtgatctcgtatacattaatgaagaagaagagtttgctgtacttgctcagtgctatttctcaagtaaagcaagacaagaagctccagctaataaagcgagtgaccttaatattgctttagcttggcttttacaaagagatttggtagatgtaccagaaagaataaaatcttcagcccaacaaattcgagcgttaattgcacaagggaaaattaaaaccctatatgtttggtatgttcataatctcccatcctcagcgaatgtgacgcaagaacttataacagtacagcaaacagctataacaatattgaatcacgattttgaaaatgctaaagtccaagtccatgcaatggaagtcggtgctgaaaaattgacagaatggtatagtgagtctctttcaccaatacttgttgatgaaacatttaatataaaagtcaatgatggtggatatgaagttaaaggagataactggaattcattctgtaccactattcagggaagggacttggcgagagcatatcgaaaacataaattaaaaatattttctgccaacgtaagagactatcttggttcacggtcatctgattcaaatataaataatggaattcgtactagtgcagaaaatgctgcatcagaattctgggcgtataataatggcgttacggttctggtgcatgagtataaatttgatggggttgcaaaaaatctcgaagttaaggggatgtcaatagtcaacggtgctcaaacaacaggtgctctaggaacgttgcaaagattgcctcctgaatcagtcaaagttcaggctagattcattaaagttaacgatgctgatgcggatttgatacaaaatataattcaatataacaatagtcaaaataaggttgaggcatcagacttcagaagtacggataagatccaaaaacgacttaaaagtgaattttcatctattccagacgccgaatatgatggcggtaggcgtggaggcgcagaaagtgtcattcgtcgaaaaaccaatctattaccatcctatactgtgggtcaggccttgatgagtttccatggtgagccgacaattgcttataatcagcgttctgcaatttggactaatgattcccattactcaaagatttttaatgaaagcaccaaagcttcacatatcgtatgtgcttactctcttatgcggtgcattgagaataaaaaaatagccttggcaaagaaagataatctatcaaaaaatgataatgctcagttaggatacctcaggcatcgtggttctatacctttactttgttcagctatcgctgaatgccttgagatttttttagggcgtcccgttcctaatttatttagggtttcgtttgggaatgtaatttctccttctcaagctgaaagtatttgggagccaattgttgatgtatgtctggcgttaagtaatcagttgctacccgcattagtagatggaggactaaaaagtcccacgaaagtaaaagactgtatatccaatttttcgcagttgataactgcaacggctcaaatgaatcaacctgtttatgaggcatttgagaagcaaattaaatccgcattctaa

SEQ ID NO: 158384 - DNA, 720 bp, Enterobacter cloacae
atgacaactattaacaagcatgggttatctagaacaattccagaaccagtcaaattggaggtaagacagcgctgtgggttcggttgtgttgtttgtgcttctcccattgttgagtatgaacacgtaattcccacatacgctgatgcaaaggaacactctccaaatgcaatagcactactttgtcccacttgccatgctaaagtaactaaacgtctttactcaaaagagaaaataatcaaagcaatggaatctcctgcagccttacaaaaaggaaaggttgctgatatattggatttttctgataggcatccaacaataatatttggtggtgcgacttttgaatcctgtactgtaccgataatgtttaaaaatgagccattgttaactattgaaaaagagaataatgcctttcttatttcgggtagattttacgatagtcaaggtgttgttaatcttgaattagttaagaatgagtggatttctagtgcaaaacattgggatgttcaggtcgtggggccaagaataactattatagaaaaaaagaaaggtcctcgtttaattattaaagttgatgcacctgagagattgattgtggaaagattagatatgttggttaaggggacaaggattgtaggagatgaacacaagctaagagtaggtccacatcaatttcacaactgtggggcttcaaattgcaatattggtttctgcttcgactaa

SEQ ID NO: 158385 - DNA, 234 bp, Enterobacter cloacae
atgcgcattgaaataatgatcgataaagagcagaaaataagcccggcaacacaggaagcccttgaatccgagctttaccgaaatttgtgccctcactatctaaaaacggcagttcgtatccgcaatggcagcgccaacggcgttgagcagagcgggttaaaactggatgaagacaaaaagcgagtgatggaaattatgcagaaggtctgggaagacgacaactggttacattaa

SEQ ID NO: 158386 - DNA, 408 bp, Enterobacter cloacae
atgaaactaaagcaactcgtagtatgcgagatagtcgacttttttgcaggtttaggccaccccggagaaccggaaacacctgaagaaatgcagcgtcaattactggcgcgtattgagggggttttcacttttcagagtgcgcagccttggacaatgcttgttacccctgattttccggctgttcctcctgggcgtgagatggtgggtggttacaactggctcgactggaatcagcttagtgcgttagggctaatttttcgccttaaccatgaaattctgcatccgatgggcctggctattttccgcgatccagatactggtgtatcagagggggcgctggttgctcctgacgatgttttcacctacccgcaatatatgatcgacgaagtatataaggggcaggcatga

SEQ ID NO: 158387 - DNA, 330 bp, Enterobacter cloacae
atgccctggactgagacccgacctatgcaacgccttgattttatccgtgcctgccatgcaggtacggagtctttttcagccctctgccgtctcttcggcatcagccgaaaaaccggttacaaatggcttgaacgttttgacccttctgacctgtcatctctctctgaccgctcgcgtgctccgcactcccactcccggacggttcctgatgctgtcgccggacagcttacggctctgaggcaaaaacatcctgactggggtcccaaaaaactgaggatgtggctcctcaaccatcatgtcgattttaccgtaccggctgccagcacctga

SEQ ID NO: 158388 - DNA, 336 bp, Enterobacter cloacae
gtggaaggggaggcccgtgaaaatgagaacgccctgaccctggcctgtctgctgcacccgacgcctgcgctgagcggtttcccgcatcaggcggcaaaagagctgattgccgggctggagccgttcgaccgcgaactgtttggcggcatcgttggctggtgtgacagcgaaggcaacggcgagtgggtggtgaccatccgctgcgcgcgtttgcttaaaaatcgcgttcgcctgtttgccggtgcgggcattgtgccagcctcctccccggtgggcgagtggcgcgaaaccggggtgaagctctccaccatgctcaacgtttttggtttgcactga

SEQ ID NO: 158389 - DNA, 456 bp, Enterobacter cloacae
atggaactcaacatcactactggttttaaaatctttgaaaaacactacaaccgtattgctgaatctctcggtgtaagtaatgcattagggcatgaacttgaaagtttcattgcttttcgcgctctaactcttttaaaactggatctattgttaattaatcaccgaaactcaattgatcaagaacgcctgttcttatttggtaaaaacactctccatcattatttattcaccaaaaagggcatacccttttcagaagcaaaaaaattaagcctccaagattctttattaattcttcttcaagaagtctcaactcattcagtaccaactgaactactgaaccttcttaaaaatgaatttaacttttcatcaaataacattaagtatgttaaagatgaatttcgtgtattcaaggattcagattgggatttcgaacctgccgatacacgattgaattaa

SEQ ID NO: 158390 - DNA, 891 bp, Enterobacter cloacae
atgactgcctactacaacgaaatcgatcccttcgccgcgcaatggctgcgcaacctgatcgacgctgggcacatcgccccgggcgtcgttgacgatcgctcaattgaggaagtaaccgcaaatgaccttaaaggattcacgcaatgccacttctttgccgggatcggcgtgtggtcttacgccctgcgccgcgcaggatggcccgatgatcgccccgtctggacaggttcatgcccctgccagcctttcagcgcctgcggaaagcgacagggatttgacgatccccgccatcattggccctcatgggttcaccttattaaggagtgcgcgcctcacgttgtgtttggggaacaggttgcaagcaaagacggcctcgcatggctcgacactgtacaagctgatctggaaaacgcggattatgccttcgcaggtttcgatctctgcgctgcgggcttcggtgcgccgcacatcaggcagcgtcttttctgggtggccgactccgacagcgagatcgggaacggggccggggaatcaaggccggcagggcggattgaatttgcaaacggcagcggtattagctgggtggccgactccaacggcgacggacgggaagggcggttatctgggtggcaggattcgcaacgggaaattgtcaacagaccgattggatgtgacggcgcaaatagcggggccagggaggttaacggcttctggggatctgctgactggattttctgccgcgatgaaaagtggaggccagttaaatccggacttaagccgctggttgatggggttgccggacgagtgggccagttgcgcgcctacggaaacgcaatcgttgcgccggtcgcagaagcgttcataagtgcttatctggaaagtgtgcaatga

SEQ ID NO: 158391 - DNA, 468 bp, Enterobacter cloacae
atggatgagattcagtttaattactttgatattgagcacgccatagcagtacatgatcacatcattgaacgctctggcggtttacaaggcattcgcgatcgaggagtactggagagtgtcctcgatcatatccaaaatgattggtactacccaagctttgagtcaaaactcacacatttgtttttttcagtgaacaaacttcacgcttttactgatggcaataaaagatccggaatatttctctccgcattctttcttgaaatcaatgggtttgagcattgtgtaaagctctttgtccaggaaatggagaacattgctgtttgggttgcggatggcgctgtcagcaaggatttactacaacagattattcatgatttggttctatgtgaggaattattagaaagcactaagctggaactagcaatggcgataatggatcatcaaaataacattcatgaaggcgattaa

SEQ ID NO: 158392 - DNA, 1014 bp, Enterobacter cloacae
atggctaaggatctgacaacctctgctcacgacagacaaaatattctcaataattcgtatgcactcaagcacgccgaaaagcatcttgctctgggcgggatcgaatttgatggcgagatagtgtttaccaaaaatcaattggttgagatttttgatgttagcgatgcaacgatagaaaggtacctaaccagcaacattgatgaattaaagaacaacggatacatcattctaaaagggaaaattttaaaggaattcaaagaggtggcagatggtaccctcatgaatgagggtaccaaaacgtctgttcttggagtgtttaaatttcgagccgtgttaaaccttgccatgttgcttgttgaaagtgagcaagcgaggatcattcgaacacgtttacttgatatcgttatcgacacactggcagaacgcgctggcggacatacaaaatttatcaaccaaagagatgaagattatcttgttgcggcattcaaggaagaaagctatcggaaacagttcaccgatgctctcaatgattatgtagatgccaatggttggaagtttggaaaactcaccaatgcgatttatcagagcattttccatgagaatgcaaatgagtaccgcaaggtgctgaaactacatcaaaacgataaaattcgtgacacgatgtattctgaggttcttaccttaattgctagtttcgaagctggcctcgctcacgagataaaacaaaaagccacccacctgggcagaaaactcacatataaagaagcagaatccatcttatcaacaatggaaaagcatcccttatacgagccaatgctggttgatgttcgcaccaaaatggcgagcagggatctatgcttccgtgatgccttgcatgaaaaacttgaggcttatgtccgatcggtaccagaaggcgactttgagagattcttaggcgagaaaagcaagtcactcgaagagagactcaatgaccctgaaactcttgaagtgtttaaacgcttaaaagatcgctaa

SEQ ID NO: 158393 - DNA, 375 bp, Enterobacter cloacae
atgctgcaaaattccgcgcagaactgcacaaattttatgatggtgatttttcaggagcagaccagacggggcgggccttccggtggtctgcacatttgcacaaaaaagcggggtttctgcgtgcgggcgaggcgggggaatgagcgcgcgctgaggggtgggatagggtcggtattatctgcgccgattttcgcgccgctgcacctcgctgctgcgtcgttttcggttcgtcgtggtggtttgaggcaaaagaaaagcccctgccagcgggctgctgaggggcttacgtgcagtgtggtcagttgcggccgtgctggccgttccacggtggtggtgggtgtgtccgggctggcgtcagatcgctgcctgcaatag

SEQ ID NO: 158394 - DNA, 534 bp, Enterobacter cloacae
atggggctgttgtcacgctggaaagtgatcgtttgttttgtgctggccgctgcttctgtatggggttttagccactggcgttacagcgccggttacggtgatgccgatcagcactggcgtgaaaagtgggcgcaacgtgatgcacgcgacgccaccgcgctggcgcaaaggcaggctgaggccagggcagaagaacaacgccgacaaggtgaaattgatgcgatcagaaaacaaaccagccagcagcttgctggcgtgcaggctgctgccgatcgtgccagtgctgcttctcgtgggctgcacgccaaagccgacgaactcgccaggcaactggcagaccgtgaacgcgcctgcggtgccggagcttccggcagaagcgaggcaaaagccagcggtgccgcattgcttgccgacctgtttaagcgggctgacgagcgagcgggggaactggcaagagaagctgatgaagcaagagccagaggattagcctgtgaggctgcgtatggtgcggttaattccggggggaataagtaa

SEQ ID NO: 158395 - DNA, 597 bp, Enterobacter cloacae
atggttaaagcaaaaatgaatggtgagcagatcgctacttcggcaggcgatgtaaccgtatttaactatgatggcgagacgcgcgaatatctttcctcatccgttgaatatttgcccgagggcgtaggtatccccgctaactcttgtatggatgcacccggcgaaagcaaagagggttttgctatttgccgtaacgccgattttaccgcctgggaatacgtcgccgatcatcgtggtgaaacggtatacagtaccgaaacaggcgaatccgtgatcgtttctttgcctggcgattacccggtaggcaccaccaccgtggcacctgccacatcttacgatacgtggaacggtagcgagtgggtcacggatacagaagcgcagcacgcggcggacgtggaagcggcggagcaacagaaagctgcgctactgcttgaggcgcaggcaacgatcagtctctggcagacggagctacagttagggattatcagcgatgaagataaagccagcctgatcgcctggatgaactacatcaaagccgtgcaggcggtggacacctcgaaagcgccggatattacctggccggataagccggaataa

SEQ ID NO: 158396 - DNA, 333 bp, Enterobacter cloacae
atggcattagtaaactgcccggaatgcagtaaagaaattagtgattcagcgtttaaatgcccgtcttgcggccatcaggtcagaaagccgaagcgctcattttttggcaagatcgttaagtggatatttatcctgtttaacatctttatgatctattgcatttttgccggggctggcggcagtagtgacgttatcaataacgcagcctcagacgcagaacgggccggagccgcaatcggtacggggctggggatgatgatgctgggaaccatctgggttattggcgatatcattatcggaatgtttgttttctttactcgcccgaaatcatga

SEQ ID NO: 158397 - DNA, 633 bp, Enterobacter cloacae
atgaaaaagataatcattgctatggcgctttgctcttctgctgtatcaacagcgtatgcggtagaaccagttaaagccgatattaacaatgacgcattaatgaaatgccaatccgaggcaaaaagtgatgcgcgtttagcttgttacgataatgttcttccaccgaaagtagccgaagaggctaagccagtagtaggtgttggaaaatggcaggtatccacgaaaacttcacccgtggatgattcagagaatgtttatgttagcctttctgctaatgattctttccggtcgcagtttggggaatcgatcacaccaagtctttacatcacttgccgcgagaaaaaaacagaacttttcctcaattgggatacctatcttgggttgaacgaaacacagatgttatctcgcttggataaacagaaggcaaaaacgaaaacatgggacatatctagcgataccaaatcggtattttatcgtggcaatgtcatcgagttcgtcaaggcgctgagccaggctaactcaatgtttactcagatcacgccttacaatgaaagtcccgtgagtgcgacatttgatgttgctggtctgtcagaggcattgaagccacttcaaaaagcgtgtggatggaagtaa

SEQ ID NO: 158398 - DNA, 318 bp, Enterobacter cloacae
atgaaaaacaaaacgttaaaccgcagcctgctcgccgcactggtggtcagcagcctcttatcccctgccgttatggctgcctgtcacggcaccgacctcaaccagtgccctgcaccgtttgacgcaacccttcccgacacgcacagcatgctcacctggagtcaggcggatcgcgtggtgggctttcgtaacgactaccgcaactacgcgggcgatgttttccgccacggaaaagccacaccgctgctggcagcagagaaaccgcttaccgacgcccgctatcaggttaatggcaagacctataccctccaggattaa

SEQ ID NO: 158399 - DNA, 552 bp, Enterobacter cloacae
atgcgtattaagggattatctcttatcttctgtgccgtttgcgtcggttgtagtgggtactcgcagcggcaagagcatttagatgttccgacctactcggagagctacgatcaagccctggggtggttagtgactgctcgttatcgggatgcagaaaatgcagaaatcgttatgtcattggttggagacttttgcagaagcaaagggaaagaagcgactctctataagactactgctggcagcacaaccacgactcaagaagtttgggcttgtcagacacccccgcagttaaatgataccgacatacttagcggggcttattgccatttcattgctaacgcgcctcgctactctgttgatttttcaaaccatcagaaagaagttgcagaacaaacctttgctaaagcctttgtagcaaaagggatcgaatatccggttggcggtttttacgagaagtatcagagtaactttgcaacctgggctgtagccaaacatggcgaaagcagcagcaccgataaggtgcgccagtggtttgataagcactgccagtag

SEQ ID NO: 158400 - DNA, 573 bp, Enterobacter cloacae
atggttgacgcatcagttcaaccacatgttgttgtgactcttgaaccaaactcttgggctgtttattactttgacattaatatcgctaatactggaaatgcaccagcctatgatattgcggtcgaatttgatccccctctcgttaatgcagaacatagaaaaaatagaggcgtaccatttagcaaggtaagcgtattaaaaaacggacactctctcaacagcaacctctgcgagtatgagcaaattaaggatcaaatttattctattaatgtcagctggtcaaaacagcccggttctacagaaagagaatgcaatgaatattcttatgatatggcttctttcgagggagttagctatttaggagcaaggagtccaatgacacaaattgccgagcaagtgaaaaaaatcagagaggactggaggccgatatcccaaggagccaagaaagtaagagcagacgtatatacttcaagcgatagaaacgaagaacgcaagtatatgcaagagcaacacgacttggcaataaaaaggcggaatgagaaaagagctaaaagattagagtctggtgaataa

SEQ ID NO: 158401 - DNA, 825 bp, Enterobacter cloacae
atgataaagccattttctgtgaggtatggtcatgtgaatgttagagagtatgtccagctgaatgatctcaattctgatacacgcatagcattgtggaactgcttatatcttttcttttggactaacaatcgtcaaactggtttagcaacaaaatgtgcgcagtctgtgtggatatattatttaaaccaacctgctgataatattcctcgatatgatggtggatacaaaagtgataagacgttgctgaacgctatccgagattatatatatggagaagagtggtatttggtatatgatttaatcgagttcatcattgaaagaactaattcatatattgatctgtcgaagcatctcaattccgtctttagaaagcatggtgtcggatacacgttaataaatggttgtattactcctatttcaaatgatgatgaaattgaaactgttcagaatgcagttgataatggcactgattcatcgcgtagccatttcgaaagagcgttgcaactaatgacggatagagagcagccagactacagaaactctattaaagagtctatctctgcaattgaatcattatgcagaaaaatcacgggtaatgataaagggactttgggggcttgtcttaaaactatagaggaaaaaggatatatacattctgcaatgaaaggcgcttttagtcagctctatggttatacaagtgatcagggtggaatacgtcatgcgctaacggaagaagacgtcaatcctaccttagccgaagctaaatttatgttagtcacttgcagtgcgttcagtaattatctgctgtcaaaaataagtgattaa

SEQ ID NO: 158402 - DNA, 210 bp, Enterobacter cloacae
atggatagcaagaaaaatgagaccactttatctccctctgattccgataatgctctggagtcattttttcgtgacgtaggtatgaccaaacctcagaatgcagaaatcacagcaatcattcatccagacaccggaaggattgatgcagtaatggttgccaggaaaggcgttaccgaaaaacttaagctccctctgggttcaatacattga

SEQ ID NO: 158403 - DNA, 600 bp, Enterobacter cloacae
atgactacttcaatctctcccgagctccccgaagtgaaagtgtgcgataaccgcgcgatcactacatctgttgctgtcgccaactacttccaaaaacgacatgacaatgtcatggaaaaaatcagaacagtgatttcagagtgtgacccagaatggcgtctcctgaattttaaggagacgcactatgagcgggaaaatcctaacggcggagctggaatctctgctcccgcattcgaaatgacccgtgatgctttctctctaatcgtcatgggattcaccggcaaaaaagcactccagtggaagatcaattacattaaagcttttaaccagatggaagctgagctgcataagagagtcccaactgcttcacggcaaaataattacgctgtaatcacctacttcgaaaacggcctgcccgtggcctgccaccctcttatgcctagtgaagtagttatgaacccagattcatgcctggaacatgtgatccgctccggctatgtggtgatgccgtgcgatgaagcagaaaaattcacactcggtgagatacagaaaatgatcgccatcgcacggcgtgcccgtgatcggtggatgcaaccttaa

SEQ ID NO: 158404 - DNA, 1080 bp, Enterobacter cloacae
atgactgataccccacctaacagactcgattcattgcataccatgcgtggcttggctgcaattactgtgatgtttttccattttagctggattttagattcagcgtatggtgggctaggaaataatttaatgaaatatggataccttggtgtagatatttttttcatcatcagtggttttgtcatatccatgtcttctagcaaggcaagctcaaacctaaatggttgtttttcctttatgaaacatcgtttaatgcgactatttcctgcatattatttttggttgcttgttgcattcttaacaggtggagcaatgagtacattccattatccagacaaagttgataatttaattagcgcattcacaatgacgccagttacatcacagaatggaccactttatttaaataatgaaagcatgtacggcgttagatggtctttaatatatgaaatgtatttctacttattagttaccttttcattgtttgttaaaaacagagcctttgctttgagcctaatcatcacagcaatggttttggttgttccagtagtggctggactatccccgactttaaatgatgcgggaattgagtcaggcaataaatttcttaacatggcaaccaaccccatcattctcttattcctgtatggtgttactttccaaaaaggatatcgccatgccatgcaactccctgcaatactcaggagaactttaggattatgtcttttaataacctctatagtttgcatccagtttgcacaaaacgtaactcatagcccaatatcaggtgggttgtatatgttatttatttttattgcagcaactataaatgaagacctttttaaaaacaaaaccccaaaattaattttatttttcggtgacatttcatactctctttatctgatacacacgttaatgaattcaggtcttgacaaacgttttactgaaataggactccctaatgggtggtttaaatttgctttgtattgcttaatttcaattcttcttgcttgtgcttcatatacttttatcgaaaaaccatttttcaaaaaaaacactaagcgggccgtgttggaataa

SEQ ID NO: 158405 - DNA, 474 bp, Enterobacter cloacae
atggtcatttataataaagatactaatcaatattcaatcagtggcaataataattatgcatggtcagcctcaaaaaatgtattctatcttattgcagacttacttgaatatataaaggcagggaattggccggatgatgctattgaggtatctgataaagtgtttaacgagtttgctgctttccagaatggcgcaggaatgatcagaggtgtcggcagtgatggcctacctgcatgggtggtgccaccagagccgtcaaaggaattattgatacgaaatgcggaagcttatcgtaacactcttatcgcaaaagccagtcttgaaattgagatattgatggatgcagaaactgaaggatcaattactgatagtgaaaaagaattgctggcgagttggaaaagttaccgcctttccttgcgtcgacttgatttaactacagcaccggacatcgattggccaggcgcccctgcctga

SEQ ID NO: 158406 - DNA, 1272 bp, Enterobacter cloacae
atgcatcgaattgatacacccactgctcaggccgataaatttggtcagggcaaaaatggttttacaaatggcgacccggccaccggccgccgtgcaacggacctgaacagcgatatgtgggatgccgttcaggaggagatctgcacagctatagagtcagcagggttgacactggataaaacaaagcatgatcagctgtatcaggcgatcgttaaaattattatgtcaaagatccctgatgcactgctgagaaataacaatttatccgatgtggtggataaagtgcttgcacgtgctaatttggagctcgggtcagccgcaacaaaaaatgttggaaccggcaatggtaacgtacttcaacagggggcatggggggtcggtacatccgttcaggaaagtgcatcaggaggtacacacgtcagcaggtttatgtatgaaccttttcagtctggcgtgttatatccggatagcgtctgcattattcagagtggggggccaacaccaaccgagtgggggcaaattgcggtaagctatggcgcaaattttagagtatttgcaggtcacggtacttataacggcgcacctgaaataacggagctttatcatgataaaaggaaaccaacatcaagtgatgtaggggcttaccctttaacggggggcactcttaatggcaatatgtccgctacgggaagtgttacatctggcgccgggaaagatatttcatcagctcaggatgtatgggctgggcgagatatctatgcgcaacgaaatttaatcgtgacctctattgcatcggttggctctgatctgactgtcggaggaaacgtgggtgtaacagggaatgtggatgccggtggctatgtccgttcgggtgctggtaaggatgtggtatcgcaaaatgacatctgggcttctcgcaatatttatgaaaatggtcagcgcgtttacagccccaataatccgccaccaaataaattcagcaaatcgctgaatacgatttcatgggaaaaaaatcttgaaactggtgtgattagacagtggggatatgttgctgttagcgataatgattttgtcagtgtaaatctacctatagcgtttccttcttccttcctgtcccttaacgttactccaagtgcatcaggaaggattgcaggtgaggatgttctatctgcacatgggagcatcaacagtaatacttcatttggtgttggactctctgctaattttcagggcgcttatacgggtgtgtacttcgaggcaataggagtttaa

SEQ ID NO: 158407 - DNA, 540 bp, Enterobacter cloacae
atgcaaacttttttttgcatcgccagcggaccctcactgacagagagcgatagcaagcaggttaccgaaactaattatccagttatatcagttaactctagctggatggcagttcctggatgtcagcacatttacgcagcagactgctgctggtgggaagaatacggcgcagggataacatcagaggcttcccggtggtgtggcgatgaattcacggcccggcgattcgggatcaactggctaccgtctgcaatcccaggctcgtttaattctggtcagcgcgccattgagctggcgatccaccttggagcaagccgcgttttgttgctgggctatgactgctcaatacgtaacggcacccactggcacggcaaccatgctctgttgtccaatccggacaaattcagcgtagcgcgctggcaggatgaattttcacgcctccgcactattgctggtggtgtcgagataattaactgttcccgctttacgcggcttacctgcttcccccgacagtctctcgagactgcactttctctgtag

SEQ ID NO: 158408 - DNA, 885 bp, Enterobacter cloacae
atggaaagaggtgttgtttttacttcatgtgaacttttaagcattgaaggggggcgtggatttcaaacagggagagcaatatctcctgaagagctaaattatctcacgctgtactgggataagttagtttctccaacaaataacttcattcatcttggattaattaacgaagatgaattaattaagtgtggcgtactaactcgattaagatttgttgagcacggattcatggacggtacgagaatgacaaactttcatgctcgtacacatatagacgctctgaatttactgaaaaaaaacgaagccgatgtcgattggcgcatgcatttttttaataatgaagttgccattcacaaagataaagcagatcgaaaagaagtgctgagatttgaattggcagatctgttaccagtgccacccaaagacatacctttgcatgagatcttagagttcaaagagagaagaaaggatgagcttctctcgcttcacggctatttagatgagctttatttcgaggttttaaagtcaggggattttgatttacagagagcaaaagcaatatcgggactgagaacttcattagatgcattaaacagactaaataatgaaggctggagaagtccgataaaatttaatctttcaaggtcattcgagtttgacttgagtcaggtggtgagtgctggttctgctgtctacgctgcgatgaattcctcacaaccatttgaggttttttgtgctggagcagcaataaccgttttaagtgggtttattaaagttagaccacaacttcaaaatgttataaaagatggtgatgcaaatttggcatacctaacgaatgcagcaagagagggtgttataaaaaataacgataatgcatctatttga

SEQ ID NO: 158409 - DNA, 369 bp, Enterobacter cloacae
atgatgggatatgcgattggcagcttcttcggaatgatgatgatctcaaccgcctatgcgttcatatactcaaggactggcaaagctttatctctgaagataactcaagcatggactcataggccagcgcgattcattattcttttgatattcgcaattcaaataatcacttgtttgatcatgcatgtcataagttggtatttgctttaccagggtgccacattcgagccttacacaagcgattacggatacagctacgatggtgagaactacatctcaaccgcttggattttctttggcgcttcgatggcaatttgtctaattgctgatatccttaaaggcattttcgtccttaccttcgcagactag

SEQ ID NO: 158410 - DNA, 477 bp, Enterobacter cloacae
atgaccaggcacgacattatctttgatataaattattcccattacatggagaaaatgttctgcaccataaccagcagaatcgacaaattaatatcagtgatattgatgatgcttggctgtgccgtctttgcaccctttagtagtaacttcatttttggcgcgtttattgccgcgctttcagcaattcaatttacgtatcagttcggcaagcaatctggtttagcgcaggaacagtcaaaaaaataccttgaactcatgacagaggctgcaagatatgatgacaacgaactgctcaaccggctgaatgaccttcaaaaaaacgactgctctgtgtggagcgtgtttgagtcagctgctcataaaaaggctactatcaagcttgggcttgaagactcgacatccccactgagctttacagaaaagctttttgctttttttgctggtggcttgccaaaagaacaaaaggtaactcagtga

SEQ ID NO: 158411 - DNA, 258 bp, Enterobacter cloacae
atgagccaaaatattaaagatgttaaatttgagtggaaagaaatattcaagacagacatggagattgcttatcgtgtgacgtgcaaaatttcgggtgacgacggcaggactgtagagactaatgaaatattgaagctaaataaattagctcctatttttctttctcaagagaactctccctcattgtcgaaaagtgccgaagcttctgcatataaaagcgctgtcgaattgtttaaggcatctggaaacgtgcagtaa

SEQ ID NO: 158412 - DNA, 321 bp, Enterobacter cloacae
atgagcaaaatattatcaacggcaattagcctggccattatcgggtgtcttcttttcggtaatcagcaggcacaacagtttgcctattactcgtacctggttatttctgttttggcttggattggggttttctgcggaggcctgacctatgagttcgtcattgaggaaatgaaatggctgtggctaagcattcctctatccgtaatgacaatctatgccctcatcgttactgaccatacggcattagcggcctccactctcgtctacgctctgttttttgctggagctgcgaaaaacaaacccaaacgaaacccactatga

SEQ ID NO: 158413 - DNA, 660 bp, Enterobacter cloacae
atgcgcgtgaaatttgatgttggggaaaaggtgggcatgctcacgctaattgagtctttccccaaagatgaaaaaggggtttataagggtaaattttcctgtgcttgcggtagcactaaaattattcgcctttctttcgttaaaagtggtcacacaaaatcatgtggctgcttaaagattgaagcaaaaaggactcacggaatgtcgagttcttcagaatataggatttgggagttgatgttacatagatgcgaaaaccctaaagataagagatacaaggattatggcgggagaggaataactgtctgtcatcaatggcatgacttcagctcgttttacgctgatatgggcgctcgtcctgatggccttacgctggatcgcatcgataatgacaaggggtattcaccggaaaattgtcgttgggccacgccatccgaacagcagttgaacagaaggaaattgaagggaagtaaatctcgatttgttggtgtaactcaacgtccatcaggcaggtggtccgcaaggataactgtcaattacaaagacatttatcttggtgattacgatacagaagaagctgcttccgaggcctaccagaaagcaaaggaaaaggttcttgaagagtttgagctaatgcgcaagcagagggggaaccaatga

SEQ ID NO: 158414 - DNA, 711 bp, Enterobacter cloacae
atgaaagagcgcggaatgatttttaacggcgagatggtgcgcgccatcctcgacggccggaagacgcagacgcggcgcatcatgaaggttcagccgtccgatggcttccacccaacgcataacggttacgatctggatttaaacgcccactggtacacgcctggcgtggtcgataaaaacggatacctgcagcctgcaaagaaagatgtgtttggcgttgcagatgagaatgaaggctacacctgccctttcggtgccgtcggcgatcgcatctgggtgcgcgaaacgtgggctgaagctggtgctggggcgccggacctgaaactttatcgtgcgaattaccctgagcacgttccaactcattacgagaatgtgccaccggctgatgaaatacgctggacgccttcgattcacatgccgcgctgggccagtcgcattctgctggaaattaccggcatgcgggttgagcgattgaatggcatcagcgaaacggacgcagaggcggaaggcatcgacatggaggcgctttttgacgcccaggactgttacgactgcattgcagaccacaacatgacaggaaggccaacggcaacaggcgcatttaagtacctgtgggaatccatctacggcgaagagagttggaaatccaacccctgggtctgggtaatcgaatttaaggtggtgcccaatgttcaggataatccagcctaa

SEQ ID NO: 158415 - DNA, 804 bp, Enterobacter cloacae
atgtatcagggtaaaaaaattggtgtggggattgtcacttataatcgtaaggaaggcttacttaagctctttaactctcttccacgcgaatacatcgatgaactggttatcgtcaatgatggtgaacattttgatgagtattcagcgttggaatgtcactatattcttaatgatgaaaatgccggtgtagggatcagcaagaaccgagcattatcgtacctgcgtgaaagagacgtggatcattattttcttatagaagatgacgtgtttgtaaaacatagcgacgtcttttttcgatatattgaactgtcgcgtctgacgggcgtgcaacattttaactttagtcagcacggtaaacaaaatgttgatgaacatggacatccgcgtgtacggatgcgttgtgattacggtgctgaaaaactctttatgtttcccttctgcgtgggagcgttcagctactacactgctctggtgattgagactgtcggtttgatggacgaacgcttctataatgctatggaacatgttgagcataccatcgcgattattaacgccggtatgcatcccccgttcggttattttgctgatatcgcggattcgcaagaatatattggcgatgaaggctggagtcttacacaatcaacgatttcaggtgagttaaattatcgtgcaattctaactgttgcccttcagtattttaaccagaaacatggttacctgcccgcagacattccatttgaaaatgcaaacaaaacgaccaaaatactagaaaaaatacatggcagatatggtgcgaaaaactag

SEQ ID NO: 158416 - DNA, 3639 bp, Enterobacter cloacae
atgcgaaaaattttactaaccattgacagactcgagcattacggtcaacacgagagtattttttttgatctggttgaatattttcatcgtcacggctggcaggttgatattgttgctagagctttggggcggtactggcaaaatagccttaattttattagtgaaaataaaaccattcgttttttggagcagagtcaggttagcctgcacgacgcctacgatctgatgtggatatttaatggttatattcccacctcgctaaataccgcctttatgcaagggaagtttgtcgccacagtcttttttcatcatttctatagctatgctgattatgatttaccctacggttgtgaggtagagaatgcgctatcaagcatcagtctggcctgttccactaccagttatgttcgtttagttgagaaagggattagacaatcacgattaaaagtattcccgctcacgattaacaatcactttgcttcaacaaaggtcaagttatctggtaagcttgaaaaaatcctgcttatttcttccggatataataataatttattagatcaaattgaggcattcagcagaaaaaaaatcaaactggattactacaatttggattctatgcctagccccgtaacgccagaattactctcacaataccagctggtgattggcgatgaaggccgcgtggtgctggccatgagtatggggttaccggtagtgatttcggacggcatctcctctcatggttatttgactgaaagtaatttgctcgaacgcagcgattaccattttggcctgacgggtgcaaaaaagatcacgaatcaacatcgctgggcacaagagatcgttgagggctactgccaggcagccctctgggcgcgggaatttcgtgccgaggcaatctcacaattttctctggacactattgtcggcaaaattcttgaccgagcccccgcaccaaaaaaattgcaaattaccgaagagcagggacgtcgcctcgaatttcaccgcaaagtcatggaaagtctcggcgaagaaaaaacgcgttcggtcagtagctggctgaaagacagaaagcctgaccagttgcgttccgcaattgttgcgactttgcttcaatccttccctgaatgtgccagcattgcagccattgttatcgatcgtgtgggagcacagaataagctgcgcatgacactcgattcgctagagaagcaaatactcagagcagagtctgtatgtatcattgggataaccgcaacggagctaaatctggcggtagaagggattacgtcagcgaaggtattgataattgatgcgggcgatacccttgaagagcatgcgttgctcacctttgccgagtttgcgatgcgggaaccgcagaaagaattctggtattttgatgaactgatcgtcagagacaataaagaagatggcttaatcctaaagccaaaatgcgatattgatatgctgcgtgcgcatccgtatatcggttcgagtgtgattattgctaccgaggcgatacgtcgacacaaaggatttgatacagcctttccgacactgggccatatcgatttatgttggaaactcatagaagaaaaaggacctgccgttatcgggcatatcccggaggcgctgattgccagagctgtgaacatgagtgaatggtgccaggaaccggccatcaggctggagatcaagagcatcactgaagggcatttataccgctgtggcattctggcagagatcaaatctattgaaaatgacggtatccagaaggtggagtatgcgttacctgttgccgcgaaagtgtcggtaattattccaaccaaagatcgtttcgttctattacaacgctgcatcgattcgctgatggagaaaacgtattaccgtcagtatgaaatcattattatcgataatggttcaacggataaagatgcaagaatttacctggaccagcttgaggcattacagcttgcacagatcaaagtgctacactgggatgctgactttaactttgccgccatcaacaactacgcgagccgtcatgcaacaggggactacctgttgtttatgaataacgatatcgaaatcgtcgacggtaactggatgggggcactgcttgaacatgcgcagcgtccggaggtcgcgattgtcggcagcaaactggagtatccggacgggactctcgaacatggtggctacattaccggcgttaacgacggtgtgatcgttggcgggaaaggcagccaggcgggcgagagcggtttcctgagttgtctgaaaatccctcgcggcgctcatgccgtcagcgcagcttgcatgatgatgcgaaaggcggtgtttgatgaactcggtggtttcgatgaagttcatttccccatttattacgccgatgttgatctggccttaaacgcgaaagcgcaggggtatcttaccctctggacgcctttcagtacggtaaaacacatgggaggtgccacacgcctgttcccggaaaaattcgcagtggtcgcacatgcggatgactcatgccatgacgcgcttttgggtaaatggggggcggaactggcgcgcgatccttattacaacccgaatatgaaccgtctcggctcagcgtttagcctgaatacccgcatgtcgcgtttacctcatgtgttgccaggcaaaccgttgccggtagttatgggctcgcacgttaactggacaggctgcggtaattatcgcgtcatcaagccttttcgagctttacagcaggaactgaaggccgatggtggattgattctcggtttgccaacggtgatggaagtggcacaattccagcccgatcgtttaatactggaagtaccgatcgccgacgatattccccagacggtgaggcgctatcgccaggtttgtgatgccaaaataatcatggaatttgatgattactacattaatgtcccggagaaaaacattttcaggagcaatataccaaaagatatccagaaccgattgagtgcgggtatggcgctggctgactgggttgttgtatctacagagcctctggcagaagcgtactctcgtttccattcggatattcgcgtagcgaaaaataggctggatatggatctgtggggacatcttaagtccacgaaacggcgaggggaaaaaccacgtgtgggctgggctggcgggtcgagccataccggcgatcttgaaatactattgccgctcattcgtgaattacaaaacgaagtggaatgggtgtttatgggcatgaaaccagtaggggtgacatgcgagttccatttgcctgtgccatttgaacattacccgcaaaaactgagtgaattggatctcgacctggcgttagttccgctggagattaatctgttcaacgaatgtaaaagcaatttgcgtttgctggaacttggcagttgtggggttcctattatctgtacagatattgaaccttaccgttgcggcttgcctgtgcagcgggtgaaaaatacgcctgaagcatggattgctgccgttcgtgaacacatttatgccggcgatgcgcttgagcgtgccggagatgcgttacgcagcgccgtacatcgcgattggatgctaaaagatagcggcctggatgactggcagcgcgcttggttaggctaa

SEQ ID NO: 158417 - DNA, 1431 bp, Enterobacter cloacae
atggcaagtgcaacaattagtagcctgggcgtgggttctggtctggacctccaaaccctttacacaaatcttgaaaatgctgaaaatacaaagctaacaacgatcactaaccagcaaagctcatataacgcacaactgagcgcattcagtaaactgcaaagcgccatgcaaagcctgaatactgctacggcagcgctggcaaaagcggacacttggaatgcgacgtctgtaggctcaaccaacaattcctttactgccaccactacaacgggagccagcgtcaataattacaatattcgggttctctcgatggctaagtcacagatgttgacttcagccagtcaggccagcgcaacggcacaacttggtgagaccaccggcagcacacgtactattaccattgaacaaacaggggtcaataagccgcttactgttgagctttccgattctgatacatcgctcaatggtattgccagcgctattaataaagctaatggcaacatcactgccagcgttgttaaggcgaaagatggtgattacacactgatgctcacgtccaaaacgacgggcacagaaaatgatatgaccataaccgtgagcggtgatgatacgctgcaaggtatcattggctacgagtcatcaaccggttccggaggaatgacggagaaagttgcgtctacaaatgcgaaggtcgatataaatggtatcaccgtcgagcgttctactaacaccatcaccgatgcactgccaggcatcacactgagcctgaagtctgaaagcaccagtagcgaaaatctgatcatagatcgttctacagatgccacacaaaaggcgatcaccgactgggctaccgcttataactccctgcagtcaaccataacctctattaccaaatataccaaagttgaagcaggtgaggatcaatctgcaaacaatggcgcattacttggggacagcaccgtacgttctgtacaggcacagttacgtggattgttgaccgaggtacaatccggctcttacgcaattttggcacaattgggcgtcactcaggatcccactaagggtgcagatggcacgctgggtaatttgaaggttgacgccactaaactgaccaaagcactaagcgataatccagaaggggtgcaagcctactttatgggcgacggcaagacaaacggtctggcgacccagatgggtatcacactcaccaacatgctgagcacaacggcaggtaaagaaggaataatcaaaaatgctactgacggtattaacaccacgctcaaaacgttaagcaaacgttacgatgcgatggaagccagtatcgaagccaccatggcacgctataaggcacagtttaccagtctagatacgttagtcagtaaattaaacaacacggcaagttatctaacgcaacaatttagctccaagtag

SEQ ID NO: 158418 - DNA, 411 bp, Enterobacter cloacae
atgtactcacataatagcgcaagagcgtacgagcagattggactggagagtgcagtaatgagcgcaagtccccatcagcttgtgaccatgctttttgacggggcactgagtgcccttgttcgcgctcgcctctttcttgaggaggggcgcatcagtgaaaaaggggaagctttatccaaggcgatcaatattatcgacaatggcctgaaggcggggctaaatatggaagttgaaggtgatttgtctgctaatctctccgcgctatatgactacatggttaggaggttattacaggcaaatttgcataatgacccaaaagcgattgtcgaggtagaggatttaataaataacattgctgacgcatggaaacaaataggccctaatgccacctccttccaggatactttttga

SEQ ID NO: 158419 - DNA, 375 bp, Enterobacter cloacae
atgaataatcccagctcttcacttagcgcctggcaggcgctttatagactcagtatcaaaatgttaaagctcgcgcattcaggtctatgggatgagctaataaaacacgaaattgattacgttttactggttgaaacgatttcgaaacacccgattttaagcgactcaccctcccagattgagcaggcaaggtggtttctcgataacattctgaaaaatgagcgcgagcttaaggaattgcttgcagtccgcatggacgaactgcgcagcctcattgatcaaaccggtaaacagcaatccatcacatcaacctatggaaagctgtcagggaatattctttatccagaaagtttgacccgcgacacacaattatga

SEQ ID NO: 158420 - DNA, 363 bp, Enterobacter cloacae
atgcttaagttattctcgaagtacctaactgtaggcgtgctcaacaccgccatccactggcttgtatttgcagctggtgtctatatgttttcggttaaccaggctgccgccaacttcctagcattcgcggtcgctgtaacattttcgttcttcgcgaacgcagctttcaccttcaagtccaagccgaaagcaaagggatactttctattcgtgtcattcatgggtttgatgagcgttttagtaggcaagctttctgattactatcagatatcgccaattatcacacttgtcgagttctcgctcttaagccttgtttgcgggttcttttattcaagatatgtagtttttagggaagcaaaatga

SEQ ID NO: 158421 - DNA, 843 bp, Enterobacter cloacae
atggctaggggtaggcgtctcaaatcctatttggattatgaaaatgcgctaggtgacggcataggagtgggctatggccaaagttatcagccttggcttagagctcaggacgttaaatcccgtggaaaccgttcgatagtctttggccttaagacgtttcgaaaccatcatctcctttcttctgtcgaaagtaactttttctatctggctgagtttaatgactcggtgattgatatccgggaacaattcccactctttcctctccggcttacccaacaaatagcaaatcatctacattttcaacatcctatggtgaggggagtaagaggagtacctgtcgaagttctgaatgttatgacaaccgattttttactgaccttgagaactcctgaaggcggacttcgatacaaagctatagcagtaaaacataacgagagcatacctgaacgcgaagcccaaaaacttgaaatagagaggatgttttggcagttgattgatgttgagtttcaaatttatgttggctcggaactcaataacgtcgtcggtaaaaacatttgctgggctacttctgtattaagagatggttctgaattttatgataaatatcctcttgataaaatcctatggaagcttaaaccagatgtttatcccatagtagggctacgtgcaatgatttcatcaatctttggggtagatgcacaagaagcgatgatgttattgcaggcaatgattggattaaaaatgataaatgttgatttatcatatccaatactcgaaaccggtctgataaagataatttccaatgaccactatataggactgaacgcaaatggatattattag

SEQ ID NO: 158422 - DNA, 837 bp, Enterobacter cloacae; identical to SEQ ID NO: 118201

SEQ ID NO: 158423 - DNA, 642 bp, Enterobacter cloacae
atgggaattttcagggatctttctgtcgccagaaaactgtcgctggggtttggcgcactgctggtatttatagttgggctgtttctggttaaccagtataactacgccatgataaaaggctccatggcgcgtacggcaacggtgaatgagttatatgatatcaatttggccattatcgatgccggtaaggaatttctcgctgataacgatgctgccgcgtatcagaaaaaatataaggaacttcaggattccattaccgccatgcagaacacagtctcaccagaagatctgggggaggggcaacagctctgggaaaaggtagtacttcagcagcaaaaatatttttccgctcatgacgaggctgtatcaaagggcggaagtgctgcttccctgaatggcctgtcagaccagctgaaacccatgatggatgacattaacgtcgtcctgaatgatgaaatggagcgcctggctgccagtctggttcgtgacaatattatcttttccattgtggcgctgctggccattatcgcggggattggcatcatgatcatcattacccgcagtatcacccgcccgctggatgaggccatgaaggggatagaggctgccggcaacggagatatgacaaccgcgttccgttaa

SEQ ID NO: 158424 - DNA, 135 bp, Enterobacter cloacae
atggttagggacgatgtccagaatgagccccattcccgcctgcctgagtgccgccgtcatgcggtcgaaaccggcgcgcccgccaatggcaagatcgatttcgttaggatcggtgacgtcataaccgtgggttga

SEQ ID NO: 158425 - DNA, 186 bp, Enterobacter cloacae; identical to SEQ ID NO: 122330

SEQ ID NO: 158426 - DNA, 411 bp, Enterobacter cloacae
atggctaaggatttgaaagccctgaatagccagattaaggacgctgaaaaggctgtctcagaggttcaccaacgagagcaatcaagccagcttgagacaatcagccaccttgatttgactgtgaagaaagacaggatagaggctcaaatcatcatcaagcgcattgtgaaagaaatccgacttaacacggctggaaagaagtgtgatgtcttcttacacaatggcttaaagctgctgaatttcccattggatagggtggttgatggcgctcagtggctggaggttttaccgctgattgatggtgatgagttcgactttgaagggttcactaccaaaccgcgacacttagtcttagaagaggctccagagtgggtgaaagagattgaagcgcaacctaatcagccgctatga

SEQ ID NO: 158427 - DNA, 897 bp, Enterobacter cloacae
atgaactcccccgttttacaattgcaagcactagctgaagacccaaaaacagaaattctagctgtattgcttaaggcgaaatctatcgctgtaaaattgaatctgcttgatttaattacgtgggtcgagcatgaaatcaatggctatcccaataaatctgatgttcctgaatatcgtacagggcatggaattgttaaggggtttaattatgtccagggtagatatttgcctctcgatttaaacggtatgacagcagagatgatagacaagataactacctatactctctatgaatcaatatcatcaatggataagcaggataataaaggtgagatggtcaggctgcctcttaatccgcgtcaggttgaaatactgttaggtgcaggtaaggggggtatggagttatgctggttttttagttctaataaacttgagcatattgtcaccactgtgaggaataaaattcttgattggtctctggagttagagaagcaaaacatttttggtgaagacctgcgtttcaatcagcaagaaaaagaggtggctcctgtgacggttaaatatattttcaacgatgtgtttacaaataatggtgtgtttgctcatcaagttgagggtgacgtaaaccagcagaatacgataacatcaggcgatttctcatctctggctgaatatctcgaaaagttgggtgttgagaagtccgacatcagggagcttgaggaaattatatctgattcacctgttcctgaatcatctgaaaatttaggtgctggaattggtggttgggtgggtaatatgattggcaaggcttatgctggtggcttaaacatagctggtgctgcggctccggcaattcttacaaatgcaatttgccatttttttaacatacctgtttga

SEQ ID NO: 158428 - DNA, 144 bp, Enterobacter cloacae; identical to SEQ ID NO: 29645

SEQ ID NO: 158429 - DNA, 570 bp, Enterobacter cloacae
atgatgggtaacgcatggatctatcacaccggtaagacacctacagaagtagcatataaaaagcagcataaagatttctttgcatataacgataatgtcttgcgcgaaaaaatttttaccaattatcctaagcctttattattacaagccacaatatttaaaaaaagtgcatcgcaaattattggaggatgggacgtaaaacttgcgtgggatgattatcctatgtttgttaaactatttcagaaattttctttgtctaatggcgattattttttttatgacaacgttaatgttgcaaaatatcgacagcatgattcaaatgcatataagaatctgccaaaacagctatctatgattgagatggcaatgaaagaattggcgccatctgaactatacgatacagcaatttctcggcagtatgcattttatttacttttggcggtgaagtcccgggatttgaaatctgtacgtcatgttcttaatagcgttgtacgagaaaaagttcttttgatgacaatttataatctaggtgcagagataattcagtggtaccataggaagaaaaaatga

SEQ ID NO: 158430 - DNA, 1611 bp, Enterobacter cloacae
atgaccatcccttttacccgctggcctgaggagtttgcccgccgctaccgtgaaaaaggctactggcaggatcggccgctgacccacatcctgacggaccatgtggacagcgatgcggtcgcgataattgacggcgatcgccgcatcacctaccgcgcgtttaatcaggcggtgacgaatctggcgtctgcccttcaggcgcaggggctgcatcgcggcgagaccgcgctggtgcagctcggcaacgtggccgagttctacatcaccttcttcgcgctgctgcaaatcggcgtcgcgccggtcaacgcgctctttagccatcagcgcagcgaactcaacgcctacgcggagcagatcaaacccgccgtgctgattgccgatcgcgaccacgcgctgttcgcgggtgatgattttctcaatacctttgtggatgcgcatcgctcggtacgcgttgtgctgctacgcggcgataagggcgaacacgcgctggaggcggcgattgcgcgcccggcggacaatttcatcccaaacccgacgcccgccgacgaagtggcgttcttccagctctccggcggcagcaccggcacgccgaagctgatcccgcgtacgcataacgattacgactacagcatccgtcgcagcaacgaaatctgcggtatcactgcgcgcacccgctatctgaacgcgcttcccgcggcgcataactacgccatgagctcgccgggatcgttaggcgttttcacggcgggcggctgcgtggtgctggcgaacgatccgagcgccacgctctgcttcccgctgattgagcagcatcagataaacgtcacctcgctggtgccgcccgcggtcagcctgtggttgcaggcgattgccgacggcgcggggaacgcccagctgaaatccctggagctgctccaggtgggcggcgcacgcctctccgccacgcttgcggcgcgtattccggcggaaattggctgtcagcttcagcaggtgtttggcatggcggaagggctggtgaactacaccgccctcgacgatgccccggaacgcatcatcaacactcagggccgcccaatgtgccctgatgacgaggtgtgggtggcggacgaggacggtaacccgctcccgcgcggagaagtcggacgtttgatgacgcgcggcccttacaccttccgcggctacttcaacagcccggagcacaacgccagcgcctttgatgccaacggtttttactgctccggcgatctgatcgccatcgacgagcagggctacattaccgtgcaggggcgcgagaaagatcagattaaccgcggtggcgaaaagattgccgccgaagagattgaaaacctgctgctgcgccacgaagcggtgatccacgccgcgctggtgagcatggaggacagcctgctgggcgaaaaaagctgtgcgtatctggtggtgaaacaacccctgcgcgcggttgaggtacgccgcttcctgcgcgagcagggcgttgccgaatttaagctgccggaccgcgtggaaagcgtggatgcgcttccgctcacgccggtcggcaaagttgataagaaacagttgcgcctgtggcttgctgaacgcgcccggggctga

SEQ ID NO: 158431 - DNA, 3417 bp, Enterobacter cloacae; identical to SEQ ID NO: 126951

SEQ ID NO: 158432 - DNA, 1032 bp, Enterobacter cloacae
atgaacactcttaccaaagaatggctactgaagaccatcgcggagctcgaagaagagcgagatgctgtgcctggcatcgtaaacgaagatgctgcgatgtctctggcggcgatgaagattgcgctggcatcgctcgaagcggaggctgttggagaggttattgagcaacagtcaggaatgatgttggatggtcttgtcatttcagagaagccaacctatcgcaatatcaaaggtatccacaacatgaagatgatgccgctgggaacgcagttttacaccgccccgccagcgccggtatctgtgcccgctgcgatggaaatggatgatgactttgacagctcgtttgaacacggaaaagctgtcggctggaacgcctatcgcgccgccatgcttcagggtgtcgatcgaccacaaaacgaaccgcaaaatattccggaaaatattccagccacacagtttaagccggtagcagacctgtacggcttaacctcaccaactggtggtgaaacatcgttcactttcgacgctgttgaagctcgtgatttcattgatggcggttggttatgtcaggagtacgtggagcttgaacgttttcaggaagcgataaccaaccataccgaggataagctcgctatggttgaccattccggtgactccaacaatatggttgaacctgtaacgacggcttacaagttgccagatgatttcgacttcgaccgcttcaacgatgtcgtgtggctggaggctgtggcaagcaatccacacatgcattcactgactacatcgaccatcgctatggtcgctttggagctgaacaggaagttagccgattgcaactctccggtgattccggatggttgggtggcttgcagtgatcggatgccggagcagtttaaggccatcctggcattcaatgagtatggagaagtttggtctggtgcgtatgacaggtactggaatttctattgcgataatctgttagtagagcatgtcacgcactggatgccactgccaaatcctcctaaggagtaa

SEQ ID NO: 158433 - DNA, 180 bp, Enterobacter cloacae
atgaaattcttaccagttgttggctgggagggaatctaccaggttaatgatggtggagatgtactaagcatacctagggtaattttgaggagagatggctctaaacagcgatttaaaggaaagaaactaaaaccgtttttaaacgaggcaggctatcttgacctgctccccgttgattag

SEQ ID NO: 158434 - DNA, 135 bp, Enterobacter cloacae
atgggtgagttactgaattcggggctgctgagcattgcatccctggtaatgtctttggtggtgctggtcgttgggctggtgctgtggttcttcgttatgacctgctccccgttgattagtacaccccgatgttag

SEQ ID NO: 158435 - DNA, 246 bp, Enterobacter cloacae; identical to SEQ ID NO: 81405

SEQ ID NO: 158436 - DNA, 345 bp, Enterobacter cloacae; identical to SEQ ID NO: 95526

SEQ ID NO: 158437 - DNA, 192 bp, Enterobacter cloacae
atgggagaccccgagaacaaaagtgaattagcatggaatgaaaacaaaaaatggaagaaaaatcaagagtctcttttattaaatggtgttgaaatacctattgtcagcttagattatgaaattgaaataaaccaagaaattggcaattataatgcattcaaagacacttgctatctggaaaattatagatag

SEQ ID NO: 158438 - DNA, 930 bp, Enterobacter cloacae
atggaatcaaaaaacagtagtttttattttgatagagttgactttttatctaagtctatcagttattcaacattaatgatttcctgcttatcgatcgtcgggatttttttgaattctcattggctctacggtattgcaaccctcacgtttataatacaactcctcacttggtttgcaatgcattttaaaacttcgtatgcagctaaggctatagaaacaaaaagattagaaatgctgagaggtattataggcgaggaaaatttttaccgagagcgactctacattgatggtaatgcggaaaataaaaatggctttcgtgcagagaggttaataacactcatacaagagaatgcatactggaactctatcttatatattaaagctttccagcagaagttattctatttattactaacaatactactactagttagtataattattattatgtataccacgctgactgataatttagattttcagtatagccgcgccatatttgggatgctagtcataaataatttctataatttattctcagaagtgtcaggttttttcaacgcccacaatgagatgaaaaaaatagatggattcatagagattaataatcgcaaagcaccagaatatctatcttacatatattctaaatacgaacatgagatatttacagctccaagcattaataatgcaatttatttaaaacacagtatgcaaataaaacaaacctgggctcaacggctttataataaaaataactttcaaagcaaacaattgatcgacgcaattacagaattaacattattactccaaccgattgaggaggattggagtataactggtggggctaataggtacttacaaggcgttcaaatttatgcaaatgatattgatatcataacaacggagaaaggggctaatgaaatgaagtaa

SEQ ID NO: 158439 - DNA, 270 bp, Enterobacter cloacae
atgacagaaaccgtagccagtgcagatacggataacacaagtttagcaggcaaggatactcgccgtcgggtttgggcaatcgttggagcctcatcggggaaccttgtagagtggtttgatttttacgtctattcattctgttcactctactttgcgcatatctttttcccgtcagggaacaccacaacgcagcttctgcaaaccgcaggcgtttttgccgccgggttcctgatgcgtcccattggcggattgacctgcccccacgattag

SEQ ID NO: 158440 - DNA, 240 bp, Enterobacter cloacae
atgccagtccatcagctcaataggctggcctgccagcgcgccctttacgtgaggaacaaaattatagaaattcagaatgtgctgcgcgcgtggctcactgaagaaaataccgcgctcttcgccgtgtgccagatcgtcaagaaaacgctggcaggcaaggcgcacatactcacaggcaattatttcccccgccaccaccctctcggcgtagcggatgccttctgcaaccttagccattaa

SEQ ID NO: 158441 - DNA, 240 bp, Enterobacter cloacae
atgccagtccatcagctcaataggctgccctgccagtgcgccttttacgtgaggtacaaaattatagaaattcagaatgtgctgcgcgcgcggttcactgaagaaaataccgcgctcttcgccgtgtgccagatcgtcaagaaaacgctgacaggcaaggcgcacatactcacaggcaataatttcccccgccaccaccctctcggcgtagcggatgccttctgcaaccttagccattaa

SEQ ID NO: 158442 - DNA, 261 bp, Enterobacter cloacae
atggctaagtataaggcgtatccggaatataaggattctggggttgagtggttgggggagataccacttaattggaattatacaccacacaaatatttagcagtttattacaaaggccgcaacccaaccaccctaagtagtgagcccaaaagagactgcgttccatatctctcaatgagctatctacgcacaaatattgttgaaaattatgtattaatcacatctgatgtccgagttgttccagatgatttagttcggtaa

SEQ ID NO: 158443 - DNA, 264 bp, Enterobacter cloacae
atgaacgccacccgcgggtggcgttgtttattccgcttagcgattatccagctgggcgcgaacgttgttcagcccggtggtgttgatgcggtatggctgcccgttcacggatcggatcagctttttggtgcggagttttttaaagacgctaagcgtgcagtcgctcagcaccagcccttcacgggtgtagcactcaacgaaagtgacgcggccagagctgtcgcggacgtggacaattcgtccacctttggcgagaacgtgtaa

SEQ ID NO: 158444 - DNA, 810 bp, Enterobacter cloacae
gtgcgcaacgtgatgatccctattcttagcgctctgtttctttttctgagcggcattttggttattaactggcagctatggcagatggcgaagctgagtaatagtcataccgccacggccagcacccaaaaaatagaaaacattctggctgaagcagtcagtgcggccagcacggcgaagcgcgttgcggcccaagggtgtaccagtagcggacagctggcgctggggacagaggcagcgctaaaaccgcatctgcgcgccatcatgatcgagcagcagggtaaaatcatctgtacttcccttcccgggaatggcgtgttgattattcatcctgagacgttacctgccgaaaaattggtgctgttaccgggcagtcgactggtgaacggcattccggtgcttgtctttcagatgcccatcgcgggagggcgcgtcatcgtcagcatcagtgacgcgcatttacaggacgtcattgcaaacgcatcgaacagcatggatctggggctggttgtcggcgaaagcatgcttgttcgcaacggtgcagtgaggggctggaaagcggcctcctgggcgggggcgcttacggcatcaacgcgatttcccttcagcctcgcctggcaacctcctgcctttttcagcctgacgcggcttttgcaacagggatggagcctgatactgcttattcttgcgctatcggtggcggtgggcattttgatccgccgatacaaggggaaaagtacctcatttgaagaggacttacgtaaggccattttgcagggggagatcgtgccttattacagccgatcgtga

SEQ ID NO: 158445 - DNA, 2583 bp, Enterobacter cloacae
atgaataatgaaaacagtcgccgtatgcgtttaagaccggtcgcttattttattgccactcaactcgcgatgaccggaattattacgactactgcccacgccagagactactttaacccggaactgctcgaactgggcgcgccgggccaaaaaccggttgatctgtctgcctttgaaaataaaggcggacaacttccgggcacctaccgcgtggatatttatctgaataacaatcagatggaaacccgcaacgttgaatttcgtatggttaaaagcgctgacggtcaggaaacgttgcaaccgtgcctcgctgttaacgatctggaaacttggggcgtgctggttaaaaaattcccgttgcttggcaaagcaggaagtgattgcgccaatatctccgcagtgccccaggccaacactgaatttcgctttgacaaacagcaattgctgcttacattcccgcaatcggcggtcaccaactccgctcgcggctgggtggaccctaaacagtgggatgaagggatcactgcgctattactaaattacagcgcgagcggctccagtaattatgcgaagagcgggcagggctatgacggcaacaatcaatatgtcaatttgcgcccggggctaaacatgggttcatggcgtctgcgcaattataccacctggaatcgtagctcgaccggaggtccgggaggtgagacggatagccactgggatacggtttatacctatttgcaacgtgacatcattcctttaaaggcccagcttaccgcgggtgacagcagtactggggctgatgtttttgatagcatttcgtaccgtggtatagagttggcttctgacgatgagatgttaccggacagtttacgtggctacgcgccagttgttcgaggcattgcgcgaaccaacgcgcaggtcaccattcgtcagaacggctacatcatttatcagacctctgtttcaccgggggcttttgaaataaacgacatgtaccctactggcgggtcaggcgatctgtacgtcacgatcaaagagtccgatggaagcgaacagcaaatggtggtgccgttcgcatcgctgccagtccttcaacgtgaaggtcggttcaaatttagcctgatgagcggggtttatcgctcttatgacaacagcgtggatgaaactcctctgagtgaaggcacggccatatacggtcttcctgccggttttacagcctatggcggtggtcagttcgccagtccttaccagtcggtggcgctggggctgggtaaaaacatgggggatatcggcgcgctttctgttgatgtgacccaggcctggtcgaccatgaaggatcaaccgaaagaaagcggtcagtcctggcgcgtgcgttacagcaaaaacattgttgataccggcaccaacttcactatcgccggctaccgctacgcgacagctggctactggggcatgcaggaggtactggatacctataccagcggcaacagctatccactgattgaacgccgtcgcaaccgcgcggagctaagcgtgtcacaggatttgtgggaagatgcgggcaacatggggctgacggcggtacgcgaggattactggaatactgaccggcgcatggagtcgtatggtgttagctataacaactcctggaacagcattagctataacctgagctacacctacaaccgtaactctacggcgaattacggatcggaggacggtggacgtatttacgataatgaccagctcttctccatgagcattagcgtaccgatgagcctgctgcttggtcagtctcgcaatgagtacgttaactatatggtcaataccagcaaaaaaggcaacaccaaccacagcgtcagcgtgggcgggacgacgcttgagcaaaacaacctgagctggagcgtgcaggaaggttacagcaccaaaggccagggcaacagcggcagtgccaacgctgactggcgctcaacctatggcgagctgacggcgggttatggctacgaccagtacagtgaacgtatgaactacggcgtgcagggcggcgtattggtgcatgaaaatggcgttacattgggccagccgatgagcgaaaccgtagcgctggtggcggcgccaggcgcgaagggggtaaatgtctcctcgcaaaccggcgtgcgcacggacttccgtggttacgcgttggtaccttacgtcagcccgtaccgtaaaaacgacattacactggatacccagtcctttggcgatgataccgaagtggctattaccaaccagacggtgatcccgactcgtggtgcggtagtacgagccaattataaggccagcgtgggttatcgcgcattaatgagcttaaaactagccaacggggaaaatgtgccgtttggggcaatggctactgtcaaagattcgaaagattcgccaggttatatcgttggggataacggacaggtttatctgacggggttagatgcacaaggttcgttacttatcaaatggggtaatggttcaaatgaacagtgccaagcctcatattcaattcctgatagccatgcagctgtgactattttaactgaattatgccgttag

SEQ ID NO: 158446 - DNA, 396 bp, Enterobacter cloacae
ttgcctgaagaccgcgagtcgctttactggctgaacgttaaatctattcccgccggagtgaaaaaagagagcggcaacacgctgcaaatcgctgtaaaaagccgcattaagctgatttatcgtccgcaatcgttgcttaaagggttgccggaaaaagagaacggcaagatcagttggacgctaaatgggaatcgtctgaccgtgaacaatgcctctgcttactacatgaatttccaggaagtaaaagttggcgggcgtgaagtaaaagaagccacttatgtcgctcctatgagcagcaccagtttccctgttccggcaggtgcagcaggtaatatcacctggaagctgattaccgattacggcggtacgggcccggaacatggccagggtcattaa

SEQ ID NO: 158447 - DNA, 174 bp, Enterobacter cloacae
atgaaaacctggatcaaaatactttcccttccactgttcctttcttgcagccttgcccaggcggtcgaggctggtggcgtgactattggcggtacgcgactcatttatgagggaagtaagaaggaggcttcactgaacgtcaccaactcggatgtcagcccctatctgtactga

SEQ ID NO: 158448 - DNA, 522 bp, Enterobacter cloacae
atgaaagtaaaattaacggccgcagcgattatttctgcttttagtctggcggctatttcagctcacgctgatgatgggaaaattaacttcatcggaaaaattactgatgacgcttgtactgtcactaatacagtatctaacccactgtcagtgactttgggaaccgtatccagtaaagcctttgatggaagcgatactgcggctccgactgattttaaaatcgaactgaccagttgccctgacagcgccaaaacagctgccgtaaaatttgacggtaccgcggctaataatgacagcactgcgctgcagttgactcaggaagacggcgtcgctaccggcgtgggcattcagatcaccgatgcgaagaacacagtggttccgcttcatgcggcgtcttcctcctatgacctgaaaaccggtgccaacagcctggcatttaccgcgcgctatctgaaggtcggttccgcagtgacctccggtccggcgaacagcactactaactttactatcgtttacaactaa

SEQ ID NO: 158449 - DNA, 1221 bp, Enterobacter cloacae
atggcatatgtcgacaaagcgcttcggtttaatcctgcctcacctgtctttcaggaaaatcttcatgacgtctatcaccatatgcgaaaccaccagccggtgacgcgaatcgggaaaacatgggtgcttacccgctatcaggacgtgtatcaggcaatgaaggagcgtgcgttcgtctcttcaggtatccctgaagatgtgcatgctgcgctggaaaaagagtcttttaaccttccgcctcggcttcgggatcttctttacggtattgtcctttttgaggagggcagtgttcatcgcatccaccgtcaggctctgcaggccctgtttaccggcgaatcctggggggcattaacccaactcatttcacacgaatcacattcattggtagccgctttacccacaattcgcccgtttgacggaattcgcgagattgcggcgccgctatggggaaaggttttcaccgcgtggcttaacctgcctcaggcgcaacaggaggtggtggagcaagagaaaagtgccatcaggctattgctggatcccagtgccattgaccgtgaggggcttcagaggctgataaaagcgctatcccgtctggatgatagttttcgccagcttgcacaggcgcacagagaaggttacgactctctgttttatcgcagcctgctgaaaggatatggcggacagggggatgcgctttatgagcggtttagcacggactgcatcacgatgcttatcggcggcagtgaaaccagcgaagcattaaccggaaacctgctctatatgctggcactgcatccggaattgcaggcggatgtcagaaataacacgctgcggatgaaagagatagtaagcgaaacgatgcgctttgaatccccgcttcagatgggcaggcggaaggttgcggctcctgtgcactttctggggcgtgaactgaaggccggggataacgtgttgctttgccttggctccgccaaccgggatgaacgcgtatttgaagaggcgtcgcgctttattccgggtagaaagaatgcacagcgacagctgggatttggtgcaggggtgcaccagtgcatcgggcaactgctggcacagtttcaggctgaaaacctggcgacggccttgaacaagctagggattatcgctctggacggcgaggcgaaatggtcgaatagaagcctgatcctgagaacgctggagacacttccgcttaagatcgactag

SEQ ID NO: 158450 - DNA, 204 bp, Enterobacter cloacae
atgacaacgaaaaaagcgcgcagcatggccggattgccgtggattgcagccatggcgttttttatgcaggcactggatgccaccatcctcaacacagcgcttcccgctattgcgcaaagccttaaccgctccccgctggcgatgcagtccgccatcatcagctacaccctgacggtcgcaatgttaattccggtcagcggctga

SEQ ID NO: 158451 - DNA, 1188 bp, Enterobacter cloacae
atgcgctatcgtggcattcgaaaatgggttaatccaagtcaatcacaacatttactttattttgcgcaaacttttgaggaaatgttttttaccttcagcctcgatacatataaaccatccgcaatgaacgccagcttactttgtaatgagacattaatcgtcattgccgccgttgagtctggtgatataaaagaaccaaatattaaacatgttctgagtgaactttgcgaaaaccttgagaaagatgaaatagctcaaagtctaattgatgaggaattgaaagatataaatgccatattaaagaatgagaaaatagatatttcatccaagaagaccaccattgaaattttatctaattacctttcattaaaaaaatataaagaaaaaaatgaagaattactttcagatgctataataacgaactcagatttcaatagaataagaaaacttgctcgcagttatgccacaacattattaaactttgggtttagcgataaatatatatatgatgcaacactaaaatatttctaccatgactctgaaagtattgaaagcaactcagatataaacgccttttttaaaaagttcccaagcaaaacagataaatacaccgtaatatataaagcatctttcctttttgaaaaattaaaagacgcatgcgaaaatttcaaaattgtcattgacaaagaatttccgataaaagaaggtgttttttcagatacgaatacgcgaaatatattatcaaaacatgatggtgtatatttattattagatgatatacctgcgcgtgatttcgactctgcaaaagcaaaagctgatcatttgctaaaaatattcggaactctcttttctttattccatcataaggaaactttagatttcaaggatgactgtttgataataaataaacaaagtgaacaacttactaaaagaggaaagcaagttaacgccatgcataaatgcgttgacatgaaagcacaaaagtcatcacgaatacttaatgagttcatttccaagttcagacttgaagaagattcttttgataagtttacgaatgctgcacaactacattcacttgctttaaatagtggctccgagcaaaatcagttaattaacctttggattgctcttgaatctataattccaacaaatggtaatgtaagcaatattgaaaatataattaattaa

SEQ ID NO: 158452 - DNA, 435 bp, Enterobacter cloacae
atgaaaaaagaacaccgccccgtacagcaggcggctaactcagatattcgcacgtctgatattacgccgaccaccagcccggtacaaccattcaaacgcacaccgaagaagcaccgcgcccgtgtctatatgctgcgcactggcgtagagggatggacagaaaacgacattctgcgctactgccgcctttcatccgggcgtaattatgcgtctgaactggaacgccagcttgatattcagcttgagcgtatcgacgaaaagaatcccgacgggatcgggtcacatttacgctatcgctttaccgggcgcggtgacgttctaaaagttattcagcttgtgaaccacaacgccaccgctggtggctataacgggctttctaagcaggatatcgcggacattctcaatctatacccggacaatctcaccgccgcataa

SEQ ID NO: 158453 - DNA, 330 bp, Enterobacter cloacae
atgcacatttcaactgtaccggccaaggtgccggtttcgtcacgtctgtcgcccgtaatggtgtggcagcagcttttaacatatctgctgaagcaccattacggcctgacacttaatgacacgccattccacgacgacgcgattattgaggaacatattgacgcgggaataacgcttgccgatgcggtgaattttctggtggaaaagtacgaactggttcgtatcgaccagaagggattttcgtggcaagaacaaaccccgtatatttccgtagtggatattctgcgagcaaggcgatctaccggcttgctaaaagctaacgtgaaataa

SEQ ID NO: 158454 - DNA, 351 bp, Enterobacter cloacae
ttgcggaagacaacatcactgacaaatcaagacattgccgaatgctggtggggactgaaacgcgatatcgcgccctgcattggcgcacgactggtgcaggatggcaagcgtctgcactacctggctgaccgggccagtatcaccggtcagttcagtgacatcgaatgtctggcgctggatgaagcattcccgatttttatcaaccagatggaatcaatgctgactacgggtgaactgaatcctcgtcattcgcactgcttcacgctgtatcacaacggtttcgtctgcgaagccgacaccctgggttcacacggttacgtctatatcgtgatttaccctgtgcaacgctaa

SEQ ID NO: 158455 - DNA, 480 bp, Enterobacter cloacae
atgcccatatcttctttcccgacatgcaacaccctgccgttaaccactcaacgaacggttaagcgggcgttatcgttacttgagcaccacctgcgggagccgggcgtgcccttcacgtccacagcggcagtcagggactggctgcgcctgcaactcgccacgctggagcgcgaagtatttatggtgctgtatctgaatcagcagcaccagctaattgcccatgaaaccctgttcactggctccatcagcagtaccgaagtccatccccgtgaagtggtaaaacgcgccctgcacttcaatgcagctgcagtgatagtcgctcacaaccatccttccggtgaccccacagccagccaggcagataaaaccatcacgcagcgcctgatgcaggcactgaccctggtggaggtccggctgctggaccatctgattgtcggcgggatggatattgtgtcgtttgccgaacatggctggctgtaa

SEQ ID NO: 158456 - DNA, 219 bp, Enterobacter cloacae
atgagtaccattgagctgccccggcttgatgccctgtgggatttgctgactcgcgtcactgtcgcggaagacgaggacggcgtggttatcagcgaaccctttttacattttcctgcgggaaccggcatcacgacggtctgggcatggtttgaaaccatgaatccggccttcaccgtggcccataagctgtatggcctgcaaacaaccctgtcgcagtaa

SEQ ID NO: 158457 - DNA, 471 bp, Enterobacter cloacae
atgaaaatcaaacaatgtttccccgcgctgtctctgctggtctcctcttttactcacgcgacggtgactgaacagcagtggggcgactggtacggcaatacgggcggtatggagtttgcgctcagcagtgacaatcaggccggggaaaagctgaccatcagttgcagcaacaaaaagatggtcgtggcctggcaggtcccgaaagaggattaccgtgccacctctgatgaggggatgagtgatgtgtatcttctgataaacaatgagaaatacgcgcttgagaatgaatcactgctacccggcgaggccatcccggcacaactggcattcgacgccctgaagcaaacccgtgcgcaagacaacgtcgccttcaccaccttccagtcgggtgagtcaaaaccgttcagtgcccgtggcctccatgacgcactgaaagacgtcacctggcaggactgcctcgaccagccctga

SEQ ID NO: 158458 - DNA, 696 bp, Enterobacter cloacae
atgaaactgattacattattacctctgctggttatggtgacaggcccagcttttgcggtctcaccggaagcgacggtcaaatcatccggctgtatggctgtcaacgatatgctggaaaacctcaactcgcgggagtcctgtctgtcagtgaatatcacccgcaccttatccgaaggacgttatctggcggtggcaaacctgagcaacggcaacatctacccggttcgcatgaccttcagtgacggggtgattaccgcccgtccggttacggatgaaattgagcggctcaatcaacaacaggcacagaagcgccgggaagagcagttacagaaaaagcgcgattactacaaaacccacccgcaaaaagagagcgagtttgataatgcgaaaaaggcgcatcttaacctcactcaatatcactcagccgcctgcagggccattggtcaaaaagtatgggattcgattcatgaaagtgtgtcatgccagatgattgaaaatgcgcagcaggtcagtgacaacacccaggcaggcacggccattctgcgggggccgggtgccagcacatttaaaatgccggtcaggttcagcgtgattcaggaggattttatccgtgttgacgccgatattgcagtgtccgcgctggcacagttaaaagcacagatagcggcgtataacgaaaaactgaatcagcgctaa

SEQ ID NO: 158459 - DNA, 705 bp, Enterobacter cloacae
atggttgttaatggctttacctgtgtaccagtagcaagccaatctgtcgcattaatcaccgtaggaaacaataacaatgtagagtttaatggttttgagtcatcttttggaattacttataaccgagacatttacatctacggaaatggctcaaaggttgtatttaataactcaaggtttggtaatggcgcactcccttcagtagagtttgcttctggatcaaccagcgttgttactgttaatgttaatggtaattcatatatttacactgctccagtcggcggcggagtgcaaacagcacctgaaatagtgtacctcacagacgcctggactcctttgtttaagatcggaggggcatcatctggaatttcggccacatccactggaagattcaccaaaaatggaaatttaataacggcttctttttctgtagtgctaacaaacaaaggagcatcaagcggtatagttacaatagaagggcttccgctagctgcaaaatcatcttccagtgcttccatttccttatatagcgcactggtaagcgcaggtccaattggaggggttgtcgatcaaggctcttcagtaattattttaaataatttggcgtcagcaacagttgctaacctaacaaacgccaacattagcaacactacaaggattgatggtgttgtgacatatcaatacgattctttattgtacagataa

SEQ ID NO: 158460 - DNA, 1485 bp, Enterobacter cloacae
atgattcagcaagatattttcagtggcaaggatagtagattatttttatattttatagttgcaatgctgtctttttatgtattgccaataatattggcagacaggctatacattgatgatatcctgcgttcacaactaggttacacgtactggtcgccaaatggaaggccgttggcagatctggtgatgagtgcactgtcattctttggcgcgaacattgtcgacctctctccgctgccacttatcattgcgcttgctgtttttacattgtgcgcattcttatattttaaggcaaacatttcagatgtgggcgcggttccatctgctgtaattatgttctcagtaattgcaaatccgttccttcttgagaacctttcttataagtttgatgttctcccaatgataacatcaatatcaatacttctgattccatttatttttaaaccaacaagcaaatttggcttcgtgatgtcgattgtaattgtcgcatcgtcactttgtttttatcaggcatcaattgggttttacgtctgtttggcagttatcgaatattacctgtcttttaaaactcaacttaatgacgacacacttacacgattaaaaaatgctacctctagggctatcgccttgtgtattggttacgttgtatatagcacaataactaaagacatggtcataggcgaatataacattacacactcccagctaatcccaatgacgcatgatggtgcgcttacattcataacaaatgccaaagccataatgaacacatttgctttgtactttaaaagcataaaatacacattttactttatgtgtggcattgttatttatagcgttgtgagttctttagtagctttccaacaaaagaagaaaccgtcacacattattgacattgtaattgttctcatcgttccagcattaatattttttgcgacgttcgttcatttatgtttactaaactcgccagtttttgctgatagagtgctgatatcttttggcggtgtaatgatgttctcaaccatttgtttctttttaacattcaagaacaagtttatagcatcaactcttattgcagcgcctctggtttttgttttcgtttattcgtatgcattcggtgcagctcaaaaatatcaaaaggaatatgataatagaatttctggtgatattgccctgtcagtttcccgccttgacccagaaggtaagttaaggttattaacagcaggaactcaaccatcatcaaatcagagaacgaatgcagtaaacagatttccatcactggcatcattggttccaatctattacactggaggttggtggggaaccaacttaattaaaatgtttggtattcgtaattatgtcggaggcgctgataaggataatcaggcatgtggcatgagaaaggtagaagaaacgcagatatactcactctacatagacgatacaaatatacttgttgattttgacaagccatcctgcaagtaa

SEQ ID NO: 158461 - DNA, 318 bp, Enterobacter cloacae
atgagattcccgagcccaggagtagacaaacatgccgcctttgttgagggtaaagactccattctaacgatttctgcaagcgttgttgaaacgcatgaaggctatgatgtcattgagaaatcggcgctgttgaagcgcggagacacattgctcatctggttttgcggccgccagcagcatgcgtactgggctggtgacgcgctcattactgatgatggcgaggccattgaaggcgatgcgctggatgaggttcgcctggtaggagttgttacgcataccattcacccagtttcttcagacgaaaatcccttcatgtag

SEQ ID NO: 158462 - DNA, 294 bp, Enterobacter cloacae
atgaaaattgtaagggaggcgctggccggaacgcaggagtccagcgacctgatggtgaaaatcgctcccgctcacggcgagctggagatagtcatccacagtgaagtgattaagcagtttggcgaacaaattcgccaggtggtcaacgacacgttgcgcgccatgaatgtgcaccagggattaattattattgaagacaaaggggcgctggactgtgttatccgcgctcgcctgcaaagcgcgctgatgcgtgcagccgatgaacaggccatcaactggggggcgctgaaatga

SEQ ID NO: 158463 - DNA, 624 bp, Enterobacter cloacae
atgcgccacgagcagttaaacaggatgaccaccctctccggcctgctgcatatgggccgctacgaggaagccattggctacattcaggcgcagtcggagcatgcccaggagctgctggactttatctcttcgcgcttcagttcaccgaccctgtgcggcctgctgctggggaaagccgcgcgcgcgcgggagaaaggcgtcgagctgtgtttcgacccgggctgtcggctggacagaccgttcctgccccttggggagcaagagctgatttcgattattggcaacctgctggataacgccatcgaagcaacacagaggtcgccgcttccccacgcgccggtagaagtgctgataaaactcagcgaacaggagctgattattgaagtggccgaccagggcgttggcattacaccggcgatccgtgagcggatctttgaacgcggcatcaccaccaaaacgcgcggcgatcatgggattggcctgtatctgatcgaaagctacgtcacacaggctggcggcgcgatagaagttgccgataataccccgcgcggcgccattttctccttgtttatcccggccacgggaaccgcccggcaactggaagacaccgactatgcaacatga

SEQ ID NO: 158464 - DNA, 315 bp, Enterobacter cloacae
gtggttgagatgccagagcagggttcccgtttcgttccagaaatcggtaaacaggtcgatatcatcgacggggccgaggatttcattgctgagggcttccagcgcggaggcgggcaggttgagaaggggaagactggtgggggtagtgagtttgaacatgattatctccatttgattgatttcaaatggataatatgtgcctgttttgtggcgtgttacggcgaagtatggaaaaaggttttgacatcgtggattttttccagttacatttatcccgccttcagtgcaggtctgttcatggccagtaagcattaa

SEQ ID NO: 158465 - DNA, 564 bp, Enterobacter cloacae
atgactgagcgcggaatgatttttaacggtgagatggttcgcgccatcctcgacggcatgaagacgcagacgcggcggccagttaatccatcaactgccaacctgctagatcttcaagggcagtatccgcacaagaaatacaacatttcctgcccgttcggtgcagtcggcgatcgcatctgggtgcgggagacgtgggcagaggctggagccagcgcgcctgatctgaaactttatcgcgcgaattaccctgcgcatgttccaactcattacgagaacgtgccgccagctgaggatgtccgctggacacccagcatccacatgccgcgctgggccagtcggattttactggagatcaccgttgtacgggtcgagcagctaaacgatatcagtgaggaagacgctcgttcggagggaatatctggctcctcggcccgtgacttaaaagaggcttacgcagctttatggcggtctatctacggttctgacagctggcgcgctaacccatgggtctgggtgatcgagtttaagcgtatcgaaggagatggccatgcgactgattaa

SEQ ID NO: 158466 - DNA, 198 bp, Enterobacter cloacae
atgaatactctttttgcattagtgctgaccattggcatgaccaatggcgaattccaggacgtagttgttgatgtctatgaaagccagcagcagtgcgaacaagcagctgttgaacaacacgtgacaggaaactgttacccggttgaaaaaattgtacgcgccgatgaagttccagctgacaccacggcgcaattctga

SEQ ID NO: 158467 - DNA, 423 bp, Enterobacter cloacae
atggattacatgaaagaagaaaataagaacttcgccttccgcattaaccaagtacttgcgcagactggctggaacctttcagagctggcccgcagagtcatggtcagcccccaggcaacccatcaatggtccaaaggcgataccactgccagaggagaaaggctcaagcgtttgtcagctgctacaggaaaaccggggcactggttcttcctcccgcccggcgaagagccaactgatgacgaactggagcagctggccaggtctactccccttgatgacaaagaacaggcgttattagcgctcttcaaccagatgcctgaagctgaaaagaatcgcctgatagttcacgcgaagggagtcttgaaggaacttgaccttctgaaaggcgatgtagcggacatcatcaaaaacatttccaattaa

SEQ ID NO: 158468 - DNA, 219 bp, Enterobacter cloacae
atgacccctgaattaaagcgtctgatctgcacgcaaatgagccaaacagaaattgccatcgcacttggtaccaagcctcaaaccgtgagcctttggttgagtgggcaagttcctgcaaatcgagtcatcccattatgcaaagtgcttggatggagcatcacgccacaccagatgcgcaatgacatctatccgaacccaactgacggtttaccaaagtag

SEQ ID NO: 158469 - DNA, 555 bp, Enterobacter cloacae
atgcaaacactttcttttcaacagaataacagagcgctggcagagcgtatgaaattccagtttcaccatgagagagctgcagagcagtctgttgatcatcacgctatctgctcagccgtccgcgcctggtcagcggcggaaggcagggtatttgtagctcttgccatcaaggaagctgctgaagaaatggggctgtccggaatcgatatgtccggtaacgcggacgtgtggaacgtgaaattgtttcgctggctagacaacaaggagatgtcaccggtttaccaggctaacgtcgagcagttggcgccggcgatcctctcagttttaccgctagcgtatcgagaccgtgtggttaagcacgataactttgccctgcgtatagccaggtcggtgaaagaggacgctgaggccttgcaggccgtggttctcaaagctcctaaacaagaacgcctgaaggagatcagcgaaagcattgtggcaaagttctacctggatggtccggattctgtggcgccactgatggccatggtaacgacgatgttgggggggatatga

SEQ ID NO: 158470 - DNA, 969 bp, Enterobacter cloacae
atggctaaaaatgacttcaaaccgtttgctaccggcgctggcgcaaacgtaatgtcccaggctgactgggaaggacttccggccctcctctctggttttacttcaggtaaggcggccagcgcagaggtaaataaggcaatccggcaggcaagttttatcgctgcagcgttagcacaatacacagctaataatgggattactgacgtattggatgatggtaatctgaatggttttatcaccaatatggtagctgcgtttggcaaggattttcaaaagtcagacgccaccctaacggctcttgctgggctggcaactggagcaaataagcttccttactttacaggtctggatactgcatcacaaaccgatatcacatctgtaggacgagatattattggtaaaacaacaattgcagacattctatcgtatcttggattgggtgcaattgcgacttcacctgacattcaatcaggcacaccaaataaactggtagatgccgcagggcttattggtgctattgcaagtgatgctgatattcagaataaagtagcaagaaagtttgtagatgcatacgggctaataaatgcaattaccactatgcaagacgtgcaggatggagctctacgtaaatttgtcaatgcgctgacacttaaaaactatcttcccgcaaaacctctcacggccagcgggtacattcgcatccctgacattccaggcggcacaatcatccaatggggtcaggtagtgacttctgtcagcgaggggtcgaaagttgtaactcttccaacgccattcccaaatgctggacgatttgcagtcgcaataccattaaatactgccgaaaataataccattgatatattcgcgcaattaaaaggactgagcactacaaccgccacattcttcttttcatgggcgtcgagttcaactcctgcagatggtttccagtggtttgcaataggatattaa

SEQ ID NO: 158471 - DNA, 429 bp, Enterobacter cloacae
atgaaagcatactttgttccatctgtaccaacattcattccggagtcatggaaaaatgatggtacctatacagaagaaaactggccctctgatgccatccttctcactgaagaagaaaccaacgcgtactggatgattccaccaccgaaagggcaaaaattaggcgttgtcaaagggaagcctgcgtgggttgatatccctccaccatcacaagatgaactgatcatggctgcggaacgtaagcgtgaatttctgttgcgtgaagcacaggaaacaattagcttctggcagactgaattacagctaggcattatcagcgatgaagataaagccagcctgatcgcttggatgaactatatcaaagctgtgcaagcggtggacacgtcgaaagcgccggatatcacctggcctacgccaccagcggcttaa

SEQ ID NO: 158472 - DNA, 129 bp, Enterobacter cloacae
atgaatatttttcattttttccctgcggttcttaccgtcaaaacggtgctttttatattctgcgaggaggtttccacggttatgcaagggtttcagtgtgcgcttaaaatctctgaacgggcggcgtaa

SEQ ID NO: 158473 - DNA, 225 bp, Enterobacter cloacae
atggaaaacttatactacacacagttcagccatatagattttaaagatcccttctttgattcactaaaaaatgattatccggactttgcaggatggattgaaaagaaaaaaaatgatccatcagcattagcctatgttctttttaatgaacaaaataatattgaaggttttttatatctgaaaatcgaaaatgagaatgttactgatgtaacccggctttgttga

SEQ ID NO: 158474 - DNA, 342 bp, Enterobacter cloacae
atggctattgaaggcgcttcaacgactcgttcgataagcccaggggagcgctatgagggactgaaccacatagccgaattacgggcaaaggtattcggtcataacgttgagtcagagcttgagcggtttattgaagatatgagtgacccacgggacgctaacaataagcaaaacaagcgtgcattagccgccatctattttatggcaaacattccgacagatcgtcacagcgtcaaaattagtgagctgacgactgacgaaaagcgggagctgataaaggcaatgaaccattttcgtgcagtggtgagcttattccctaaacggctaaccatgccgaattaa

SEQ ID NO: 158475 - DNA, 210 bp, Enterobacter cloacae
gtgaccaaacctgagattgcgcctattccgaaaggctaccgtgacgatggctatattcgccgcctgccgcaggacccgtggggcaatgactatattctggttagcccgggtgagcatggcgctgtcgatattttctcagccggtccggatgcagaagctaatactgccgacgatatcagcaactggtcttttgataaaaaagataagtaa

SEQ ID NO: 158476 - DNA, 525 bp, Enterobacter cloacae
atgaatattaatgtttttagattaactgttgcaataattacagcttcactgttgttaactgccaacgcttccgacacaaccatcaatatcactggtaaagtcacagccgctgcctgcaccactggcgtaggttcaacttataacatcgacctcggtcaggagatttctgcagcgacgctaaatgccgccggtgctgcttccacgtatgttactaaagacatagtattaagcgattgtcccgcgggaacgacatcggtgacggcgacatttgacggcaccaaagatagcggcagcgacaccatgtacgctaacgcgaccggagaaggttacgcgactaacgtcgccgtagagctgcagaacaaaacggcgggcacggacgtcggtaaaggcgccaccatgacggtagatgtagacgcgagtaaaaatgcgacctttccgctgcaggcgcgcgcttacagcaaaagcggggggactactccaggaaatatcagcaccacggtgttgatgaactttacctataactga

SEQ ID NO: 158477 - DNA, 534 bp, Enterobacter cloacae
atgcaaaaacaccaccttcgtcaggccttatttttggttatgatcgctttgtcgacaggcgaagcgctggcggctgatgtgaatattaccggcaaagttattgctgcggcgtgttctgtcagcactagcctgagcagcgcccagcaggttgatctgggtacattaggcagaacgaagtttcagttcgctaacgatgcaggcgagtggcagagcttctcgctgctgctcaataactgcccggaaggaacgaaacgcagcacggtaaccttcaccggcactgcggatgagaacgacgcgacgctctttgccaacacggagcctgagaccagtgccgccaaaaatattgctattgaaatggcgaaagatgccgatcacagcgtggtgttgtcaaacaacagcactatgacggtggatgttgataccactggcaaaagcgccacgtttccgcttgcggcgcggatgtacacgtccgtgggtggtgtacagcctggcacagttaccagtactgtgttggttaactttacctaccaataa

SEQ ID NO: 158478 - DNA, 1284 bp, Enterobacter cloacae
atgagtaatgctgttaagggggctttgttgataaacaaagaacataaaaatgtaatatataatgcaggctatttactctgtactcaaggtgttgcatatatagcaccacttattgtcttgggacatcttataacaactcttggtattaatgggtttggtaaatatgcttttgcgttggtgctgatggcatactttcaggtaatcattgattatggatttgcctttagttccagtaggtcaatttcgcagaatagagatgatatatgtcaaatctcgcgaatatatttttctacgaatatcgtaaaacttgctctcgctagtatattattcatactgatctatttggtttgcattgtcctggccaaggataaaatatatataacattattgttgagctccttcttatgggcattgtcaaattcaatgtatccattatggttctttcaagggattgaaaggctaaaggtagttgcagtaattaacattgtatcgcgattgcttgcatgtgtttgtgtaatatattttgtacgtaatgaaggtgacattaatattgctatcttggcgcaggccattcctgttcttattggcgctttatatgcgaacgtgtttatttttattaaacgatatataagactggaatttcctactgtcaaatttattctgaaatccatcaaggatggctggcattattttttagcgacactttcttcgacattgcttactaatagtgctgtttttattttaggagtatactattcgccctcaactgttggtgtttatgctattgtggagcggatagttaaagctattgtttccttgttttcacctttaacacaatcgctttatccatataattgtagaaagtttaaggagtcatttgagctaggcatgtcaacagcgattcgtactggacgtccgttagttatattgagtctaattataagttcgctccttcttgtcacatggtggttggcatatccaagaataaatttagcacaagaaactctaatttatgcctttttacttgtaccatggctttgccttggggtattgaataatgttttagggattcaaattttaagtgcagctggttatgctaaaatgtatagccgaagtttcgttttttctgcaatatcaacagtgatttttcttttattaatggcaggtatttttaagggatatggtgctgcaatagcagtttcaagtggagaatttctcttatgcctattactgctaagcaatataagagaagtcaaaaataaacattttcacaaagaaacttga

SEQ ID NO: 158479 - DNA, 534 bp, Enterobacter cloacae
atgaatgtaatcaagacagatataccagaagtattaatttttgaaccgacagttttcggtgatgaacgtggttttttcatggaaagctttaatcagcagacatttgaaaaggcagtaggacgcaaggttgagtttgtccaagataatcactcaaaatcaagtaaaggtgtgctacgtggtttgcattatcaattgcccccttttgctcaagcaaagttagttcgttgtgttgttggtgaggtatatgatgttgcagttgatattcgcaaagattctgccacctttggaaaatgggttggtgtaaacctttcagccgaaaataaacgccagttatggattcctgaaggatttgcacatggttttatggtgctaagtgatgaggctgagttcttatataagacaacgaattactacgctccaaatagtgatcgtggattagcttggaatgatccagatataggaattaattggccgctgtcgggtaaacctattttatcagaaaaagattcgaagcaaccgctcttgcttagatga

SEQ ID NO: 158480 - DNA, 201 bp, Enterobacter cloacae
atgacagataaccagggactttccccaaccgaagttgaagctctcttcacagagacatttaccacccactccaacactaccccaacgcaagtaacgaacaccatcgaacagatgtttgatagttttgtcccgcacatcaccgaagtaatgcaccgtcagaaaagtgacctgcccccacgattagatacaacactcagttag

SEQ ID NO: 158481 - DNA, 237 bp, Enterobacter cloacae
atggccgacatcatcgataccgcagcagagattgaagagcttcagcgtaacgctgccctttccgctcaccgcatcgaccgtaacgccgtatcagcagagcactgcgaagaatgcggagaggatatcccagagccgcggcgcgctgccgttcccggctgccagacatgccggattgccaagctgacctggagcttatacgcaagcaaagggggtcttgatggattacaccaaacttag

SEQ ID NO: 158482 - DNA, 1932 bp, Enterobacter cloacae
atgaacaaaacaacaacgctgtcccctttgactacaatggccccggctctttttacctgcctgaaactgaacgcatttctcgcccgccgtgcgttacatctggctaatgcacaaaaaagtcttaacaaagcggctgctatcaatattggggctgatgacattgctgaaaatggatgccgtgatggtctgccagatgattttgtgaatacgtcaacaggacttttttatgacaatggcaagaaactgacacagttcagttcgacgcccattgttcctgttaacaggcgttactctgattgtaaaacgcgcaatatgggcattgagttgatgacaattaaccatgccggagagttcgtctgcgctgagatctcattgagtgatgtgacggtaaatcccgataatgtgattgcatatcttgcaggcaagggctttggtatttcctcgacgataagggctaaagatctactggcgtattttttacaggcctgtatgaagaaatcgctggcgttgcccacttatcttgtcgcagatgcgatggggtttgtaccaggcaaaaaagcatttttacatggcgcaatgcccattgcgcaaagtgttagcgggtttgattatctggttcctggtgtgcgtgtaccgacaggactcgttgaatccggtaagctgaatgactggaagtctctagtggagacgtatgctcatggatggccgcaggtttttgcattgtgtgcatcctttgcttctatgctggtgaaattgtacaaaatggatgtcgcgctgtttcacttttatggcgggtcaacgaccggaaagaccattcttcttcagttagccatgtcggttcatggtcatggcggtgagccgggaagtgcatcgggtgttaacattctccgctggaatacaacggcgaatgcgctggagaaaagtctgagtttattctccgggctgttagcctgtattgacgaactgggagcgtacaaacagaaagacttcgcctcactcctgtacaacattaccgccggacagggcaaaagccggatggacaagaacctggacgtacgggaggcttatacatgggaaatgtttattctttcatcaggtgaaatgtctatccccgaaaagcttgccacacagaaagagcagattcagggcgggcaggagcatcgcgccatcagtattaatattttgcctgaagatgcccgtaaaaagggcgaatcagcggaagaggttcgttgtcgtgctgagggcctgaaaaatggtctgggtgatatttatggcgtagcgggtaaggcgtttatcgctaacttgttgacgatggacgacgatgagggtgaaccgctgtcctggcatgaaatgtgtgaatttgtccgggatgcaacaaatgactgcttcagcattctggtcagcgacctgcaagaagaaggctattccctcagtgatattcagaagcgtgccttaaaacgttttgccttatgctggttcgccgggttgatggcaagagaatggggtatcgctccgttcagtgaggaggatatctcggaggcgataatgagtgctgctcgtcgctggctggatgataagccaaaccagtacagcccgctgaagcaggtgctgactgccattcagttagatctcatcaaaaccagaacagcccattttatgccattgcttgatgaagatgcgtataccccgtcaaaccactggggattcattgataagaatgatgacatgatgattttcgttcctgtttttgaagactggtgtatccaaaaaggcctcaagcctgttgatgtggcaaaggcgctggcacaaaaaaattatctcaaaccagaaagtcagggtcattacaagaagcgccctcagaagggaattaaacaacccttttatttgataacgagtgtatttcttggctgtaacattgcgaccgatttttaa

SEQ ID NO: 158483 - DNA, 177 bp, Enterobacter cloacae
gtggttgagatgccagagcagggttcccgtttcgttccagaaggcggtaaacaggtcgatatcatcgacagggccaaggatttcattgctgagggccaccagtgcggaggcgggcaggttgagaaggggaagactggtgggggtcgtgagtttaaacatgattatctccataaatga

SEQ ID NO: 158484 - DNA, 648 bp, Enterobacter cloacae
atgggggattttcagtcctaccaagaggatagaatgactgataaacagacgttttcagctcttaagcaaatattggaaaagcgcaaaaacaatgatgcgcctttctttattggcgtttatccttcaggtactcatcacggtcgtgaaagtcctgatttaaaatataaggatggtagtaatatttactataataaattctacaactacgatgctcagttaggtgatttcattcgttattttgataagagtaacttctcgaagaacacaacagttattattactgcagatcattcaactttaccaacacctgaatttaaaaagtcatttggcatcaatgcagattactttgtcgatcagatacctttaattatatataattcaggtaacacaccagtccaaaaggatgctcaggggaaaaatagtttgtcattagctccaacaattttgcagatgttgctgattaataatgagccaaactattttttaggttgctctcttttggattttaattgtaaaagtgagttctcaaacactactgctatcggcgatgagtattataacacctacccggctatttaccctgactacggcgtgaaaaaagcatctactaatacaaacgttagtgatttttataatgttagtggatag

SEQ ID NO: 158485 - DNA, 981 bp, Enterobacter cloacae
atgacgcaaaacaacaatagccaggtcagccgaagcaatgacccggagcaaattgatttatttgatttagtgctgcagctgtggcgtgggaagtgggttgtaacagcctttattgttgttggtatcgccctggcaattggatatctcactgtcgcgaaggaaaaatggacctcaagtgcgattattacgcaaccagatgcggcccagatcgctagttattccaatgcattgaacatcctttatggtgctgcagcaccaacaatgcttgacaaccaaacgcgtgctattgggcgttttagctcctcattctcagcattgtcgcaagcgctggagaatcaggctgcacctgaaaaacttagtattgaacctactgttaaaggacagccacttccgttaactgtttcttacaccagtatatctgcagaagctgctcaaaagcagctggcggagtacatccagcaggttgatgagcaaacggcaaaagaacttgctgtagaccttaaagacaatattaaggagcagattaaaactcttaacgattctctattaactcaggagaaagtcgctcaggagcaaaaagatctgcgtatcaagcagattgctgaggcgttaaaaaatgctgaagcagcgaaagtctcctcgccacaaattcagcaaacccaggaagttactcaggaaacgatgttcctgctgggcagcgaggggctgaaatcgatgattgataatgagtcgtctcggccgctgatcttctctaccgcatattaccagactaaacgaaacctgttggacattcagaatcttaacgtaaaccctgattccatccacgtttatcgttacgtgatgaagccggatctgcctattcgtcgtgatagcccgaaaaaagcggttgttctgattcttgcggttctgctgggtggcattatcggttcaggcttcgtgctgggccgcaacgcattgcgcaactacaaacccaaagcctga

SEQ ID NO: 158486 - DNA, 1167 bp, Enterobacter cloacae
atgaagaaactactcgaattacgccagcagaaagccgcactcaaaacccagatgcgttccatgctggacaaagccgacaccgaaaagcgcagcctgaacgaagaggagggcaaaaagttcgatgaactccgcgcccaggctgatgccctcgaagttgaaatcacccgtcttgaagccgtcgccgacgatcagcgcaatctgcctggtacttccgttgaaggtgagccagtaagcaacgacgaactgcgccactacatcatgacaggtgatacccgttctctctccacactggtgcaggctgacggcggttataccgttatccctgagctggacaaagagattatgcgccagttgcaggaagatagcgtgatgcgctccatcgcaacggtgaagaccaccaaaaccaacgaataccagaagctggtatctgtgggcggcactaccgttaatcgcggcaccgaaggtgaggcacgtaccgagaccagcacgccgaagatggagcgcgttgatatcaaactcaacccgatctacgcctacccgaaaaccactcaggaaattctcgacttctccgaggtggatattctgggctggctgtcttctgaaatcgccgacaccttcaccgctaccgaagagagcgactttgtaaacggcgacggtgataaaaaatccaaaggcttcctgtcttaccctcgcgcggccactgccgacaaaacccgtccgttcggtacgctggagaagatggaagcggctgacgtttcctctgatggcctgatcgacctgctgtataagctgaaagccaaataccgcaaaaacgccgtatgggtgatgaattccaacaccgccgccaaactgcaaaagctgaaaaacggcaacggggattacatctggcgtgatcgtcttgttgccggttctcccgatacgctgctgggccgtcctgttcagtatctggaaaccatgccggatgcggaggcgggtaaagcgttcctcgcggttggcgacttcaagcgcggctatttcatcgtggatcacaccactggcgtgcgtacccgtcctgacaacatcaccgagccgggtttctacaaggtgcataccgataaatacctgggcggtggtgtggtggactccaacgccatcaaggtgcttgagctttcaggctccggttcctga

SEQ ID NO: 158487 - DNA, 288 bp, Enterobacter cloacae
atgagttcttttgatacgactaaaacccctttgcctgacatgctgaaacagatcattgaaggaaaggtacaattacctgattttcagcggggatgggtatgggatgatgagcatgttcgttccttactggtcagtattgcacggtcttttccagtcggtgcggtgatgctactggagaccgggggtgaagtccgttttcaggtacgccccgttgagaacattgctggtttaatgccggagccagaacgactcattctggatggccagcagcgtctaacttctcggtga

SEQ ID NO: 158488 - DNA, 1167 bp, Enterobacter cloacae
atgaagaaattactcgaattacgccagcagaaagccgcactcaaaacacagatgcgttccatgctggacaaagccgacaccgaaaagcgcagcctgaacgaagaagagggcaaaaagttcgatgaactccgcgcccaggctgatgcgcttgaagttgaaatcacccgtcttgaagccgtcgccgacgatcagcgcaatctgccaggtacttccgttgaaggtgagccagtaagcaacgacgagctgcgccactacatcatgaccggtgatacccgctctctctccacgctggtgcaggctgacggcggttataccgttatccctgagctggacaaagagatcatgcgccagttgcaggatgatagcgtgatgcgctcgatcgcaacggtgaagaccaccaaaaccaacgaataccagaagctggtatctgtgggcggcactaccgttaatcgtggtaccgaaggtgaggcacgtaccgaaaccagtacgccgaagatggagcgcgttgatatcaaactcaacccgatctacgcctacccgaaaaccactcaggagattctcgacttctccgaggtggatattctgggctggctgtcttctgaaattgctgacaccttcaccgctaccgaagaaagtgactttgtgaacggcgacggtgataaaaaatccaaagggttcctgtcttaccctcgcgcggccactgccgataaagcccgtccgttcggtacgctggagaagatggaattcgctgacgtttcctctgatggtctgatcgaccttctgtataagctgaaatccaaataccgcaagaacgccgtatgggtgatgaattccaacaccgccgccaaactgcaaaagctgaaaaacggcaacggggattacatctggcgcgatcgtctggttgccggttctcccgatacgctgctgggccgtcctgttcagtatctggaaaccatgccggatgcggatgcgggtaaagcgttccttgcggttggcgacttcaaacgcggctatttcatcgtggatcacaccactggcgtgcgtacccgtcctgacaacatcaccgaaccgggtttctacaaggtgcataccgataaatacctgggcggcggcgtggtggactccaacgccatcaaggtgcttgagctttccggctccggttcctga

SEQ ID NO: 158489 - DNA, 333 bp, Enterobacter cloacae
atgaatataaaccacacattaggcatcgtcttaacggcgatgctggtaatttctgattgccatgccaaagggacgccaacgcaggttgtataccgtttcgatgaccatcgctatctggagctgaagggttggaactgcgagggcgaactctggtatacggatacaaaacggggcattcataccgagcctgtgagtcaattttatcaaattttttctaaaacatatattcacccatcagaaaaatatattgccgtaccgacaaaaaatgtatcggaatttatcatttcaaaagactatgggaaaaacggtaatggtgccaacttactgatttag

SEQ ID NO: 158490 - DNA, 654 bp, Enterobacter cloacae
atggccgcaggttgcaatgcttcagaaccgccgacccaggtagtttaccgttttgatgaccaccgttatctggaactgaagggctgggactgtgaaggtgaactctggtacacggatacaaagagaggtattcataccgaaccggtcagccagtattaccgattatttacccgcaaatttatccatccgtcagaacgatatattgcaataacaggctggggcgctggtgggtttatggtgtccaaagactacggacaaacctggcattctgtaggtattgcacccggtcacaatgagccaaatggtgatgatggtcctccttatgaagacgttctttctttcacagtcgtcaacgatcagggttttttacagacgaaacaccggctgtatatgtcatcaaagccgtttgatgatccgcgtattttacctggaggcccaggtattttttatagtcttgctaatggggaaaaagacagtattacttcggaagcaccaggatgggcttggggattgatttacttcacgcgagaaggacttgttggaaaaataatgagtcatgaagccaactatcaggatcttcctgacagggtaccggaaataaagggttataccggctgggaccatatgcggtgcgatatggatgcggggcgataa

SEQ ID NO: 158491 - DNA, 723 bp, Enterobacter cloacae
atgaatataaaccacacattaggcatcgtcttaacggcgatgctggtaatttctgattgccatgccaaaggaacgccaacgcaggttgtataccgtttcgatgaccatcgatatctggagctgaagggctgggactgtgaaggagaactctggtatgtcgatgctaagaaaggcattcattcgcaaatagccagtcaattttatcgaattttcacgaaaaaatttgtgcatccttcagaacgctatattgccattccctggtgggggaatgtaacgggtggtttttcagtatcgaaagactatggacaaacgtgggtaaaaggtggtgcatcaatgtcatcgggagaaaatgaacctgatggaagtaatgccccttattacgacgacgttctttctttcacagtcgtcaacgatcagggttttttgcaaacgaaacaccggttgtatatgtcatcaaaaccgtttgatgatccgcgccttgccgctggtggacctgggattgaatacaccgtggatgacggtactgggcaaaaggtaagcgggaaagtggaaccccgttcacctggttggtcctggggaatggtgtatatgaccaaacaaggtttagaaggctctactgagcaacttaaaaccaattggcagaatcaacatgataaggttccggaagtgaaagattataccggctgggaccacatgcgttgcgatatggatgcggggcgataa

SEQ ID NO: 158492 - DNA, 2166 bp, Enterobacter cloacae
atgacggaagccagaaaaagcccgtatgcgccacgggtaatatctgaaggggatattcctgtacacagggatttgggggaagtcgctcagacctgccgtgtgggcgtaccgcgcccgatgccggggatcgttattctggtccacggcgtgaatgatgtaggcgaagcgtaccagaaccaggagaagggcattatcgcgggcctgagtaaacgtcttggccgcacagacttttacacccatgaatggggggaatacagaatcacccgtcccggccgttcaccggttatcccgttttactgggggtataagcccgtcacccatgcggattatgttgcagatcagaagcggtaccgggatgaagtgggtaagctgaaagaccaggctcacctgccgtacgatgcctatcaggaagataaccctgataaaaaagccgatctgggtaatgacggcaaaggtgcgtttaagtaccagaacgataactttggtaatgcgcttgacgcgaactttgccaaagggggcggcaccttcgcgaacgccacaaccaatattcccgacatgctggggccgggggcgggaggtgtggcgctggcggctgcgggatttgcatcactgcatatgaatgacggggattacactcaccccatctatgaaaacccccaccggatttaccagttttttgccgctcagcgcctcgctgatttgattattcagatcagaaccgaagatgaaactaaaaaagatgtgattaacattgtggcgcatagtcagggcacgatcatcaccatgcttgccaatatgctggtggtgcaggcgggtttgacgccggtgaactgtgtcatcctgaatcattccccgtattcactggaatcccgcaccgcggaaaatattcagcccggccatcaccagacagataaagcccggcaggatacgtttaaaaatttctgtcggctgatggcaacgcattacaaaggcggtgtacttgatgacgctgcgctgaaggaaatggaaggggcctgcaccctgcgtaaaccgtccgataatccattgcgcaaagacgtcaggttttgccgggataataacgggaaagtctataactacttctgtcctaatgatggcgtcgtgtctctggcaaacgttcagggttttggctggcggggcatccccaaaactatcgctggcgatattccaaatttatatcagcgggtcttttaccagcatggtgaggtagggctggctccgacaggaaaagagtttactttgcctgcgcgcatgacgggggatgcggattacagcggacccttaagcaccaattatcctgattcgggatctggcgtgattgtgaacggggaagaattgccggagacgtttatctttgcactccaggggcagaataatcatctcaacaacgataagaaaacaagcgataagccttacaccgctggcatcgattcgctcagcccggatgcctacatttcgtattctgcaaaagcccattccatcaaactgacggagagcgccacgtatgccgtcagccgttaccagggcgtcagctggagtcccggccatatactgacagacgatgagctgcaggtcgaaacactcgggatgaaagagcgtatcgggtatgacaccagggtgattcgtggggtggtgacaggaacgaaggactttctgaatgtcacgctgacctggcttcgtccccgcgacgaactggaaaaggaatggatgaaggcagatccagtcagttacagccagcattcttctatcgtggcgagcgagtacgcgccgtgtcatgcgatggcgtttgacctggcaatcggccagtgccgggcgttcgactataaagcgggtaaattctgggaagacctgttgcaccgtgccgactggcgtgatccgcagaatggataccaatttgcgaaggattatttcaaaacaggactactcaacgaacaacatacaaaaaactacatgaacaaacctgatgaggttttacctagaggtgaatttggcgtgctaaatcaatttaacaacgccacaaccgtaaaaccgtcacgcgatttatcagctggtaatcaggaaatagcaaatctgcaatgggatatgcctaagtcaaaatctgacggtgacctgggaatagcgaaacaaaaatcgtggtgggaatcatga

SEQ ID NO: 158493 - DNA, 2511 bp, Enterobacter cloacae
atggcagggcaatcaaactcgattcaacaacaggatacattgaatcgttatttactgtattttcccagaaataaaaccgttttatctgatgttctctcgtttagaggagaagaagaactcagtaaaccttaccgttatactattcgctttaccaacccaacaccgaacatcgcggttaaagacgtccttaaccagatggccgagtttattctgcgtgccccgaatccgaaagctggctggcacaatcaggagccctggctgccggtgcggcagattaatggcgtaatcacgtcattttcccgcctgaagtcgtcagccgatgaaacgctgtatgaatgcgtgctggagcatgaactggcgctgatggaccgaaattaccgttcggccgtgtacatggatatgacggtgcctgagctcgtcacgaagttaatgaaggacagcgggtattttcagggttacaacatcgatttcgaccagctgggcttcagctacccgctgcgggaaatggttatccagtggaaagaaaccgatctccagtttatccgccgcctgctggccgaagtcgggatctggtttcgctttgaaaatcacgacaaggtaccggccgaaacggtggtgatttttggtgacgggggccgtcgctacgttttcagcgataaaaagctgccatatgtccgtcattcgggcatgaccagtcatgaagagtacgttaccgggctcgaagagcgctaccagcttattcccgaaaacgtgctggtccgcacctataactatcgcgatccgttttctccgcaggcggataaaaccattaccgacaacgacattcctgacgggataacccgcggcaaacagtaccactacgccgatcactttctgagtgaaggcgacttttatggacaggaggcggaaacggctacgttttacgcgcgcctgcgctatgagcgtctgctgaacaatcagagcgtgctggggctgacgaccagcgatccggcactgctgccgggcgtgatttttaacctgacaggagatattcctgccgggtttaagcccggattcgttgtcaccacgatgacgctctccggcagccgcgcggagcactatcgcgccatcctgaagggcattccttatctgcacggctacagctaccgtccggactatctgccgcgtccggtgatagccggaaccgtgcccggccgcgtggcggccattaatcccgatcccacgtatgccggagtcgatgcgcagggccgctaccgcgtgaagtttgattttgacctcgatgaaaaacgtgacggctttgaaagtgcgctgatgcgtctgggcagaccgtacggcggggatgtgtttggttttcacttcccgctgctgggcgggacggaggtggcagtcgcctttgaaggcggcgacccggacaggccgtatatcgcgcacgtcatgcatgacggcagccatccggatttggtcacaaaccgcaacgatacccgcaacgtgatccgcacggccgcctcgaacaaaatccgccttgaggatcgccggggtgaggaacatatcaaaatttccacggagcacgacaagggacaggtcagcgtcggccacctggtcgatgccacggggaaaaaacgcgggcagggcgtggaggcccgcaccgatgactggatggcgctgcgtgccgccaaaggggtgctcattaccacagaggcccagccccgcgcgcagggccaacagctggatatgacggccgccatcgcacagctggaaaaagcattgtcgctggcgatgacgctgcaacaaagcgcgttaacggccggtgccgggaatgtggataccgatcggcaaaaccagctggcccgggtgctgaaccagctgacagggccgggcattctggcgtatgccgaaaaaggagccgcgcacgtcaccccgcagagcctgcagctgtccgccgggaaagacctgatcgcaacagcaggacaggatgccagcgtgaacgtggtgaaaaaattctcgctggccgtaggggaaaaactctcgctgttcgtccgcaagctcggcatcaagatgattgccggtgccggggatatcacgacgcaggcccagcgtggtgccatgcacatgctctcgcagaaagatttcacgatggcgagcactgccgggcagctgaacggaagcgccaaacagggcatacagctggtctgtggcggcggcgggatccgtgtcagtccgaacggactggttaccatcttctcgccaacgggaatcgaactgaaaggccccaacctgaagtatgacggtccggaaagcgcgcaggtcacggtcccgccgttcaataagggcgcatttaaactccgctatcagctgcacgccggagatgacccggagcaaattctcgcaaacaaaaaattcaggctgaccagttcggccggaaacgtggttgagggtgttacggacagcaacggtcattcatcgttactcgatgccgatgacctggatacctacaaaatggagttactgtaa

SEQ ID NO: 158494 - DNA, 294 bp, Enterobacter cloacae
gtgacgcacgtattcggtgaacgcacgttggccacgctggagcgtcttcttggcctgctgtcggcctttgaggtcgtggtatggatgacggatggctggccgctttatgaatcacgcctgaagggagaactgcacgttatcagcaagcgatatacgcagcgcattgagcggcataacctgaatctgaggcagcatctggcaaggctgggcaggaagtcactgtcgttctcaaaatcggtggagctgcatgacaaagtcatcgggcattatctgaacataaaacactatcagtaa

SEQ ID NO: 158495 - DNA, 432 bp, Enterobacter cloacae
atgaaagatagtgttcgttcttttattactgaagtggataataaatatcacacgaatacatttgccttctacggtcataagattgcctctgacggtacgctgacatggcaaaaaacctccattacctacccgaaaaacaggcatgatagtgacagaaagctgcccaacaactaccgggagatccccctgccttttaatcgttctcagatgtatgtgatcacctcatcaaatacgccaggcgatggcacggttccggtggaatcgctgagcgcgatttgccgtaacagcgacatcaaaagcgttctggcaacatgcgttgaacatcagggagcctatgacgtcagcagcctggatgatatacaggccaggcctgccctgcagtttactctcagggccattgtgaaaatggtccaggagataccgaacccatga

SEQ ID NO: 158496 - DNA, 1218 bp, Enterobacter cloacae
atgataggtcgctatcagcagttatttcaggcaaaagaaaaccaacgttttgtgatagcagggttactggcacgtttatcgttaccgatgatggggatcgggatcattaccttgttagcgcaactaaaaggaagctataccttagcagggcttgtttctgcaacttttgtcttaacttatgcgttactatctccacaagtttctcgcttagtggataaatatggtcaatttcgcgtcttgccagtggtgaccgtaatcagtgtgcttggtgtgtttattattatcttaactacgtggttatcattacccgatatcggcttatttatcggagctttattaacgggggcgaggcccagtatgtctgccatggtaagggctaggtggactgcgctgtataaagatcaacccatactacaaacagcctattcattagaaaccgtatttgatgatgccacttttattgttggccctccgttatctgtcgggatcactgtcgctttatttcctcaagcaggtttactggttgcggcaattttattagccgtgggaatggctttatttatttcacagcgaagcacagaacccaaagttgtggcgcatgactctcttgtattggtgaataaatcaattatttcaatgattggcttgcagttgttgattgtattaatgattgctttaggtgtgattgttggcagtgtggatattttaagtgtcacgttggctcaattacaacagcaaccagcgatggccagtttagtgttatcggcctatgcgatcggttcatgtgcgatggggcttgtatttggcggattaacctttaacacaccgttatcacgtttattattcctcagtggcttaatgacgtttctttctattgtgccaatgtggtgggtggtaggtgtttattctttgtctgtggtggtgtttatttcaggattgttctttgcaccgacgatgattattgcaatgacattagttgagagaattgttccacggaataaattaacagaaggaatgacatggttactcgcagggttaaatattggcgttgcgattggtgcgatgctaacgggcaaaatggtggatacctatggtccttatgcaggttatgccgtcgcaatctctggtggagttttagttttcatttcaacatggctgagctacttacgggataaaacacaacaaaaaatggcagttgaatgtgaggaataccattaa

SEQ ID NO: 158497 - DNA, 492 bp, Enterobacter cloacae
atgcattctccagtctttcgcactgccacacttgatgatgttgacgcctgttatgcgattgaaatcgaatcctatgaaggggatgaagcggcaacaaaagaaaaaatagcaacacgagttcagcaatatccagacggttttttatgtatggaattagccggggaagtcgttggttttattaattcgggttgtgcatgggatgttgtgatgtcggatgaagagtttaaagaactcattgggcatgacccacaagcaccaaatgtcgttattatgtcagtagtagtacatcccaaatatcaaggtaaaggctattcatctttactgatgaaaaggtttatcaatgacatgaaggagatgaataaaaaaacgattcatcttatgtgcaaagaacgccatattgacctgtataagcattttggctaccaatatattaaaccatcagaatctgaccatggtggaatgacgtggcatgaaatggtaatgaaactgtaa

SEQ ID NO: 158498 - DNA, 582 bp, Enterobacter cloacae
ttgtttattgtggtgcaaaccacattgagctcaggtaaaaaagcaggattaacttgtggttatggtgtggtgctaggcaatgccatttattctgggctcggtttattcggtcttgtcacattaatggctgaatttggctcattattttcactgattaaaattcttggtggcttatatttgctttattacgcgctaagtgtatttaataacaaaacgcaacttaatctgtccaccgaaaatactacggaacatttcccatctggtatctattttaggcgggggctaatttctgatttatcaaacccccaaaccgttttattttttatgagtattttttcaacgaccatttcgccatcaacaccattatgggctaaattagtcatttggctgggaatagttattgcatcattaatttggcggattattttatgccaaacattctctttaacttctgttcgtagaacctattcacgagttcataaagtggtcggtaaaggtgttgggttaattctaggggcgttggcaacaaggttgatttaccaagggttcagcgaattggctatgaagaaatcaccgttctag

SEQ ID NO: 158499 - DNA, 465 bp, Enterobacter cloacae
atgtaccggcttctgctgctgaacttcgtggattcatttatcgataactgcattctctcctgcgtcgatgaaccggcttacggtggtatcgtgcagtgcgaactgctttttggccttgccgcacacagcggtatctatgtgggtaacggcgatattgttcatcttgatggcgatggaaccgttatcaaaagtaaggctaaagggtttcttgaccggctcgatggctggaactccgctatctcggtgtatacagactgtatggatttgacgcctcagggttgtgcgcgggccgctgaacgggcaaaggcggcagtgggtcagcgctatccttatagcctgctcgactttaactgccaccggtttactgcccgctgcgttaccggcgattcgtgccctgatatctggcttgccagacacctcgattcttttcagaaaggggaccgatggcgcgtatggaaacgatga

SEQ ID NO: 158500 - DNA, 1152 bp, Enterobacter cloacae
ttggctgctagcttttccgtgaaaatactcttgctcatatggggtagtattatatcaagcgcaatggctgccggcatgcttactgatacatcaataagcagcttattgttagccactttaatgtcaggaagcttaagctctgttagtgttttggctattctctctcctcttggaagactggttgaaagagccaggaatatttccaataacccattaagtcaatccctctacactgggcgcaccgatgagtttggccaaatagagtttgctttacgaatgatgcaagctgaaacaggcgccatagtaggtcgcataggtgatgcatcaaatcggcttagcgaacacacccgaggcctactaaaggatattgagtcaagcaatgtacttacagttgagcagcaggcagagacagatcaaatagcaacggcagtaaaccaaatggtggcaagcattcaagaggttgcgagcaatgcacagcatgctgcagatgcggccggaagagcagacactgagacggcatctggccagcgtctggtagcccacacaagccagtcaatcactgcccttgaaggtgaaattaggcaagccactcaggttattcatgagcttgaaggtcaaagtaacgagatatcaaaagttcttgacgttatacgagggatcgccgagcaaacgaatttgttggcactcaacgcagcaattgaggccgcgcgtgctggtgagcaggggcgtggttttgctgttgtcgccgatgaggttcgcagtcttgctgctcgcacacagcaatcgacaacggatattcaaagcatgatcagcgctctacaagagcgagcgcaatccgctgttacagtcatggagcaaagtagtcggcaagcgcacacgagtgtagctcacgcagaggaagcagctacagctcttgatggaattggccaacgcgttaacgaaattaccgacatgaacgcgcaaatagcgactgcggtcgagcagcagggagcagtaagtgaagacataaaccgcagtattatcaatatacgcgatgctgctgataccaatgtacagaccgggcagaataatttgcaaagtgcgaaatctgtcgctcagttaactagcgctctgagcgaactggcaaaacagttttgggaaaaacgaggataa

SEQ ID NO: 158501 - DNA, 315 bp, Enterobacter cloacae
atgattatcgataaagaatacgcacttgtagatgcgaccgcaagacttaacactgacctgagggattatgaatatgaaataaacaacgccgccatcataacatttggcaatgacctcattgaggtaatcgtatatcagttcagctttgtcatcaaagtcagaacgaatagtgaaaaaatcaagcatggtcttcttgttaactttggtaaaaatatagcaaggcaagtttcatccctttgtgcatccgcaatgcgagtctaccctaacgaaaaacacaaaccgagccgtcagcttttccactgcataaattggtaa

SEQ ID NO: 158502 - DNA, 561 bp, Enterobacter cloacae
atgaaaacaatcgattttgaaatccgtacctccgaagtgagcgccagcaacaaaaagctggtgggctatgccgtgcgctggaacagtctctcagaaattatctgggacgagttccgtgagcagtttgcgccgggcgcatttaaagacagcctggcatccggtagcgatgtgcgtgcgctgtacgagcataactatacccagctgctgggccgcactaaatccggcacgctggtgctgtccgaagacgataccgggctgcgcttcgaactgaccccgccgaatacccagcttggcaacgatgtgctggagctggtggagcgcggggatatctccggcatgagctttggtttccgggcgctgaaagaggcgtgggatattgctcagtctccatacctgcgcactgttaccgctgccgaactgcgggagattaccgttacctctatgcctgcttatcctgagtctggcgtggaaatcgcgcaccgttcgcttttctcccaacatcctgaactgcgccgcgctggcgataaccgtcgccgctgggctgagttagcggggctttga

SEQ ID NO: 158503 - DNA, 864 bp, Enterobacter cloacae
atgagttccaaaggcaatttgccggaaatatattattacaggctggagagtgctgtaaaagaaattccgggggctacggttgagcattttattcactatgcatctacattgaggcttgagctatgtgtaaaagtgaattctcctgatttagtgaaaggcatgggagttattcttgatgaagagaatcttgaaaaacgttatacaagcatgagagaaggtgagaagaatggcgaaccattcccctctgcccactattttgttgatatttctggacggtttggtcatatagagatgtcattaatcgatagtccagacgaggattgtaaagttccatctgatatatgtgctgttcttgcaattgacggtcattcaatatcaaaaaatgagactgctcttcttaaagggaaagcggtaactagcggtatgctatatatgccaagaagctccgagtctgagagtaaagattttctattttcaccttattctatctggatgaatgaatgtttttcttttgatataaatgatatatatgtatttagcgatgaaatagaaattttaaaaaatggtgtgggtgcactcaaaaataagattagtggtgacgctggctatagccctgttatagaacgacattctaaaaatcgtcttgatgttattatggccgctatgtcttttaaagaacgataccctagcgattttaacagtgtttgtttaaaacctgatgggagctataacttcacagagtgggcccgccaagtcctagatcgtcctcatttattcaaagactgtgtagttaaaataaagtcagtggatactgttcaaaagtttatctcggatatatataaatctcctgatgatagacggtag

SEQ ID NO: 158504 - DNA, 516 bp, Enterobacter cloacae
atgagaaaatttatcagagacgtcccacttaaatctatttttcatctttttttagttagaggcagtatttatctctttccatttatcacattaccagtaataacacgcagccttggtgtaacacaattcggtattttatcaatgtttttggctgctcaacaatatctgataatgctggtggaatatggttttacattaacaggcgcaagggatatttccagagcggtacacaaatacgacgaaaacaaaatactaagcgaaattttaaagtgccgctttttgatttttctggtttgtactatctttgttgtttctacttattttttactccctgagtatggatattcattctgttacctaatattattaatggcagttttaagttctgtatgtaaccaaactcacttttttattgggaaggagaggacaggttttatagttatatcaactgccatagcaagaattctatctgtctcttatacacatctgacgctgccgacgatctactctgtgtag

SEQ ID NO: 158505 - DNA, 1068 bp, Enterobacter cloacae
atgatcgagtcagcaattaaaaccgccgtcgagcggattaccgggctggatacgtacccgctgctgcttccggatacgatgcaggaaggcgcgacgttccagcgtatttctgacccgcaggttggtgacggactgaggcggaccgggctgtccgaggtccggatacagatttcgctttatgttgtcgatgtgtcgtcttctctctcagagcttgagcagaccgtcgcaacggctgataacgcgttgggtcagcgaatagatagcatcaacgtgtctatggacggcatgacgggtggggtgaaaaactcggctatcgcaattattcagggcaacctggctcaggtggccacgcgtaaatcgttgtcggcttcagtcgccggtaacagcgcacagctggaccgcattgatgaggtgattgtcaacgacagggaggcaacggcgcgctctctgctgagtctgcagacggacgttaacggcaacaaagcatccatcaacaacctgaatcagacgttctcggattaccagcaggctatggccacgcaggtaaacagcatcacggcgaccgttaatggccacacttctgcgatcaccaccaatgcgcaggccattgcgaacgtcaacggcgacctgaaggcgatgtacagcattaaggtcgggttatccagcaacggccagtattacgcggcagggatgggtatcggcgtggagaatacgccatccggcatgcagtcgcaggttatcttcctggctgaccgcttcgctgttacccaccaggccggagcgaccgttacgcttccgttcgttatccagaacgggcaggtaattatcagagatacggtaataggcgatgccactatcacgcgagcgaaactggctgaaacaatcagctcggttaactacgttccgaaccaggctggcctgtccataaactttagaacgggcacgcttgagaactacggttcgacagctggcgagggggccatgaaacagaccaaccagacaatcagtgtacgggactccaacaatgtgttgagggtgcagatcgggagaatcactggtacatggtga

SEQ ID NO: 158506 - DNA, 1296 bp, Enterobacter cloacae
atgaacaaaatcgaagaactgcgtcgccagcgcgcgggtattaacactcaggttcaggccctggcacagattgaaatgaacggcggtacgctgagcgcggagcagctggagcaattcagcgatctgcaggctcagtttgatgagctttcagcatccattgagcgtctggaagcggcagaacgtcttgccgccaccacggcagttccggtgaaggctgcgcagaacggtcgcaatgcaccggctgtgcaggtaaaagccgaaccggcgcagtacaaaggcgcaggcatgacccgcatggtgatggccatcgcggcaggtaaaggcgacctgcagcaggccgcggcgtttgctgcggaagacctgaacgatcaggggctgtcgatggctatcacgaccgcagccaattcaggcggcgcgctcgttccgcagaacatgcagaacgaggtgattgagctcctgcgcgaccgcaccatcgtgcgtaagctcggggcgcgaagcatcccactgccgaacggtaacctggcgatcccgcgactggccagcggctcaacggcaagctatgtcggtgaaggcaaggatgtgaaggcgagcggtgcgactttcgatgacgtcaaactgaacgccaaaacgctgatcaccatggtgccgatttccaaccagctgattggtcgcggcggcttcaacgtcgagcagctgattttaggcgacatcatcagcggcatttccacccgtgaagataaggcgtttctccgtgacgacggtaccaacgacaccccgaaagggatgaaggccgtggccacggcgggtagccgcacgctcccatgggtggcggacgaagaagtgaacctgcagaccatcgatacctaccttgatgccctcatcctcatggccatggacggtaacagcaatatgctgaagagcggctggggcatgtccaaccgcacctacatgaagctgttcggcctgcgcgacgggaacggcaacaaggtttatccggaaatggcaacggggatgctgaaaggctatccgattgagcgcacctcggctattccggcgaacctgggcacgggcggcaaggagtctgagatttactttgcggacttcaacgatgtcctgattggtgaagacggcgcaatggtggtcgatttctcccgcgaggcgacctacatcgatgcagacgggaacaccgtttccgcgttcgcgcgtaaccagtccctgatccgcgtcatcatggagcacgatatcggcttccgccatatcgaaggcctggcgctgggtaccggcgttacctggtaa

SEQ ID NO: 158507 - DNA, 219 bp, Enterobacter cloacae
atggaaattgatctcgataacttagtctttaacgggctggatgaagcagaagagcgcaacgcggaacgtctcgacgatgcggttaaaaggcccaggcgattgtcgccgatgacgactgcggcgatgcctgcaagatctgaagaaaaagcaccgggctccccggtgcttttttatggatgccttttgctacccgatatcagatctccggcgttttgctaa

SEQ ID NO: 158508 - DNA, 783 bp, Enterobacter cloacae
atggaaatgtgggagcataaatttgaacttaaaaaggatagatgggtttatgttccaacgcgggagattgctaagctagggaaaaagattcatcaatatttacggtttaaatggaatgcgcccttatacttttatcatttgcgagatggtggtcatgttgctgctgctaaaatgcatagtaaaagtgattttttcgcattggtcgatattaaaaatttttttaactgcactactcaaagccgagttacaagagagcttaaaaagtttataccctacgctgaagcgagaaggctggcaaagctttccacagtgaaaatagctagttttcagccaattaaaagagctgtgccttatggttttcctcaatcacctatattggcctcactatgccttaataactctcatgctggtagtgtaattaatagaattataaagtctggacatgtaagaattagtgtttatatggatgatattattttgtctggaaatgatatcactattctaaaaaaagaatttgaaaatattttaactgcattagttaaatcaaagtacgaaataaatgagaaaaagaaaagatatcctgcaccagaaattgaggtgttcaacatccttttgtcaaagaatagtgtgaaaatagcgccggaaaggatggttgcgttcattcaggcatatgcgaaatcagaaagcgaggatgagcgtggcggtatcgctcgatacgtatacagtgttaatgagcagcaggcaaggctgcactttcccaaacacataccccaggatgagtaa

SEQ ID NO: 158509 - DNA, 1263 bp, Enterobacter cloacae
atgacgcactggcataaggctttcggcattacggattacgtctggtatcagctgccggacggcgcggtatatgttggcggcgcggaaaaagccctgtttgctggtcgcccgattgagatcccgcatgaatttaatcagggggcggccggggggaactcaatgacgcttcccctggtgcagagtctgcgccccggcgtggagctgaacggggaacgggtgacaaaagtccacctgcaaaatgacacgatggctgtcacctggacaccccgcaaccgtgcgacgggtaagccactgcaaaaaacacccgttcagcgccagattgaaagccattatccggagctggcatccgggatgcatttgccaaagtttggccgtgtgatgaatcccgttgaggcagtaaaaagcggcaatttctccgatccgttccgtccccgctatgcggttgacgtgcagctgctggacgcggacggcaacccggaaaaaaacacgcctgtttattcggccgttccgctgccggttcctatggcgggtaatgattcggggatgttccagtttccgcctgaagggactctggtcgaaatcgcttttactggcggacggccggataagccttttgtacggcagaccgtgccggacggaaccagcctcccggatatccagcctggcgaacagctgcaacagcagcgcgcggaagtatcgcagcgcgtcacccaggcgggggactgggtgaggcagacagaccagacgatcagtgaaacctctatggcgcgggtggttaaagccgatacagaacagcgggagctggtcagccgggaaacaacagttaaggccacggataaactgactgtgctgggtacgtccacattgctggccggagccattcagcaggtgtgcacgggggattacagccaggctgtgaataaccgcgtggcgagtatcggcggcaatgatgaaacggacatagccgggagccagacagtcacaacgggtaaagacctgatcgagaaaattggccagatacggaaaagcgtggcggccgtgcaacagcagattattgccccggtggtgtggattggctctggaactatcaacgtggcacagctgatgctggacacgctcgacgtggttaaggagctggcagagcaaacggcaagccacacgcacagcaatacagggacaccgaccaacgcgggagccatccggaacaccggaacgaaagcggacacgctgaatggcaaatactccccggtgattagcaagtaa

SEQ ID NO: 158510 - DNA, 225 bp, Enterobacter cloacae
atgccctggatttttttaattatatttagtttattctgtgtggctgtatgcgcgattaatcaaagttattcaaaagtaatgtcttttgctctaactgcaatgttcactgtattttttactatttattactttatttcaagggcgcttttgatattcgatatgatttgcttttcaatacttatttatatatcgctgcaaattttattggtgtatttcagcttgtaa

SEQ ID NO: 158511 - DNA, 777 bp, Enterobacter cloacae
atggctttagttttagaccaaatacggcagtttgtggcgatttgtatttctttctttgccttcaatcatctcctacagggtaatacaaaaaaattctataagtttatattatttgctgctctgttccattattccgcactgtttgttctgttgtttaggatgttaatcaacttaaagaaaaaaagaattattattgctggcctagttgttgtggttttctttgtttttctcggcggtgtgataatttttaatttaggatttgtatctaacattccagtaattggtttagagctttatagaaaagttgctatatatgttcgtgagttggatacctttaaggcagagataggttttggtgtatgtgctgatattcttattattttttactatttaatgcgaagggaaagatacaatcagttagataaactgtgggcgttggcatttatgtctgcatgttttcacatagcattctactttatgcctgcattttcacgatttaactatttttcaattctacctttatcttatatatttagtcatgctcttacaagccgaagaaatagaatgggggtcgcacagtttgggaccattttgggggctgtctcgttaactatactaatagtgacagtgaagacattcactgatccaaagaggccgtcatgggatgaatattcaccaagtgcgatccttttcaattctcaggaattagataatctgagaagcattcgatgcgcagcattaaagaatgaaattgaggatttttgcgcaacttattaa

SEQ ID NO: 158512 - DNA, 159 bp, Enterobacter cloacae
atgggagaagtgattcgaatactcaacccttatcttatagtaacatttccgttacgaattgtcaatacccaaaccaacattttattcacttttcttgcatttttattcaaattcgagtgctgcgtattcttcggctatgtcctgcgcaagcccgtctaa

SEQ ID NO: 158513 - DNA, 150 bp, Enterobacter cloacae
atgttcattttttgccattggtatggaatctttgaaaagggcgctactaagcagacagattcagactatcgaaaaatcttaaaaggtgctctagatatgctgaaagtttccggtaaagctgaaataaaaataggtctggaaattttttag

SEQ ID NO: 158514 - DNA, 396 bp, Enterobacter cloacae; identical to SEQ ID NO: 105189

SEQ ID NO: 158515 - DNA, 1026 bp, Enterobacter cloacae
atgtacgagcaaacatcgggatgtattccacttttgatgtgtggtgattctcttgaagttctggcacagctccctcctgactctatcgatttcatcatgacttcccccccgtactgggggaaacgagaatatgataatggaggaattggattagaaatagatcacatggattttgttaaaaatttggcgaaaatttgcctacaactcaagagagttttaaagccaacaggttcattttggttaaatctcggggatacatataaagataaaaatttattgggattaccttggcgtgtggcttttgaattaaccgataatcaaggatggattcttaggaatagtgttatatggaataagttgaaaggaggcatggataacagcgctgatcgccttggaaatgttcatgagaacatatttcactttgttaagaaaaataaaggttattactataatgcagacgcaattcgtactaaatctagagatgcaaaagtagtaaacggttccgtaatttctgctactggtgtttcaggtgttagatacaaaagacagattgagctttctactactctgacaccgcttgaaaaagtcaacgctctttcagcattaaatggcatgcttaatgatatttcaaccggaaaatattctgatttcagaatggtgattcgtgggcagcaaagaaccacacactcagaaagtgaaaaagtttctggaagagcaaaagaacttagagataaaggttattattttctgaggtatcaccctaaaggtagtaaacccgctgatgtttgggatattttgccagaggatacacaaaagagaaaatcccactttgctgcttaccctttagacctttgtagaatcccaattctggcaacttgtcccgaaggtggcattgtattggacccattttctggtactggttcaacattgattgctgcatatgagttaggtcgtaaatctgttgggattgatatatcagatagctatttaaagctcactatggaaaggtttaatctattaaaatga

SEQ ID NO: 158516 - DNA, 783 bp, Enterobacter cloacae
atgcaagagcaacgttgcccttttaggcaacggacatgcttcaaaacccggaagtcagaatcgaatgtcgccattggtacatgttctgtgctttacggaagagatccccgtccaataatgatctgtccagcaaggcttctcgaacgagggcagatatttgcagattgtctgcacttgcttactaatcatgaaccaggtaatgaatttcatgttgttccagaagttaaaatcccaggaggtaatgttgacttcttcttagcctctgtaagaaacggaaaggtaagagattttgtgggtatagaactgcaaacaatggatacaacaggtactgtatggccagagagacaacgttttcttagggaggtaaatatcattcccagtgacgacgcagagcattcagtcagaccatatggtattaactggaagatgactgccaaaactattttggttcaaatgcatcataaagtgaaaacttttgaacatataaataaaaaacttgtattggtggtgcagaaccatttgttgaactatatgtcaaatgaatttaatttttcacatttgaatcagccagcaaggattggagactcattacattttcattcgtatagcatggagcgaatcggagaagaatacagaattgagatgaatgcaagacttagtactgatgatgatggtatttcacaatgcttaggtttgcaagcggaagctcgtattgagcttgaacaaatattactaatacttgaaagaaaaattggtccaatgacgttatttaggatgttttga

SEQ ID NO: 158517 - DNA, 162 bp, Enterobacter cloacae; identical to SEQ ID NO: 113199

SEQ ID NO: 158518 - DNA, 279 bp, Enterobacter cloacae
atgactaaaccagtaaaggtcattgaggtttctgagagcttcgttgatgtctatgctgaagttgctgcgattaccacctatgaggcacaaagcagcagtcatgttaattttggattcatgcgtgaatttatagaatcatatgctgatgagaatggacagccttcatcttcgcaagtcgtgctgaaaaaagttgcgtccattacgatgaccgatgccagagcaagagctctctatgatgctcttggtttggccctcaaggtaaaaggagaagaaaaatga

SEQ ID NO: 158519 - DNA, 282 bp, Enterobacter cloacae
atgacaaatataatgaccttctcaagtactgaagcaaattttatgcctggtttagctttaaaacctcaggtttggactgtgtttgcttctgtttcttcaaaggctgaagttattggtactggtgcaatcacaaactttgttatcagttcgcaacctcatggttttaattttgatcttgcaaagatgacttcaagggttgaatgtgacgaagttgtaatgccatcagacatgaacactgttgaagagcttgatgcttggcttatggggttaaaccttgaatga

SEQ ID NO: 158520 - DNA, 798 bp, Enterobacter cloacae
atgaatcacaagacttgctcgaaatgcggagtggaaaagcccacatctgaattttacaaaaaaccatcaaataaagacggctttgagggtgcctgtaaatcttgtcgtaatactcagattcaaaagcaaaggcttaccgacgctggcagggcatccgcaaaaagagcacaagaaaagtatgcaaaaactgagaaaggcaaggccaatcagtttcgcaaagaccacagtgaaaaagggcaggctcgcagagcgcgattcctgactggcgagactcgaaggaaatggaatgaggaatactattcccgcgctgacgttaaggagaggcagcgagaagcccagcggcgtcattatcacagtgggaagggcatgagctacatgcgagaatataactctcgcagcgatgtaagatccaagaaagccatttatgaccttgagcgaagaggaaatcctgaactacgagaagcgcggctcgcgcgtgcgcgacagctttcacgactggagcgcaataaggcagtaaaaagagcttatcaggagagcgaggcagggcgaggatctcggcgacgcattgataaaaagagatatttttctaacctgattaaggtgaaggcgcgcagattgctgcgtacggaagtggataaggggctgattttgcgcccgacaacttgcgagtcttgccattccgtcggtgctgttcacgcgcaccacgacgactactctaagccacttagcgtgcgctggatgtgtccgcaatgtcataaagactggcatcgattaaacggacccggaattaacgggtag

SEQ ID NO: 158521 - DNA, 288 bp, Enterobacter cloacae
atggggataacgcaggcgcgcatcaatcacctcagtgattgcctgtacctgcgttttattctgcaacatctggctggtgctgtcgtcggtgtcgcgtaccacgcgaatctgccagcccgtactggctttcggaagattaatgcgatgggtcagttcatagagagaactgagcttctctgtgacggttttagtcatgactgtcgagtaagcgccaccgtccaccgccagatcaatatggtactgaaccgtagtgccgacaatatccgcatcgttttcctgctgctgtaa

SEQ ID NO: 158522 - DNA, 228 bp, Enterobacter cloacae
atgatgaaatcaggaaatttgataaggtatttgtggttttttatctgcgttgtcacatgcctggtgatggcgtatttatgcagcatggttaatccatatgatgacagaactttgtcctccgcctttaccagctttctgaggccaatcggggccgggtttggtacggcgattgtccttatcctgatcactagcattgcgcgagagctgcggtgtttctgcaataaataa

SEQ ID NO: 158523 - DNA, 510 bp, Enterobacter cloacae; identical to SEQ ID NO: 83605

SEQ ID NO: 158524 - DNA, 249 bp, Enterobacter cloacae
atgtgtccggttaacgttatcgaaatgcacgcacagaaaattcaggcgctgctggatgagctggaagccaaagaccagaggattgctgagctatcacaccatcttcaaagcgcgcacgcctttgtcgagcatacagaagcgtttggtcacgctgcatcaaacgggattctgtgctgtggtgatgcgcagtggaatattgatgcgtctaagtcggtgctggccgcagccggtaaaggagaggtatcatga

SEQ ID NO: 158525 - DNA, 198 bp, Enterobacter cloacae
atggggcagttagtaacacttcatgagtgggcatctggtcctaatggattcaaatatccattaagcaactcagcattaaacaaaatagcaaagaccaaacagacttatccgccagccttaaagcaaggtcgacgctgggtgaaagaagctatcgagcgctattgcgtcatcgccgggatcgaagtgagggtgaaatga

SEQ ID NO: 158526 - DNA, 837 bp, Enterobacter cloacae; identical to SEQ ID NO: 84320

SEQ ID NO: 158527 - DNA, 774 bp, Enterobacter cloacae; identical to SEQ ID NO: 48585

SEQ ID NO: 158528 - DNA, 186 bp, Enterobacter cloacae; identical to SEQ ID NO: 48586

SEQ ID NO: 158529 - DNA, 1176 bp, Enterobacter cloacae; identical to SEQ ID NO: 48587

SEQ ID NO: 158530 - DNA, 978 bp, Enterobacter cloacae
atgtctttagaaatgttccagaatcaggttcgctcaaccattaccgagcttgtcctgaaacaatccgcactgttcggcgctgccactggcggcgcaatgatgctgggcagtgagaaaaccattggtgattatgccgaggaatccagctggaagctgatcgccgggctggttactgcccgtgacgcttattccacttctgctgtaacggcgaaagaaatcgagcagatcctgaaacgtgcgccgcgctttgactggcgcatggggccggttaaggtgaatgacgggttgctggcgcgtattaactccagccctgaggacgcagccgccgcagtatcggcacaggccgcgcagggcatcattgagcagcagatcacgcaaggtctggccgcgctggatgcctgcctttccacgaacgcgaagttttcactggctattgccgccgatcccacagccgcaaccgggcaaatcactccgaaactcagcagctttgtaaaagggcgccgggcattcggtgacgctggccagaatatcatttgctgggcgattaactccgacgtgtattacagcctggtagagaacgacctgttcaagaacgccgagcagctctacaagctgggtgacattgccgtgttcactgatggcctgaacgggcgtttccttgtcactgactacgttccgtcaaatacagcttatggcatggtgaacggcgctgtaatcattgataacggctaccagtccaagtttgttgcacagccgcagctgggtggggaatccctcgtcacgatgatgcagagcgaaggtgagttcaaaatcgctgttaagagctaccgcatcaaatcgtcactggccgacacgctcgccaataaggtatcgatcaccgccgcgcaggttaaggacaaagagaactgggaatatttcgcctctgacgacagccgcgcacagccaggcgtcaaattgacctttacgcccaaagcataa

SEQ ID NO: 158531 - DNA, 669 bp, Enterobacter cloacae
atgctgaaactccgcattacctccgacgatttccaatccctcgataaagccctgcaacccttctacgttgaacagtctgatggttacgcgctgaacgtcgaacaggacgacaccgccgccgcaggcctgaaagcgaagaacgccgagctgctgactaagttagccgtggagaaagagcgccggattactgctgaggcgcagttaaaagtggttaacgaaaccgtcgccgggcacgaccagaaaatcaaccagatcgccggagagcgtgacagctaccgcgccgggctggagaaatccctcattgacgagccgctgacagcgttcatgcgctccaacttcattgatggatcagacgattttgtggtgccggtgctgaagaaattcttccagcttcaccgcaatgacgacggaacctatgagagtgccattttcatcaacagcgatgatggcaacggccagaaggaagtaagggcagacgtagaacagctgcgcaagcacttacacgctgacggcaaactcgactgggttctgaaagcatcgggaacaagcggcggcggtagtacgtcctctgtcagtatcaattcatcaaccactcaccgttacgagccaggcccgaacggacaacaggatctcaccagtcaggctcgtgaaatcatcggacagaaataa

SEQ ID NO: 158532 - DNA, 528 bp, Enterobacter cloacae
atgtcgagcaagaacgtgaacggccaatcagcagtgaagaacattcgattcccgcatcaactacttgaggatatcgcagaggcacagggtgatctgagtttcgcagcctgggtgattgatgcctgcgccagaaagttagccggcggcgctacgccagaaatctcactaaacgcggcagtgaagcggctggaatccatcgcgcagcagttcgaaactatccaggagcgggcattgccagcgattgaggttaagccggtgaagaccatcagcagcaagccagtaaagaaaccggctgagcccaagacacacactgtgcatacaccaggcgataacggtgctgatccaagaatcgcaccaggcacattcaatgctgccgttctcgagctggccagaaccataaccagcaatcacgaaattgccgatcgcctaaatgctgatggcgttagcccgggcagaggtggcgaactcactcacagagtcgtgatgaatacgaagacgcgcctgaagaaatgggggtacctggactaa

SEQ ID NO: 158533 - DNA, 1602 bp, Enterobacter cloacae
atgggatattcgacacccaaagaacttgatgtgaagattctggaaatgagtgtcgatggatacactcagaaagagatcgcactggcgttggggctaaacaaccatcagactgtgagcaatcgcctccgggccatgggagttcgtagctacgcccagcgcaaagataacggctatcaacgtcggccggagattcagctcgatatgtttggccatcaagaggaagagccaaaaggtaagcgcccctatcaatttagcccggttattttagctcaggcaaataaggagaaaagccaggattcaagcggcctagagccttatttacctgacgtgaaagttgatggcctgcagttcaatatcaatctcgttattccagcgttatcccctctctcgatgaattaccggtacggcaaaaagaaggcgccggtggctgatcacgttgtcctgcagctggtcgaagagttcagacgcgcagagggattcgagaggatgcctcgggaatatctcgactatgttgctcctgtggttatcagtaacttatatctcgcagggaagcatggaaggcaactgacctactcccgggacaagaacaaacagaacagcatggtgaggcgctttatcgacttcttgactgctgccggctacatcgttaacaccatacagcccaagcagattaacgaagataaccgggtgtcatcatggtgtgcgccaactcgacctatgttgcgcctgcttaacctgcctgatggctggacagttcgcctggtagataattacaggccggttttgttgcgaaccaagaagaacgggagagatgaggaagttaagccaaaggttgcggagcttaaggagtatcaccgcgccggtgaggttgtcattaggtacaaccgggctattgatgacgccgagatccgctatggtggcctgcctatctcatgctacctgcaccggatatttaacgaagacatgcagcacggcggccggttctatgggggcatgcaccagactatgccaaagttatcccgtagcgctataaccatcgatggtgagctgacagttgagatcgactattcagccattcaccctaaccttctgttctggatggctggccgtgaagcgcccgaggatgtgtatcagtctatccaggagattactggtctggatcgcaatctggtcaaggcgctgctgcttaggttactgaacgctaatagtgacgatggattcaagcgaaccgttaccaaatcgggaaaccctaacaccaaggccgttgccattcgtaatccgggagacaagacggggctcctggagggattcatccctgacgtgcctgataactacaagggcggggatttcatcgcagcgattaagtctgcgttcccggagctggctgagtttatcggacgggataaattgggcgtaaccctgcaatggcatgatgccagaatcatgagctcagttatttctcgatgtcttgaccatggttttgtgtgtctgccggtgcatgactcaataatcgttccaatgagcaaaaaggatatcgccattgagattatggcgcaggagttttccagctatacaaatggtcgaaatatccgcgtcagataa

SEQ ID NO: 158534 - DNA, 177 bp, Enterobacter cloacae
atgactagcacagatatccaaataaaaaatgatgctttggactcactcagaaagatacgggcattactaagcgccgctctgtacctgacatcaaatgaagctgaggttgagatgtcgctggaattagtcgatttggctgaaaaagtagccgctactgtcacggagggcaaggcatga

SEQ ID NO: 158535 - DNA, 873 bp, Enterobacter cloacae
atgaacctgcaagcacttaccgccaaagcgcgcgccgttcgcggcaatatcgtggccgcagtttccaccaaaggcagccgcaccaaatcgcccgtttacgagcgtgacgaacaaatcaaactgcgtgaacgtatccagcagacgcagcccgagtgggtgttgttgtggtgggatatttccgtggttactggctggcgtaccgctgacgtgtgcaacctgcgttactcctgcatcgactggacgacaggtaaagcaaccatcaccgtggccaagcagactaaggccgcagaagcgcgtgcaacccgcaaaggtgttgagctggtacgcaaggcccgtaaagacgcctgtaggctctcaggcgaccacgtaggctatatgcagtgggatagcgcgaccgcagacgagatcgccgcgcacatgacggcagaggagcaggaagcgtgctttgagctggtcagccgtgccgatgttaagcgtgacaccaaacaactccccccaggcatcctgaagcgcctccgtgaacgtcaggagcgcaacctgattgacgatgatctcgtattctcccgctcccagattgaaagtaaccgttgcgccagtctggatggccctatcacgcgccagagtgtctggcgtcgtctacacactgtgtgtacatggttcatgcgccacgttaacgccaagctgcgtctcagcgcctacagcacccgtaagattgccgcattcaacatgatgcgccgtggaggtgagcagggcctgctgatcgcgtctgagatgctcggacatagcaacccggcagtaactcgcacataccttcagctgggtagccaggctggagaactccaggcagcaatggcaatggaggtggcggcatga

SEQ ID NO: 158536 - DNA, 138 bp, Enterobacter cloacae
atgagtatgatttcaatcataacaatcgccttgcgcatttgccagggcagaaccgtgacaatccccgcaatgagcgccgctgacttcggacagctgctcgatgccgtcgctgtcctgcgcaaggagatcgcccaatga

SEQ ID NO: 158537 - DNA, 165 bp, Enterobacter cloacae
atggctaccaagaccgtgcagaccactttccgattgactgaagatttgatggctcgccttgagcaagaggcaaagcgcgttcggatggaaaccggggagaatgtgactgtgccggagctattgcgtcgttatgctgccagcttgcctgaagtgaagaaaccctaa

SEQ ID NO: 158538 - DNA, 192 bp, Enterobacter cloacae
atgagtctgagtaatcgagttcgacgcctgcaacagcaggccaagcagccggaaggggccgcagtggtgatgattatcagcgacgtaatggacgagctgggcggcgataccacgccccgtacatacaccccggtgcaatgccgggagttcgataactggatggagcaatttagcagtgagcaaacacactga

SEQ ID NO: 158539 - DNA, 168 bp, Enterobacter cloacae
atgtcattaaaagcgcgtgtcgagaagctgcgcgagcaggtgcaggcgtccgcaacacctgacgccgttccggtagtgttccccggcgatccggttcctgagtctgggccgtacatcgctattcaggtggttgatagccgtgtgagggatgacgatgagtctgagtaa

SEQ ID NO: 158540 - DNA, 168 bp, Enterobacter cloacae
atgtcaattagagccagagttaccaggctgaaagagtcagtaaaacgcgcaaatcccccggttcgcctgattatggagccgatccccgcgctgacggtggatgagtgggaagcattatcccagaagcatcacgagaagatgttgcagggaggtggtgcatgtcattaa

SEQ ID NO: 158541 - DNA, 273 bp, Enterobacter cloacae
atgtctgcatgtcgcctgattctggaacgagtcgttccacaaaccaaaccaacctacccgccgttgtcgttcgaactggatgacagcgatctgccagccactgcccggtcaatcctccgcgcggtcgctgatggcctgttaccaaccgaccaggggaaattacttctcgatggcctggcatcaatggcaaaagtcattgaggtgtcagagctgcgcgagatggtagaacgcctggaagatgagattaacagcgccaagcgcgacgggtattaa

SEQ ID NO: 158542 - DNA, 531 bp, Enterobacter cloacae
atggcgagcaccgaagaaaaacttctcacactcctgctgtcggcggagcatctgaaagaggccgcaaaagagcagcagaaagccgtggcggattcgctggcggtggcaagggaaaccctgaaaggctaccgggaaatatcggacagtgtggcacagcaggtaagggatgaagtccggcaggaagtgcagaaaatggatgttgcggggctgattggcgagcgtatcagcgctgattttcagcgtctggaaaaatccgtcgggaacatgaaaatcaatgcggacgcgctggacaaggaaatttccattatccgcagtaacatcatcgcggagtacaacacgctgcggggttacagctggaagtggtttgctggggttgcggttgcctttgtcgtactgatatttgccacaagctggtttgtgaaaacggaactacaggacaattacaacgcgtctgttgccgtctatcagaaagtggcagaccttgaaaagctgctgacaacggaacagaaaccggaaaagaaaaagaactga

SEQ ID NO: 158543 - DNA, 936 bp, Enterobacter cloacae
atggcaacgtatcatctcagcgtgaaatttggcggcaagggtaaagcccttgctcatgccagttacattacgcgggaagataagttcagccagcgccaggatctcgagcacaccgaacacggcaatatgccggaatgggcgagagatgaacccgcccatttctggcaggctgcggatgcgttcgaacgtgccaacggttcaacgtacagggaaattgagatcgctctaccccgcgagctgaatgaagcgcagcggctggcgcttgtccgggattttgtgaagcaggaaacgggcgacaaacatgcatggacgtttgcgatccacaatccgaaagccagcattgacggcggcgaacagccgcacgcccatatcatgatgagccagcgcgtcaatgacggtattgagcgcagtcccgaacagtatttcaggcgctataacgccaaatttccggcgcgtggcggcgcgcgcaaggactcagggcataatttaacccctacagaacaaaaacaggcactgaaagccctgcgggagcgctgggagcgtacgcacaacgcgcatatgaaacgatatggctttgagcagggttttattgatagccggtcactgaaaacacagggtatcgaccggaaaccggaacagcatctcggttttgaagcagccggacgactggacgacagccagaggcaggatattaaagacagccggacgttttcagtcgtggatgtgcctgaacaggcgaaacatatcgaccacagcgaccgtagctggatgaatgccagcggtatcgaggtaaaccggaaggaactggtcagatctctgacgcatgatatctcgcagcagtacgggcgggagatggctgcacgggtcacaaaacagggaaatgttgaaatagagcgcgtgaaatccctgtcacgcggattttccataagcaggtaa

SEQ ID NO: 158544 - DNA, 387 bp, Enterobacter cloacae
atgcggatcagtaacgtcgaatggcttaaaaagcgcatagccttcatcagaaagctgggagaaaaaacggcacggcaacggcagattatcgatctgctggatgatgaagcttcgctcagtgagactgaaagacgactgctccacgttctggcaaccgctgaaaaaaacgcgttgcaggaacgggatgccgcacagaaaaaggcggttcaggcgcggatttcagggcagaaaaaccgcagggaacgcaatcacagactgtttctggcggctggtctgatgattgacgcgggactggttgatacaaaaacgggtgagttgaattttgaccacgaaaaattactgactgcgctgaaacgggtacgctacgatctggaaacatcggcgtga

SEQ ID NO: 158545 - DNA, 531 bp, Enterobacter cloacae
atggcgagcaccgaagaaaaacttctcacactcctgctgtcggcggagcatctgaaagaggccgcaaaagagcagcagaaagccgtggcggattcgctggcggtggcaagggaaaccctgaaaggctaccgggaaatatcggacagtgtggcacagcaggtaagggatgaagtccggcaggaagtgcagaaaatggatgttgcggggctgattggcgagcgtatcagcgctgattttcagcgtctggaaaaatccgtcgggaacatgaaaatcaatgcggacgcgctggacaaggaaatttccattatccgcagtaacatcatcgcggagtacaacacgctgcggggttacagctggaagtggtttgctggggttgcggttgcctttgtcgtactgatatttgccacaagctggtttgtgaaaacggaactacaggacaattacaacgcgtctgctgccgtctatcagaaagtggcagaccttgaaaagctgctgacaacggaacagaaaccggaaaagaaaaagaactga

SEQ ID NO: 158546 - DNA, 936 bp, Enterobacter cloacae; identical to SEQ ID NO: 158543

SEQ ID NO: 158547 - DNA, 387 bp, Enterobacter cloacae; identical to SEQ ID NO: 158544

SEQ ID NO: 158548 - DNA, 348 bp, Enterobacter cloacae
gtgaatgaagatgatatctacgctttgctttctcccctggcagaagggcgggtatatccctacgttgcgccattaggtagtgacgggaaaccgtctgtctctccaccctggattatcttttccatcgtcgatgatgtttccgctgacgtgctgtgtggccaggcagagagcagggtttccattcaggtagatgtgtattccactacgatcactgaatcacgcaccctgagagatttggcgctcgcttcgcttaagcccttaaaccctacagaggtggtaaaaatccccggttacgagccagattatcggctctaccgtgccaccctggattttaaagttaccccctga

SEQ ID NO: 158549 - DNA, 450 bp, Enterobacter cloacae
atgattgaaacgagcctcgatttttccggattgaatgacatcgcaaaggatctggaggcgcttagccgtgccgaaaacaacaaggttctgcgtgatgctacacgcgccggggctgaggtgcttaaggaagaagtgatcgcacgcgctcctgagagaaccgggaaactgaagaaaaacgtggtcgttttgactcagcgctcacgccgccgcggggagatttcttccggcgtccatattcgtggcgttaacccgcgcaccggcaacagcgataacacgatgaaggcgaataacccgagaaacgccttttactggcgctttgtggagattggcactgcgaacatgcctgcgcatccttttgtgcgacccgcttacgatacgcgcgaggaagaggccgccagcgtcgccattgctaggatgaatcaggctattgatgaggtgttgagcaagtga

SEQ ID NO: 158550 - DNA, 339 bp, Enterobacter cloacae
atggaacctggacgattccggcacagggtaaagattctcacctttacaacttcgcgtgatccttctggtcagccggtggagtcctggactggcggtaacccggtttcggcggaggtaaaggggattaatggtagagagcaaatgtcaggtggcgctgaaacggcacaggcaaccattcgcgtctggatgcgcttcaggtcagatgttaacgcctcttcacgtctcgaagtccttagcggcccctacaaagggcaggtgcttaatatcatcggtcccccagtcgcaaacgcgacaggaacccgcctggaaatcctttgtaaaacgggagccgaaaaatga

SEQ ID NO: 158551 - DNA, 327 bp, Enterobacter cloacae
atggcgatagatgttctcgatgtaattggcctccgtctgtttaaacagcagattgagtttgaggaagacgacagggacgagctgatcacgctgtacgcccaggccgcttttgattactgcatacgctggtgcgatgaacctgcatggaaggttgctgctgatattcctgcagccgttaagggcgctgttctccttgtctttgctgacatgtttgaacaccggaccgcgcaaagcgaagtgcagctttacgaaaacgctgcagctgaacgcatgatgtttattcatcgcaactggcgcggtaaatctgaaccagaggagggctcctga

SEQ ID NO: 158552 - DNA, 1158 bp, Enterobacter cloacae
atgtctgaactcgctctcattcaaaaagctattgaagaatcccagcataaaatgtcccagcttttcgaagcacagaaagcagaaatcgaaagcacgggtaaggtttccaaacaactgcaggaagacctggcgaaagtacaggaagagctgtccaaatcaggtacccgtctcttcgatctggaacagaaactggcatccggtgctgagaatccgggtgagaagaaatccttctctgaacgagctgctgatgaactcattaagtcatgggatggtaaacagggcacctttgacgcgaagacgttcaacaaatcgcttggcagtgacgctgattctgctggcgcactgatccagccgatgcagatccctggcatcatcatgcctggtttgcgccgcctgaccatccgcgatcttctggctcagggtcgcatctcaagcaacgctctggagtacgtgcgtgaagaggtgtttaccaataacgccgacgtggtggccgagaaagcgctgaagcctgaatcggatatcaccttcagcaagcagaccgcaaacgtgaagaccatcgcccactgggtacaggcgtcacgtcaggtgatggatgatgcaccaatgctgcagtcatacgtcaacggtcgtctgatgtatggtctggcgctgaaggaagaaaatcagctgctgaacggcgacggcaccggggataacctggaaggcctgaacaaagtggcaactgcttatgacacctcgctgaatgtttcaggtgacacccgcgcagatattatcgctcatgcaatttaccaggtgaccgagtctgagtttagcgcttccggtatcgtcctgaacccacgcgactggcacaacatcgcgctgctgaaagacaacgaaggccgctatctcttcggcggtcctcaggcgtttaccagcaatatcatgtgggggctgccagtagttccgactaaggcacaggccgccggtacctttacggtgggtggtttcgatatggcctctcaggtatgggatcgcatggatgccaccgtggaagtcagccgtgaagaccgcgataacttcgtgaaaaacatgctgaccatcctgtgcgaagagcgcctggctctggcgcactatcgcccgacggcaatcatcaagggcaccttctcttctggctcatga

SEQ ID NO: 158553 - DNA, 678 bp, Enterobacter cloacae
atgcctgagatcgtaaaaacgctgtctttcgacgagacagaaatcaaattcaccggtgacgggaagcaggggatttttgaaggttacgcctcggttttcaataacaccgattcagatggcgacatcattctgcccggggcgtttaaaaacgcactggcaaaccagacccgaaaagtggcgatgtttttcaaccacaggacgtgggaactgccggtaggtaaatgggacaacctggcagaagaccaaaaaggcctgtatgtacgcggtcaactgacgccagggcacagcggggccaccgacctgaaagctgcaatgcagcacggtacggttgaggggatgtcagttggcttttcggttgcaaaagatgattacaccatcattcccaccggccgcattttcaagaatgtccaggcactgcgtgaaataagcgtctgcaccttcccggccaacgaacaggctggcattgcagccatgaaaagcgtcgatggtattgaaacgatccgtgatgtggagaactggctgagggattcagtcggcctcaccaaatcacaggcagttgggttaatagcccggtttaagtcagcgattcggagcgagtccgagggcggcggaaacgaagaacaaatcaaagctctgcttcagagcatccaatctttcccttctaacttaggaaaataa

SEQ ID NO: 158554 - DNA, 1275 bp, Enterobacter cloacae
atggaagaacctaaatacacgattgacctgcgaaccaataacggctggtgggcgaagctgcagtcctggtttgtcggcgggcgtttagtcaccccaaatcagggctcacagacggggcctgtttcagcccatggtcacctgggcgattcatcaattaacgatgaacgcatactgcaaatttctacggtatggcgctgtgtgagtctgatttcaacgctcacggcatgcctgccgatggatgtattcgaaaccgatgagaaagacaaccgtaaaaaagttgatttgagcaacccactggcgagactgctgcgctactcacctaaccagtacatgaccgcccaggaattcagggaggctatgacgatgcagctctgtttctacggtaacgcatatgcactggtggaccgtaacagtgcaggagatgtgataagccttctcccgcttcagtcagccaacatggatgtaaagcttgtaggtaaaaaagtgttttatcgctatcagcgcgacagcgaatacgccaacttttcgcagaaagaaatttttcacctgaagggcttcggttttaccgggctcgtcggtctgtcacccatcgcttttgcctgtaaatcggctggcgtggcggtggcgatggaagatcagcagcgagatttctttgccaatggtgccaagtctccgcaaatcctctcaaccggcgaaaaagtgctaactgaacagcagcgttcgcaggtcgaagagaatttcaaagagatcgctggcggcccggtaaaaaaacgcctctggattctggaagcgggattttccacatcggcaattggcgtaacaccgcaggatgccgaaatgatggcgtcccgaaaattccaggttagcgaactggcgcgcttctttggcgtgccgcctcatcttgtaggcgacgttgagaagtcaacgagctggggctccggcatcgagcaacaaaacctcggcttcctgcagtacacgctgcagccctatatctcccggtgggaaaacagcattcagcgatggctaatcccgtctaaggatgttggccgcattcatgctgagcacaatcttgatggtcttctgaggggcgattctgcttcccgcgctgcctttatgaaggcaatgggagagtccgggctccgaaccatcaacgagatgcgccggacagacaacatgccgccattaccaggtggcgatgtggcgatgcgacagaagcagtacgtgccaataaccgacttaggaaccaacaaaaagccccgtaatgacggggcttaa

SEQ ID NO: 158555 - DNA, 1515 bp, Enterobacter cloacae
atgacgcgaggtgagcgtgtaatagcgttcattgagcgcttttgcatcgtgccggaaggtaagcttatcgggcagccaatgctgttggaccccttccagaaagaattcatcctggatctttacgacaatccagccggaacggatatggcgatcctcagcatcgcccgaaaaaacggtaagacgggtttaattgccggaattctgctggctcatctggtggggccagaagcggtacagaacacgcagattgtcagcggagcacttagccgggaacaggccgcaattgttttcaacctcgcggtgaaaatggttaacctgaaccccaagctgaaggagattgttcacattacgcctagcggcaaaaagctgatcggcctgccgtgtaatgtcgaatacaaggctttatctgctgagggtaaaaccacacacggcctttcaccgattctggcgattctggacgaaacagggcaggtaagaggtccgcaggatgattttatcgatgcaataactaccgctcagggggcgcacgaaaacccgttgctgattgtaatcagtacgcaggcggcaaacgatgctgatctgctgagtatctggattgatgacgcgatcaaatctaaagacccgcacatcgtatgccacgtttatgaagcgccaaaagatgccgatatcagtaaacgtgaaacctggctggctgcgaacccggcgctgggaacattcagatcagaaaaagacatggcacgccaggccgagaaagctggccgaatgccaagcttcgaaaacaccttccgaaacctaaaccttaatcagcgcgtgtctaccgtatcgccgtttatctcccgcagcgtgtgggaactgtgcggtggtaatccactaaacacaccgaggaagtggtttgcaggtcttgatctgtcagcccgtaatgatttaacagctcttgttattgctggtgaggcagatgatggtgtctgggatgttttccccttcttctggacacctgaaaagactcttgtagaacgcactaaaacggaccgtgccccctatggcgtttgggtaagggaggggcttctgcgcaccacaccaggtgcttccgtggattactcattcgtcgttgcggatatcgctgaaattatcggtgattttgaccttactgcgatggcattcgaccgctggcgcattgaccagttcaggaaagaggccgattccataggtctgagccttccgctgatcgagttcggccagggctttaaggatatgggacctgcagtagacacccttgaatcgttgatgcttaacggccgcgtgaggcatggcatgcaccctgtattaacgatgtgtgccgtgaatgcggtggtggttaaagatgctgcaggtaaccgcaagcttgataaatccaaagcaacaggccgtattgatggcatggtcgcaatgacaatgtccgttggtgctgctaatggggaagttaccgaacagggtggtgacttcgaagacttcatttttcgaccgctgagcatgtga

SEQ ID NO: 158556 - DNA, 486 bp, Enterobacter cloacae
atggcagataaacgaacccgttccgacagttcggcagcagcggttcaggccatgaaaaatgcagcagtggacaccatcgatcctccgtcccatgcaggtttggaaaaaaaagccgaaccattctggcatgacaatatcagatcgaaagctctggacagctggacgccagccgaccttctggctgccgtagaactggcaaataatcagctttatataaccgttttacgcaaggatttacgcaaagaagagcgtaaacgcggggagggacgcgacgaaggactgataaaagacctccgcaaacaaattgttgagctacagcgaactatcctggctcagcgccgtgacctccaaatccattcccacgcaaccaatggcgaaagccgcgaccagaagaaacgcaatcagaatgatcgtgatgcacgaaataccaaagctgagcatcaggaccaggacgacaatctgatcgcctttcccaagcacggataa

SEQ ID NO: 158557 - DNA, 687 bp, Enterobacter cloacae
gtgcgcaccgcttttttcattgatggatacaatctcttttacgggctgctggctggaacacccttcaagtggctcgacctccctgcgcttctgacatatatcacgaaaattcaaaatcctgcctctgagactgcccaggtaaattactttacctctcccgttttacctcctcttgcaaccagaggtaaagagtcggctgaagctcaggatgtttatattcgcgcactcaaggcgaagggcgttacagtccatttaggaagacacaggcttaatcgtggcagtgcgccgcgttatctggatggtattcctgcatcccgatctgataaggttgatgtatgggatcttgaggaaaaagagaccgatgtaaatattgctatcagtatgtaccgacttctttcaaagcaacagaaccttgaagcagatgcacgcattgcacaaatagtcttagtgtcggctgataccgatatgacgcctgccttaaaagcaataaaggaagattttccagaaataacggttggcattattttgccacatcgcgaaggtatcgaacgcggagtgcccggctcacttaaaaaccatagtgattggataagacgacaagtgaagattgacgaattgcaatctcaccagtttcctgaacgtgtccctacaaagaagaagcctgctatcaagcctcattactggtaa

SEQ ID NO: 158558 - DNA, 738 bp, Enterobacter cloacae
atgaaaaaaccgcgcaggaacagaaccaaaaccgtgcagttcacgtataaacagcattacctgggcagacagttcctgaaactattttcacaggatgcaaataaagtttatgtaaagatagtagataaagaaggggtcgtaaaacaaaagtctgtcaacgatgaagtcttttattcaaaaaaaggatgggatgaatccacggaaagacttatgaaaagcatagaggatgcttttaaggaagaagtagataaagcaataaataatgaaaatagcttcaatttcggaagaataactgattactacctgatgtggaatatcaggggcaggttagccagcgaacgtccggaaagcgtcaatttccgcataatcggaagcgagttatcttttgaagagcaggacacattagagtacaaaggggcttattttatgaggccggacggaacaatgcatgatgatatgtttcggggtttgacattcaaaatggacttgaataaattaaatattttatttaaaagcaggaagtggggattagttaaatcgccggaggaaaactttatcctgcctgatttctggaacgttaatctttggaaaaacgatctgacctggataatcccaattacaagagacatggcatttgttgctgagcacgaaaatggaatcgtaacgcaagaaaatgcgtgccgcatgaatcaattttcgatgactcactgtaataatttttgtgttacgtattcataa

SEQ ID NO: 158559 - DNA, 267 bp, Enterobacter cloacae
atgtcagtttactgtgtctcttatgacctgaatcaagcaggtcaaaactacaatgcactatatgatgagttaaaaaaatcgccggggtggtgccaccctttagattccacatggctaatatcaaccggagaaacagcgcaacaactgtcggatcgtttgcgtaggcatctggacaataatgacaccttgcttgtgattggtgtaaccaaagaatacgcaggatggctcacccaagacacatgggattggatgagaacagatatatag

SEQ ID NO: 158560 - DNA, 1011 bp, Enterobacter cloacae
ttgcaacagtgccacttcgacgactacctgctgccggccgagaagttcgccgcactcaagcgcgagcaggccctgcccctggcgatcaacccgaacagcgaccagtacctggaagagcgtttgcagctgctggacgagcagttggccaccgtcacccgcctggccaaggacaacgagctgcccgatgccatcctcaccgagtcagggctgaaaatcaccccgctggatgcggcggtgccggatcgggcgcaggcgctgatcgaccaaaccagccagttactgccgcgcatcaagatcaccgaactgctgatggacgtggacgactggacgggcttcagccgccacttcacccacttgaaggacggggccgaggccaaagacaggacgttgctgctgtccgcaatcctcggtgatgcgatcaacctcgggctgaccaagatggccgagtcgagccccggcctgacctacgccaagctgtcctggctgcaagcctggcacatccgcgacgaaacctattcggcggccttggccgagctggtcaaccaccagtatcgccacgcctttgccgcccactggggcgacggcacgacctcatcctccgatggccagcgcttccgcgcgggtggccggggcgagagcaccgggcacgtcaacccgaagtacggtagcgagccgggacggctgttctatacccatatctccgaccagtacgcgccgttcagcacccgcgtggtgaatgtcggcgtccgcgattccacctatgtgctcgacggcctgctgtaccacgagtccgacctgcggatcgaggagcactacaccgacacggccggcttcaccgatcacgtctttgccctgatgcacctgctaggcttccgcttcgcgccgcgcatccgcgacctcggcgaaaccaagctgtacgtgccgcagggcgtgcaagcctacccgacgttgcgcccgctgatcggcggcaccctgaacatcaagcacgtgcgtgcccactgggggttctag

SEQ ID NO: 158561 - DNA, 813 bp, Enterobacter cloacae
atggaattgcccaatattatgcacccggtcgcgaagctgagcaccgcattagccgctgcattgatgctgagcgggtgcatgcccggtgaaatccgcccgacgattggccagcaaatggaaactggcgaccaacggtttggcgatctggttttccgccagctcgcaccgaatgtctggcagcacacttcctatctcgacatgccgggtttcggggcagtcgcttccaacggtttgatcgtcagggatggcggccgcgtgctggtggtcgataccgcctggaccgatgaccagaccgcccagatcctcaactggatcaagcaggagatcaacctgccggtcgcgctggcggtggtgactcacgcgcatcaggacaagatgggcggtatggacgcgctgcatgcggcggggattgcgacttatgccaatgcgttgtcgaaccagcttgccccgcaagaggggatggttgcggcgcaacacagcctgactttcgccgccaatggctgggtcgaaccagcaaccgcgcccaactttggcccgctcaaggtattttaccccggccccggccacaccagtgacaatatcaccgttgggatcgacggcaccgacatcgcttttggtggctgcctgatcaaggacagcaaggccaagtcgctcggcaatctcggtgatgccgacactgagcactacgccgcgtcagcgcgcgcgtttggtgcggcgttccccaaggccagcatgatcgtgatgagccattccgcccccgatagccgcgccgcaatcactcatacggcccgcatggccgacaagctgcgctga

SEQ ID NO: 158562 - DNA, 366 bp, Enterobacter cloacae
atggctgaccacgtcacccccaatctgccatcgcgcgatttcgatgtgacagaggcgttttatgcgaagctgggctttgcgacgagttggaaggatcgcggctggatgatcctgcagcgcggcggtttgcagctcgaattcttcccctatcctgacctcgacccagctacgagctcgttcggctgttgcctgcggttggatgatctcgatgccatggtggcattggtgaacgcggcgggagccgaggaaaaaagcaccggctggccgcgcttcaaagctccgcaactggaggcgagcggcctgaggatcggctacctgatcgatcccgactgcacgctggtgcggctgatccagaaccccgactga

SEQ ID NO: 158563 - DNA, 1017 bp, Enterobacter cloacae
atgaaaaaatcgttatctgcaacactgatttccgctctgctggcgttttccgccccggggttttctgccgctgataatgtcgcggcggtggtggacagcaccattaaaccgctgatggcacagcaggatattcccgggatggcggttgccgtctccgtaaagggtaagccctattatttcaattatggttttgccgatattcaggcaaaacagccggtcactgaaaatacactatttgagctcggatctgtaagtaaaactttcacaggtgtgctgggtgcggtttctgtggcgaaaaaagagatggcgctgaatgatccggcggcaaaataccagccggagctggctctgccgcagtggaaggggatcacattgctggatctggctacctataccgcaggcggactgccgttacaggtgccggatgcggtaaaaagccgtgcggatctgctgaatttctatcagcagtggcagccgtcccggaaaccgggcgatatgcgtctgtatgcaaacagcagtatcggcctgtttggtgctctgaccgcaaacgcggcggggatgccgtatgagcagttgctgactgcacggatcctggcaccgctggggttatctcacacctttattactgtgccggaaagtgcgcaaagccagtatgcgtacggttataaaaacaaaaaaccggtccgcgtgtcgccgggacagcttgatgcggaatcttacggcgtgaaatccgcctcaaaagatatgctgcgctgggcggaaatgaatatggagccgtcacgggccggtaatgcgggcgcgctttcgacgccgctggaggtatcgaccagcggcgctccggtgcgcgcaatcgcctcggcaacattcgtcggatttagcccgcctgccagcccccacggcaaggcaccgcgatatccggccagcagcgaccagtcgaacgccaaccccatgccgccgggcagcgcgcctttgggggtcttggcgtcgaacaagatcaagtccgccgccccggcatag

SEQ ID NO: 158564 - DNA, 264 bp, Enterobacter cloacae
atgctgctctgccagctgattgaacttaacccaggtgaatcccttcatggtgcggaccttaaagccccacgcttctgccagttcaatagcttctttggtgtgggttccggtgaaccatatagccagaacggcatcatcggcagccaggtcccaaacaggcagacgcttcatgtcgataagcttcatcgtgccgtagtgattggtggcagcgccgttgctgacggtgttgccgtattcccaggctgggtcagcgtaaatcagtga

SEQ ID NO: 158565 - DNA, 495 bp, Enterobacter cloacae
atgagtcttttgaaagacattcagattttcatcgccaccaatcctggattaaccaacaaagaaattgcggcgtctatgcctcagtacgatgttcatgcagtgcagcgcggggtatgtcacctggtaaaactgaatcgcgctacccgccagcacaacggaaagtgttaccagtatttcgccaaatcgcctgggggcgatgtaagcgaagggcgttctgtaatgaaaattaaccgggcagatacgccagtttctaccgagcaggaagaagcgcttaacccggtagtaaccgcgatgatggaaaaggcccaagggttgtttgaaaaggggctgtatcagcgtgcagccacagttctgatggatgcctttaaccgttcaaaaagcgaagagcagcgaatgaagatactcattgatcgccagcgctacctgagcatggccccgaaagttaaaacgcctactgacgcatggtgtcttgctggacaggcgaggaacatctga

SEQ ID NO: 158566 - DNA, 192 bp, Enterobacter cloacae
atgatcgtcagactggataaccggctgtttgagattctcgatgagatgggtgcgcatgtggatcgggaaatgttcatggcggcctatgcacagcggaaggccgaaaaggaaaatgatccccggcatatccgtcagcggaaattgaccaggttggctcatgatttgatgtcagaatcggaccctgaattgtga

SEQ ID NO: 158567 - DNA, 240 bp, Enterobacter cloacae
atgaataagtatttcatgtttatctctatgctaaccatgtcagcattgactgctggctgtgttggtggcactccaaaggcaagctatgtattcgtccatgactcctgtgactgggttaaaccgatctacctgacggatcacgacatcgacgttatgaaccatcagacgaagagagacatcctggcgcataacaaagcgtggcaggcgaactgccagaaagaaaccagagccatgaaatag

SEQ ID NO: 158568 - DNA, 234 bp, Enterobacter cloacae
atgacggcaagcgagcttctgatgtggattgagtacgacaggcaaagtccggttggcgatatccgtggcgacattcgggccgcccagctcgtctctgccatctacggctcacagggggcaaaagtaccgctggacgatgcgatcctgcgctggggtggcgatgagcaatcagaaccgaaggacccgtttgcagggcttgaggctgctttatcaaacgcagcggcaactaattaa

SEQ ID NO: 158569 - DNA, 384 bp, Enterobacter cloacae
atgaagaatattaaaaatctcgccctggctaagatgtcgggttttcgtcataagacggtcgccgttcctgagtgggagggcgtcaaagtggttctccgtgagccgtcaggtgaagcctggctgcgctggcaggaagtagtgaaagcgggtgctgatgatgaaaatgtgtcagtatcggaaaaggcacaccgtaatctttgcgctgacgtggtgctcttcattgacgttctgtgtgacaccgataagcaaccggtattcagcgtagacgaagaagagcaggtgcgtgaaatctacggccccgtccattcacgcctgctcaaacaggcgcttgacctgatcaacaatgcggacgaagcgcgggaaaagtctcaacccccggcgtaa

SEQ ID NO: 158570 - DNA, 297 bp, Enterobacter cloacae
atgaaatcagtaatctacgtggaacattctgatgaggttgaagttagtggtaatttttctaatattgaagcaccatttctcgtagcaaaaaaaataaaaaaactcaccgcacaaaaaaatatttctaacagtaattcaacacattacgaagttgaagattgcggagagctcatagctgagaataatgtagatttaaaaaaaattaaaaaacagagggttagtttaactaataccacgcctagcttcaaagtgtcgatagtttatatattagtaatgagagccatatatggaaaataa

SEQ ID NO: 158571 - DNA, 279 bp, Enterobacter cloacae
atggaaaataatgaccaaccaatgtttaaactaaagaatgttgacaaagtaaatttgaaagaaaacgctacaacatccgacactctcgctgacgcagaaaacattaaagaatttaccgcaataaataatcaagcaggttcaaatagaaacaaaaacaaagacatttcaaaaaccagaaagatttataacttcgttcttaaaaactcactgactatctgcattacagttataagtgcaattatagctgccgtaataaaagttaaacttaatatttcttga

SEQ ID NO: 158572 - DNA, 399 bp, Enterobacter cloacae
atgcagctcctgaataactgcagcctgttccatatcggagagcggcagctggttattactggtcatgatgcgcgccaggcgctgcacatcgttaccgttgaacggcatgatgtgtatgcggtctactggcttgccagattcagcacagcgtgcgtagcaacgacggcgacggtgaccttcaacaacccacacgccaccttcatcacgggctataacttccagcggtggaacagaaccgccattcatcagatagttgaacaggtcatcatctgcctggcgggtacgttcatcatcttcgcgtttgttgaaaccttcccgcacatggatttggtcgaggctgatgaacatcccggtatcggtgcgcttgatggtcccgtcacgggtcatttgcttgaatga

SEQ ID NO: 158573 - DNA, 363 bp, Enterobacter cloacae
atgcgtgaacccgaggaagttgaacgtttctggtttaccttttcccctgctggcgcggttttcggctgcgaagcggccgaactccatcagtcgggttttcttcggatgtaccgtgagtccgaactccttcagtctgcgctgcatggctatacgaaagcattgagcgtcgattcgcttgtcgaacccgatgactatgtcatctgcgtatctgaccatgaccacattgcctgtggcatggcggcgtcgccactgatgcgcccacagatcgaagacatagtggaggtagatgtttgccagcagcggcgagataaccgcaccctgtggggtgccttcctccgatgcccgccattctccttcctctga

SEQ ID NO: 158574 - DNA, 222 bp, Enterobacter cloacae
atgaatccgcagggcaaggtcgctgtgttcgtacatgccgcgaccataaaccggatcgaatccgcccaccttctcgatggcgctgcggtggtaatacagcatcacgccgcgctgcccggtgtaagcaacatgcttatcatcacggtacagctccgccatgtcgtgcagcttattgcgcccggccagatccagaaactggtaagccaggtgcggctcgggtga

SEQ ID NO: 158575 - DNA, 360 bp, Enterobacter cloacae
atgacgaacacacagaacgtcaccgagatacaaccacgtatgaccagagagcagttgatcgaggcggcacgtatagcagctaagttcctgccagttgcatcagctcagcttatgaatgagcttgctaaccgtctcgatatcaccagcgtagcgctttgcgaagcgttggcgcagcgtaaggaactggctgagcagaacgctacgctgcgtgaggatgttgcaagttgggccaaagagtgcgaccgcatcgaagagcgccacaccaaaacgcctaccaatatgcatcttctggaagctcagcgagaactgcgtgagctgactcctgttgtcatttcaatgaataacgaggttgctctctaa

SEQ ID NO: 158576 - DNA, 444 bp, Enterobacter cloacae
atgtctgcactttatgaaaaatcgcagctgacgaagatccttatttcctccctgccagccaccaaagaaacgatggattccgcaaccttcctcgatctgagttgcaccatcaaagaaattcagttcaccggtgggcagaagcaggatatcgacgtaacaacgctttgctccaccgagcaggagaacatcaacggcctgccttctccgtcagaaatctctctgtccggaaacttctacaagaatccggcgcaggacgccttgcgtgaagcgtatgacaacgatacgacctacgctttccaggtcatcttcccgtccgggaaaggctttaaattcctggctgaaatccgccagcacacctggtcttccggtaccaacggcgtagtggcggcaacgttctccctgcgcctgaaaggtaagcctgaaaacatcgagtctggctcctga

SEQ ID NO: 158577 - DNA, 258 bp, Enterobacter cloacae
  misc_feature (201)..(210): n is a, c, g, or t
atgaaagcctttgtttttgttaatgataacggcgctgcttttagccgttataaaaaaaatgagatccctgcgcagttcgtgtacggcgtatccaaattagaaaagatgggctttgaggtaatggtcggtcgggggaatttacttaatgatcttatttcattttggaagttcaaaccagatttgttctttatgccttttatnnnnnnnnnnaagaaaaacgatgcttttttatattctggcacgtatttttttatttaa

SEQ ID NO: 158578 - DNA, 363 bp, Enterobacter cloacae
atgaagaagtatttattcatcgttgcacttttagcttcacctgctgttctcgcagcaactgatgcggatattgttaatgcagtacaaaaaaaagtacagaacggtttcttcccaaaagatgtcaaagtagagtcagtgacagaggttagatttttccctgatgacagggatacagcgtatgcccggtttggtaacgtctgtggcaaagcggttgtaagcaagtctaaccaaaaagcctctctggtattcattgcacccgtggtagaaaaatccagtcagatctccatagatggcccaacgatttacgacctctctaagcaaggcgccatcgctgaagaagatcttcaaaccaaatgtaaatag

SEQ ID NO: 158579 - DNA, 168 bp, Enterobacter cloacae
atgagaaatacagcttcgatttttgcgaacgagtgccgcgaggattacaagcactaccgtgaaaagtgcaaggcagcagttcgtgacggagtaagtcatggcttatgggtaaagctggcgtggttaaaccgccgaaatgctcgtaagtgggagtcacaggtcgcatag

SEQ ID NO: 158580 - DNA, 519 bp, Enterobacter cloacae
atgccgcagcataactatccaaatggtaagccctggtctgattccgacattgcttttctccggagaatggccggcgtaatgacgttgcgtgatattgcgtcagaacttaaccgcactcacgctgcggtacgtacgatgagtacgagactgtccctcaatcttcgagaaagctacgccaggtggacctcagtagagcttcagatattgagatcgtgtgcgggcaccatgagtgccactcaaattgctggaaagctcggccgcactctcgattctgttaaggggaaagccagcctgttgggcttaagcctgctatgtattggcgaaagacatcatcatgcagtttacagtgatcacgacgtatctctgtgtgttgcgcttcatgaagagggcctatcacaagctgtcatcgcagaaaaaatggagatacccgcccatagcgttcatgcctttatacacggccggaggcttactcatgatgatgcttcgtggaggaatatgtctcgaaaaggaggcgcttga

SEQ ID NO: 158581 - DNA, 1536 bp, Enterobacter cloacae
atgaacaacaccacaatgcacaaaacgctgctggcgattgccatcggcgcggttacacactccgcttttgcggcggatgagaaaaaagaggacaccatcgtggtccagtccacggcggggagtgatttcaaacccggtggtgaccagctgcttccagccttcctcgacggacaggtggcgaacggcgggcgcatgggtatgctcggtcagcagaacgccatggacgtgccgttcaacatcatcagctacacctcgaagctggtggaagatcagcaggcaaaaaccattgctgacgtggttgccaacgacgcgggcgtacaatttgttcagggttacggcaacagcgcggaaaccttccgtattcgcggcctgaagtttgacggcgacgatatgacctttggcggattgtccggggtgctgccgcgtcaggtggtggatgcccagatggtcgaccgtatcgagatcttcaaaggggccaactccctgatgaacggcgccgcaagctccggcgtgggcgggatgatcaaccttgagcctaaacacgcgggcgacaccccgcaggcgaaagtgggcgttgactacacctcggattcccagattggcaccacgctggatgcgggtcgtcgctttggcgataacgaccagtttggcgcgcgcgtgaacctcgtgcatcgcgaaggggaaaccggcgtgccgaacgaccgccgccgcaccacgctgatctccaccggcctggattacaaaggcgaccgcttccgcacctcgctggacctgggctaccagaaaaaaaccttccacggcagcccaaccagcgtcaacatctcggcggtggactttgtgcctgaaccgccgaagaacgatcgtaacttctcgcagaagtgggcctacagcgatatcgaaaacgagttcgggatgtggcgcagcgagtatgacatcaccgatagctggacggcatataccggtctcggcgcgcagcacgcgcacgaagaagggatctacagcgcgccgaagctcctcgataagagcggtaatgcgacggtcagccgccttgataccaaccgcatcagcgattccgtcagcggcatggcgggcattcgcggtaactttgacaccggttttgtctcgcacaaggtcaacgtcgggtattcagcgatgaccaaaaacgaaaaaatcgcgtggaaaatgtcggcggcggcagataacccgaccaccaacatctatcacaacaccggcgttgatatgccggacagcactaacttcaacggctcaggcggtaaatacagcgatccgctgaccagcgggcgcacccgcacgcagggctggctgctgagtgataccctgggcgtgctggatgacaagctgctgttcactgcaggcgcacgtcatcagaaagttgtcatccgtgggtacaacaaaatcaccggcgcggaaaacgacgcggacggtttcgacggcagccgctggatgccaacctacggcgtagtctataaaccgtgggaggaaatttccctctacgccaaccacaccgaggcgtaa

SEQ ID NO: 158582 - DNA, 246 bp, Enterobacter cloacae
atgcaggtagatatttataacagcaatattagaaaaatgaagtttttagttgttccgacaggaacggatgtttctggaaattcattaaatctgactgacccagatttttctagtgtggcattgttcaagggtggtatcaccctgcaacacggtttggtaggccttaatctcgtaaaagcaacctcagatattgctgcgcaaggatatcatatcgttgaaatttcagtaaatgtggaggtactttga

SEQ ID NO: 158583 - DNA, 477 bp, Enterobacter cloacae
atgatttcgcaaatccttcggtatgaaccgcttacaggaaagattttctggactaagtgccgtggcggtgtgccggccggatcagaggctggctgggtcgataacagcagtggttatctcaggttgtcagtttgtgggaaaagcagatatgcgcacgtagttgcctgggagttatatcacggagctaaaccaaaaggtgaaattgaccacatcaacggcgacaaacttgataaccgcatcgacaacttaagggagtgcacgccttcccaaaatagccaaaacaagaagataagaacggacaataaaagcggcgtgaaaggagccagttggaatagtgcaagaaaaaaatggtccgcccgggtcaccgtaaataagaaggttattttccttgggtttttctcatctcttcacgacgcccaagttgaaatctccaaatgccgtgaattgcatcacggtgattttgctaatcacggataa

SEQ ID NO: 158584 - DNA, 2082 bp, Enterobacter cloacae
atgagcgacatggaaaaacttaaattaagatatagtcataatattatagaacatttaggcttaaaattatatcaaaataaacctactaatgttattgccgagttaatatctaattcttgggatgctgacgcccaaaatgtatggattgaaatagctcaagataaagtttccattacagatgatggatgcggtatgtcttacacagagttgatgaatgattatttaatcatagggaaaaagaaacgaagtaaagataacattaccgaaaaaactgcacgtcaacggaatatgatgggtagaaaaggcataggtaaacttgcgccttttggtattgccaaaaagttaacattgataacaataagtaaagaagaaaaactctataattggattcagcttgatctatccaaaatgttgtctgaagaaaatgatgattttcccaatgattccattatttatgaaccaactatattggctgataatatcccaatagaaaaaattgatacagctttgaagttagaatataaaaaaatattggataaattaaaagagtcaggaacggctataattctcgaagatttatcgcttaaaaaaatcatttcttctgaaaaattaaaagaatcagttggacagcgtttcaccgttacgctattaagtgatgattttaacgtctatattaacgagacaaaagttagtgaaaaagaagccctacctaatttctataaaaggtatccagaaagtggctatgaagatcaaaccttgaccattaatggtcaagatcgccaagttcgttattgggtaggctttgtggagtctgctgagtggccacaagatcaggctggcgtgggcatctatgcccatggcaagttagcacaagatcgcccctttgtatttggattgaaaggtagagagatctggacacgttatatgtatggtgtaatagaagcagactggttagatgaacttgaggaagatgtagtatcaaccgacaggacaagtgttaactggatgcatgaagataccctgcagatgtatgaatggggagctgggttagtaagaaaatggattagtgattatcaaaaattccaaaaagaaaataacaaagggaaagttattgaaaaaataaataaactacctacagacttaagagttacggaggtagaaagaaaagctatttccgacatagtatgtagtatgagtccaaaagtacagaaagatgaaacattacagaatgaagttatatcaaaactaacttcagcatggactcatgcaccaagccatatgattattcaatcactatggaataaagtaaaagacttggaggatgagcaagaatttattaaattgattgatcaaatcaatgatcatttagttcctgaatcaatgtcattatccgttatggtttcacaaagaatttatgcgctcactaaactggaacgtttgagtaaaacaggaacagagcctcaattgcaatctttacttgagcaatttccatggatattgggttcagataaaggaaaagtacatgcaaatcaaacgatgaaagagattgctaagaaagcagcacaggaagggaaattagcagcccatggttttacagctaaaagtgtttcagaacaaccggattcaggcactagaccagatttcacaattttttctgatacaaacgagaataatataatattgattgaattaaaaagtcctttattagatcttgaaaggattcacttaaaccaactcaatacgtatatgggatggtttgaggataattatgatgcgaaagtttacggctatttaattggtagaaaccctaacgcttggcgagaaaaaaaccataataaaaatattgaagtgctctcctggcatgatatttgcgttagatcaagaaaggattacattgaattacttgcagcaatgttatatggcgtatcggaacattatgatgatgcgagaattaaaagagctgttgaattcggcggctcagaatcaatcgaattactaaaaaaaatggcaaaagcgcaatccccattaaaagatttatttgaccgatttgatcataaaacaggaggagcattagatgtttaa

SEQ ID NO: 158585 - DNA, 870 bp, Enterobacter cloacae
atgaaatcttggataaaaatgaatagttggacatcagaagacaccaaagcagtaaaaacgtggtttgatttggacaaatatcgagagtttgaaaacatttctattaatatgctttaccatgaaatatgggcgagaacgtatttcttcaaaccagtaatagaagaaggaatgcagaaaacggtattgaaaaattatatgcagatattggatggtgatccttttcttatcaaagtgaagcacttaaattatatggataccgaaaataaattatatcaacccccatacttttttattactactgttgatcgaatagcaaatatcagttttgcttgtatgagaaaggctttattcattagagcaaatacagaacaatataaaattgattccactattgaaaatgaatatatttccgaaaaaatccctgaacagtttcctactacgattatgttagaaatcgatcttgcgggtggaagcgatgatgagatagctgaggccctgcgagtatcattaccacaatggcgaaaagtaaaaggcgttaaacctgcaccacttgatgcagtcagatttggttatggggcaataaaaaaattaattagctatcgaattatccctatgcttgatttgctcgcatggtcagaaagaaaaaaagtacttctgtcagacgacagactatcacgattgctatacacggatgaagatgatgataaggcgattcgccaaggatatcatataagagatgctgatcggcctttcgcaatgaaaactgtagaaattgattttttaaggcaatttaatttttttattaacaaaaatcagcatgttaaagaaatgagggtttcggatgttatgaaactctcagactctgagtga

SEQ ID NO: 158586 - DNA, 732 bp, Enterobacter cloacae
atgcaagagaaaaggacaggtgaacaatgcccaaaaaccatcatccagaacgctttagagacgttagtttctaaaagagtatcgaccactgagtttgtccaacagctttctgaacaaaatattaatgcattacccaatatcacatctacaggtaaaatgaatggtttctcattcgaatacgccgggattgctttcaaagcttcgcaattaggtaagtgtttttcatggtcgaccttgcagggtaaactcgattatagaccggagcgcgataacggctttctgtttgacctaaaagcaagtatcactaaagcgaattcaaacgaaatcttaaaggaaaacgttaaaaactccttcggagcatttattattgataggcatgcaagtaaagacggaagtgctgcagcttctgtagaagagaagtgttcctcggaagctttagcagggagtaataaagcgataacaactaaatccgtaaaagagatgcctaatcaaagctacgaggtctcagcattcagatggatggaaaccataccttaccttgatacgatttatcgtctgctgaaacaacttaaaatcccaattcttcgacgccccgcaaagcaccaagtcatcactgaagcgttgaagatagaaatccatcccatcaatcccaaaaacactcttaaggcgcctttacttgacggcaatttagtgccaccaaggcaacattaccaccttacatgtagattttag

SEQ ID NO: 158587 - DNA, 540 bp, Enterobacter cloacae; identical to SEQ ID NO: 151691

SEQ ID NO: 158588 - DNA, 237 bp, Enterobacter cloacae
gtgagagtggcgactcagtgccgcaaccataccaccaaagcatttctcccgcatcagcgggtaacgacagagggtaaggcgatgccagaattcgaaattaatcaccagatcggtatttctctacgggagctaatcgacttccgtcagtggactgaatctcagctatctgagctatggaggctgcagccaggtgacggcgtgaacgtacaagggcagttagtaagacgcatcaaatag

SEQ ID NO: 158589 - DNA, 546 bp, Enterobacter cloacae
atgcattcacttgcgtatcaacaaggtaacaaattttcgccaacgacgatgatttaccagaatcgccgggagccagaatcctcggcgtttaacatcgatgggatccgcgctgctgttcgcgcctgggcagctgattgccgcagccgtgaatttgtcgccgctctgattgttgaagagtggcgagccactggtggcaccggtctggatatcccgactgactcgcaccgccagatgcagaaagtgttccgctggatcgacggcgacaccgaatacgccgccaacaacattcgtcagctgacgcccgcaatcatggcggtcctgccggttgagtatcgcactcgcctgatcggcgccgattgcaaaatgtctcgcctggctgaggccgagaaagaactcgcagaagctaaacaggcagtgctgctggacgctccagagcatcagaagctgaaagaggtaagcgagggtatagcgtcgctgttcagactcatgcctgagcaggtagggccgctgatgacgatggttacgtcgatgctggggggtatgtga

SEQ ID NO: 158590 - DNA, 906 bp, Enterobacter cloacae
atgaacttattcgagaaatccggccaaagtgtgggtgataactcctcagctatacaagttacaggtgatgcccactttggcaacaccactactgaggtcatggctatttgccagttaatggtcaaaagtgaaatggcttcgcttcgtgaagatgcatttgctttagtcgactcacgggctcaagaatttggtcaccaaattgcagaaaaactctctaaagatgttgatgaaaaactaagagcaaaactcgctgatcccgatattcagtacaccctcaatcaagcagttgttcaggtcgcaagaaaggggtttgatgcaaaatcagaacttcttaaggagttaatagttactaaaattgaaagcgatcaagaagacgaaagtattttgatcgatcaagcgttagatacaacatcaagactgaccactaatgatattaagtttttggcatttgtatattttttacgttcaattaccaagatgataggaaatataaatatcacaaggcttgcagaggaaaagaggactcatgtttcactgcctgacctttctttacaagcaaattatatggcccataagtcaatgtatgctgtttatgaaacagattacataaaatttcttggagaacatttcaccctcaaacgcttaaataagccacttttagagattaaaggcgtgttgttctcagataaaacatacaacatcaattacttagagttattatccaaaagaactggatatgatactttcacatctgatgcatcattttatgaagcattccccgctacaaaattaattcttgactcttttggcatttcaacccttgcagaacttaactcactagtcaccaaccctgtaggtgtgattattgcggaaaattatctcaaagctcgtggatatatcagttaa

SEQ ID NO: 158591 - DNA, 1821 bp, Enterobacter cloacae
atggaacttatctattcttatctgcattcctgctggggagaaagcttcactttaggactgaatttttcgcaaaagctgcattgtgagtatgattttgcggctaagaaaatcgttatccaggctaaaaaagaaacgaggatatccgatttctttggtagtaacatatcgaacgtcacggcaattgtcggacgtaatggtgtagggaaatctactatacttcatttgttgggcttaaagaaaagggatctcagtgatatttatcgaacggatgaagctgtatggttttgtctctatcatatagaggggaaatactatgccgttgaagggattagttcaggggagttattcgatgattgtattcctcagagacggaaaggttactttgcctatattcttgttgaacgtgatggtcagctttcctacgaaattcatctccaggattattcaagtgatttcgaaaacactgcaataattcttttcaatcctcgtactaaggttagagaacgttatgaattagaatataataattacggattcaaacgtggttatattaataactccacgcgggctacatttgaattcttgactttccagacaggattccctgaatttcagaatcgaacatggtattatgagttgaaaataaataatacttttaggaacaataagatcgcatctgaaaaatcacttcggcttttccaacataagagtttttatactgaagaggagtttcctttacctttcacaaattaccccgagaaacttaacggaaacaaagaacattttattctacatttaatggaaatgcttattaacgagcattttatatacgcagtagaaccagggcgttcagaattcctggatgaacaggtagatcagcacttagtcgaacgctatctgggtgaaataagagagttatttgacggcgatttgaagaatttttcccaggtcaggaactatttgtcaaaaatattgctccgatttattgatgttacaaaagacctcattgggactgatgaagacattaactggataaccgtggtcaaggtactcgaatccctgccaaaggagtggtttaaaaatagtgaagggtatattcatcttgccattccttgtacgccggaagcatccaggtatgatgtcgtttctatgcttgatgagttagctaaaacatatattgtctccccggtgagaagtactgcacctttgatgagttctgggcaaaaggcgttagtcgaaaaaatttccagcattcgttatgccataagtaaccatctttcagataatcgagttaaaagtatcattttattgcttgatgaatatgaggagcatttacatccggaatggtcaaggcgtttttttgattatctgctgaccatgcttaatcaatttaataagagcgtaactatacaggtggtgatcgctacccatgcgccatatattattagtgacttgcctaaagaaaatattataaaattagaatggaaaaacaatgcccgggtcactgaaaattgtcattttggttttggtagtaatatatttgatatcatctgtgacagttttttcctggataattcccttggagcctttgcgcgaaaaaagattgattatgtcatcgaaacgcttgcgtctgaagagccgcaaggacctgagcaattaactgagtgccttcgtatcattgagcttgttgatgatccttacctgcaatccaaactccagcaattgttggatgtcaaatatccccagagacaacgtgaaaaggagattgaacggctcaaaaaacgaattattgaactggaaaggagcaattccaatgattga

SEQ ID NO: 158592 - DNA, 1095 bp, Enterobacter cloacae
atgattgaattttcatgtgaaagtatttttaccaatgatttttgtcaggaatataaggcactccttcgcgcgaaaataaaaccttttaaattaagcgtctcatccgaaaaagtggattttactgaagatgctctgtcatacctcctgatcaatcctttcgacattgccttgagagggcagcaggacagtttttttgaaaaatactataatgtgatgcaatttcttctccacagtaaagcttattatgattttttaaaagatatttgggtttcagaagacttaccttctaacatatatcgggagaaattgcgcgaggagcgtcgtagagtcattgaacagtatatacaaccctatttgcctcaactttcaatgatgtctacggatgatgcatgtcgtacggctgttaactacaaaaagatgtatgatgatgtcgattcgtatcgtaagagcttaagcgctgctattagcaagcatatatcctataaaaaaatagacgatcaaatacgtagctttgttattagaaatattaatgttcgcatatgcccctactgcaaccgcaactactgcgatttctatcactttgagaagaaacaaaaaaacgtcgcagccttagatcacttctacccgcaaaaaaaattccctttatatgctgtttcgctgcataattttgttccgtcttgttattattgcaacagtatgatcaaaaaagacagactttatccattaaaatcagtttatgtgactgactctatcgaaaagacgtattttaaaattgtgcctacgagtctggctggactgcttggtgaaaaggacgactttttggtgtgtaccagcaaagcgtctatgcaggatcgcctaaagggttacgttttcaggcatgagtgtatttatgaaaatcataaacaagagataaaattatggctcaaaagaaaaacactgcataacgacggataccgttcccacctgagtacaattcttaagaaaaacatttctgatgatgaacttaaaatgatgttatttgatacggcaggtaatacggatgactttaaaacaaagcccttgtctcgggcaaaaaaagatattctggacttataa

SEQ ID NO: 158593 - DNA, 1224 bp, Enterobacter cloacae
atgagtatggttgagtggatacgccgcgagaataaagatagcctcattttattcgtacatggattaaatggtggtttagatacgtgggatttcaataaagatgtttcattcccaaaactactatctttagatgaagatattagcactggttttgatgtggcatgttttaattattttactaaatttactcaaacatatgctcaatctaaaggaatcttggcgcgtttttggtctgggaaaaagaagattgagaagaacttaccaactgacgaaattgcagagttgctgtatactgaggtaagagtcacactgtccgagtactcaagaataataataattgcgcatagcatgggcgggttaatatcgaaaaattttatacttaaaaaaattgaacatgaagaacagtcaaatataatcggttttatttcgttggcagttcctcattctggggctaaattagcaagcatcacttcaatggtgtcttcaaatgctcaattagtcgatcttgcattattaagtgaagctaccgatactctgaatagacgctggttaaactgtagtaaacgactgcctgttactaggtacatttatggagcgcatgacgcgattgtcgataaaaaaagtgctttaccgatggatagtgaaaggaagaactctattgcagttaatgaggggcatagctcaatttgcaaacctgagaataacacagctacagtgtttgttgcggtaaaacaatttatacagcaaattaatttagaagcacccaaaaaaatatccatcgaacgtcttgaagatgaacagcaatacgacaacgagtattttgttctaaaaatgattgttgcagatatacaccaagatatcactatgcatgcaaaggaatattattataatgccgagttaatgaggaatgtattcacgagtgattatgatagaacattactcgggcatttatattctaaaattagagagatttatcaagaagagtatgagcaacatatagctaattcgatagcgccagataaattcatatcaactgttcatgctcggatttctcgagaggataaattatcgttagattcactaattaagagtttggaaacggtacacaaaaaaggaatgttgcatcagttagcaaacaaaaaagaccgggatattgtttggtcttcaggaactagtattgagactctagaggaattacgtcgaggtagcaatgaaggtaaataa

SEQ ID NO: 158594 - DNA, 516 bp, Enterobacter cloacae
atgaaggtaaataatttgccatatattcctcttgatgaagagtatagtctgaatatggccatgcttgctatcgctatttcaacattgtcacatagcaaaaaaggaactttatccctagatattaacaaattgcaagtttttatgtatttgataaaaaacccatcaaaaattgattctgcacttgcagcttcaggtaaaaaacctgcgtgtgttgaaccacaattaacatatacaataaagagtttttcgtcaaatgttgatatcttattcgataattccaaaattaaatttctaatcaaaatgatgtcactgcgaggtttactcgcggcggagaaaaaaagcgatgagagcgtaaagctttatttatctgaaaagggtaaggaatttgctgattcgtttactgacgggtatttcaaagaaattaaacgattaactaaggcattgttacctttgcagacattacctacgtctaagctaaactccgtaataaatcaagtattcaaggggaaacgatga

SEQ ID NO: 158595 - DNA, 1968 bp, Enterobacter cloacae
atgaaatcatatctcaatataaatgctctgattcttgtgggtaaaaggaaaaattatgtaattcctttttatcaaggccttaacgttgtatatggcgactctgatacaggtaaatcaagtatactggagtttattaattatttattaggtgctagttcaatagacttggccgatgagatcaagacatctgtagagcatgcagcccttgaaatagtgatcaacgatacggtatttactattgtaagagatatctatgattataaaaaaccagtagaggtttatcgttgtgggtttagtgatattaagaagcactttcccaaaaaatatgcaccgaattattctccaacatctaatgttgatggcatttattcggagtttttacttgatagtcttaattttccgaaaattgaaattaaagtctcaccgtctaaagcaaattcactaatgcgcaggctaagctttagaaatatttataagtttgtttatgtaaatcaggatgatatcggtagtaaatcgtttcttcaattaacagatatgtcccgttatgtatttacgaaagaagttttcaaatacatgtttaatgtgttagatgaaagcattgcaagacttcagagtgagatatcagtaaaaactagcttagtgacagaattaaataaaaaatatcaaataatatctgagtttcttcgcgaaactgattatgaaactattgactcaattgatgatgaaattaataaaatagatatcattctagaggagcttattgctgggctagctgaactcgataaaaatatgaaagctagttcaacacaatatgcagaactaaaggatgtacacaattttatctctttaaagtataaagagtgtttgttaaatattggggctcttgaggataagatagagaaatattctcgattaaaaaatgactatgataacgatattgaaaaaataaaggcaataagatcagcaaactctcgcatcggcgttttggattcagaggtgtattcttgtcctatttgtgatagtcatattagaatagacggaactgattttccatttgaaatttcgtcagagaaagatcttgatgaggagttaaattcgcttaatcgacgtcgaagaaatattaacgacatgatttttgagatgtcatctgatttaaataaagcttctattgataaaggcgagttggatgagcaacttaacgaattaagagagttaattgacgaagaaagtcaatcaatgattactccattcctgacgcagagagactcttttattaaggaggtgtcaaagaaagagaaggcaagggagcaattaataaaagatctgaaggttagaaatcagcaagaagagctgctcgaaaaacatcaagtattattaaaagacattcaagctttaacagagcgccttgatgcattgaaaaaaaatgcacccagcatggaagggattttacagggtttgggtgatagatttaataattacttgaaaggtattaatataaaaaatagaactgggataaaaatgtctgaagcttattatattccagttataagagggaaggagtatttcaagatcacatcaggaggtttaagaaccatttcgtctattggttaccttctatctattcttgattacgcaatagatcacaacatcaatcaccccttacttttgatatttgatacggttggtaaatatttagggaagcaaaccaaagaaaaatatgcgcaggaaactctaacggtcgaagatgaccttgagggtatgtctgatccaatgaagtaccaaaatatttatgagcagttattgaatactgttcaaaaagcagagaggaaaaatgttccttgccaaattatcttggttgataatgatctgcctaattcattttcaaccagtgatctttcgagtattgttgctcattacagctctatcggtgaggatggtttacccttaggtttaatcgatgacctttga

SEQ ID NO: 158596 - DNA, 225 bp, Enterobacter cloacae
atggacaactatcacataactaaagacggtgataaatggaaattacagaaagaagggaacaccaagccaagtaaaacggctgacactaaagcagaaatgattaaacagactcaggattttatggctgataagcaggggtctgtcaaaattcacaaggtggacggtaagttccaagaggaaagaacgtatccgaggaaggttgacccaaaatcttcaaaaggttag

SEQ ID NO: 158597 - DNA, 474 bp, Enterobacter cloacae
atgagtgagtttaaaccctttgacgaccagctcaatggtctgattgctgccctgtcaccggctgcacgccgtaagctggccggagacatagccaaggagctgcgcaagtcgcaacagcaacgcatcaagctgcagaaagccccggacggctcgccgtatcaggcgcgaaagcgtcagccgctcagggctaagaccgggcggattaagcgggcaatgttccagaagctacgcacaagccgatacatgaaagccactggccgtgaaaacagcgtggtggtggaatttaccggcaaagtgcagcgtatcgcgcaagtccatcagtacgggctaaaagaccgtcctaacccgcacagccgtgacgtgcagtatgcagagcgccagttacttggattcagaaaaaatgaaagtaatgctatagagaaaatttttttgcatcatatattgagggagatggatacaaaagatgcaaggtag

SEQ ID NO: 158598 - DNA, 855 bp, Enterobacter cloacae
atgacaccaaaagaaagctgtgagatagaaatatcaagattttataaaaaatattacacattcacatcttcaagtgacactgatgatctaaataatttactcaactctctttgcagttctatagaaaagtatgaaatagcgacccaaaaaaacgttagcaaagataataagcgatatctttctctaaaaaccctacgcaatttctccctccatcactctgaacttttaaactcgtcaaaaggaataaaatcttcagacattgcaaacattcgcactgaagtggggattttgtgtctattacctttaatggtcattgaccgcataattgaaaatacaaagcaagaacaaacaaaacgatacatccgcgaaactttcattttttacgaaaaatatgtcaacatctatcccgcgatttataatttcgccgttgacctttattttttagtgcaagacgcttcgttgacaattactggtgagcacttccaagaaatggctaaatcaatcaattatgagaaagccaaccattacccacactatatatctggtaaaatcacaaccctaactggagttcctgtaaacgactatattaatgagcatgtcattagtatggagcagagaattgaagaagaaaaaaaacacacgccgggctcactcagaatcgcaaaattaagttcaagtccatctgaacaattcaagaccctaagtgacgaagaaaaaaagtttatatacaaagaccttattgcaactaaagcaattgaactaagcaacaacaattctaacaaccactttaaatcaaatagaccactcacacctatcgagcgacttgtagttcacttttttcttagaaacaaataa

SEQ ID NO: 158599 - DNA, 2391 bp, Enterobacter cloacae
atgagttttattgataccattaaaaatataaccagcactaccctgaaccgttaccttctggatataccttcctgtctgtcatcgctggacgttgaagaattcagtggcagggaggcattaagccagacctattattacactattacgttcaccagcccggataaaaatattgataccgctacggtattgcgtaaacccgccacgctgacaatggggaccggtattttacaggccctggcggataagaaagtggtccacggtgtcattactgattttcaccggatatccggctcggccgaccaggcaaaataccgggtaacggtggagcctttccttaaattactggacaggcagcaccgcagccaccgtttcttcgtcaataaatcggtgccggaggtggtggagcaggtgttgcgggaacacggcctacacggctgggagtacgagtttaacctgaagcagagctacccgaagcgcgagcagataaaccagtaccaggagagcgacctggcctttgttcagcgcctgctggcggaggtggggatattttacttcttcaccttacaggaagatgcgcagacggaagtggtgcactttgccgacgcgcagcgggcgctgatgttcggcaaaaccctgccggtgaacagcccgtccgggatgagcgacagcggcgcggactcggtatgggggctgaacgtggctcacaacgtggtggaagcgaacgtcacgacgaaagattacaaccaccgtgacgcgcagagcgtgctgcagtccgccccggccgatatgacacggggcgacggcgaggggatgacctatggtgaggtataccattaccggctgcgccaccttgagcgcggcgacaaaattgacccgcaggcggaaaccgccaacttttatgcccgcctcgaccatgagcgttttctggcggaacaggttcgcatcaccggtaaaagcacggatgtgacgcttgccccggcccaggtactgaccctcaccgacagcctgccgccggccctgccagaaatgcttcagaatccgttattgcttaccgccgtcgggttcactgccagccgcagggatgcactccaggtcactctgctggcggtgccctgcagcgaaacgcagtgctggcgtccgctgctgctgccgcgcccgaaggtgagcggcaccatgacggcgcgggtgaccagcgccaaggccaatgatatctacgcctggcaggatgcttctggtctctatcgggtgaggtttgacgctgaccgggacggtaaatcacagggccaggagagcatgccggtgcgcctcgccaaaccttatggcggtgatgtgtatggcttccacttcccgctaatccagggtacagaggtggcgattgccttccacgaaggcgatccggaccgtccgtatatcgcccatgcgctgcacgactcgcgccatgtggaccacgtcactgagaagaactcgacacgcaacgtgatccgcacgccgacgaacaacaagctgcggatggaggacaggcggggtgaggagcatatcaagctcagtaccgagtatggtggcaagacgcagctgaacctggggcataatgccgatgcgtccagggcgttgcggggagaaggtgcagagcttcgcaccgatagctgggtggccgtgcgtggcgggaaaggtcttttactcagcgcggacagtcaacctggagcgaaaggacaaatgctggacatgagggcggcagtcgctcagctacaggaatcattgcagttggtcacttcactggctaagagcgcgaacgtttcaggcgctctggatgctgatatcgcgtcccagcaacaacttaccaacgtactggatcagttaaaagatgctggtttactggcgacagcaccggctgggattgggttggctacccccaaaaacattcagcttgctgcggggcacaccctgacagccaccgcaggtgaaaacgcagatatcagcattctgaagcgcctgacggtagctgtgggtgaggcaattagcctgtttgcccagaggatgggcatgaagatactggctgcacggggtatggtcgatattcaggcccagactgatgagatgcgtctgcagtccagcaaagcaatgaccatcaacagtgtagatggtgagattgtactgaatgcggctcaggggatcaccttgaccagtacagggggagcttatatcaaaattaaagatggttcggttgaaattggagctccgggacgtattgatctcaagagtgaggatatattgtggggaggaagtgcttctcttgagaaggcgctgacccctgcaactgttactgatccacagtaccacaatacaatgaatgggcgttttcgtgtgcttgactcatacgctatggcgagctga

SEQ ID NO: 158600 - DNA, 3429 bp, Enterobacter cloacae
atgtttaaggaaaatagcgtgataaagaaaaaaaggattagcacctggataattgttgctgtcattatgctattgggtgccgtattgatctgggttgataatcctgttgtacgacctggttctttggttaataaattgattgcatcacttatagttgccgcaatttgtctgcttattcttctgctggatgaattgtttgtacgattgtggaactggctagttactttgaattttgttgataaattcaaattgctaactcgtaaaaagcctgagtttgttgaagacaagaaaaataaaaatgaatatcaggaaaaagtaaaccagattcgcctgtatcttcgtaagttgtatcggagtaccaggggaaaaaaggttcgcatcctgcttgtcaccggaactgtggcagaggtggagcaactgatcccaggcctgacagaccagctctggcaggaagaccagggcacgctgttgctgtggggcggcgaccttaacatcccggcagataccgcctggctcaccgccctgcgtaagctgcgccaccgtccggcggacgggatggtatgggtcacgtcacggctggacaccccggcagaaaatgccgctcccgcactcacccctgatgcgatggacagccttgccgcgtcgctgaatgcgcgttatgccgccctgggctggcaattgccgctgtacgtctggtcgctgcatgcccgcgccgggcagcaggccggtcgggttacccagcccgtcggctgtctgctgccgcccggctgtcgtccggaagggctgagcgggcaactgagcgccctgacgccaggccttatcgcgcaaggcattcagcaaatatgcacgaaggtgaagcataattttctgctgaacctggccgaccaactctcacgcgtgccggaaacggtgacagggccgctgtcagttttgctcaacccgtaccgtccgctcccgctggcaggcgtggtgttcagcccgccatcagagggagctgcgcgcagcgtgaaacaccactggggtaaggataaccgctgggacattattactgattcggtgcagacgcttccggcggggctacgtccgcgtaagcccggcgtcagtgccccaaaaatactcctgggtgtggtcgtggtgttgatggtgggatgggccatttcgatgatgatctccttcaccgccaaccgcagcctggtggcgacggcacaggagcaggtgcagcgggtttctgcggagaagcaaccccttgcgacacgtctgtatgcgctctcagagttgcagaaaaccctttcccgccttcagtatcgcgctgaacatggcgcaccctggtacacgcgcggcggcctcagccagaatgatgaccttctggctacgctgctgccacgctatgccgaaaatgcgataccgctgctgcgcgatgcggccgccgttcatcttcagcagcagctgaatgcgtatgtgcaactgccgccggacagccccttgcgcgagaagatgacaaaaaccgcttacgaccagttgaaactgtatctgatgctggcgcgtccggagcgaatggacgctgcctggttctccggcacgctgatgcagaactggccgcagcgtccgggtgtgaaagacggcatctggcagggaagcggcacttcgctgcttcggttcttcggcgccagtctgatggcccaaccgcagtggcgtctgcatcctgatgacgggctgatcatccaggcgcgcacgctgctgatccgccagatgggaatgcgcaacagcgaatccacgctttaccagaagatgctcgcgcaggtggcgaatcagtatgccgacctgagcctgtcggatatgaccggcgatacggatgcgtcgcgcctgttcacgacggacgaagtggtgccggggatgtttacccgccaggcgtgggagcaggccgttcagcccgccattgaaaaggtggttacggagcgccgtgacgagatggattgggtgctgagcgacagcaggcaacctgctacgcagtcaacctccggggaagcgctgaaagcgcggctgacggagcgctactttgctgacttcggcggcgtctggctcgactttctcaacagcctgcggcttcagcctgcaaccacgctgtcggacaccattgaccagttgaccctgatggccgatgtgcgccagtcgccattggtggcgttgatgaacacgttaaacatacaggggcggaccgggcagagcggggaagcgatatccgattcgctggtgaagtcggcgaagaatctgtttaaccgcgatgagcaggccgcgattgaccagcagggcggtgtgcatggtccgctggatgcaacctttggtccggtactggcgctgatgggcaatcagacgaaaggggcggggaatacggatctgagtcttcagactttcctgacccgcatcacccaggtgcgcctgcgtcttcagcaggtcactaacgccactgacccgcaggcgatgactcaggcgctggcgcagacggtctttcagggtaaagcggtggatttaactgaaacccgggattacggcagcctggtggcggcggggctggggcaggagtggagtggattcggacagacggtgtttgtccgcccgatggagcaggcctggcagcaagtgctcgcgcccgcagccgaaagtctcaacgcccagtggcgcagcgcggtggtggacgattggaacactgcttttggcggacgctatccgttgaaggacgtcagcagcgaagtgtccctgccgctgctgtcgaaataccttaacggtgattccgggcgcattgcccgctttttacaaacccgtcttaacggcgtgctccataaagaggggagccgctggacggcggacagcatcaatgcgcaggggctgacctttgacccggcctttctgaaggcgatgaacaccctgagccatatctcggacgtggtgtttaccaatggtgaggctggcctgcactttgagctgcgcccgggcacggcggatggcgtgatgcagacggacctggtgatagacagccagaagctggtctatatgaaccagatgcccgcgtggaagcgtttcagctggccagcggacaccgaagcgccgggggcgaccctgagctggataagcacgcaggctggcaccagacaatacgcggatatgtcaggggcgtggggctggattcggctgcttgacaaggccactgtcagcgcttaccccgggacgggcagcagttggagcctgaactggaaagcgccggacggcagggcgctgaactacacgctgcgcacggaggccggagaaggcccgctggcgctgctgaagctgcgtaattttacgctgccagaggccatttttactgttacaaacccaatggaagatgtgacggcgttttctgatgacaacgatattgctaaggaggactggtaa

SEQ ID NO: 158601 - DNA, 1587 bp, Enterobacter cloacae
atggcatccattacaacgctgatggcggcctgccggctggaggcagacacgctgacaccgcaggtacagtcccgccttgcgctgtgggataactggctgctgcccgtttctgacgacaaccctgtcggcgatgaccccggctatgatgatgatttccagcagatgcgcgaagaggtgggtaagctctccggcatggacgcggagcttatctgccagcttgccgaaaaattgctgaccacgaccacaaaggatctccgcattgcgacctactacgcctgggcgcggctgcaccgggacggcgaggcggggctggccgacgggctggagctgcttgttgccctgatgcagcggtatggcgaactgcttcatccgcagcgggaacgcagccggaaggcggcgctggagtggctggggagcagccggatgctggacagcctgtccctgtatccggaggtgataaagactgaagctgaacgcaccgccagtgcgctgtggctgctggagcagagttcagcaccaaccgatgaggtggaacgcccgcagtacggtgcattatatggcgcgctggagagccgcttacagaaatccggcggtatggaggcggtagtaccgcaaaacgtcagcgggagccatcacgccacgccgtcatccggtagcgtaccggcgctcatcggtattacatccggacaggaattgttgtcgcaggcgcgcattctggccgactacctgagaagccagcctgatggctggctcgccacacaccggctgataaagaacctgcgtcatgacaccctgcatcagttaccgcctctgtcatcagacggaaaaactcgcatcgagccgccaaagtcggaccagcgtgcgcagctcaaaaggctttacctgcagcagagctggcgtgagctgatggaggaggcagacagcctgctgtcgcgcggggctaaccatctgtggctggacattcagtggtacctgcaccaggcgctggtgaaatccgggctggaggcggaagctgcgctaatccagtctgacctgaaggggttgcttgtccgcctgccggggctggagacgctggcgtttaacgacggtacgccgttcgccgatgaggtgaccctgaactggatacaacagcaggtgacggatgacccgtcgggctggcaggagaaccacccagccacagcttcggctgtggacgacatcctgcaactggagtcggaagcgttaacgcttgccgacagccaggggacagaagcggcgctggcctggctgcaaaaccgccccggcatgaccacttctcgtgaacgctggattctgcgtctgctgatggcgcgtattgccgaacagaccggtaaaaacgaactggcgttgcaccttctggctgagctggatattcattcgacaaccctgacgctcgctcagtgggagccggaactgctgtttgaggtgaaggcgagaaggctgaagctgctgcggatgaaggcagggcgtaatgacgccgataaaacccgtctgaatcttgaaatggaatacctgctggcggggctgattgccatcgatcccgtcagggccgccgtactctgtagctga

SEQ ID NO: 158602 - DNA, 1053 bp, Enterobacter cloacae
atggcgcaggtacggcagcatctgccgtacatgaacttttaccgcttctgccagctgcttgagcagagccagccggatgcgccagtacccggcagcgactggcaggtgcgtcaggagccggtgcgcttccgccctcactctgggatgggattcccgtccagtgaaatccgggggatggaagatccggaggcggaacatgcgcatcttccgccgacggtacgcgtcaattttatggggctgtacggcgtggagtcaccgctgccgacgcactacattgacgatatcgctcagcggcgggaagggtacgaagccgcccgcgattttctggacatcttcaaccaccgtcttattacccagtattaccgtatctggcgcaaatattcgtatccggcgacctggcaggcgggggggacggacaacacctcgcagtatctcctggggctggcgggcctgggtatccggggatgcgcggctacggcaggtacgccgctgtctcgctttctggcgctgcttcctgcactgctgctgccggggcggacagcggaggggatggcgtcgctggtgacgctgctggcacccgatacccgtgcagcggtgtattaccatgaccgctgccgggttccgctgaagcagcaggttgccatgagcgtccggcaaccggtcagcctgaaacaccgccccgtgatgggcaattacgggatggatgttaacggccaggtgctgttgcgactgaccaccacccatcctgacgaggtgcgtggctggctgcccggcggcgaactgcatcaggacctgatggcgctactgcacgtatacctgggctcacacctggatgtccggctacagctgtgcgtagcccggcatctgctgccggatgcgaggctggcgtgcagcacaaatgccccacgagtgggacgtaccgcggtgatgcgaccgctggcttcgcaacagaacagaaacaacatgattaccattcacctggggcgttatcagtgcgtccgggataacattcaccgaagggagagcgatgaagatggcgattaccgctggtaa

SEQ ID NO: 158603 - DNA, 537 bp, Enterobacter cloacae
atggcgattaccgctggtaacacctccgccacgctgctggcagtgtgcctggcggcaacattaaccggctgcgggctgacgcagaaaatatctgatggcaccgttgcggcgactaaatccattttttacaagcaggtgaagaccctgcatctggatatccgggcgcgggaaggggtgaataacaacgcaaaaggctcatcgctggcgacagtggtgcggatttaccagttgaaagaccgtaaagctttcgacagcactgattacccgtcgctgtttgccctggacagccaggccattaaaactgatttactggctgaaaaagatatccgcctgcgcccgggagaatccttctcactggatatgcctatggaggagaaggcgcagtttgtggcggtggccggaatgtttatggcgccggaccaggaaaacaatacctggcgtctggtcatctcccgcgatgaactggatccggacaaaccgcgtattattgaagccagcaataatcagctgacgctgctgcctgtgaaggatgactga

SEQ ID NO: 158604 - DNA, 480 bp, Enterobacter cloacae
gtgtcagccagagaacgttttttcaaaaaagtgcagcagaacagcaacagcgtgctccccggtaaaacgtcggcagaggccgaaatcctggaattttgccagcggatggatgaactggcgcagcagattgaccagtggtttgagggaagtggggttgaggtcatcatcgcgaccagacacatccacgacctgagtactattggttatagcctcagcagcggcatctgccgttatgacatcacaactgtacggttacagaacggagagcgcagtgccagcatcatccccgatcaattttgccagggcgcggaaaggggctgtgtgacgatgcgcgttgaggcgccgggtatccaccaggtgtttcacctgagcatggcagcggaaacgggctggttcatccggcgtgaaaatcaggacattcagaaacgcgttatgctgacggaagatattttcttcagggctatcgacagtctggcctga

SEQ ID NO: 158605 - DNA, 1512 bp, Enterobacter cloacae
atgaatcccgttgtgaatacctggcttgccgccgaaaaggccgccatcacccactttgattcatcccagtccgattcactgccgtttactgttccctcgggcgacagcaccgtccattcgtccgttccgctggcaccggtattgccacaggcgattaacgggcctatcaatatcatgaccctggcctcgccgtcaccggactacatgtggggcgtcacgtggtccggtattacctacatcagcaccagcaacggtgcctttacgccgctggcgcgcctgcccattcccggcatcacccagtttccgattgatttgctgaccgccctgctcacccagccgctcaataccctgagcgtggtggaaggcatcacctcgcagttgtctcccgtcacccctgcgggcggtattaacagcgcctactgtctggtggacaataccaacacgctgttcgccaactatggcacgaaggtgtacgccgtcgggctgaacgtgcccggcctgccgttgctgggcattggcattaagcgtacgctcgacacctcatcgtttatcccgtcgggcgatgcgattaccggtctggtgctgacttacgatggcaatctggtggtggttggcacccgctcggtttccgtggtggcgcgatctttctccggcccggtacataccctcaccttcggggcggacgaatatatctccaactcggcggcggtggatgaaaacggcgggatttacgtggtctcagacaagaaaatgcgtaaggttgtctggaccggcggcgccctctcagataacccggcggatggcgcgtgggtgtctgattacccaaccggcgataccttcccgaccgttttcggttccggctcaggcgctacgccaacgctgatgggctttggcagcggaaccgataaactggtggtgatcaccgacggcaaaaaacgcatgagccttgtcgccttctggcgcgatgcgatcccaacaggctttaccaaccgtatcgccggcattattccggtcacctgcggcttgccgctctccacggagtacatccagagcgatcagtcggtggcggtgcaggattacggcgcgtttgtcgtcaataacgtcggcgcgaatcccagcagcggcaaccgactcaccgacgcgctggcacgcggcccgcttcttgactcaccgcagggcgtggaacgttttgagtgggatccggtcagccacagctggagctcaacgtgggccagagcggacatctgctcaaacaccatgatcccggcgatcagttccgccagcaatacggtctataccaacggctatttccgcggcaacggcggctggaaagtggtgggtatgaactggcagaccggcgcgaccgtgcataacaccatttttggcgacaatatctgcggtaacgggatttatgcccagatggagtttatgccggatggcgatctgctgatgaacagcatcctcggaccaacgcgcgtccagttgccgggcggcgtggtacaaccgttatga

SEQ ID NO: 158606 - DNA, 174 bp, Enterobacter cloacae
atgaggggcacatacgcgaaatggcaaaaaaaaaaccgccattatctggcggtaaatgcttgcatggatagatttgtattttggtctctacgtccccgacgctccatggtcgggctgcggatcccttacaaactaacactgattaacttaacgaaagctaaacagctctattaa

SEQ ID NO: 158607 - DNA, 645 bp, Enterobacter cloacae
atgacaagcaaacgcacaacattaatgctggcacttgctgcgcttacggtcagttcctccgttgccgcgaaaacgctggtgtattgctccgaagggtcaccggaaaattttaatcctcagttatatacctcaggcaccagcgtggatgccagcgccgtaccggtctataaccgactggtcgatttcaaacccggcaccacagaactggtgccgagcctggcagagcgctgggaggtgagcgatgacggtaaggtttacaccttccatctgcgccagggcgtgaaatttcagagcaataaatccttcacgccgacccgggactttaacgccgatgacgtgatcttctcgtttatgcgccagaaagacgtcaatcatccttatcacaacgtctctaacggcagctactccaactttgaaagcctggagtttggcagcctgataaccgccattgataaagtcgatgaccacaccgtgcgctttaccctggcacacccggaagcgccgtttgtcgccgatctggcctggtattttgcctcgattctctctgccgagtatgccgatgcgatgctgaaagcaggcacgccggagaaggtggatatggagccgatcggcaccgggccgtttaagctggcgcagtatcaataa

SEQ ID NO: 158608 - DNA, 315 bp, Enterobacter cloacae
atgaaagcattgccaaaagtcgtaaaaggctctgtcaacgaactttcaggtaaaaatatcgtacctgtcgttgcgggtattgttgctggggtgatagcgggtgcgagcgccccagcgttcgccagcaacagtacaccaatgattgcaccaacgcactccaaggttgccgccagcaacagcgtacagcaacctggtacgtctgttttactggctaaaccttctctggaaggacaagcattcgcggcgcattacagccactcaagtcatgcaagccattccagccactattcctgcacgcctggttcaacgtgctaa

SEQ ID NO: 158609 - DNA, 378 bp, Enterobacter cloacae
atggataacctcaaacatggaaagaatgaattaggggaatattttttgttgcccctaaacaaaaaactctatagccgtgaagctataatgaaaacatgctactcgtttaccgatgatttcttcattcatgccgtcaaatcagaaaatgaagatgttggtatctatatctaccaaaaaaacgacagcgttaatgatatgaataccgtagcaaagcgctttttacatttacttcatgaaaatcagatgcgtcaaatcattcatgatgaaacttcagccttacatgaagagatcgtcaggaaagcattctccccggccgccgtgtttgttgaaaaacgggtacaggctgacactcaagatattttaaaatcggtagtataa

SEQ ID NO: 158610 - DNA, 225 bp, Enterobacter cloacae
atgataatcaagcttgacccacatttttatactcagggcgctatagagaatatagcccaacaattcaatgattatttgagtgtagagtttaccattaaagaggcgttctgtctgaggataagtatcaataaaaaatatctctcagatgcacctctcattatgaataccttcctgactaacatccttgatctcagtatacaggacatcatgcacaatgagcgttag

SEQ ID NO: 158611 - DNA, 1458 bp, Enterobacter cloacae
atgagcgttagatttaaatctcccgctgagtttgcttctcagtcatatcaactacttccattcagattcagccaactggatgacggaaattatttcctttcgactgattatggcgagtggatgtgtattagcccttcacaacttactacactcatctataaggagaagattgaagatgaaacgctttggtatgaactgaaggccaaacacatggtcagtaacggaattgatgacaaccagatcgctttactctcctcccgatacagaacaaagaaatcattcctggaaaacttttctcagctccatatttttgtcctcaccgttcgctgtaacaactcctgcgtctattgtcaggcctctcgtaagagctgccagtccgatcaatctcgttatgatatgagtccggagacccttgaaaagagtattgatttattcttatctatgccttcagacaagcttacgcttgaatttcaggggggagagtccacgctgaatatgggcctcatccgtcaggccgtcgccttggtcaacaggaaaaatacccgaaaagatattcaattcgtggtttgtactaatttgtgcgagttgaatgacgaagatctcgactttttgctagagcataatttttcaatcagcacatcgcttgatggccctcaggcgttgcatgatgctaaccgtaaatatgcaaaatcaggtgcatggagtgcactcatttcaacgcttaataaaatcaaacggcgtgatgcgtttgacagagttagcgcactgatgacaacgacccggccaagccttgatatggctgaagagattataaatgaatatgtaagccatggatttcggagtattttcatccgcgaacttaatccttatggcttcgcacagaaatacttccataaaatcgggtataccacggaacaatttctggcgttttatgagaagtgtctcgattacatcattcgcattaatcacgatggaattgcatttcgcgaatcctatgctgcattgatcatgaaaaagctcatgacgccttgggcaacaggatttgtggatcttcagtccccctgtggatctggttttggggtcacactgtataactatgatggaaacatctacccaagcgatgaaagccgaatgatggcagaaacgggcgatcagcatttcaaaatggggagtgtttttgagaatagcccagaagaacttttctttggctcagtcatgcaagaactcgcctctgcaggagtcaatgactgcctgcccgtctgttctgactgtgcgtttgctccctactgcggcgcagaccctgtacgccgctatcaggtaacaggttcagtttatggccatcccggtaaagacgatttctgtttaaaaaacaaaggtattatttcgatgattattaaacgatttgttgaaggcgatcgcgagacccgtcgtattctgatgcaatggggaatgaaatga

SEQ ID NO: 158612 - DNA, 1239 bp, Enterobacter cloacae
atgaaaacacgatgcactgacgatacgctttttctttctactcaggcagaaagcatctggcacctgaaggcagcactatttggtaaagtcgctgtcgaattaaatcaaatcgcagcggatagcattgtctttctgacctccggcaaatctataccactgtcagcattgccctctgcacgcgcaatcatttgtacaaagaacaatccgaactttgaagacttaatcgcccagggggagacaccggttatcgtcgtttcagaagaaactgttttcagtgagggcgatgtaataaccatcagcgagcgggggcggatccatcgcttatttcgtgcaagctctaagaacaacgcattcctggtgactgaagtttgcaacaacctctgtgtaatgtgcccgcagcctcctaaaccggaagcagcaattaaccagggtgatattgagcagcggatcctaaaaactcttgccctgattgatgataagcactttccggaagcactctgtattacggggggggaaccgacaatgttaaacgaaggattgcttcatattattgaggcgatttcagaaagaaaccaacagacgttaatacacttgctgacgaatggccgctacttatgtcaggggaactatacagcgcttctggcacagaaaagtaatcatcatttgctcgccggcatccccctttttggtcatgtttcagagattcacgactatgttgttcaatgcgaaggggcatttgatcaaacaatggccggtttgttaaattgctacaaacacgggattgacattgaactgcgcgttgtactgaacaaagtaacggtaaaatatttaactgcgctggcagaatttatttcccgaaatctctttttcgttaagcatgttgcgcttatgggcatggagaacatgggatatgcaaaactgaaccgggaagccgtatttatcgatccctgggagtataaggatacgctatccgccaccatcgagatttttcagttatatggtattgatgtaagggtctttaaccttcctttatgtattgttaacgaagacacacgagcccattgcaaacagagtatcagcgactttaagaatagctggagccctgtttgtacctcctgtatgaaacgcgacgcatgctgcggttttttcagttcctcgacggataaattttggttatccaaccatatcagtccttttgttacagacctggagagaaaacacccgagttttggaggttga

SEQ ID NO: 158613 - DNA, 315 bp, Enterobacter cloacae
atggactggctggcgaccgaacttaacgacgccaggccctatatcttcacagcgctgtggcgtaacaacccaggctttaacgaccctgagcgcattgcggcaggaataaaagagtggaaccactgcatcaccattctggaaagccaactgcagcgcatcgctcttacccttgcggatgtggtgcttaggctgtcggtgaatcgatggaaaataacgccgtttgataaacccgacgcgcccgcgattgaggcctggtttgaacaccttaaccagcgactggcatttttgcatcatggaaataacggcgtagcgtga

SEQ ID NO: 158614 - DNA, 1002 bp, Enterobacter cloacae
atggcaaaggtttcaaaagcagataagaaaaaaggaatggtacttgcgttcgaacgtaaattggcaacgtcggatgcggtgatgtattcaggatgctgggagggtgagaattgggaaccgattcgcgttaaggaaaaagcagtgcgtggcactatttctaatcgtttgcaccatcccacaacaaatgatccaactaaattagatgctgatattacaaaagcaaaccttcagcgagtggatgtagcagcactaccagcagacgctgacacgttaatggtgaaatttacactgcgcattctgggtaatttgtccacgccttctttatgcgatgatcgtgtttatcataacgcacttaaacaggtgattgatgactataccgatgagcatggtttttctgaactggctcgtcgttatgcaatcaatctggcaaacggtcgctttttatggcgtaaccgcgtcggtgctgaaaaaattgtcgtaaaaatcactggctgtgggtcatggtcgtttgatgcgtttgattattcgttgcacaatttttctgccagcgataagcaacttgacgaactggcgcttgaaattgaaaaagggctaaaaggtgatggatttgtcctgctgagtgttgaggcgcaggtgcttcttggcgcagggcaagagatttttccttcgcaggagcttgtactagacagcaataacaataaaagtcgtgttctataccaggtggatagtgtggcaggaatgcactcccaaaaaattggcaatgcgatccgtaccatcgacagctggcatccacacgtcgcagaatttggtgcgattgccgttgagccctatggctctgtcactactcgtggtgtagcttgtcgtcagcccattggcaaaatggacttttatacacttctcaataactgggtgacgaaaaaacaaaaaccagatgttgagcaacagcattacgtgatggctgtgctgatccgtggtggtgtatttggtggaaaggatgattga

SEQ ID NO: 158615 - DNA, 936 bp, Enterobacter cloacae
atgagttcgttaatcctacttcgtcgtatcaaaattgaaaatgcaaatactgttgctggccttacgtatggatttcctgcaatcacccattttatgggattttcccatgcgttatctcgcaaattgatggaaacacacgggttaaaaattgatggctgtgcggttgtgagccacgagcaacagattcatgcgcacaggtccaattatgattaccatttctctctgacccgtaacccactgaaccataaaggggaaattgcacccttcaatgaggaaggtcgcatgcacttaaccgtttcattactgctggaatgtcacggcgaaatccctaacggtgaatacgggcagcgtgacctcgcagcgtttctttcacaggtgtacccaaccctcaggttggcaggcggaatgatcaccaatattgagtgtatttcagttatggcgatgcccaccagcggtcaggaaattagtcgattacagtggcaattgatgccgggctttaccttgcgcgatcgcagtagctggctgggtgagcatcatcaaacgcttctgaaaaacgacccaaatgccacgcttcttgacgcctggctcgactttgcttcgttaaaaatgcaggccgaaacgccagaagagggagatatccacgaaggcgactcggccagatggcaacatgttcctaagcccaattccggttatctggtgccaataatgactggttatcagcgtatctcagaaatttatgctcctggctctataactccagtgcgagatgcagaaatacccttcgcgtttgctgaagcggtgtatggcataggtgaatggtgtggggtgcataaaatccggtctcttgaggatattttttggcgttaccgaacgacagaaacgggttattactgtcagggcgcgggcgcgccagtggcatttgagcatttaaattaa

SEQ ID NO: 158616 - DNA, 1302 bp, Enterobacter cloacae
atgtcagttgaagcactaagcgctttcattgctgagtatatagccggacgacggcaagcaaagctggaagcatttgataaagcggccgcaaagcgcagcgaagatagcgcaacgcttgcggcagaacgccgggaactggaacgtcgctatgagccgaaagcatggttgacggatgcagcgaagcgagccggacaaattaacctcgtgacccatgcggcgaaatttacccacggggattcaaaaagtagcagtatttacagcgaggcagtggcgcaggaagggtatctcagcaccgccgcgttgtcaggtctggaatcagatgcggtgggcaacgctgctgttatggatgtagcaaagttgctacaggctcgagtcgaagatggcgattctctattggctggttttcagcgtggcgatcacagagcgctcgccactttcaccgatgatgctaatcagttgaatgaatggattgccggattctcacgaactttgattccaggaaaacctgtttcgcacgtgttggcgaagcaaagttatttccctgttggtgatgattaccacctattaagcccgctctttgccacttcgttggctcacgtcctgtatcagaaaatggctgccgtgcgctttagcgaagaggctaaagctatatggaaagctcacagtaagaaaacgtggcatcccattccgctgacaatatttccaaattcagcagaaatgcgttttggaggctccaacaagcagaatgtttcgtatttcaatagcgtgagaagaggggggatctggctactttcctgccagccgccgcaatggacgcaagttgaaaaaacgccgactgaagtccgttcaatctttaagtttggtgaagagtttgatcgtaaagcttacggcatcgttcaacgcatgcttaccgtcataaatcgtcccggtaaaaacgttaaaattcgcgacgatcgcgatgaatgcattgatcagcttattgatctcttgtttgaaatatcaacaaaactccagtctgaaaaatggcaaaattggacgcttaaatgccctgttcttaaatcccatcagcagctctggctcgatccctggcgcacaaaaacagacgaagccttccgtcttgaacgagaaaaagacgactggcaggacgctgtggcggaagattttgccctctggctcaatgcacgtctgagaaagacactgcctgatgtgggggacgtggaaaagcgtgtttgggaatcacgtacacatttgcgcatgaacctgcgagacatggagaaaattgtccgggaggctctgaaatga

SEQ ID NO: 158617 - DNA, 1089 bp, Enterobacter cloacae
atgcctaccgtaggttggattcaggagacggccattgacctctttcttgaacgaggtttttcagcgcatgaaaaagggtctgcgaccaaatttaaatgtcgtgaatgctcgatggaattttcttctatagcagagcgtagccaacatgaacgccttcatcctgttgcgaatcctatgcttaccatcgatggacgagaggtcatgggagataacttcaaacttactcgagcggtaggtccggaagacattgtattaagttgtgttgatgaaattgaactgaacggtgatgttctcgtaaacccggacgagttattgaaacaactctgttcagcgaagaaaggcttttttgatatcaagctatcgcgccgggggatccgccctaagcgcattaagattgatttgctagtggcctctctgactcagcttgaacaggtcgatcagagtttcttgcgcttgtttggccgggatgatttcgatggcgatacgatatctcatttcataagtgaaacggagggctgcgatgaagttatctggtacagagatgggcttattcgttatttacatggcgtgatggcgaaggatcagcgcgctgaacgattaaccactgaagactttgcaaagtgttttaatcgttcacatcagttgcttgtgcagtatcccacggcgttatcgtattcactgtctcaactcattaaattctcatttaatgatttctcagatttccatgggcgatcgtctatttctcgtctggatgacgcgttgatgctcttccgtggggatactattttgaccaatgctggcgaccagaatgtcattttaaaattaccgacagaccatattaccagccgtattctgaatgattatgtcgcccatttttcacgctatacactggaaagcctcgagctagctatcgaccagattaacatctcgaaactggttaatcaggatcgccaaaaactgaattaccttcgttatctcaaggcgacagaggaaggtaatcttaaagctcagcgtaactacggtacaaaattaaaatatagtgaagtttttaacgttacagttccagaatcagaggcttcagatgtctga

SEQ ID NO: 158618 - DNA, 1311 bp, Enterobacter cloacae
atgtctgaaaataaagaaaaaaagacagggaccttatccttgaaacgaaacaaggatcatgcggaaccccaagttaatgcagcagccactgaaactgaatcagtgattgccgaaacccaggccgagttcgacaaggcagaacgtttttcagacaaagcgtcgtcagaagtagctgcgagcagtagcaaagcgaatgatgctgaaaaaataaaaacactagagagtattttaaaccagctgtttattcctgtgacgaataaggatggcaaggtgcgtgcaagtgcgctaactcaggcattgcagactgatttaaagcgcatacagcagcctggaagaatacctaacgaggtacttgagaagctgattgcatctgtcgggatgtcagatcctgagttcaacaaactgtcgcaagtagtaattctcactcaatcgaatcatgaggttagcaaggtagtcctcgattttgccgtaaaggcattaagtgagcattgggtgggcaaacacctggggtactcaaatctctttctgtcggaggctgaacctctgagtttgagtaatccggggattctggcgcacttaacccgtagctttagcgaacgctatgaagcaagaattacgtcgattaaggagcagcttaagcagaaagagggctcagataaatcatcttcttcgcttcgctcactaactccggagcatcttcgccagcaatgcgaaaatttgctgactatctgttatttgtgggcagtagaaacaggcaaatgtgatgtaaaaataggcattcaggcattcgaaaatcgcatcttagagcgcggtgatggcttaatcaatgagaagaaaatttgtggctttctcgcttctcaactcagcgagccgcgaggcggtatcgcagacacgattagatattacgaagaattattgagccgcgctcgtgaagggcagcgaggcactgagactagaaatgaacagctcagaaaaaatctgaataaaattgaagcggaaaaggctcaactgacgcaacgggtttctgcactgcagcaggaaattgagctgctaaaagttagcctaagtcaggttaaaacccagtctgaagagcaagtgcttgatgataaagctcagcgtgtacacctgaaagatgacgtcagtaaggcaaaatcacgtgctttcaatctgttaaatgaagatgttatggagccacttaaattatctcttaatgcattgcagagagaaaagccgaaggtggaaattgcgacacattatgtcgagctggtccttgaaagcattgagagagaattgtcatggttcagaaaatag

SEQ ID NO: 158619 - DNA, 1773 bp, Enterobacter cloacae
atggttcagaaaataggtatcgattttggcaccacaaacagtctgatttcagtggtgacgcgtgctgggaaaattaaatcattcgatgacttaggacgacctcacccttcagttgttcgctatgagagcgataaaaccatctgtggtaaaaaagcaaaagataagctcgatcagcatggaatcggtgttttaggaaataccgttcgtggccctaaaaagctgttgggttgttctgatatcaatgttgatgggcgtttactcagtcctggcgaagtggtgactgagtatattcgatatcttattgaacacgcccgagatgaagatgacgaagaaagtgccgatttgaagaatgcagtggtgactattcctgttgcgatgggaggccgcgagcggcaggtacttcgtgaggcattgctaaacgctggtgtctatgttgagagctttgtacatgagcctcttgcagccctctatggctattttcgtgatcaggaagaccctaaaggggcactaagacgattcgaaggcaagatgttactggtgtttgactgggggggcggtacccttgatctaacgttatgcaaggtggttaatggcaatatcctgcaaatcctgaaccgcggtaataactccgtgggaggagactatcttgatgatgctattcagaagtatgttgagcaaaagcacgcagagcagcacaactgggacgatgagagccagctagagcgtagtcctgggatgctagccaaattacaggcggcctgtgagcgtgcaaaaatcacgctttcaacccacgacaagacttctatctttgtgcctgactactaccttggtgaaggggaagagtcggaaatcgattactggttaactcgagaagagcttgaggctatttctaaacgattaattagccaagggattaatgaaatcgatgcgttgttagctgataatcaggccgatattgataggcagacgatcgctttgtgtctggctactggtgggatggttaacatgccccttatcaaacggcagttgagtgagttgtttggtattgcttcgcttgagatttcaaaaaagggagaccgtattatttctgagggcgcagcctggatcgcgtcggatgagttgaagctgacattatcaaagccttttgaactactcgaagcacgcaattcgattctgactatcatccctgaggggacattgctaccgacccgtggaaattcgatcagctatccacaatccatgtattgcacagaccctcgagatgggaatgcacttgcgtcgtttaaacgaccacaaatggtaggtaaaactgctgccgcagatccgcgcaccaactatggtgaattggttatcccgattaacccggattttccccctctggaagagagaattgagctggaaattagcatcgatgaaaatctgattgttcatgtttctggtgttggcggggatatgcagatcccgcgctcgacagagttttatgatcttgaattcggtcttgcaacgatgacggttcagccggaatcaaaaaaaaaacggcttaagttaaaaggcgagaaaaagcttccttatggcttgatgatcagagcaaatgtgacgcctgataaagaagactgggagcttgtcccaggagaacttttgaaagcttacaatgacgaacatccgtttctgaggaagactcttacagaacaacaaagaacagaatttgttcgttatcagccatgcagtaattgtggggccaggtggggtaaaaattgttgctcgaatagctga

SEQ ID NO: 158620 - DNA, 1086 bp, Enterobacter cloacae
atggcgactatacgcaaacgtggtaactaccaatgggaagctcagatccgtaaacgtggttttccctctcaaaccaaaacctttaacacaaaagtggaagcagaggcgtgggccaaaatgatcgagtcagaaatggcgagaggtgtttggctcagccggagcgaagcggaatctacaacactgtatgaaaccctgacgcgctatgaaaaagagattgttcccgacaaaaaaggagcaatgcaagatcactccctggtgcgaatactaaaaggtactcagctggcgaagaactatatggccagcatcaggagtactgatgtcgccaaactcagagatgagtggttgaaaatctatgctccagcaaccgttttaaggcgtttggcgttactttctcacgtattcaacgtttcgcgtaaagaatggggtatggaaagcctgcttaaccctgtagaagccattcgcaaaccccaacccaagaacgccagaaccagacgcctggaaacgcagcctgtgctttctgagaaaaccagtgttacgccagggaaagaaatagtcaccgagatagaacatatcatcgccgcaacgcattcagtagtattgccagcaatcattcttctggcgttagagacagctatgcgccgaagcgagattgcagaactacgatggcgcttcatcgaccttgagaagcgagttgcacatttgccagatactaagaatggtaatgcccgagatgtccccctatcaacgaaggctattacgatactgtccagtcttcaggaacattctaagccagctgctgataaggttttcgatatgcgtgccgatgcaattacgcgtgcttttgatcgagctgtaaaacgagccagagaaaggtatgaacaaactaatgaacaaattaactcacaatttgacgacaccttcctcagagatttgagatttcatgatctccggcatgaagcgacctctcgcttggctgaaatcttccccatgcatgaactgacaaaaatcacagggcataaagacccgagaatgttaatgcgttattatcatcccaaggctgaggatttagcactgaaattgaaatga

SEQ ID NO: 158621 - DNA, 228 bp, Enterobacter cloacae
atggtagattataataactttgttttagagggattaaaaattcttttcacgtataatgaaaaggagtttataaagagagatttttttgaagatctttatgacccattgattaatattctttgtatagaaaattattataacgcaacaggtatttatgatcttgatgatgctaatgagcaagtcagattattaaaggatgccatttctaagtatcaattgtctcactaa

SEQ ID NO: 158622 - DNA, 849 bp, Enterobacter cloacae
atgctgataatgttagtatctgcatgggtgatgtgttatgcaggtataatattacttgggttcggttggtcaaagttgacttccgatataactgtaaattatctgaggacagtattgtctgttggcatccagctatttgtgatgacattaattattggtattgggcaatcattcatagatcagtatttttccgttattaaagatgatgtgccggaccttaacagccttatagtcctgcttctggcgtcaattgttctattagtgctaactaatagattaccacagctcttatcaggaattgttggtggtgcatctttacacgggatggggggatttggcggaggtatgattgctggggcagctaccactgcaatcagtagcgctggctcgattgcattgagtgctacggctcaagccagcgggggggcttctgcattaaaagctgcatttgaatctgcacaagctgctatggctgaggaatccggttccggaggtggggcaggaagcagtggtgccggaggtgtttcggaagacactggcaacattgacgcttccggctctggcggtgattcaactgcaggcagctcaggtggtcgctccagtggaggtagtaaaggatttgctcagttttccaaagttagtcgtatggctagccatatggggagtagtttgattaacggagctatggattatcagacgaccaaccaaaaagccaactcaactcgtacgcgacaaacgattggggaagaggtcgcggatcacatacgtaaacggtcatctgctcaagcgggtaaccgtgaacataccgagtttgaaggtgatagcttatctggtagtaaaaactcttga

SEQ ID NO: 158623 - DNA, 171 bp, Enterobacter cloacae
atgttaaataaaatttttattcctttcattataactagcgcattaattttatgttcttgcgataaaaacgataaagattgtttgtcgccaaataagaaaggtgacgtcgtgaaatatgatgactgtactttgcgcagtcataacactcccagtcccaagaaagagtggtaa

SEQ ID NO: 158624 - DNA, 795 bp, Enterobacter cloacae
atgaaagaatcactgcagggtggcttaccactgagatcaattttagccgctaaaaaaaatctaacaattttcctttttgcatctttgatgacgatcgctgcgagagccggcatccctgtcattgatgggacaaacgtggttcaaaccactatcagcgccgtcaataacgttcaggctgttgccaagcagattgaacagtatcagactcagttgcagcagtatgagaacatgctgcagaatactgtagcacctgcggcatatatctgggatcaggctaattcaacaattaataagcttctgcaggctcaggacacgttgaattactacaagaaccaggcgggaagtctggattcatatcttagccggtatcaggacgtaaactactacaaatcatcgccctgttttaatagcaatatcagctgtactgcagatgaaataagtgctcttaacaacgcacaacagaacagctctgaagcacgtaagaaagcgaatgatgctgtttttaacgtaatagaccagcaacagggaaccttacagcaggacgctgataaccttgctgacctccagactcaggctactggagcaacagggcaaatgaaggctattcaggcggcaaatcaacttgccagcgcccaggcgaaccagttattgcaaattcgttcattgcttgttgcacagcaaaatgctgctgcaacattggcacaagtgcaagcagataaagaagcccagcaaacagttgctgatcagagagctttatctggtgttaacaccccaactcctaataggaattggtaa

SEQ ID NO: 158625 - DNA, 360 bp, Enterobacter cloacae
atgaatgaaatgccgaaaaataccagaaagcatggaaagcatattagagtgccagttcttcctgaagaagaagcaataatcaaagctaatgcagaagcatcaggattaattgttgctagctttattcgaaaagttgcaatgggttatcaggtggaatccatagtggatataaagcaggtcttagaacttagccgggtaaatggagatcttggccgattaggcgggttactgaaattatggttagcaaatgatccaaggaccattaattttccaccttcactgataaaaacattgttaagtaaaatagaatcaactcagcaagagttgagaaatattatggagaaaatacttgataggtga

SEQ ID NO: 158626 - DNA, 954 bp, Enterobacter cloacae
atgaattcagttgaaaatcagcaggtatgttcgcggtttgttgagccagagaaattagcagacctgcgtacaaagcgggagattgaggtgatgaacggcaggccgtggacgcgggagcttccccctccgccggtattgccacctaatggtcctctggagaaaatctcagggaaactggagtctttccgctatgagagattcagggaatattttgatgcagatgcctacccgagccactctgtgccggagataactgatgggcagcgaggtacggctgccgctgcagcgatttttgcaggcagccccgggctcggtgctgtcatgatggcagaaagcgaatcttcgaataattcggcggaatatgtgcaggggatgattaatggtcagccattccgcggctgggtgggtgttacccgtgttcaggctggcgatgaggtggacatgattgttgaatggcagcatgaccattatgaagtctatgccattgcgttaccggaagatcgtatagtttcgatgtgtccgaaatgtgatatggggcatattgcacatatgctctggcgaattaaaaatatgtttattcttaccgcgataataatgtttgtttgcatgtttatgtttatgcttcatgatgttttaaatgacaggagaatttctgattattgggaggcatatcaatattcgttgtatgtgctattcgctatatcattagttctctctgggttgattgctttttttgcatataaggctcatgcaaataattgttgcaagttagctgaggaaatatttcagttgctggggatgaggaatgttgcaatggtcaatttaaataaaataacaaaaaagcgtgagcaacagctgggaaataaaggggggcacggctcggatgatgtaagtaaaattgcttgtcccagttctaaatttatttattcaggggagtggtggttttactattaa

SEQ ID NO: 158627 - DNA, 483 bp, Enterobacter cloacae
atggtaagagcggggataccgtccgagaccgttcacgggttggtgaatgactatctgaaagatgccccggccctgcgccagacggtgctggaaggtatccgccacagcgaacgctttatggcaaaccggaatgaagtcaccgcgaacaggcagaggatgagcagcaggctggaagagtactttgcctcagaaaagggcagtgaataccggctggcagggataaacagcctgttgctggtgctgaatgcgctcgattttatctacctgtacggacagttcagggatgataagaagccgctggcgagcctgctggccagcggtctggcgatggtgagccaggggacgacggttattttgccggcagtagaaaaagggctggaagccggtaagctgacggtagcatgggtcaagggcgttggggcggtagcgggtgggtttgcttcggcgatttcggtgtttactgatggagcttcagcagtgtag

SEQ ID NO: 158628 - DNA, 339 bp, Enterobacter cloacae
atgggtgtgatgggattgaaaacagttgtggatgtcctggctgtcacaaaatcagtcggtcttctgctggagcttattggtaaacctctcgcaaaggatggggctgatttaatcgctcgtggtctggcagttgaggtattaggcattcgggtgcttgcagtactgatgacctgggaggcgatggtggcgataactttgttgcaggtggtagtgacctggatgtcggatgacgagcttcagatatggtgtgagaaatgcgtatttggcacagcgccattcaaccgcagcgtggctgaccagaataaagccctggaatcggcgataaaggatatttcatga

SEQ ID NO: 158629 - DNA, 906 bp, Enterobacter cloacae
atggatggtgactcttttaaagatataaaagaaaaaatcacacgtgctgcttttggtacaaatggatgttgctttctactgatagatgcatccttgaaagaatatcaaacaggatcttttttacacgataccctaaaagtttataaatcttaccctgtaatatttcagcacaaagaacttcaaggtactttacctctttacctgtttcctcttagtaagttaagcgaaaaggatgaccaattgtttaataatagtattcaccattctttgagcgagataaaaaacgagaagcttgcggcgggggaggggcgcagtgtctgtgcgtggatttcgacgaatttaacaggggaacagcttgctgaacaaatagctttgtccgctgtacagtcaattaaatcactcggtgatatattacttcgttattttgatccctcagtatttggtctattgattcctgctctggataaatggcaaaaggagcagttattaagcaatgtcaatacgtggtcttatattaacggagacggggtggttcattcagtgaatggcgatggtgaatgcagaaaaagattaagccattcacttgggttaacagattcaaatgtatgtgaaattaagcttatattggttgtgaataaaattttgcgtgtgtatcgaaatgctgatgttgcccacaagctcagtgagtgtgaagcagtgaaattattgcgtcctgcactgggttattattattcatcgttctccccatcggaaaatgatgttgttgagtttgggcttgatgtactgagcgcacagaaattattttatcaggatgggttattttgtaaatatatgcttaacagacgtggcaaagaacattcgacatatatagatgttaaattaaaaattgatggtcaaatctactaa

SEQ ID NO: 158630 - DNA, 1245 bp, Enterobacter cloacae
atggtcaaatctactaatcaaaatacaataaaatctggaaaggtgccattaacaattgtggggtgcaatatgagttggcctgtgcaaataattcctccatgcgataaagttcatggaatgaaatggaataagtggtttttatctcttttatgtcttttattgtctatggcagtattttgggtgggggctaaagttattgctcctgttgaaagtggtgagctattaaaattatctgcatttctgtatttttggggaatgtttgccttttttttaattattgcagttcgaacatattactatgggttatgtttgtcagtggctgaagcaagagagcatgaagcagaattaaccagaaaaaattggactgaatgggccaatcaaaagttttatgtgtccgcttataatttatttcttccatctgcagtaatacagaccgatatagcattgtccaatcctgttgaaatatataaagatcagcaattgaaactacgtggtcataatggaacgatatactctgaagaacaattgatttatgagttattgtcatcagtcagagcaaggctgttaggattgaaagaactctgtatctttgatgtcatgtttacatatggcaatagttatattactttctcgatctttaaagaatgttgggcagcagttggttttaatgatgattgtttgggggatatttattattgtagtaaagcattagagcaagaatttgagactttatctgatatcgcgttgaatcgagcaataataatcatatctgcaaacattgagggtgttgatggatattgccctgactcatcagaatttgcctcaatatttatagtgactcatcaaaagcaaataccaggaaaagaaaataataatgtggctttgcgaactatggcatgcaataaaaatcaagccaaacaaaatttcgtaaatatgatagcttatcagccagatgttctaagaacgacaaaattagtttttagtaatatgagcgaaaagaatgctttggatgttttagaaatattcagggcttcatctgcatctatgaatgttgaatggaattatgaggtaaaacatttaaatttgatgctgggtaagttaggtgatacccatttgtggttggcgtttgttttatcgttattgatatcagaaacaaacgatgagccggttttgatggtcgccagcgttggtgatgactatgtctttaatgttataaaacagtttgataataacaaggagcgttaa

SEQ ID NO: 158631 - DNA, 1011 bp, Enterobacter cloacae
atgaccacctgtggcggcaaaattgtggatggggctggtgatcaccgcttgttcggcaaagcaatcgcccgcgaacgcgatcgagtgacctgtggacagcactctggcatatacatgattgcgggtgggatcgcaaatgactgtatccatggacgtaaaatggcaggtacactcgacagcaccagttcttgtccatgcagggcaaagtttattccgtcgatgatgaatgatacgtatgagaagagtgaaggtagtgcaaattctgcaggcgtatcttcacaggaaattactccactggagaagactaacgaattatcgtcggaacttaagactatgccgccttgtcaacatactgacggagctgtgaaggttgctaattatatacttaatgaaattaagacgaatgtcagaggtcagattgccgaaacaatacgttcttttattgacgaagatacgttaaaacaaagacgtgccgaatgggataaacttcccttttatgcaaagttggctcagtctcttaaaccagatttatttgctgcaatggctgtctggtatcatactgtgaaaacgggttcaacctgggatcataaaccgaagattcgggatagattttcgtcggttgcagttgcgcgtccactacccagaaaagggaaaccatcaaagtcttattaccataagtttaaacaacatgattacttttatgatgtttggtcaaacattcattatggttatgttggacttagcgtcggtttttctgaagcattgctcctgaagggttctggctgggaacaaaacatgacgcctggcgcaataggggatgacacattggatgatgttacgagcatgaaaatagggttttctctctttaaagaatatgggaaatatgcagaaaatctgactgtaaaaaatatacttgatgcactggagaaaacacctgaccagctatttccttattccagagaaaaacattggtgctggaatatagataatccggaaaagctcgaggagtag

SEQ ID NO: 158632 - DNA, 471 bp, Enterobacter cloacae
ttgaaaaagaagattgtactgggttgcatttttttgttttggggtttgttaatcatgattgctcatatcatcccaataaggcctgtcattgtcatcgaaaacaataccaatgagtctatgtttgtatatgcaggcgaaagcatatataacatcgagccagcgcctgatgaagtcgaggaaattatcaggtcgaagcctgaaatcattgcgcctggaaaaaagatgaaattcacttcttcatttatttctttgatgagaaaagatgcagcaattgacattggctggagagttggtgggaagtacggatacaattccaatggtgggggggggcagaattttattctctcctcaacgggaggagcatgtgccgtgtcgattgaaataaatgatggcctcaatagcaatacaatagaaaagaatcctggtggttggtgcttgaaaaagctaaaggcatttaaatacaaatattaa

SEQ ID NO: 158633 - DNA, 837 bp, Enterobacter cloacae
atgagtataaagctacctgattttctcaattggccccgccttaatgccttacgtcataaaatgaaagcaccgctgtcgataagcttttcgctagatcccatacaaccagatacctcgttggctgaaaaactactttccggcattcatgaaatcgatcttaacgaagtacagactcacaacgacgggacattattctataacaacaagcgcgtattactacatatcagggatattttacctgctgcggagatgccaaagtatcatataactaattgtcaaagtctggacagcatgcgaaaaagtcgtcgatttgaccgctatgttgtcgcaaacagagataccggtgaattcatcgtcaataatattggtagtggtgagaaaaacctgatggtaaaattagatgtttgccagaattgtcttgatagaatccagtggcgtgggttcagcaggcaaaacatgtcgagttgtgaacgcaggagacgagtggctgatttttcactggccgaatttttcgaagaatatccacgagatttaataaccactaaacccaggttcacctcagcaactagtccgctaaatgattacccgaaaaactggaagcaattatcgttagaagtcaggcgtaagcgaggttttaaatgtgaatcctgtaatcgatcgttcaaaccgaatgaatccagatttcttcacgttcatcatcgcaatggtctgaaatatgacaatagtaatttgaatcttgaagtactttgtattgcctgtcacgcagagaaacctatgcatggacatttgaaaactcatccggattacaaaacgcttgtcacagctcctttgatatag

SEQ ID NO: 158634 - DNA, 681 bp, Enterobacter cloacae
atgaattcagagcagagcaaccagtcttactggatacccctcgcagatttgatgacgggtctgatgatggtgtttatgctgctgacggcagcatttatgctgcgtgtagagcagacgacaacgcttgttgttaaagagtatgaagtcaccaagcgcgatatgcagttagcgctacaaaaagagttcgcaaaagacctgaaacactggaacgccgaaatactgggtgatatgacgattcgctttaacgatccatccgttcttttcgctataggttcgtcagaactgcgccctcgtttcaaagaggtactcgggaagttttttcctcgctatatatccctgctgacttcaaataaatacaaagccgcggttaaagaaattcgtattgaagggcataccagtgccttctggaacggagctaatgatgcaaaagaagcatattttagaaatatggaactttcccaggcaagaactcgcagtacgctcgaatatcttatgtcgctatcaaaagtgcaggataatcaaaagtggcttgtacagcacgtaacggccaacgggctatcatcctctcatcctctttcgcatgagtcatcacatgcagcaaaccagcgtgtggaatttcgtatcgtgactaacgctagcgagaagatggatctaattgcaggtgagttatctaaaaaatga

SEQ ID NO: 158635 - DNA, 1311 bp, Enterobacter cloacae
atgatgaaaaaaagacttctgcttacactgctattcatgccctgcatgtcatttgctgcaacgacggtaacgttcagtaccgtcacatcagatcctattaccaatagtttcgtgttaattaacctagttctaacaatatttttcgccttcatacgcttcgacaggttcgctgtcgttcatggccctgaagtactcactactgttggcatcctcggttgtttcgcgggaattgcaacttcgctactgcattttgattcaaccaatgttgcagaaagtgtccctcacttgcttgaaggggttaaaaccgcattcatcgcctcgttaagtggtgttttcggctcactagtgatcagaacaaggcattatttccagaacaagcctatccctcagacatccggtacgcctaaagcggcaagcctggatgatgttgttgcggccactcaagcccttcagcaaagcattgccggcaacgaagacagtagcctcctgacacagcttaaattaatgcgtcaggaacaggcggatgaattacgcgcattgcgcagtgcctttgatacattttctaagaaaatggctgaagacggatccaaagcgcttattgatgctctgaaagaggttattaatgattttaattcgcagattaacgaacagtttggcgagaatttcaaacatctgaatgcaagtgtggaaaagcttgtcatctggcagcagcaatataaagacgaactcgacatgttgcaggctgtgcaaaaatcttcagccaacgatctcagggaggtctctttgggccttgcatcatttatagggcaggcgtcgagtttcgcgcagaccgctgaggcacttgaaaaaacgcttgaacatttggctcagcaacatcagaacatcgagcagtctcagcgctctatgagtgaagttttgtcacagatgaaagaggtcacccctcagttctcacgcaaaatagatgaaatgacgacatcaatggctttgggcgtaacaaaactgcagaacaacgttgatgatatcgttacggattttggtactcaggcacaatctttctcttcagaaattaaacgatttttgaccgagacacttaaccagtctcaatctgaagtcagttcagggcttactcagtccatggagaagatccatcagagtgttgtcgctctagatactggtctgcaggaggaattgacaaaaagcctcgaaactctgggccgacagcttgcttctctttccgagaaatttgttgctgactatacccctctaaccgagcgcctgagagaggttgtacggatcgcttccgcgacgtga

SEQ ID NO: 158636 - DNA, 372 bp, Enterobacter cloacae
atgaaacgcactgccgcagttttgtttttggcgctcacactggcaacccctggcgcggtgagtgccggagggtcatatctggttcttaaccagcaaaagcaaaaggaacgtgaagaccagttcgaagccgtggaacgtgatgctttggcccagccagatgcatggaaagcgtatctacaggtgtctgacgcagtgcctgctgatgctcccatcatgctgcaaaaccgctaccgcagcctcgccatttcactggcactgaaggctgcaatggcctgttccccagacgctctcaagctcctcgggcgtaacgacgtgatagagtttcgcgtactccgatcatcgttagtctctgcctgcagaaccgctaaataa

SEQ ID NO: 158637 - DNA, 399 bp, Enterobacter cloacae
atgtctgccaacacagcacgcaacccattgctcaaaatcctgtatgacaaccgacatgtcgcatttctggcgattatttatgtggcagaaatggctgtatgggcggttctgaatctgaagggactcggtgacgaagacttttccacctggcgaatcttccttctcgtgagcgtgggtatcatcgcgggcagtgcgggaatcttagatgatcccgatgacggatggatggtgtatgcaggggccctcgcgccctggctcatcgcgccttttgtcgtcatcgtatatggcttccttcaaatgaacctgcagtttttgtcatgggaatggttctttacctgcgtactgctcagttttagcctgcagtttatggtcatcttccttaaccgcttttccttttaa

SEQ ID NO: 158638 - DNA, 1011 bp, Enterobacter cloacae
atggcgttaatcagctgcttcaccggccctcagggcttgcagggagtgctcacctgtttgcgcgataccgagggcatgaccggtattctggttgtggttgcgctactcgctggctggattgttgttcagcatcttgcagatgcacgccgtgaacgccgtgcgcgggagagcagaccgggaatacccgtctctctcccgcaatttggcagtggccgacatgccgatgtggttcatgcatttgctaaccgggaatactggcaggtgatgctggccgaactggagacaggactgacagaagctggttacatactgacgcgggataaatcacagtgctggaggttgccaggggaagaccggcaaaaaatcagccgcaggattttccgggcgcgcctgctggcaatgacgccgagagtgactgagcagagggtaaaagacagtgaagacgcagcggtgaacgatggttatgccggcatgttgcttaatgtactcattcgcggaagtgaaaatgcagggtggtacatcacaaaaccggtaccggagttcgtcccgacgaactttccgttaaaacaggtcatgatcactgtcagtgcaaaacagtctgtcctgacgcgggatgtggtgagaatcatcaacgatgtggctgaaaaagtgaaaaagcagcgttcatttcctgaaacaccggaacgtatcgcaggtggtgtcattagcgaagaactgttttatggcgctgagcagcggccgggcaaggtggcaccgggctggtttaattcaccgtctggaaatgatgttcctgacgatatcaccgaaggactattcccgccggcgggaatgtcagaataccggcatttcattgtccgggttcaggctggaaggttttataccccgactgcacttgccttctatattgaagaagcgggtcgcaggatagaacagggcgaatccagcggagcatgctacgaagatgacagtggctatgctttcgccgtgacgcctgcaaaaaagacgccctga

SEQ ID NO: 158639 - DNA, 354 bp, Enterobacter cloacae
atgaaactaacagaggaaaaattagaatcccttattactatgttaaatgaaattatttgcgacgagtttagtattaccagagagcagcgtgaaaatatggtccgaacagtagcgactccaggggcactaagtgagcgatacaggctcaacacaactactaaaatagctgacaaacaggcaaaagaggaaaaaaaacacgcgaacctaatcttgtatttccacgtactggaaaagcgtggttgcaagaggagctcgacctactacattccattatcgatgatattccggatgaaagtatcaacgaccacattctgtggttatcaaagcgactgggacgaaccccctatgctatag

SEQ ID NO: 158640 - DNA, 582 bp, Enterobacter cloacae
atgaaaataatcactaaatgcaattttttaaagttaggactaagggatgtattaagaaatatagagtcacttgacgtatctttaaatgatgcgactataattgatatgcgattcttcatccttgaagaattgaaggatataaataatggtttgtttattttgcttttcccaaacatccattacgacctcccacgagaaataaaaagggcaagtgtatttttgtcaagccccataaaaactctaaaaaatgaaatcctaaaaatattatgcaacaggcatagacatactttaaaaaactcagattctgtaatatatcaaaacacaggcgaagctactctgtatgatgcagcattacctctacctagcgaaaaaagagcatctaatctaacaaaatttaaactttcgccagcagagtttaacacgcttgagaatttaaaaactctcaaaaatattaaactcatagctgaaaaagaaggagtgtcagagaaaactatttatgcaaggctcggaaagataaagttaaagatgaaagtaaaatctttagctcagctcattgttttttataattctatagtaaaataa

SEQ ID NO: 158641 - DNA, 675 bp, Enterobacter cloacae
gtgctggagttcttatctcgaagggccggcaccgttgtttccaaagaagaaattctggaagaatgctggaagaatagaggtattgtagtatcactgaacgctctaagacaaaccttatacaggctaaggagagcgcttgacgaaattgaagcttctaacgatatcttgctgaccaaaggcaggaatggttacctgttgaaagatgagtctattgttgttttatatgacgatcaggaatccagagactctgaagaaggcattccagatgaaaatattatttataaaaaagaaagttatttatttttaaattcactaagcaaatttagaaaaaaatccttgagcatcttgtatgctcttatcattgcaactttgttctttggtgttgggttttatattcggtttgcaatgatgattaatacgcttgaatataagaagttaaatccaattggtgatcttcatgtatatcttgaaaaaaaatctgatttaaacgaaactgaaataggtgaagtgctaaaaaagtattactatgataatggattatcgaaggaaaaattaaagtgcatttttattaatggtgatgagcaagacaatatttcatatttcatgtgttctggttatattgaaaaaagttcgtcaagatgtgagtctgttgtaatcttaaaggattttaaatga

SEQ ID NO: 158642 - DNA, 483 bp, Enterobacter cloacae
atgaagattaaactcatattctccatattcctgccattgatatttggctggtttgtaatgccatatgtttatctcgcgacatctggggactgttcatctgtaaattttttaattcgtgaaaaccaacagttttcaactatcacaaaaactttacggtattcctatattggaagcagtgagcactatcttaaaacctttgtgattgtcaatgaagtgaataacggatctaaaatttttcactctgaagggactataattactaaaagaaatattaacattgattccttaacgcttgaaacaactaagtcgtttgttttaaatggtatacaggataaacattacgataaagttgcgattattgatcctatagctcaagaaggtttcacttttagagtctatatattcaggattggtaataagtttcgtattacaggatttaaaaacacaccatcaagtatatgtgtaaaacctaaaaatatgtaa

SEQ ID NO: 158643 - DNA, 3348 bp, Enterobacter cloacae
atgaagaagatacaacaagtatcattttttagattaactgcaatttcaagcgcggtggttagcactctggtctcaacagcatatgctaactgcaactatgtagatgtaaataatgtactttgtacaggcccaacagtggccaatcagacaattattgatgagaatttaaaggatgtggttatcgatgaaagtttcgatggtaccccgtcttctttgttcttttcaaacactgctatgagcattggaggaatagctgttacgtccaatggcagtacagcggttactgccccaccatccaatgattcgacgttagatgttgcactttcggtggtaaaccgtggtacaggtgatgctaacttcattcaggaaaatggtactttatccagtaatgtcgccggcgcatttgtagcacaactcggacagggaggaattaatgttctgcaaaataatggctctctggtaggtgatgcaaatggtttattcacgttaaaattggatacttcaaatacaacgaacatagagttgcatggaaacctcacaggaggagatgcagcttcaggaacatatacacctgatggaggagtgtcttatgttgttgaacctgccggtttaaatgttatttcacgaggaggtgctgttaatgttaatcagatctcaggcaacattgagggtgcccgaggtatattaataaatcaggctgagggagaagttaatttgcttctttcttctgttgtatatgggcgtacatatgatggtgctacaataaacagcggcgctgtaaatgaatcatctaagattaatgtcattcaaaattcaggacaaattataggtgagcaaaatggtttatttgttaatacactactggactctgcatcacctatattaatcgatatttcaggcgctgtaaaaggaaatcaaaatgcaggtgttgttgccagccattccgggatgtcctcaacaggtgacattatcttctccgaaaataaacagggcgaagtgagcgggaaaaattatgggattcttgcgacaaacaccggaactggaaaaaatgagattaacatttccggcaaagttatttcaaacggcactgacgctataaatgaaactatatcaaaaagttcatcccaaaccttcacaactgaaggtaatcttgagactacagttgttaaaacatctcaagtggtatcgaatgttgatggtggaactgcaattaacatagatactcctgttggaacagatgttgtcgttaatttgaatgaaggcgcagatgtttattcagcatcaggtattgctatcagagatggtgcaggtaatacaacactttccttgaatgatgggtcaaaaattgctggtgaggttgttcttggtgcaggtgatgatactgtaaatataaacggaaatgctgatgttaagggattaacattacttgatggcggaagcagtaagtatcttaaaacacaagaggaagaaattgtaactaatgtgcttgatacagacacttttgattcatggactactacagagactaattcgtatattcagaatgatgtccttgggacatcaaacgcgggcactaataaactaaacttaacaggtacgatgcaggattttgctggctctgttatcaggaactggcagagtataactctggacaattccgttctctcttttgtgtctgatggtgatctgttaactggctctggagcaaactccgatgggacaaaacgaggtctcattatcaaaaataattctcgcttaataagtcctgttttgttaggtattgaaggtgacgtaaccatagatgaaacatcttctctcatccacaatcaaggtggtgaaattaaaggaaatgttatcaactctggtctgattcagtggaacggagtgggtaacgagctaatcatcaacggtgactatacaggccgcgaaggatctgtattatccctaaatactaagttagagggagacaactcgttaaccgacagcctaatcgttcgaggaaacacatctggtgaaactggagtgattgtgaataatgccggcggtataggagctaagacgttaaatggtatcagaatcatttcagttgaaggtttatcggaaggtgtcttttcacagaaaggcaggatcgtagcaggtgcatacgattacaccctggtgaaaggaaatggtcaggatacaaaaaactggtatctgacgaatgaagatataacgggtcctggtcctggtcccgatcctgacccgggcacaggtcctggtcctaatcctggtcccgatcctgacccgggcacaggtcctggtccaaatccaggtcctgatcctgaacctggcatcggtccgggaccgcaaccagaaacgcccgtcaaggtaagaccggaggctgcatcatatctggacaacctgagcgctgctaacacaatgttcaaccttacaatggctgacagaacgggcgaaaaagaatttttggatgagttcaactcacaaaagcattccacaagtttatggttacgtcagtcaggcacgcattacagatggaaagataactctgcaacccttaagacacagagcaacagatacgttgttcagctaggaggcgatctattttcgtggagcaacagcgttaatgaacgtctgtacgtgggtataatggccggttatggccatcaagccagtaattctggctccagcgtcaccggatattcgtccaaaggaacaactgagggttataacaccggtctgtatgcgctatggtccagcacagatgaatccgggcagggggcgtatattgacagctggttgcagtacaactggtatacgcattcggtaaaaggcgaagatatagcccctgaaaaatataattcatcaggattcgtcggttcagttgaaacaggatatgactatttgatagaccgaaccattggaagcaaaggatcagaatacagtgtatttgttcgccctcagttgcaggcgatctggtcgggtattgatacagacgatcatcgcgaaagcaatggctcgaaaattaaaagcactggaaaagggaacgtacagacacgggcaggagtgaggatatatctcaagggaagcagtaatattgatgctaatacaggaagagtattcgaacctttcatagaagctaactgggttcacaatacgaagagttatgaggtttcaatgaatggtgtaccagttcagcaggcaggaacaaaaaatataggcgaaataaagattggggtagattctaagctaactaatgaaatcaacctctggggccatgtagcacaagatgttggtgataaaggatacagtagtagctctgctatggtaggcgtgagatattcattctaa

SEQ ID NO: 158644 - DNA, 2139 bp, Enterobacter cloacae
atggacattgaaatacgccactgcaataacatcgagcgagcccgtatcacccttacggccgaaaaactgaacatcaagtttgcgccaaacggtaccggcaaaagcacgctgtcacgggccatcagctgtgcgacacaggatgattctcaggggctgcaggcgctgatgcccttccggctgcggggagaacatcccgctaatgtcggacccgtcgtcaccggggctgacgggataggggaagttatgtgctttaatgaggagtacgtcggccagtttacgttccagccggacgagcttatcaatgacagctttaatatcctcatccgcaatgaagcccatgcggagagggagcgtgaaattgaggagatgacgcaggctatccgggcagttttcacggatcataccgagcttaacttgctgatagagcacctgcaggaactcagcagtgcattccgaacaaccagttccgggatttcgcgttcttcaaccggcatgaagggcctgtcaggcggtaataaaatacagcacattccggcaggtctggagagctatgagccctatatccgcagtgagcgccgcgtggaatggattgactggcagacaaaggggctggagttttcccctctgtcagaaggctgctgtccgttctgcaccggcgataccagggccagtgaagcgcaaatccgccaggtcagcgaagagtacgataaagccacagttaaaaacctggccgccatcatcagactactggaaaaccttggggattacctgacagaggacgccagagaacggcttctggggatcatacgccttcagaacggcccggataccgaacatattgagtacctggtggcgctgaaacgccagaccgacacactgacagagaagctcactgcgctgagaaacctcaatgttttcagcctgcaggaacagcagaacgtacgggaggtgctgacggctaggctgattgacctgcagttctttcccgatatgcagtgcgaactcacgcaggggatcactgacaggctgaacgcggcccttcaggatctgataaaccttgccggaccgctgcagggaaggattaaccggcaccgggacagcatgctccggctaatcgcccagcacaaaacaaatatcaataattttctcacctatgccggctataaatacagagtggatattgccggtgagggcgatcagagaaaactcaggctacgacacatggattttgacgggtacgtcagcggcggcagccagcatctcagctatggtgagcggaacgcgtttgcgattgtgttgttcatgtacgaatgcctgtcaaaaaatccgggactgattatccttgacgatcccatctcctcttttgacaaaaacaagaagttcgccattctcgaaatgcttttcaggcgcgcaagcggtgaatgcctcaagaaccggactgtgctcatgctgacgcatgacgtggagcctgtaattgacaccctgaagtcggtcagaaagttgttcagtaatctcgtgaccgcctcttgcctgcgcctgtctgccggagtcatagaggaattacccgttaacgacggcgatatcatgacgttcatgcagatctgcaaatccatcaccgcgtcagcagactgtgaggagatcattaagctcatctatcttcgtcgctattttgaaattgttgacgaacgtggcgatgcttatcagctcctgtccaatctgttccatcgacgtgtcgttccgctggatcatcgtgagcctgccgctgcgggcgcgggctaccccgaaatggcgcctgagaaaattcagcaggccctgcgggatatccgggagtatgtgggcagctttgattatccgcgacttcaggctttcgtcagcagcccggatgaaataaaaaacctgtaccgtcgctgtcgtaacggctatgagaaactgcaggtattccgtttactggaactggatcaggaccatccggtaatacgaaaattcgttaacgaaacgtaccacattgaaaatgagttcatctgtcagctggatccgtccagatttgatctcatcccggagtacgttattttggaatgtgacaagctcatcgccctgccaacggcagcaaaccagagctcgattgcccgtaccgcctga

SEQ ID NO: 158645 - DNA, 870 bp, Enterobacter cloacae
atgcgtgagacggacactgccatgcctgaggggagtacggcgcctgcaccagacgctgagggaatgccggctcgtcccgtcatcgcagccagataccgccgctcacaccgcgacggggagcggtggctgcggaccgtcgccgtcacaggaggggtaattattgtgttcctgactgtatcggggcaggcggttaaaaatggcgacatggccgcctggctgtcgatgctgtttaacggcgttatggccacggctgccgtaggggcgtacctgacagcacgcaaatgggtaccccagctcaccactcaggaagggtataaagtggccatcagtctggtgaatgaagagtatatttatctcggcatgcagaaccccctgctgtctgaggcgggccagctcatgtcatgctacaacgaatgcctgcaggatccccggcatatcagcaaggacgattatgcccgtaaaataggtgccttatccggggctgtttttcgtgaaaaaaagcgtaaggacagcattgagcaggcggaatttcgtctgcggacctacggcctttatgaagatccggcctatgctgatgctctgcaggccatgaaacaaagttttacggacagcattgatgcggcgcgaaccctggaagccttgctcctgggcgatcttgaatttcagaaaaagctggacgacctagacggcctctccgcaaacatcgttacggacatggaaaaattgtcggaaggccgtgcagctctgaaggacgccatcgagaaagcctatagcaacctggaacgtaaatggaatgatatggtgattttgcagaaggcggtttttaacgctcacccgcccatcggtgagttatatactgtccggaaatag

SEQ ID NO: 158646 - DNA, 609 bp, Enterobacter cloacae
atgccaacgaaacatatcgatgatgccaccgccgctcagcttgacgatctgtacgtccggtgcgtgacactgacccagcagcccgtgaaagaggtggaggtgctgcgcctggcgctcatgaacggtatttctaatatcaccgacgatgacattctggcgaccctgtccgtcagggacagtgtctggcagcgcctggcggagacggtatggaccgagcttacccgccaatggccggaagaggcgatcaccacggtacgttttgagtcactggctggcgaattgtcggaaacctggcagcagctccccagcgggcgctgccgtagtgccatccgggaacggctggaaagccgggtgtctgaaccgctcaggctgttcagcctgacggaggagaatgccaccgatgaggacattcgtgccgcggcggagcgtgatacggtccgggaagtggaataccagacggccctgccggcgctgcagaaccggcagtacagcaccctgagtcagcatgagaaggcactggcgcagttctacagcgaccgggtgcacttcacaccggacgggaagggggattttgtggtcagcttgacggaggctgccactcatgcgtga

SEQ ID NO: 158647 - DNA, 399 bp, Enterobacter cloacae
atgaacagaaccgatgatgaaccacagacagaaacggacgtgatggccaccgctttcagcaccatgcgaaagtacggcagtaatatcatcaacgttacgcagtttatggatactaatgcttatgtgaaatccgatccgcggatgccgagaacgcggctgcgtcgttacctgggccagtacggcctgcgcggtgaggcgctgagcagggaggtcagacgtatcgtcgctggcccagggcgaccggataacacgctgaaagccgggatcttctatacgtggccctatggctgggagcctgcggatttcacgccgatgatgaggcgcatttttcgcggaaagcgcacccgtcacctgatgatgtttgatgaactgcctcagctttttagcaaacgaggataa

SEQ ID NO: 158648 - DNA, 210 bp, Enterobacter cloacae
atggggattttatgtgaaaagtgtaacgccaataataacgcagatatcgattgcagttacaatggcgtagttggaagcaatttagcctcttacacctactcagcaaatttcacttgctggcgctgtaagcatgaaaatgatgtcaccattgacactattgaatctgaggagactgacgaagtgcttaaccctcaaatcaggtataactag

SEQ ID NO: 158649 - DNA, 468 bp, Enterobacter cloacae
gtgtactatgggaaacaggtcaacttcgctgacggcctagactatgggaaagaggtcaactttgcaaactgcctgaactgtgggaagcaggtcaacttcgctgacagcccagactgtgggaaacaggtcaacttcgctgacggcccgggctgtgggaaacaggtcaatttcgctgacggcccggactgtgggaaacaggtcaactttacagatagcctgaactgtgggaaacaggtcaacttcgcggacagtcatgactgtaggaaagagaacaacttcacagacatcccggactgtgggaaacacgtcaactttatggccaactgggagtgtgggaaacacgtcaacttcgcggacagtcatgactgtgggaaagagatcaacttaatggccggccgggactatgggaagcaggtcaacttaatggccagctgggaatgtgggaaacaggtcaagttcagcatgtaa

SEQ ID NO: 158650 - DNA, 939 bp, Enterobacter cloacae
atgagcatcgacattgaaacgacacttcaaaaagcttaccccgattttgacgcacttctaaaatcaagaccagcgacacactacaaagtatacaaaattccaaagcgtacaatcggctatcgtatcatagctcaacctacgccacgagtaaaagcaatacaaagggatataattgaaatactcaaacaacatactcatattcacgatgctgccacagcgtatgttgatgggaagaacatattagataacgccaagatacatcaaaactcagtttatttattaaagctggacttagtcaatttttttaataaaataacaccggaacttttattcaaggcattagctagacaaaaattagatatttcagatacaaacaaaaatttattaaagcaattttgtttttggaatagaacaaaaagaaaaaatggtgcattagttttaagtgtaggagcaccaagttctccttttatatcgaatgttgtaatgagcagcttcgatgaagagataaaaaacttttgcttattaaataaaataaattattcaagatatgctgatgatttaactttttcaacaaatgaaaaagatgttttaggattggcacataaaaaggtaaaatcaaccttactttatttttttggctcgcggatcataattaataataacaaaattgtatattcatcaaaagctcataaccgtcatgtcactggagtaactttaactaataataataagttatcaataggaagggaaagaaaaagatacattacttctttagtattcaagtttaaagaaggcaagctttctagtgttgatattaatcaccttagaggcttaatcggttttgctcataatattgagccaactttcattgaaagacttgaaaaaaaatatggaaaatcaacagttgagtctatcaagaaatattctgagggaggataa

SEQ ID NO: 158651 - DNA, 267 bp, Enterobacter cloacae
atgactctaaaattagctgtcctgggagacaggacgagtaatggaaaaataatttctgcaactgcaaattatttcagtgagggaaaacaggtggcgcaaaataatgataaagccatctgtactgtttgcaaaggaacatttcccattcaggccactgccgtgagtattgtcagtaatggcatacttcttgtaaaggatcaggaccgtgtgctctgccagtgttccgatcataaagtgttcgcaggttctcattttttcacccgctaa

SEQ ID NO: 158652 - DNA, 228 bp, Enterobacter cloacae
atggcggtcgccgtcaacggtgtcacatcttcgtcttttttcgccttcaccgttgccagatacggctccagctcgctgattaactgcgggttgttggccgccacgtgccgccacagcaggttctcacggttttttgtgctgtattcattccaccagccgtctatctttgcggcacctgccggacagctgttaatcccgtgcatcgccattcccaccgctgactggtag

SEQ ID NO: 158653 - DNA, 873 bp, Enterobacter cloacae
atgaacggcaggccgtggacgcgggagcttccccctccgccggtattgccgccttatggtcctctgaagaaaatatcagggcaactggaagcgtttcgctatgagaaattcagtgagtatttcgacgccgatgcctatcggaccagtgtgctgccgaagatatcagagggccagcatggagctgctgctgctgtagcgatagttgcagagagtcctggcgtcggtgctgtaatgatggctgaaagcgaatcttcgaatgatccggcggaatatgtgcaggggatgattaatggtcagccgtttcgtggctgggtcggggtaacccgactccaggttggtgataaagtggacatgattgccgagtggcaacatgaccattatgaggtttatgccattgttttgccggaagagcggatagtgtccgtatgtccgaaatgtgatatggggcatattgcgcatatgctttggcggataaaaaatatgattattctcacggggattattttttttatgatactttttgcgggaattcttaatgaagtgattgatggtacctgggaggggcttgtgtcatttgtcactacatacttttggttgttcgttatggttttgttgggaggcggaggagtctcagggttaattgcattctttgcttgcaaagcctgtgctcctacaagttgtaaactggcagaggaaatttttcatttgatgggaatgaaaaatgtttcgacagtaaatcttaataagctgacaaaacgacgtgagcagcagttaaaagataatgggagatggcatgacccaagtgataaaagcaaaccagcctgtccaagtgggaaattcatttattctgatgaaagctggtattactactag

SEQ ID NO: 158654 - DNA, 960 bp, Enterobacter cloacae
atgaattcagttgaaaatcagcaggtatgctcccggtttgttgagccagaaaaattagcagacctgcgtacaaagcaggagattgaggtgatgaacggcaggccgtggacgcgggagcttccccttccgccggtattgccgcctaatggtcctctggaaaaaattagcgggcgtctccagtctttccgcagcgaatattttcgggagtattttaatgcagatgcctatcggacctgtatgttgccgaagatttcagatggccagcgtggagctgccgccgctggagcgatagttgcagggagcccgggagtcggtgcggtaataatggctgaaagcgaatcttcgaatgattcggcggaatatgtgcaggggatgattaatggtcagccattccgcggctgggttggggttacccgtgttcaggctggcgatgaggtggacatgatagttgaatggcagcatgaccactatgaggtttatgccatagcgttacccaaagagcggatagtttcgatatgtccgaaatgtgatatggggcatattgcgcatatgctatggcggattaaaaatatgtttattttaacagctataatcatgtttatttttgcatgtgtttgccttgttaagtctttgaatgaggagggctggggacagttggatttttggaaggaatattttgtttttctcatgatgatgttagggctggtttttatttttactggggcgattgcaatagctgcttataaagcctgttcctccacatattgcaaagtggctgaggaaatatttcagttgctggggatgaaaaacatcgcaacagtcaatctcaataaaataacaaaaaaatatgagaaagaactaataaagaatagagagtggcacgaaccaagtgataaaaataaagctacctgccccagttctaaatttatttattcaggggaatggtggttttactattaa

SEQ ID NO: 158655 - DNA, 777 bp, Enterobacter cloacae
ttgaaaaggatcaataaaactccagaggatcagttctttaccaacttcaaagctcaaaatccaaatggaacttgggatgattttaggaatcatgaacaaggtgttttgtataagaggctcaagcaacacatttgcaatgatcaaatgtacctttgtgcgtattgtgagatagatttagattgtgaaaatgaacatgaaataaaagtggagcatttcaaatctaaatctggttcaatcctgggtggcatcaactggcatttagaatggtctaatctcttagctgtatgtctaggtgggacaaacgaaggtgaggattatcaattaccagtgaaccttagttgcgattcatataaatctcattatgaagacaaaaataaagttattgacaaagactggacagggaaaattcttcttcctctcacacttccagatgcgcacaatttatttgtttttgataaaggtacaggtaaattgctacctaatgaaccatactgtaatagcattagtatagatgggaagcctgctgcagaaacactcgacattgttaataaaacaatagaggttttaaatttaaattgtagcagactaaataacgccagaatgaaattgctatttctcttcaataggtgtgcacgagaaaaagatttaagaaaaatgcataagttactgatacaatggagtcaaggtgaacctaagttttttcagacgacacgagatataattattcgtgaaagcaaaatttgccaaggattattggacggaacgatacgatattaa

SEQ ID NO: 158656 - DNA, 780 bp, Enterobacter cloacae
  misc_feature (763)..(772): n is a, c, g, or t
atgttctttattggcgacctgaataccttcatgccgatccgtcagatagatgtgcgtgttttatcacacgttattctcactgcgttgtgtgttttctggtttggcgtccgccttcgccactatgcacaaaaaaagccgttctggtcagagctaaaagaaacattacgaactatcgtcattttttcgatcttcgatcttgcattggttgcattctccaaatggcatttttctcgctatatttgggcctattgctggttatacgccattatcatggttccattatcgcgtgaaatcaccaaatctattcttaacaagttgggctactggaaaaaacgtacggttattctaggttcaggcaggaatgcgcgtgaagcctattttgctttacagagccacgaagtctcaggttttaaaattgatgcgttttgtgattttgatgcaactgacgatatgatggaagaatgtcccatagtcaaagacgaggagacattactcacatcttataattcattttcaacgcagtttgttgtggcgtgtgattttgatgaaaaagataagtttgaaaactggttaaggttcctggcgaaacataagtgccgaaatgtgattattattccttccctgcgaggattccctttatacggcactagtatgtcctttatattcagtcatgaagtattactgttgcaggttcacaataatctttccaaagcaacgtcacgcttcatcaaacggacgttcgatattgtctgtagtctgggtnnnnnnnnnngattttaa

SEQ ID NO: 158657 - DNA, 381 bp, Enterobacter cloacae
  misc_feature (18)..(27): n is a, c, g, or t
ttgtctgtagtctgggtnnnnnnnnnngattttaagctcaaaaacgacccccggattacacctattggccactttattcgtaaaaccagcctcgatgaattacctcaattgttcaatgtgctcaaaggggaaatgagtctcgttggccctcgtccagtcattcatgaagagctggaacgatatgctgatgatgttgattattatctgatggttaagccaggaatgaccgggctatggcaggtcagtggccgtaacgacgtagattacacaacccgtgtctattttgactcctggtatgtcaaaaactggtctctatggaatgacatagtgattttgtttaaaacggttagcgtggttctttttagaaaaggtgcttattaa

SEQ ID NO: 158658 - DNA, 408 bp, Enterobacter cloacae
atgaagtccgagtttcagaataatcgttttttcctggttggtgttttggggttaaaaacatttgtggatgtcctcgctgtcacaaaatcagtcggtcttctgctggaggcaataagtgctgttttcgaagttaaaggtaaagagcaagcatcaagaataatcggattaggtggtaaatatatagccgacaaactggtaaaaaaatattttggagtaagagttctggcgattttagtgacctgggaagccatggtggccataactttgttgcaggtggtggtgacgtggatttctgatgacgagcttcagatatggtgtgagaaatgcgtatttggcgcagcaccattcaagcgcagtgtggcagaccagaataaagccctggaagcagcaataaaggatatttcatga

SEQ ID NO: 158659 - DNA, 600 bp, Enterobacter cloacae
atgtacaaaaaagggttcttcccttacatcccttctcctaaatgtagttacgagtgcttcgctctcttcacttgctgcgcttctcgctatgctccagcccgctccatcgcctttggctcattcccggacttcgcccgctgtgatgctcggccactctacgcaaccgtgcttgccgtggcaggcaacgcggcggggatgtgtagtggaacggtactctgtatcggtatgattactgtattcaatcacatactggtatcagtaggtatcattcaaaacatcttcattcatttctgtatcgttcaatcatctttcttgttcgtttcctttcaggtcttagccgttggtcattggtcttactgcctgctgtgctactgccagctatggcacgccgtcacggtctactgtctgttactgtcctactgccttcactgtctgccgtctgtcagtcctacggtctgccatccgtcatccgttcggcgctcgcttgttcggctgcgccgcgctcgctctgcgtatctagcgatactatatcactatagacactttcataattatctattgatatcagtaacttatatttttaattttaaaggctactaa

SEQ ID NO: 158660 - DNA, 216 bp, Enterobacter cloacae
atgaacaataattatgaacctgttcgggaacttgaatgtaagtttgatgataatgggcatccttcctggcgttcatttccctctcataaaaattgccaaatcagaggtgggtgtgatttacctccacatttgcctgggattattattcttgtacatggtgttaactcgacaggagaatggttttcaattgctgaaaaaaaatttgtgaaggcctga

SEQ ID NO: 158661 - DNA, 465 bp, Enterobacter cloacae
atggaggagatggcaccgcaggcgggcattcacctgatgccggtcaccgacattggcccggagaccgccatcctcattaaagagaagctggatcgcggcgaatgggtggcgatcgtgggcgatcgcattgccgtcaccccgcagcgcggcggcagctggcgggtgatatggagcgaatttatgggccagcccgcgccgttcccgcaggggccgtttatcctggcgtccattttgcgctgcccggtggtgctgatttttgccctctgtcagcagggaaagctgaccctgcactgcgagccgtttgccgacccgctgctgctgccgcgcggcgaacgccagcaggcgctacagcagaccgtcgaccgctatgcggagcggctggagcattacgcgctcttgtcgccgctcgactggtttaattttttcgatttctggcagctgccagagatcaacgagaaggagtaa

SEQ ID NO: 158662 - DNA, 195 bp, Enterobacter cloacae
atggcccgttttcttttgcaggtgcaccaccatatcgacggcatcaatgctgtcgaggtccagatcctcgtaaagacgtgcctcaggggtaatatcctccggggcgatttcaaacagcgtaataagaagcgcagagacttcctgataaatcgtttattgttctgtcatagcggtcattctcaggcgcgttgttga

SEQ ID NO: 158663 - DNA, 894 bp, Enterobacter cloacae
atggatgaaaaacaaataaatatatcttggtggaatacaggtctcgtgccaccagttgcgagtaaaattaaagagcccatatgctctaaaaaggctttaaaaatagagcaagtagttattcatattatggaacaaaaacccattgatataatgatacttggagaggtggctgaaaactgtaccagtttcttggtaaatctagctgcaaaaacccacatgggtctagtcatttgtaccgaaaaagttggtcgtgtttattttgatattgccatcctatatgaaagcacaaagcttaaatttatagaaaaagagaatttaatagcaaaaacatcttcaggatcagcaatcaagtgtggtacacacttattatttagagaagaattttcttttgaacagttaaatattttcgcttcgcattggcctagtcgacttcatagacctgaaaaaagagtaattattggtcaaaaattacgacaacatgttgattttattttagctaaaaagtctaagtacgtcattctttgcggtgattataacgatcaaccatttggtcaatcaattgtcgaaggaatagaggctacaaaagatattgaaattgtaaagaataaaccaagtatgctttataatcctttttggcgtcacttggacaaacacgttgatgatcatacgttttgcggaagttattatcacaaaaaaaatgagacagacaaatggtttacattcgatcaaatgatgttttcttcggaatttttaaaagattctccgggttggaaattagacagaaatagttcagcttttcattctgacaatatttctgagaaagatatcggatttaatttccttaaatcttttgatcacattcctatatacagtaaaatcaaacatatagaatag

SEQ ID NO: 158664 - DNA, 423 bp, Enterobacter cloacae
atgaatctacaagaattaatcaagcttcaaattgataaagctaacggtcttttctcggaaaaagataatgcagaacgcgaaataaagcaaactttcaataccatcaaagagtttatgccaaataaaatagaattcatatataaagaggagtttgataattatggcgataatgttacaacaatttatgcaacgaatccttcgattgaaaatcaatatatactactcacttacgattttgataataaatctattttccctcttaaaataagtatgtttgatggtgaaaattggttatgtcaatctttaaaagatgtaaaatcagttcttcgggaaattgtatctaaagatgattttatggtaaggcttatatcaatatcaaaagaaaaaggagattttattgattttgatgatatacccttctaa

SEQ ID NO: 158665 - DNA, 654 bp, Enterobacter cloacae
gtggcgatcctcgggcgcaacggcgcgggcaaatcaaccctgttgcaggcgatggcgggcgggatggatctggcgggcggtgaactgcggctcgacaacctcagcctgccgcatctggacgtggctgacgtgcggagaaacgtcggctttatgacccaaaacgcccggctgttttacggcaccctgcgcgagaacatcacgctcggtatgccgcgcgccaccgatgaagagatcttcgaggtgctggagatgtgcggcgcggccagctttgtgcagaagctgccaaaggggctggattacccgattatggagaacggcgtcgggctgtccggcgggcagcggcagtctattctgctggcgcggatgctgctgcgcgacccgaatatcgtgctgatggatgaaccgaccgcctcccttgatgaacataccgagcgggaatttattcaacgtctcggggcgtggctcggcaaccgcacgctggttgtcgcgacccaccgcgtgccggtgctggagctggtggagcgcgtggtggtactcaaagatggcatgctggtgatggacgcgccaaaagcccaggcgctgaacaacagccgtatgcagcaacagcagcaggcaaccggacgggagtggaaaaatgaaaatcagtcagcgtga

SEQ ID NO: 158666 - DNA, 459 bp, Enterobacter cloacae
atgaaactcaaactaaaaactctaagtcttgataatcctaaacatgaaaaatttatctatcgtgttctagcggtcggcatagctgtgctttgttgtgtcagtgctgttaaatcatggaacgaatacaacgacccttataacgtatcagcacgtcacacggagaatttcgaacgtagaacaaacgctcttgtttctttagaaaagccttctgaatatatctgtgatgcctctaacggtaaaagctatcgtttatttgattataacgatagctttatgtacgttcgttctggtattactcctactcgtgatgattataaattctctgagactctcagaggaattcattctgataacatgtataacgcccgtatatctgaatctggtaattcaggtgcaggtcgtatgtctaatcagatgtataagcacaacggcattaacttcttatgcaaacgtgcataa

SEQ ID NO: 158667 - DNA, 258 bp, Enterobacter cloacae
atgtctttagaacaacgaattgagagctttgaagcacgtatcaaacaacttgaaggtgttagtacacatcttcatatccgttcagaattcactatgtatattatttccgccatgattggtgccggggtagtgaatcgagacggagtaaaggaacttatccgcaacgctgatgtatcagcttttaatgcacctgccatagcggaaaaagaaaaagagattatgttaaagctggtcgacaaagtcgctgtactgaaataa

SEQ ID NO: 158668 - DNA, 369 bp, Enterobacter cloacae
atgaaaacaattatcaaaaacattgaagcagttggaaatgcttcccatggagcagaaataaacattacagaaaaaggtgattaccatattgaaggggggcggttctctcacaatggtggcacagggttaatacttaacattggcaggcctaatacacctttaaacgatctttatgaagcagggcttgatgattctgtttctcataaagaggctgtggaagttggagctttgctcgcaggaatgacacatgagccgattgccagaagagtcgaagttctcaatgaatcttctcttggttcaaaaatcagtgctgtagctaaccttgccactattatcgatttactagtttctctagctaccaaaaattga

SEQ ID NO: 158669 - DNA, 363 bp, Enterobacter cloacae
atgaaactaaattatgaagaacttgaagccaagtgcgcggcgctggctgcggagaatgcgggactgaaggaactaatcgagcagcatgctaatagtgttgctgtgtgcccgaattgctctcatgaagagccgagcgaaactgacgatatcgttgcgctttatcgttctatggaaaccccagcaaccgacgctttcctggctgaagtgcgggcgcagggtgtggagatgctggcatctctggctggtaatgaatgtcagcgttacaagtcagtaaacgaccgttccggcgcgagaaagtggaaaagtatcgtaattctgtgcacggacttcgccgcccagcttcgcaaaggagtgcagtcatga

SEQ ID NO: 158670 - DNA, 249 bp, Enterobacter cloacae
atgagcactcgccgaaaaattaacaaaattcttaaagagaaaggcctgtcagcggatgtcgagtatgacggaagcggtgccagcagagatgagtatggttggtggaccgttaatttcgatcctgaatcagctgattttgttcgtctgaagcttaatgagcctgaattcacaggttcgatagaattttgcgaactcgaagaagggtttcaacagcattcggagttacctgcaatggaggccgcccaatga

SEQ ID NO: 158671 - DNA, 3060 bp, Enterobacter cloacae
gtggcatcacaggatgaaaaattgagtttcgcagaaaaagcacttagcacagctgaaaggatattcaatacattatggaaagcagatccctccccggatatgtggcactggattttgttaatcttactcacgttcgcagccctctccattactttgattttattaaaaaaagtcacgggagatttcatagaaatccttgcaaaactaacagagttgtataaagctagcggtttaccagtatggttgaataacgataacaaaaaaaaggtaagacgccggaaacaattctgcgaagttcttaattctgatctcgcccacctagctaaggctgaaaactggaacgatcagcactttaccgacctagaagctgaagtggagaccgagggcggatattatgcaagtactatagatcggctacgcaggaaaaagtcttttggcctacgtaaggaacgctcccttatccgtgctatcaaatccagcacagaacgtgcgatgcagcttgttggtgaaccgggctctggtaagagtgttgctctacgacacctagcgaagcagttagcagtaagagggcaaacatctaatgagaagaatgcgatagtaccgctttatatcaatctgcgtgaaatggatattaccgatttagaaaaagttaacgcagacagtgttcgtgaatttgttctggacaacatccgtcgtggagatgcggatacctccgcatacgttaaagaaaactgggatgattactgtaacagaggcctatggcttttcttgtttgattcattcgatgagataccagcggtaatgcactccgctgccggcagcaatattatccggcattattcccaagctatacggcattttcttcaaggcatgggtgagtgcaaagggattctggcatccagggaattcaaaggccctgaagctttaccctggaaaaagcttcgcatattgccattgagtgttgaaaagcaagatgagttgattcgaaattctttcctgaatgagcaacaaatggatttagcccggcaacatttggcaagctcccgcagtagcattggggccactccactttttttgacattactatgccgttatgtaagagatgaacaacgtgctccagccaatgatcacgatattttgttacagcatattgagagactggccagaagagaacccgaatacttactacgaaaatatggtctcaccccagaacaattaattacaggggctgaacggcttgccaggttgtttgctgaaaatgacactatgagtctggctccaacccttgatcaaattgttagtcagttgcccgcatcagacattcccggagggcaaatcgaacgtctaatttctgcgctggtagactccaagataggccgggcagatgttcctaatgcagcacaaggggatcgtcgcttcgcatttgcgcatcgtcgctatcaggaagccctgtttgttcactatcttacagtccatccggatatactttcagcagcacaacttcttactgaaacgcgctggcgagaatataccgtcactttgctgcaaacatgtgatgcagaaacaatagagaatttattagaacaagctagcatcattcttcatgaacgggctgcaatgcaaatttataatgcgtgtggacattacccactgcccgaaaatctggcttattttgactggtcttcagaaattgcaattcccgtgcttggtttattacaggacggactaggacatcggccagaagatgtgcccgaaaaattgtcgctggcagttgaggcttttttaaaacctcgctgggaaaatggggacaccctggatcgctgtgaagtcctgcggctgggtgggctactgccacaggatacactggttgattatcttgttgacgcattcaatcatggaacagagcaggaacgcctccatgcattcaggctgacgcggtttacaactgaacttccgaaagctgcacggactgcagttttaaaaatgcttttcgtccaggttatctcagccagggatcgttctgagcaactgaccgttgaagccttagcagcaaggctcccttcaagtcttggagctcgtttcgttgtatcgcgagggaaaaagttaagacgtcatttgagatggatgaaaagaatcgtttcgctattctccttcagagatgtagcgaccatggcagggtcttttttaccccggtcattgaaacgaatggggttccagagcatattctctttagataaaactaaagaaaaggatttttcagatgcagtggatattgtttttttcatcttcatgtcaataataacatgtattttctgcttaacgctgtatttaaacaaaccttccactgtaaatatattggcattagcattatcgacattagtatttatactttcatgttttgttttttctccgtatattgttcgccatcatggtaataaattcacattctatgataccatcaaatggatgacagcaaatatctttactataaattatcttaagcaaattttaaagataatatccgggggtgctttggcttgtattttttgtgcaatcataggatatgcaactcactggttcaccaataagtatatttcgccagactttctttactcaggcttgggaacaccgggggtctatatattcactgggtttgtgattgcaactacactgtgttatatcactctagtttttataataatcaccaagggattaactaaccggaaacagagaattgagtatgttacgaaacttagcagcatgaaaaactctgggtgcccacacctggaaatcctgtattattcagaaagttatgagcaattggttttctggctgcagtatgatgcagagttaatgaacaatgaagtttgtgtgcgttccttctccagttatatcttatctatattacgtcttgaaaaaatagctatacctcagtctgaattaatccgacctacatgtttaaagagtcatttgccaaaatcagatgagacaaaggcggttaagaatctgacaacgttgcgtcagttacttgaaaggcgactgatgaataatccgagttaa

SEQ ID NO: 158672 - DNA, 1278 bp, Enterobacter cloacae
atgcgtaatccggacccattacatttcctttcaacagctcagaaacaatacattgccgagattctggaggctctaacggaaacgcttgatcttacagatactcagtaccagcaaattcaacaggcttacagaggggtagggaaatggcttgcagaaagtgacgatccacttctgcatgagacgataatttattcgcaaggcagcgttcggctgaatactactgttaagcctggccctgatgaaccctttgatattgatcttgtatgttatcttcctcattcaggtaacgagctgggggaggatgtacttgatgccgtagagcgccggttgagagagcatgatcgctataaaactatgtttgagcgtcttcctcgaggtttcagaattaactacgctgcgtcatatcatctcgatatcactccgggaatcgattattacagctacttacgtcttaaggggcatccactctgggttactgatcgcaatactcaatggaaagagtcaaatcctgacgggtatgctcgctggttcgatgagattacagagaaaaaacctttacgtgtcagagagatttttgaggctgctgcagcggattcagcccttaataagtctgttgctcctctgcccgatcatacccgtaaaaagctactcaaccgtatcgttcagatactcaaaaggcatcgcgacgaatggattgctgctcagagcgacaacaaatacccgttcaaacccatttctgcaatcatcacgaccctggcagcgcagtcatatcagaagataattgatgagaggcgtgtatatgataatgaccttgatattattattgatgtcattgagcttatgcctgatttcattgcaagggatgcaaccggttattgcgttctcaatcccacaatgcctgctgaaaactttgcagaaaaatggaacgtagccgaagccaataaagggcagaaactacgtgatacgttctatgaatggcatgaagcagcatggcagagttttgatgttattgcagcgtcagttggaagagataagcttctggaaaatatcagcaaaaactttggttcggcaccagtgaaaattgttcgtgaccagatggtcaataatctcggggagcttcgccgttcaggacgtcttggcctggcaagtggaacaggtgcacttgtttctggttcggtcagtgctgcaccacaaaatcctgttcccagtaatactttttacggttctgactcttcagctacagcagcagttccgcgtaatacatttttcggagaataa

SEQ ID NO: 158673 - DNA, 486 bp, Enterobacter cloacae
atgagctatttttcttctccaccacaactttcactgggggctcaattttattccctaaaggcccgcttccgggaaggaagcgggagaatagttaactttaatcgaacacttgtctgggagtgcgacatctcacctggccctttctgcaggcaatacaggcttatgattcgttatacgaaggggtatgcgcctgagtgtattgttctttctccagacctggatgaactttcagctggaagaaagataccccatacatatggactcgacaccattacaggctgcagaaaactatgcctttttttacccaaatccaaaactattgatggcctatcggagtggagacctcagttgagaatcagtgatactgtgattccctgggcttcgctttggttactctattttgaagactggttatttagtggggaatggaaagggggaggggctcatccttcagataatgaaaatggggtctattttgatgagtaa

SEQ ID NO: 158674 - DNA, 567 bp, Enterobacter cloacae
atgagtaataaacatattttgcgatatttttctggggatatcgaagcgtctgggccagtacctggatttttcagcatgctttcgatcggagtttgtgttgttgatgaacccgaaatcaatttctatcgtgaactcaagcctctaacacttcatcacgatccggaagcgcttgcagtgactggctttgatctcaatgaattagcagatacaggtactgatgtattaatagccatgagagagctttcagagtgggtgaacatccatacaccggatggaggacgggcagtttttgctggttttaatgctgctttcgattggtcattcataaactggtattttcattattcgggggttgtaaacccttttggttatgccccgttagatatcaagtctcttttaaagggcgcgaaaggattgtcatggcaggattccagagccactgttgcagctgcacattatggcatcaggcgagtcagagagcatcacgcactatacgatgccatttttcagggtaggatacttcagtgcattctggaagataaaggggaaggtaaatggaatttttaa

SEQ ID NO: 158675 - DNA, 1113 bp, Enterobacter cloacae
atggaatttttaaaaaattgtgcttatatgctcattaaatggtttactcgtcagcgtaaaccccctttcatttttcttgctgctggtcttggcctcctcaagctgactggtggattctcctggcaggtaatgctgaattttaagaattacggcataacggcatcaagtcctgaggggaatttcataacttccgtcctcgttccgctccttggtattgctctatgtataacaggaactgtttgggcgatatgtggggcgattacggactggaaacgtaatgccaggaagcgtgtcttactcatcaggggagaaggcttaagaaatgtagcacgcagtagtattgatacacagataaagcaacgttttcctgggcaactgagccatttggacattaatattactcagaatctgcgggacggctatgttattcaacctgctgaaacttttcgtaattacgtccagcctctgagccgtaatctggttcagcatgttggagcactggctccaggggatactgaaattgtgtacgctggcatgctgccagttccttttctcttctggatcggtaatgttcttgatgataaggggcctgtggttttgtatgattgggatcgtgcttctgaaagctggcagctcatttcagacgataagccagatgacggtgatagttttcaacatgaaacaaccataaaaggaagtatcgaggatgtggtgatcgccgtatctttctcctatcatgcagatctgtccaacatacagagatgtttttctgggattcgtgtagagcatttgtatttaaaccatatcaatttcaataatcactggtctataaataagcagcagcggctttctatgcagttcattgagtttgtcaagtcgctagaagctcagggaacaaaaagaattcatctggttttagttgctccaagcagtgtcattgttaattttggacgacgctatgacagtcgtaatctgcctgaaattattgtatatcaatatgaaaaatcagatgcagatacctatccttgggggatatatgctctgtctcacggcagagaagagggtgggtttgttttacgagttgatgcacttaaaaaagttgccaataactaa

SEQ ID NO: 158676 - DNA, 183 bp, Enterobacter cloacae
atgatctgtcctaaatgtcgttctattgccgttgggaaggaagtaacacgcagggggtggagtggtgactatgcctgctttgaatgcggctacaatgatgccaaagacggctttcaagaaataagcaaacctcctgtcaggaagataaaatggaagctgaaagagcaaccaaagttagtttga

SEQ ID NO: 158677 - DNA, 483 bp, Enterobacter cloacae
atgacaaacgtaagtgcagtagaaaaaaaggctgaattaatgcagcagatggaagagaactcgccccgagttgctgctctccagtattgcctgacacaggttgcggaaaaagtcgaagaagcagaaaagcgcaatgcggagcttgaagccagatgcgctgcgctgagtgcggagaattcgggactgaaggaactaatcgagcagcatgctaatagtgttgctgtgtgcccgaattgctctcatgaagagccgagcgaaactgacgatatcgttgcgctttatcgttctatggaaaccccagcaaccgacgctttcctggctgaagtgcgggcgcagggtgtggagatgctggcatctctggctggtaatgaatgtcagcgttacaagtcagtaaacgaccgttccggcgcgagaaagtggaaaagtatcgtaattctgtgcacggacttcgccgcccagcttcgcaaaggagtgcagtcatga

SEQ ID NO: 158678 - DNA, 294 bp, Enterobacter cloacae
atgcagatatcactcatcctgcaacttgagcgcttggcttctggcaaaaggacgcctgacttgagtgttcgcaaagaaggaattttgccatcgtttaacggaaagccagctaagaatttctgggctataaagaagattccgattagaggttactactgggagtctgacagacatgatatgacgatttttattagtcattacatatacaaagattttgaccgacttgatgactcagatgtccaaaaggtgaaaaataattgggaaagaattgagcgaggccatgatgattgctaa

SEQ ID NO: 158679 - DNA, 420 bp, Enterobacter cloacae
atgattgctaacaatctgtttagtgatgataattttgatttcccggaggttagtgagcgagagatggcgtgtgagcgcttgatctttaacacaactgaagaccttcttttagcaatgcaggacgcgaacatttctcagtccgagctagctaaaaaattgggtaaatctaaaggtcatgtaagccagctgctcgacggcactcggaatatgactctcaaaaccctttctgatatggcctatgctttaggggccgtggcgaaagttgtcatattaagagaaggagtggacgtctcgcatgccatcattccagatatgaaacgactctcatggaaagcggccgatgttagcgataacccgggccagaccattaaaattactattaaaacaagcaatgcggaatatcaaacgaaatgctattaa

SEQ ID NO: 158680 - DNA, 213 bp, Enterobacter cloacae
atgagcaacaaaacaggcggtccagctttcccagaattaggcaatgttggttgcaactcagactggcaaagtgaatctggcatgacgctccgtgactacttcgcagccaaggctatgcaggcaatgatagcagcgcatgagccgcagggagcgattcctggttgggcatacgaaatggccgacgagatgctccgcgcccgggaggaatcatga

SEQ ID NO: 158681 - DNA, 1911 bp, Enterobacter cloacae
atgaaatacggaagcgtgtgcagcggcatcgaagctgccagtaaagcgtgggaacctctcggctggatacctgcctggttctctgaaatcgaaccattcccatccgcagtcctcgcccatcactggccggaagtaaccaatcttggcgacatgaccaaaattgccgaggcggtgagcgcgggtgaagtagaatcgcctgatgttctggtcggcggtacgccttgccaggcattcagcatcgcaggcttgcgagaaggcctgtctgacgaccgaggccagttaacactctcttacgtggaattagccaatgcaatcgacgcaaaacgccgcgaacgcggtgaaccagaatcaattatcgtctgggaaaacgtccccggcgtgctcagcagcaaagacaatgccttcgggtgctttctggcaggacttgccggagaaagcagtgagttgcagccagcagggggaaaatggacgtacgcaggttgtgtgtctggaccagaaagggttattgcctggcgtgtccttgatgctcaatttttcggaatggcccaacgccgccgtcgtgtgttcgttgtcgcaagtgctcgaaaaggattcgatcccgcagcggtactttttgagctcgacagcgtgcgccgggattctgcgccgtgccgagaaacgcaaaaggctgttgccgcccttactgcacgaggcgttggaacgtgtggcgctgacgacaatcaggcacaagcaggacacctgatagctcagtgcgctaatggtgacgttagccacacattaaagggtgaagggtttgatggcagtgaggacggaaccgggagaggtgtcccagttgtggctttcggcggcggaaataccagtggaaacatcgatgttgctgcctgcctgaccgcgaaaggccagagaatagactttgaagtggaaaccttcgcagtgcacggcacgcaggatccagataccaaccgagaactgacgcacactcttggacgcaacaacggacaggaaaacgcgatagttactgaaccattcacattggcaatccgtgggcgatcagaaggaagtacggtcgaagtgagaaatgacggcacagccaacgcgctgttgacgccgaatggcggccgcgctggcatgggtgtaggagctatcgggtggggcatgcaggttcgccgcctaacaccgattgagtgcgagcgacttcagggctttcctgataatcacactctgatcggctggcgcgggaaggatgctgatgaatgcccggacgggccacgctataaagccatcggcaatagcatggcagtaccggtaatgcgatggatcggtgagcgtatcgccgctgcgctgccagccgcgaagttaagtggtgattatggtggtagtaaaaccccgccagaccagcgagacctctggcgcacgccgccagccctattcgcttcacttaatgctgagttctgtttccaactggatgccgccgcggcgccgcataacgcgctgtgccggaagttcatcacagccgagcagaacacgctggaaacgccatggtctgattacctgagcattcctggctacgtctggcttaacccgccatacagcaacattacgccgttcgttaagaaggccgccgccgagagcgacaatcagatcggcactgtcatgctggttccggcagacacttcggttggctggttcaaggaagctatccagaccgccagcgaggttcgcttcatcaccgccggtcggctggcatttatcaatcctgtcaccggtaagcctgtgtcgggaaataacaaaggttcgatgctcatcatctggcgaccgtacccgcgtacatactgccacttcgcaactgtggaccgggacgagctgatggctttcggggtgaaacttctcgcccgccgggaggccgcatga

SEQ ID NO: 158682 - DNA, 2115 bp, Enterobacter cloacae
atgacggaggcgaagacaaaaccctacgctccacgggtggtatcagaaggcgatattccggtacacaaaaccctgggcgaagtcgcccagacgcgcaacgtcgggataccgcgcccgatgcccggcattgtgatcctcgtccatggcgtgaacgacgtgggtgaagcctaccagaaccaggagaaaggtatacttgccgggctgggtaagcgacttaaccggcaggatttttacgcccacgaatggaaagactacagaattatcactccagggcgttcccccatcatcccgttttactggggatataaaccggttacgcatgctgattaccgggcggaccagaagcgctaccgggaggaggtcgggaagctgagtgacaaagcgcatcttccctatgatgcgtaccaggaagataacgagacgaataaaaagtcgctgggtaatgacggaaaagggccgtttcagtaccagaacgataactttaaaaatgcacttgatacgagttttgccaaggggggcgggacctttgccaacgcaacgacgacgatcccggatatgctgggacccggcgccggtggcttcggcgttgccgctgcgggatttgcctcgctgcacttcaatgatggcgattttacccatcccatttatgaaaacccgcaccgcatttaccagttttttgccgctcaacggctggcggatttgattattcagattcgaagtgagccgattacggcgaaagatgtgattaacgttgtggcccatagtcagggcacgattattactatgctggcaaatatgctggtgaaacaggccgggtatgctccggtaaactgtgtgattcttaatcactcaccgtattctcttgagtcgcgcgtggctgaaaatattcagccgggttatcaacagaccgacgatgccagacagcagacatttaaaaatttctgtcgcctgatgcatacgcaatggaaagggggtgggaaaatggcagagagcgaattacaggctctggaggcctcctgtaccctgcgtaaaccttccgataatccgctgcgaacggatgacagatattgccgaagcaacgacggtaaagtgtataactacttttgcccgaacgatggcgtcgtgtcgctggagaatgtgcaggggtttggctggcggggcattcctcagaatattgccagtgatataccgaatctgtttcagcgtgtgttttaccagcatggtgaagtaggaaacatccctgacgctaacccctttgagttaccgccgcgaaatgagggggatgcaaaatatgcctttctcacgaacgccagttacagcgctcgcgatgtggtgataaacggtgaggagttaccggaaccttttattttcaaacttcagggggaggataatcacccggataacgatcctaaaaccagtgataaaccgtatacctattatgtcgatccggacagcccggacgcctacatttcctattccgccaaagccagcgccattaagcgcacggtaacgacaacctttgcagtgaaccgctatcaaaatattggctggcagccgggtcacgttttatctgcttcagagcttaaagaagagagttttgaacgcaagcatgaggttatttatggtgaggtgtcaggttcgcgtgattttcagttagttacccttacctggaagaaaacaccggaagaactgcaagcggaatggcagaaaatcgacccggtgggctacagccagcactcctctattgtgatgagcgaatttgcgccatcgcacgctatggcgtttgatttggctattgggcagtgcaaatcattcgattatcaggcggggaaattttgggaagggttgttacatcgtgcggactggcgcgatccgcagaacggttatcctgccgctaaaaaatattaccgtacaggaatgctggatgaacagcgtacgaaatggtttatgaataggcctgatgaggtgcttccaaaaggggagtacggtgtggaaaaccactttaataatgcctcgccagccatgccgtcatgcgaactgtccatcagaaatcaggatgtagcaaatttgcaatgggatatgccaaagcccatgagtgatagtcaactggcttaa

SEQ ID NO: 158683 - DNA, 351 bp, Enterobacter cloacae
atgggtatgatcaatcatcgtgtgacaacctacatcgaagataacgattttgatatggtctcacacgatataatgttaaatggcggttttgattcatgggatcgtcgggttcattcagcttatgaaaatcttgctccggtgaaaattcagccaaagatggagtcatttctcaataagccaggagaaaatacccatgatgtgtggattgagtatgaatggggtgattttcttaagagcagagaggaaagtctgttactgcatactattcagtcagagcgactaaatacgcaacattctctttttgagcgactgccatcttttgaaagcactattgatttgactaagggctaa

SEQ ID NO: 158684 - DNA, 255 bp, Enterobacter cloacae
atgtacctgcaccttgttccaagattgtttcatctgatggcaaataaatgccatcttgaatcaataaccattcctgaacttgatttcataatcgaaggtgatgcactgtcaacgggaagaccctacccgaataaaaatatctgggttggtatgaggaaaggcagaaaagccataaatggacttttactaaagactgataagcatcttaagtggtttaccactgattaccagtggaatatgaaaatatgggtatga

SEQ ID NO: 158685 - DNA, 303 bp, Enterobacter cloacae
atgaataaagaaaaggctttgcgtgaactggaaagattgctttctaaaatgaaagatcaggcaaggactcttgatgaattagaaacggttcaatggcattacatggatttagtggatataacatccagtgggttgttcgatataaacacactggaaaaagaaagaaaggaaaaccctcattttattagaatctctgatggcatgcgagtttttgatgatgaacaatgtgcagagttcatgtcggttaaacataatcttccgttacagctctgtatggcatatgtacgtagtcataagtggtga

SEQ ID NO: 158686 - DNA, 435 bp, Enterobacter cloacae; identical to SEQ ID NO: 80549

SEQ ID NO: 158687 - DNA, 471 bp, Enterobacter cloacae; identical to SEQ ID NO: 97164

SEQ ID NO: 158688 - DNA, 216 bp, Enterobacter cloacae; identical to SEQ ID NO: 80560

SEQ ID NO: 158689 - DNA, 180 bp, Enterobacter cloacae; identical to SEQ ID NO: 80559

SEQ ID NO: 158690 - DNA, 171 bp, Enterobacter cloacae; identical to SEQ ID NO: 80556

SEQ ID NO: 158691 - DNA, 1086 bp, Enterobacter cloacae
atgaaaagtaataagaataatgtctttcaattagaactgaagtggcaccctgttgccgcttcagttctgctcgctctgccgtttgttgcgcacactgcagagatcagcatgaagaacggtgtcgtttcttctgtcggcaacgtgcctattatcaacattaataaagccaacgataaggggctttcacataatgtgtatgacaagctaaacgtagataagaacggtcttatctttaataacagcgttgggggtgcgaatacaaccctggcgggccagattcaggggaacagcaacctgacctccggtgcagcaaaagttattctgaacgaagtcacttctaaaaatgcctctgcaattaacggcatgatggaagttgcgggtgataaagccgatttaatcattgccaacccgaacggaattaccgttaacggcggtggttctattaacaccagtaagctgaccctgactaccggtacgccagatattcagaacgatgcgttagccggttattctgtgaatggtggaaccattacgctgggtaaactgaacaactccagcccgaccgaaattctgtcccgcaacgttgtggtgaacggtaaagtcaccgccaacgagctgaacgttgttgccggcaataactacgttgatgcagcaggccaggtgaccggttcggtaacggccgccggaacgcgcaatgctaacagcattgacgttgctgctctgggcggtatgtatgccaataaaattaacctcatcagcaccgagagcggtgtgggcgtgcgtaaccagggcgttattgctggcggcatcggcggcgtaaatattgacgctaacggtcagctgctgaacaacaatgcgcgcattgaatcctctggtcagatcaatattaaaaccaagggtgcactgaacaacaccaccggggatattacttccgtcggtaccattgcgctggacaccaataaaaatagcctcaacaacagccgttcgggcaatatttcgaccatggcagacctctatgtaaatagcggtgctatcgacaataccaacggaaagattgcggctgcaggcatgctgggactttgttga

SEQ ID NO: 158692 - DNA, 270 bp, Enterobacter cloacae
atggttattgattttgcaaccgttatcgctcttttgaccgctgtaggtgctcttgtaggatgggtctggaaggaatttcagaccaagacacaacaaaacatcatacttgagaaccgaatttctagaattgaacgtgacatttctattaatgaagttaaacgcgactttgttaatagcttcgtcaaagatttgaaaagtgatttgaaggagagtaaatcagaaatgagaaagcttgaagataaaattcgtgagatgaaagcggatcgataa

SEQ ID NO: 158693 - DNA, 498 bp, Enterobacter cloacae
gtgaaacgcaaagatataccaaaatataaacaagaacttttcaagaagcagaaaggagtttgtcctttatcgcaattaaagatcgaggacgtcaataaagcccatcttgaccacgaccatatacttgaaggtcctaacgcaggacgttgcagaggtttattaatcgctcaagcaaacgttcttgaaggacaaatcaaacatcaatttaaacgctctggtcttgatggaaaggttgattatcttacgttcttgaaaaatcttgttctgtatctcgaaaaagattacagcatgaatcctacacatccacagttaataacagatctgaagaagcaattcaaaagaaaatcgcttactgagatgaagcaaacactgagaggttacaacacagaaaagaaacaaaagaaagaactcgaaattctctataacaaacatataaaggcgacctatgaaaccgacgaaattcgaaaagtttctacaggtaatgaaaaagctcgctaa

SEQ ID NO: 158694 - DNA, 219 bp, Enterobacter cloacae
atgaaaccgacgaaattcgaaaagtttctacaggtaatgaaaaagctcgctaataagccaaaagagtatttgataattttatttcttcttactctgacttacaacactgttctggttccaattctcgtgacttttgatattcaagctccgaaaatggtgcttatcactgaggaacacgccagaacaataggctcattattactaataggaacaaactaa

SEQ ID NO: 158695 - DNA, 546 bp, Enterobacter cloacae
atggcaaaacttggtggagttaagaaagacctcgacaaatggaaaattaaagaatctgatcagttctcaaaacgagtaactaaagcgtcaaaactcgcttcggttgagttacagcgaaagattaatagagatgttgaaggtcctgttaacttcaccaagaacgctgtcggatttaaattcaaagtcaccaaaacaggcacagaaaacagaatttttatcaaagatactcaagctgaatatctaggtcagcttatcgacgataacaaagcattcaataagtatgttccaactggtgttagaggttcgaaaaaccaattcggtaacattcccggattaaagactcgtcgaaatctcgaatctgttaaacagaacaaagatggtaaaacaagaacgattcttatcaaaacgaatgttaaacagcagaataaacgtgttatcgctatctttaagcgtcatcaaacccgtaagaaaactatcggttcatggacaaaaatctctgatgatattcacaaaaacgttctacgtgttgcgaaactgaaacgctaa

SEQ ID NO: 158696 - DNA, 2121 bp, Enterobacter cloacae
atgaaaataattaagaattccgtctggttagtttcaaaaattgaagggctccctgacgccctgtaccgggttcttgccctgtacaaagaaacaggaaccatggttctgtatgaacttaacgacaacaaaatcacacgtccgaaactattttacattgaaccatttaagttgggtgtacaggaaagaaacattgtgcacttcaactatcctatacctgtatggatgatggccacagaaaatgatattccggataaaaacaggatccggagagataagaatttcgccctgattagcccgctattgtctgatcctgagtttctctttttgtacgcgctcaacgagcgaagtccgttgttaagaaattatgcaaaggacaacaacgtcagctattccacgataaaaaaattattatcgaactgctggaagtacggaagaggtaaacagtcactgacgccagcatacgccaggagtggagggaatggggtcaaaaaaacagttaagtctgtttctgttggccgtaaaaagaaagggcgcgccctcattgagggcagaactgaaacctacatcatgcgagaacgggactcagctaacataaaaaaaatcctgaaaaaacactacctcaaaccgaaaggcaaaagccaggctgaatgctggcgcatctatcttgaagaatacttccctcaactagcttcagtaactcgggactgcgccattccctatccttctctggcacagttcagatattgcatcactaaacttttctctcttgctgagatcgcacgtcggcgcacaacagaaagagactttttactcaacaaacgggctttagcggggtcttctgctgactctgatacacttccgggctcagtattcgaaattgatgcgacagttgctgatgtgcatctggtatctgaattaacgggagatgtggttggccgaccgacagtgtatctcgttgctgatcgtgcaacccggatgataaccggcatgcatgtgtcttatctttatgcttcctggcgagcagcatctcaggcacttgctaactgcttttcaccgaaaggacagtactgtcagttatttggtatcaatgatattagcgatgaccgctggccatgcgcccatgtaccaacaaagttactttgcgataatgcagaaatgctggggcttaaaacgcagtctgcagttgttccattcacagaattaatgtttgctccttcctacagggctgacctgaaaggcgtcgtcgaaagcaggttccacatacttaaccaaaaggcaatccataagcttctgggtacgacaagagggggattagttgtcaggggtgagacccggccacaattaaggtcatgttatacgcttaaagcatttacagaaatcatgatacgtgccgttgatgagtataaccatgccctgaatacagagcttctgtatattaatcctcttcttcttgaacataatctgattgctactccggtcaatagctggaatgtcagtattaataacttccgttttggcggttatcagatcactgagcacgaaattatatcaagacttctgtacccggatagcgcaagtataaccggcaagggaattcagtatggtaatcgtttctatgagtgttcagaggatgagatggtcagggccagaagtttcggtcagacacgtgttgaagtgcggattaatgataactccatggacaatatttatataagaagtggaaaagatactgttttttcgcaacgggaactgctgtccaggcgaaaaatatttcagggccttcctcatatggaagcagaagttgtttctgatattgtcgatatgcataaaagcagtaatgttattacacctgagtcgatggcattgcgtaagctgattgaagctaatgaacagcaaggcgaaattttgctggcagcactgaggaaaaagggccgtgggcgttataaaaacataagggaaaatcgaagaaaagaagtgctgtatgctcaacagggagactccagaaagacccgtgaggattacaaacttccccccgcaaacaacattgtgattttaccaggtcccgaagcaaggaaagcgtggcttacaaaacaaaatgatccttacaagaaggataaatag

SEQ ID NO: 158697 - DNA, 996 bp, Enterobacter cloacae
atgttgttaaaagcattcccgggggaaatcctctttagtcgactttgcagaagcttgtcagtaagtggaatgccggtgcagaagttttcaaggtgcctcgggctggaagcacggtcctcatttcatcctttcctgacacagcatctgacagagattgctgagactagtcacgaaaacgctgagcttctctgggcggaacaaactctgttccctctatgggtatggtcaatgcccggttatgcaaaagcgcttcggcaactgacgggccctccggcacgtttgttatggttttatcaacttacaggcaaccactcatcccaaaggttgcaacttcatttttgccctgtatgcgcaagggaagatgcaatgggatatggtgtcccctactggcattgtgaacatcagatcccgggagtcagcatctgtaaccgccaccgctgccagttaatacccaagctggttccacccagtcctcacattgctgttgaattttaccccgacaagtttaacaacatgatcctctgtaagaacatagaaaatgatttttcagtctttgccagtcagatattgacttgcctggcgcatggtgaagaagtatcagataattacttttgcgattttacctcgaccagaactgatgtgaagaacatgaagcacagcgggaacgaaaaactcgacatgtcattgaacgacctgattaggcatttgtgggagaaaaatccagacccagttatcactgataaatcacacttcctttattacatcctctctagttttgaaaatattttccctgcacaaaaactacttctctttttttatttgaagcgcatgcaaagcataagacaaagtattagtagagagtacagcaccccaaacaaaacaaataaagaaaatataaacattgaaatacacaaagccgccacggaattaaactacctgatgatcaaccattggccttcaacaaaacttactgtcgagtttagaactttaacgtga

SEQ ID NO: 158698 - DNA, 972 bp, Enterobacter cloacae
gtggcctgtccattttcacaatcagtttcccaggctgtagatgagaaacttacaagtgcagccatattcctggttgtgacccttaaccccggtacctctgctgaaactactgtacgaacattctgtgcaacactatcctcccttgtcagaggggtaggttttcgtatacctgatggtggcctgtcttgtgtgttgggattcggggaggaaggatggcgtcgcctttttggggatgctaaacctaaatatttgcataccttccgtgagatcaatggcgtccatcatgcaccttctacggccggagatttgttatttcatatccgggcaaaccgtatggatctctgcttcgaattagccacccggatactatcggaccttggaaattctgtttccgttgttgattccgtacagggattccgttatttcgataatcgagatctacttgggtttgttgatggtactgaaaacccggtcgctcagagcgcggtggatgcgacattgataggtgatgaggatggggcattttctggcggaagttatgtcattattcagaaatacctgcacgatcttgataaatggaaagccattcctgttgaacagcaggaaaaaatcattggccgcgaaaagctatcggatgttgagctgaaggatgcagataaacccagctacgctcataacgtgctgaccagtattgaagaagatggcgaagacgttgatatcctgcgtgataacatgccctttggcgatcccggcaaaggcgagttcggaacctactttatcggctactcaaggaaacctgaacgtattgagcgcatgctggagaacatgttcattggcaatccaccgggtaactatgaccggatcctggatgtcagccgtgcgattaccggagcgttattttttattccgacgtccagttttctggatagcgtagaaccccagccagagctcagccacaaggccgagggctaa

SEQ ID NO: 158699 - DNA, 858 bp, Enterobacter cloacae
atgacgaaagaaattactaacttagcgttagcacctgttggcaatctggagacctacattcgagcagcgtactcatgtcccatgttgtcacaagaggaagaacaacgtttagccagcaacctgcaaaaaaatgatgaccttgatgcagcaaaacacctgatactttcgcatctgcgttttgtgattcatatcgcaagacaatattctggttacggtttaccacaagccgatttaattcaagaaggaaatgtcggtctgatgaaggctgtgcgacgttttaacccggacgttggtgtccgactggtttcgttcgcggttcactggatcaagtctgaaattcatgagtatgtattgcgtaactggcgcattgtgaaagttgcgacaactaaagcgcaaagaaaattattcttcaacctacgcaaaactaaacaacgactcggctggtttaatcaggatgaagtggacatggtcgcccaggagctgggggtttcggtaaaagacgtccaggaaatggagtcccgcatgtcagcacaggacatggcctacgatatgtacccggatgatgaatcagataactatcggcctgtttctccttcactctacttgcaggataaatcctcggattttgccggaatgattgaagaggataactgggatagtcaggtatcagaccgtctggttgtcgcaatggataccttggatctaagaagccaggagatcatccgcgcacgctggcttgacgacgaaaataaagccacactgaatgaactggcagaacgctacggtatatcagcagaacgcgtgagacagcttgaaaacaacgccatgaagaaattacgcatggcgattggcatataa

SEQ ID NO: 158700 - DNA, 1146 bp, Enterobacter cloacae
atgatacaagcaatcaaagaccctaatttttttcagaatatactaagcaccctactgcacagtgatatacccgtcattcgggtgatagttatctttgtcctcctgcactgcatcgcacactatgtggtacttccctttctggacagaaaagcagagcaacttcggtcatcccgactgcagatcattactcaccatcatctgtttcgttacacagtattaacccttcaaggcatagtgctgacagcacaactgtctctggttatatcacctgaaaataaaatactggattttatactcctgggggcacgactgtgggtgcttacctttgccttgctggcattttattcatttatagatgttggctgcgaactttacaaaagcagcaataaactcagtgggttaccttatcggggtatcgaacagagccttaagctaacaggcgctgtagtttacgctattttgttgatttcattactattgaataagtcaccgcttatcttactcagtggactgagcgctgtggcagcggtattactgttagtgtttaaagatccgctccttggcctggttgcgggcatacagctttctgcaaatgatatgttgcgacccggagactggattgaacttgaccaactgggtgcgaatggaactgttcaggatattgggttaacgacggtcaaagtacttaactttgacaataccattacgacaatacccacttacaccctggtttcaggggcatttaaaaactggcgttatatgattgagcataatgccagacgctttcagcgcacgattaatattgatattaaaacgattaaatatattaaccctgaagaaaaacaggccattactggaaatcaatctttacctcaactgacggagatggaaagcaatgcccatactaacgttgagcttttccagcaatatgcctgtgcgtatttacgtcaacatgatgctatctgtcagcagatgacattgatggtccgtcagttacaacccacggtttatggtttacctgttgaattttatgcttttacatcgtttacggagtggatggcgtatgagcagttacaaacagaaatcatgtcctatctcattagcattgtgccattctttaatttaaagatacatgatgtttcatag

SEQ ID NO: 158701 - DNA, 2739 bp, Enterobacter cloacae
atgcccgcattgtgtgatatttgtcaggcaagaccggctaccagccgcgtcaccgtggttcagaatggtcaacgtaagactattgacatctgtgattatgattaccgccagctaatgcgacatcagaacatcatgaaccccttcgactcattgctgggaagaggtgggctctctggcttcttcaatggttttggcaatagccctcgcgatcgtgatgacgagggaatttttggtgaagtaccacgtgagtcggtcgatacaacggaagcattcagtaagcagtcactggaattgttacagcgagcggcagaaaaagctcatcagcttaatcgtagcgaactggatacggaacatcttctgtacgtactttctgatgctgacgtctgtaccgcattgtttaaagacctgaaaatatccccggacgatattaaaagctatatcgatcagaatgcttatagtggcgcaactgagaccgggagcacacctggtgacctgtcaatatcgccccgccttaaaaaagcgttcatgtacgcgtttcaggcatcccgtgaactagggcattcttatataggaccagaacatttactgatcggcctgagtgaagttcccgatagcgtagcgggtgcattactcaagaaatatgggatctctcccgaggcaattcgccagaaagttgtgaaaatcgtaggtaaaggcgccgaagatggccgtgttgatacccctaccggtacgccaaaccttgataaatttggtcgggacctcactgaaatggcgcgagctggtaagctggatccagtccttgggcgtgcacaagagattgaaaatacgatagaagttctggctcgccgtaaaaagaataacccggtactcattggtgaacccggtgtaggtaaaacggcgatcgttgaaggactggcacaacgaattgtcaaaggtgatgtgcctgaagttttgcgtgataaacgtctcgtcgagatcaatatgaactcgatggtagccggagccaagtatcgtggggagtttgaggaacgggctaaacaactgattgatgaagtgacggctaaaaagggagagctgattctctttattgatgagcttcataccatagttggtgcgggtcagggtggaggcgaaggtgggctcgatattgcaaacgtcctgaagcctgctctggcacgcggagaacttagcctaatcggggcgacaacattaaatgagtaccagaagcatatagaaaaagatgcagcgcttgagcgccgcttccagccggttctggttgaagagccaacggtggatcagacgattgttattcttcgtggactcagggacacacttgaagcccaccatcaggtcactttcaaagatgatgcatttgttgcagctgctgagctatcagaccgatacataacgtctcgttttcttccggataaggccattgacctcatcgaccaggctgcagcacgcgttcgtattggtgccagttcacgacctgttgcaattcaggagcttgaggctgaaatcgcgcatctgaaacgtgaaagagattacgcctcctcccgtaaactttttgacgaggtgaaacgttttgaaagtgacattgccgctaagcaggaatcccttgaacaacagacagaagcgtggaagaacaaaacgggctccgaaacccttgaagtgactgttgctgctgtggcggaagtggtctccagactgaccggtatacccgttagcgatttgacccaggaagaacgaaaaaaactgctcaatatggaagaactcctgaaacaaagagtcgttgggcaggatcaggcagtcacagcagtcagcgatgcagtcaggctctccagagccggtctgggacaggcccatcgtccgattgcaaccttcttgttccttggtccgacaggcgtggggaaaacggaattagccaaggccattgccgaagccgtatttggtgatgaacaggccataattcgtattgatatgtcagaatatatggagaaacacactgtcgcccggttgatcggtgctcctccaggatatgttggttatgatgagggggggcagttgactgaaaaagttcgacgtcgtccatacagcgtgatactgctcgacgagatcgaaaaggcgcaccccgatgtttacaacgttctgttgcaggttttcgatgatggccgattaaccgacggtaagggccgggtaattgatttcagtaataccaccatcattgctaccagtaaccttggttcggctctcattatggctaatgctggattaccggaagaagagcaaaaaacgccgaaagtcctgcatgaagagttaatgcaactgctgaaaggccatttccgtccagagtttcttaaccgcatcgatgaagtgattgtgttcaactcgctgtcgcaggagaacatccggctgattgtccagattcagctcgacagactgactcgcactgcagctgcacaggacatttcactcaaactcgatgactccctcgttgaacatctggttgaagtcggttatcagcccgactttggggcgcgtgaactcaaacgtaagattcgccaggaagtggaaaccaggctggcaaaagaaatcctcagcgatcaactcaagtcaggagatacggtcagcattggttacgatgacagtactgaaaccgtcgtgtttaagaatgaaacaattccagtaaaaaaagagaatgacagtgtggatgaaaatcaggaaaatgcaaaaaactga

SEQ ID NO: 158702 - DNA, 918 bp, Enterobacter cloacae
atgattgtgcgtccaccacaacactggttcatccgtctatttacctggcatggttctgtcttgtccagcatcattttccgactttcgctcaatataggtatgtcgattgtagccattgtgttgttccagtggtatgagcaactagggattcatcttaccgttgcaccattcagtttgctgggtatcgcgatcgcaattttcttaggcttcaggaataatgcaacctacagccgtttcattgaagccagagcattatggggaaccatgataattgcacagcgcaacataatgcgccttgtaattaaccttgtcccggatgataaaaatctgcataagaccatctgtgattatcttatagcctatagctggagtttaaaaaaccaattaagaaacaatgaagcttcttatgatgtgtatcgaatcctgccaaaatcagtttttctttctgtcatgaacagtgcttacccaaccaacaaaatactacttttacttaacagagaaatagccaaaataaataaagatgggcaaattagcgacattcactttaacctcattagcagcagcattaatgaactatcccatgtacagggtggatgtgaaagaatcgcgaacaccccggtccccttcgcttacacactgattctgcaacgaacagtgtatctgttttgtaccctgttgcctttcgcactggtaactgacttacgctatatgaccccctttgtctctgtctttatatcgtatgcttttctggcatgggatgctcttgctgagcaacttgaaaaaccatttggtacagaatcaaatgacctgcccctcaatgctatttgcaatacaatagaacgcaatctgatggatatgactaaacaaaaaccactaccgccaattcatcaacctaatagtcattacaatctcacgtag

SEQ ID NO: 158703 - DNA, 486 bp, Enterobacter cloacae
atgtcacaactgacccacattaacgccgccggcgaagcgcatatggtggacgtctccgccaaagccgaaacggtgcgcgaggcgcgcgcggaagcgttcgtcaccatgctgccggaaaccctggcgatgattatcgacggcagccatcacaagggcgacgtctttgccaccgcccgcatcgccggtattcaggccgccaaacggacctgggaacttattccgctgtgccatccgctgatgctgagcaaggtggaagtgaacctgcaggcgcagccggagcataatcgcgtgcgcattgagtcactctgccgcttaaccggcaaaaccggcgtggagatggaggcgctgacggcggcctcagttgccgcgctgaccatctacgacatgtgcaaagcggtgcagaaagatatggtgattggcccggttcgcctgctggcaaaaagcggcggcaaatccggtgattttaaggtggatagccatgattaa

SEQ ID NO: 158704 - DNA, 246 bp, Enterobacter cloacae
atgattaaggtgctcttttttgcacaggtgcgcgagctggtgaataccgacagcctgacgctggatgcgtccttcgaaaacgtcgcggccctgcgcgcgcatctggcggcacaaagcgaccgctgggcgctggcgctggacgaaggcaagctgctggccgccgttaaccagacgctggtggaattcacccatccgctgaacgcaggggatgaagtggccttcttcccgccggttacggggggctaa

SEQ ID NO: 158705 - DNA, 453 bp, Enterobacter cloacae
atggctgaaacccgaattctggtaggtcccgagcgttttaacgtggggaccgaatacagctggctggcggaacgcgatgaagacggcgcggtcgtcaccttcaccggcaaggtgcgcaaccacaacctcggtgacagcgtgaaggcgctgacgctggagcactatccggggatgaccgagaaatcgctggcggagattgtcgacgaggcgcggggccgctggccgcttggccgcgtcacggttattcaccgcattggcgagatgtggcctggcgaggagattgtcttcgtcggggtgaccagcgcgcaccgcagcagcgcgtttgcggcaggggagttcattatggattacctcaaaaccagagcgccgttctggaagcgcgaagccacgccggaaggcgatcgctgggttgatgctcgggatagcgatcgccaggcagcagagcactggtga

SEQ ID NO: 158706 - DNA, 597 bp, Enterobacter cloacae
ttgaccagctacaaaaataccgccagctatgaattagcacatctttcgtggtgtattatcatcgctgttaaacttgcccatcaggaaaggaaaatcataaccccttctcaagagcatatgtttatcatgaactggcttttaaacgcccaaaagtataagttattttcgaaaccatttgcacaggatatcctttggtttctgaatcagggaaaacgttatggccagaaagcggagttatataaaaaagcggcaagtgttctggcaatacaatcaattgagaatgaaaaatacagccatttatttcgctttacgcaattcttcgacgagttaaaagataacggatggcgtggttatgtactacctgagtgtgaagaaaaaaatcagcccaatatcgatacaatagagtctgttatctatgtaggccaggcagcgttagttggttcatttaacaagcatggcgtgctcataaaaccgcttcaactcagcgctgcaggaaatacattgttaatccagtcactgttaagtaaatacatgcttaaaacagaaaaagaaataaaatcagatggttttacaactttcacactgctaccagactga

SEQ ID NO: 158707 - DNA, 282 bp, Enterobacter cloacae
atgatttttaaagatattactacaatctatatcaatagcgataaaaataatcgacttatccgttatgatttactacgaaaagaaaataatgatgttatcattcaggtctttgatgaccagaacagagacatagcggatcctaaaccgataatcaaaattgatcagtttgagataacctatgattcttatattgctgattgcaagcactcacaaaaactacctgcttcttttgaagagtatgttgatttgaaattacaggaccaccgaaataaactcgattaa

SEQ ID NO: 158708 - DNA, 825 bp, Enterobacter cloacae
atgcataagatcatttctgataacagtcataactcgcatgcctttcgcaatgtgtcactctggaagcgagaaaacctttcttttgtccaacaagatgttctggcagaagaggtaccggttgcattggtttataacggaatctcgcatgtagtaatgatggctacacccaaagatctggaatattttgcgcttggtttctctttgtctgaaggcataattgaacaaccgaatgaaatttatggcattgaaattgagcctgtttgtaatggtattgaagttcgggttgagttggccagcagatgttttatggcgctaaaggaacgtcgacgtactctggcgggcaggaccggatgcggaatatgtggtgttgaacaactcggcgatattggaaaaccactcattcccttaccttttacacaaaaaataagtctctctcatctggatttagctctgggaacgttatcgttatatcaaccggttggatctttaacaggttgtactcatgctgctgcgtggatgtcgacatcgggaattcttgatggtgggtatgaagatgtaggaagacatgtggcacttgataaactactcggcagtcgatcaataaagaatggggagtggcaaaatggcgcggcactggtttccagtcgggctagctatgaaatggtacagaaagctgctgcatgtggggtagaaatacttttcgctgtctctgcagcaacctctcttgcggtcgaagtggctgaacgttgtaacctaacgcttgtcggattttgccgtccaggtaaggcaaccatctacacgcatccacaacgactgacattataa

SEQ ID NO: 158709 - DNA, 222 bp, Enterobacter cloacae
atgcctaaaatgcttggggaacaatcagtatcattgctgatcaattatttagatgtcactatgcggttgcagaagaaaattgaaagctttcaaaaagaacaggatcatgatgtaagaattgttgatatttgggaccgtttgaacgaaagcgagaaaaacgaactgcttaatgcaatcagaatatttgctgggaagcctgatagcgacgaaaatgaggtttag

SEQ ID NO: 158710 - DNA, 2313 bp, Enterobacter cloacae
atgaaagttaaaaaaagatctgttcccggagttcacccatacgatggtccagcggggggctggggcgccctgaaagcaactgcgattgcggtacgtactcaaatggatacgctggaagcgcctcctacattgttgcgtaccaaccagccggacggctttgattgtccggggtgtgcatggcctgataaagaacataaatccactttccagttctgtgaaaacggtgctaaggctgtcacctgggaagcaaccagcaaacgtgtaacgcctgaattcctggctgcgaacacggtggcgaaactcttcgagaaaaatgattatgaactggaaggatatggtcgtctgactcatccgcttgtctatgacaaggccagtgatactttacgcccggtatcatgggaagcggcatttgaccgtattggtgaaatactccgcagcttgtccccagaggaagtggaattttatacttcaggtcgtgcatccaatgaagcggcctatctgttccagcttctcgcgcgtgagtatggtacgaacaatttcccggattgttcaaatatgtgtcacgaagccactagtgttggtctgccacaatccattggtattggtaaaggtacggtttctctcgaagatttcgatagtgccgaaatggttatctcaattggtcataacccaggaacaaaccaccctcgaatgatgggcactctgcatgaacttgccagaaaagatgtgcctattgtggtgttcaacccgcttcgtgaaagagcgctggaacgttttgccgatccgcaaagcgtcattgaaatggcaacttacagctcgacaaacattgcgtcatcttactaccaggttaaagctggcggggatgcggctgcacttaaaggtgtggccaaaacgttgcttgaaatgcaggaagcgaaaggtgatgtgctggatctggaatttatcgaacagcatacagaaggttttaaagaattcgctgatgatcttaatgcgacctcctgggaatcgattgaagcggaatccggactgaaacaggcagatcttgagcgtgtagccattgcgtatgataaatcaaaggccaccatcatcacttacggtatggggatcactcagcataacaaggggacggagaatgttcgtctgattgtcaacctgctgttgatgaaaggtaacattggtaagcctggtgcgggtgtatgcccccttcgtggacattccaatgttcagggcaacaggactgtggggatcacggaaaagccttcagaagactttctggaaaagttggaagaagtcttcggatttgttcctcccaaacatcatgggcatgatgccgttcaggcaatgcagtcgatgattgagggtaagtcaaaagccattatatgcctcggtggtaatttcgcggtggcattaccggatcaccgtcgtggtttcccggccatgaaaggtctggatctcagtgttcatatcggaaccaagttaaaccgcacgcacttgttggtgtcaaaagagacgtttattttgccttgcctcggtcgcacggagctagatgtccaggagaccggtcgtcaggctattactgttgaagactctatgtccatggtccatgcttcttccggcaaacttaagcctgcatcagagtttttacgttctgagcctgcaattatcgcgggtatcgcggaagcaacattgcctgacaccaaggtggagtgggctaatttagtcgctgattatgacaagatccgtgtcctgattgagcagacgattccgggctttgatcattacaacgagcggataagaaatccgggtggttttcgtatgccacttccaccaacggagcgagtctggccaacgccgtcagggaaagcggtattctccgtgtatcatggcgtgcacgaaaatattcgtgtagacggtaatgatatattcagaatgattacgttacgcagtcatgaccaatacaatacgacgatttatgcaatggatgaccgttatcgtggtatttttggtcgccgtgatgttctgtttatgaatgagcaggacatggcgaatcaggggcttgaacatggcgatcgtgtcgatatcgagaccgctctggatgatttgccggcacctttacgcctggaagatatcaccgttgttgcttataaaattgcacaaggatcagtaggagcttactatcctgaggcaaatgtcctggttccattggattatattgaccaggaatgtggcaccccgtcttataaatcagtaccggtaaaaataacacttcgtactaaagaggtgttaaaaacacctaatctttacgtgaaataa

SEQ ID NO: 158711 - DNA, 897 bp, Enterobacter cloacae
atggacattaaacaactgaagtacttgatcgcgcttgatcagactcggcattttgggcatgcggcaacggcctgccatatcacccaaccaacgctttctatgcgcattcgcaatctggaagaagaacttaatttaaccttgattaagcgaggccagcgttttgaaggtttcaccccggaaggggtgcgtattctggcatgggcgagggctctactggcagcatatgatgggcttgaggaagaagcagcgatttgtcgtgggcagatcattggccagcttcgtgtgggtatggtgccgctggccagtctcaatcccatgcggttgattaagccactggcagataaatatcctgaactgcagttcagtctgttgtctatgacttcggaacaaatcatagacggagttagccgtaatcaactcgacctcggaatttgctatttacatcaagttgatagcgatttactcaatgtggcgtggctaccacaaacgcggatggggttgctgcacgataagaaacattttcagtttgacgaatcaatacccgattgggaaaccctggccgaactgccgttgggtttcctgaccaaaggaatgtactatcgcgaatcgatagagatcaacttcaaagctaaagggttaacaccgaaatatgtctttgagagcgactcaacctttcagatcatccaggccgtgcaggcggggttatgctgcgccattatgcctctcaataatgggttagaagaactgggtgatcatctggctattctccccatagcagcaaccgatgttgattcgaggctggcacttctcatgcgtaaccagcaaccgatctcctcgttagcggagagatgctttgccgatgcgcaggaaattttaagccaatctcttgagtcttag

SEQ ID NO: 158712 - DNA, 558 bp, Enterobacter cloacae
ttgggctgtctggcgcacgataacatcggcaatagccagcgcgttgccgatgattgcttctgctgtctgcttattcgaacctacggcggcagccagcccatcggcgttctccttaattgcatcagaaagctcggccagtttctcgctactgtctacagcactttcaatcagatccttaaatacctcggaatctttaatctcctccaaaatcacactggagacatcagaaacatctatacttgcctgcccacgaacccagccggtataaccggactcgttaccggttcggtcaaccagctgtgcgcggtaccagaattcctgaccggccttaaggcccatctgctgatacttgcgctgcggatagggtacgtctgccagcagcatcgcatcgtcctcagtacccgtcaggctgtactgaatttccgtcttcagcgtgtcgtcggtattcgccgggaatccccagttcagctcgatgccgaaaaccacattttcagaagcgatgaagccaaccggcttcggtggattgcctactttgcccgtcagcgttttctcttctga

SEQ ID NO: 158713 - DNA, 381 bp, Enterobacter cloacae
atgaaattaactaatcgactgaggaagaagatattagtgctggatggcattgataatgactttatagattatggtgcaaaaatagcatgccctgaatgcgagggcgtaatagtctactctatcgtaaactcatatgagtttgacacgctcactgaagaggtaaaatgctttttggttaagaaaatgagaggtgtgaaacttgttagtgatcataatgaatttagctatgatgaaagcaaattatatgttttgaaaaacacatgttcaaagtgtttaaaagagttttctactgtattaacgtataaagaagtgcagccagcccgataccgggtatatcttgtggggctttttgacggtgatttgaaacagttcaaactttaa

SEQ ID NO: 158714 - DNA, 129 bp, Enterobacter cloacae
atgattgaattaaaaattaaaccgattacaggtgaactaaatcttgatggcctgcctttggaaattgatactgaagaaggcttttataagtgtaatttaccgcgaattagtaaagcacaacgccgttaa

SEQ ID NO: 158715 - DNA, 246 bp, Enterobacter cloacae
atgaattacgattcatataatgaagtactcgattatctcaggttttttttcaacgtaagagtagactcttcaatttatttagaaaaactaatgactcttattgaaagatctcgctcagaaaaaacagtgataataagagctatttatgaaacgtacatgcagtatgtaaaacaaaataaagaaggcataaaagttatcgctggggaaaaagaaatgtggattgacgtactgttccattggcaataa

SEQ ID NO: 158716 - DNA, 444 bp, Enterobacter cloacae
atgacagaaaaagaaaagctgattgctcggctgaatgaacttggtatccagcttaaccgtgaagtcagcaccagcggcaccattcaggaacttacgatgcgtattgctgagctggaagaggagctggatggtgatgccagttcgattgacggtgaaagcggagagaagaatgctcccgacagcaccgacagcaccgacagcaccgacagcaccgacagcaccgacagcaccgaaagcgatgtagctggcgcggaaaaagtaaaaacggaagcggtcacaacggatgaccgggtatcagtagaaacgctggctaccctgcatgttgacgcgctgcatgccacgcgtaacgaaccagtgtcgatcgttgagcccggagtgattatccgcgtatccgaacaggatgccgatgagctgatcgcaaaggggctggctcgcgaagtctga

SEQ ID NO: 158717 - DNA, 207 bp, Enterobacter cloacae
atggcaacacagactgaactggatgccgcgcgtgctgcgttacatgacctgatgatggggaagcgtgtggcgacggtacagaaagacggtcgaagagtggaatttacagccacttcagtcagcgatctcaaaaagtatattgctgaccttgaatctcaggttggtaccacatcacgacgcgggaggcctgcaaggttttacgtatga

SEQ ID NO: 158718 - DNA, 303 bp, Enterobacter cloacae; identical to SEQ ID NO: 96991

SEQ ID NO: 158719 - DNA, 1026 bp, Enterobacter cloacae
atgtccgtttacacaactgccgagctgctggcggtcaatgagaagaaattcaaattcgatccgctcttcctgcgcatctttttccgcgaaagctatcccttcactacagagaaggtttacctgtcgcaaattcctggtctggtcaacatggcgctgtacgtttcgccgattgtctccggcaaagtgctccgttcccgtggcggcagcacatctgagttcacaccgggttatgtaaagccgaaacatgaagtcaacccactgatgacccttcgccgcctgcctgatgaggaccctcagaatctcgctgacccggtctatcgccgtcgccgcatcatcctccagaacatgaaggatgaagagcttgcgattgcgcaggtcgaagagaaacaggctgttgaggcggtgctcagcggtaaatacaccatgaccggggaagcgtttgatcctgttgaagtggatatgggccgcagcgctggtaacaacattgtccaggccggtgcggctgcgtggtcctcccgcgacaaagaaacgtatgacccgaccgatgacattgaaacctacgcgctcaacgccagcggtgtggtcaacatcattgtgttcgatccgaagggttgggcgctgttccgttccttcaaggcagtgaaggagaaactggatacgcgtcgaggctctaactctgagctggaaaccgccctgaaagacctgggcaaggcagtttcctacaaggggatgtatggcgatgtggccatcgtggtctactccggccagtacatcgaaaacaacgtcaaaaagaactatctgccagacctgacgatggtcctgggtaacactcaggcgcgcggcctgcgtacctatggttgcattcttgatgccgatgcccagcgagaaggtatcaacgcctcgacgcgttacccgaaaaactgggtgcaaacgggcgacccggcacgcgaattcaccatgattcagtcagccccgctgatgctgctggcagacccggacgagttcgtgtccgtcaagctggcataa

SEQ ID NO: 158720 - DNA, 333 bp, Enterobacter cloacae
atggcaattaccgaagttttcactcataaccagccgctcggtaacagcgacccggcgcacaccgcgtatggtcccggcgaactgacggcatccactccagccatgacaccgctcatgctggataccacttctggcaagctgaccgtctgggatggtgccaatgctggcgcggccgtgggcgttctggcagtgacagctgaccagaacagcgccgagttgacctattacaaatccggctctttccgcattgaagatgtcctctggccatctgccgtcacagacgaaaatatcaagcgtaacgcgttcgccggtactgcgatcagcatcgtttaa

SEQ ID NO: 158721 - DNA, 990 bp, Enterobacter cloacae
atgaaaggcttatttatccctggtgtgactgagcttggcgcatcatcagatagttttccatccggcatagttattcccggtgctaatgttatgacgctgccgcctggcgagtgggttgaccttagcgatatcgatcttacctcctctgcactggattatcgggtttcgttcagttgtgcaagcaaccatgcatactactcagctgacggaactattcagttcgctgcacctgacgtatggccgcttgagtaccgaaatggagtggcagttggaaggcatgagcctgagcctcagagaaccaacttaatttcctactcagaaaatcttaatgccaatagcccatactgggaattaaatacaggtgtaactggcataacaaagacagggccaaacaatccatacggcgaaaaatcctatgcagtagctgttagcgccacagccaacgcgggtgtttacaccagggcgcaggtatctgcagggcagagatatactatttcgatggctggtatttctggcgactcgcggatgatgttaataggaaatagttatcttggcacgcagaacgtaaatgtaaacttcaggcaaaaaacatcgactctctcttctccattcacctggcgatttaatgatgtaaatacagagtgggtgcgatacgcctttaccggtgattcaactggaagcggaacgcctggaacagtcatttactcagctgttgctcttgccggaagttattcttgcgcaatggttcagcatgagtccggagccttcgctacatccccaataattaccaatgggatttcagcaacgcgagcggctgctttcgctacagtgcaaaatcccggagggctggcgagtgcaatcatggtccactattcagacaataccagtgagcaactggaaatcccgactaacagtccgtctattcagctgccacagtctgctaatgactggggtaagcgctacatccaacgaatcgagtacataagataa

SEQ ID NO: 158722 - DNA, 228 bp, Enterobacter cloacae
atggcagatattaacctccgcatttccttcaaagcgagatgcgacggctttccaggttttatccagttggaccgccagctgttgcacgcctttatgtccatcagtgggatgtcccagcgcccgacagatggggacccgctgaacctgccattcttccccctgcaacagcttctcgcggggatttccccagcgatcgctgttttcgagccagatgtcccgtcggcgtag

SEQ ID NO: 158723 - DNA, 441 bp, Enterobacter cloacae
atgaaagactggatcaaaaaaactctgggggaccacttcataactaacatgatggtcaactgcgctctgttcacccctgatgcgttcccagctcttctgcatcttagcggggaggatggaactcgtgatgccgacacattcctggctgaaaaactccgtaaagaattacagaagcctgaggaaccagttaactatcacaacggcacgtataggttaaattttgagtacaaaaaattctcaaaagaacagttccattttttatacgaaatgcgagatcttcattaccgcgttgatcgtattgaacagcttcttcaggaactgattcataacccggaggtcgattttagcgaagctgatgctgcagggaagtggattgacgaacaagtcctgctacttgaatcaaacgaaacgatgtcattacctgcagtggaacagaaataa

SEQ ID NO: 158724 - DNA, 267 bp, Enterobacter cloacae
atgtcaggcgcattgtctgacatcacgctggtcggtgtctttgatgatccagaaaacattggttatgcgggagcggggatccgtgttgaaggtaccagcccgacactgtttgttgaaacctccactgtcagccagctgcagcgtatggacaccctgacgattaacggccggtcattctgggttgatcgtatcggtccggatgactgtggttcctgtcatatctggctgggtaacggctctgctccaccttcctcgcgtcgccgttaa

SEQ ID NO: 158725 - DNA, 207 bp, Enterobacter cloacae
atgtatgaatttgaggcgcaatttagtgatccattagaattcacgggtttttcatatatatctagagggtatcgtaagtttaaaggggcgggagaatacaataaaagtcctagcccactcagcgataacaaagaaatgtttttcaaacggttgattgaatcaacagcgcgctctattattgatgaaattaatgaagagtatgaatga

SEQ ID NO: 158726 - DNA, 702 bp, Enterobacter cloacae
atgaatgttcaagaaagagtgaagtggaatcgcctgagaacatcattatctctctcagaattagcagggtattttagtcgtagcatatactcggatgagaaaggttatggttattctgcgattgatatagatggggtaggtataagtgcaacttataccgagaaaaatattatcgagaatgtaacagttgaccctttaggtaatgagttcaaccaagtggttactgaatacatatcaataagattttctcttaccctgcttactaataagctatatttgttctgtgtgtataatccaccaaaatcgataaagaattttactgacaaactcagctctgatttaaactataagattggtttgagttcaatcgacattgatttatacagactgtatcagactatgaggaatgaacgaagtatctctctgatgaaattatgtaaaataaaaattagtagcttggttgttaatgaaaactctaaagcatcaattgaagttagttctcgtaaaaatgctattgatgaccttcacgagttaactaaagaaagaaagtttaaaattgataaaatgaaaataaattgccttttagatggaaagagttctgaattagaaatatctaaagcaggcagcttggttggacgcactgaccaaataccattttataccggattggttatcaaccagttgctagagaatgaaggttga

SEQ ID NO: 158727 - DNA, 123 bp, Enterobacter cloacae
atgttcggtagcaagattgacattgcagctactgaacaaatgcaacatggcgacgaacgttctgggggcaatgactacagcggcgataagtgtaaagtgatcttccaaacacgaagcatgtag

SEQ ID NO: 158728 - DNA, 1014 bp, Enterobacter cloacae
atgggtgctatttggtttgataggtatgaattatctaatcatcttcatgaaatcatagggcaaaagtcaggggtggctgcatccatcgaggatatatgcgacttgctagcaggtagcggattcgatgatgatattatttcttctgaatctcatgcatttcgtatcagatcagaggactatgataatttatattataccttgctttataagatcggagctacggaaagacctcttaacggagtttttgaagtatttaaggtgacaaatgagatagatattaaatatggacagggattttctgggaaaataatcgggatatatcgcaagcatatagagctagaaatccaaaaagcgattgcagaagggcgtaaatcacttgatcctgagggtatgatgaaggaggcagcacagaaatatggtaggaaaggtttagattcattaattcttatgattcatgcttatgatgatgcaatgaagcatagcccaaatacagcaatgaaatttcaccaatacaaaaacataattaacttatcggatctcttcgagcaatataatccgattgtaggagatggggcattcctagatcagcggtttattgattttctttcaaataatgtcgagaaattaggtgggattcactggaggaaatttgaagagttaaccgctgaatgcttccaccgttttggttacaacgttgaattaggtcctggaagtaatgatgacggtgtggatataagagcatggaataatcaaaaaaaaggggcgcctaattttatcattcaatgtaagcggatgaagtcaaaaattgataaagtaacaatcaaagggttatatgctgatatacagcatgaaggttgtgagctagggtttttagtgacgtcgtctgaatttagtatcggagcacgttccacaatagaggctcgaagttatccaatagaagagatcaataaggacaatctaaatagttggttaaaagagttacgaacgccacggactggtattgtccgtgtttga

SEQ ID NO: 158729 - DNA, 477 bp, Enterobacter cloacae
atggcattgatatgtagttcgccgtgttcgcctaaagccgtttgcgcgggagttgactacagatggcagaccaaagtatcaccgtaccgtcggggggatcaaatgattattcgtgtacacaacggtgaaaggcaagtcattagccgtgccatttacactcgacgaatttggaaggcaaatcactacgttttcggaaattgggctctggattgttggaacatcgtttattgtggattgcgtgctcctaagtacacgctggcccactcacaggccacggtagctacatgcgaaaccatgaagataagctgcgccgagtttcaatttttctttgaaaaaactgatcagggtgatgcgatcgtgcaaattgaacagcacgacttgcgctttaattggaagggaaagaaatacacctttactcgtggcatggataaaagcaaggtgatcgtcacatctcaagcagttggatctttatggtaa

SEQ ID NO: 158730 - DNA, 270 bp, Enterobacter cloacae
atggaagacagtatcgtagcgcataataattcgcccattaccgccgttcaccgcatcggaaaccaccacgagcatattctcatccagactaatcaagcctcggtcaaacactttatggtgaatcgcacacaacgtcagaccgttgggtacttcgcaagggccatgatgctgcttccatctgatatcagccgctccaagggctatattaaccttcgctatcttgcgatcgtcgtcgacgttaccataaagatccaactgcttgagatgtga

SEQ ID NO: 158731 - DNA, 207 bp, Enterobacter cloacae
atgaataagatcatcacatttatcattgcagctatgatcgtatttagttggttggttacacataatacagctaaaccagaaaaagatctttctgctgatgtgccattcattatcaaatctaatcggccaggaacgtgtagagtcagcacaatctctgtcgatactaaacgaggtttagccgatttagcgcgcaagctacaattgtag

SEQ ID NO: 158732 - DNA, 336 bp, Enterobacter cloacae
atgaaaagaacaatgcttctggtattaatagcggctggtttgttggctggctgtggtgagaaaacgccgaaatgcagtagtgatgatgctaaaaatctggtcgtggatattgccagaaagacaatcgagaaaggaatgacactggataaggatgtgcggatttcagttgaaaatgtcagaacaattagccatgagtcaggccttgatgtttaccagtgtgccgctgatctaacgttcacaaaacctgacctgcaaaactctctaccaatcacataccggattcagaaaactgatgataataatggccagttctatataaatgtatctgggttataa

SEQ ID NO: 158733 - DNA, 360 bp, Enterobacter cloacae
atgaacagaaaactgttggccttattgatggcagccataacgctacctgtcgcagcaacgcagtacgtaaagcccggagcggttctaaccctgaatccgggaaaggacaatgctgaattcaacattaatgcctcaacgggggatggttcgggcgtatgcaatatggaggggacagcacagcaaatagctgccggagaaagccagaagcgtcgctgggtctggaatgacaataccagccagtgtgttgcagtaattagtgaactgaataacggtaaggccaacgttatgactcgtggttgcgagggatactgcggggcctctgcggcaggcacaatggatggtctgtttaataagcagtaa

SEQ ID NO: 158734 - DNA, 528 bp, Enterobacter cloacae
atggcaaccaccatcactgaaataacggaatgctttgagtattttttcagttctctttatcgcagggagttcgtcaaaacactgcgtctgaacgaatgtagcgagcgggaattactgcctctggtacgttgctatttgctgggttggtttgcagataacgtctcaccggaagtaaaaagcaaactgccaggaactgtatccgggcacggttacattgattttgtcattgacgatgtggccgttgagtttgcagtacgtaaaccaactgcgtcacgttccaatgtctccgcgaccgtcaacagtacagaagtaaagaaattgatgaagcacaatggcaaagccttgcttgtgctgtttgacttctcagacacgccctactcagaagaacagatcgaatctttccgcaactggccctctcttggtcgagggaatcatcgcaagtccgcattcaacgtcgtttatttctttgtggaaaaacgcagaccgctggcactggggaaaatcaccaaaaacatccgtatcacttaa

SEQ ID NO: 158735 - DNA, 531 bp, Enterobacter cloacae
atgggttttcatattaacgcattgatatctggtgaaatttatatgagcagcaagaaagcagtatcgtctataccgacccatcctgaagcttctgttgaagagggaaaagactggctgacagcagaggaattcactcatattgaggggatgccgggcactgcgcgtggcgccaggatgcgcctggagaagctggcatctctgcacccggaaatacgtcgtaaaaggactgccgggaaaggcgtggtttaccatatcagcgcagccacaatgtcgcttgatgatgagagaaacagggctaagggtgaagcgtttactctcaccgacagcgatcgccagcttagcctctggatacagttgtatcgcaatatgtcgccagcttcgcgggcgcaactgatggagcaggcccttaggctggtaaaagatgatctgatgtctaaggggcctgaagtttctgagctggcggtacaaatcatgaagctgcccgaagataagcgtaagagcctctttgaaaagctgaatgggaaggtgtga

SEQ ID NO: 158736 - DNA, 423 bp, Enterobacter cloacae
atgaatattctccatcaggaagggctagctatgcccgtcgatcaggaattaataaatatcatattaaatgaagcgggaaatccaccgccgcataaagccagaattacagccgtcagtctgttatttaaagacctgagttacagcgctgaaaagggcggttaccatcctgtcgaaatacggcttatttcacgcaatgatgaatggtgtttcgattacattaccgacttcagttatataggagtggtttaccccgaactggaaaaggaaattgatatcagctggagtcagcaatatgtctttctggctcatgttggtgatctgtctgttaatgccggaagggagttgtttgaactctggcaatccaactttattcagtatcacgccatgaacgtctacaccattaccgtcctgtgggaaagctaa

SEQ ID NO: 158737 - DNA, 540 bp, Enterobacter cloacae
gtgacgactgacagagggatacgtgcgtctcaacagggcgaactggactgtctttgcggtgcttattgtgtggttaacatgctgagctggctgtttgacggcagggtgaaacgacgcccgttaatgaaccggcttattcagacttatcagcagcgctggcctttgcatgaatggctgactgaagggattgaagaagaccgtttagactggctgatagctcaggtgctgcagaaaggacattacagccgccagttcccggttcaaatcaccagaccctttgccgggaagcggggattaacagatgggcggcttttcagggaaatgcagcggtttcttgacgtcactgaccattcccgcctgattatgctcagcgaccagtttcactggtcccttctggtcaaaatagatgaagaaacgctctgcttcttcgacagtaacgggcgaaccaccatgccccgtaaagctttctccctgcgtactggcgtaacccgccgccagctgtttcccgacgccatttacttcattgaacgggagttctga

SEQ ID NO: 158738 - DNA, 453 bp, Enterobacter cloacae
atgaccatgtttacccagcgtgaaacccgtatcctcgatcaggcgcgtgacatcatcagccggtactatcagcgtggcgttcaactctgttcccctgatgatgttcgacggtgcgtaatggttgagctggcaccgcttgaacatgaagagtttggcatcatcctgctcgataatcagaatcagctgctgcaccgcgaaatcctgttcaggggtacgttaaactcggtaagcgttcacccccgcgaagttatcaaacgcgtactgaaacataacgccgccgcagtcatccttgtccacaaccaccccagcggcgagcctgaacccagccggtgtgacatccagttgaccaaaaagcttcaggagctgctggaaatgctggatgtgcggttgcttgaccactttatcgtggcaggaactgaaacggtgtcgatggctgagcgggggctggtgtga

SEQ ID NO: 158739 - DNA, 930 bp, Enterobacter cloacae
atgagccgggctgcgttgcgtcaggtcgtgccggtggggcaaaccaccgtgtttgatgcgtatattggcggtcttgcaccatcgggacggcggggcatcatcagcctgttaaaccgtagtgccggcatacttaaacgcggtacggatgcagcagactacccgtgggaacaacttaactacgccgccgtcgctaaagtacgtgcggcgctgctggatgacggttacgccgtgtcgtcggtgaacatggcgctgtcagcaatgcggggcgtggcgcagacggccttttacctcaactgcatggatgccgaaacgctggcacgtatccggtctgttaagcgcgtgagcggcgatatccagcgtaagggaagggcattagacaggcaggaaatccgggcgctgattcaggccgctaaacagcatccgcagcatgtacggcgctaccgtgatgtcgctatagtgctgacactttgcggaacaggcctgcgggccggggaactggttaaacttgagcgccgggactatgacaatggtgttctcacggtcagacagggaaaggggcgtaaataccgtgaaattcacgtggcggatgcagtggataaggctatccgcgcatggctgaaagttggcgcagacgaggctcacagcgcactgttcagccgaattcagcgcaacggtgaggtcgccagccagccgctgactacgaccgggttaacgggtatcctggctgatttacagcagacgtcaggtattgcacgtttcaccccacatgacatgcggcggaccttcattacccgcttactggagcagggcgtggatatcaacaccgtccgccagctggcaggtcacagcgacatatccacgacaacccgctatgactgtcgtggtgagagcatgaaagtcagcgccagcaaacgcatcaggtgtttttag

SEQ ID NO: 158740 - DNA, 615 bp, Enterobacter cloacae
atgattggtaaccaaagcaacaaggctgacgccagatgccaccgggaacggaaaagcagtaacgaggtatttgaatttctggagaagaagctctatctggggcgggatacccggcaaaagctggcactgattgcccggaaactgacgggagcgggttttagcccggataaattcgctgcagagaaagcggcggatgtgctgagtgcctgcgtgaaccacatgtttaatgacctgctcaatgagggagagctaaacgggatttataggtcggaggaacaccccatgatagtcccggccaggtcccctaagtcactggaaatctacactgtttaccagcttgtaaaaggtcgttttgacaagcttcatacgggggagtcagatcgtgagaaatatgcttcggtagcagaaaaacttaatgagtatggaatatggaaaccccggttaaaacgactctctgacggtaaagaatgggcgcgtgaggatgttgcgtgggtacttcagcctgaaaatatcaatgcactgattaacgtccagaatcaaaagtacgcgcggttgagtgctgaagataaaactaaagccgcgtctggaaacggctcaaaagctaaaaacacctga

SEQ ID NO: 158741 - DNA, 198 bp, Enterobacter cloacae
atgaacaccaaccgtattttgcgtaaaaaagaggttcttcatctgacggggatctcgtcagcgacgttgtaccgactcatctcgaaaggagtctttcctttgtcaaagaagctaacgggcgacagtggccgggcggtgggttggctggagagtgatatcaataactgggttaacagtcgtatgcaggcgggagaataa

SEQ ID NO: 158742 - DNA, 447 bp, Enterobacter cloacae
atgaaagagataatagctaaaacaagttctgcgaaagaaatagcagtcccctggtttgaaaccatggggaaacaggttgggttatcgaaacgtactaccgctgccatattaagggaacaacagttgcggatacgtaagcttaaccgggtatctgcacggattttgtctgatgccatcaaaagaggggagcactggtgggaggatgagtgcaacatatacggtaaaatagcgtgcattcttgacaggtgtaaatacattccatgtggaagtggagcctgtgcgcagtgtaacgctgctaaacaattacattaccagggtgtttcggtggggaatagtttatcgggtcatacgacgttaaatttagattatttaaggccgactgatgatgaatattcatctggctggactgcaaatgacttagttgaacggcatcaggatattttttaa

SEQ ID NO: 158743 - DNA, 954 bp, Enterobacter cloacae
atgaacgaatcttattacttcagaacatcagacccggattacattcgccacgcaccgtcaaggcttgagattttaagtaaagcattccccactattattacgcagcaggaaagtgagcatgaattgcagcgtcttattcatttactaaataaactgaaaggcagcaatcgctgctacaacatcattgctcaaaaactcaggcagtgcagaaacggatctccatgcaacagtcttatatgcccgcattgccagcgggaacgcattctggcgcaactggctatgctgcatgtcctgccggggaattcagcagaatatgtgggagtggtcctgtttttcaacaaggatacgcaaactccgccgccatggaagaacaccgatgcgctcagggcgcaaattggtcgttataagcagaggataagccgggtacttaaccgactggggtacgccggtccggccacaggcacctttagtatgatgcgccatatgcctgatggcccagaagcgcgtattttctgggttccacagttgtgtttgttcctgcccaatgacagtacgttgattaaggggctaaaagcgcatatgtcgcgaagtagtggggaatttattgatgcgacgacagttaacacgccggtgatcgtgcccaggtataaagaccccgccaggctactttcatgcgccctggatcccgcctggcacacaacggattatacactgactgataaagacgctcttgttaagtccagagtagcgccattgaaaggtcggacactgttaaaaagtttactggccctggactcactgggaacaggtgccgtttctttttcgtttgggcaaccccagggaaagtgcattgatttcccggtaatgcagccactgcaatgcacttttgttgttgatcaaattgcagtggaacgacgggtaacactggcaaccactgcattttcgttgttgtaa

SEQ ID NO: 158744 - DNA, 1374 bp, Enterobacter cloacae
gtgaagatcccgaagtgggtttatgaccgtattactgaattaacggactgtgtggtgggagatacgcaatgggcggtcacccggcgacagacattgcgccggtttctagcccacatatggctggaggcagacgatgatgggtggactatatgcactgtccgggatatccgtagttgttacgccagccttctaagtgaatgtgaaatcaattaccagggcagggcctccatatccatgctagtcgatttcctgccgacattgccggatattgagtttcgtgcagggaaagcgaataaagacccggacaagcgtaaagccaatgcatggctgttcaatcccctgcggcctgtgtgtgatgagtctgccaggggtaagttaaatctggttgatgcggatacaggtgagtctgttagttttagagctctgcttcaggggaacgggaaagctcctgggcatgcgatagatgtagagaaacgccagacggccctaaaacaaacggaaaaggacttcttggccaaagttgggcgggggcgcatgagtatacagtttgtgaaggaattgcgtagccgtgagccggatcactattaccgcgcaggtatacgcagccttaaccatctctacaatggcagaattgagggacaatatgtcacttacgaccatcattatcgtctgacgtttggagggcggtattatgatcaagctttccagaatctgcccaatgagttcaaagctaaatttcggaccgggttactcaactatgacatcgaagcgtgcaatctggcctgtctgaaccatctgttcagacagtatgacgtcgattatcgtgtgaagtcatcgatatataaaaccatgatggaacataccgggctgacccgtaaacagtgcaaacagatggtccataccaccacctacagaattgggcgtgtgactattggtgttaatgatggccttggggcaaaagtgtatcagtggtgcggtaacagccaaaaaaaggcgctaaagattttgcgttggtggaaccgttatatcagtccattgaaatctgcgcttgagtcattgctggaacgtgtgcatggcacacaccgcaagagttgttcatcaccgcggaactatcacaggtacgctaatgaagtcggattaatactggatctgaatagtgaggtgtatcagcgtgaaaagactcaccatcagcaatatgcgagggataaggcactcttggcgtttatgatctgtggtgtggagcaggcgtatatccgtgaggtagtcagtctgaaccctggtggtgtctgcatgctcgatcacgatggggtagtggcaacgggcgccctttcactgccggactggcggggtttcacgatgaaggtgaaggactag

SEQ ID NO: 158745 - DNA, 1425 bp, Enterobacter cloacae
atgcaaaaccgttatccgtatcacagcaaatactcactttttaacacagtgagcctggatgaagataaagctaaacataatgaatttctctcagcgcttgagagcgatttttcatatttagacataaacgcagtcccggactctgtaaagccgctgaagaaaaaggttgaagagattgctggaagagagattttagaggagagaacgagtaaatatcagcttcagcaatgcatgcatttagtccatatgatgaatatggtgtccaaagtatggagccagagtgcggcatggtggcatacccctttctctctcgataagagtaagcctctcgctactattgaggattacagacacgatgaagtaatttaccgcgacctcgtttcattcagagaaatgctgaatcaccgcataaatattttcccgcaaatgtttgatctcgaaagattggtaatggatttcatggtttatttccccagaagtatgtatgactttcacgactctaacatcaagatgtatgcaggacaatatgaagcagcaactattcttacacatcttattcatcagcttaactttgagcatcgcgaaatatatgatgttaatggctttgatgaattttgtaagcaagcacttatcaatgaggcaataaaacatgcgaattatttcgttaaagaatgtgatgatttttttgaatatgattttgaaattgctgatattgactacggcaagctctttgacagtgaatgtggacattacgacgataatacattaataaaaatagtttgtgaaaaatttaatcacaccttaaggggtgacgattatacaaaaatctcatcattgattgatgtgattattttcatgaaacactatgacagaaaacagcctctctacaatggctcgacagaacaagctttttttgaatctagaagtgaaccctatataaggtttgccgcgatatgctttttaattaaagcagacagggataaattaagatttaactcgaaaaaaacaggggctggtaacaaaaaaattcacaccatcaaggaacttacactaataagtcgcaagctttccagagaagataactttgaggataaaatttctaaaatgtcagatgtcgattattcttttttaaagttcatcgcatatggactcagtgcaataacaaccgctatagaatatggtaaccccacaaaagaagggattgatgagtacaaaaaggtcaggaggttcaaatggaacttaatcgccatgatttattcgacaataggtcatttaccactgggaaatctcaaagattatctctcaattctgactgggaatttattgaaatttatcaaaagttccgaaatgatgggtgtacttaagcaaaactcaagggaagaatatttgagaatgaaggaaacgggagagctggacaagctgtaa

SEQ ID NO: 158746 - DNA, 324 bp, Enterobacter cloacae
atggatgatatatcagataagaatataaatagaaaaaagccaagaataaaaaagacattagaacagcagttggcttcagctcagatgcgtttaaatcgcttacaacataaatccaaacaggaatctaagcagatagaaacacgtcagaagatcatactaggtgccgaagttgctaaagctcttgattgtgatgttttcacaattgacaaggagcttgttttaggagtattgctggagatccaacatctacatcctgatgataaattaagattaagaaaaaatgggctgttatttctggcgagcatgaagggaaggaagacttaa

SEQ ID NO: 158747 - DNA, 378 bp, Enterobacter cloacae
atgaatatcgaagaaatatataaagaacttgaaaagcttaaatatcacgtacgtattcttggagatactattgattatcaagcccacccggtagagtctttaatcctttctatggattggaatgaagcggatatcaatagtgctcatgacatcttcgaaaaatatgatcgaaaaatagaaaataaggaagatatagagtggtctgaattcgaacatgaattgagaaatcagtttaacatcggatatcaaacagttaaacaaatagtcatagcattttttaacaatcatcaatggaccgatgtttgctatggatatgctatgagctttgaaccctccacccctgtagagtttcatcagattacacgaactaacaaatga

SEQ ID NO: 158748 - DNA, 468 bp, Enterobacter cloacae
ttgacacaagatagtgttataacaatagtaggaactattgttaccatacttagtatgattattaccatatggcaagcctctgaagcgcgtagttataaaaatcaaataaagtcagacattcggaaaataaatttaaccaatatttctgattctttaaagcgagcacaagaagaaataaggaaacttcccaccgcttcccaagatataaaacgagggatgcgcccgactgaattaatccgtaaaacgcgagaacattttgatttagccttgagcactataaatgctaatgggccagatggaaatatccgaacactcattattgaagctcaaaaaagattgaactcgtatgaaattactatgaatgaaggcacccctagccctcaggatgtacatgagcttcagagtaaaatacaagacgctgtatctataaccagcacagcaatttatcaaatggagggtaagatatga

SEQ ID NO: 158749 - DNA, 453 bp, Enterobacter cloacae
atggaactggaaagtgttgtcaaagttgcggccatctgtgcgtctgtcgctgcattaggtaacttagttactgccattttttcatatctggcaacaagaaaaaccacaaaaaatcaacgagaattaacacagagacagataatccttcctctatgggactatatttctgccttaagtaaaattgatccacaaaatcctatcaccccagatatcgttaaaaatatcaatgcgctggagctggtagcgctatgttgtgaggctgatattgttgacgagaaagttattatcagaacattctccgaacaatttattcagcactttgaagacattaaaagctgtcaggatataggtgatgggagaagcggtacgtcactcatcaaagaaaaccgggctgcagaagagttttatgaccgtctgaatgaagcgagaaaatcaaccgggagaataaaatga

SEQ ID NO: 158750 - DNA, 1068 bp, Enterobacter cloacae
atggctgaaaatggccctcgcgaggatttggcaaaattagtagcaagcaaattgctttctcgctttaaatggcagcaatatggtcctatagatcaagatttcccatgcataaatgaagatgaacacaagcctgaagacaaagcccaggctcatacacatccagtagatgtagtctttcattacaaagatccatatttaaataaaacaatatatttaaatacagatttgaaaagttacgctgcaggttccctgtcgccaaaaatgattgagaattcattgaattccttgggtaaaactattaactgtgcgaagcgtagtaaagaatgggcaaaaaaatacagtacccaacccggattaagtgaggtaagggggcttttatttgtttataatcatgataatgattttaagcataatttctacgatttcttctatcctcccaaaccagataaaggccgtagagcaacagccgtaaatttagaaaatataaagctgaccactgggcagcagatccatatcattgagcctcgcactattacttatttgatgtcagttgttggggatatgaatgagttgattgccgaatgtaagtttccacggaatgagtatggattcttttatcctcagctaacctatcataaagttcttaatgctgaggagtatcttccggctacaatagaaacattaacatcgccttttatgattctcaagcatggggctgttaaagaatacgactcttcgaaggataaattagtagaagtatacccagatggatatgtagtatattacaacgggaaaactaatagcgaccttgaattctactatttacttgatttattaagtaactatcaaatcctgaatgcaaaaaacaaaataagaataagggttgcgtctatagacaaagacgaatccttgaattctcactttgttagggcaagagaaaagtatgcaatggattggggttatgatgaagatatgaaaaagtatctcgattcaattgagatcttttctgtctcaatacaaaaagaattttactctagcgaagaaaggtcttgggggcttgttaaatga

SEQ ID NO: 158751 - DNA, 222 bp, Enterobacter cloacae
atgaaacaacaaccgactaaatacgcggtcgatgaatgggggaacctggtcaacgcagaagattttcgctctccctcattctggaaactgtactgcttctactgcaagagtccggtagtacttgttcttgccccgaacgggcaggtatcgcattttctgcatgatgaaacctttatggcatcagccgatttcatggcatgcccgaacgtggaatgttcctaa

SEQ ID NO: 158752 - DNA, 303 bp, Enterobacter cloacae
atgaaacagccagagaacacgatcgcggtaaaggtggcggaataccgtttatacatcacccggctgaagatgtgccgggatagcttgtttgggtgttgcagtgataccgagcggagtggctggcgcctgagagcctttgagcagttaagtaaagcttcactgctctactgccaacgggcaagttctgccgatacccgcaagtttcaacaggcctgtgaaggtctccagcaacacatcagtagagttttaccagaaggtcagtggtgcggtgatttggctgcattacctgctacccacgaataa

SEQ ID NO: 158753 - DNA, 1281 bp, Enterobacter cloacae
atgacaaaaaacactggagagtgcataaatagaaaatgtaaaaaacctatttccgagtatggagaggccaatgaaaatcgttattgtgaagaacattatcagttatctgtagaaaaaaacaaaaaaaatcttcaaaaaagaataagtaaaattgctgacagaaccatatccattaaaaaactccgaaaaatagaagacttaatcagcaatggcaagatcaaagaagagattgagagaaaaaaaataaacaaaaaatggacatctgaaagtattaaaaggaaaagtgatgttaacgacatactaaagtcgagggaatggaaaaacacacaagaactcatcaggagaagaaatgttttttgtaataaaaaagaattcatgaattatgttcagaatgtatttcaactatattcattaaaattactatttagcagagaatatctaaataaagataatacatataaaaagcatgtagaaactccactgataaaccttattcccgttgttacaattaaacttgaagtggcttttacattcaacattcaatccagtgttagcatgagtagtgatgatgtcattttagtacctgaaagaataagaaaaatgataacactcaaaaaggcattgcttaataagaaaagaggaggttatgtacctaaagatttaaatgacaaaagcagcaaaagaaaagcaaaagaatttaaaattaagaaaagcaagataaagaaaaaaagtaatggtatctatcaacagataaaacgtgaaaatagtctggagaatgtcatttcatttatggatagcataagggccaatttaaaacacgaacacagaaatatctttagcacatttccgcctttttttaataatccaatagaaaagtctttaccttttttccatttagcacaatctcaatatgttagaatttttaaaaaagacgctgaaaatgtgtttatttcactagaaaaagaactatctacttttggtatttatttagaggcgtatggattgctaagtttacacgaattaatgtcgggaagagcgattggtaatgatctgataaataaaaccagacaatggattgaaaataaacaaaaggagaaaagtgacctttacaatatcatggtaaatatacagactgaatttgaagttgtatttaaaataaaaataagcgacaggcgtatattttcaaaaatgtacaactcatatttcagtgaggatatcgtgcaagtttcacccataactggcgaaatagaggtcataagaaaaaataataatacaaattaa

SEQ ID NO: 158754 - DNA, 222 bp, Enterobacter cloacae
atgaaaatcatcagtaagcgtcaggcgatggaaatttatcgtctgcatcctgaatcccggttgtttcgtttctgtaccgggaaatatcgctgctccgggagcgtatgccattactacggtcgtgaagttcaggatatcaacggtgttctggctgtctttgccgagcgacgccaggaccggaacggaccttatgtctgtctgcgcagcgtcactctcaattaa

SEQ ID NO: 158755 - DNA, 351 bp, Enterobacter cloacae
atgtcgaataagacactgacaatgaatgacgatactgccgagccctggtggggcttgagttgtaacgccatcccttgttttggtgcacgtctggtccaggaaggtaatcgcctacattatctggctgaccgcgccagcataataggtcagttcaatgaagcggatttaatccatcttgatcaggcattcccggtactgctgaaacaggtggagctcatgcttaccaacggcaaactgaatccccgacaccagcattgcgtcacgctctatgcaaatgggttgacctgcgaagctgatacgctgggttcctgtggccacgtctatattgccatttaccttactcaacgctaa

SEQ ID NO: 158756 - DNA, 921 bp, Enterobacter cloacae
atgaaagctagtgaagtcatgaaggcggtaaagacgtggtttaaggtgagcaattatgatgctttgcaggagatcacgattgaagacctgaagagggaagcgtttgcccgattgaggttagctaaacatgattttaatggagagttgaatgacgacgacgaccgtgagatccgccagcgttatctggactatgaagctaaaattttagcgggaaagcctttattagtaagtccaagcaacgctcctgctcctacctatggaaaagactacccactcaggcaggcagtggaaaatcctctccagaacgcaaaaatatacatcaaacacatcaccgtagcggatgctgcgaaatatgagcgtcaattaagagagataaagatacttaggcgtatggggcttaaggaagaaggggtaaccatgccagcctcagaagagattggtcggtggcggttgactgatatcgaaatgcttcatccccacaagccactttatctggaactcaacatcagaaggcttactgacgaagaagtcatcgaacatatgaagcgtatgcttccagaatggcgcaggacgcatggtatcccggaaccgttaacgggaacattcaggttcgggcttagcacgatcaagaggctaattaacttcaggatcatccctctactggatctgctgttctgggccaagagaaacaacgaaaaaatttcctatgaacagcttagcaggcttctttatcccaatgattctgaggatatcagaggtggatctcagatcaaagacacggataagccattggctgacaaagtgcttacccgtgagtttgataggatgtttaacatctacctgagcaaaaatgacagcatgatacacaccaaagttgctgaggccttgaagatgaacgaaaaagagcagcaagaggaataa

SEQ ID NO: 158757 - DNA, 684 bp, Enterobacter cloacae
gtgcttacgcccttgcagttcatcgagctccagtacagtgaactggttctggaagctgacgttgttcttgcgagagaagtatttcccgtagctgccctgcgacgtaaaggcgtagagctgctgaccaatatccttgaggcgctggtcattttcttcttccaggcagcgctcagcgatgtcgtcaaccttcatctctttacctttctcttcccacaggcgagaaaggacctgtttcaacgcagagatttgccattcatccagcaagcccttagccgaagccatcgcacaaacgaggctgactatcgcgtcttcttcgtcctcgtagttctgtatgagctcaaacgggttgaggcagacgtgcgttccttcttcaaagtgaacgaagtcgccattgagcatttccgacaacttctggtaggacttaccggcatcaataacccagacctgagccccctcggacaagtaggaaaaaatcagttcgttggtaaggaacgatttacccgagccggattcggctgcgatcaccaggttcttgttggtattactgtcgtgaagagacagactcatgagctggccgttgcgggaaatcagcgctgcatgataggtcccggtccccttccattccccaaacaccggcaggaccacagcagcctgctcggttgtcatggtcttgtagcggaatag

SEQ ID NO: 158758 - DNA, 522 bp, Enterobacter cloacae
ttggatcaagccattgtcgtagatacctttgttggtcttggcaaatatgcgatctgtcgtgtggtgctggaggaagttaatccgttccttgataacagatgtcagcagctcgtgacggaagccatcacgcaaacccatcatccggtacatctcctgattgatgtccggggagcggaacaggacaaactggagcgtagtcttcgacgggaactcctgattcaggaaaccgttcattcgctcctgaactttttcatcggcaccacacaggggctcacacatgaaaccaaagcctgcactgtgatcatccataaggaagacatgatcgtcttcgtcataggccaggacaggaataatcccggcagctcgcaagtgctccgggatcaacgtttcttcgagtttctttttgatggttacgatcattcagcactctccaaccatgatttcaggttcttcggacgtcctttgctgacacgaccatccggagcaacaacgaacggaacgccctcaatcccaatgaaatga

SEQ ID NO: 158759 - DNA, 489 bp, Enterobacter cloacae; identical to SEQ ID NO: 25123

SEQ ID NO: 158760 - DNA, 150 bp, Enterobacter cloacae; identical to SEQ ID NO: 99366

SEQ ID NO: 158761 - DNA, 963 bp, Enterobacter cloacae
atgcaacaaacattaaactttgatctatcagaacaacccatcccagtgcttttgcgtggggataagtgggattctgtttggtcagaactgactgataacgaggatttgaacttcgttgatgccagtagaggaaccagtctgtcatcgttgatcacgtcatcggttgagtccattcacacggccttaattgatgggtggaccatgatgatcggctattccagtggtaaagattctgaaacggtcttgcacctgttcctgatggccctgatccgggctgtaaggagtggggcgaccatcagccagcaccacttcatcttgcacactgacacactgatcgaaagcccagaggtaaggtggctggcggatcagaaactggccgagctggagcgtttcattgcgaaggaaaaccttcctctgaccatcgttctagcaaagcctgggatctcgcagagttggacgggccgaatccttactgggagggggttgcctacgttttccaactccacggcccgccagtgtagccaggatttaaaaatcacctctgccaaaagagcgaaggcagcttatatgcgagagcttcccaaagaggttcgacagaaagtctgccttttgctgggcagtcgtgatgctgaaagcactattcgtgcggccaacattgcaaaacagcgaggaagctcagatcgcgtcattaagacgaaagatgggggtgagctgtatgtggtgaaaaactggttggcgagtgatgtctgggagttcttactatccgctggcatgggctcagcatatcctctgccaagttacttggagagcaatgttgtggtcaagtttttttggacacgccgatcagatggtagggttatgcacaggcgggcaactgggcggcagggctggccagcgtttcgtactgtgcgggtgatcggtagccaagttttgaatgcaatcgggtactgttataaaagttaa

SEQ ID NO: 158762 - DNA, 336 bp, Enterobacter cloacae
atgtctatcaataccaaagttgaacaaatcgcatacggtcatgctaccgctctagtgctcagtgaactgggccaacaagagaattggtgcaaggcttatgagtatttgtctgagtgtgtagaatggaaagacattctggagcagatcgagagcgaagccgagtctctgctttcgactattaagtcggttttaggcttggcccacaaaggcatcattcagtcagcaattgactgctctctggattcggacatgacccagcttgacctgattggaatggtcgagctcggaagtgaaatcgaagatggggagtgtgctggaggtggctatgcagcttaa

SEQ ID NO: 158763 - DNA, 540 bp, Enterobacter cloacae
atgtctcatctgaacaatctcaaatccgtaatgatctctctcgccgccgaacataagctgcctgaaatctaccaggatgacatcactaccgatgtggagtctctggatcgattcgatggtttacgtctggtctggctgttgcggtcttgcggcagcgtattggtgccagcggaagttggcgttaatccgatctatatcacccattggttgtggtctaaccacggtcaacaggtggttccattctctgtggatacccgcacggggttgattgaaaaaatcgacttcgagcaagctgaaaagatgatcatgcagatgccttgcaacctctcttcattgcagaacaaggaatacttggttgaccaggtaaaccgagtattgcaacgaggttgtgaaatgcgtatctggggtatcttcgagtctccaagctcggtggaatccgttggtggttggaaagagtggcagagctatttcagctctactgggaatcgactgatggccgatttcgttggtaaagccattcgattcaccaaccctcgataa

SEQ ID NO: 158764 - DNA, 561 bp, Enterobacter cloacae; identical to SEQ ID NO: 102670

SEQ ID NO: 158765 - DNA, 606 bp, Enterobacter cloacae
ttgcttggcgtcgatcaggtcggcgggtgtcatctggccgccctcgcgggcaatcttgagcaggcggttctggtgaaccagccgctcgatgccggtaggcagatcgagtgcctgccatgccttgaggcgttcgatgtgttccagcatatgccgcgaatttggcttggccggagactggcgcaaccaagccaaccaggtcgtcttgccgttgtcccggcgcttgagcagatcgtcgaggcggcggcgatgcgcgtccgccagtggttcggccaaggcgtcgtagatgcgccggttagcacgggtgatcgcctcggcactcgcccgctcgacggcgttgagggcgggcagaatgaccgactgccgccgcaggtgcccgatcaaggcgctggccagcacgatgcctttgtcggtttgcatcgccagctcggtcagcatctggacggcctgccggtaatggctcatggtgaagggccggaaaccgaacacggtttgcagctcgctcaggtgctcgcgccgggtctgctcccgctggccgtactcgttccagctttcgacgccgaccttgagctggtcggcgaccagcttcaacaagggcgggaacggtag

SEQ ID NO: 158766 - DNA, 561 bp, Enterobacter cloacae; identical to SEQ ID NO: 15275

SEQ ID NO: 158767 - DNA, 735 bp, Enterobacter cloacae
atgaacactaatgacactgaactacttcgcttatttgatacattaacgacagaacaaaagattggtatcgccagacacttactgcaaaacaaagatattaaatcaactacagttatcgccaaagaagaagataaagcgatctcattttcccagccttatgtttttgctttcacatctaactttcgtgttttttctgatctggacatatctaagaatgaattccgtgtattaacttacatcttggaatacatggagtttggaaaccttattaacctttctcaggcatcactctgtaaagcgttgaacatcgcatctagtaatatgtcaaccatattcaaaaaactaaaacagaaaggcattctcgttgatcatcatggacatctttatattaactcaaacatctttgccaaaggtatgagtcatcaacttgatgaaaagcgtaaagagcatttaagcaatgcaagaaatgttcaggctgagattgaacaataccctgatggttatcaaaatctttctcaacaggaaagacgaggattagccctcgaaacagtaaatcaaaatgtttatacagatgcttttatttttagcaagaagaaaaagaacaatgcagttcctaatgctaaaaacagtatcaagatagataaaccccgcaaggtatataaacgaacaaaagaaaatgaagcaaatagacaagatttagttaatatcactaaccacttaaaagctgtttcctaa

SEQ ID NO: 158768 - DNA, 792 bp, Enterobacter cloacae
atgaaaaaactacccggttcacttgaaattaaactgcatgaaaaactatctaaaaacgacattctgaatgtcttagcagaacatatgacgatgcttgaggaaacatttggcattgaagagttcaaactctattcttttcttgaatgttatattgatagtaaaaaacagtccttttatcatgaagaacataatactgttgtaaattcatttgacttacaaggtaatgagaaacttgagaacacagcaaaaataatttcaaaagatggtaataaaagaatcgtctcttttgataaaaatatcgatgtagatagaatacgtttaacagttggaagtattcagaagcataatccgtatcgatattggtctaacaatattcaagtcattccatcatcagtagtcagcaacatcattcaagataaagaaagccaattacaattagaaagagataaactttacttcctcaaccaactgagacgtaaacaagaagaggaacaaaggcgtaaagatcgtgaggaatttgagcgtccattaaaatcactcattgctaaaaagatcatggaaagtggcctcactgatttagagttcaaaagaacaatatgttcaagctatgactatataaaaagccgtactgtaatagctaaatatctagtcaacaagcctgatttgttagaaacatatcatggctcccgattaatacgaatgtccattaaaaatgatgaaggtaaagttggtaaagttgaactttatgatctttctggaacactaatttttgaaagctataagaacaattaa

SEQ ID NO: 158769 - DNA, 501 bp, Enterobacter cloacae
atgtcattagataaacatttagaaaatgtaataaaagaaacagaaaacaatactaaaaaactggctccattgctccctgaacataaaccccggtatccgctgggaactcatcgcaggcgcgtcgataatcgggttgcaatgtatgcaattttcttcgtgctcagaacgggatgcgaatggaatgcgttaactacgacgggtatatgttcatcaagcttagcccaccgtcgagttcaggagtggcgtgatgccggggttttcgaacgcttctggcaaaacgggttgcttgcctgtgagaagctgggtgtcatcgactggtcatggtcatggtcatggtcatggtcatcgatggatggttgcatgacaaaatcgccgcttgctggctcaaaaaaacggggaaggatcccaccgacaggggaaacagggtgcaaaacgcagcctgataaccgatgcgaacgggctaccactctcactgattgtctccggggcaaatacccatga

SEQ ID NO: 158770 - DNA, 405 bp, Enterobacter cloacae
atgagtctacatagacaatttatgaatactaaaatcacagaaattaataataattattatgaaacttgggggatacataatcaaacaagtagtgttaactctaatattcaatccttaaaatccgaatccactcaattaggcataagaataaatgaaataagaaaagaacaagctattgcttataaagataatcaagaaaaacaaaaaaaactgtttttttattttaaaacacttataacggaactggaaacaacgattgaaatattaaaattgatcggccaagaaaaaccagaattagacagtctaataaaagaaagcattgtgaaaaataatgcagatgtaaataataaagataaatttaaaaactatttaactgaaataatgcaaaatagtataagaggataa

SEQ ID NO: 158771 - DNA, 840 bp, Enterobacter cloacae; identical to SEQ ID NO: 6027

SEQ ID NO: 158772 - DNA, 510 bp, Enterobacter cloacae
ttggtcagacccaggttgatcgcgtcggccaggatcgtcgtcaacagcaaggttttgtccttggccgtgtcgctggtcttcaggtgtgtgaagtggcgggtgaagcccgtccattcatcgacctccatcagcaactcggtgattttgaggtgcggcagcagcatagctgtctggtcgatcatggcttgcgcggcgtctggtactgccgcgtccagcggcgtgatcttcaggcctgacgcggtggtgatgatggcatccggtaagtcgttggccgcagccatgcggttgactgtggcgagttgcgcctccaacaattccaaccggtcatgcaggtattggtcgcagtcggtggccactgccagcggcaattcgctggccagcttcaaagtggcgaacttctcgaccggcaccaggtattcgtcgaagtccttgaactggcgagaaccctgcacccagacatcaccggagcgcagcgcgttcttcagctccgacagggcgcataactcgtag

SEQ ID NO: 158773 - DNA, 495 bp, Enterobacter cloacae
ttgcaaggtcaacgcatcggctatgtccgcgtcagcagcttcgaccagaacccggaacggcaattggagggtgttcaggtggcgcgggtgttcaccgacaaggcttctggcaaggacacccagcgtcccgagctggaaaggctgctggccttcgtccgcgagggcgacaccgtggtggtgcatagcatggacaggctggcacgcaaccttgatgacctgcgccgcatcgtccaagggctgacacaacggggcgtgcgcatggagttcgtcaaagaagggctgaagttcaccggcgaggactcaccgatggccaatctgatgctgtcggtcatgggagccttcgctgagttcgagcgcgccctgatccgcgaactgaacagcgaacaaattgccgagttgaaacggcgagttgcggcaggcgaccaaaaaaccttggtggcccgtgacttcggcatcagccgcgaaaccttgtaccagtacctgcgggaagactga

SEQ ID NO: 158774 - DNA, 588 bp, Enterobacter cloacae
atgcgatcttttaatgtaaataaaaaatatttaccaatacttcctggacttgcgttatgtgcagttttaagtaatacaaatgcaagcactgagtatcaacatgatgctgacctaatcgctcagcaagcaaaagggcttggggcacaggctaaaggtgcacagcagccagatggggctcttagccttgatgctacgctaaaatcaccagatgtgcagaagtacatagcgcaagctgaagcactccaaaaaaaccaggacctgagcaagcaaataaaccgtggttacgtccccggtatgaatgcggatagtgttcaagcagttatagaccatacccaggctatcagggcccaaagtaataactctgaagctgtcaacgatataattagaagacgtgatgaaattcaagaaaacgccagccttaatgaagcggctctgaaagctgtggaaaataagccggaagtcatgcgaggacaatctaaaaatatcgaaaaattgtttggttcctcgggcatcacagctgctgacttcgaaagaaaaatggatagcacacgtgaagaagcactatcaactgaagaatatttttactag

SEQ ID NO: 158775 - DNA, 855 bp, Enterobacter cloacae
atgggaagtggatggcatgaatggccgctggtgatcttcaccgttttcgggcagtgcgtggccggcgcgttaatcgtgatgggcttcgtctggcttaaggaaaatgatgacaaggccagcatgcgcatcgtgcgcagcctgttttttctctggctggtaatgggtattgggtttatggcctcggtactgcatcttggctccccgctgcgtgccttcaactcgcttaaccgcgtgggcgcgtcagcgctgagtaatgagatcgcggcgggttcgatcttctttgccgtgggcggtttctggtggctggtgtcggttatcggtaaaatgcccccagctttgggcaaaatctggctggttgtcagccagatcctgggcatcgtttttgtctgggcgatgacccgggtctatcagattgagactgtcccgacctggtatacgggttacaccacgctgagcttcttcctgacgatggttctggctggtcctctgctggccgcgctgctgctgcgcgtcgcaaacgtgacattcaaaggtactcttgccgcgtcagtcagcgcactggcacttatcgtctgcgtggcggtcatcgtgttgcaaagcaatacgctggggacaatacagagttccatccagcaggctaacgccctgcttacggattatggttcgcttcaggtatggcgcatcgcgttgctggcggcgggtttaggctgctggatctgcccgctgattcgtcgtcaggagccaaaaacgctcggcctgtttgcaggtgtcgtgctggtggcgctgggtgaactgattggccgtgggctattttatggtctgcatatgaccgcagggttagcaattgcaggttaa

SEQ ID NO: 158776 - DNA, 162 bp, Enterobacter cloacae
atgagctgctccattaatcgcatcctgcacacggatcagtttcatactcaatgcaccagccataaaccatccgtctttctggacattctctttgaaatcatcccactggtcgccagtggagaaaactgttcgtactgcagtatcaataatggatacatatga

SEQ ID NO: 158777 - DNA, 534 bp, Enterobacter cloacae
atgttacagaaagataatccaattgtaaattacaaaccctatacttttaatcataagaaggtatttatccaatttattatatttattttgattgcttttattgtattggcttctgttatatactctccttatattgtattaaattatcagggatatactttatctcaggatgctaattctgtagatatacgattaagaactattgaaaataaggcaaaaacgataaacaaaggtgataattattttagtgtctggtatccagatttttataccagtcctactttaattgctgtttctgaagatgatacagctaatcttcgaaaaagatcgaatcttattattaattcagatagaaaaagtaaaataactacggtatctttgaaaaatgttccagcaatttcttgtagtggtttttttaaccgtattaaagaaatatatggtaatgtttctgcctataatgtagataataaccaaacagaatgtggcagcattttttccacaaaaaaatacaatcttgtgtatcaattgaaatag

SEQ ID NO: 158778 - DNA, 333 bp, Enterobacter cloacae
atgttcaggtgcaaaaatctgcgcaaaggcaaggtcctttttatgtgctgttttgcgaccacaaacttcacccgttctgttatcgaagaaaactttacggtgacgatatgcagcagagttaaccgaagactgaccttcgcctctgctgatgttctccattttaaaactgtatatcgccatccaagtattcctcaatgccaaatgctgcttttcgttttacgtaaggaaaacgccggggttgacgttgaccttgattttgtttccgaaggaaacggttttagcctgcggcaggcaaccgtcggtagaccccacggcattagagcgaagcgataa

SEQ ID NO: 158779 - DNA, 486 bp, Enterobacter cloacae
gtgacggcctcgctgatgctcaggaaactcggcagctacccgcgccagaacggcttggccgtggcgttgcgcgagctggggcgcatcgagcgcacgctgttcattttggattggctgcaaagcgtggagctgcgccgccgcgtccatgcggggctgaataagggcgaggcgcgcaacgcgctggccagggcggtcttcttctaccgattgggtgaaatccgcgaccgcagttttgagcagcagcgctaccgggccagcggcctcaatctggtgacggcggccatcgtgttgtggaacacggtatatctggagcgtgccaccagtgctttgcgtggcaacggcacggcgctggacgacacattgttgcaatatctgtcgccgctggggtgggagcacatcaacctgaccggcgattacctatggcgcagcagcgccaaggtcggtgcggggaagtttaggccattgcgaccgctgccaccggcttag

SEQ ID NO: 158780 - DNA, 144 bp, Enterobacter cloacae
atggcggtttgtttcaatagctttagccagccagattgctttctcttcgtttgtagcagcagccgtagcctgttcaagggcttcctcatactgaaccctgatagaacggtgatcgatgtgttcatcatgaccatacaggtctag

SEQ ID NO: 158781 - DNA, 336 bp, Enterobacter cloacae
  misc_feature (257)..(266): n is a, c, g, or t
atgagttttaccgactggccatggcggcactggtgtgcgcagtttgccgacaaacctgctctcaggctgaacgacgacgcgctgagctggcaacagctgtgcacgcgtatcgatcgccttgccgcgggctttcatcagcagggggtggaggagggtgacggtgttctgctgctggcctataaccacccgcaaacgctgatggcatggctggcgctgctccagtgcggcgcgcgtattcttccagtgaatccacagcnnnnnnnnnnagatgactctgcgctttgcgctggtactggacggcagctacgacgctcttcctgccctgagcatgcgtga

SEQ ID NO: 158782 - DNA, 273 bp, Enterobacter cloacae
gtgaacaacaacggcgggcagattttctctctgttgccaacgccccagagcgagcgtgagcgtttctatctgatgccgcagaacgtgcagtttgaacatgctgcggcaatgttcagcctgaaatatcaccgcccggagagctgggaacagctggaaacagcgctaagcagcgcctggaagcaaccgggcgcgacgctgattgagctggtcgtgaacgatgccgacggtgcacagagcctgcaaagcctgctggcacaggtgagccagctgtga

SEQ ID NO: 158783 - DNA, 1398 bp, Enterobacter cloacae
gtggcgattatcgacggcgatcggcgtatcacctatcgtaactttaatcaggcggtaaacaacctcgcgtccgcacttcaggcgcaggggctgcaccgtggcgagaccgcactggtacagctcggcaacgtggccgagttctacatgaccttctttgcgctgctgcaaatcggcgtcgcgccggtcaacgcgctctttagccatcagcgcagcgaactgaacgcctacgctatgcagatcaaacccgccgtgctgattgccgatcgcgatcacgcgctgttcgcgggcgatgatttcctcaacaccttcgtggatgcgcatcggtcggtacgcgtcgtgctcctgcgcggcgataagggcgaacatgccctggacgcggcgattacccgcccggcggacaacgtcatcccgaacccgacgcccgccgatgaagtggccttctttcagctttccggggggagcaccggcacgccgaaactgatcccgcgcacgcacaacgattacgactacagcatccgccgcagcaacgagatttgcggcattaccgcgaagacccgttatctgaacgcgctgcccgcggcgcacaactacgccatgagttcgccgggatcgttaggcgttttcacggcgggtggctgcgtggtgttagcgagcgacccgagcgccacgctctgcttcccgctaattgagcaacatcagatcaacgtcacctcgctggtgccaccggcggtcagcctgtggttgcaggcgattgccgacggcgcggggaacgcacagcttaaatctctcaagctcctgcaggtgggcggtgcgcgcctttccgccacgcttgccgcgcgcattccggcggaaatcggctgtcagcttcagcaggtatttggcatggcggaagggctggtgaactacaccgcgctcgacgacgcgccggaacgcatcatcaatacccagggccgcccgatgtgtccggacgacgaagtgtgggtggcagatgaacacggcaatccgctgccgcgcggggaagtcgggcgtctgatgacgcgcgggccgtacaccttccgcggctattttaacagcccggaacacaacgccagcgccttcgacgcagagggtttttactgctccggcgatctgatcgccatcgactgccatgagtcggtgatccacgccgcgctggtgagcatggaggacagcctgctgggcgaaaagagctgcgcgtatctggtggtgaaaaagcccctgcgcgcggtcgaggtgcgccgcttccttcgcgaggagggcgttgccgagtttaaactgccggaccgcgtggagagcgtggatgcgctcccgctgacgccggtcggcaaagtcgataagaaacagttgcgcctgtggctggctgaacgggcacagggctga

SEQ ID NO: 158784 - DNA, 2670 bp, Enterobacter cloacae
atgaataaacgtctgtaccgtatcgtctttaataaagcccgcggcatgctgatggtcgtttcggagctggcgcgcggctgttcgggcggatcgtcttcctccgggatcgggcacgcgcttcagcgtcttgtctgccgcgtcggcgcactcagccttgcgctgtggctggcctctggagccgtcacggtgcaggccgccgggattgtggcggacgcctccgcgcccggtaaacagcagcccaccgtgatcagcaccgctaacggcacgacgcaggtgaatatccagaccccgtctgcaggcggcgtgtcccgcaacacctacagtcagttcgacgttggccgggacggggccatcctcaataacgcccataaaaatacctcaaccgaactcggcggaatggtgaccgccaacccgtggctggcgaaaggcgaggctaaagtcatcctcaacgaggtgaacgcacgcaacccgagccagctcaacggctacattgaggtggctggacaaaaggccgacgtgatcattgccagcccgtcgggcattacctgtgacggctgcggctttatcaacgccgggcgcgccacgctgacgaccggtaccgcgcagatgcaggatggccggataaccgggtatcaggtggagcgcggtgagattaccgtgaacggcaacgggctggatacctccgggcaggcgcacaccgatatcatcgcccgggcggttcaggtgaatgcggcgattcacgcgcaggatttacgcgtcactaccgggcgcaacacggtggatgcggcgcatgaaaaggtgaccgcccttgcggataacggtgcggcaaaacccgtcatggcgctggatgtctcccaggtcggcggcatgtacgccgggaaaatccgtctgatcgggacggaaaaaggcgtcggcgtgcgcaacgcgggcaatattggcgcagaagccggaacagtcaccctctccgccgacgggcgtattgagaatagcggcacggtctggtcttccgctgacgtcgccctttctggcaccgacgccatacaaaacagcggctccctcgctgcacagcgcaacgtcagcctgacgggcaaaacgattgccagcaccggcacgctggcagcaggcgtgcagcccgatggcaccacgggccgcgacggcgatctgacgctcaacgccagcggcaaacttgagatgcatggactgaatgtggcgggtggcaacatcaggtccacggggcaggggttggatgcatcaggcagcgtgacgcaggccaacgccattacccttaacgccggacaaggcgacctcagcaccgccggtgcggaagtcatcgcgaatgacacactcagcgccacggcaaccggcacgctggataacagcagcggcctgctcgccgccgaccagctcacgctcacggcaaaacgcctgcaaaatcagaaaggccagataagccagagcggcacgcggggtctgacgctgaaccatcaggacggcattgataaccgcgaaggcatgattgccgccaacgccacggtaagcgtcaacgccgcgtcgctggataaccgtaaaggccagatcgttgccgccgataccggcagcgccctgacgataaaaacggctggcctgacggacaaccgcgagggtgaactggcagcagcaggcagtatcagcctgagcgccgacactctgaacaacagcagcggctttatcagcgcggaacacggccgcgtcgggctaaccagccgcaacgcgctggctaacgtcggcgggacaattgccgcccacgataccctgacgctcgacagcgccgggttgaacaacgacgaagggttaattcagtccggggcggacatgatcgtcgacactcacgggaaccgcctgtcaaacaacacgaccctgacgactggcggcatcgtcagcttcggcaccctgaacgtcaacgccggcagcatcagcaatcagcacggcatgctggccagcgcgaaagaaaccgtcgtaacggccgcggacgtggacaaccgcaacggtaccctgagcgccacaggttcgctgaatctgcatgtggggtcgctggagaatacgcaaggcacgctggtatccggcggcgatgcgcggatagacgcatcccggatagacaaccagaaagggatgattgtcgcccagggcgatcttgccgtcacggcacagcgtctggataacgacagcagcgggctggtccagagcggaagggatctcacgctggccgttgacggtatcagcaaccgcaacagcggggacacgggcggcatcgtgagccagggaaacctgagcataaccacgaccgatctgcaaaatgatgcgggcgtactgctcgccgaaaaacgggccacgctggacgccgcgcgctttagcaacatcgccgggacgctgtatgccctggatacgctgacgcttgccacgcacagcgataccgacaaccgtcagggggtcattcagggaagcgggctcgttcttgatacgcacggctggcagctggataaccgcgaggggacgatttacagcctggcggacatgcagctcgccaccgctgcgctgaacaaccagaacggcacgctgggcgcaaaaggggagttcacgctgcgggcaacctcgctggataaccgttccggcgggcgtctggtgggtgagtag

SEQ ID NO: 158785 - DNA, 744 bp, Enterobacter cloacae
  misc_feature (641)..(650): n is a, c, g, or t
atgtcgttgaaaaagtcatccctgattgtcctgttctcactgcttttgttctttgtggtcagcaccgtcaccagcgttggcctcatcattaaaagtaataattccctggataacgtcaacaaagagatccaggttgtgctgtcgattattgaccccatcaaccatagccgtacgctgcgcgttcgcgtgatggagtatgtgaagatggtggaagcgggcaactcggcagacggggcggcgaagcttgccgccgtgaaagaggtgctgaccaaagcggaccacgcctttgcggcctttatggcttcgccgcgactcacggatgaagcgccgctggtgagtgcctatcaggatgcctggcaaaactaccgtaaccaggggctggcgccgctgatcgatgccgctgaggcacacgatgttgctaaatttaacgcgctaatcccggaagtttcccgcctcgaccgccagtacgaaatcgttctcgaccaggtcctttccgtccaccagaaatacgccaaaagcctgaacgaagacgcgaacagtaatttcgtctccggcctggtgatgattgccgttatcgcctgcctgtttgtgctggtaattgttgccgtcagcctcttcatgaagcgcttcgtctttgcgcnnnnnnnnnntctttgcgccggtcaacctggcgcgcgagcactgcagccagatcgccgcgggcaagctcgacattccggtgccggtgaaggggagttcgcataa

SEQ ID NO: 158786 - DNA, 438 bp, Enterobacter cloacae
  misc_feature (417)..(426): n is a, c, g, or t
atgtataaaaaacgcagacttgccgtgatgataggcatgctggccggaagtacctctgtttttgcccaaacggatatgacaagtatcgaagcgcggcttgccgcaatggaacaacgccttcaggacgcagagacgcgcgcgcagagggcggagaaacgcgccacggaagcagaacaaaaaacgcagcagctcgttgccgcgcagcagcagacgcagtcgacaacccaggcggtggcgcagcgcaccactgcgctggagaagaaagcggatcaaagcagcgggtttgagttccacggctacgctcgttccggcctgctgatgaatgacgcggcctccagcagcaaaagcggtccgtatctgaccccagccggcgaaaccggtggtgcagtagggcgtctgggtaatgaagccgacacnnnnnnnnnncacctacgttga

SEQ ID NO: 158787 - DNA, 402 bp, Enterobacter cloacae
atgctcgatgagccgaccaaccatctcgacatggagggcaaagaggcgctggcgcaaaccctgcagcagtttgagggcggcgtcctgctggtcagccacgatcgtcaattaattagccaaagctgcaaccgtttctggttaattgaagagggaaagctgagcgaatggcatgatgcagaatcggtattcgagcggctgtgtgaaagcgcgggactggtaacatccccagctcccgtcgacgccacgaccatgcctgtatccccctctgacgatctgcttgaacggcttgtcgcgctggaaacattgctggaagacgatctcgcgcggaagccaaagcatcaaaaaccgcagctacaggcacaatggcgtaaagaaattaaggagatagaagcacagctgtaa

SEQ ID NO: 158788 - DNA, 333 bp, Enterobacter cloacae
atgggcgtagaagtgatccccgctcagacaggcaaagttcacaatatccgcttccgtcagggtgcgacgcggcgtcagcaggctgtcgcccggcagcagctcctcaaagtattttcggaacggatgcacgcgaccttcctgcacggttgcgccgcgcacccactgcttgccaatggccgccagcatggtcggactgccctgaatcgccgtgcgctgcaggtagtgcttcaccgcgcgcaggccgcccagttcctcaccaccgcccgcgcgaccgggcccgccgtgcaccagctgcggcagcggggagccgtggccggtggactctttggatga

SEQ ID NO: 158789 - DNA, 477 bp, Enterobacter cloacae
ttgcgcgccagcggattaacggtcagcgatcaggctatccgcgacggcattcagaatgcgctgctgccgggacgttttcagatagtgagtgagtcaccgcgcctgatcctagacgtggcgcacaacccacacgcagcggcgtacctcgcaggacgtctcaaatcgttaccaaaaaccgggcgcgtgctggcggttatcggtatgcttcatgataaagatatcggtggcacgctggcctgcatggagagtgtggtcgatagctggtattgtgctcctcttgaggggccgcgtggtgcgacggccgagcagttgatggaacatctcggcaaaggcgcaatctatagtagcgtggctcaggcctggcatgccgcgatggcggatgctaaaccagaagataccgtgctggtgtgtggctctttccacacggtggcacatgtcatggaagtgatggacgcggggagaaccggtggcgagtaa

SEQ ID NO: 158790 - DNA, 2478 bp, Enterobacter cloacae
atgtcctctccctctcgccaaaaacaggtatggtccgggatcgtgctcgcgctgttcgtcgcgatcccgcctgcgtgggctgatgacgaattcaacctgcggatccttgagctggatacgccgctggaaaataccgctacgctcaaaaacttcattaatgataacggattgctggcagggcgctatctgaccaccatcatgtgggatcgggacgtcgtggataaacgcgaggtcacctatgtgctttctgacgataagcagcagcttctgccggagctgaccaaagcggatctgcgtgaattcggcgtaaacgtcgacgcggtgccggatctcaacgatctgaacgacgcggcctgcattcgggatatctcccatttcatcgaacatgctcgctacgattacaatcaggataaccagaccctgacgctggtcattccccaggcctaccgcaaccgcgcggctgcgggcgccattaacccgaaactctgggatgacggtgctccggcggcctggacaagctatcagctcagcggttctcagcagcactacagcacgggtcaaacctcatcaacctggcttggcctgacgtcgggtcttaatctgggcgcgtggcggctgcgcaacaacagtacctggagtgactcttcgggctgggaagccatcgccaccaccctgcagcgcgatatcaaagcgctgaaaagccagcttgaactgggccagacgtacaccaacagcgagctgttcgacagcgtgcagatgaccggcctgacgctggaaacggatacggcgatgctaccggtcagccagcaggggtttgcgccagtcgtgcgggggattgccaacagcgatgcaaaagtcaccattaagcaaaacggctacaccctttatcaaaccaacgtctcgccggggccatttgagatccgtgatttaagccaggtcgcctccggcgcggatctggaagtcaccgttgaagaggcggatggctcggagcatagcttcatacaggccagcgcgtcggtgccggtcctccagcgtgagggcgggtttaagtattcgctggcggccgggcgttatcgcggcaatgaaggggaagatgagcccacctttgtgcaaggtacggctatttatggcctgccgtatggcgtgacggcctacaccggcgctcagggggcgtcgatgtatcatgcactattgctgggggttggcgcggatttgggtcacctgggctcagcctcggtggatatcaccaccgcgagaaccgcctttgatgacggacgtgatgacgcaaatggactctcatggcgagcgcagtattcaaaagatattcccgacacagataccaccgtcacgcttgccagctaccgctattccacctccgggttttatacctttcaggaggctatcgatcagcgcgacagcgagattgatgacggcatttatacctatcgcagaaccaacaaccgccgaagccgcatgcaggtaaacctttcccagcggctttctgactggggttcggcgtatcttaacggctatcagcaggattactgggatatggacggccacgagcgtagcgtcagcgccgggctgagctccagctggcggaatattacctggtcgataagctacaacctgacccgcacgccagatgccgattccgatcggcaactggcgctgaacgtcaatatcccgttatcgcactggctctctaacgcgtgggcaaactacagcgtaaataccgcaagcggcgggtatgtctcgcaccaggtggggatcggggggaccgcgcttgaggataacaagctgagctttaacctccagcagacctacgccaacaaagatacgggctatggcggcagcgtattcgggcgctatcgcggctcgtccggcgaagttggcatggggtacagctacggcggggataaccgccagtggaactataacgctcagggatccatcgtggctcacggtcagggcgttacgctggggcagcccgtgcgggacgctttcgcgattgtacacatcaacgacggagaggatgtcaacgttcagagcggccgcggcatttataccgatgcgtttggtaatgccatcgtgccgtcgcttaccgcttaccgacacaacaccctcacggtaaacacgcaggaacgcagcgatattgatattgacgcggcaatgttagatctcgtgccgacaaaaggcgcggtgatactggcgaacttcgaggcccgcgttgggcgccgcgcgctggtcacgctgcgtcatcagggtaaaccagtgccgtttggtgccatcgtggcgcttgataacaccaacgcgattgtcggggatgatggcgaggtctacctctcagggcttaatggacacacatcgttcagcgcgcagtggggagaggcgggcgacgaacagtgttatggcgtcatcgatttacccgatgacaatggcgagggaatcattaataccgcggtcaattgccaatga

SEQ ID NO: 158791 - DNA, 885 bp, Enterobacter cloacae
atgggggcgatgctggacagcgatgatgcgttaacgcgtcacgaatggctgattgccccgcttttgcttcaggggagccactctcctgacgcacgtattttacaggcgtttgccgtagacattgatgcgctgacccgcgcttgtccgcagctgctgcagcagtccgatatcgtggaatgggatgagactcagggcacgctaaaggcgtttcgccgcagtcagattggcaaacttacgctcgggacgaaaccgctggcgaagccgtcagaagaagagttacaccaggcgatgctgaacggcatccgggaaaaagggctgagcgtactgaactggacgccggaagctgaacagtatcgtatacgcctgcactgcgccgcgaagtggctgccggaacacggctggccagcggtggatgatgagacgctgctggctacgcttgagcactggctactgccgcaaatgagcggcgtacactccttgcgtgcgctcaaggcgcttgatgttaagaccgcgttacagaatttactggactggtcattacgtcaacgtctggatagtgagctgcctgggcattacactgtgcccaccgggagccggattgccattcgttatcatgaggataatcctccggcgctggcggtacggatgcaggagatgtttggtgaagccaccacaccgtctatcgcagaagggcgtgtgccgttggtgcttgagctgctgtcgcctgcgcagcgtccgctgcagatcacccgcgatctgggcgcgttctgggcgggaagttaccgggacgtgcagaaagagatgaaagggcgctatcccaaacacgtctggccggacgatccggcgaatacggcgccgacacggcggacgaagaagtattcgtga

SEQ ID NO: 158792 - DNA, 696 bp, Enterobacter cloacae
atgtacgaattccgcgaccgtaccgcaaaagcttacggctgcgagctgctggtgcataaaaacccggaaggggtggcgatgggcattaaccccttcgtgcacggcagcgccaaacacacggatatcatgaaaaccgaagggctgaagcaggcgctgaacaaatacggctttgatgccgccttcggcggcgcgcgccgtgacgaagagaagtcccgcgctaaagagcgtatctactctttccgcgaccgtttccaccgctgggatccgaaaaaccagcgcccggagctgtggcacaactacaacggccagatcaacaaaggcgaaagcatccgcgttttcccgctctccaactggaccgagctggatatctggcagtacatctatctggaaaatatcgagatcgttccgctgtatctggcggctgagcgtccggtgctcgagcgcgacggcatgctgatgatgatcgacgacgatcgcatcgacctgcagccgggcgaagtcatcaaaaaacagatggtgcgtttccgtaccctcggctgctggccgctgaccggcgcggtggaatccaacgcgcagacgctgccggagatcattgaagagatgctggtgtcgaccaccagtgagcgacaggggcgcgtgattgaccgcgaccaggcaggctccatggagctgaagaaacgtcagggttatttctaa

SEQ ID NO: 158793 - DNA, 573 bp, Enterobacter cloacae
atgaccatctggcgtggcctgacgctggtgattaacgacggcgcgccgattgccggtttcgacccgggttaccgctggtgggggcgcggggagttgctcggcatctccattcccatctggatattcgccctcgtcgccctcggggggtatctggcgctgcataaaacccgctggggccgtttcgtctacgccattggcggaaacccggaggcggcacgcctggcgggggtgaacgtcaagcgcgtgctggtcagcgtctacgtgctgattggctgtctggcggggctggcgggcttcattctgagcgcgcgtctgggaagcgccgaggcggtagccgggatctcctttgagctgcgcgtcatcgcctcggtggtgatcggcggtacctcgctgatgggcggttacgggcgtattggcggcaccattatcggctccatcatcatgggcattctgattaacggcctggtgctgatgaacgtctcagcctactaccagcaaattatcaccggattaattatcgttctggcggtggcgtttgacacctacgccaagagccgtcgcggcgcactgtga

SEQ ID NO: 158794 - DNA, 537 bp, Enterobacter cloacae
  misc_feature (522)..(531): n is a, c, g, or t
atggagacggtagcgaattttattcacggcgaatgtgtcaccggttcaggccagcgcgttcaggcgatcttcaacccggccactggcaagcagatccgccaggtggtgatgagtacggcacaggaaacggagcaggcaattgccgccgcgcagcaggcgtttcctgcgtgggcgcgtcatgctccgcttaagcgcgcgcgcgtgatgttccgcttcaaggcgctgctggaagagaacatggatcgcctggcccgtctcatcagcgaagagcacggcaaggtcttctccgacgcggtgggcgaactcacccgtggtctggaagtggtggaatttgcctgcggtatcccgcatctgcaaaaaggtgagcactcagccaacgtcggcaccggcgttgacagccactcgctgatgcagccgctcggggtctgcgttgggatcacgccgtttaacttcccggcgatggtgccgatgtggatgttcccacatcggcaccatcgccgggaagttaaacggcgtgatccnnnnnnnnnntgctga

SEQ ID NO: 158795 - DNA, 345 bp, Enterobacter cloacae
gtgcgccagaccaactggcagttcagcgagtcctttaccgccaccacgtccctgctggaactggccgagcgcccggacgccatcttctgcgccagcgactggctggcgattggctgctatcaggcgctggcggtgaacgacgtgcgcatcccgcaggacatgctgctggcgggctacgacgaccagaagatctccgagcagctcactccgccgctgaccagtatccagctgccctacagcgagctgggacggctggcggtggagtacctgtgcaatcaggaagatgccgccacgcacgtgacgctggcgggcaggctgaaggtgcgcgcctcaagcctcgtctga

SEQ ID NO: 158796 - DNA, 444 bp, Enterobacter cloacae
atggcgccgctcaggagtgccaggatcaccagcgaaatcgccgacgctttcagcagggaacgcatgccggaggtggcatcgctgttgtcgagcgcgacgaccagcagccagtttgtgcccggcacggctgaggcaatgaaggttttgtctacatcattcagggttccgtcgaccggattaccgcgcttcagcgccgcaaagtcgatccctttgatcgtctcggcaaacggcttcagggtcaaagccggatcgttggcggcaatcacggtaccgtcactgttcaggagcagcccgctgctggcgggtgttgggtggatgccgcgcacgtttgccacgacgctatccatggcgacatcgcccgccaccaccgctttcaggacgccattttctttcaccggtacagcaaacgtcaccaccagctttccggtaccggcatcaacatag

SEQ ID NO: 158797 - DNA, 792 bp, Enterobacter cloacae
ttggtcttccgcgccagagccgttgctctgtggaatatcgccggtatgggcaacccaggcgactttcagttcgctgacgttttgcttgttaatttgatccagtgcggcgaagcggtcaccgtgtgtggtgttgccccagtgcgcccagttcttttgctgctcaccgggtgcgacgggtttaaccggaacgggttcattcgccgccacgagagtctggggcttaaacatccagccaaggctaaccagcatcgccacggccaggaccgccgcaacgccaaaagcaggcgccttgttgggggaattgtggtttgctccacgcaggtaaggccagacgatggcacaaaggaaagccagtacggcgaaggtaaacaggcgggagaagagcggccagaaatcccagcccgcatcgcttaccgcccagaccagcgaggcaataaacgcgatgctgtaaaggacaatcccgctggtgcgattgaggaaaatcaggatcgcggcaatcaccattaccacgcccattatcaggaagtaacaacttccgcccacggtggcgagcttaaaccccagcccgccgacggccagaccgatgagcaacatcagtccggcaagaagccactgcaggatacgcggtatcccacgtggcgcgctgccaaatgccatttctgtctccttagatcccgccgctatgccgggtgtaccagttgggtaataaaatcggcgggaataatgattaacacgggtgaattcatctttatcaaaagatttacgaaccatttggtgaattcgtggctatga

SEQ ID NO: 158798 - DNA, 240 bp, Enterobacter cloacae
  misc_feature (201)..(210): n is a, c, g, or t
gtggatatctcaatcctgatttatgcggtgattgcgctggcgggcgttgcgataggctggctgatttccagctaccagcatgcgcagcagaaggccgatcagctggcggagcgcgaagagatcgtcgccgagctcagcgcggtaaagcaacagcttgcgctaagtgaccactggcgcgacgagtgcgagctgctcaataannnnnnnnnnctattcgtcggcagcgtcagatgtgtataa

SEQ ID NO: 158799 - DNA, 384 bp, Enterobacter cloacae
gtgggctcggagatgtgtataagagacaggttgatgactctccagcgccacgtccagctttctgccgctccgcgccagctcctcctccatcatcagacgtaccgccgaagggcgctgcagggtgatgaaatccagcgtcagcaactcctcccatgccaggcgtttttttcccgcaagcgcggaatctttcggcacaatggcgacaaacctgtccagccccagcggcgtaaacagcaaggtatgcgtgggtgccggctcaaaagctattcccatctcaacccgcccttcccgcaccatctcaatcacctgctcgttgatgacatcatgcacggtgacgttaaccccggcatggcgatcgcgaaacgctttcagcacttccggtaa

SEQ ID NO: 158800 - DNA, 795 bp, Enterobacter cloacae
gtgttcgtcatcgccaatcagacgacgtttcgggtcggtggagagggtggttttccctgtgccggacaggccgaagaacaccgccacatcgcctttctcgccgacgttcgccgagcagtgcatggacgcgatgccgcgcagtggcagcaggtagttcatgaccgagaacatccctttcttcatctcgccgccgtaccaggtaccgccgatcagctggatacgctcggtcaggttgaaggcgacaaagttttcggagttcaggccctgctctttccactgcgggttagtgcatttcgcaccgttcattacgatgaagtcaggcgtgaagtcctgcagctcttcgtcggttggacgaataaacatgttcttcacgaaatgcgcctgccaggctacttcggtaatgaaacgtacggagagacgggtgtcggcgttagcgccgcagaaagcgtctacgataaacagacgcttgccagaaagttgatgggtgacgagccctttcagatgcagccaggtttccggagagagcggtttgttgtcgttcttccctttgcctttgtcagcccaccacagcgtatcgcgggtggtttcgtctcggacgatatacttatctttcggcgaacgaccggtaaaaataccagtatcgacggcgatagcaccaagattcgtcaacacaccgcgctcgtatccttccagtgctggattgagctcttcctgatacagcgtatcgtagtcggggttgtagacgacttcctggacgtcgtgaataccataagccttgagatcttgcggggttaa

SEQ ID NO: 158801 - DNA, 390 bp, Enterobacter cloacae
  misc_feature (329)..(338): n is a, c, g, or t
atgacagacacaacaacccgcttgcgcggcgaaaaccttacccttggctacggcaaaaaaatcattgcccgtgatttaaccgtcgctattccggagggccacttcacggcgattatcggcccgaacggctgcggcaaatcaaccttgctgcgcacgctgagccgcctgatgaccccggttgagggcagcgtgtttctggacggagagcagatccagcgcttcgccagcaaagaggtggccaggcgcatcgggctgctggcgcaaaacgccaccacgccgggggacatcacggtgcaggaactggtctcgcgcgggcgctatccgcaccnnnnnnnnnnccgcaccagccgctatttacccgctggcgtaaagaggacgatgaagcggtaa

SEQ ID NO: 158802 - DNA, 441 bp, Enterobacter cloacae
atggctgcgcggttccagaatcgctttcatcgcctgggtgaccaggtcgtgctcgtggcgatctttttcggacgccagcagcttattacccgcctcgcgatccagtacatcgtccggctgacgacgcgcggagcctgccagcggcagcgagctaaagtgtgcgccctctttgcgcagcagcagttccgggctggcgccgagcagcacgcccccgtcctccagcggtacgtggaagttaaaactggccggattctgcgcgataaggcgctccatcagggcaccgctgtccagctttttgtcagccgcgatatcaatcaggcgcgacaacaccaccttgttcacctgcggggtggcggtgagcgacgcggcacgcgcgaccatctcttcaaacacgggctgcgcagggatctcggtgcgttgttgcaccttcagcgcctgtga

SEQ ID NO: 158803 - DNA, 642 bp, Enterobacter cloacae
atgtttgcgcgacatgcgctttaccgcctcacggcagcagagaaaatagcccgtgacgttggtgctcagcacgcgattaatgcgttcagcggacagattttcaatagtggattgctcaaacagaatgcctgcattgttgaccagcgcggtaaggggctcaccttcgcgatcgaggctgtcaaacatggccatgacctgcgcttcatcgctaatgtctgcacgcagggcaaatgcttttccacccgcctcaacgatctgattgatgacgtcctttgcggctttgatattgtggtgatagttcaccgccacggtataaccttcgcgagccagttgcagcgcggtggctttgccaatgccgcggctggcgccggtgaccagtgcaattgccattgtcttctcccaataaaaaagccgggtggcggcttcgccttacccggcctacgttactacagcaaaaaaattactggtattcgctcatcggcacacaggagcagaacaggttacggtcgccgtatacgtcatcaagacgcttcacggtcggccagtatttattcgccacgcctgccgggaagacagccagttcacgggaataaccgtgattccactcggccaccatctcgtgctgggtgtgcggagcgttaa

SEQ ID NO: 158804 - DNA, 369 bp, Enterobacter cloacae
  misc_feature (341)..(350): n is a, c, g, or t
atgctggcattactgttgcagctctttttcagtgaacagatcggcaaacagtgcggtgctcaagtaacgctcacccgaggaaggaaggataaccacaatattcttattggtaaaggcttcatcttcctgaagtttgagcgctgccgcaacagccgcaccggaagagataccggcgagaatgccttcttcatccatcagacgacgcgcggtagagatggcttcttcgttagtgatggtgaccactttatcgatcagcttcagatccaggttgcccggaatgaatcccgcgccaataccctggattttatgcggacccggcttgagctcttcgcccgccagtnnnnnnnnnncccgccagtgcctgggtga

SEQ ID NO: 158805 - DNA, 711 bp, Enterobacter cloacae
gtgcgtatccggcagctcgcctccctccaggatccccacgccgtagcagaagaaagtgagcggtcgcttcgcggtgatacgcgggtcaagctggcgcaaagagcctgccgccgcattacgcgggttagcaaatactttcccgccggtgcggcgcgcttcttcgttgattttctcgaaacccgcctgcggcaggaacacctcgccgcgcacttccagacgcgcaggaatattgtccccctgcagcttcagcggaattgcgcggatggtgcgcacgttggtcgtaatgtcttcacccgtcgtgccgtcgccacgcgtggcggcacgcaccagcacgccgttttcgtagagaagactgaccgccaggccatcaagcttcagctcgcagcaccaggtgagagcgtcgctgcttttcagacggtcctgcacgcgcttgttaaacgcgaggaagctctcttcatcaaagacgttatccagcgacagcatcggcacttcatggcgtatctggctgaacgctcccagcggctcggcaccgacgcgctgggtgggagaatccggcgtaatgagttccgggtgctgcgcctccagttcgcgaagttcgcgcatcaggcggtcatactccgcatccggcacctccggcgcgtccataacatgatagagatattcatgatggcgaagcgtggttcgcaggtcagtgagttgttgttcgattga

SEQ ID NO: 158806 - DNA, 345 bp, Enterobacter cloacae
atgggtcgggaagaccacttcacgcgtatcatcagggcgttcagactcaacgacgtttaccacctgcggaataacatcgcccgcgcgacgaaccaccactttgtcaccaatccgcaggcccagacgttcaatctcatcggcgttatgcagcgtggcgttactcaccagcacgcccgcgacctgcacaggctcaagacgggcgaccggggtaatggcgcccgtacggccgacctggaactccacgtcgcgaacgaaggtcatctgttcctgagcaggaaacttaaacgcaaccgcccagcgcggcgcacgcgccacaaacccgagttgctcctgaagcgccagtga

SEQ ID NO: 158807 - DNA, 363 bp, Enterobacter cloacae
gtgcgtggcgactacaatgccgacatccggcactttctgcagctcgtcgatgcttgccttttccagcgcctccagcgtgccaaagtacgccgccagacctgctgccgttgcttcccccacttcacggatgcccagcgcgtaaaggaaacgggcgaaggtggtctcttttgcggcttccagagcgttaaccacgttctgcgccgacttcggccccatgcgatccagaccggtcagcttgcccgccgtcagtttgaagagatccgctggcgtatgcacatactctttttcaaccagctgatcgataatcttatcgcccatgccgtcgacgtccatggcgcgacgggagacgaagtgcttcagtga

SEQ ID NO: 158808 - DNA, 198 bp, Enterobacter cloacae; identical to SEQ ID NO: 141144

SEQ ID NO: 158809 - DNA, 222 bp, Enterobacter cloacae; identical to SEQ ID NO: 140650

SEQ ID NO: 158810 - DNA, 672 bp, Enterobacter cloacae
atgattctgttcggtgccacgctgatgaaagatgccccgcagcaggaagtgaaatccgttaacggcgtggtggagaacgactttacgctggcgcagtccatgcgcaaaccgcagtactggatgctggcggtgatgttcctgacggcctgcatgagcggtctgtacgtcattggcgtggcgaaagatatcgcccagggaatggtgaaactggatgcggcaaccgcggcgaatgcggtgacggtgatttccatcgccaacctgtctggtcgcctggtgctggggatcttgtccgacaagattgcccgtatccgcgtcattacgatagggcaggtggtctctctggtggggatggcggcgttactgttcgccccgctgaatgaagcgacattctttgcagcaattgcctgcgtggcctttaactttggcggcaccattaccgtcttcccgtcgctggtaagcgagttctttgggctgaataacctggcgaaaaactacggggttatctatctcggctttgggatcggcagtatctgcggctcgctgattgcctcgctgttcggcgggttctacgtgaccttctgcgtgatatttgctttgctgattatttcgctggcactgtccacgacgattcgtcagccgcagcgtgaagtctataaagaagcgcatgcctga

SEQ ID NO: 158811 - DNA, 1899 bp, Enterobacter cloacae
atggctatcgaaatcaatgtaccggacatcggggctgatgaagttgaaatcaccgagatcctggtcaaagtgggcgacaaagttgaagctgaacagtcgctgatcaccgtagaaggcgacaaagcctctatggaagtcccgtctcctcaggctggcatcgttaaagagattaaagtctctgttggcgataaaaccgagaccggcaaactgatcatgattttcgattccgccgacggtgcagcagctgctgcacctgcgcaggaagagaagaaagaagccgctccggctgctgctccagcagctgccgccgcagcaaaagaagtgaacgtgcctgacatcggcggtgacgaagttgaagtcaccgaaatcctggtgaaagtgggcgacaccgttgcggctgagcagtcactgatcaccgtagaaggtgacaaagcctctatggaagtccctgcgccgttcgcgggtaccgttaaagagatcaagatcaacaccggtgacaaagtgtctactggctccctgatcatggtcttcgaagtggcgggtgctgcacctgcttccgcgcctgctcaggctgctgctccggctccggccgctgcaccggctgctgctggcggcgcgaaagacgttaacgtaccggacatcggcggtgacgaagttgaagtgacggaagtgatggtgaaagtgggcgacaaagttgccgctgaacagtcactgatcaccgttgaaggcgataaagcttccatggaagttcctgcgccgttcgcgggtaccgttaaagagatcaaaatcagcactggcgacaaagtgtctaccggctctctgatcatggtcttcgaagtggaaggcgctgcgcctgccgccgctccggctgccgctgctgctccagcaccggctgctgcaccggctcaggctgctaaacctgctgctgcacctgctgcgaaagcagaaaaatctgagttcgctgaaaacgacgcgtatgtccacgccaccccgctcattcgtcggctggcgcgcgagttcggtgtgaacctggcgaaagtgaaagggactggccgtaaggggcgtatcctgcgcgaagacgttcagacctacgtgaaagacgcggtgaaacgtgccgaagctgcacctgctgcagccgctggcggcggtatcccgggcatgctgccatggccgaaagtggacttcagcaagttcggcgaaatcgaagaagtggaactgggccgtatccagaaaatctctggtgctaacctgagccgtaactgggtgatgatcccgcacgttacgcacttcgacaaaaccgatatcaccgatctggaagcgttccgtaaacagcagaacgccgaagctgagaagcgtaaactggacgtgaaattcaccccagtggtcttcatcatgaaagccgttgccgctgcacttgagcagatgccacgcttcaacagctccctgtctgaagacggccagaagctgacgctgaagaaatacatcaacatcggtgttgcggttgatacgccaaatggtctggttgttccggtcttcaaggacgtgaacaagaagagcatcactgagctgtcccgtgaactgaccaccatctccaaaaaagcgcgtgatggtaagctgactgccggcgaaatgcagggcggctgcttcactatctccagcatcggcggcctgggcactacccacttcgcgccgattgtgaacgcgccggaagtggctatcctcggtgtgtccaagtccgcgatggagccggtgtggaatggtaaagagtttgtgccgcgtctgatgatgccaatctctctgtccttcgaccaccgcgtgatcgacggtgctgatggtgcgcgtttcatcaccatcatcaacaactgtctcttatacacatctgacgctgccgacgaatag

SEQ ID NO: 158812 - DNA, 567 bp, Enterobacter cloacae
atggcgcagtttagtctcctcaaaataccccaccacccagaagctgtgggcatcgacgatggcgacctttgtctcccccgccgtcgcgtaatctccgggccgaagccgcaggtgcgtaacgtaccccgagaccggcgaacgcacggtggcgtgcgccagattcagctctgccagatccagcgcggccagcgcgccgtgataattggccgccgcgacgttcgccgcgctgccggtttgctgcacatcctcgctcgaaatggcgtttttaatcagcgtgcggcgatgggccgcgtcctggcgcatcagcatctcatggcgtttcgattccacatccgcctgcgcgctggccaccgccagcctgagccagcgcggatcgatggcgtagagcacatcgccccggttcacccactggttgtcccgcacggccacgctgatgacgggcccggagacgtccggcgcaatctgcaccacgtccgcccgcacgcggccgtcgcgggtccacggcgtttgcgcgtagtgtttccacatcataaacgccagcagcgtggccgctgcgacggcgcttaa

SEQ ID NO: 158813 - DNA, 312 bp, Enterobacter cloacae
atgctcagagagcacgcgctgttcccggcgcagggaaaaataggctccgtagttgcccgcatccccgctccaggtgctccagaaaggacgaaacgtctggtcgtcacgctgaccgtccgcgctgccgaagattttattcaccgcgtaaatttcataatccagcgggcggatgttatcgaccaccagatggtattcgtgctggccttcattcagcttttgacgcgccgccaccttcgggaacaggttgatgactggcgtgcagtgcagcgccagatggctggcatccaccacgcgctccagctgttcatctga

SEQ ID NO: 158814 - DNA, 1413 bp, Enterobacter cloacae; identical to SEQ ID NO: 141143

SEQ ID NO: 158815 - DNA, 207 bp, Enterobacter cloacae; identical to SEQ ID NO: 141235

SEQ ID NO: 158816 - DNA, 321 bp, Enterobacter cloacae
atgtcagacaacagcccaaccggaacaaactctgtggtgttgaaaataaacgcggcaatggccagcgtgaccacgcgtagccacgcaaccctgcgggaaactgtgttcgttgtcatagggatgtcggagattcgttgctggaaagaagaggagacgatcttaaaacgtcaaacggcgaaaactcaaccattatgtgacgcagatctcaatgtttaccttgtgaaagcggtagccggggagggtgttttcattgaatataaaagaacaacacaacaaaaacaggcggtaagacaatgcaggagattgatttttatctggtag

SEQ ID NO: 158817 - DNA, 789 bp, Enterobacter cloacae
atgcaggagattgatttttatctggtagatgcgttcagcgatacgtcgtttggtggcaatccggcggcggtttgtccgctgaaagaatggttacccgatgaaacgctactgaaaatggcgcaacagcataatcaatcggaaacggcctttttcgtctgcagcaaagggggcattgagctacgctggtttacaacgctcaccgaagtcaatctctgcgggcatgccactttggccgccgcgtacgtcctgtttcatgaactggattaccccgactcgcggatccacttcgacaccgcatctggccgcctgacggtcagccgggagggagagtggatgacgctggatttcccggcgtgtccgacacataaagagacgccaccgccagagatgatcgcggcgctgggtatccgccactacgttgacgcccgtaaagggcgcgcgtgggtgatcgtcctggaaaaccgccagcaggttgaagcccttatgccgaacctgtctgcgatgacaccgggtgagcacaaagttagcgtgacggcaccgggcgagggggaatatgactttgtcagccgcttcttctcaccgggcgtttccgtcccggaagatccggtcaccgggtccgcgcacacgatgctgatcccctactggagtgaaacactgggcaaaacgaccctgtttgcccgtcaggtgtcggcgcggggcggtgacgtgcgttgtgaactgagaggggaacgggtgctgatgagcggtcaggcgtcgtgctacctgaaaggcacggtgtatctgcgctaa

SEQ ID NO: 158818 - DNA, 249 bp, Enterobacter cloacae; identical to SEQ ID NO: 141188

SEQ ID NO: 158819 - DNA, 810 bp, Enterobacter cloacae; identical to SEQ ID NO: 156127

SEQ ID NO: 158820 - DNA, 417 bp, Enterobacter cloacae
ttgcgcttcattggctgcgcgggcgctggcgttactgtcagcaaggttggcttcgtaatttcgcagttgctcacgcaatttaacctggtcaatcagcgcagcattctgcaataccgtctttttctgggcttctgtcagagaagcaagttccccctggctgacttgaaatttaaccttcgccagttcggtattctgaccagccagcgcgatctgctccttctgctgcttgatcagacgggtataaacatcctctgttttttgttcgtcagttttaccgcggggctttttctgcgattccagcagattgaagtcagtggccgcattggactgaatggcggcgatttgtttttcctgtcctggcagaacggcaccgctgttgtccgtgcgaatggccccctgtcgaatggcatcctgtag

SEQ ID NO: 158821 - DNA, 186 bp, Enterobacter cloacae
atggcgttgatgctgatggcaacggtcgccagatccaccgtcacgtcgtggctgatgctaatcgtgttacccgccgcgctgtcgccggtgacgctgattttcacgctgccttccggccacgcgctcacgtcggcagacgggatcgccgcgctccaggtgccgtccgccagcaccgtagccgcataa

SEQ ID NO: 158822 - DNA, 381 bp, Enterobacter cloacae
atgacgcgagataccgccgagtgtctggcggaagtggagtttgaggtaaaaggcatcgcctaccgcgccttctggagccagaaccgggcacgcaaccagccggacggcaacctgcaggcgccgcgcgtggagctggcccgctgcgaagatggcaaaatcctcgccgataaagtcacggacaagctggagcaaaccgccgcgctcaccggtctggactatggccgctttacccgttcaatgttgctctcacaggggcaatttgccgccttcctgaatgccaaaccgagcgatcgcgcagagctgctggaagagctgacaggcaccgaaatctacggccagatttccgccatggggcgcaggcagcgggcgtcgtgctgctga

SEQ ID NO: 158823 - DNA, 264 bp, Enterobacter cloacae
ttgcgtcagacgcgcggtttgctcctgctggtgcgcccagagcggacgaagctgggcggcgggctgcgcaagctggagctttgccagctcaggcgcagcgtccgtcagagcctgttgtgcctgctgctgcaatgcggtgatgcgttgttgctcgcgcacaagctcatcatgacgggtaagccactgaaaatgtttctgctggttttgctgctgtgccagcaacgttttctcttcgtcagtaagtgcctgcaaactttgctgtaa

SEQ ID NO: 158824 - DNA, 1239 bp, Enterobacter cloacae
atgaatacaaatacaccagatagtggagttctgacattagttggaggctcttaccatgaagtctgtttgcaccctggctaccacgatatattcggatctgccggtcgagccgcatcagcgcttgcccatctcaaagtaccagtaaattttcacacttacgcggataacagcgttgctcaagtacttcgtgagagagcttattttgagggctttaatgtcggcatccaacctctagctcgttctattttgtttcactacgagcatggcctgtcagaacctaaaatttataatgtgcctcccgtatcgatgccagacatcagattgaaagcgactaacgttctacgttatgggatgctggaagggactgctgttgttgatgccgaatacgccgtttatgatcctcaaaatgtgtcgaaacctgaattgttcacgcaaaacggctcaacagcaaagaatctggcacttattctcaatcgctatgaagccacaacgttgagcggtcaacctaaattatctgttgaagagcaagctatccatttgtttgaacaaggccatgcgcaagtaattataattaagcaaggacctgctggagcattggtatgtgataatggaaaaatatccacggttccagcttatgagaccagtaatgtattcaaaataggttcaggagatgcgttcgttgcttattttgcataccagtggatgattaataaaaaatctgctcatgatgcagctaatgcagcttctcatgcaacagcgtattattgtgagaacagtttatttccatcaactcaagggctcgctgattttaatcccaaggcaattttacccactcctgaatttctacgtggtgaaacatattcggtctatctcgcaggccctttctttactttggcacagatgtggttgattgaacaagctcgccgcaatttgagcgatctagggtttaaagtcttttctccttatcatgacgttgggcatggtaaagcagaagatgttgtggaaagagaccttgaggggataaaaaatgctgatatcatttttgctattggtgacggtttagatgctggaacaatctatgaggtcgggtacgctcgagcatgtaatatacccgttgtcttctatgcggaaaatgaagctgatgaagacaaaaaaatgatgtctggctcaggatgcatcttgtgcaaggattatgttactgcaatctataaaacactttgggcagtggtgcagaaatga

SEQ ID NO: 158825 - DNA, 606 bp, Enterobacter cloacae
atgaagacagctctattgctctctggcggcatggactctatcgcaattgcatggtggaaacgaccagatatagccattactttagattatggtcaacgtgctgcggaggctgaaataaaggcagctagtgcgacctgtagcgccctgaaaattgatcatcatgtcattaaagtagattgtagctctttagggtctggggatatggcgggtgcagaggccgattctaacgcaccgtccagtgattggtggccttatcgtaatcaaatgctgatttcacttgctgcaatgaaagctattacgcttggtgtcacgcacctctggatagggacagtgaagtctgatagctctcatttagatggtactctagcttttgtatataaaatcagtgagttgatgtcttttcaggaaggcaacatgatcgttgaagccccagcaatagaattttccacaactgagttggttagaatttctggtgtcactccgggtggtcttgcgtgggcgcatagttgtcacaaagctaatatcccatgcggtaattgccgtgggtgcaataagtattttcaggttctggatgaagtgggatatgaactggacagacttaggtaa

SEQ ID NO: 158826 - DNA, 687 bp, Enterobacter cloacae
atgaagtgggatatgaactggacagacttaggtaacccttttccgcgcatacaacctctcacgtaccgacctattgaatggccgatagaggaggttttttttctaccacctccattggaaggtaatttattgccgccgatgcgttcagtgatagattcacgtagaacacgacgtgagtttggatcattggatcattatttactttctgaatggctctggttagttgcgagagaaatggttgcagggcattctcgcttaggcttcgcactaacccaacggccagcaccttccgctggtgcaattcaccctatacatattgttctttccttgccagaaatggatgggtggcaactctacttaccggacaagcacgcgttggcgttactttcacagccaaatcagacaagggacgttgtacgcaatgaattattgccagtacttgatattcaatctggcatcgttattaggcttattgcggaaccagggatgaccgcagctaaatacgaaaatgcggacagccttgtatggcgtgacgcaggtgttttaacaggacagatggcacttgtagcagaagcgtttgcatgtaatttttgtccactaggaattacaggcaatgaatggtgcgccagtttaaaactggaggactgtttggctggtgtcggtttggcggttcttggctcgcgttaa

SEQ ID NO: 158827 - DNA, 846 bp, Enterobacter cloacae
atgactcagcgcggagctgtaattatagggccaactataatcaacctcgattttcctgcagctgatcaagccatactaccaggagtaatgtggggaaagattgaagcatttccttcccctgcatactgggcttaccaagtctttgctcgccggttggaagtgaatacagttaattacaaactggggcggaccttaaaagaggaagtaggagcctgcttacttggtggacatggaatacctgcagcaataggcattgccgcatttaacctgttaaaagcatatggagcatttgaagcaccacctccttcagaagagcttctttacgaatggctttctcagccgattgatacaggtagtaaatccgtgcgttaccgtttcgcaaagcagaaatcccgttatctagccgcagccttgaacaaattagatgtcgaaacaccaccacttgaatcaggccgactgctccgcgactggctaactactattccgggtattggctataagacagcatcatgggtagcacgaaattggcttggtgcagatgatattgcaatattagatattcacattctgcgagctggcctattggctggttttttccctcaagacctaactgtagaacgcgattatctgaagcttgaacaactgttcattcagtttagtgaatcaatgggagtgaaagcctcagagctggatgctctcatttggtacgaaatgcaggcatcatcaactacagtttttgctttgcttgaatccttgagaggtcaaccacttacaaaacttaaaccacgtttaacgcgagccaagaaccgccaaaccgacaccagccaaacagtcctccagttttaa

SEQ ID NO: 158828 - DNA, 483 bp, Enterobacter cloacae
atgtgtgaactcattaacgatgatgcactgtcgtttcttagctcatttccatttaagggaaatgagttagtttacgttgatccaccatacgttcacagcacccggaaacgcagccgaatctatcgacatgaatacagtgatgataaccaccgacaactgcttgaaaagatattatcactaacatgtaacgttatgatttctggatatgaaaactctctttacaacgaaatgttaacaagttggcgctgcgtcaaatttaacgcaaaaacccactcaggtattcgagaagaaagcgtttggatgaactatgctccaccagcaaagcttcatgattcacgttatctaggtaacaactacagggaaagacaaaccgttgctcgtcgtcgtgcccgcttgtatgaccggatcgagcagatggagcaaacagagcgtagtgaattaattcaatggctgaataccaaatatggtctggagacagtatga

SEQ ID NO: 158829 - DNA, 561 bp, Enterobacter cloacae
atgtctcagcaaaaagggaattattgtgctttttatgtttctgagccttttaatcagagttcattaggggcacatgcaactaaagattttgtatattataatttactaagatcatggaaaggtgctgacgcctcatttccatttattgattctcatagctcaacttacagtgttcgggatggaagtgattgggaaaaaactcttaaaccgagattacatcaaagacttaaaaattcaaaaaacataattctatttttaagctcttccaccatcaactcaagagcgataagagaagaagttgattatgctataaatgttttatcattgcctgtaatagtaatatatccagaatttgaaaataaagaagatatacatgatgctaatggcttcacgaagaaaataactaatctttgggatctgcttccaattttccgtgattctaaacacaaagttccagtaatgcacattcctctaaaaaaggaactcgtacaatcagcattaaaagataaggacttctttttaggtagcgccgctaaaaatattggatattactataactaa

SEQ ID NO: 158830 - DNA, 837 bp, Enterobacter cloacae
atgaagaaagtaaaatttttcgatagcagagtgagagataagttctctaagcatatatcagcaataagtacactcgcctctgttttattaattttttttaatataccggagaacaaaaaaatcattttattcgctgttttttcggcgtgtctttttttactttactgcaaaatatggtggcactttaataaccttcaagagattgagttggatgttgaaggtagtaaagtttcaattaagactggagacttatttttacagcccggtttgaaatgtatagcatttaacgagtattttgataccaaggttgacgaaaaaatcatatcatcaacatctttaaacggccaatatattaataagttcttccctaactcggttaatgagttagacaaaataataactgagtatgaatttgaagaagaagaaaaaataggtattaatgatgagagaagagtagggaaaaaagtaaagtactctttaggaacaacttgcgttattgatgattatttacttactgccttcagccattttgataaaaacaataaagcatatctttctatgccagattatttatcttttttaataaccttctgggataaagtaaataaagtatatgctcaaaggaatgtatctgttcctatctttggttcaggaatcacacgaataaaagagcataagaacattagtgatgaagaacttttgaagatcatgctttggacattcagaataagtgaaatgagatttaaatatccagctaaactttctattattataaattatgacaagataaaaaccatcaatttattagatatcaaatctgcacgaaatggaatttaa

SEQ ID NO: 158831 - DNA, 1065 bp, Enterobacter cloacae
atgaaaaagattgcgctctctttggtagctcttggattactcacttctttgccgggcctggcggctacccccgcgccggttccggccgccattgccagccatgacggccccattcgcattgcggtgatccgcaacctgggctcggacgacaacaccacgcagtttgttgccggggcgattcaggaagggaaaaagctcggcgttaaggtcagcacgtttttaagtaacggggacgacgccagattccaggatttcgtgaaccaggccatcagccagaaatacgacgggattattctctctcaggggcgcgatccgtactccaccgcgctggtaaagaaggcggtggatgccgggattaaagtttcggtgtttgataccgccgtgaacggcgagatcccgggcgtaaccgttacccagcaggacgatgcctccctgaccaacctctcttttggtcaactggcgaaagatttcaacggcaaggccaatatcgtcaagctgtgggtcgcgggcttcccgccgatggagcgccgtcaggcggcgtataaagaactgcaaaagcagtatccggagattaaagagctggagtccatcggcgcggtctcctctgacgtgcagggcgacaccgccaacaaggtgggggcgatcctcgcgaaatacccgaaaggtaaaatcgacgctatctgggggacctgggatgccttcagccagggcgcgtataaggcgctgaaagagaacggccgcaccgagatcaagctctacagcatcgacatctccaaccaggatctccagctgatgcgcgagccgggtagcccgtggaaggtgagcgtggcggtagatccgaagctgattggcgcgaccaacgtacgcctgatcgccaataagattgccggagaagcgacgcctgccacctacgatttcaaggcggcggctattccgcaggcgctgctgaccgcccagccgggcgcggtgaacgtggcgtcgctggggaaaatcattccaggctggggccagacggaagattttatcgcgccgtggtttgcgacgcttgccgctaaaaacaagtaa

SEQ ID NO: 158832 - DNA, 735 bp, Enterobacter cloacae
ttggatactaatagtccattaattgaagtcgagcagaacacttcagatatatatattccgttgcaagcctggtttgaggggagaaaattcctttcacacagattttcgggccaaaactgtaatgataatccatcaagtgattgggggacttggttatcaatacaggaatgctgtcctctccatcaggtcaatagtcttaactgggtcggactgcatgaagctaggaaaaatacagattcattcttggggaatgtgaagagtgaatttaatggaaagcttcccatttttattcatgaaaaggagagggtgataatcgaaaaaaaaatcggcattcctcccaaaccctcattaccaatctatttaatatcatgctctgatatggatgataccaatgaacacattgtttatgtcggaaaaaccgttaactccaaaaggtttattggcggtcactcggctgccttaaagttgctagatcccaaatataataatatgaaaaagaggatatatagagccaccccatggttttatgatggaaaagactatatttcactggattggattagtccgacatcattagctatagaattacttgactttatagagtctcatcttatttacaatctcaagccggaactcaacacatcgaagaaaaaaaatgaagatacacgttattctttttatcttcacattcagaactttttatcaacaggctttcttgatgatgagtttatttaa

SEQ ID NO: 158833 - DNA, 861 bp, Enterobacter cloacae
atgagtgttttttctgatatttctgagtatgtctgggatttgcttcatgatggaaaaaaattaggattatctataggtgaagaaacaattagtgatttgattttattagagattgctaggagagattatagttatgtgactataaagaaaaccaccaaagataaagagtcaacaaaaggaacagattgggaatggtggattgggagcaggcaaactggttgggtacgatatgcaatacaagcaaaaaaaatggatcataaccagtattcatataaaaagctaaagcatgaggtagggaaaaataaaattttacaacataatatattacagcagtacgctaaagatataaacgcagtaccactctatgctttttacaattacccaaaacaagctgaacttgatgagtattggaattgtaagagaccaatatcaagaaaaaaaatgggaattactgttgctaatcttgaagtggtagttagtgcaatacataaaaaaagagggaggaatttcaattcaatacataaggttagaacgacatacccgctttgttgccttctggagtgtataggaaccagaagtaaatatatttatagaaatacaacaccacaacaaccgccagatgtgatttctctatcatactcaagcgtcataatgcccgagaatgaaaaaatagagttgcatcaaattcacgaaaacgatgcaaacttagattatgtatttaaaggtcatgacatttctaggttgtttaaaagtggcgaggcttttaatttgaaaagagaacgtttgtacccaaataaagccccgattccaacacgtatacttgttatcgacttagagttattaaagaatacaaaacaatga

SEQ ID NO: 158834 - DNA, 141 bp, Enterobacter cloacae
atggtcttcggcatggaggggaagagcgaaaagcaatgtaaacagtgttataaatctcattttcagtttttccttgtagagacaatgtggccagaaactcctgtcctctacgataatatcgattttatgatgaatagttag

SEQ ID NO: 158835 - DNA, 1518 bp, Enterobacter cloacae
atgacaccgccaaccaaaattgatacatcaagtctacttaccatattgggcgttattgctgctgtatgggcccttattacgccaaacgctcgactacgtttaaggttctgcctagcgtggtgggattgggtaattgttgggtttgcattcttactaagcaattatttggtgtttgcaccggctttaaaatcactagacttatattttagctttggcccctggaaatggggattagatagttcaagtgccgtatacctgatatcactcgcagttgctatttacattttatttcgcttaaaaaaccctaaactctcaattggaagaacagggatatttctagagttagtggaaaatttgcaccttactaaacgatacgacgatctggcacaattgttggcacctcaactagaaaaattaatatcaataattgatagacctgtgaagaatcgactttgtgataagatagctaacaatctccgcatctctaatcgcgagacagctgctgaacatgcacatgaagcattgttaaatattgtctcatcacctgaacttaccaatcactttgcacttgcgcacccatccctctgccttgagttaatcaagatcgagccaatagttcgttctgactttacttctaattttatcagtgcattacttggttcacctaacagtcgtctatatgttgagcttaaaaataatcttaacgttagtcgaggacatcgtttattgattccaaaaaacaaccgtatattacattttttcttttccaatgctaagtttgcagctgatttagcaatataccgtgatatcggtgactatctctactggaggttagatgaagatgaaaaaattattgctgcacttaataagtctttaggttcctattacgatgcttcaaaatataaatgtcctatttactcaggtgtcacgctgtttgaaattatggttcatgaaggtattcaccagggtcttcaggatcatttatggttgcattactattcatattttgcaaggaaaatgataaagaatatgaataggcaatcggatgaatatagtggtgaatgggaaacaccttttcacttccttctctgtcatttatttagcgtcgctacagattgggcagaacaatgcgaatggatagatgaaaaggagattcctcaagaaaataaagaaatagataatttcgatcttcattatatttcaaaagaggctaccaaattacttggtgctatgctgcagttggttatgcctaataaaaaactcaccttgaaatctagaaaacatattcttgatatagttgtatcttgttatattagattgaaaaggaataaaaaattaaaagacgtcgctgactcattattaattttcaccactagaggcgaaggtaattcagcaccgccgcattatcgtagagaacttctagaaatattcaatacccttgatgattatcgattaagaactgatgccccggaattccgagcagctatagagtctgctattcaagcaaggccgaattag

SEQ ID NO: 158836 - DNA, 570 bp, Enterobacter cloacae
atgaaatttaaaacaacttttatcgccctgtccgtttctgccactctgttctctggaatggcaagtgcagccattacgggtaccagtagtgtccagatggactttcaaacaaaggtagtttcaggcacctgtacagcaaaagtgctcaacggagcaggtgcagaatctagtgaaattgcgtttggcgatgtatacaaatcggatttggtgaataagacccgcgtcgagccgctcaaaattagcctcacaaactgttctggggtagaaaaggcaacggtatccgtagcgagtgctgacggacctaagaaaaattgttctggccagagcggaacgggaagttcctttgcagccggtttagcgacaggcttcgaaatctggtctggggtggtagatacaggtttgttgatgaactgtaacacacctccggccccgcaggaggtcaccatcactgacggtgcgggcgagttcccaatgaactcacgtattgttatcgcggaggggcgtaatatcagtcaggttggcactggcgccgttaacgcagcattgagatttactgtcgactatcaataa

SEQ ID NO: 158837 - DNA, 3408 bp, Enterobacter cloacae
atgaatataccgggtaatggcctgggccggtttggtttggccgggctgacgctggccggaatggctgcgatatggtggggaatcacccgttatggcggcatgctgaatattgatacgaggggtgagaagatcctggcgtttgtcctggtgtgcttggtgttggtgctgattcgttatgcgcccgcactttcccgttacgttaaggaaagttattatcggcgccaggctcagaagattaatgccttacctgacgaagaaggccgcatggcgctgacgcctccacgtcatatcacagtgggcgagattcgccagacaatgcgccatctgtacgggcgtgccaggtttcgtaaagtccgcatcctgctggtcagcggcagcgcatccgacgtcgaacaactcgccccaaaactcacgcaggagctttggcaggaagaccaggggacgctactgctgtggggcggcgacccggcggcccctgctgacgactggctgaccgcactgcgtaaactgcgccatcgtcccgctgacggcattatctgggttacatcggctctggacggtctgccgggcgcagaagacggctcgctctcagccctcaccccggatgcgatggaccagctttcccatgcgctgagccgccgttatgacgctctgggctggcagcttcccctatacgtctggtctttgcatccgcacactggcaggcagaacggacgcgtcacccagccagtaggctgcctgctgccggcgaaatgtaccccgcaggcgctcgccggacagcttgccgggctgataccgcaactgaccgcgcagggcatacagcaggtctgtactgaacctcagcatcactttctgctgagtctggccgacctgctgacccgtaaaccggaaacggtggcggagccactgtcagtattgctgaatgcgtaccgcccgctgcctctggctggcgtggtgttcagcccgccttcagctggggcaggtcgcagtgttgctcatcactggggtaaggataatcgctgggatgccatcccggcgtcggcacaggccttaccggcaggtctgcgcccgcgtaaacccggaatcagctggacgcagatggcgggcgtgagcgtggcggcgctgatggtgctctggggtgtatccatggctgtctcctttgtcgccaaccgtcacctggtggtgacggcgcaggagaaggttcagcagtctgtggcagagaaacagccgctgagcacgcgtctgcacgccctgtctgaactccagaaaacccttgcccgtttacagtaccgtggacaacacggcgtgccctggtacgcacgcggcggcttaagccagaacgatgccctgctggcggcgctgtttccgcgttatggcgaaagcgccttgcccctgctgcgcgatgcggcggcggaacatcttacgcaacagctacacgcctttgtacagctgccgccggacagcccgttacgtgagcgcatggcaaaaccggtttacgaccggctcaggttgtacctgatgctctcgcggccggagaaaatggatgcggcctggttttccgccacgctgatgcgttactggtcgcagcgtgcgggtgtggcaaacggcctctggcagggcagcggcccggcactgtacgctttttatgccacgagcctggcgtcacacccgcagtggcgcttacatgttgacgatatgctggtcagtcagacgcgtacgctgctggttcgccagatgggggtgcgaaacagtgaatccaccctctatcagaaaatgctcgcgcaggtggcgaaccagtatgccgatatgcgcctgacggacatgaccggcgacaccgacgccgcaagcctgttccgcaccgatgaggtggtgccggggatgttcacccgtcaggcgtgggaggaggcggtacagcctgccattgacaaggtggtgaatgaacgtcgcgaggagatggactgggtgctgagcgacagcagacagcccgccacgcagcagacctcgccggaagccctgaagcagcggctcaccgcacgttattttgccgacttcagtaccgcctggctcgattttctcaacagtctgcgctggcaacgggcagtgaccctgtccgacgccattgaccagctcaccctgatggcggatgtgcgtcagtcgcctttggtggcgctgatgaacaccctgaatgttcagggccgcaccgggcagacaggcgaagccatttcggattcgctggtgaaatctgcgaagaatctgctcggtggcgataaacagccggccattgaccagagcggcggctcgcgcggccccctggaggagaccttcggcccggtactggcgttgattaacagccagcagaaaggcggtggcaatactgacctgagcctccagacgtttctgacccgcgtcacccaggtgcgcctgcggcttcagcaggtgaccaacgccgctgacccgcaggccatgacccaagcgctggcgcagacggtgtttcatggcaaagccgtggacctgaccgagacccgcgactacggcagtctggtggcagcggggctcgggcaggaatggagtggtttcgggcagacgatgtttgtgcggcccatggagcaggcctggcagcaggtactgactccggcggctgaaagtctgaatgcacagtggcagaccgccgtggtggatgactggaacagcgcctttggcgggcggtatccgtttaaagatgtcagcagcgaggtctccctgccgttgctggccagatacctcaacgctgattctggacgtatcacccattttctccagacccgtcttaacggcgtgctgcacagggaggggagtcactgggtgccggacagcatcaacgcccaggggctgaccttcaatccggccttcctcagggagattgataccctgagccatatttccgatgtggtgttcacccgcggggaggcggggttgtcctttgaactgcgcccgggaacggcggatggcatcatggagacgcggctggttatcgacagccagaagctgacttatatgaaccagatgcccgcctggaagcgttttacctggcctgcggacaccgaagcgccgggtgcggcattaagctggataagcacccaggccggcacccggcagtatgcggatatgtccggggcgtggggctggatacggctgctggacaaggcgtcagtcagcgcgtatcccggcacgggcagcagttacagtctcacgtggcaggcgcaggatggcagaccgctaaactacaccctgcgtaccgaggcgggagagggcccgctggccctgctgaagctgcgaaatttcagcctgccgttgcagatattcaccgtcagcgagcctgccgctgaccccctggctgatgacaccgaccccacagaggaaacgtactga

SEQ ID NO: 158838 - DNA, 321 bp, Enterobacter cloacae
gtgactggtacagcaggacctattacccagcacagcccgcagcataatcccacaggtcctgaaagcggtaccgaaaaatcgctgcggggaatgccgaccgaggaaagcagggaagatgatacggctcccactgccaccacaatgtttcggatgggcgaagagccgttactaaaaggtctgcctccggattttatggataaatacaatggggatttggctaaagcactggcaggcgatactgagactgatccttataaaattgctgaatgcggatttgttcccagtataaattttcgctgtgtcattaatgcgcagtcatga

SEQ ID NO: 158839 - DNA, 537 bp, Enterobacter cloacae
atgacgttatgcgcaatatggtgtttgttcagggggggcacctttgagatgggcgatatttgcctgaagaaatatgggctgccctgtacctttgccaatgagcatgccagttttcccgtgcatgccgtcacgctggacagcttttatattgccaaatataaagtcacttacatggattacgatctttataccaacaataaaggcttgcctgagttaaaagttgatgcagagtaccttgaggattatccaaaattgcgtgattctaacttaccagcaacagctgactggcaactgagcagagattactgccagtggctgggggagaaaactgggctacacattgatttaccgaccgaagctcagtggaaatatgcggcccgtaaccgaggtcaggatattcgctacggaactaataatggtcatctcagagtcggagttaatagtccttcttatcaacagcaagaaagttactcagtggtgggtaaggggctattaccagtgggggagctacccagcgactccattaggactctttga

SEQ ID NO: 158840 - DNA, 408 bp, Enterobacter cloacae
atgagcctgatagataccctttcaaatattaccggcactaccctaaatcgctatcagcttgatattccctcctgtaccgcgccgctggatgttgaagatttttgcgggacagaaatactgagccagctctaccgccacgacatcagtttcaccagcacggacaggaacgtggatgccagccagttgctgagcaaacccgccacgctgacgatgggcggcggtgtattacagagccttgccgaacagaagcgggtgcacggcgtggtcacgtattttgagcacatcagtgtgtctgccgaccaggcagaatacatgataaccctcgaacccgatgccttttggtctgaaacctttgatgacgcagcagtgggtgcgggcgcgtttcgggtttccgatgatttatgttga

SEQ ID NO: 158841 - DNA, 2271 bp, Enterobacter cloacae
atggctaccggagaagagaaaagtaaaacaactgtgcagggttcagggtctgttgtaaaagggaaatgtgagcctgaatgttatttacacccgggcagtgcgacactgctctttctgaccgcttcagaaaacaaagttatcgagcaggaacataactttctggctggtttactggaggcccagaaacaggcacaaaaaaatcttgatgatattaactatgaagcgataactcaggcaggcagggtgccggcaagaaagtttgagagtgaaatcaccaatgcatatgcggcattagataaagcgaacaaggcactacgccaggagttgatgtcactgacggcaaatccgccagaaggtgagttactgaatgataaaatgaaagataccgcgattggtatcatggaactcattccgcttaagaagaatacggtaaagggagttaaaaaagtctatgtccgctcagataaaataaaacagcactggcggacatacaggctcagtgaagttgataaaaagagcggtgaagccagttttataaaatataaaaataagactatcacaacccaggatgctgatggtaaaacggttgagaaaactattcgccaggcaaaaatagatactgaaaaactaataaaacagttcaatactgtccctgcttctcttaaatgtgaactggttaaagacacgaatgttattgtcagcagctgggcagaagagatgaacaagtctctgacatggccaaagggaaacgataaggtcgacgaatctgtctaccaccagtatgttgacatcagcgcacaggctcaattgatgcgttacagccatggagcagggctttcagcgaaatataatccgtcagaaggaaagttggagggcaagatagaaggccatgccagttttgctctaggggaagccaagaccgaagctgttctgtacttgccggacaggttaggtatcagcctgttatttcctgcgaaagaggtgaccaaacaaacaccggatggcgtctgtaatatgggagcactgcgttttgccatgaaactggtgttgtcaggtagcgttggtgccagtgttgcaattgaagtgggggtaaaagtagactggagcggagaaatgggaaaaggctatggcattaaaggccgtcctgccaccctgactgctccaccgttgccaggacaacagcaggtgaatttaaagaccccaaacatacctgacgcgcaggggggcggtgaaattggtgtttttgttggcgctcaggccggaggtaacatcagtggggctattgaatggtttgacccgcatcctgatgagacgccagcagatccagcagaaaaaggtttggagaaaggtgacaagcccattgttaataaagagaataagtttgccacgatagccaaactggaagcaggtatgacagttcaggcgggagctggcggcagtggtgttttttatatcacttatattcagggtcgtttccgcatttattgtaaagcggctttttgttggggagtgggcgcaaaaggagaggtggggtttgaggttgacggcagtagctttgcggctttcatgaagagctttctttatatgctgaggaatgtggattatcagaagcttgagctgatgatggaaggggatgccttccgctctctatgcgcaatccctattattatggcggcacaagggatacaggcgggtgaggccatgcttaagaatatggtcgtaatattgcaacaaattagagcagatcttaaggatgaaaacaaacgcgtcagcttaatggacagtattttgtctaatcctgatcagcttaaatatacccctccggaaacaaaaggggcagtgattgccacattaattgacaagaactgggcggactggcttgatccacgaaatcagaataatgattttttttccgttaacagctggaagctcggtcctttaaagaaacgaaaacaagcggtgtttatggcactgaagtgggtacaaagtcaggcagattataacaatgtcatgcagcatttgacggtatcaccaggggagaaaaaaggcagtaaggaaccaaatgaaaaagatgtgattaactttttaggcatcggggaacacaaattgtttttttacacaaattatggcgaaaaactaacgttgttgcataataatctcccgactaccgttgacccggatgaaccatttaagcctatcccggatatcctgatgtcagaatatcttgccatggttgacgagcagcatccaactaatacaatgattgcttga

SEQ ID NO: 158842 - DNA, 129 bp, Enterobacter cloacae
atgccctttacccgctacaggataacaaccggtgaaggaagggtatttgagggcaggactgatgcggaaggtaaaacagttaccatttataccgccctgccagatgccctgcatgttgagttactttaa

SEQ ID NO: 158843 - DNA, 2325 bp, Enterobacter cloacae
atgaatctatctgactctttgcaaaacgttttatccggggcgggaaccttgaaccgctacaggctggatattccttcctgtccttctccacttgatgtggaagacttcagcggtattgaaggcctgagcagaatttacaggtatgacatcatttttaccactacggacaaacatcttaaggctgcctggtttttgtgtaaacccgcaacccttacgatggggggcgggttactggagagtctgactgaacagaaaaaagtgcacggtgtcattactcatttcagacgcatttctggctctgccgaccagacacagtacctgattacgcttaaaccattcctgtttttgctggataagcagcaccgcagtcaccgtttctttgtcaataagtcagtacccgaagtggtcgggcaggtgttacaggagcataacctgcatggctgggaatatgaatttaacctcaagcagatctacccaaagcgcgagcagataaaccagtaccaggaaagcgacctggcgtttatccagcgcctgctggcggaggtgggaatattttactggtttaccctccaggaagacgcgcagacagaagtggtgcattttgccgatgcgcagcgggcgttggtatttggtaaaaccttgccagtcaacagtccgtccgggatgagcgacagcggggatgactcggtgtggggcctgaacatcacccataacgtggtggaagccagcgtcaccacgaaagattacaaccaccgggacgcacagagcatactgctgtcggcaccggcggatatgacccggggagacggtgaaggggtgacctatggtgatgtctatcactaccggctgcgccatctggcgcgcggtgacaaaatcgatccggcagcagagacggccaacttttacgcccgcctggaccacgagcgttttctggcaaaccagacgcaaatcacaggctacagcactgcggcgtggctggcacctgctcaggtgctgaatattaccgacggcctgccacctaccctgcctgctgtcttacaggaaccggtgctggttatcagcacgcattttactgccagtcgcaagagcgcccttctggtggatattttgggcattccgtacagcgaaacggtgtgctggcgtccggcaccgctgccgcgcccgaagatgaccgggacgatgacggcgcgtatcaccagcgcaaaagccaacgatatctacgcctggcaggatgcatccgggctatatcgggtgaaatttgacgccgaccgggatgacaagtcgcagggccaggagagcatgccggtacgtctcgccaaaccctacggcggcgacgtgtacggttttcacttcccgttgattcagggcacggaagtggcgatcgcgttccacgaaggcgatcccgatcgtccgtatatcgcccatgcgctgcacgactcgcggcacgttgaccatgtgacggagaagaacagcacccggaatgtgatccgcacgccgacgaacaacaagctgcggatggaggacaaacgcggcgaagagcatatcaagctcagcacggagtacggcggcaagacgcagctgaacctggggcacaatgtggatgcgtccagggtgctgcggggtgaaggcgcggagctgcgtacggataagtgggtgagcatccgggggggcgccggggtgtttatcagcgcagacaaacagccttcggcaggcgacaggatgctggcgatggatgaggcgattgcccagcttgaaaatgcgctgggtatagcgaaaagcctggcgtcggcggcggaatcggctcaggccctgccgtcagataccgggaaccagcagacgctgaacgatgcgctgaaagacctggcacatccggggatggtgctgaatgcgccgcagggcgtgagcatcagcagtccgcaggcggtgcggttgtcttcggggagcgccagcgtggggataatgtcacagcagaatacggatatcagcgcgctgaagcgctttacggtgtcggcgggagaggcggtcagcctgctggcggcgaaggcggggatgaagctgtttgcggcgaagggaaaggtggaaatccaggcgcaggatgacgggctggatgctgttgcgaaaaaggatattaccgtgaccagcgtggaaggccgggtggaaatcacggcggcgaaggaactggtggtgaactgtgcgggagcgtatataaaactcagtggtggcaatattgagctgggctgcccggggaatatcctgctgaagtcagtcaatgtgcagaaaatgggtaaggcggattatgatgtgaaaaaaaagaacttcccgtag

SEQ ID NO: 158844 - DNA, 1170 bp, Enterobacter cloacae
atgactatatcgttcaaacttcgcatgttgtgcttaaccggtacactggctgtcatcgggctgttcctttcaaaacagagcgtcatacccggcgcgtatgcacttgagacatcaaactttaaaacggtgcgaactacgtccgcagttgttcatacggtaaacgactgggtcgaattctcgggaaaactggaagccaccgatgaggtcactgtacgttcaaaagttacaggctcgattgtggatgttaagttcagggatggtcagttggtcaggaaaggcgatattttatttattatcgatccagccccttataagactgaactggcccgggctcgtgcagcatacgcgcaggcaaaagcgaagcaggacctggcattgttggatctgtcccggggtaaaaaacttatcgggacccatgctatctcacagcgcgattatgacgttctgaacaatgccgcccgggaatcgaaagcagccagggagattgccgaagctgaggtcgagagcgccaggctcagcgaaagctatacccggatcaccgcaccggtaactggccgtatttccagagcagaactgacagtcggtaatctggtcgcagccggtattgacagtccggttcttgcatccattgttgctcttgatcccttgtatgtcgcttttaatgcggatgaacgaacctatcttaattatatcgacaagctttcaaataaagacaaacctgaagtgctggtaggactggccgatgaaaaagattatccacataaagccattcttcattctgtggataatcatctcagtactgaaaccggcactatcaggatgcgcgcacttcttgataatccaacatcaaggttgcttcccggtttacaggctcgggtcagactccaggcaagcaaatcttatacagcagtaatgattgaccagacactgatccgcaccgaccaggacagacgctatgtgctggtagtcggaaacagtgacaaagttgaatatcgccccctcgaactgggaaacagacaggggaaactgattgttgtgaaaaaaggcctcaataagggtgacagagttatttccggtggggcgcagttggtcggtcccggtgaaacagtcattgtcagcaaagacgaatccccttcttcaaaatcccgggaaggaaataagtcatcatga

SEQ ID NO: 158845 - DNA, 3192 bp, Enterobacter cloacae
atgaaagtatcaaaattctttatcgacaggccggtttttgctggagtactgtctgcgttgttcattctggcagggattatcgccatatttcgtctgccggtatcggaatacccaccggttgtccccccatccgttatcgttcatgcccagtatcctggagccaatgccaccacgattgcacagacggttgcagctccaatagaggaaactgtgaacggtgtagagaatatgctgtatatgcagtcactttcaaatgaggatggcaatctctatctgacagtgaccttcaaactgggcacagatcccgatcaggctcaacaatgggtgcagaaccgggtgtcgcaggctctgccccggttacctgaagatgtccagcgactgggtgtcacaacgaataaaagctcgccgaatattacacttgccgttcatatgatatcgcctgatggcagatataacgataattacatcagtaattacgccatacgtaacatcaaagaccagctctcgcgtattgagggagttggccaggtatcagtatggggccccggtggttacgcgatgcgaatctggcttaatcctgatgctatggctgctcgcggactgacgacatcagatgtcgcctctgctatccgtgaacaaaacgcccagtcaccagtgggaagcgttggcgcagcccctatggcagaagaaacaccgttacagttgtcagttaatgccagcggtcggcttaaaacggctgaagaatttggcaacattgtgctccatgcccgacaggataccagaacgacattattgaaggatgtcgcccgtattgaactggccgctgaaaattatgccatgcgtacttacctggataaaaagcctgcggtagcgctggccatacaggagtctccgggcgcaaatgctctggaaattgcctcacgggtaagtcgcacaatggaagagctgaaaaaacagttccccgaaggactggattaccagatagtttacaatccaaccaaatcagtcagggcgggtatagaagctgtgcttcatactctttttgaggccatactcctcgtggtactggttgtttttcttttcctccagacctggcgcgcctcagtcattcctctgctggctgttcccgtttcgataaccggcacaatggcatttctgtacctctttgggttttcaatcaatgccctgagcctttttggcctcgtcctggctattggcattgttgttgatgatgccattgtggttgttgaaaatgtagaaagaaacatagaaagaggcatgacgccatatcatgccgcctgcaaggctatgcaggaagtcagtagtcccattattgcgattgcgctgacgctgagtgccgtctttgttccgctggcttttatgagtggcctgaccgggaggttttatcagcagtttgcagtgacaatagcagtttcaacgattatctccgctattaactcccttacgctctcaccggctctctctgccatgctgctgaagccacgtgattcagacagcgactggcttacgcgcattatgcatcgtagttgtggacggttctttacggttttcaaccgcctgttcaacagtagtgccaggcgatatgaaaaaggtgttggcgcgcttggccagcgcaagattctgattatggtgatttatggcattctgctggcaatcacgctgttcctgggcaggtctgttcccgggggttttatccctgctcaggataaggaataccttatcagttttgtgcagcttcctgctggcgcatcattgtccagaacagaccgggtactggaaaaaatgaatgaaatagcacgaagtgagccaggagtatcttccacatcttcttatgctggattgtctgtaaacggcaccaccacaagccctggttccggtctgacatttgtcctcctcaagccttttgagcaacggccaggcatcagcgcagatgatgttgccgcctccctgaatgccagatatcggtcacttcccggcgcagattttgcggccgttttcccggcaccacccgttatgggtctgggttccctggggggattcaaattgcagcttgaagacagaggaaatatcggttacgacggaatggccgaagtacttcgacgctttcaggcagaagcagctaaatcacctgtgctgacgccacttttttcaacgtaccagaataattttccacaaattaatgtcgatattgaccgtaatcgcgccaaacaacttggggtgaacattagtgatatcaccgagacattacaatcctatcttggctcatattatataaatgatttcaatataataggtcgtgtatatcaggtaagaatgcaggccgacgcagagttcagggcgaccccggaggatatactgaaactacagacccgaaatgccgatggcaatatggtaccgctgtctgccatagcccgtattgagccgacacacggtcctgagctggttacccgttataatggttttacagcggtcgatcttagtggcgcgcctgctccgggctattcttcaagtcaggcgatggaagagattgaacgtatagcaaagaaaacgctaccacccggcgtagagtatgagtggacagacctgacctaccagcaaattcttgcaggcaacagtgccgtctggattttcccactctgtgtattcctggtattcctggtgctggctgcccagtatgaaagccttacgctccctttggctgtcattatgattgttccaatgagtatcctttctgcacttaccggggtgtggctgactcatggggacaataatatctttacgcaaattggatttatcgtcctggtcgggctcgcatctaaaaatgccattcttatcgttgaatttgcccgtgaacttgagctttcaggtaagtctgcctttaacgcggtgaaagaggcatgccgtctcaggctgcgtccaattctgatgacctcactggctttcatcatgggtgtaatccccctgatggtatcgcatggagcaggcgctgagatgcgtcaggctatcgggatatcagtattctctggaatgcttggcgtcaccctttttggcttgtttatgacccccgtgttctacctgttagcccgacaaatatcagggaaaccactgcactcggcctcattaccggacgcgcctgaggaacggccggtaacagaacaggcttcagactaa

SEQ ID NO: 158846 - DNA, 420 bp, Enterobacter cloacae
atgagaaaagaccaccggctgtcccgtgcattacacgtgctgatacatatggataaaatccgcgatcccgttacctccgaagatatagccttgatgattaatacgaatccggttgtggtcagacgccttttccaggggctcaaacaggcgggtatcattcattctgaaaaagggcatggaggtggctggacactccagaaacctctcggagacatcactctccttcaggttttccacgctattggcagcactgaacttttttcaataggctgggcgactgagcatgacaaatgccagatagaggatgcagttaacaatgaaataagtgatacgcttgaagaggcgagatgtctgattacgaaccgctttgctgaacttactcttgacaggcttgtgccggaagtccttaaacataaataa

SEQ ID NO: 158847 - DNA, 456 bp, Enterobacter cloacae
atgaaactttcgttgttgcataagtggtgggatatcatgtatcttatactattacatgatatccatacagagagtatttttatgtcattcgaaaatgtgtcagaacagttatgggtctgcctcgtcattgcactgatgtccagttgcatttcaatcaccgtcacacagcaggaaatgtttcgcccgttgcgtgaatggatggtcaaaaaaaatgccatgataggctaccttttcagttgtttttattgttttagtcactgggtggtttttgccggtgttgcaatttacaggcccgttcttgtccattcaggcttctggttaattgaccttgcggttacggcattctttaccatcggtttaacggccatgttcagcgggatcattctgaaagtgatgagaaacgctatcgccaaagcaattgaagaaaaagaaatgaaaaacaagctgggtttgtaa

SEQ ID NO: 158848 - DNA, 945 bp, Enterobacter cloacae
atgccagaaagattgccctccatatctcaacagtccgaaatggcggctatgatttgccagctcgccccacatgaaggtcacacccgtacgttgctggatggcgtgcgtctgatgcgtgctgacggtgcgctggggcgtacccccgtgttgtacgaaccaggcattgttattgtctgtcaggggcacaaaagaggttacctggctgacagggtttaccactacgaccctttgcactacctggtgctgtcagtacctctgccattttcaagcgagacagatgccagcccggcagaaccttttcttgctgtgtccattcggctggatatgacagctgtggcagacctggttatggctgtcgagcaccatgccactgcatcaggttcacccgttggcattgtctccacaccacttgacgacacgctggcagatacgacagttcgtcttctgaaggtattattttcaccacttgaagcccgggttctggggccggggattgtgcgggagctgatttttcgtgttctgctgggtgaacagggcggagccattcgtgctgcgctggcctgtcatggcaactttggacgtatcgcgcgtacgttacagcgtatccacctcgattacgcccggccactggatgtggcttcacttgcgcatgaagctggcctgagcgttccggcttttcatgcgcatttcaaagccgtggcggcgacttctcccattcagtacatcaagtcagtacgtcttcatcaggcgcgactgatgatgatacgggacaacgttactgcagcaggggcagcagctcgggtcggctacgaaagtgcgtcgcagttcaatcgggagttcaaaagactgtttggtcgcagtcccggagaggagacacgtaaaatgcgcacggcattcgcactgatggaacctgcgcaactcgaagcagcgacatcgacacactaa

SEQ ID NO: 158849 - DNA, 744 bp, Enterobacter cloacae
atgaaaacagtggtatcagaaacgtctaaggtggtcattcttaccggtgccagtagtggtataggtgaggccacagcccgtcatctttccagtaaggggcatcatttgtttatcggtgccagacgtatggaaaaactgaccgcactggcgacagaattgcgggcaatggggggtaatgttgatgccatggcaattgacgtcacgcaaccagaagatttgcaacgcatcgcagccagggcgctggagaagcacggacgcattgacgcgctcataaataacgctggcgttatgccactctcaccgctggcagcgttgaaggtcgaagagtggaaccgcatgctggatgtcaatgttcggggcgttctgcacggaatagccgccgtcctgccgatcatgcaggagcagggttatggccacatcattaatattgcctccacaggcgcgtatacggtctcgcccacagccgctgtctattgcgccagcaagtttgccgtgcgcgctatttctgacggactgcgacaggagaccgacgcgatccgggtgacgctggtcagcccgggagtggtcgagtcagaacttgccgatcatattacggacgaaaccgcccgggctgccatgcgcgaattccggcgcatcgccttgcctccggagcccgtggcgcaggcaatcgcctatgccatcgaacaacccgctgacgttgatatcagcgaactcatcgtccgccctgtggccagtcttcattaa

SEQ ID NO: 158850 - DNA, 768 bp, Enterobacter cloacae
atgtcagagtcaggctctttttccagggctatgccctttgcaggccgtgttgcgatcgtcaccggtgccgccagcggtatcggcctggcgaccgtcgaactgttgcaccgccagggagcacgcatcgtcgcggttggccggggagataatgtcaatgcgcttacgcgcgaaggcattgtccccgttgtcgccgacgtgactcaggaagccagtgcggaactggccgtgcggactgcaacagaacagttcggtcgcctcgacgtcttaatcaacaacgctggcatcatcatcaaccagccggtggcagaaatgacgctcagggaatggaaccaggtcatggctgttaatgccacgggcgcatttcttttctcaagggaagccatgcgcccaatgatggcggcaaaatcgggtgcaatcgttaatattggttcttacgcctgttatcagtcttttcccggtatcgccgcctatgcagcttccaagggggcgctggcacagttaacccgtacactcgcgctggaagctatcactcacggtattcgtgttaatgcagtcggctccggagatgcggtgacaaacatcacgaatacaatccagcccgacgggcaggcatatctggcagagcatggtcgtaaagcgccggttggccgtgcagcccaccccgatgaaatcgcagaagtcgccgcctttctggcgtcagacagggccagttacattgtcggcgcagtagttatggccgacggtggcatgagtgtcgccattcagtga

SEQ ID NO: 158851 - DNA, 858 bp, Enterobacter cloacae
atgcaacaacaaacctcccctgcaaaagtctggtttatcaccggcgctgctcgtggtattggcctttcgctggcacgccagttactggcgcgaggcgatgccgtagccgcaacctcccgcaccctgaccagtctacgtcaggcattcggcgacgataacgcgcgactgctggcgctggaggtggacctggtgaacgaagccagcgttcaaaaagccatcgacagcaccattgccgccttcgggcgcattgactgtgtggtcaacaacgcaggctacggccagcagggcaccattgaagcattaaccgacagcgaattgcgtcgcaattttgatgttaacgtgtttgctcccctgcatgttctgcgccatgccctgccgcatatgcgtacgcggcgcagcggacatatcttcaacgtggcgtcgatcgtgggctttcagggcggttacgcgggctggggcagctatgtcgccagcaaattcgcactggccggtctgaccgaaaccctggcggccgaactggccgagcttaacatcagagccacagtggtttatcctggaccggtgcgcaccgggtttctgtcgaaagagacgctggtcgtggcccagcgcacaatcgctgactataccgaagctcaggcctcgctggacctccatctgaacggtctggacggcaaacaggctggcaatcctgataaagtcgcttctctgatactgcaggcggcctttgctgacgcccctcccgtgcatctttttgctggtaagattgccaacaccctcgctgaacaaaaaatgcatgcagtgagtcaggaccttgatgtctggcgaagcgcgtcagacgccacggattttgaagagtaa

SEQ ID NO: 158852 - DNA, 558 bp, Enterobacter cloacae
atgcatgacagcctgcctgcggaaaaagcgtaccgtattcttgaagctggtcccgttattctggtgtccaccagggggacagatggccggacgaatctgatgaccgcaggttttcacatgatgatgcagcatgccccaccgctggttggtgtgattatcggtccctgggattacagctatcaggcgctgtcagataccggggaatgtgttctggctgtaccgccagccgggatggcaaaggccgttgtggacatcggtaattgctcgggagaaacagacgacaaatttgcgcgtttcggcctgacccccgttgccgcgcaatcggtcagagcgcctctggtagataaatgcctggctaacctggagtgcagagtggtggatgaccgacaggtgcggcgctataacctgtgggtgctggaagttcggcggatttggcttgacagcgcatggcaggaactgcgcctgctccaccatcagggcgatggccgtttcagtgtcgacggagagatgcttgaccttagtgacaggatggtaaaatggcgcgacctgatgaactga

SEQ ID NO: 158853 - DNA, 906 bp, Enterobacter cloacae
atggataaactggcagcaatgcaggtctatgtcagcgtggtggaaactcatggctttgcaagagcggcagaagtgctgggtctgccacgctctacggtttctagggttatccgggagctggaatcctggcttggtatccagcttttgcagcgtactacccgcaaactcagcatcacggcggagggcctgcgctactacgacgaatgcaaaaggatcctgacggatattgcggccatggagtcgtcttttcccacccgatctgagcagccaggaggccgtttcaaagtggggatgccccagtccctcgcccgacattgcattatccccggactcccgtcgtttctccgccagtaccccgggctggaagtgatgctgtgctcaagcgataatgttgaggatatcatcagggaaggatatgactgcgtgatccgtactggcaggatcgaagattcaacaaccctggttgcccgcccactgcctggttttacctgggtagttctggccgcgccgtcttatattgatgctttcggcaagccgcaaaaactggatgaactggaaaagcatcacgcggttggctatctgaatcaccgcaccggacgcacaactgaatggttttttacccttgatggtggggatcgggcgatccgtatgagagaggtgctaatcgttgacgataccgatgcctatattcaggccgggatagagggggttgggttaatccgtgtcgccagttatctggctatgccgtacctgcaaagcggggaactggtctcctgtctggagaacagcacctctaaattaccgctatccctggtatacccctatagccgttatataccaccgtcagttcgcgctttttatgactggagcagaacgatgttaagtcacccggataatcgtcagtaa

SEQ ID NO: 158854 - DNA, 333 bp, Enterobacter cloacae
atgatgcagatttatatagtcagaatggaccatccggatggcaccgggtggaatatctttgtgcgtgagcatgtgatttatctgaaggggctgatagaacagggcaaactgttagcgtccggtccgctcaaaaacacgccgctgcgggcgggatttcttattttcagggctgagacgcgcgatgaagtccagtccatgatcagtgcggacccttttgctcgtgaaggtctcatcgctaaacttgaaatccatgaatgggacccgttgtttggtcagcttgacaggtattcaagccacaatacggtcagtgagttgcaggacttaattggctga

SEQ ID NO: 158855 - DNA, 894 bp, Enterobacter cloacae
atgctggataaacttaccggaatgcgggccttcgttgttgttgttcagacaggctcttttgtcgcggccgcagaccggctcggtatatcgcctcagatggtggcccgccatatcgccacacttgagaagcagcttgaaacgcgtctgcttaaccgaacgacgcgcaggcaaagcctgacgccggcaggctcgctgtactacaggcgttgtgaaacaattttacaagccatcaacagcgcagaacgggaagcaagcagtacgagcgaggttcttgcaggtacgctacggctgaatgcgccggtaacattcggccgttatgtcttagtggattttttgagcatatttcttgagcgccatccgcaaatgcgcattgaacttactctttctgatgacgttattaatcctgcttcagaagattttgacctggtgatacgcatcggcgagcttgataagaaactccggcttgcggcaaaaccgttgccgccataccgatttattgtatgcgcagctcctcaatacctgacaaagtacggtcatccagaacaaccttctgatctgaaacatcatgagtgtctggtttttgcgccctggtctgcgggattaagccattactggccttttgccagtaatgaaggacctgctgaagtgatggtaaactctcgcctggcgattaacgactggggagcaatgcttgaggctgcattaaggggcacaggtgtgctggttggttatgaaaaagggctcaggaaacttatcaacaggggaaaactcattcctgttctggaggacttcactattccctcacgggaaatgcatttattgtacgacccttctcgggctaacgaaaaccggtataaagtttttattgacgaattgtatgaacatcttagctaa

SEQ ID NO: 158856 - DNA, 675 bp, Enterobacter cloacae
gtgacatccaaacattcgtgcgtactccctactgaacggcgaatagctctcgtagcctcttgcatacgcagaggatccgactttcatccgcaggggcgggatcatgagccgcatttccagcaaccgaatccaagtgctgtgagagcattttctgtttcttacgtagccaaccttccagtgcgttcggttgcggtattgctttttcatggcggatatccagcctgcccgctgcgcttttaccccggatactggcttcgatgccgtacagttcaccgatgcgatgcagtgcttcggtcgttatttccgacggggtgcgcacgtgcacgtcgtggattttcgctgtgcgtaagcccagctgtcgcttcctttatatgtcactcgcgatacagctcgttgaaccctgccttagcatctgccttcagcccccctgaacccgcaatatgcgtctgcgggttcgcgggcatggttttatctgtttcatatggatacatttcgagatcacgttacctccgaagatatatccttactgatcactacgaatccagtctaaggcagatgcctgttccggggataagttggcaggtactaaccatttggggaatgtccagggaggggggcacttcaaaaatccctcacttcaaacaccgttcagctcgttttgtaatggcagattga

SEQ ID NO: 158857 - DNA, 174 bp, Enterobacter cloacae; identical to SEQ ID NO: 85415

SEQ ID NO: 158858 - DNA, 678 bp, Enterobacter cloacae
gtgctcagcggcgtcgtcggcaccggctcgtcgctcatcatgctgcccgtcctcatcactctgtacgggccacggatcgcggtacctgttatggcgattgcgtccctgttcggcaacatcgggcgggtgattgcctggtggcatgagatccgttggcggccggtgtttgcctattcgttggcgggagttcctgcggctgtgctcggggcgcacacgctgctgacgatctctcctgccactgtggacatgttcctggcagctttcttccttgcgatgatcccgctgcgccgcctcatcagacgatcgaacctcaatctgaacctctggcacctgagttttgccggggcgattgtcgggttcctcacggggttcgtgctgtccaccgggccgctcagcgtgccggtattcaccgggtacggaatgagtggcagcgcgtttcttggatcggaggcggcaagcgctatcctgctctacgcaggcaagctcggtacattcggtatatcgggcgtccttgcaccggccgtcatcacacgtgggtttgccatcggcatcgcattgctcgccgggtcgatgattgcgaaacgtctcgtccagcggctccagatgcacacgttcgagtttctcatcgatgcggttcttatcgccggggcagcaggaatgatcctctccctaaaatga

SEQ ID NO: 158859 - DNA, 213 bp, Enterobacter cloacae
atgtcaaaaaaacaaacactatcaaatacaaactatagttcgcctgactggctgactatccgtgaagcagtcgaagtgataaataaaaaaggactgaaaattaaaaaaaaagtgacatttacaggcatgcattacatggcagcattcatctctctatttactttcagtcgccaattacattacgaaaaatacagatgtcgggctacaaagtaa

SEQ ID NO: 158860 - DNA, 234 bp, Enterobacter cloacae
atgagaaaacccgattattatgcatatgttacccaggaaagtcagccggatactcagggcgagaaaaatacatactggacaaaagtcggcgttgcctttgctcaccacggtaaagccggtctgaatattgtcctgacgcccggtattgccgtctccggcaaactagtcctgctggaaccccgcgaggaaaacagtccgcagcagagtacggctcctgtcgaaaccgcgcagtaa

SEQ ID NO: 158861 - DNA, 663 bp, Enterobacter cloacae
atgctttccaccactgcctttctggcggcggccatgcagtgcgccgccagcattcatccgtccacggcactcgacgtggcgcgggtggaatccggttttaacccgtatgccattgccgagattgttccgaactccggagaatcttccggcgataaacacgttaattctcaccagccagccagtcggggagaggcagagcatattctccgccgcctgatggctcagggccgccgttactctgtcggcctgatgcaaatcaccagcaccaatttccgccattacggcgtcacggccagcgacctgcttaacccttgcatcaatctgtcggtatttgagcgcattctcgccgactgttaccggcgcggtggcaccctgaaacgcgcactcagttgttactactccggcaactttgaaaccggccagcgaccggaatccgcctttaaccagaccagctacgtgcagcgcattggctatgtcgtcccgtccacccgggaagaccggcagcgtgaccctgaccggaacgcgcaaccgcctgtccgttatcccgcagttgtgctgcgtggcgatcctgccggtgccactgcgccggtcctgacttctctgcattatcccggtgccgtcattcgcggcgctatccctgttatccctgatgaggataaatga

SEQ ID NO: 158862 - DNA, 159 bp, Enterobacter cloacae
atgtgttttgcaaatttaaagatactcaactttcgtgattttgagacagttaatatccctctgacgggcaacatagtcttgttgggcgagaacctcgtcggtaagagcaatcttccattagcgattcgcctgttcaaccttatgatagatagatattaa

SEQ ID NO: 158863 - DNA, 1944 bp, Enterobacter cloacae
atgagtcttcagatagccagccttgtgatttacaaccacgggggagaacgtcgtgaaatcacccttcatcccggtcaactgaacatcttgaccggcgcatccaaaacgggtaaatcagcaataattgatattattgattacgttaccgggcgaagcgaatgttacgtagccgatggcgttatccgcaaatgtacgcaatggtatgggatcctttttcaactgaatgatagccaaatctttatcgcgcgacgcaatccagatgccggtacacagtctcacggcgacatctatattgcccgagggagctccctgtcgattcccgatggcgcaactctccacaaaaacactacagtcaacgctgtggagaaatttctgggaacggcaatcggcattaatgaaaacgaacaccgtcccccgagtcctacgcgaccctctctggaggcaaatttccgccactcgcttcttttttgtttccaggatcagaacgacattgataacaaacagcgtctgtttcatcgccaagatgatggttttatagcgcaggctatccgggacacctttccttattttcttggcgcaatggatgaagagcggctcttacagcaagcccaattggacgatgcgcgaaaactactgcgtcagcttgaaaggttggtacgggaagctgaatcgctggatgacgccacatttccgcgtgcaaaagctcttcttgaagaagctaaaatggcagggcttaccgacgatcgaaccgtagttgtaaactatgaggcctgcatgactctgctccaaagcttgagcgagcgaggagtattttcagatgcagttgtagtaagtgatcatgatgacatattgatgcgactgcgctcagaacgtcaagggatgcgtactgagcttgagagactgaatagcgagattcgtgaaacgcgggcgtttacctcagaatcaaccggctatgagcgagaggcgcgggagcagcgtgcaagactcagcgtagtgaatttgataaagtcctcagaggtatcgcagctttgtcctctttgcgaaagtcacctcgaaaacattcctccttctgttgctcaactcaaccattcactcaatgaattgagccgacaacttgaggcggtagaagcagaaaatccaaggctccagaagcgcttagcagccctccaaatacaggaaaatactctcctcaataatcttcgagagaatcagaaaaaaatcagtgattgcatccaacaagctgaatatctgcgagtacagcaggaaaactttatgctgcaggcgcggactctggggaaaatcgcacagtatcttgaaactgtcagcgatgcagagcagtattcgggtcttcgcacccggttagaaaatcagcaattaactgtaagtttccttgaaaaaaaattggatccgactgctgtacgagagaaacttgcggccttcctcaatataatcggccgttatatgactgaatattcggaacttctcgatctagaacatcagggaagcaacctgcgtctagatatccgcaaactcaccgttgtggcagataccttggacggaccggtaccacttttccgtatgggcagcggggaaaattgggtcggctaccatattttggctcatctggcccttcatcgctggttccgtcaaaaaaaacgccccgtgccaggatttctaattctcgaccagccatcgcaggcgcattatccacctgaaaaagataatgatgggtctattgacgctctgaagaatgaagatcagaacgctgtaaatcggctgttcagcctaatcaaccacgctgctaaaacgctcgcccctgatttacagataatagttatggaccatgcagaccttaaagatgactggtttcaggctgcagtctctgatcgctggcgtaatggcgtaaaacttattccaacaagctggataacaccccagaaataa

SEQ ID NO: 158864 - DNA, 501 bp, Enterobacter cloacae
atggagccttggtcttcccgtcccatagaggagagctacctcttcaacccagctttctgcgtattgcttatagccaatacatcgtcagaattcaataaaaagaccggttgctctttaccctttgcactagcctttataatccttccgataattcttcatcagaaaacacgcaaggctctgcctgctacaaccgtaacgtcactaatggcatggtgccaggacaaccgagatacgatgattaatttccccgacagagtcaggcggctaaacggtattacccgtgagagcatattatttggcacaaggcaaagcgctctttgcttggatgaaaatggtgacttaaagaaaggagctaaactgctcccacctacagaaaaacgaacgccgctgcttactcaggaagccggagaatgcattgagcgtgcggcatttctggggcgttggctcgcagcagctggtacaacagcgactatttatgctgcatgggggatagcgccatga

SEQ ID NO: 158865 - DNA, 1188 bp, Enterobacter cloacae
atgagtaacgcgcatgaggccagcgcgtcggccactggctatctgtatcagtgtcgctacgcattgctaaaaggactggaagctactctggattcaccagagttcaggatttcaattgaaaagtttgatgatatagcttttgaggcaaacggcttaccgattcatcttatccagaccaaacatcataaagccaaaactggaaagctgactgacagcagcgctgacctttggaaaacgctactcatctggataaaaagtgtagccaccgatagtggcggtttctcaagaactcgtcacttcctaataacaactggtttggcaccttcgaattcggcgtcttttctattacgaacagaaagtcgtaacgaggctcaagccgattttttgttactcacgactgcaaacagttcaaataaccgcgcgctacaagaagctttcaacgcctataagctcttaccggaggaggctcgatttgctctgttaagatcaatatatgtacttgatagatctccttcgattactgatgttaaagaagatatttaccggcagttgcaccgtgctgtaggaagacagcatatcgaaattttcaccgagcgtttagaaggctggtggttcgaccaagtgatacgtatgctcagcggcaatgaggtgggcagcatcccagtgctggctattgaatcccgcattgatgaactgcgagaggagtttcgacgttcctcattacctgtagattttcggtcattttctcctcctcaagaagtgatcgctcagctagatagtcgaccctttgtcaatcaattgcgaaagataaatctcggttcggcccgtattgagtatgccatccgtgattattaccgagcttcagagcaacgctcaaaatgggtaagagaagaattattgcttaatgatgagcttaaaacgttcgagcaagacctgatagaggcttggcaaccacgattcgccgcacagaaagacgatttattacctgatagtgatgagtccgatcgtatacgttctggaaaggacctgttcacatgggcagaacagcaggcatgttttcctctccgcagcctacgagagcggtttcttacccacggaagctaccatattttggctaaccgatacgcagtggggtggcaccctgacttcatgcagaataatagtgatgaacagaaaggagaggattga

SEQ ID NO: 158866 - DNA, 774 bp, Enterobacter cloacae
atgctatatccacgttggtgcgacataactatccaagagcaagacaacaagcagctatggcgcttgtccgaacgcgatggaggaagggctgctatcgaagctaccctaactactcggatccgagctcactacgacaatttggacgaaatagctgaagacgtccgtgagttgggatacccaggcgcggctgcaattttggctgagcgcatgccgcgctccacccgagcacgttcgggagagcttggcgagatcctcgcgaccgagttggtcgaagaacatcttgaattcgaggttccgatccgtcgcctgcgatacaaagatggtcgagagatggcgctgcgcggcgacgatttcgtcggtctaaagctcgatgaccaacaaaaattgcactacttaaaaggcgagtctaagagtcgtgtaaaccttgccaacgccaccatctctgaggcacgaaaagcactgtccagagacgatggcagacctacggcaacgtcccttctcttcgtcgcggatcgactcatggagggtgaaggcgaacgacggcagatgggtagacggattcgtaatgaagtcgccagtcgatctgcgccccaagggcgaaccagtcacatgctgttcaccttgtcgggcaacgccacgcctcaggcactgtacgacgatctcgcagcggcggatctggttcgtccccatctttctgcaaatttgcgcatagaagaccatcaggccttcattctggcctgctacgagagggctctggcacttggaaacgactga

SEQ ID NO: 158867 - DNA, 3402 bp, Enterobacter cloacae
ttggaaacgactgaagaactgactgcattcctgctcgacatcacacaagacggatatcgaggtcgcttgcaggcccggggtcaagcaagggctcttattcgccatgaaggaaacttgccaccagacgctccagccttcagcgaagggatcgactccgatcttgcggactatggcttctcagtactacgtgcttccttggcgctacgcgagcttgaaggtgatgcagtgacttggcgaaaaggcttcgtacaggcaggtggggcctttgaggcattggttcagaacgggtcacaggccgacgcatctcgagggttctatcgaacagtgggggctgcttcctatcacttggccaactactctgcgctggcattttcgcttctgtcgcaattacaggccgatcagaatcgttcgcctgccgaggatgctctcgcgctcctaatcgtgcgtgatcttcaaggcttggttcaacgtgcgagggagtggcttagcagcccagcgaaccgagatgagggaatcgccagagctgcggccgagggagcgcttgaccccgacgatatcgtttcgcgtgtagcgacgtcgacaatgttcagagcattggtgttctttgagtttgccctgcaaaccggccaagagtccctcgttgtagaagctcgcaacctgctgaaacgggcgatttcgttgaccaaagcggccagcgcggtgtcactctggtggattcttcgaatcaccgtgaacctgatagatgatctttgggcaagcagtctgcacaaggttctgccctccgaagggccactaggctcgcaagactacgcacaacttcggaagctttttgtctctgagttgtactgcaggaggtcatctgaggtcgaattgtggccttctcaacttctggcggcacagcgagccgtcgatgtctccgacgacctagtggtcgcgctccccacgagcgcgggcaagacgcggattgcagagatcgctgcgttgatggctctggcgtgtggtaaacgcgttttgatagtcacgccactcagggctctgtccgctcagaccgagcgctccttccgcaagacattcacacctcttggattttccgtctcgtcgctgtatggaagcagcggtgtagcaggaaatgacgaggatgcgctccgggaacagaacatcgtcatagccaccccagaaaagttggattttgctttgcggaacgaccccgacatcatcaatgatgtcggcttgatcgtcctagacgaaggacatctgattggtccaagtgaacgcgagatccgctatgagaatctggtgcaacggttgctgcggcgcactgaccatggcgaccggcggatcgtttgtctttcggcaattctgccggcaggcgatcagctcaacgatctgactgcatggattcgcagtgatgcgcctggcgatccgatccagtccagttggcgccctacgcgtcagcgctttggcactctgtcttggctcggaaattctgcgcggctgagcttcgaccttgagccaaatggccctttcattcgacactttgtgccagaggtcccacccattcgccctcgtcgtacggcatttccaaaggacaacaaggagctaactctcgcagcggcatggaagttctctgagcaaggaaagagagctctcgtattttgcacccaacgagatcatgttgaaggatttgccgagacggccctggacctgcagcgacgaggctttctgccatctctgcttgccaacgcccaagaggttgaacgtgccatggccgtaggtagggagtggctaggcgcggaacatcctgcagtacgctgtctggccatcggcgttgcgattcatcatggtcgtcttcccggccccttcctgcgggaagtggagacactacttgccgcaggcgttctacgcgttaccgtggcgtcacccaccttggcgcagggactgaacctcaatgcagcggtactcctgatcccaaatctgtacagggcgggcactctgatcacgggtgaggagtttgccaacgttgctggccgcgccgggcgcgcattcgtggatctcgaaggactcgtgatccacgtaatgcatcagccagaaaattggcgccaccagcgatggagagagttggtcacgtcggccaaggctcggtcactctcaagcggcatcattgtcgtggtcaacgaggtcatacggcgcctcgcgacgtcgggtgtttttgcgcgtggggatgccatggattacctgtctagcacgcaagatgcttggttcccggatgctgtagatggtgagatggagtcagactcaatggagagcctcatcgagcggttggatacaaccgtccttgggctcgtcgaagcgcttgacgcgcaaagtgcggatctaccaaggctgctcgatgaagcccttgcgggttcactttgggcaaggcaaatcgctcaccttgacggcgccgaaaagcagaagcaagtgtggattctcctcagtagagcacagctcatttggaacaaaacaacggtcgagcaacgcaaaggtcagttcgcgatgggagtgggcctagaatcgggccttgccatcgacgcgttggctgtcgtgctgactgagcttcttgaccgtgccgatgcagccgccctcgccagtgacgcagatgccctgatcgctgctctcattggaatgggagagcggcttcttgcgatccgtcccttcgttccagatgacccactgccggcgaactggagagacttgctgggagcttgggtgcgagggcaagacgtagcagccatcggccaagagggaatgcgcttcgtggacgacgcatttgtctatcgcctggtttgggcgattgaagccatccggatgaatcggcgcatcaatggaggcgaatcagaactacccgtcgaaggagctgctgccgcctgcctggaagctggactaccgtccaacgccatggccatgcttgttcgggccggactgccctcgcgggtggccgccaagatagccgtggagcaactcgcgcccgccttcacgaatcgcgcggaaatgaaaacctggttacgatcggaagaagtagcaggcttcgaccatgttcctggatggcccacgcttgagactcatgcaatctggcagcagtttcggcacgacgttgtgtcaagcgtagatggcaggtgggcgtcgcaggagtggacgatgcaatgggcaacagactcaacagtgcctctgcgtattgaagttgatccgcaagatggacaagtgtcgatagcgacgccagatttttcacagctcacaacaatcagacagaggcttcaggcggaactaccgagcctgcttgaagttgaatctctacagagcggaacgagtgtcaccatccgccgtattggaaaaggcgaggcgcgttgggtggataaggactga

SEQ ID NO: 158868 - DNA, 243 bp, Enterobacter cloacae
atgttccacggcaccatcgacagtgcatcggtgtatccgcgtgaagtggtcaaggaagccctggggctagttgaggtgcgtatgctggatcaggtcattgtggccggagcaggctccgtgtcgttttcggagcagtggctgattttacgtaccatctacacaaaaaagctatcagtccttatccacccaacgcgcctcgccttttccaatacggcggatggtgacactcgttccgctctgtag

SEQ ID NO: 158869 - DNA, 882 bp, Enterobacter cloacae
atgatgcaaaaacattttgacattgttcaggctattatcggtaactgctttatgaacaatatggcaaacaatagatttttatacagcaagacgaatggtagctcaactacaaaatacccattaaactgcataggttttttctcatggaatagcagcttgcaaaataattacacaaaatttgtcctatttcctattttctttgattatctggatagctatgttgatcttcgttttgactgtgtcaacgaaagcttcaacaaaaaaatcctcattctcgaatccaatattgataaagattcaattgatgatttgttccttcatacgctgtacaaaatgtgttctcagattagaaataaaatgcttcaccatcggctcaactataacggtgccgaagtgacagccagcgagaccactgtcaccattccgcagttcagagttatcaatgaactgatttaccaatatgtaaaattctcaaagaccggtaattcactctttgaaaaaaacgctctctattccgggttagttgatattcttaaaaaaaataacgatagtgaacatgagtttgttcaacgagtagagttgatgtccgactacttgttcataaccccctatgaagctcgcgatttgcacactatcaacgcccccatgacttccactgacctcattatcgatcgagtctcttatcctgcaaaatgtttctacgatgacaatgaaatatttaaggaaaaatatccagatcctgaagaaaaaatcatcattggaaatcgttattattttttccaaatggaagacaaattatacttagtaccttcggaagcggtaaaccatcgcaaaaagatcactttcggtgagattgatgcctgggagtttcaaacacagtaa

SEQ ID NO: 158870 - DNA, 402 bp, Enterobacter cloacae
gtgcgactgcgctttcatggttttcttctcaatctgagagaacggcgcgtagcagacggtgaaaaagagccggtgccgccagaacggtttttcttttaccggctggtaataccgacgtgttacctcatcggaaaagggaatgccggaatccgcctcaaagacatcatgatatttttcacggagccggtgaatatagaatgttaccggcagcccctcatacgaacgaataacgttattcaggtgcgtggccatcagggtcaggagatgttcgtcttcacattcaaagactgtgccgcccagctcccaggtggcaaccaaatcacggtgacgatttctgatgacgtaggggtgaatatgggaggaatacggaatatatttatccagcgtaatacgctcgtttaa

SEQ ID NO: 158871 - DNA, 681 bp, Enterobacter cloacae
atggaagcttgtgatgacatcgcctactcagtacttgatgctgaagatattgtgaaaaaagggcttgcctcatttcacgaccttatggatttcattcagtgtcatcagctttgtaaagaggatgttgttgcgaaacgcgttgtggataattgcaaagaagatcatacgacctacgcgcaacaagacctttcccctgctgagcttaatgatatgagcatgcaaaagtttcgtgtctacgccatcgcagagcttgttgatgcggttgttatcgcatttaaagataatatcgaaatcaaagacttggtgtcagaaagcaatggtagaaacttgtgtaaggtattgaagaaatttgacagttccaggggctacaagcacagtagtgtccttaagcttgagctaaaaggctctaactatatcaagggcctaatggatatgctttggctcggaattaaaggtcgtgcaacaggtggcacccaatgggatacaccatttggtcgttacgtttacggtcgcatttcggaaaactatcggcgtatttttgaacaaagaaacgacttaccagcccattacaaagaagctcagttgctcgctgatgcgatttcgggcatgactgacagttatctgatagcattacatgatgaactcgcaaaactccaccagtacgaatgtcgtcagagatga

SEQ ID NO: 158872 - DNA, 831 bp, Enterobacter cloacae
atgatgaactcgcaaaactccaccagtacgaatgtcgtcagagatgagaatctccttaagcgccggataaagtattacatcaaatctggtcgggggggtaggcaaagcgagacggcgctaatcaaggcgctgtcgcagcaggcacatctgtatgtttttggtgggcttatccgtgatattggcctttttacggctcaccagtttcgttctgatattgacttggtttttgctggttccaagagacatcttcatagagctctttctgattatggtttgcagcagataactgaaaataaatttggtggcttcagggttagagacttcagtgttgacattgatatctggagtcttgaggagacttgggcttttaaaaatcattttatcattcaaaaagatgtggagagcttgctgaatactaccctaatgtcatgggattcagttctttacgatattcaaaatgataggatcattacaaatgactcatggcttactgatctacatactggtcgcctcgatttggtactagaacataccccagatgtaaacagtgctttaatcagaatattgcgcactatctatggtaaagaagtactcatgctaggtgagcgtctatgccattttttggcatcatcgctgaatttttattcaaatcagacattagttagtgatgagcttgaacgttttaggacaagttacattactagcacaaggctatccaagctccgccaagatcttgccagttggtcaggcaaaggtggtttaaaagttaattcccatctgtactgtaagcagctgaatttagaattaatttcatccaatgaaatgaaatag

SEQ ID NO: 158873 - DNA, 231 bp, Enterobacter cloacae
atgtggagttatactaacttttatcaacactgtaatgtaacccgtatacaacagaaccatctccctacatccctccagatactgcgtatggttatacgtcccacgtattgcgttcttatccacatgctcaagctccagctaaatctaagccgagttaactccctgttcgcgcataattgcacccatcgtttgccgagaaccgtatcacatcagccatcctttatatcctaa

SEQ ID NO: 158874 - DNA, 1788 bp, Enterobacter cloacae
atgaccgttgagaagctgatcaccgaccatatcgatatctggtcctctaccctgcaaactcgttccacggctgggcgtggtagtaacagtaaaatcgacctctatggcatcaagaaactgcgcgagctgattctggagttggctgtgcgcggcaagctggtacctcaggatccgaacgatgaaccggcgtctgagttgctgaagcgaatcgctgccgagaaagcagaactggtaaagcagggtaaaattaaaaagcagaagtctttgcctgagatcagcgaggatgagaagccgtttgagttgccggaggggtgggaatggacacggttaagtgatatcagtgcgtacatacaacgaggaaaaggtccaaagtatgctgaacatggttctgtaaaagttgtatctcagaaatgtgtgcaatggagtggttttaaattagaacaatctcgttggataacggatgaatctattcattcatacactgaagagcgatttttaaaagatggggatgtcctttggaactcaactggggctggtggtacggctggtagggttatttatcttccagtagttaaagaaaaacttgttgtcgatagtcatattacgttaattcgaacagttagagataacggacagtttattagtaactatatatccacttatgggatacagcagcgcttcgatccaaaacactcgaatacattattatctggcacaacaaatcaagcggaattaaatacttcagttattacttctttcttagttccattccctccacaaaaggaacaggaaaggataaacgacaaagcagcagagcttatgtccctctgcgaccaactggaacagcaatcgctaatcagtctggatgcccatcagcaactggtagaaaccctgctggcaacgctgaccgacagccaaaatgccgaagaactcgccgaaaactgggcgcgaatcagccagcatttcgacacgctgtttaccaccgaagcgagtattgacgcgtttaagcaaaccattttgcaactggcggtgatgggtaaactggtgccgcaggatcctaacgacgaaccggcttctgaattgcttaaacgtattgagcaggaaaaagcgcaactggtgaaagaaggcaaaattaaaaagcaaaaaccgttgccacctgtgagtgatgaagataaaccttttgagttgccggaagggtgggaaacagtttatatgcaagatataagtgagttaataacagatggcacccaccagacgcctaaatatacagaaaacggcagaccatttgtttctgctcaatgtgtaaaaccattcaaatttatgcctgagaattgtcgatttgtttctgaagacgattatcaacaatacatcaaaaatagaaagccagaatttaatgatattttactatcgcgagttggtgcaggtattggtgagagtgccgtaatagattcagatttagaatttgcgatatatgtcagtactggattgataaagccaatgaaaagaaatattaattcaaattatttagtgttgtggctgaattctccgatagggagagggttttcctcaaaatacacatatggaaaaggcgtatctcaaggtaatttaaatttgtctttgatcaggtcttttttggtttctcttcccccaaggctagaacaagagcggatagtctcgagagttaatgaactattttcaatctgcgatattctcaaatcgcgcctcctgtgtatccagcaaacccagctccacctggcggatgcgctcaccgacgcagcattaaactaa

SEQ ID NO: 158875 - DNA, 3018 bp, Enterobacter cloacae
atgataattagccttgaagagcttggccttgcctaccgcaaagcgaaagtcgatctgttctattcatcccatgtttcgctggaagcaattgcggcttatgaagagtccctacacaagaatctgacggatctgcagggaaaaatacaaggtgacgacgaatcatgggtggaagagaatgagtttactggcaactggtttctggccacaaaatctgtagagatgtcttgctgggaacagcagcgcgaaccgcaggctaacggtctcatattttcttcacctgctgataagtgggcatatgcttgcaactcaatagctgagaaaaacgaacaaaaaaaaatcaaagccgagtttcgggtaatggctcaatgcagcctggattttcatgttctctcgactctgtggatgttaaaagtcgggcatctttttgatgccaaattatctacctgtgcttacggtaaccgcctgcgccgtactctggatggaaaggatatcaatgcactttcaattggttcttttcaaccttatctcagaccttttcgtgattggcgtgacaatggcattaacgccatgcggagcgcgctagatgacagtaaaagaatcgtggcactcactgctgatgttagttctttctatcacgaactgaatcccgggtttatgcttgatccaaccttcgccaaagatattttggagttggagctcaatgctgatcaaagcaagcttaatcgattatttattaatgcgttaaaggcatgggcaattgagaccccgttgaagaaaggattaccagtaggtctccctgcttcagctgttgttgccaacgtagccctgatcgagctggatcgcgttattgagcagcaagtcgcacctatctattacggacggtatgtagatgacatcatgcttgtcatggaaaatggtgcaaatttccgttccatggcagagctgtggcaatggttgttcacccgttcttccggcaaactggactgggtgaagggcgaggaaaacaaacagatcagttttcaaccaaactatctccatgacagccagattcgttttgcgaatgcgaagaataaagtgtttatcctcgcgggtgaccccggaaaaaccttagtggaagctattgctcatcagatttatgaacgagccagcgaatggcgtgccatgcctcggctacctcactcctccaacaatgtcggtactgatttgcttgcagcaacgcaaagtaatggcgaagtcgctgataatttgcgtaaagcagatgcactgactatgcgcagggcgggttttgccatcaaattacgcgactttgaagcctatgagcgagacctccaaccgggcacatggaaaggccatcgccaggcttttttccgggcatttattgatcatgtaatggttctgccacaattttttgatttatcagtctacctaccccgagtgatccgactggccacggcctgtgaggactttgtcgaacttcgcaaacttatcttcgcgctcgagaatatttgcaatgaagttcgagaaaattgtctccttgccatcaaggcgtgtcctgatgataacctcccctctgaagaagagattattggcaaatggagggctcagctttttagcagtgtgcttgaagctattgttgcagcatttcctccgcgtatttccaaggtaggtaagcaaacctggaatgaccatttaaaaaactggcacacccggtgtgggctaggcatagaatatttgggtcgtgatttttcattaaagggttaccaagaacagcaggcgagattattctctttcgacttagcgcatatgccattccgctttatcggtctacctaaagagatgattgctcaacggggcatacccgctccgaaaacagttgcccactgtgcgaaagcatcagaattactgcctgatgatgtcgttttgggtaatcaggtagtagcgaaatggtgcaaatttaaaatcctgccacatggactgttatttgctacacggcctttcagcctgcctgaactctttatcctaaacaatgaggcttattcagcctcagctcggcaagaaatgcgagctgttgttctcgctgttcgcggttttgtcctcggtaataaaacaccttgtatcgataaacaaggcgtattgcaaattcctgacggccaatctgctggaaaatatggggttgccgtctctagctggaaaacgtccatgtcaagctggactgcggcggtcatgcgttcagccgatcaggatgccaaccgttacactcgattatgtcgcttgcttgatggtgtgatagcccaaccacataacagtcgttacttaattctgccggagctctcactccctgcgcactggtttattaggattgcacgtaagttacaaggtcgcgggatttcacttgtcaccggtattgaatatttacatgccagtaaagcaagggtgcgcaatcaggtatgggcttccttgtctcatgacgggttgggttttccttcactaatgatttatcgtcaggacaaacaacgcccagcactgcatgaagagcaggagttacaacgactagcagggctagaaatgaaaccagaaaagagatggactacgcctcccatcattcaacacggtgattttcgttttgccttgttgatttgtagtgagctgaccaatattagttatcgcgcagcactgcgtggcaacgttgacgcgctgtttgtgccagagtggaatcaggatactgaaactttcaatgccttggtcgaatctgctgcgctggatatccatgcttacatcatacaatgcaatgaccgccagtatggcgatagccgcatccgaggccccttcaaagatagctggaagcgtgatgtactgcgagtcaaaggcggtattacagattattgtgtaattggtgagattgacgtaaatgcattgcgacaatttcaaagtagttaccgttcgccaggcaagccctttaaacctgttccggatggctttgagatagagcattctcgaaaaatgttgccagaaggatag

SEQ ID NO: 158876 - DNA, 474 bp, Enterobacter cloacae
atgctgagaaggtacgctataacaaacgccgtgtatcagccgcggcagtgtgatgtagtcagcctgagtcttatcagcaacaatcagccgttcggctatctgcatttgatactgaggtgggcggccagtgcccaagtagaaactcaccaacgattccgggaaatagttaagccattcaccaacccgttcaacaaaatctggaacaggcagcgcgtcgtcttccagcacgactacccggcaaggttgctcagcagaccactcaagcgcgcgccgatgattccagttcgccccatgattctcttcatcgaggaggagatgggcgccaatactcatggccaacgcttcagcctgccgccgccgggcgtgatggccgattacacagaacttaaattcttcagccaccagcggagctccattaaaaaagccgcacgatggcggctactgtctgaatatcagggtgttgcttctctttaa

SEQ ID NO: 158877 - DNA, 1413 bp, Enterobacter cloacae
ttggctagcacctttaatgattctgatgttttattccaaaaaatatccacaagaacaataactaattcagataaggcaatcagaaatagatctgcagaatcagcagatcttaaaggttcttactctactcatgctgctggtaggtcaataccttactacttaaaacttaggcaaggtgcaataattaagacaatctctggttcaggacgattggtagaggcatcacagagagttaatttcgatgaaattgcgacatggtcttataatcaactttgtctgataaggcaaggtggaggggttaaggacttcctcaattcttttgcaaaacaaaaagatttaagtgaggttttaagatctactgtgccaagtgccttattaatagaaagtacttcattatatgaaaagttacaatcggaaggcgccatactgaaatacaaattgcctgatggatccgattgcattctaaatgaaatacaagtaaatcggttgcttcgtaaacttgaaaaagtttatgaaataaaatccgacttgactattcaagtgccgcttggtaaggctaagatacgaaaaaacaacaaaacactaacgattgactctactgttctaaaaaaaataaaagtttcgtacaactctaaagatataactttgcaaagttttatctttaaaaatggtttctacagcattacgtttactgacccatgctatatgtattttatgggtaattgtttcgaagactcttcaggcatatcggaaatcaataacatattagaaatgcttgtccctaaagctaatataaaaaacgtcttaagtgagaaaggtttgcttttaaaaggaatggataagttctctaatgattccatgtttgatgtggtggaaaacattcatagtggggatgattacatcttttgcgatgacttagggaatgagtgggcagaccatatcacatttaataaagcggattcatgcatttgtttcattcattcaaagcatggtgacaaaagcacatcagcaagtaaacttcatgacgttgttggtcagggtataaaaaatcttggatatatgtattttaatactgctgattttactgttaaattaaaaacaaaatttaataaaaattatactggagtttacaataaaaagtcagtatcaaccaagataaaaaaggtaagaaaaggtgacactaaaaacattaaaaaataccttgacgacctttttaaggatgttaaattgcatagaaaatgcattcttagctgttcatttttatccaaaaaagagatagagcgcgagttcattaatttgcgaagaaaaaaaccggttaagcctcatgtgattcaactgctatggatcttgtcttctttttctcatgctgtaaaagaggctaatgctgttccaattatttattgcgataactag

SEQ ID NO: 158878 - DNA, 945 bp, Enterobacter cloacae
atgactatttccctgcatacccaggctagcgcccctaacaccgcagcggcgaccagcgtatccccgctggacccgtcaggctcctcaaaaacgaaatttaccagaaccaaaactgatatttatcagaccgtcactgacagcatcattgcggcactggaaactggtgttaaaccctgggcgtgtccgtggcagcgtacccctggtatgtcgggtttaccgtccaattacgcaactggtatgggttacagtggaatgaatatcatgttgttgtggtgcagtgcgtcagaacagggattcaatgattcgcgttggatgacctacaaacaggcaaaagcggaaggcgggcaggtacgtaagggagaacacggcacaacagctattttctataccatgttggaaagggaaaataacgaaggagaaactgaatatattccgatgcttaagactttcaccgtgtttaatgttgagcaaattgacggtttgactctgagtgatgaagccgttttcccggcagagacctttgagccgttaccgcaggcggaagcgcttttccgtaacagtggtgcaaccatcattgcgaaggggcagaacgcctttttcgcaccatcaaccgacgaaatccatttaccggaacgtcgtctttttagcgatgctgccaatttctacgctacgggtatgcatgagctggttcactggagtggagccaaaagtcggctgaatcgtgaaatgaaagggaagtttggcagtgaggattatgcttttgaggagttgatcgccgagcttggaagcgcgttcctaatggcggacctagggattgtcggagaggttcagcatgaaagttatattgcttcctggctgaaagcactgaggaacgacaaacgctatattttcaaggccgccagcgcggcatccaaagcgcatcgttatttgatggataaaatctga

SEQ ID NO: 158879 - DNA, 432 bp, Enterobacter cloacae; identical to SEQ ID NO: 128924

SEQ ID NO: 158880 - DNA, 411 bp, Enterobacter cloacae
atgagcaaggtcggctcttttgcctttagcttcctgccggtaatgttctgtatcgccattcctctgggtctggcgcgcgaaaataaaggcgtggcggcgtttgcgggcttcgttggctatgcggtcatgaaccttgcggttaacttctggctgactgccaaagggatcctgcccacgaccgacgcggcggtactgaaagccaataacattcagagcgtgattggtattcagtccatcgataccgggatccttggagccgtgatcgcgggggtgattatctggatgctgcacgagcgcttccacaacatccgcctgcccgatgcgctggccttcttcggcgggacccgctttgtgccaatcattacgctggttgtgatgggtctgtttggtctgatcatccctctgatttga

SEQ ID NO: 158881 - DNA, 273 bp, Enterobacter cloacae
atggcgggtcaagatcagaacagttctaccattttgatcaacaccgtgaacagcaaacacatttttagcaagatcgataccgacagtcgtgatagtcataacgaattcctccgggacgatgtgtaccccatgattgcacaagagttaatcaggcgcataatcaggggaagtcccttccattcgttaaggttaattttttgccatcacgtcattagtatattcacaaacagactcgccattattgactgtatgctggagattcagctccgttaa

SEQ ID NO: 158882 - DNA, 594 bp, Enterobacter cloacae
  misc_feature (471)..(480): n is a, c, g, or t
atgactaataaattcacatccaagatttcctacacagatgccttaacggtagttacctacaagcagcctaagctcagtatagatgttacagacattcttcagggctcagatatacctgtaaccctgcttgataacgatgaacctataccagcaggcaccgctgaggttctctggtcagaggataaagtcaactgggtgcagggagatacaacttacactgtggcttcagctgataccctaccgtctacgatttatgcccggatgcgttaccttgattccgatgaactggcagaggagtcttcatggaaggaaacgtctgctcggttggcagccgcaaaacccaagcgcctttctgtctcggtaacgggggtttcaaaggtagaggttggtcaaaaagttactttggaaggtaagttcacgaaccctaacagtaagtaccagaatggtaataacgtagttgaagaatggaannnnnnnnnnaatggaaaacaccggatggccagacatttaagggctcttcactgtctgttacccttactgagcaaatgttggataaacagggatatgctgcttttgaatacagtgcatggttag

SEQ ID NO: 158883 - DNA, 141 bp, Enterobacter cloacae; identical to SEQ ID NO: 36145

SEQ ID NO: 158884 - DNA, 321 bp, Enterobacter cloacae; identical to SEQ ID NO: 118203

SEQ ID NO: 158885 - DNA, 249 bp, Enterobacter cloacae
atgaagcacattaccgtagacatcgaaagcgctgcttatgccgaatgcagtggagagtcagatgtagacaccaggcattttgctgaggtttgtagtgcgctgggtatcacatatgaacgcatgaaggggatctccatggctggaaaggtatatctgtataactgcaaggttcctgagggtgtggtgttgccgaaatactggagttatggaatcgacaaattcattttgaatcaatacttcggtggatag

SEQ ID NO: 158886 - DNA, 204 bp, Enterobacter cloacae
atggctaccgtctacaaaatcacaatcaccaaaaaatccaaagagaccttcaccgggctcatgacccgcagtcagccagaaatcatcaacggcttcgttgctctcgctgacgaagagggtaagtggcgatatttcagccctgacagcattgaagacttcctctttgagcctgtagagcagccagaagaacaaacaacggagtag

SEQ ID NO: 158887 - DNA, 270 bp, Enterobacter cloacae
atgaaaaagttaaaagtcgagaagactggctgctggggagcgattggcggcgtattccagcaactgccggttggtcatgagtttgttgcggttgatgtgccgccagctttcgttgggcgcgtttcagtgattggcgaagttgaagagcaggagcttgaagtctccacgccagcttccgacgataaatctgcagagcaggcagagcaggcagagcaggcagagcaggcagagcaggcagacaacaccgctaaatcgaaaaaggcgaaataa

SEQ ID NO: 158888 - DNA, 540 bp, Enterobacter cloacae
atggctaaagagccgagtatcgaatttctgcgcgagtgtttcagttacaatcccgaaactggagttattatctggctgcctagaccaagaatccatttcgcaaccgaaagagtatttaagacatggcattctcgattttgcggcaagttagcaggcggagtgaactccaatgggtacattgaaatcggcatgcagggtcgattgatgaaagcgcaccggatagcctgggctttgtcctatggggagtatccatcaggcgatatcgaccacattaacggagtcagagatgataaccgtctcgttaacctgcgcgatgttagccggcgaggcaacagtagaaatgcagccaggcacagaaataacaattccggtatcagtggcgtctactggcatatccgagatgacagatgggttgctgcgattaatttcgcgggaatgcagcgacacctcggctattatccatgtctgattgatgcggcagctgcaagaaaatcagccgaacttaaatatggctaccatgaaaatcatggtagagcgtag

SEQ ID NO: 158889 - DNA, 1071 bp, Enterobacter cloacae
atgaatgcaggcgatgttatttcagaacgttatagaatcgaacgtcatgttggtcgaggcgggatgcaagacgtgtatttagcgtatgatattttacttgaaactcacgttgcacttaaaactccgcaacttggtcaaccagatacaaggtttaaaacaagtgctataatttctgcccgggttaatcatcataatgtcgcgaaaacattggattacatcgaggagaatggttctttatttctaatcgaggaatatgtgcctggagataatctagagaaacgattgaatattttcggagcaatagaccctcatttggcagcaagaatatttttgcatgtctccaagggggtggcagcttcgcaccatgctggtgtagtacatcgtgatttaaaaccgagtaacataattgttgagtccgatgttaatcttcatgagttaaagctaactgatttcggaattgcgactttgaccgaagaagtctttgaggaggctgcacgtggaggtgatataacacgttcaacctctggtacgatccggggtgcacttccttatatggcccctgagatgatgtttagacaacctggtgaaaatcctggtaagtcagtagatatttggtcgttgggagcaatgatgttccaaatattaactggaaaggttcccttcggtgtttatctccaagccgctgttaatgttcagaacagaaatagagaaccttggccaggattcatgttagctaatcctcaatataaaaatctttcgttacaactccaggctatagtagaaaaatgccttcagtatgatatagcggatcgcccttcagcggacgagatagtggaagaaatatctgaactgtgttttatcggtgttgatagggaattggggactgtttctaatcttatccaaaacggatatagtggatttattgacggagacagtggtggtactacattctttagtcaggaaagcgtttacggtcaaataaaccgcgcaactcgaagtaacaaagtatgttactccagtttccccggctccccgcgagatcgtgctcaccctattattgtgcttacttaa

SEQ ID NO: 158890 - DNA, 1047 bp, Enterobacter cloacae
atgttgatacagaatagatacagaactcttgacacgtctgatagaggtggaatgggagaagtgttatattgtgaggatatacacctgcaacgacaggttgtattaaaatatcttcaacctggtgtagatgggcggcgactgttagatgaacaaaaagcattgactaaagttcgctctaaacatgtagttcagctttatgatattgtcacaattaatggtgtcggtattgaatatccggctattatccttgagtatatcaatggtgaaactttaaccattggtaactattctgctgatatcgaatacttaaaactaatatggcagatatcttgtggtttagctgagatacatgcacatggtataattcatcgcgatattaagcccagtaatataaaaattgataatgagggtgttgttaaaatccttgatttcggcctttcaaggaacgatgctgatgcgcaaacaaggagtattattggaacaccagtttttatggctccagaactttggggtgatcagacaatcgcttttgattcatcaatagacgtctacgcttttggcgttacttgctttgctcttctctctgaaaacgtactcggtaatttagccgaacggccgccagttcaaccatcattggctgatttttcttttccattcgcaagcttacctcaagaagtatcacaaatgctacatagttgcgttgctaccaataaaatagataggccaactatgcaagatgtcgctgagttattagaaaaacaactacttaaagataaacatcgcgcaactgttgtattgaatggtgtagtccatatcttagacaataataatagaagaattacacttaatgcctctattggtagtcttacaattgaatacaatgggcttgagttcattgttgctcaagtcaccggtgccgtttttattaacaatactcaggttcgagtgggaaatgttgttccagggtgttgtgttcttacatttggtacaagtagcggaagaacatttgttactttcgatgtttctaaccctgaggtgatgccatga

SEQ ID NO: 158891 - DNA, 1095 bp, Enterobacter cloacae
atgcatcctttccaagacagtctccaggtatggttttctaggaaactacctgaacatgcatttaatcaatgctgggaaattccatttgttttatcaagcgacataggcttggtgcgtaaagaaaatcaagatcgcgttgcagctctccacactgggaaaaagtcagttaatccgctctttgctatagcagtggttgatgggatgggggggatgcgtgacggaggggtttgtgcttctttggcactctcaggatttttctatgcattaatccagtatcgttctttagaaataaaagatagaataaatgcagcaataaaactagccaataaacaagttttcgatatttataatggtagcggcggagcaacattaaccgcagttttatttgattctcaaggaaatcgcttgtttgtgcatgtaggtgatacccgaatatatacctttagttccaatgctcaagtacaacggcacacaactgatgattcattagctgaagctgttgggggaagtgggagagaattacttcagttcgttgggatgggagagtcaatgcaacctaaaatagcagaactcaccgatgcaggtgagttttgtgctattacaactgatggtattcatggcatcgaagaaaaaacactgaataagctttttgtcaattcttctgatataaaacaaattgcagaaagattatgtaatgtatcaaagtggtgtggaggtcatgacaacgctacatccgcaatattgaacttgaaaaatatagcggaatctttatcccactatgaagttaatggtattagaatatgggatgctcaaggggacttaactacactgtggttgagggagggggatgttggaattaattttttacaggggcagaatgtaaataattcagttgatacagatgaagggattttatcgtctaagcaagtctctgaaaaattaaccaatcaacaaaaaaagattaataaagatagagcttctaaaaaaagaacggtcaataaaaagaaagcggatagtcagcctgaaaaaatacaactagatatcgaaattggtaaatcaggagagaaaggagaattcgatgttgatacagaatag

SEQ ID NO: 158892 - DNA, 726 bp, Enterobacter cloacae
atggaaagtggcatggtgataaactatgaagagaattttcagtgtctctgcagcgattttgaaagaaaattaaagcaaaccaataagcaggatggtttgtcggaggctgagattggttcggtgcttgcatcagggcaaaaatgggcttttgacttcttccgacagtttggagagaacgatgttgaggctcagtacaataccgctctcatccaaaaatttgaacaactatgccatcaagctgatcgtgacggtactatgactggtactactgatatcgccgtcggtctggatactcttagtcaaatcttcagaaaacagggaagagtaagggaagcctgtaaatatcttgcaatagcttgtgggtatcttgagttaaaaaaagatctgtcgattctgtataacgtagcattgagctttacggaacagaagataagtgaacaacgaacgtctagggcgagaaagggtggccttgcaagggggcgcatatttgaacctgcccgtcaaaaagtcatcgagctcctggagactacggaaaaaccagaggaaggctggtcattcaaggaggaagcatttgacgccattgatgaagctttacgaaattttatcgatgaggaaggcatcgctttgaaggatagtgacctccgcgcacgagtgttgcgctggtcgaatgaaaggcccaatgtcaaggaagcttttgcgagagtagttacaaacaagattctctaa

SEQ ID NO: 158893 - DNA, 654 bp, Enterobacter cloacae
atgcttcgtgacaccggggaaatatgcagtctgggccgcgcccgtgctctgttgaagtctgtcaaagccgaagcgcaatccggcaccattgaaactttgtctccggcagggccctcggtcatcccaatcacaaataatattcaacctcctctgccaaatctgcgctgggtagctggcgtctctgctatcccgacgaaggagggcagtgctaaccttgggattatcattgatgctttctctgggagaattatccgatggggacttcatgacagtgatggcagggaacttcagctagttttactacagggattattgattggtcgtcaggttcagcagaaattactcattcatttcgacagcgccacccgttatacacacaaggaatggcgtcatgcattgaggctcattgacccggaaaggaagataagcaggcggggatcctgtagtagtcatcagcatgccgcatctttttttcattggctgcagactgagaaaattggtgaagcaacacctgtaaccactaaagaactaaaagatcagttgcttaacttcattgatgaatttaacagcttgcaaagacctgtaagtactcttaatccgctgctgtatcgaatatctgatctgacttatggcggctttgattgtgccctatga

SEQ ID NO: 158894 - DNA, 1566 bp, Enterobacter cloacae
atgatccagaataccgtcaacactcttgcagaattagagcaacaggtctcaacctcgacctttcctcttaatgccttaccatcttccttacagcatgtttttcgtcaacttcagtacagtaacaaagcctcatctgaactcatcgcgaacattctattgtcggccctgtctctcgcctgtcagtcactgattgaagtcaagaacccctttaccctaagagcagagccctgtgcactatatttgatgaccctggcggaatcgggtatgggtaaaacaaccattaagaatctggttatgaccccgttttacgaatttgcaacggcaattaaacaggattacaaagtcaaacttgccgcttacaaagatgagcttgaggtctggaaaacagtccaattggcgctgaggagtcgtcttcgtacagccattaaaaaaggtggcaatggcgaggatgagcagactgagctgaaactgcactctttaaaagccccccgcgagccattgaatccggatactatttataacgatgtttcacctgcggctttagctgagggattaagtcgctattccagcgcagcactcatgactgatgaagctattaccttgttgaacaatgaccttaaaaaccatcttgggtttcttaacacagcgtgggatagcaacattttcaattacaaccgtggtaacaataaaagttgtagttttacgccactgctcactctgttgttaatggtacaacctgatatcttttttgattatttgaaaaagcatggtgccacagccaaagccagcggttttttatcccggtttttatttgccagcgtacctccccagaatcacacggttgattatcggcatcgcttccatgttacgtctcaatttcctggcgaaaatgcattaccagaatttcatgacagtattaaaactctcttggctgctcaaaaagtccagatcgattcaggtaacatggacaaggtacaattgtcgctggatgatcaagcaaaggcattctggacaatgaaacgtgaatactgggtcaatatggccttacctcagcagccatggtcatgcatttccgatatggttcaaaaggcaaacagtaacacgttgagggtggcgggaatgctccattatttctgcaataatgacagtaacatcattacactggagaccattaagcaagccacctgcattatggagtggtacatcaagcatgctgtcagtcttttttgtaaattcacgcctgaatatcaattcgaactcgacacgcaggaacttctggtatggatacgcgaacgtattgagcttaataaccgtacccccatcaaaaaaaattacgtgttaaaaaatggcccaaatcgtctgcgcaacagtggcatacttgaaccgctgcttaactctttagcgattaaaaatcagatttgctgtgttcaggcccgcaaaaacagccccatttatatttcggtcctgcatgagtccggatttattatacccccacccgacatgctcccacatgagcaatttattattctgcctcctcatccgtttgccagccctgctggtttttga

SEQ ID NO: 158895 - DNA, 624 bp, Enterobacter cloacae
atgagcaacgatatgggttataatcagcatcacatcaatcgtattcatgaaacgctgcagagttccttacgtgaatacccaaggacgtttattctgaatattattcttaggttccctgatactaattacgaaagctataaggaagaccatacagtcataacacgctttattgaatccttaaaatcacagattaaattcacgcagaagagaaaggtaaaacagggaaagcgggtacatccctgtaaccttcgctatgtatgggcaagggagttcggtgaaggaaaagggaaaaaacattatcatgtagcattgatgctaaataacgatgcctggtgtagtgctggtacctattatccggtgcagggacattacgttcattgtctgggattgatgattatggaggcatgggtcagaacattgaaccttcacgttcagcaggattatcaaaataaatattatcccctgatagagtttgtccttgaaggtgattttaatctgaataccaatggggaacatttcacctggcattacgatactattatgagaagactgtcatatcttgctaagcgatttagcaaagataattctgatggacagcggaattttggttgcagccagtcctga

SEQ ID NO: 158896 - DNA, 471 bp, Enterobacter cloacae
atgtccgcactcgatttatcccaggtattcactgccaacgagcaacgtgtcattcgccgtgcactgcacttgctggaaaaataccagcgccaaccgagtgagtcatttacgtccaccagcttcaccaaaatctggcttcagctcctcatggttcatcaggaacgagaagtttttatcgtgatgtatatcgccaatctgcagtgtctgctggaacaagaaacactgtttaccggcacgctcagccataccgaagtgcatccccgcgaattggttaaatcaaccctcaggtataacgccgctgcggtcattctggcccataaccatccttctgggacgtcagaaatcagtcagcaggacaaacatattacccagcgaatcattaaagctatggcactggtggaagtgcgcgtgctggatcatcttgtggttggaaacgaagtggtatcttttgccgagcagggtttgatttaa

SEQ ID NO: 158897 - DNA, 162 bp, Enterobacter cloacae
atgcatatttcatctgtaccggccacggtgccggtttcgtcacgcctgtcgcccgtgaaggtctggcaataccttttaacctatctgctggagcgccattacggcctgacgcttaacgacacatcatctcatgatgacgcggctatcgcggaacatatctag

SEQ ID NO: 158898 - DNA, 2145 bp, Enterobacter cloacae
atgaattacgaaattacaaaaaagaaaattcatttgatcgggagcaagggtatctccactactgaaattcttgtttcgataagtaaaattgtcaatagaggtattcccgagtgggaaggacgtgatttagtaatacgagctttggataaaattgatttttttgatgctgttgaaaagtcactattattaagcatggttcgttctgtagggttatatccatatatcaagccttatcttgatgaagtatcagatgatgaccgcttggcatatgaaatacatcgaatagataatgttgaaccaggaatggtatttcaccgcctccaagctcatgtatacaacttactgatgcaacgtaagaatgttgttcttagtgcatccactagtgtaggtaaaagcttagtcattgatgcgattttagctagtaaacagtacagtaaaatagtagttgttgtgcctaccatagcgttaatagatgagacccgacgcagaatggttaaacgattcagatcacattgcaatataatcacccatcctagccaagaggctactctttctttagcaaatgtttacttactgacacaagagcgtgtacttcaacgtggcgatttagatgatgtagatttctttgttattgatgagttctataagctggaccttgaaaatgattcagatgagaaaaaccgttcaattgacctaagtcttgcatttcacaggcttgctaagcagggggcgcaattttatttgcttggaccaaatatccaaaatattcatgggcttgaagcctacgaatataattttattccatcaagtttctcaacagtttcggttgatgtgtatcactacaatctttcgtcgaaaggagatgcacgtaaagaaaaactgcttgagctttgttcgcaactatcttcccctacgctaatctattgccaatctcctgctagtgcaaataaagtggctcaatttcttattaatgaggctaatcttccccgtgtggaaaatactcaggatgttgctgattggattggtaaacattatcaccctgattggaatatatcaaaggcaatatcgctaggtgtaggaattcaccatggtggggttccacgagcacttcagcagtactttgtgaagctgttcaacgaaggggctattaagttcatcgtttgcacctcgacaatgattgagggtgttaatacttctgctgaaaatgtcatcatttatgaccgaagggtcaacaatactccatttgatttctttaccttcaaaaatatatctggtcgagctgggcgtatgaaccgttacttcatcggaaaagtttatatgcttgaagctcctccattagagaaagacttaagcgttgaatatcctgtaggttctcagaacgaggattcacctatgggcttgcttctcaaattagaacctgagtttttatccgacctatcccgtcaacggttagagcaagcctattcaacgccacagatttcggctgtaacattgatcgaaaaccgccatgtaccaatagaggtgcaagtcaaaatcgcagaacagattttagaagatcaacatgaacataagcatcttctttgctggaaaggtaatcctgagcagaatcagcttgagtatctttgtagtctcgtttatgagcatcttcctcacaacctcatggaatacggcattttctcggggctccaactggcttggcatataaatgcgctaaggtcacagaagaacttcactgaatatcttcaacaagcgattgatgatgattggcataaccgcacacccagcgaggcaataggactgcggctaaaattaatccgtaatgttatcagctaccgtttgccaagggattttatgtctatcagtagaatccaggccgatgttttaggcaggcgaaatcttgagtttggagattatacctttatctcagaacaacttgaaaacctgtttcaagatcctttgattactgctctggatgaatacggcatccctatacagatatctactaaaataaaaggaatgatacttccatctgataacttaaatgaggtgctcgctaagctaaggaagctggttgtaaaaattgacaaaatgcaattaagtaaatttgaaaaaaacatcctacgttgggctatagccgaaatgtga

SEQ ID NO: 158899 - DNA, 1620 bp, Enterobacter cloacae
atggcaattacttctaccccatctaacaaaggtggccctgcagctaggcaaggttttaaatatcaggatcatgttgccgtcagctttatactaaaaatgctccaagatagttcttatctgcagatcgaatgtgagacagcagatgacatagttgcggtctctcgcccaaatacagaatgcatttacgagtatattcaggtcaaaacgacagagggagacacaaaatggaatctcactgaagcaacagctttggaaaagggcagacctgatagctcactttttcaaaaatctctgaaatgtgacacgcgactcggcatcgctcgtttccggattgtctctaagagagatatatcaaaaccactgcaatgtttcctcattgatatcggcaagcgagtgcttcctgatgattgtacggaacgtggggttaagctagttaaaaaattccctaagacgatatcagctcaaaagagagattttaaatattgggctgaaaactttgtttggcaagtctgtggtgagactgcatggcttgaagctatgaacgtccgtgtgttatcagaattagcagagcaatatggcgtagtgcctagtcatcggcagcagaaagaaatatacgaacacttccttaactgggcagatgacgctgctaccgctgatgttaaaacccaaagtcagatgaaaatcatagcgcgaaaagaagcccttgagtgctttagcaaattactcgatgcggttgaagcttcttcttcaataactgctaaaccttataaatctaaaccagagccctttttagtggagtttcatagcgtagctgaaaccgctcttctacgctctttagcgggatttgatgttgagtatgattttggtgaatggagatgtaaggaactagctgaacatttagtggagtggcttcctgagttctgtttacgtgctagtgagatagctaatttccaagtacatcatgcaaaaacaatcctagctaaatcaattagcactttcacacaagcaaaaatgccacgtgataaactcatcgccgaacttattttgcatacgattttgcgatgcagaaaagacagtgagccgatagcatgtaaggttttctatgagtcggaaggaaaactatcagaatttggtaatgcccatattgttcatcaggctggtaaagccgatgaattatggcttggcctttctaaaatgatccctactggaaagatggacgatacgctaaaagaaatttgtagtgtactagacactaccatttctaaagctgtattgagctccgagcgtgaaattataatcacgctgcgtgaacctcaccaccacttacctaccgcggagcaattcagtaaggcattaagtaagcattcgcctgctcaagaaatgctcaaaattatgtgtttccctatacttcttgcttacgatagtgatgtgcttggaagaggatatgcctccgattacattaatcatttaaagaatgagatcatggctcactatagcgagctaaaaagcagattacccccaaaagtcttacaagtgaaaatagctattttccttcttccaatagaaaacatccagagattagtcatcgagtttaactcgctttgtaggactggaatttga

SEQ ID NO: 158900 - DNA, 903 bp, Enterobacter cloacae
atgatgaatcagcaaaataagatttttgacagcgagacaccgttacctgatggtttccttttttcacggcagaaaacattgctcggtttcgacaatcgatacagtaaaatccacaaccagttacgtttactgttgaatctggggaaactggaatcctggggggcaaagtttcatcagaataatttacccatctgcagcctagtatcagaccaatacccgctcgttatttttcatggggatgtgggtactggcaaaactgcaacagctgaatgtattgcaaacatgcttgccaaagattctggagcggaagattccattctctttaaaatcagtaacagagtcagggggagtggcaaagtcggtgagatgggcactcttataaaccaggcatttgcagaggtgataaagtctgctggaaaaaatcgccgtggcatactgataattgatgaaggtgactcacttgcttcatcgcgaacgcaagagcatagccaccatgaagataaggttgctgtgaataccctcattcaatgtattgacgaccttagaaaatatcagggacgtatcgtcgttttcctgtgtactaaccgcttatccgtacttgacgcagcccttatccgccgtgccgctgtcgtggaggagttttctcgtccgagcgatgcagagcgactggcgctatttgatatggatttacaaggtttaggtttatcaactcagcaaaaaggtgtcctggttaaggctacaggtcccaatgaaggaaaacccggatggacgttttctgacattcgtacacgattgtatccggctgcactggcaaaagcttttccggataaacctttatcatacgagattatccttcagaccgctctttcactaaaatcatcacctgtcatggaggaccggtaa

SEQ ID NO: 158901 - DNA, 951 bp, Enterobacter cloacae
atgccgctcagcaatacagaactccgctactacgacagtaatgtcctgagacttccctcggataaaagaactgaataccatgctcaggttgatcggctgattgctgagctaaagaaatccgtgaaagagcaggatgagatcaaaataaccaaagttgttaaggctggttcctttgcaaaatttacaattttgcgtaaaacacatgaagatcctgtcgatgtagatgtggttttttatatttccggaaaggatgttacccaagaaaccctcgggagtctcagcgaaaaaatcttcaacgctctggtaaaactctaccccaacaaatctgttgaagatttccagttacagcgaaaagcggcgaccgtgactttcgtaaaatccgggctgaatgttgacgttgttcctgtgatagaagacatcgataaagccggatatggatggcaattcgacatccatgaggggacaaagcttcacacctgcgcgccgtgtcaaatcaagtttattcgtgacagaaaagaaacagacaatgacttcagaacgcttgttcgactggctaaaaagtggcgaaatcacgctgggttaacacatctgaaatcatttaccattgagcttattctggcttttctacttgataagaacggtaaagaaggaagtatcgagagccgcttcaggcagtttctgctttacattgctcagtcagggcttaaagagaaaatattttttcccgagaacggcaatgatattcctgatttttcagatccagttgtcattatcgacccggtttgcgtgactaacaatgttgccagtcgtttgagcgatgacgaaagaattgagattgtagaagctgctgccgaagcatgggagatagctcatcacgcttcagtagaggacgatttggctatctggaaagagctctttggtccacgtttaaaagtaagggaagaagcatga

SEQ ID NO: 158902 - DNA, 366 bp, Enterobacter cloacae
  misc_feature (326)..(335): n is a, c, g, or t
atgaaagcccaacgtgcggcggagaagcagaaagccagggatgaaaaggccaatctgaaagcgaagcagcagctacagaagcgccaggaagtagccgagcttaaacttcgccatgcagggctgcaagtgtcaggaattaaaggtaaatacgggcttgatcctaaatctcagtatgaagcgttacgttatattcatcagcaaagcgaagagtttgcgaaggggaatattagctctcaacgtatgaatgcgcttatacgcgagcgtgtaaccctgttacgcagagaagccgcacagcaagcgaaggtgacacaggcacagcgtacccnnnnnnnnnncttgacttggttagacaatcggcactggtaa

SEQ ID NO: 158903 - DNA, 1428 bp, Enterobacter cloacae
atgcagaacgccagcgctttgccgcaccgtaacgccctgcgcccggcgctgctgtgggccgcggtatgcctgatcctgctgggcgtgctgctgtcgctgctgcccggcgcgcggctgaacagcagcgtgctcgccatgctgccgaaacagacgctcggcgcgatccctcccgctctcaacgacggatttatgcagcgcctcgaccgccagctcatctggctggtcagccccggcaaacagccggacccgcgcgtggcgcagcagtggttaaccctgctgcaacgcagccaggcgctgagtgtcgtaaaaggtccgctggacgccgccgggcaacaggcctggggagatttcttctggcaacaccgcaatggcctggtcgatccggccacccgcgcccgcctgcaaaacggcggtcaagcacaggcccagtggatcctgtcccagctctactccgccttttccggcgtgagcggcaaggagctgcaaaacgatccgctgatgctgatgcgcggcgcgcagctcgcgctggcgaaaaacagccaaaagatgcagctgatggacggctggctggtgacaaaagatgcggccgggaactactggtatctgctgcacggcgagctggcgggctcatcgtttgatatgcagcaaacccaccagctggtgaccacccttaacgcgttgcagcagacgctgaaaagccagtatccacaggcgcagctgctctcgcgcgggacggtgttctacagcgattacgccagccaacaggctaaaaacgatatttccacgcttggcgtcgccacggtgctcggggtgatcctgctgattgtgtcggtgtttcgctccgtgcgtccgctgctgctgagcctgctctccattgccatcggcgcgctggcggggacggtcgtgacgctgctgctgttcggtgaactgcacctgatgacgctggtgatgagcatgagcatcatcggcatctcggcggactatacgatttactacctcacggagcggatggtgcacggcgcggaacactcgccctggcaaagcctggcgaaagtacgtaacgcgctgctgctggcgctgctgaccaccgtcgtggcgtatctcttcatgatgctggcccccttccccggcattcgtcagatggcggtgttcgccgccgcagggttgagcgcctcgtgcctgacggtaatgttctggcatccgtggttatgtcggggcatgccggtccgcccggtccccctgagagggatgatgcagcgctggctgaacgcctggcgcgacagtaaacccctctctgtcgggctgccggtagcgctgcgctgctctccgccatcgggatcgccagcctgcgggtggatgacgatatcgcccggcttcaggcgctgccgcaggacattctggcgcaggaaaaaaccatcaccgccctga

SEQ ID NO: 158904 - DNA, 1623 bp, Enterobacter cloacae
atggttatttttgatgaaaaacggcatttgtatgaagccttactgaggcacaattatttccctaaccaaaaaggttcaataagtgaaatacctccgtgcttttcttccagaacattcacgccggaaatagcagagctaatttcatctgatacatcagggcgcaggagtctacaaggttatgattgcgtggaatattacgccaccagatataataacttcccaagaacgctgtcaatcatccatccaaaagcgtactcaaagctagccaagcatatacatgataactgggaggaaatacggtttataaaagaaaatgaaaacagcatgatcaaaccagacatgcatgctgacggtcgcatcataatcatgaattatgaggacgcagaaactaaaaccataagagagctaaatgatggttttggacggcgatttaaagttaacgcagatatatcaggctgctttacaaatatctactcacactctatcccgtgggcagttataggggttaataatgcaaaaatagccttaaatactaaagtaaaaaaccaggataaacattggagcgacaatcttgactactttcagcgtcaagctaaaagaaatgaaacacatggtgttcctattggtcctgcaacctcaagcattgtttgtgagattattttaagtgctgtggataagcgtcttagggatgatggatttttatttagacgttatatagatgattacacatgctattgcaaaacacacgatgatgctaaggagtttttacatttactcggtatggagctgtctaagtataagttatcactgaacttacacaaaactaaaataactaatctcccaggaactttgaatgataactgggtttctttgcttaatgtaaattcaccaacaaaaaaacgttttacagatcaggatttaaacaagctaagttcttctgaagtaattaatttcctagattacgctgtacaattgaacacacaggttggtggtggaagcatactaaaatatgctatttccttggttataaataatttagatgagtatacaatcactcaggtgtatgactaccttctaaacttatcatggcattatccaatgctcatcccatatctaggcgtacttatcgaacatgtctatttagatgatggtgatgaatataaaaataaattcaatgaaattttgagtatgtgtgcagagaataaatgttctgacggcatggcctggactctttatttttgcatcaagaataacattgatattgatgatgatgttatagaaaagattatatgtttcggcgactgcttgagcttatgcttgctagatagctcagatatatatgaagaaaaaattaataattttgttagcgatatcatcaaactagattatgaatatgacattgacagatattggctccttttttatcagcggttctttaaagataaagccccaagcccttataatgacaaatgctttgatattatgaaaggttatggcgttgactttatgccagatgaaaattacaaaactaaagctgagtcatattgtcatgtcgtcaataacccatttctagaagacggagatgagattgtaagctttaatgattatatggcgatagcgtag

SEQ ID NO: 158905 - DNA, 1401 bp, Enterobacter cloacae
atgagttctaactggtctgttaagaagcttggcgacctagttactttcctttccggagggacaccatctaaaagtaataaagattactggaatggagaaattccatggattagtgcttcttccatgcaatcaactagataccatgactcagatctacgtgtaacttctttaggaagtaccaatggtactcgtttagtacccgcagagaccgttcttttgttggttcgcggtggggcccttcataataaaattccagttggtatcacgacacgggaagtaacctttaatcaagacgtgaaagcgttagtgccaaaaagtgaagacataactccatattatctcctcgcgtggttgatttcatcgagagagcttcttttaggcaaggttgagaatactgggattggtgcaggtaaattagatacaaaaatattacaagacttagatgtgccagtgccgccgaaggcggagttattacgattagagttatttagcaaagctcttgatgataaaatcattctcaatcagaacatcaaccataccctcgaacaaatggcacaagccctgttcaaaagttggtttgtcgattttgaaccagtaaaagccaaaatggcggtgttggaagcgggtggatcgcaggaagacgcaacgcttgccgccatggccgccatttccgggaaagatgcttatgcgctggcggtttttgagcgtgaacaccctgagcaatatgccgaattaaaaaccacggcagagctgtttccgtctgcgatgcaggacagtgagttaggggaaattccggaagggtggtcgattaaaccattagatggaatcgcaacctatcaaaatgggttggcgttacaaaaatttagaccagagaatgagaatgacttccttccggttgtgaaaatcgcacagttgaagaaaggtttttctgatggtgaggaaaaggcatctccaaatatcaaacctgagtgcattattgataatggggatgtcgtcttctcatggtcaggttcgttgatggtggatatttggtgcggcggcaaagcagctcttaatcagcatttatttaaagtctcatctaccaagtaccctaaatggctttactataaatatacagcccatcatctcattgaatttcagcgtatagctgaagcaaaagcagtaacaatgggacatataaaacgagagcatttgtcccaagcaaaatgcctaatgccttcatctgaaacagttcatgcttttacaccttttttcgaaccggtactaaataaggttatttctaatcggttagaaactcggaaacttgaaaatatccgcgacacccttctccccaaactcctttcgggcgaaatcaccctgcctgaagcggagcaggcggtaagcgaggtggaaaatgtataa

SEQ ID NO: 158906 - DNA, 519 bp, Enterobacter cloacae
atgagtatcttcgagctcggcgtcaggcccgatcgggacaacgatttcgcagacgtggccagacagacgatttccgcttcggttgatcatgaagaaggtacgctggcgatgtacgccctgcaacgcagcgacaatccacgtcaggcattcatggtcgagttctatgaaaatgagagtgcttaccgcaaacatctcaatgccgccccctacaaagcattcgctgctcgtgcacctgacattatcgatcggaaaaagaaaatcaccctggagccacagtttctgggcgacaaacacatcatagcgaatgagcgaaccatcaataatctggtgatcgtcgaggtaaaacccgtggcgattcagtgtatctatccagaacagcctttgttttggcctactggatggcacaagacagatcggtttcgcccgtctggtgacagactttgccacttttggttatttgtgcgacgtctacgtgctgaacgactatcagaaaagtggcctcggtcgttggttgattga

SEQ ID NO: 158907 - DNA, 483 bp, Enterobacter cloacae
atggggatcaagcttgcgcacgccatgggcgcgcatgtcgtagcctttaccacgtctgagtccaaacgtgacgccgccagagcgcttggtgcagatgaggtggtggtctcccgtcatgccagcgaaatggaagcccatgcaaagagcttcgattttatcctcaacaccgttgctgcgccgcataacctcgacgtgttcactgcgctgctgaaacgcgatggcacgatgaccctggtgggtgcgccggccacgccgcatggctcgccagaagtgttcagcctcatcatgaagcgcagatcgattgccgggtcgatgattggcggcattcctgaaacgcaggagatgctcgatttctgcgcccaacacggcattgtcgccgacattgagcttatccgcgccgaccagattaacgatgcctatgagcgcatgctcaggggcgatgtgcattaccggtttgtcattgataacgccaccctggcttaa

SEQ ID NO: 158908 - DNA, 786 bp, Enterobacter cloacae
atggggcgtgttgatattactcaaaatcagcattatcagcacctggctctcaaggaacggcgaaaagcagcttctctaacccctttagttcgaaccgtaccggagcagtcagcatttactgctgttgacgttgattcacctctcgatatggtaaagcaaagcggtttaatgacgtttaatagtacccaaactctggaaaccaacataaaggcaaacctgcatacctttgatgatcgtaacgatgttgctggtttcattgaagcgtcgtcaggggatggattattcgaagacatagccgctgcgttcgaggaaatcagtaaaaatgaagggccattacaagcgtctgagatggtacaaaggcatgcggtattgcatccattaaaactgggctcctgcatgagagacgttaacttgtggggatgcccacatcgaatgaagtgccaagcattgaaaccctgtgagcatttcacgttgacaggtcgtattgatgaatactcaactattgcagtaaaaggtcgggcattacacgaggcttcgctcgcttttgaacagtatatcgcggccctttcagacaaccagttaatacaaggcaatatcgaagaaaatctaactcacctggatgccttaagcgagcaattacgcaggcgctcaaacttgttacaagttctctctgctcgagagattctgtctggagagataaatgtggaaggtgaaattcgtactttagctcaattatttgcccttgagcaccataaaacaaagaggaagaaaactaatgcgtggtaa

SEQ ID NO: 158909 - DNA, 1551 bp, Enterobacter cloacae
atgaataaaatcccagcaatagaaagcgaagataagcatgtctttttttcacgtgaacaaatgatacaaataaaaagtctctacatcccttcaaaaatccacttaaggtcagctgatgtttttgatgacaagaatatatttgcagagactaatgattgggtgttccattactcagggagccagtcacacattaatttcaaaacggatgattacacaactaaactaattaagtatatattataccgttatgcatcatcaaaatctcctgggactatttatcgtgtgcatcgcgcatggctagacgcaattgaatatgcttcgaagcaaggaatgtttaactttaaattgttaagttctttccttgaaaatgaaaacttattgccgacttattttttttgtattgtttttggtctgaaaattctttgtgtagatgaatttccgggttttactttagatgactacgaagaccttgaattgatccctcgccctaattcaaatgattggaatatatatcaaaacatagataatattcttgacccatttgaaaagaacatgatcagcaaaggtctttttgaaatggctgccgctatctcacgaggcagaaaatacaatctggtggaccttcgcaatgccactgttctggggctaagttatgtcacaggtagtcgtccggttcagttagctaaattggctgctggtgactttcgaatcgatacttgcaatacgacaacagggttggttcgttatagcgttcttttaccttatgctaaacaaaggcacgtcactacggatcggttgattctggcgctcccgccagaaataggtgcactggttaagcattatatagatcaagccagattattacataccgataaaatgtttaatatggggggatcagcacctaaatttgtttctcagtcgattagccaaacgattctatcctttagcccacaagattaccagtttgccgtatcgtgcggtgaagccgccctaccttcaataacatcaactgatttgcgccacaacgttggtcactcacttgcaatgcagggtgctagtgcagaggaaattgctcacattctcggccattcatctctggttgtagcaaagcactacatccgtgcgaccccagccttggcattgatccgcgctaaagcactcggttctaaccctgtgtggcaaaacatggtggctatgatgcttactgggaaactagttccttcaaaagaatgggaaggtcgacgcgtggttggtatggttggtgatcgattacactatgagatcggtggctgtgcgagaaccgatgatgaatgccccttctgtgaagttcgttgctgctatggttgcttatattaccgccctttccttgatggccatcaccagggcgtattgaatagcgtctctaaagaagtcgatgagctgatagcagtatcagatagtgttggtaatgctctcaatccactaatttctatccacgagacgacgcaaatagaaatcaagtcagtgattgcccgttgtcatttgcataacgtcagaggttgtgggaaatga

SEQ ID NO: 158910 - DNA, 1362 bp, Enterobacter cloacae
atgtatgtacttgaccagttgagcgttgctcctaaccggcgactttggacattggttgacaccactactaacttaccgcttctgtttccacttctctttctcattgatcgcttagcttcacgttctgaatccacgcagtcatctacgctacaggctctaaagtttttttatgagtactggtatcaaaaacatgatgtcactttctgtttgagcttccaattgtctggatacaatccttcgattgcggttagtgagcttgaagcatttcttcattatcttgaatcaggaaagcttatgttgcctacactcggatatgcagtaattagcaagcacaatacgaatataaatcatgtacatgcagtctgccgttttataaactatctgatcaatacttacgtttctcctcgttatatggatggcaccccaaaagagctttctcgttatgctttacaattatccaagcgtttgtcgacctatcgttctgattttcgacccagcaagcaaaagcattcacacaaacattttaatagccttacagcagacatggtcaggagattttatgagattattagaccagaatcttctttcaagccaaatcctcttaatcccttccctgctggagaagttcaattcagaaattatttaatctgtcgtcttcttttgaattatggtttgcgagtaagtgaattgctcctgttagaaaaacactcaattaaacctaacatccaaggcggacaattcagtatcatagtgacctctgtagatgatgatgtcagagatccaagaaaacgattgccgtcattaaaaaactcatgggcgcatcgagttttagcgttagacataaatgattacaaccacttgaaaatatacattgataaaataagtaaaaatacctctcataacttcatattcacatcaacaaaaagtaacttgcctcctctatcatatcactctatatatgatattttctcaaaaattgattgtgtatttaaaaaagagtacccgcaattcagcgatgaaaaaagtattgattctgtagttagcataaccccacacgtaactcgccatacatgggcttatttgatcttaaagagaatttatgctgctaaatatcagtctgttatgagaaattgcaagcttgccggagttgatttcgctattgcaggtctgatgagtgaagctaaagatgagcttcgtcttttaggtggatggagtcataatagccgcatgccagaattctatgcccggcgttttctttctgagcgagctaatttttccaatgtcagacgtattgccgctgactcctcagaggatgaatttttttcattgatacatcaagcgtttagggaggttatcaaatga

SEQ ID NO: 158911 - DNA, 207 bp, Enterobacter cloacae
atgcatgacatgtttaacgtcagagcgtttaaggaatggtggattcataacgataacatcaaaagtttcatcgggctggtacccaagaaagtcggtatgcaccagctcgactcctgtgctaaggacactatcgttcttcactgcaaggaatcgctcatcgttcaattcgatcccggtaatcaatgcatccggagccgccagttttaa

SEQ ID NO: 158912 - DNA, 408 bp, Enterobacter cloacae
atgagcttccagcctgatgactggcttttccgacattgcaaaagctttgtccgttactctgtaccggcattcatctccgaaacattctttaacaacgctggctatgaccgtgtcgtgttctccatcttccggagctggcacaaagatttcaaattgtgccggtgtatccggctcaagcagaacgggatagagacgcggagaattaagcaaagcgcattcagaattaatgagcttaacccaggcgcttttgtcgtccggatccttaagctgctgtccaaggttatcgcaaaagtcaactatctgacgggtatgctcatccgtgactgcacagatcaggttaagaccatgcgtggccatacgcagttcccgggttcgggactgggaattgatcgaccaggggttaagtga

SEQ ID NO: 158913 - DNA, 297 bp, Enterobacter cloacae
gtggcagtccggttcattgatgacgggatcagtaccgacggtgatatggggcaaatggtggtcaccatcctgtcggctgtggcacaggctgaacgccggaggatcctagaacgcacgaatgagggccgacaggaagcaaagctgaaaggaatcaaatttggccgcaggcgtaccgtggacaggaacgtcgtgctgacgcttcatcagaagggcactggtgcaacggaaattgctcatcagctcagtattgcccgctccacggtttataaaattcttgaagacgaaagggcctcgtga

SEQ ID NO: 158914 - DNA, 615 bp, Enterobacter cloacae
atgcagaatcaagaactgctggttgagcattatcataaaacatatgatctaacgtttacagtatgggaaaaaagaaatcagacgctgcttgttttacttgctgttgtcggcttttcgacactattgaccttcaatgtctctgaagcacaacccttacttgttgatattattgcaaagttatgcggaattgtgagtgacgatcggataaaggagcttaagaaaagctttccctatggagtcatacaaagcatattcataattgtagttttttacctcacaataaacctttaccataaaacctgttttataaaacgcagctatcagtacttgagcggtcttgaaaatgatataagatcagcactaaacctaccgacaggtagcgtaagttttacacgagaaggtgatttttataacaaccatcgaacattttcttctttcatgacaggtctgagctatgtcatcattctgggtgcattactggtctcctttctcagtatgcgcctgttaaatgacttgcatgcgcaggactactttatccttataacagatgcatgcctagcattcggaataatatatttcttttctacttatgcatatgtttcattaaaaaattga

SEQ ID NO: 158915 - DNA, 735 bp, Enterobacter cloacae
atgggtatttttgacttcatctttagaaagacgaaaagaaatgagaatagcaagcatttagaaaatacagcacaagcccctgcacaatatataaatattgccgcgcagaacaaagatataattgaggggatgcaattccatgcaacatgccaactacggacccctatatttgttttgaaaaaacacggtgaagtttttaaaggtgacgggacacccccagcatatggatctacaagagatggtatttgggttccaaaattgagaggtagtacatttgattttcttgataaaggggctacttcagcatctgatgctgggccagttaatgctgatgagtatgttgattacgccattggtttgcttgaaatttttgaatcaagcgcatcaattaatgacaagatgactcaagcgttagcttatgctggaagcaatgagtctaaaaaaagaatagaaatggggctgctacgtttttatggagaagcaaatatagctgacgtaatgtcgtcatatatccctaagcttgagaggtttaaattctatttggatgagccaaacaaattaaccttggttaatggagtaagtgaaaaaatagcagcttcactaaagagtgagggagtaaatactttacgagcactgtctagcatgaatgaatatgaattaactaaaatcaaaggcattggcaaaatcaccgctcaaaaaataataaacagtattaaggatttagaggtgttgtag

SEQ ID NO: 158916 - DNA, 315 bp, Enterobacter cloacae
  misc_feature (7)..(16): n is a, c, g, or t
atgatgnnnnnnnnnncccatgatgtgcatgtgttcagaagccagcgtaaccgctcgatgaacaagcaaacgcctgtacgacgcgaggaagtgagcaaacagattgcagaagccgctaaagctatcgggattcatggcacagtatcggcacacagttttcgaaaggcgggaggtaatgcaatttacaagcgctctgcaaacaacatcgcgttagctatgaccgtgctcaatcacagcaacatcaccgacaccaggcgctatctggacttagacaagcaagccgttagccgtgtgatcaatgagatggacttataa

SEQ ID NO: 158917 - DNA, 288 bp, Enterobacter cloacae
  misc_feature (272)..(281): n is a, c, g, or t
ttgaacagagcagtagtgttagacgaacagcaagctaaagcgatcagagagtggctaaacgctcataacaagagcctgatagctgacgttacattaatgatgcaagccgccgtactgcgtgtgggggatgccgtcgcgttacgcttcgacgaagtgatcaacggtgagatagacatagaagaacagaagacaggtaagcgtaaagccctcacccttcctgctccagtgatgcagatgatcgcacgtcgccgtgctgagtatccccatgatgnnnnnnnnnncccatga

SEQ ID NO: 158918 - DNA, 123 bp, Enterobacter cloacae; identical to SEQ ID NO: 31757

SEQ ID NO: 158919 - DNA, 207 bp, Enterobacter cloacae
ttgttcacaccggagtctgttcagcacatctgttcggtgttgaagtcaacaaggaagtcgccagggctctatacggaccttactcatattcataacataacgacaaagtacaaagccccgatgaaattcgagcaacgagtaacatacattctgctcaactttatccattatctgtgggcaagtctgttcactaagcagaagccttag

SEQ ID NO: 158920 - DNA, 171 bp, Enterobacter cloacae
atgatactggccaaggaagggactcagttaccgtttgacattcagactgtatcaacccacatgtggagcgatgaaggtatggttgaagacaaaaagcgtgaattccttgcacactggaattcaattaaatcccgctcgacaatagtctcaatggatccgttaatgccatga

SEQ ID NO: 158921 - DNA, 204 bp, Enterobacter cloacae
atgagagctgagactgattattcagtagtaaaagcatccttgcccattttcgcagcaggcaacatacctcaattaaaaacgctctctgactgggctcctgaaaacagccagggtccgtccaaccaacggaagctgagcctgaaatatacagaactcgtgccgggggctgagctgggcattttcattgtcagccccgaaaattaa

SEQ ID NO: 158922 - DNA, 429 bp, Enterobacter cloacae
gtgtttcatatctggaccctcattcctgcgctttacgtgctgtttaggtttatcaggccgcttcccgccccgcttacggtaaaaattgccgtcgcaggcgcaatgattctggcttccgagtttcacctgatcacgaagttatttacggggaatatgttttctcccgagataccaaaattgctgctgctgcttaccaccgggcttttcggtatgaccgtttttatggctgtcctgttggtactgcgtgacctattctggatactgcatcgactggtatcaggacgccggatgaaatggcatgcagcttgctggtttatcctgcctgttctggcggccatgctgacaacgcaggccctgaaaaatggtaccggggttcctgaagtgaaaaagatagagatcacgctcaggagcttgccccccccgttttga

SEQ ID NO: 158923 - DNA, 453 bp, Enterobacter cloacae
atgcgcagccgagccgcgcgcgtgaacgatacgttccggaattcgctcgtggtcgaaatgggtaattttttcccgcaggataaagtcttccagcagggtggggccgcgcgagccggcgcgaagagagttttgatcgtcagcaatgcgcacgccctgattggtcgtgagtgcaaaaccttcaccacctttacggtgtggctcaagcgatttcagcttctcgttcccggtgtccggcgatttcatgcttcccggtgcggtaggctgttcgccggggggcggaagggcctggcgaggggcggtgagagccgtcagcaggggcgagagagtccatacccggttgagattcttcagtgccatgaatcggtgattgatgtgtattatctttgttcgacattgcacgcttctcctttatccattgctaaaaaccctattaaggatagaacaatgtcgtga

SEQ ID NO: 158924 - DNA, 144 bp, Enterobacter cloacae
atgagtaatcccgctggcgaaggcgatctgctgcgcagcggctggcaggcccgcagcaagcaggataaggtgggggcgcgcgacaaaatgcagccctcgctgctggatcgccttacggataacgacccggaaaaaaaagcgtga

SEQ ID NO: 158925 - DNA, 318 bp, Enterobacter cloacae
atgcctgcgctacgtcgacgcttagagagtcttgctaaactgccggttcgcccagaaattcacgcggtagtaacggtcgggaacgacgcatataaggactatctggcgcacctgagcgacgtcgacatcacctgggtagtgggccacagcgagcaggcggtggcggatcgtctggcggcgttgaccgttccggcggaagagtactttatctggctgaccggggaaggaaaggtagtaaaaagcctgagccgtcagtttgacactgacgcgattgatcaacagttggtgcgtgccagcgcctactggcacgctaaataa

SEQ ID NO: 158926 - DNA, 207 bp, Enterobacter cloacae
atgcgcgttaacggcgtacagcttcgggtgcgtggcaaagtgcagggcgtggggtttcgtccctttgtctggcagctggcgcaccagatgatgctgacgggcgacgtctgtaacgacggagagggtgtcctggtgcgtctcgcgggtaatggggggggactttaccgcgaggctgcgccaggactgcccaccgctggcgcggattga

SEQ ID NO: 158927 - DNA, 765 bp, Enterobacter cloacae
atgaatataacatcagaattaaatgaatttaaaaatggattcgataaaaattccgatatttttaatcgaaaacctttatttgatcaaatgaagcgtcttatagtaaattctcctgatgctaacttggtttttgctttggatgatgtttggggaagcggtaaaacatcatttgttaaaatgctcaagtctgaaatagaatcaactaacagtaaagatattgatgttgtttattttgatgcttttgaaaatgactatcagtccgatccttttatttcaatatctgctgaattatattctttacttaaatctaaagggcaagaagctgaggttgttgcagagaagattgttgagactggaaagaaaataggcgctaagattttagttggtggtgcaaaaatagcaataactactctgacggcaggtgttgttaatggaactatgcttgataaagctgctgatgttattagtgattccattaatagtgaagttgaatcctttgtcgaaaataaaataaaacatatggagagtgagaaaaaagcgataattgattttaaaaaatccttggaggagatatatgtcagcactgaaagaaaaacattaattattatagatgagttggatcgcgctagaccggattactctttagagcttcttgagaagataaaacatcttttttctgtaagaggcttgatatttttattggttatgaatcgtgaccaatttgaaaagggtatagcttataggctgtctcttatacacatctga

SEQ ID NO: 158928 - DNA, 225 bp, Enterobacter cloacae
gtggacactggagagggatatatcatgtttaggagaactcttaagcacctaatccatgacgggcagcatgatatgctaaaaactccctccggagggcccggagggagtgaaagattagtggagtttaagacgcggacggatgacgcggttgattctgcccaccagcatcatcagacccgttttgaagtagccgtgcagtgcgatctggtgcatacggtacagtga

SEQ ID NO: 158929 - DNA, 1134 bp, Enterobacter cloacae
atgaaacaggtactttttgttcgtcccgacagcttcgagggcgggaaaataatgtggtgtgtctccggcactcagcaggtggaaaccgtggctagcctggaggcactggcggatcatccgctggcgacgcgcgtatgtctgatgttgccggccagcagcatgatcttccgccattttacgttgccgaaaaaggtcgcttctctggcgacggcgttctcgtggatggccgaagagacgctgattggtgacgtggacacgcttcactggaccgtgcttagcaaaaagggcgcagaggtcgacgcggtggcgatcgatgccgacagtcttcaggcgtggttaacccgctgtcaggaggcgggtctgacggtggtgcaggcgctaccggatgcctggctgctgcccgtgacggcgggcggcagcacgctggttgccgaaggtgaaacctggtggctgcggttatccccgcacgtcgcgggtgaaatggaggccaacctgctgccgctgctgatgcagaaagccggagagggtgaggtctgctgctacggtgatgcacctgccggtgtggatgtcgatgttgtgctgccctggcagcatccgctggtgctgattcagccccagtggcaggcctgccgcgtcacgcttctgcacggggcgttcagcgccaaagccagcaatggcaaagccgccagacggttaaacgtggcgatggccgccgtagggctgctctcccttagcctgctgctggggccgcgcattgcgatggcctggatgctggtacagcaggaaaatcagatccagcaggagatccagcaggtctacgaacaccatttcccgagcatgcgtcacaagaccaatattaagtaccactttggtcaaaacatgaagaagcagggtaaagggatctttcttcagtttgacgatctggagaaagcccgacaggccgttccggcaatggaaatcgacctgctggaatacgatgcgcggcagaatacgttgacgctgagcgtcagcgcacaaaaccagaccgcattacagacgtttgtgaaccaggccagtgagaaatttgatttcaccctgcagcccgtgtccacgtcagcaccttataccgccatgatcgcagggaaatataaatga

SEQ ID NO: 158930 - DNA, 318 bp, Enterobacter cloacae
atgaacagcgttgcgctgatgcgggacgtctacccggtggggttcgcgatcgcgagcgcggtgttaggcggcatggtgggcagttttctcggcgttgtcgccgaacgcgtgccggccatggtaagggaagaggagggatgcggaaacctgctctttccgtcctcgcactgcccggtgtgccagcacgcgctggcggcctgggagaatattccgctggtgagctggctgcttctgcgcgggcgatgcagccagtgcaaaaccgctatcccgctgcgaatctttctggttgagctggtttccgccggctttgttgaataa

SEQ ID NO: 158931 - DNA, 768 bp, Enterobacter cloacae
gtgaagttcgtaaagtatttattcatccttgcagtctgttgcattctgctgggagcaggctcgatttacggtttgtacaaatatattgagccacagctacctgatgtcgccacgcttcgcgatgtgcggctccagatcccgatgcaagtctatagcgccgatggcgaattgatggcgcagtatggcgagaagcgtcgtatcccgctgaccttaaaccaaattccgcccgtgatggtgaaagcctttatcgccaccgaggacagccgtttttacgagcaccacggtgtcgatccggtggggattttccgcgccgcgagcattgcgttgttctctggtcatgcctcccagggggcaagtaccattacgcagcagctggcgcgtaacttcttcctcagccctgaaaaaacgctgatacgtaagatcaaagaggtgttcctggcgatccgtattgagcagttgctgagcaaggacgaaatccttgagttgtacctcaataaaatctacctgggctaccgtgcttatggcgtgggggctgcggcacaggtgtatttcggtaaaccggtggatcaactcaccttaagcgaaatggccaccatcgccggtctgcctaaagcgccttctacgtttaacccgctctattcgctcgatcgcgccacctcgcgtcgtaacgtcgtcctgtcacgtatgctgagcgaaggctatatcagccagagcgagtacgaccaggcacgcaacgatgtcattgacgccaactaccacgccccctga

SEQ ID NO: 158932 - DNA, 825 bp, Enterobacter cloacae
atgaacgagcaccatcaaccatttgaagacttacgacaatatggaagtgaagggcaggaatattggtcagcaagagatttggcaccactactggattatcgagattggcgaaactttcaaaacgttctatcacgagcagctcaggcgtgtgaaaccagcaaccaagaggtttcagaccatttcgttgagaccaccaaaatggttgttctagggtctggtgctcaacgagagttggaagatgttcatttgtccagatatgcctgctatctagttgtgcagaacggtgatcctagcaagccagttattgctgctgggcaaacatactttgcaatacagacaagacggcaagaactagctgacgatgaaacattcaagcgactccgcgaagatcaaaagcgcctttttctccgaaacgagttaaaggagcacaacaagcaacttgttgaggcagcccaacaggctggtgttgaaacaacgttagattttgcaatcttccaaaatcacggatacaagggtctctatggtgggctagatcaaaaggccatccaccagcaaaaagggcttaaaaagagccaaaagatactcgatcacatgggttctaccgaattggctgccaacctgttccgagcgactcaggcagaagaaaagctccgcagagataatgttaaatcgaagcaaaaagctaatgaaactcacttcgaggtcggccggaaagttaggcaaacaatccaggagctaggcgggacgatgccagagaatctgcccgcaccggaaaaaagcatcaaacaattagaatctgccgccaagaagctggataaaaaatag

SEQ ID NO: 158933 - DNA, 867 bp, Enterobacter cloacae
gtgccgaaagacgaaaagcagcagcccaccagcgcattttttgctggcgctatcgttgtcttcgacaaaacatggcggggtgaacgtttcagttacatcaaccgcaccgacctggaggccaaaggccgtgcttcgatgtcgctggcccagtttgcagtgggaagaacgcaaactgatgcggcgccggaactggacgctgaggtagtgccggagaaatcagaggcagaactgccattaacccaaaaagccattctggaaaccagtggtgtagaggcttgggcctgtgttgtcgcggcgttcggcgagaaagacgagtacaccttcagcgagtcaaagtttggtcatacctgggctgccgactctctggaaaaccctgaatttaccaatgtttcaccgctgacgatcgacagagcgaaaaagctgatcggcgagagcatcctggtgggtgttaatgcatggctggaaacattgccctttgatagcgatgacgtgaaacaagacatgtcagagcggttacgcacggttgccgttgagtctgcgaaagaatacggcattaaccacattgaattcatcgcgaccatggaaagcctggataaagccaaatggtcaaatattcgggggatccgcgcccatgtccgtgagacgcaggaatcaaaggacaaggcgttaaacgaatcgcgcgtttggcctcttgaggttggactggtgtttaaccagattgaaggggctgacgctctacctgtttcacagcagaacaagctgaaagccaatatcaaccagctgtggctcgaacgtatgccgacgagtgaaattatcacgaccgctggtggtctcttcaacagcatgcagggggccgtcaatgcgtga

SEQ ID NO: 158934 - DNA, 225 bp, Enterobacter cloacae
atgcggacggatgccgatattttccttgaacttctggaaagagaagacgtagaaaatatatttggtactccagaagagcagcgtggttgccattgccgacggctatgccaaagcctcggcaaaacgggctttatcaatttgcataccgccagcggtcctggtcacgccatgggtgtccagtccggagaaaccaacctgattgaaattgccatttcctcagagtaa

SEQ ID NO: 158935 - DNA, 465 bp, Enterobacter cloacae
atgagtataggcatttccagtggcagccttgtactgactaacgccaccagtatgcgaaattccctgatgagcactttgtttaaccaactgcatagtccctttgttagtttcaggattataatcatcaagatggtgccagacataaacacttggcgtagttttttgattcaatccagcctctatatttccaacatggaaatcttgcaaataatctccggtatattcaatagaaacaacaggattaatgccagctttattatacaagtcattacttcccgaataatccaacccacctgtagggatttgatcaacagtactgtatccacgctcactaagcttagcgattggatcgatggcaagacccagcagctcaatccatccccacggattagccgcataatgataaaggtttcaaccaccattcaaccaaaactgatcctgtacaataaaccgaccgccctgtag

SEQ ID NO: 158936 - DNA, 882 bp, Enterobacter cloacae
ttgaaacgttttcactctttgattttatccctgctgtggctgggaggaagctatccgcttctcgtcagtgccacacgaccactctttaacgtgcgtctgctggagcttgatcggcccattgaggtcgatatcagccagttcaatcgcccggataaccttcctgaaggagaatatcaggttgatatctatgtgaacgatcgattcattgcgcgcagggcggtgcgttttttccgccacgatccggagagtgcgttggcgccttgttttgtggatgtaaaaaacacgctggcgatgtttggcctgaaagtgaacgcgattaaagcgttggatacggtgaatgctgaagtttgtgaaccggtgccggtgctgcctggcgcgaaatggacgctggacagcgaaaagctcgcgctgaaggcgtcgatccctcaggtctatctggacgccacggcgcgtgacgccatttcgccctcgcgctgggatcagggtattgacgctttgatgctgaactacgatttctccacgacccagacgctgaagtcagactatgacagtgacgatctttactacctgaatttacgcagcggtctgaacattggcggatggcgtctgcgtaactatagcgccttaaatgcggtcaacagccgcggtaacgttcgttcgctgagcacgtacttacagcatgatattgccagcctgcgcagccaggccatggcgggcgatacgtggaccgcggcgatctcttcgacagttcacaggtgcgcggcgtgcgtctgtacaccgacagcgacatgctccccgatagccagaacggttttgcgccggtggtgcgcggcgtggcgaaaaccaacgccgtggtcaccatccgccagaatggctacatga

SEQ ID NO: 158937 - DNA, 2376 bp, Enterobacter cloacae
atgaatttcagggcgctattcctaagtatacaaagagttttaggcatcttctccagtagggagaatgatgtggctgagttaatgatgaaggatgtttcgagtctttcaccatttgctcagattataggggatcagaaatacactgtaccggatcacccgaatcttgaagtcctgaaattcattgagtacccaactcggccagctgggatacaaacgtttaatgagcagtctattctttctctttacagagataaactgcactcaatctctatgatgctggcaataagtgatggagacatccgtgaggatgcctttaccttcaccaatctggttttaaaaccattgattgaatacatccgttggattcatttacttcctgcttcagaaaaccaccaccataatggtattggcggattgttgtcacatagcctggaagttgcaatgatttctttaaaaaatgccaatcattctgaattgcgcccaattgggtatcaggatgaagaagtcattcgccgaaaagtatatctctatgccgcttttatctgtggccttgtgcatgatgccggaaaggtatatgacctcgatatagtaagtctgaatctgaatgaaactttaacatgggcgccaagctcgcaaagcctgcttgactgggcacgtgaaaacaatgttgtcgaatatgaaatacattggcgaaaacgcattcataaccaacataatatatggtcaagcgttttccttgagagaatattagatccggtctgtatgtcattcctcgaccgtgtcaaaaaggagcgcgtctatgcaaaaatggttacggcactgaatgtctataacgatggcaatgactttctgtccaaatgtgtaagaacctcagattattattcaacgggaactgaccttaatgtattgagggacccgataatgggtctgcggtcgaatgatgctgcggcaagagcaataggtaccattaagcataacttcaccagtattaatattaataactataaatccaaacccatgcacatcattattgtaaacggtgaagtttacctcaatgaaaacgccttcctcgactttgtacttagtgattttgcggcccacaagttcaacttcccacagggggatgcaggtaaaactgtactagtagagtcgctggttcaacggggttatgttgagccttacgatgatgagcgtgtggttcattattttattcccgggacatactcggaaaatgaaatagccagcatcttccgaaacggtatcggtaagctggaattttataatctcctgaaacttcgctggatcgggttaatttttgactcatataaaatcccggattctgttccgggcctcttcagcgttaatgcaaataaagatttcatctatattgatgaacagaaaactgtaacagaatacagaaggccggtcccgggtcgtgagtctgttaccagagtaacggacaccgtaagcgacgccattgaagatactccacaatacggactcaaactcgtgaacggccctgatgccgacagtgtcaacggtaaaagcagtgaaaatactgaagccatcacagaaagtgtggaggcggctggcacggataaagcaaccgatattattgatccgcaggttactacgccaacagatacagccggaacaggcggcttggatgaaaaggaacgggtagaggaacatgaagagcagagtcagatgcgtctggtcgagcagctgcatgaaatgcttctgagcgccccactgccccacaacgcagtcattaatattgattccgtaccttaccttaatctcgatgctgctattgcgttaatccctggtattgatgaggcggcattttgtgatgggccctttttccagctgacgtaccgtgatggatcactggatggtatgtggatagtccgtgacgtaaacaatctacgcctgatacaactgggggataactgtgctggtattcaggtgagtacctcggaaccccgaaccacttctacgctgaagtcgctttttgatacgtcaatgtaccagccgttggatatccctgaaagtccatcattaaacgaagcggtttcgcccccacaaacaccgcttgatctccctccggcgcgactgaataccccccaggctgtagaggccaattcggtagctgaacagattaacgcccactccgaaccggagaccgtcactgcttctgagtatgagcaatatggccacctgctggaagaaaccctagatagcgatagtgaggcatattctgactttatagtcgccgacaactctgtggttgaaccccccagcctgaggcgaaaaatagcgatgtcgccgaattccatgatgaaacagaccaggtcgttgcgcccggtaaattga

SEQ ID NO: 158938 - DNA, 132 bp, Enterobacter cloacae
atgagcagattaacattcgagatttcaggggtaaaaaaactgcttaaagaaatccagtcagcggagcaattccttgcaaccgttgatcagctttttgagccaacaaattatccgggggggggtgcctcttaa

SEQ ID NO: 158939 - DNA, 561 bp, Enterobacter cloacae
atgagcaaccttaacagcgatttgattgcgcggatctatgccgcgtcagacaccccgttaacgaacgaagagctgtatcgcgaggtacaacgcgaaacggggatgtcggatgcagaactacagaaaatgaaggcgttcggctcggacaaaatgcgaaccagcggcgtcaagcatcaggttcgctggtatcagcagacgctgcggcaggccggggtgatcgagcgtgtcccggaaaagcggggcgtctggcgctatgccttcaaaaatgacaagaagctgcatgagtcctgggacaaactgtgcgtcgttggcttctcaacttcgctcggggcatcggtcttcgggaatgcgtacgcgttcttcagcaacatcaatgagcaaatccatctctgccttacgtcgcccccgttcctgctgcgtaatgcccgaaattacgggcacggcggcggacgcggtgagcaggcgtatattgactggctgctgcggattcttgagcctatcgtgaagcagctcgtgccgggggggcagcgtggcgctcaatgtgacgcaggacagctttaa

SEQ ID NO: 158940 - DNA, 243 bp, Enterobacter cloacae
atgacgacgcgcaagctacggctcgggccgctgccgaaaacggaatccacgaagctgacttttgcttgcccggccagcctgaaagccgacctcgaccgctacgctacgctgcacgcgcagacctacggcgaggcggtcgatgccacggtgctaattccgcacatgctagaagccttcatggtcggagatcggggattcaggaagggaggcgcgggcaaggccgcgccgccgaagccaagctga

SEQ ID NO: 158941 - DNA, 1281 bp, Enterobacter cloacae
atgagccaggacgacactcccgacctcgccacgccgcatgcgggcaaggtggcacccgaggcagttgcgctgcgcgcccaaccgcgcccggtcacgcgcctgaaccggcgcacgctggccatcctcgtcggcggtctctcggtcgctgtgctcggcgcgctgatgtggtcgctgcaaccgcagcggcgcggtgcaggcgagcagaccgagctttacaacgtcgatcgcgtctcgaagtccgaagggttggacgcgctgccggcggactactcgaagctgccgccccccttggcggcatccgtgccggagttggggccgccgctgccaggcgatcttggcccggccattgtgaagtcgcagcagccggtgacggccgcctacgcggcccccggcaacgaccccaacgacgcgttgcgcaaggaagccgaagcagcagcggcatcggcggtgttcttccgctctggttcgcagaaggccgcgccggtggcgcagacacaggtagccgctgcgccgggcttcaccgccaatgcggccttcgacccgctggcggccgggcctgcgtcgacggcggcccagcccgccgacccgaccgccgtgcagaaccggcaagaccagaaagaggcattccagaaagccggaaccacggaagcccgtgattccggcaacctgacgctgccggcgtcgccgtatcaggtcatggccggaacggtggtcgccggggcgctggtgacgggcatcaagtcggacttgccgggcgatgtgatcgccacagtgacggagccggtctatgacacggctaccggcaagttcctgctgatcccgcaggggtcacgcatcctgggcaaatacaacagccaggtcagctacgggcagagccgcgtgcaagtggtgtggaaccggatcatcctgcccgacacgtcttcgctcaagctcgacaacttggccggcaccgatccggccggctacgccggcttggaagatgatgtggattggcattgggatcgcgtctttgccggtgcggcactgacgacgctactgggcatcggtgccgaactggctgcgccggagaaccggcaggacggtgatcgcgtcatcatcgccggccgcgatagcgcccaggacagcatcaatcaggtcggtcaggagatgacccggcgcaacctcaacatccagcccaccttgacggagcgccccggcttgccggttcgcatcatcgtcaaccgcgatctggtgctgcggccgtaccagccacttttcttcaacagggggacttcgcgatga

SEQ ID NO: 158942 - DNA, 993 bp, Enterobacter cloacae
atgaacctgtctttccgcttatacgctttcgcgctgaccgtggtggccctgtcgggctgcgcttcgcagggcaagccgcctccgtccatttcgctcgatgagccggtgcaggcacagccgctgccggagccgcctgctccagtggaagtcgtcgccatgcccgagccgctggcgctgccagcgcagttgaagccgctgcacgagttggacgcggccccggctaagccggagccggccgatgagaaggtgcgcgtttcccgtgccaatgccgaggcgcgcatcgcgcccacgcgcgagggctacgtcaatgcgattcaggtgtggcccttcaccgatggtgcgctctaccaagtctatgccgcgccgggacgcgtgaccgtggtttccttgcagccgggcgaggaactagtgacggtcgcagccggcgataccgtgcgctggatcgtcggtgacacgtccagcggcagcggcgacgcgatgcgcatcaatgtgctggtcaagcccatccgctcaggcctcaagacgaatttggtcatcaccaccagtcgcagaacatacctgctggaactgacctcgacggaaaaggcatggatggcgtcggtgtcctgggactacccaaaagaccggatgttggccttgcagcgccagtcgcaggcggctagcgccgccgcaccggtcgataccggactgtcgctggagaagatccgcttccgatattccgtctcaggcagcaatccgccgtggaagccgctgcgcgccttcgacgatggcgagaaggtctatatccagttcccgccgggaatcgcccaaggcgagctgccaccgctgttcgtcatcggcgcgcagggcgacggacaactggtgaattaccgttttcgctcgccttactacatcgtggatcggctgttcggcgcggccgaactgcgcctgggcggcgacaagggtgacgtggtgcgtatcgaacgcacggatggcttggcgcggaggaactga

SEQ ID NO: 158943 - DNA, 705 bp, Enterobacter cloacae
atgcgattcaaacgcccgcaggtgcgctatgccgacacgccgcagcctgccaccccgtaccaatccgccgcgcaggtgtgggacgagcgcatcggctcggcccgcgtccaggccaagaactggcgttttatggccttcggctgcctcacgcttgcgctgctgatggccggtggcctggtgtggcgctcggcgcagtccatcgtcaccccttacgtcatcgaggtcgatcagtcggggcaggtgcgcgccgtcggcgaagccgccacgccgtaccggcccgccgatgcgcagatcgcgcaccacctggcgcgcttcgtgacgctggtgcgctcgctgtctatcgatcccatcgtggtgcggcaaaactggctggacgcctacgactacaccaccgacaaaggcgcggcggtgctcaacgactacgccagcaagaacgatcctttcgcccgtgttggccgcgagtcggtgacggtgcagatcaccagcgtggtacgcgccagcgatgcctcgttcaacgtccgttggacggagcaacggttcatcaacggtgcccccgccgggaccgagcgatggaacgcggtgctttccaccgtcctgcaaaccccgcgcaccgaacagcgcctgcgcaagaacccgctgggtatctacgtcaacggcctgtcgtggagccgcgaactggattcttctgaaggagccaagccatga

SEQ ID NO: 158944 - DNA, 1365 bp, Enterobacter cloacae
atgaacgacgtaacgatcatcgacagattcctcgataccttctcgcgctacatcgactccggtttcggtctgctgcaaggcgaagtcgcgttcctgacggccactctcattgtcatcgacatgaccattgccggtctgtattgggccatgagccatgcgaccggccagggcgaggacgtgatcgccaagctgctgcgcaaggtgctttacgtcggtgccttcgcctacatcatcggtaacttcaattggctgtcgagcatcgtgttccgctcgttcgccgggctaggcatcaccgccactggctcggccataacgatggagaacttcttgcagccgggtcggcttgccaagaccggcatcgacaccgctgcgccgatcctcgaccagatcggtgacatggccggcttccccgaagtgttcgtgaacctcgaccccatcgtggtgctgttcatcgcttggctggtggtgatcctctgtttcttcgtgctcgcggttcagcttttcatcacgttgatcgagttcaagctgaccacgcttgccggcttcgtcttgatcccgtttgcgctctggaacaaaacctcgttcctcgcggaaaaggtgctcggcaatgtggtttcgtcaggcatcaaggtcttggtgctggcggtaatcgtcggcatcggctcgggcctgttcgcggagttccaggttcatcccgacgagccttccatcgaccatgcgcttgtcgtgatgctggcttcgcttgccttgctggcgctgggcatcttcggccccggcatcgccacgggccttgtgtccggtgcgccgcagctcggcgcgggtgcgatggcgggcgctgccgtcggcgcggtaggcacgggtgttgccatcggtgccgccgcgaccggcgtgggcggtgccgtcatggcgggcgcacgcatggccccggccgccgcaaagctggccgggagcggcgcacgcgccgccacgtcggcggccagcagcgccaagtccgcattccaggccggttccgccgctgcgggcggcggggctaaaggcgcggctgcgggcctcggcaatgtcgccaagaccggcgcgcaagcggcaggccgccgagctgcatcgggcgcttccgctgccggtcagaaggtggccgactccttccgggcaggatggaacggtgcggatgtcggcgctgccggttccggccaggccgccgcaggcgaaggcgcagccagcgcgccgaagcaagagcaacccgcctgggcaaagcggatgcaccgccgccagcagatcacccatgccgcaaccaccgcagcccacacgctgcgcagtggcgacggcggcggctcagggcaaggcccaagcctgcgccccgatgcgtga

SEQ ID NO: 158945 - DNA, 327 bp, Enterobacter cloacae
atgcgatgcgttcctgtcctgctggccgtgctgctgaccgcatgcggccagcagccggctgaagacctgaccgccaccttggccgccgatcccgtgcggctcaaggcgctgcgcgcccaatgcgcagccgaccggcaaaccgcaggcgaagacacctgtcgcgccgctgccgaagccttccggcggcgcttcttcaccggccagactgggccggacgaataccggacgctggcagaactgccgccgattccggcgagtttcgacacgccaaccgacgacgcgccggaaggtgatgcgtcgctcgccgctgcggaggacacgccatga

SEQ ID NO: 158946 - DNA, 738 bp, Enterobacter cloacae
atgaagacccgtgtactttccgtttcgctcgccgccgcgctggccggctcgctgatgctcgctcagccagcggcggcgctcactttcgttgatcccgtcaacttggtgcagaacacgctgactgccatccgcacgctggagcagatcaacaaccagatcaaccagctccagaacgaagcgcagatgttgatgaaccaggcgcgcaacctggcgaatctcgacttcaacatcgtcaaccggctgcgctcgacgctcgccacaactgaacgcctgattgccgaggcgcaagggctggcctacgacgtgcagagcatggatgccacgttctcgcgcctgtacccggagcagtacgccgccaccatcagcggcgaccgcatggcacaggacgcacgcgaacgctggaagaacacgctcgacggcctgcacaccgcgatgcggatgcaggcgcaggtgtcgcagaacctgacgcaagacgaaagcgcgctggccgacctcgtgagccaaagccaatcggccacgggtgcgctgcaagcgatgcaggcaacgaaccagcttctcgccttgcaggccaagcagtccatccaggcccagcagctccagatcacacaagacagggcggcctcgctggagctggcgcggcaggcagcggccaccgagcgcgcccgcgaagtgcggcggcgcttcctgggcaccggcacgccgtacacaccgcagtccgtcaacttctacaacaactga

SEQ ID NO: 158947 - DNA, 2451 bp, Enterobacter cloacae
atgcttaaccttgccgaataccgccagcggcccgccttgctggccgactggcttccctgggctgggctgatcgcgccgggcgtggtgctgaacaaggatggctcgtttcagcgcacggcgcgctttcgcgggcctgatctggacagcgccacgcagggcgaattgatcgccacgacggcacggctaaacaacgcgttgcgccggctgggttcgggctgggcgctgttcgtggaagccgagcgccagtcggccgcggactatccgcattccgactttcccgaaccgctgtcctggctggtggacgaagaacgccgcgctgcctttgaggaatcggggaaccactacgaaagcagctatcacctgacgctagcctatctgccgccggaggaatcccgcgctcgtgcagccaagctgctctacgagcacgcgccgggcgatggtgtggactggcgcggtcggcttgacgccttcctggcagaaacggatcgggttttcgacctgctcgatggcgtgatgccagaaatcgtctggttggacgatgccgcgacgctgacttatcttcacgccacggtgtccacgcggcgctaccggctggccgtgcccgaggtgcctttccacctcgacgcactgctggccgattccgccctagtcggcggccttgcgcccatgctgggtgaccagcatctgcgcgtggtgtcggtgcggggctttccgacctcgacctggccgggcctgctggacgacctcaatcgcctgggctttgcctatcgctggagtacccggtttctctgcctcgataaagccgaggcggaaaaggagctgggccgcctgcgtcgccagtggtttgcgaaacggaagaatgtcattgcgctactgcgcgaaaccatcttccagcaggaatcgccgctggtggacacggatgccagcaacaaggcggccgacgcggatgccgccttgcaagagcttggcagcgatcaagtcgccttcggctacctcaccgccacggtgacggtgttcgatgacgaccctgccgtagccgacgaaaagctgcgcatggtggaacgtgtcatccaaggacgtggcttcgtcaccatccccgaaaccttaaatgcagtcgatgcgtggctgtcgtccataccaggcaatgcctatgccaacgtgcgccagcccatcgtctcgacgctgaatctggcgcacatgatgccggtgtccgccgtgtgggctgggccggagaaaaacgcccatctcgacggcccgccgctgatcgtcacgcgcacggatggcgcgacgccgttccggctggtgacgcacatcggcgacgtggggcatacgctggtcgcggggccgacgggcatgggaaaatctgtcctgctggcgatgctcgccttgcagttccgccgctatggcggctcgcgcatcttcgccttcgacatggggcgatccatgcgggcgacggtgctgggcctgggcggcgaacactacgacctcggcgcggacggcgccattgcctttcagcccttggcccgtatcgacagcgaaggctatcgcacctgggccgccgagtggatcgaaggccgcctgctgcatgaaggcgtgaccgtcggccccgacgagaaagccgccatttggtcggcgctcggcagcctcgctggtgcgccggtggagcagcgcacgatgaccgggctttcggtgctgctgcaatcgaacgcgctgcggcaggcattgtcgccgtatgtgctgggcggcgcgcacggcaagctactggatgccgaccgcgaccggctcggcagcggcgacgtgcagggctttgagatggaagagctaatgcacagccccgccgccgtgcaagcggtgctgcgctacttgttcgcccgcttcgatgcacgtttcgacggtgctcccacgctgctgattctcgatgaagcctggctattccttgatgaaccgtccttcgcggcacgcatccggcaatggttgaaaactctgcgcaagaaaaacgtgtcggtgatcttcgccacgcagtcgcttgccgacatcaaggattcgaccatcgcgcccgcgatcatcgaaagctgcgcgagccggattttcttgcccaacccgcaggcgaccgagccgcagattcgcacggtctacgagggctttagcctcaacagtcggcaaatcgaaatcgtcgccaccgcgcagcccaagcgcgactactactaccaatcgcgcctgggcaatcgtctgttcgacctcgacctggggccagccgcgctcgccttctcgggcgcatccacaccgcaagaccaacgcgacattgaccgagtgctgacgcaggccggcgctcccggcttcgccggtgcgtggctacgccatcgcggcctcgattgggccgccgacctgctgccgtcctcgccgtcggcggcttctttcctcgctactcaacccctggagatttcgccatga

SEQ ID NO: 158948 - DNA, 273 bp, Enterobacter cloacae
atgagtggcccggatagcttcgcggccggcttcgaggtgccgctacatcgctcgctgaccgagccgctcttgatgggcggcgcaccgcgcacggtggcgattgccaacggcacgctagccgctgccgtcgggctgggcctgcaactctggattcctggcgtagtgctctggatcgtcggtcactcgctggccgtgtggggcgcgagggtcgatccgcagttcatgcaggtcttcgcccggcacatcaagcacaagccgctgctggacgtgtag

SEQ ID NO: 158949 - DNA, 384 bp, Enterobacter cloacae
atgacgcagatgcacgttcacgctttccgtaattccgtaaatccggtttcaaccatcgcacgcctgcggcggctggccggccccgcgcaccacggcctgctgctggccgcagtcatgctgatgacggcgggcacggcgaaggcatccggctcctcgatgccgtgggaaggcccgctgcaatccattctggagtcgattcaggggccggtggcacgcatcgtcgcggtcatcatcatcatcgccacgggcctcgcgctcgccttcggcgacacgtcgggcggctttcgcaagctgatccagatcgtgttcggtttgagcatcgcgttcgccgcgtcctcgttcttcctgtcgttcttcagcttctccggcggggctgtcgtatga

SEQ ID NO: 158950 - DNA, 1068 bp, Enterobacter cloacae
atgagcgccattccgcaaaccccgcccgaactctcatccgccgcaacctctctggatcgccgtatccagatgctgcgcacggcaatggggccagtcatcgccgctgcgctggccgaccccgacgtggtggaaatcatgctcaaccccgaccgcaccctatgggtggatcggttgtcatcgggccgcatgccgctgggcgtggagctgtcccaagacgatggcgaacgcatcatccggctggtggctgcgcacgtcggcgcagaggtgcatcgcgggcggccgctgctgaccgccgagctgcccgaaaccggcgagcggttcgagggcatcttgccgcccgcagcgcccggcccagccttcgcgctgcgcaagcgcgccgtgagcatcatcgggctggatcgctatgtggccgacggcatcttgaccacaggccaggccgagttcctgcgccgcgccgtgcgtgagcgccagaacatcctgatcgccggggcgacgagcagcggcaaaaccacactcgccaatgccttgcttgcggagatcgccgccacgggcgaccgcgtgcttgtgctcgaagacaccatcgagctgcaatgcgcagcccgcgaccatgtgccgctgcgcacccgcgctggcgtcgtgtctatgaccgagctggtgcgggccacgatgcgcctgcgccccgaccgcgtgatcgtcggcgaggtacgcggcggcgaagccctggacttggttaaggtgtggggcaccggccaccccggcggcatcgccaccatccacgccggttccgcgctgggcgcgctgctgcgcctcgaacagttgattcttgaagtggcggtgaacccaccgcgtgcgctgatcgccgaggcggtcaacgtcgtgatccacatcgccgggcgtggccgcaagcgccgcgtcgaaagcatcgcccgtgtcgtcggtttcgacggcaccggctatcgcctggcggacgcgctggaaacaccgtttcccgagctgatgccggttcctctcgcagccgatgccgctgcgccttcctcgtcccttgacctacctggagaactgccatga

SEQ ID NO: 158951 - DNA, 2016 bp, Enterobacter cloacae
atgcaaggtacgaatgtgctgttcggtcagatagccgtggtattcggcatcgtgatcgcgggtgtgtggggcgccacacaatggacggcagcagcccttggctatcaggtacgccttggctccccctggtttgatttcctcggcacaccgatctacctcccgtggaagctgtttgagtggtggttcttcttcgatgcctacgcgccacgcgttttcgacacgggcggtgccatagcgggtggcagtggcttgctggcggtggtggtcgcagtctgcatgtcgatctggcgctctcgtcaatcacgcctagtcacgacctatggctcggcacgctgggcaagtacggaggacattcgcaaagccggccttacgcagccgatcggcgtgttcctcggtcagcacgatggcaagtaccttcggcatgaaggcccggaacacatcctcactttcgcgcccacgcgctcaggcaaaggcgtcggccttgtggtgccgacgctgctttcttggcctgcatccgccgtagtccacgacatcaagggcgagaattggcagatcaccgcaggttggcgctcacgctactcacactgcctgctgttcaatccgaccgatgcgaagtcggcggcctacaacccgctgctagaagttcggcgcggcgcacatgaagtgcgtgacgtacagaacatagccgacattctggtcgatccagaaggcgcgcttgagaagcgcaaccattgggagaagacttcgcacgcgctgctggtcggggccatcctgcatgtgctctacgcgggcgaggacaagacgctgcgcggcgtcgccaatttcctctccgatccggccagccccttcgagctgaccttgcaccggatgatgaccacacagcacctcgtgaacgtggaaggtggtggcccgcatccagtcgtcgcttcggcggcgcgcgaagtgctcaacaagtcggacaacgagcgttccggcgtgttgagcaccgccatgtcgttcctgggcctctaccgcgaccccacggtggccgaagtcacctcgcgctgcgactggcgtatcgccgacctgatcgcgtccgagcatccggtgtcgctttatctggtagtgccaccttcggatatttcgcggacgaaaccgctcattcgcctgatcctcaaccagatcggccgacggctcaccgaatcgctcgacggcagcgacggcatcgaacgccgccacaagctgctgctgatgctcgatgagttcccggcgctgggccgcctggacttcttcgagacggcgcttgccttcatggcgggctacggaatccgcagttttcttatcgcccaatcgctcaaccagatcgacaaagcctacggccagaaccattcgattctggataactgccatgtccgcgtgacgttcgccaccaacgatgaacgcactgcgaaacggatctccgaaacgcttggcaccgctaccgaactgcgcgcgcagcgcaactatgccgggcacagattggcaccgtggctggggcacctcatggtgtcgcggcaggagacggcccgcccgctactgacgcccggtgaagtgatgcagcttccgactgaggaagctgtggtgatggtgtccagcgtggcaccgatcaaggccaagaagctgcgctactacgccgacgcgaatttcaagaaccgcgttttaccgccgcctgtgctcgcggccgggcaatacgcggacgcgccaccggcccggcccgacgactggagcggcctatcgatcccagccgtgtcaacggtccgggctgcgggcctgtccggcgatggcacaggcaccgccgatgacggcggcccacgccgacagccggagctatccgaagtcagcgaatacagccccgaaccgctgctcgccggccatgacctgactctgctcgatgacgacgacgacctgccgctgccgcttcccggccagctcgacccggccatgcagcgcacggcccggctggcttccctcgaccccaacgacggaatcgacttatga

SEQ ID NO: 158952 - DNA, 276 bp, Enterobacter cloacae
atgagactcgccatcacgctcgtcgctgcaatgctagtcgcatgcggtcaatctgataaaccgcacaaagccactagtgcagaaaagaaaaccccgacagtagaagagctggtggcagacccggaacagctcaagaagttgcgccagcaatgcaagacggatcggcctactttgggcgaactgctttgcaaccgggtagcggaggcaacacgtaagcggttctacggtgacggaaaaacgccatacacaccgcccaaagaatcccccaaattctga

SEQ ID NO: 158953 - DNA, 945 bp, Enterobacter cloacae
atggaaattcgacatctacgttgttttatggcgctcgccgaggaacttcacttcgctcgcgccgctgcgaaactgcatattgagcagtccccactgtctcgcacgatcaaagaactcgaagaggagttaggagcacagctctttattcggaacacgagaagcacgcgtttgacacgagctgggttgatgctcatggagcacgcacctcgggtgttcgcatccttgcaacaggcgcgggactgcgtgaaggcagcaaaaaatggctttcatggacaactccgcgtcgccttgtcagacggcgcaacactactgtgcttaccagccctattggcgttgtgtcgcgaggaggagcccgaggttgagattcgcttttttgaggtgccactatcccaacaaatcaaaggattgcacgacgacctgtatgacgtcggctttgcacagtccgacgacgtaggtgatggaatcgtcgcacttcccgcgtggactgacacgcttatggtggcgctgccagctcggcatccgttgctggctcttaagcgaattccattggatgaactgctgcgctacccgctagtgctatctgatcctcaagtgtgcgagggccacgccaagcacattgagcgagtacttagccgggctgaaatgcagcctctagttgccgagcgggttaccactttcgacctgatgatggcgttggtatctgccggttttgcactcggacttacaggggctgcacacattgcagcctcccgagagccaggagtcgtggcgaggccgctttcgacacgcgtaccacctttgacgacctatctactcagacttgaaggcgatccgtttgacgagcttgcgcgcttcattcagcgagtacaggccatcgaattgccagagtttctcaggtcaacaaaaagccgaaatcccgatcttccggaggaattgatgccatga

SEQ ID NO: 158954 - DNA, 1146 bp, Enterobacter cloacae
atgaagctgtggcgatcacccgacgtacacgcgcttcaatgttccctagcttggcgctcacgccccaagcaacgcgcgcgcgacttttctttggcaccgaccatcagcagcgatgccaggcttccgctgtcggcttcatgggaagttgatctagcgggccgcctctcgcatgccgctgatggcgcacggatggacgcagttgctgtcgaacagaactggttcgcgacacgttggcagatcgcctttgagacagtgtccgctgcactgcagcagcggcaggcggcagagctggaagatctggcaaaagagcgacttcaagtcgccgagcgccttgagcgtctgacagagcagaagttcaaggcaggtcaagctacgggctttgacattgaacgcacgcgttccgaggtcatcgccctccgggtggagcaagagcagttgcgacgcgtacgcggcgaagcaacgcatgccttggatgtgctcgttggccggattccgggggcgcttggcagcggtcctgcgcttgcctctctcaccatgcccgattggactcccagaagcgtgccaggcgaattgctgcagcagcgccccgacgtcagagccgcgcaggcgcgtcttgcagcggcgacggcgcgatggaacgcagcagaaggcgagcggctccccaaacttgtgctcgatttgagtggtgggcgccaacgcttcgagaacaacggaacacgtgtggcagggaacattttctctctgggcttgggtgtgacgcttccgatctttgacggtggagcaatacaagcgggaatcgacgagggctcagcacgcagtcgcggcgcacaggctgacctggaacgcacggttttgcttgcgcttcaggatgtggagaacgcttatctgggctggcagacccagcggacttctctgcagcatcaggtcgatggtcttgtcgtcgctgatcgactccttgaccgcagtcgacgcctctttgaggcgggacaggtggatgcgaccgttgttgcagaagcggagcgtggcaccttgtcccagcgagcggctctggtccgtgctcgcgccgacgcagccgtgcaatggggtgttctcgctaaagcgctttctggttcgccagagcatgtgaatctgcaatcttcaccctga

SEQ ID NO: 158955 - DNA, 636 bp, Enterobacter cloacae
atggcaactcgtatgaaatcaagcccagaggagtcgcattcggcggacaacggcgctgaagccccctccatctctaagaaagcgcaacaaacacgggagcgcatccttcaagctgcgcgtgacgtagtcatggagggaggtgccgggcacctaacgcttgacgcggtcgttgcacgggcaggaatgagcaaaggtgcgttcctgtaccacttcaagaccaagcgcgatctgctcctcacgatgattgatgaccaggtctcggcgtttgatggcgggcaggaagagcgagagctgccattcgtcggcgatccagacccttggctatccagccaggtctcggctatgcctgacggcgggatgcaaaagatgagcgctgcattgctggcggccgtggctgaagaccccacgctgcttgagcctgtgcgcggctggtaccgcaggcagtacgagaacgcgagcaaatctccacgcggcaccgatatcgccggaatcgttctatttgccttggacggagtcttcctcgccgaaatgatgggttttccgacgtttgctgccgaagacctttctcgactcatgcacaccctccaggcgctcgcccgcggcgaactggaactcacccctattgataaacgctga

SEQ ID NO: 158956 - DNA, 1167 bp, Enterobacter cloacae
atgaaaggccttcccgtgtcttgcactccctttaaatcccagtcctggcaaatgcagaaagtcggcctcgcgtttgttctgctcgcatcgcttgccggctgtgatagtcagaaggagcctgcttccgatccaccgcgagcggtcaagctgctcacggtgggggatgtaggttctgtggccaatcgcattgaattgagtggtctagctcgctccagtgagcggagtaccttggggttcgagactggcgggcgtatcagcaagcttcatgtggacgtgggagatcgcttctctcgcggacagcttctggctgagttggatgttcagcccgagcaactccgcctagaacaggctcgggcgacactcgctgctgcggaagccgcattggcagacagaatcgtgcagacaacgcagcaaagggggctgcttgagggcaacgtaatctccccggctgcattcgagagtgtgaaagcacagttggttgcagctgaaggccaggtgcgcaatgcaaaggccgcattcggccttgccgagcgtgcgcgaaggggggccgccattcatgcgccattcgacggcgtcgtcgcggagaaactcgctctgccgttcacagatattgcagccggagcgccggtgcttcaagtggatggactacgcagcggcgtagaagtccttgcgactgcatcgacgacccaggcggcaaatatcaaaattgggcaggtcgccgaactgcgcctgagcgagtcagcaagtcccgttcgtgcttcggtacaacgcatcggcttgcgtgctgaaaatggctcacttttacctgtcgtgctcgttcctcaagatgctactcttgcgcgcagtcttcgacccgggtctgccgttcaagtattgctgaaggcaccggaagcgaaggatgcctcaccagatcgtctgatgcttccctattcggcactggtgctcagtgagaaagcaggacaagccgcagtgtttgtatatgacgtgaccggaaagaaggtgcaccgccgggaagtgcaattccagagcgagccaggcggcgacaacgttcgcgttgtgggcggcctgaagcgcggcgagatggtagtcgcggctggcgcgagttggctgacgaacgagcaacaagtcaccccactcaaggccacgacccaattggccggacgctga

SEQ ID NO: 158957 - DNA, 3117 bp, Enterobacter cloacae
atgaagatcacagaaatggcgctgcgcgccagcagactcacctaccttgccgcggtcatcattcttgttgccggcattgccacgtttctcaatttcccttcgcaggaagagccatcggtcacgattcgagatgcggttgttgccgttctgaaccctggcatgccagccgaacgtgttgagcagttgattgcgcgtccgatcgaggagcgtttgcgggagctggccgaggtcaagcgtgtaaccacaaccgttcgcgcgggcggggccgtcatacaggtcacgatctgggagcggtacaccgacctagcccccatatggcagcgcgttcgcgcgaaggttgccgatgctcagcctctgcttccacagggtacgttggggccatttgtcaacgacgacttcggccgtgttgccgtggcctccattgcggtgaccgcgccgggctactccatgggcgaaatgcgtgtgtcgttgaaagagatgcgcgatcgcctatacgcgcttcccggcgttgatcgcatcagcttctacggcttgcaggaagagcgcgtctatctcgaatttgatcgaccaaaactagcccagcttggattgaccccacaaggggtgatcgatcaactcgttaaacaaaacgtcgtgctttcaggcgggcaaatcgccatcggtggcatcaacgcttcgctggctgttagtggagaggttcgcgacgccgcttcgctgcgcgcgttgccgatcatgatggcgcaagctcagggtgcgcgcggtgcttcgcctgctccttcaatctcactgggagagcttgcgcgcgtgcaggtacaacctgcagatcctcccgagtctgctgcagtctataagggccagcctgccgtagtgatggcagtgtccatgacctcgggccagaacgtggagcaattcggcgtagccctcaaatcccgtgtggccgagcttgagaaacttctgcccgcaggtttcgagctctcctatgtgacattccaggcagacgtcgtcaaacgtgaaatgggcaagatgaaccaggtgatgatcgaaacgattgtcatcgtgctcggcgtcgtcgtccttttcctgggatggcgcacaggattcatcgtcgggatgatcgtgccgcttaccattctgggggcactgatcgtgatgcgcgcgctgaacatcgagctgcaaagtgtttcgatggcagccatcatcatcgctttggggctcttggtagacaacggcatcgtgattgccgaagacattgaacggcgcttggcagccggtgaagaccgcaaacaggcttgtctcgaagcgggtcgtaccctcgcactgccgctgctgacgtcctcattggttatcgtcatcgccttctccccgttcttcttcggccagagtgcgacgagtgagtatctgcgctctctcgtcattgtcctcgcgctcacgttactcggatcttggctgttgtgtctgaccgtcactccactgctgtgctaccacttcaccaaagtgcatcatcaaccggcgaatgacgcgcaaacctacaacacacgcttctatcgcggctatcgcaagttgcttgagtgggtgcttgaccacaaggcgatctacgttggtgtgatgacgggtgcattggccgtagctctgtacggattcacgacactgccatacgacttcttgccgaagtccgaccgagttcaattccaaataccggtgcagctcgcccctggaacggattcacggctcactcttgccaaagtgaaggaagtgagcggctggctcggtgatcaagaaatcaaccccgaaatcacggatcacattggctacgtcgctgacggtgggccgcgcttcatccttgggctcaatcccccattgccagcatcgaacatcgcgtactttgtcgtgacggtcaaggcaggcaccaacattgacgtcgtgattgcccgaactcgggcttacttcgcgcagcatcatggagatgtacgcgcagagcctcagcggttctcgctaggcactaccgaagccggcacagccgtctaccgggtcagtgggccggatcatgaggtgctgatgaatgcggcggcgaaaattgagtccgcgctacgggagctgccaggtacggccaacatcaagaacaactgggatacccgtgtcggccgtctcgatgttcgggtcgatcaagatcgtgcgcgacgtgctggcgtcaccaccgacgacatagctgcctggcttggcacccgctacatcggccagtcgatctctgtgatccgagatggcgataccagcgtgccaatcgtgatgcgcgggacgtccaatgatcggcgcagcactgcggacgttggttcgacgaccatctatccagcgtcgggtggccagccggtttccctggcgcaagtggccgatgtcacgctcgctagcgagccgtctgtgatccagcgccgcaatctcattcgtacagtcacagttcaggggcagaacaccgcatacaccgcgcaagagatcgtggatcacctcgcacctcggatcgccgcaattgaactacctgcaggctatgccatagagcttggtggagaaattgaggaatcggctgaatcgaatgcatcgctcacgcactacatgccgttcgctcttctggcgatgttgctgctattcatctggcagttcaactccttccgcaagctgatcgtgattctcgcaacgattcccttcacgttgattggggtcgtgattgcactgaaggcaacaggcactcctttcagcttcatggcgacattcggggtgcttgcgctgttcggaatcatcgtcaacaacgccgttcttctgctcgaacaaattgaacacggcctctcggaaggtctcgcccgacatgaagccctggtgggagctgcgatgcagcggctgcgtccaatcgtgatgaccaaggtgacctgtatcgcgggtctcgtgcccctgatgttgtttgcggggccgctgtggaagggcatggccatcggcatgatcggtggtctcgcacttggcacgctcgtgacgcttggcctgattccgttgctctacgaggtgctgttcggaatgaagtggccgggcagcaaacggagtcacgaggcggtacaacaaccagtgcaaccggtctga

SEQ ID NO: 158958 - DNA, 336 bp, Enterobacter cloacae
atgaacccgttgtcatggaatccatggttggttctactgattgccggcctgttcgaaatcggttggccactaggcctcaagatgggtgcggccaatgcagcgatgcgctacgtggggccggcgattgcagttgcctgtatggcagccagcggctttttcctatggttatctcttaaacagatccccataggaacagcttatgcggtctggaccggcatcggttcgctgggcgcgtttttcgtgggcgtgtatgtgttcggcgataccgcctccttgatacgttgggttggaattgcgctggttgttgctggcatcgtctgtctgaaaatgggataa

SEQ ID NO: 158959 - DNA, 618 bp, Enterobacter cloacae
atgaaacgccctatttcattaatccattttgtgctgctggcaggcctcacggcaaccttatctggctgtgcttcaaacggaatgactcgatcagggtttcttggtgattacgatgtattgggaaaaacgaagtacgaaaatgttctgctcttcaaggcgccaggctttgaacccagtcgttaccgggaaatattagtcgaggatgctcaggtagtgacggcaactggacgcataggtgggcttgaagctgagcaagtgcgagagcttctcgatcacgtcaacagtgaactgcgacatctccaaactaagtccgaagctcccgcatcgtcaggccgcatacgtgtgcgtgtggcaattacgaccattgagacgcccaatagagcagtcaacaccctaacgacgttgcttgttggaccagtgacaactgggggagctagtttggagtttgaggcagtagatgaacaaacagatcgtcgggtggctgctgctagctgcttcgagcacggcaacgctctcgcggatttcaaaggctcctacacactgctcgggcatgcaaagtctgcaatcaccacctgccttgaacggatcaatagcgcttggagaagtgctggctcgtga

SEQ ID NO: 158960 - DNA, 1389 bp, Enterobacter cloacae
gtgctggcaacggtagttctgacagggtgttccacttaccgtccttggatcaacccgacactttccgacgccgccttaatgtctctcgccgagaacgaccaacgcatcaggccgtcggaggtcaaccaaccggtggttgtagcggtgacactgtcaggcgggggcgctcgggcggcggccttcggcctgggcgtgctgcgcgaactcaaggccacacgcttcgcgctagagggccaggagaccactctgttggatcaggtgttcctggtcagcggagtgtcggggggcagcatccttgccgcgcacttcgcggccttcggcgatgccacgctgactcgtttcgagccggattttctgcttgtgccttttgaggggcgactcatacgtgaagctctgtggcctgagcgtctttatagactaacttcaccttggtttgggcgcagccagatcctggctcaacgcttggacgaactttttgaaggccgcacctttggtgacgtgcgccgacgaccgggcgcgcccgaactgatgatcacggcaaccgacctcacgaccggtgcccctttcgatttcaccaccgagcaattccggctaatctgttccgacctcgatgcaacgccgctgtctttcgcggtggcggcctcgtcggcagtaccgctggtgctgtcgcccgtaacggtgcgaaacaacgccaatacctgtccgccgcctctccgatctttgcctgtcagagggcaaaattacagatcacgcatcctgcaaagcggcatagacagctacctcaatgcgcacgatcggccctatatccacctcgtggacggtggtgtctccgacaacctcggcgtacgtctgatgctagaccggctagtagcttcgggctcaatgagcgccaatttctcggaggtcaagcccggaagcttgcgccgactcgtgttggtgacggtgaactccgaacgaggactgagcgagagagtggacagtagcgaccgagttcccagcacgacgcaagtacttgagtcgctgatcttcggtgccggcgctcgcgagacccaggtgacgctggccatgcttaacgacgacctgcaacactggcgttccgagattgtccgcacccgtggccaagcggacagcccctttgcggccgacgcagaaatctacgtagtaagcgtaagtctgaacgacgtgccggacgacaagatccggcattcgctgctgcgcgtgcccacagccttcacgatcgaggctacggatgtcttggacctgcaaactgcgggaggcgaagcactgaggcaatccaaggagtttatggcattgattgaatctctaagaagaatcacagcagccaagcagactgcgcctggtactcagcttcccttgatatctaactga

SEQ ID NO: 158961 - DNA, 1983 bp, Enterobacter cloacae
atgaccgacagccgcgacgacgactttcgcgtgcgccccagcgccccgaagaaccggggcaagggccaggggcagagcttcgtttccaaggtgctcaagcaggccggcaaagccagcagcggcaagtcggcagtacgccgtcctggcgcggctggcaccggccagcggcccggctctcggctcggacgtggccacacggcggcgcgcttcgccggggcgaagctaatgcccatgtcgcggcgcgtgaccatcaagaccttgctggtcaatcaccagcgggccagcccgcaatcgctcgccaagcacctgcgctacatcgagcgcgacggcgcgggtcgcgatggcgaaccgggccggggctacgggccacaggccgacgaagccgatctggacgccttcaaggaacgctgcgccgacgaccggcaccatttccgcttcatcgtctcgcccgaggacggggccgagctggacgacctgcgcacctacacccggcatctggtgagccgcatggaagccgacctgggcacgcggctggattgggtggcggtggatcactggaacaccgacaacccgcacacccacctgatcgtgcgcgggcgcgacgacaccggcaaagacctcatcatcgcgggtgactacatcgcccacggcttccgccatcgcgccgccgagctggcgaccgagtggctggggccgcgcaccgaactggagattcagcagaccttgaggcgcgaggtggaacaggagcggtggacgagcctggatcgcaccttgcagcgcgagaccggcgaggatggccgggtgcatgtcgaacggctcaacgagccgaggttgcaacgccagcgcctgctgctgatcggccgcctgcaacgcttgcagcgcctgggcctagccgacgaggtgcagcccggcacctgggccattcatgccgatgccgagaagaccttgcgtgccctgggtgagcgtggcgacatcatccgaacgatgcagcgggccatgagcggccagccgcgtgagctggcggtgttcgagccgggcgacgatggtcgcagcctcatcggccgcgtggccgcgaaggggcttgccgatgagttgcacgaccgaggctatctgatcatcgacggcacggacggtaaggcccactacgttgcactgaacgcccgcgacgaactggcgaactatcccacgggcgctgtggtagaggtgaagggttcgactgaggtgcgcacggccgacaagaacatcgcctcgctggcgagcgatggcctgtaccgcaccgatcatcacctggtaatcgagcagggccgggctacgcccggacgcgacccgcaggaagtcgtcgccgctcatgtccggcggctggaagccctgcgccgggcttgcatcgtggagcgcgtggccgaagggctatggaaggtaccggacgacctggccgagcgtggccgccaatacgacgcgcaacggctgggcgatgtagccgtagagctgaaatcacaccttcctattgaacggcaggcccgcgtcatcggcgcgacttggcttgaccagcaactgatcggcggtggccgtgggctgggcaacttgggctttggcggtgataccaagcaggccatacagcagcgagccgatttcctcgaagaacaggggctggcacagcgccgcgggcagcgcgtcatcctcgcgcgcaacctgctgggcacgctacgcaatcgggaactagtgcaggccgcgaaagacattgcggcggaaaccggcctagagcatcgcccggtggccgacgggcagcgcgtagccggtatctaccggcgttccattatgctcgccagcgggcgctacgcgatgctcgatgacggcatggggttcagccttgtgccgtggcggccggtaattgagccgcgactgggacaacagcttgccgcaaaggttatcggcggaagtgcctcttgggaacttggacgaaagcccagtatcggtatcagttag

SEQ ID NO: 158962 - DNA, 444 bp, Enterobacter cloacae
atgatggccgccgattcgctgcgctctgacgtgccatcgggcatgtcgttctgctggctgcttcagtgtcgctgcgcctgtcgtgccggtgcattcgcaccgcacgtcgcgcagcatccggcgcagccgtccaacgttcaggcgtcttgcctcgaacgcgcccggcctgcggccattggcgctttcgccggcgcgctgtctgttcacgcagcagcgccgccgggccgccgttgcctggagcgacagcgaagggcaaaggcggaaggcaagacaaaaggacgcggcacctggccgcgtcgaaagccagtcagcacatggggggaacgcggcacggagcggcttcgccaccgtgccgcgtttggcgcgagggtcgcgccaatgctggcatgtccgcgtgcttcgcacgacaggacacgcccaagcttgcggggagcgcagccatga

SEQ ID NO: 158963 - DNA, 240 bp, Enterobacter cloacae
atgtcccagtcaatgttactgctaccgggaccgttcacccggatacaagcggaaacggtcactgcagcgtaccgcaatatcaccattgaagatgaccagggcagtcacttccgcctggtggttcgtcacactgaaggccggatggtctggcgggcatggaactttgagccggatgccggtgaaggtcttaaccgctatatccgcacctcaggcatccgtacagacacggccacccgctga

SEQ ID NO: 158964 - DNA, 168 bp, Enterobacter cloacae
atgttgttcagcacctatcatcagcgctttaagcttggcagcaaaccagcagcacacattgaggcgttaactcagctaagggatactgaattacttgacaacatgcctgagtcgctaaacaggctggcagatgcaattattgccaaacttgaagagctgccagaatga

SEQ ID NO: 158965 - DNA, 699 bp, Enterobacter cloacae
atgagtacatccgaggttttagattttctaaacaaaaattctggtgcactgaccgttctattcactgcggttgttactatttcaacggttgtttattcaattcttacaggaaagctggtttctgaaacgaccaagatgaggcaagttcagacagagccgaagatagagataacgattaagccctttgattttgcaataaacatcgttcgactgcatgttaggaacattggtctaggtcccgctataaacgtcagatttaatctgaaaaccatatctggtgggcaaatcgcccaaactctcattgatgagttcgctgaagcaaatttcttgaagatagggttgaaatatttcggtccaggacaagaactctactcccattacactcaattgacgcagcaatataatgagaagattgaatctattttggttatagagatctcataccagagcgcaaccggcgttaagtatatagagcagtcaataatcgatatgtcggagctcaaaggtgcttatcagctaggaacaccaaatctctactcaatcgccaaaagcctcgaaaagattcagaaagacatatctcaaatcactagtgggcataagaaaatcagtgctcaggtttacacagcagaagaccgccaaaaagagaaagaggacctaaaagcctttatcgaaaagaaccagaatcggcctaagacatga

SEQ ID NO: 158966 - DNA, 594 bp, Enterobacter cloacae
atgcagaacactgaagtaatgacaaccatcaggctgggaggcgctcttggaaaactgtttgggaagatgcaccaccgagtcatccgggatacgagagaagctgtcagagctttaaatgccaccctcccgggattcgaaaaatacctgaatagtagcaaatccagaggactcacctacgcggtttatgtcgacgggatgaacattggagaaatggatctcgattttcctaatttaggcagagagattcgaattgtgccaatagtaattggaagcaaaaaggccggcttggttcaaactatcctgggagctgtattggtgattgcatctatctggatgcctggactgagcatagccgccagcaatatgatgtttgctgctggcgcatcagtgactctgggcggggtcgcccagatgttatcgcctcaaccaccaggccttgccagtaagcagagtgccgataacaaagcttcgtatgcgtttggaggtgtaacgaacacagctgcccagggttacccggtacctctgctttatggtaagcgccggattggtggtgcgattatttccgccgggatctacgtcgaagaccagctgtaa

SEQ ID NO: 158967 - DNA, 735 bp, Enterobacter cloacae
atgattaaattcccgactaaaaagcgcgttgatttgtataaaaatgctgtcagttctgagcaattacatctggatctggctgcggctcaggagttcatgttcgatgcctgggaaactgatgacctggacgttgtgctgaaactcatcagaaaagctatcaagaaatccccgctctgtgctgacgcatactcattctactgcgagttatctcaagaacctcctgagtcaaaaatcgggaatctggagacggctttgtacgcagccagcattgctcttggcgaggattttcaggagttcgcaggacgtttctggggatttgtcgaaacacgtccatatatgagagcaaaagcagctttggctgaggccttatgggagtcaggtaatttttatccggctatggctcactgccgcgaaatgctgaagctcaacccgaacgataaccaggggattcgtcatttattagcgaactattaccttgagcttgaaatggtggatgatctggccttgctactggacgattatcctggggatatgcgcccgtttcttcagtatacacgcgccctcctcgcctaccggcagtcatccccagatgccaatgatatcgctaaagctgcgattgattctaatagacacatccccggcttgttatcgaagtgcagattacagcccaagtctaacagtggatatattacgttagggaaggtgcgaataagcggggaaattcttctcggctga

SEQ ID NO: 158968 - DNA, 1641 bp, Enterobacter cloacae
atgagcagattttatgatttcaatgcgttagaactaatggaaatggcccccatatctatcttcagtcgtaacaaaaatactgagattttcctggatgatcaattattagagcaggaacgtcgccattgcctgtcggttcatattttttgcagaaagctcgaaagatttgaagaagaatttaacagcaataaaagttccagaaatcgcttggttaagttccttgaatcacaagaatgcgattttatctatgatatagctaaagagtggtcatcttacaatttacaaaaagttcctcaaagcacaacttatacgtacttgaaaacacttgtcgaacacatcaacgaactcaaaagtaagtttggcattatgagttatgccacttatcacaacaattacattcataacttaattacgacaatcaatgaaaacctcgtaaatattaattatgatttatcccttattacatcaacaaagcgaaattggaatctttatcgaactgaattcggactaattctagcgaacgggattaggaaagtattacttattgataaattagaacatttgaaaaacaaagatcttaagccgggacttattttcttcattacaacgccagtgtcacaagatgtcttgcaggatttattttcacgtcaccagccttacattatgatttataggaatgaaaaaggcattataaaaacagttgaaccacttcatctgcttaccgatgctctttatgaaatcatttcactggcttcaaatattaaaaataaagactcaatgttctttgaacctaaaaataagttaacctctattattgaagaattgtttgagctccagaacctttttgaagaatacatgcgccagagttttatgcaggtcagattaagtgaaagaaacacacaatatatatataataaaatcagatcacttaaacatcaagccaatcatcttgagtttggaaatacagaaaaaatacggacgctcgcttttaaactaggtgtattagctgattcatttaataattacgatgttaaaagcaagacaatcgaccttctgcctaatactattttcactggcattcagaacattaccagcaacagtaatttgtatcgtgtgaaaaacgacattctgttttatgaaaataaccttacagcatcattattaacctggttgaaagcaagccttgaacttaaaaagtttatggtggtccaggaagatcagatcgcaaacgggcgaagtgatatttctattttctcttcaggtgtgagagtttgcattatcgaatccaagttaatacaagaacattccaccgaagtgccaataaaatctgtaataacaaaaggaatatttcaactttatacaaagtattcagactctgttgctcagtcatttatcgttctgcctgacctatatctggtgttattctgctttgaccataaatttgtgaatattcgtaaacacactgaatcagcgcttgaagactaccaaaaagaaaacagaaatattaaacttgaaatgatgcacagcacccatcatcaaaccatacgctttagcttgcgagagtctggcggaatatttgcggataaagtcgtttatattaacttaactatagcaaatctcaggacaaaggataaaaattga

SEQ ID NO: 158969 - DNA, 462 bp, Enterobacter cloacae
atggtaacagtgaataacacacctatacatctctctgaccttaatgatgcctttttagcggtagacagtgcaaagctggaatgcgatgggcatactttaatgctcagccatgccttgatggaggctaagatcccacatcttcgcttccttgggaaagttaccgttaagggatgtgattttgtgctctccccccacttatggttgcaaatcgacggcttcacggtggactaccgcctccggatgtggattaaccttttctgtggcccagataaagcctcaggggcgccccatggcattttcagcagccttcattacccgaagcatcattatgaaccactgaggccagcaccgtgtaatctactagccccaaatctgctcgatttaattaccgatggattcgcctcaaaaatctgcatcccggaatctacgttggcatggtattcgacaggacaaatgaaataa

SEQ ID NO: 158970 - DNA, 531 bp, Enterobacter cloacae
atgagcattaacgacaaagattttagttctttaacagtagagcaatatggctggaatttgggggtttttaatcattcaaccccatttacatcacactttatttatgtctacgattgttataaacagtatgttggattgatttccatttcacaggaggattttaacaccactaaaatttccacatcgttaagcattcatatgtgtgtggcaaagctaggtaaaatccttaagaaaatgtcaaataaaaaggctttgtcacaaacggaagaaactgaattggcccctcttattattaattatgtaaagcaaacgatgacttttaggcaatgggtaagtcaatcagaattaaatcaacgcatgcattttctaattaatatctacggttctaaagatgataaaaaaggggaggtggttctacgaccattaatttcgaatccagatgccttaattttaacaccgacggaagtcattgaattgaacacgcaagttattaaagctgatcgtatgcgacatccggaatggttccgttaa

SEQ ID NO: 158971 - DNA, 600 bp, Enterobacter cloacae
atgttaaaactcgataatgtactttcacaaattttcgtattttccttattcgaaaggtttttattgatctgtgtgaatcaagtgctttgttcaaggtacttgttacctgatactaaaattattttaaacgggattctagccttaccattgttctgtttaccggagacattattcgtgactgacaagacatctattttagttcttacgccaatcctggagcttgcagaagaagcccataagtccttaaaagagaaccttaaggaaattggaacaagtgacacaaccggaacatgcatgttcgcatgtatattggtttgtaaatttgcacgactcagaggcatggtcgcaagtatacgcggcgggaatggtacagataatggaggtcttttcaatgagtatggaggacatggccactactggtgtgagctgagtgctggaggaatgactttttatatcgatattgctgccgagcagtttggatacccttctttcattgtcaaaaatgccaatgacgtgtcggactttccgcgatatatccccggcaaccaagctacagtagatgaacacgtgaggcttgcgtacactgaagggattcaatag

SEQ ID NO: 158972 - DNA, 222 bp, Enterobacter cloacae
atggctaagaaaaatttatactcggaagagattgtgattgccaaaaagcaactcaatcagctatccacgcttaaagataaagtcagcctgctaacgcgtcagtgggaaggtgatattggcaaaaatctgcctggttacactgagctatatgctcacgtggaaagaattgaaagacagattcatgaacaaattggtagctggaagaaaagtcctacaatgtaa

SEQ ID NO: 158973 - DNA, 810 bp, Enterobacter cloacae
atgactaaattaaattatttaaaacccgtagcgtctgttttaatttctgtgttgattgcgacggctggctctgtgtatatcacgtcgaaatattttaaaactgagctccccagtaacgatgaagtaggaaaggtagcggctacctatctggtaaaaaatcctcagtatctgcttgaagcgggtaaggctcttgaaaaccaaaataccaacgcctcccttgagcggatcatcccttacgcaccggctctcttcgagaccaaagagactcccaacattggaccggataatgcggccgtcgccgtcatcgagtttttcgactaccagtgccatttctgtatgaaggtagcgccggtcgttgaatccgtgttgagccagagcagcgatgttaaattcttctttaaagaatttccaatcttcgctggttcgaaacccgtttctgcgatgggggcggcgacaggcctgcatgtgtaccaggcatttggcgctgaagcgtatcgtaagtaccacaacaacctgatgaccagcgcgtatgtattcttcaacaaccagcgagggtttacgctcagtgatttagacatggtggtgaataaatccgggttcaacagctcattcagcgatcgagaaaaaagtcgctatgagaatgtcatttccggaaatatgcaactgggggaagctctcgggatcagcggaacgccagggttcattatcatgaacatgcaaaaacccgatgctgcaacgacatcattcatcccgggggctgtcgacgaagctaccctgaaatacgcaatccagaaggcccgtggtggttaa

SEQ ID NO: 158974 - DNA, 423 bp, Enterobacter cloacae
atgtcgctctggctcagcattgtcacccgggcaacgggattaccggataagcggtatttaaatgatccggtgatcttccgttattaccaacaaaagatccaaaaggctccttttgccctggtcggatggactctctgtttcctggcaaccatcggtgtgtcgctgggactggagctctccaaccaaatattacttctcgttctgctgattctgtttttactaatggtggttctccagagtcggtaccagttcatgcatccggagagatgcatcagtgctcgattttaccaggaggtgctggacgatgcgtcagtgtcagatattcagaaagcgcagtttgagtatttgttcgtgtccaaagtggatgcaatgacgatcggtgatctttaccggctctatgatttcaacagaggaggccggtaa

SEQ ID NO: 158975 - DNA, 393 bp, Enterobacter cloacae
atgtctcaaattcttgaacgctatcgcctcatggccatgatttcgccgctaatgcttcttgcggcttgcagccatgctccgcactctgccgatccgcctcgcctggatgtaccggcccatttctcaaatgaagagggaggtgaaggcatcctggacaaatcatcccgccgtactcttcccgtcgactggtggacggcctacggcgatccacagctcaatgtcctagtccgggcggcgctggagcgcaacaccgaactgtcgattgcgcgcgcgcgtcgacgaggcctcggccgccacgcggcgagcacgggcctccctgctcccctcgttgtccgcgggcacgcaggcaactcgaggacgcgactattcagagaacgttgcgatcggcaatga

SEQ ID NO: 158976 - DNA, 276 bp, Enterobacter cloacae; identical to SEQ ID NO: 36785

SEQ ID NO: 158977 - DNA, 720 bp, Enterobacter cloacae
atgagacggggggggaaaacattgcgtattgcccgtaccttctctgctgatagtcaggaacgggaacagcagcttgttcgcgcgctggtaatgcagtggaaaacgacctctcgcgatatgccgcaggcgatctcgcggtgtttttttctgggagacgccgccgtctggtctgcttttcgcgcacaaatgcatgacgcttttcctggagtcaacttacctgaccagcccgaaccctgggagggagaggcaacgcttgcgaggctaacagccctgcttcgtgaggacgcgaaaagccagcaccttgtggtgggatgcgtttcttgtcccgcatcacctgatagcctgcttcccgcgggggaatctgcagcattgtggctggtcggtgcggatgcaccagtggtaatgcctcggggagaattttatgacgcctctgcttcagacccattaagaaacatctgcgaacgggccgtgactcaatgcgaacttgatgaggatccggctacctgtattttgttttcgcatcctcaaattccccaggtgaacgaatgtggctggaataccacccataacctgcaggataactattgggggataccgggaagtatggaacctcttattgttatttctcttgccgctctttatgcccaaaacgaagcacagccttgcggctggattagtaccgatgacctgcccccacgattagatacaacactcagttag

SEQ ID NO: 158978 - DNA, 555 bp, Enterobacter cloacae
atgatcacttttgagattcgtatggaaattaaagtcctgcacaagcggggaatgagtatccgggccattgccagggagctgggtatttcgcgcaatactgtccgcagccacctgaaagccaaatctgaaaagccgcagtattcaccacgcccggcaccatcatcactgctcgatgaataccgtgattacatctctaagcggatcagcgatgcgcatccctacaaaatcccggcgaccgttattgccagggaaatcatggagctgggctatcgtggagggcttactatcctgagagagttcatccgtaaacagaccctgccagcacaggcagaaccggtcgttcgcttcgaaaccgagcccggacggcagatgcaggttgactgggggaccatgcgaaacggcaagtcacccctgcatgcgctcattgctttcacgacgcattgccatcagacggcagaggcgaactcgcagctgggtcaacagctgttccagttgagtcaccagccagcggctgccctggatcgtcaacagaggagggagaaacgtctcatctaa

SEQ ID NO: 158979 - DNA, 243 bp, Enterobacter cloacae
atgattcaggccttcgtcgtttcaacagcctgtgtcttttatcccccctttcttttcattaacaaaatgttaatttatgtggtgcaattaattaacatttgcacaacattagtgcgtgatttgcactgtgtttgtgcattctttcgccctgccactttcctggccttcatcagactgtgtcgctttgtaaaaataattttcatgaaatcattcgcttacagtggatatcgtgaaagtttttga

SEQ ID NO: 158980 - DNA, 237 bp, Enterobacter cloacae
atgtgtgaccagcaccatgccgacaggcatatattatgctcgcaatgcgatatgctcgtggcgttgccagagctgggtcacggacataaagccctgtgtccacgttgcggcgcaacgctgacgaccgagtgggacgcgccaaggcagcgtcccactgcttacgcactggcggcattatttatgctgctgctctccaatctcttccccttcatctatatgaaggtgggggggggatga

SEQ ID NO: 158981 - DNA, 681 bp, Enterobacter cloacae
atgagtaagtacacagacttaatcaccaactaccacgccaccagaccgaaatactttgatcacatcgacctgagcacccggccgctgattgacatcacatcagccacacgggggctggttagcgcgtttgacattgatacggcggtaggcgtccagcttgataccctcggactctggatcggacgtagccgtatagtcagccagcctattacgggtgtctatttcagctgggacaccgacgggctcggatatgaccagggcgtctggcaagggccgtatgatccggattcaggctatacgtcgctgagcgatgacacctaccgcatcattctgaaagcaaaaatcgctatcaacaattgggacggccgcaacgactcgctgccacccattcttgacgctgcgacagcaggctctggcctgaaaatgcagatcgtcgacaaccaggacatgacgatttcggtctgggtatttcccgagacagatattgctgatgtgtccctcgagctgatcgccgcgattaaacagggctatctgacagtaaaagctgccggcgtatgggccggtgatgttgaaacgccttcgatagaaacaccgtccgagggctcaaaattctttgggtttgatttggaaaacgaatacatcggcgggttcgatgttggagcatgggggaaattactttaa

SEQ ID NO: 158982 - DNA, 342 bp, Enterobacter cloacae
atgaacacctctcctgcaacaaatcagcgggtagcgaagccatgcccgtcgcctgtggccgtctggcagatgttactgacccgtctacttgcacaacactatggcctggccctgagtgacacgccattctgcgatgaaacagtcattcaggaacatatcaacgcaggcgttactcttgccgatgccgtgaactttctggtggaaaaatacgaactcgttcgtatcgatcgcaaaggatttagctggcaggaacaatcgccttatctgcgggctgtagacattttgcgggcgcgacaggcaatggggttgttacgacaaggccataatctttcgacacgctga

SEQ ID NO: 158983 - DNA, 222 bp, Enterobacter cloacae
atgaaaatcataagcaaacgtcaggcaatggcgatataccgccagcattctgaatcccggttgtctcgcttctgtacgggcaaatatcactggtccggcagcgtctgccattactacggtcgggaagtgcaggatattcgaggtgtgctggcagtttttgctgagcgccgacaggaccgtcaggggcctcatatcatcctgcgctgtgtcagcctcaattaa

SEQ ID NO: 158984 - DNA, 474 bp, Enterobacter cloacae
atgtctgaactgatattacctccggcttttccagtcaatgagcaacgtattatccgtcgcgctatgcgactgctggagaaataccaccgccagcccggcgagcagttccttgacacgagttgtacgaaaagctggctgcaactgcatctgggacggcaggaacgtgaggtttttgtcgtgctctatctcgataaccagcatcgtctgctggaacatgaaacgctattccttggcacgattaaccacaccgaagttcatccccgtgaaattgtgaaatctgcactacgccacaacgcggcagcggtgatcctcgctcataaccatccatcgggaataacggatgccagtaaagcagaccgaacgattacttcccggatagtgaatgcactgactctggtggatatccgggtgctggatcatttcatcatcggtgatggtgatgcgttgtcgttcgcggaaagaggctggctgtag

SEQ ID NO: 158985 - DNA, 456 bp, Enterobacter cloacae
atgtctgaaaatagcacaggaaaacttcgtagccttaaagaaaaactgaatttcccacgcagaaaagtacctgcagaaaatcatgatacatcttctgaacacttaccggaaaacacgattaaaccctcggtaattggttctgacaaatacaggctgttgctggaaaatattgtcatcaatggtctgttgaatattgctgaggataaacttagtgatgatgcctttgttgaagttgttttcagcaaagcatatgagcttttgcctgccccggtcaggatagtcctgaagcgggaatggtgcctgagttaccttcagtcgcaaaaagcgccgattctggtgaaactgcaactttaccgcgcaggaaagcttagtcctgccgaactatctgcatcgccgttgttaccagattcagaaaaaactgcatcgcagatacccccttctgttttacctaaataa

SEQ ID NO: 158986 - DNA, 804 bp, Enterobacter cloacae
atgcataaattaattgttttatcgctcagttcagtcgctctgcttattccatctatatcttctgcattgacaattcacggagatatacatcccgaacgttatacatttttcctgacccaagaaggcagtagccaactaaaacaggcgaatgatcgactagccaggaatccacaggcctacacgcttgacgtgaaccatacaggcattcagccctttgatgcagtccggtgggatggtgagcctgtaaaagccgtcacctgtgtgctggtagacggcattatgatggggaaaaaagctacctggtcacaatgcaaagatgaaagtggtgcggaatatttcggtaatgctggatggccagtacgtgattacgtggcaaaagcgtgtgaagtaggcaaatcagattgtcctgtttatcttgtgcttcagacagatccaccgactatgcgaaacgacatggctaaatttgcccctgcacctaagaactttaatgcttctgcaaacctgacggatgaaattaaaaacgacggatgccaaatggctaacaattcctttgaatatgcgaaaagcagtattcgctgttctgcaatcaacaccgtgcgttttatccgcaaacaaaataccgaagctaagtatgaggctgatctcaccacaacttcaggcgaaaacctgacaatgactgtcgggtacacctatgggaatgcatccagcaaagaacccggctggcgtaccatttctgtcaaagagggaggcattattacggatattcgcaaacagggccaatggcttcctaatggctataagtag

SEQ ID NO: 158987 - DNA, 435 bp, Enterobacter cloacae
atgttgaagactacctctgccttgcttttcagcgctgctttattcagtaccactgcacacgccgttatccaggaccagcaatgggggaactggttcggtaacatcagtgcaatggagtttgaaatcaatacccaaaacaactcaggtgaagtgctcacactgacctgtacaagtggaaagttaactgttgcttatagcgtacccgcagaagactaccgcgtttcttccctgacaggacttgcagaaccgggtatcagcgttaacggtacaaatcattctctggatgaaacagcctttgctgcactcaaatctgcgggtgaaaaagacgtaataaaaataacctctatgaattcagctatctctaaaaaattcagttctaaagggctgaatgaagcgctggctgatacctcatggcaggactgtattaatcactaa

SEQ ID NO: 158988 - DNA, 1290 bp, Enterobacter cloacae
gtgggaaattcacttcacagtgcaagaataagtaacaggagagatttaaggttattcctctggtatttatccaccagcgacctggctaggttaatcaacaaactggtatcaacggaaagtgtttatcatgagggtgatatatttggcagcaatgtcgaagtcgcttcgcaagcaattaaccaagccataaggttgataaaagacaatgaaaccaagagaatgtatacgctggattttgatgttttaaaatcggttaagataccttcatcagaattctcatggataaaaaagtcacctgatgctgcttacttcacatggctatttataaaaagcggcatacatgatctgaatggtgaatttcaactggatattaagatcgcatcaaagataaggaatggacgttacccaaataaacatgattttttgtataataagctggatctgaacacctaccctgtcgataataaagagcgtctgatggcagtagaggatttttttgatcgtatccccatgtctctccgggccaaactcaatctgatgcatcgtatacggggaaagtgggatgagctttatcacttaagtgcaaatttcccgctgtcaccaaaaagcaagaaaaaatgtgactgggcctggaggtatattcagaaagacagaagccgaatgaataccagaagaaaagatcatgaagggaactatactggagaaattaatccaccatcggctacgaattgcgacatgctgtccatgctgaggccctcaacagccagtgaaaaatacatggccgttaaattttcatttgtatttttctttgtaaaagataacttttttattcagcgctttaaaaaagcatgggaagttcatcagtacaggacttcttccggtaccagagaaagaaaggcatctttgcgggaccgggagaataataaaaaatccggaccagagcccatttctgtgccgccgatagccacaacacttactgaacttgcagcgatcagcaatatacctttccccccagaaatgcagccttatgtcctgcatacttctgacaatgaaataacggtacaaccagaaattgaatatcagacccgttacagtgcgccctctgataacgccgctgatggccagataactcatgtttccgttggggaggccctgaagtatatggggaaattaaaccagggtgacaagagccgggattcactgtcaaataaaatactggatgccacgtcaaaaagtcttcgaacaatactgcaaaaagcgatgaaggaaggagataaggacgaaagctga

SEQ ID NO: 158989 - DNA, 132 bp, Enterobacter cloacae
atgccgattgatcactacatttttaccaacattcattactatgtaaaataccagtttataaccttcttttttgactatctttacccctaccagtatgatggtctaaaattaatcaaattgtattacaggtaa

SEQ ID NO: 158990 - DNA, 207 bp, Enterobacter cloacae; identical to SEQ ID NO: 85099

SEQ ID NO: 158991 - DNA, 1119 bp, Enterobacter cloacae
gtgtataagtacgttttaatccttaaagctacaatcatttcgatgtattgtggttatattacgaatgtgaaaaagatgagtgaaatagaggatatcttccagaactgtgctgagattcataacgaaaacaattcaataataatgtctgtaacagacaacagcattaatattgaaaaactccatcacacttatgcgttactgaaaaagataatacgtaaaaaaaccttcccctttagcatgttgcttaataactcaggatacaagcaaaccagtcgaactattgatgttttggaggttatgcatctgcttgaccagatacctgatatgttcctacaatttcgtaaacttcatccactaatcacccgtttccagaaaactctaagtcggtacgatttttattgcagagtttataacggtgccatcaccagggttgattcgacgaatactgccgtgatgctgaataacctggttagtgaatatcgtgacgaggtgaataaatctgcttttaaacaagacctcagaaaataccaaagaaattcaatgaagaatctgaaaggggtgatgaattatattcaacatctttttacccggcatgcaagactgttagtaatacgcctagacctagcttggggaaaagcacattcaggcagcattacgcctgaaatagcgaaacaacagcgtcagcaattactgcgtaacatgaaacgaaaccgaatattcagacacgttttgggcacggtatggaaactggaatacgggcctgacagaggctttcattaccacaccttattcttccttgacagcaataaatcccgctgtgggatcaatatctgcgagcagtttggcaaatactgggtttcggctattacagaaaggaaaggcacgtacttcaactgtaatgtcagacctgaacgttatgagaaatctggcgtcgggatggttaagtatgacgacattctgaagctggaagggctacaacgtgctgtgaactatctaaccaaaatagatacctttgcacgcctggcgttacctggcaacgtgagaacctttgggcggagcgaaattaaaacctgctctccgaagagcaaacgtggcaggaaacgcactcagccatcgtaa

SEQ ID NO: 158992 - DNA, 411 bp, Enterobacter cloacae
atgtataaaccagtctatgcgccttttgccgttacgtatcatggcgaatgggtagaaccggaaactgcggcacaagaagattacgatattctgttctgcgaattctgtaggctgaaaatcagcgttgttaatgacgaacttaccggtgtaaaaagttttgttcatacgccactgcgactggaggcgacaatgcgacttacaacatgcccctacaacaaaactgcaagccagctcggcgatgggcagaaagcagaatacggtcccttaccgccagtaaaaccccgccaacctccccgcaatacaacgatacaaagctggcagtgttgctggtgccatctctgttggaatggtgaaaaggtatgtccgcaatgtgcggactggatatacgccattacttgtagcgatcaataa

SEQ ID NO: 158993 - DNA, 240 bp, Enterobacter cloacae
ttgggtgagtttttcaaggtaaaaagttttcccatgccgtgtccagaaagtgcttccaccgacgaaatcgttatgagcggacaacgtagcaaggagtgttggccgctcattaaatttttctggatgatcgaaaggccatgcgcaaatgagtttcccgcaatcaaccagcatggtgatgctatctccaatagcaagaatctctactgcctgatgctcttcaaattcctctacacctattag

SEQ ID NO: 158994 - DNA, 276 bp, Enterobacter cloacae; identical to SEQ ID NO: 101078

SEQ ID NO: 158995 - DNA, 600 bp, Enterobacter cloacae
atgcatcaggggtcaccgacgcaaatcgctgaagcggtgtcgaaggggaatgccgattttgccatcgcgacggaagcgctccacctgtatgacgatctggtaatgcttccgtgctatcactggaaccgatcgatcgtagtgactcccgatcacccgctggcggggaaagggtcggtgacgattgaagagctggcgcaatatccgttagtcacctatacgtttggctttaccggacgttccgagcttgataccgcctttaaccgtgccgggttaaccccacgcattgtctttaccgctaccgatgccgacgtcatcaagacttacgtacggcttggtctgggcgtgggcgttattgccagcatggcggtcgacccggtgtcagaccctgatctggtacgtcttgatgcacacgatattttcagccacagcaccacaaaaattggcttccgtcgcagtaccttcctgcgtagctatatgtatgattttattcagcgctttgccccgcatttaacgcgtgacgtggtggataccgccgttgcattacgctcaaatgaagatattgaagagatgtttaaagacatcaaactccccgcaaaataa

SEQ ID NO: 158996 - DNA, 285 bp, Enterobacter cloacae
atgatggcagatatcaatgactcttattatgctcgtaacgaaaagtggattaggccagcactgattgcttttatatttgcatttggcaatagtctcggtgatattctcggggttgcgagccccatagtttccacagcaagtatgtggttggctgcaattgcgtttattatcactggtgtaatggtgatgtttacagatacgatttcagcacatattttaaaattgttggcggtcgtggcactgttaggggcagtcatcactttagtgattcgctatttcacatag

SEQ ID NO: 158997 - DNA, 255 bp, Enterobacter cloacae
atgactgggagtggtatgaatactgtacgcataaacaatgaagtgaaacacatctcagagttagattccgagaccctttctcttgaatggaataaactgaaaaacgaaaataacgaactgtatcgctgcataaaggaagcaaattctggttggcgaggttttgtccttcgtttgataggggttcatctgcctgatggtaaaacaattgtcattcatggtgttagcactaaaaatgaatctactcacactgaataa

SEQ ID NO: 158998 - DNA, 912 bp, Enterobacter cloacae
atgaacaccagagtgaataagcctcaacccgtcaggcttcgccctgtcttccagaaactggaagagctggggttaacaggggaaattatttccattcgcacggacgggaaaactggaaccttaactccagacctgaagcctggtatcttcaaaacgggtccctgccaaacgaaacggatcatgaccggcaactgggttatcgctgactcaagggactactttgaacatgttgttctgtgtgttgagcgtccagacggagcctatgacatattcaccggctctttcataaaattatatccggttgaaaactgcaaaagcaaaatcgtcgaaatgagtaaccctgtcctggtgggcatgacttactccatccggaaggtttttaatggaggaaagttcagtcggcgaggaattgcctatctctcgatccccgcagtaacatcaacaaaagtaacttttccttcccgaacgtatcaggaggggcaggaacaaatcacaatgtcgagcccggaccaggcaccattttccgaagatgtccggaaaaactgcgccggtacgtgtgttcttaccggcgttcgagccagacaaagaactgaggcagcgcacattaaaccccgtcatgctggtggtgagccggatgtgacaaacgggattctactgcgaagtgacatccacaccctctttgacaattggcacttttcaatcgaccctgattcaatgaaagcccgtttcagcccggatgtgctctccgtcgataaagacttgctacaactggaaggcaagcaaattgatttttcccgcttgcaaatgcctatcaatattgaatacctgcgacatcactggaacgaattttttaaccgtcatggcaatccattcagaaagaaagagccaaataataaaaatcaacaattatga

SEQ ID NO: 158999 - DNA, 204 bp, Enterobacter cloacae
atgggcattcaagatttggttggaaaagaaagagagctgatcgtcgtcgcactactggccctgcatcgtgaacgcgttaatagttttaattcagcttgcacggcatgttcattagcggggaaagaatggccggaacaggaaatgtttggtattaacgaagtaatgaatgccctccgcatggttggtgctttgcctgtgagataa

SEQ ID NO: 159000 - DNA, 408 bp, Enterobacter cloacae
atgccaaattaccttacgggatatttaaaagcgaccattgttattttatctgcgggcctgtcaggttgcgacctggcaaatggtgcgacggaaagtggagtgtatcagaaatacacgaatggacctttcagggagccgactatcgtgatgagtccgggctggcgaatggatgaccacggcaaggaagcacttatattcgggagcagccaatgcccagatgctaacggcaacactacgtctgagggcggttgcgtcctcattgagaatcactctgagactgtcgcggtcatcgttgttgatgcgacaaagcaattccgacgccaggaaacatggacgattgaacataaaaaggatcggaccattgtgatgcgcccggataacagttatgtgatgccctgggtaaaatag

SEQ ID NO: 159001 - DNA, 660 bp, Enterobacter cloacae
atgctcaactacaacagctggtggatgattggctcggagatattccggtatgtgcgacagatctccgcgcccggtaacggtaccggcggcgacatttttccggtgaaaacccagcaggactaccgtgccgcctaccgtaagctcgaagcggatggatatgcaccggccgttatcgaacaaatgaccacaggcgctgcctacaatctggcttatccacgaatcccgttaaaacgctctgagaacgccaccagcgaacggaagcgaaaacctgacgtggacattcagggagagccttgcgagcgctttgtgacccagcggagcggcgcagcgcagacaaaattcaagaatctccttgttgagaatttcgcgggtcggtgtgcggtcacgggatgggttaatggtggtgtgctggtagcggctcatatcgagcatgggacgcgctacaacccttcgaacggcatcctgttgacgccgacaatgcacgcgctgtttgacgcggatctgatgggtatagacccgtccacactcaccgttcattttaaaccgggcatcgaggcgggagagctgtttgaaggcaaaacgctcaacccgttggtgtatgacctggatacagaccggctggctgctcgctgggctgatttcctcggtaccgaggaatag

SEQ ID NO: 159002 - DNA, 1206 bp, Enterobacter cloacae
atgagccgtgaagtacctgctggtaggtttttttgtatggatgagttccacaatcatcatatgaacgatgatgtcattcgcgaaaggctccgctcaatagacggtatccccggtgtgagctatcaggtatatggcgataatgttttcgtgttcgagaaacttgtccaactggtgaaacagaatggccataacctggcaacagccttagacctcgttccgcaggcaacaatgaccgcctcagaggctattgaggagtggtcggtcttcccggcgccatattctcgtgagatcaataataccgaccatagtcaggcgatctaccacccttatttcaatgcgtatttgccccggaaatatcctgaccgtgacgcctgtaatgcggatgcgaccagattgcttctcggtaatcctgtcgagggtgagggggattttgtctaccgggggcagtccatgatccttcgccagccctttacactcgaccgtcttcccccacggcctgaatgggatgtgccggtgtatgaaaatcccggtgcctacacgcatctctggaacacggattttgtcagtggcttcgcgccggtttccgaatctttgtttaacgaggttaaatcagcggagtgggaatggaaccacgctatcgccgcgacatgcgcgtacatgggaaatccggagtgtttcgcctcgttgtggccccgggcgggagagttcggactggagcagctggagctcaaatccagtgacgttgacgaactcgatccggaataccaccagcaattccaggctatatacccggagctgtccatgttgtccccggccgctatccagagagcctatgacgagtactgtgaatcgatgtgggaataccctgagaggtgcgacggatttctttatcaccttattggcagtaccgtcagttcgaatgtgtcccgcgacaacccggaaaaaacaggaagactcatcgcacacgcatggctgacaggagcctcggttgaggatgcctatcgttttggctcagaggctcagcagttcgataccgctctttctgggctggcgtatcaggtatccgtggccatgaaatttgttgccggtgattctgcggccgcaggaaatgaaggccatccgatcagcacactttccgataccttccgtcagatgagaaaagtaagtagtaccctcctgacggccacacagaacggccggaaatga

SEQ ID NO: 159003 - DNA, 231 bp, Enterobacter cloacae
atgtttagaactgagcaaaagtcagagcatttaggccaggtcatgatgattgatccggagctggttgggcagggcatagaggttggacaggtcgttgtgtttgatctggggcacgccagcaaaggcgttgtgcatttgatgcgcgaaagcaaaaagcgtgattgtttttcccctacaacagagcgcaaacagactttcaatatgaccgatcaaactaccaagggaggttga

SEQ ID NO: 159004 - DNA, 564 bp, Enterobacter cloacae
gtggcttcggttggttcggcgcagagacctgggccggtcctgtttgccgccgtctttcctgagttcatcgcccgcgaaaaaccgggccagcgagggactggccgtcaagggagaagcgcagggttggtgcggcccgcagcgcagcgaggactcggccctgcgcgccttgacggccaggcaccgcgggctacggtcgcgggaaaaagcgatgaacttggggaaagacgaacagcggccaatgggccagggggtgcgctgaaaccaacgccgcgcggcgagcgcccctgcgtgccagcggcacgcctagctggatggctgttggtcgatcaggtgcaacctgttcggtgcatgcgaggggcgccaagcaaggcgcggcggggatgggctgtccagccgatcccctggagggcaagcgccgcgcgcaggccaggagtgaagagacggccggaggcatcagggatcaaagccgcatggccgcgactcggcacgaggcgcggggcaacgcccgcgagcccgacggcggcacgccgggatgctctactgttcacaacaaaatgtaagtga

SEQ ID NO: 159005 - DNA, 192 bp, Enterobacter cloacae
atggcaagtaacgacgtcgttcgtgcccggattgacgggcagattaaagaagccgcaactgttgttctggctgaaatggggttatcaatttcggatgcgattcggatgctgctgacccgaatcgcggcagataaggcactcccctttgacatcaatcgtgtgtcgtccgattctgatcggaaggcaccataa

SEQ ID NO: 159006 - DNA, 336 bp, Enterobacter cloacae
atggcatctatcagaccttcagcattcaatcaacgtgagcgtttggacggcggccccttccttgtcattgaagcagccgaaccggaagaggaaggcattaacgttttcttcactgatattcccgcagcggagcgcaagccggattcgccaatagcgagactgctcaatgtgtgtccagacagattgaccatttggcctcttaatattcgagaagatcgcgacgattacctgcaacctaaatacggcacccttgaacgcatcgtcgtcgctcggcctgttatcgagccctacatactgccagagactactgacgatgtcgttgggcttcttgagtag

SEQ ID NO: 159007 - DNA, 744 bp, Enterobacter cloacae
atgaccgatggtgggcggcagcatgtgacgctttccaagcgtgatcggcgcgccgctgttcgcatggttcaagacaatatagaagcactggcggaatctgagccgcgctcgctgctggcattaaagaatgatattgagctcatcacactgaatcaactgattgagcgataccaggaaatgcttggaaaaggactgacggaaagcaagtggcaaagcttctttctggaaaatcctttcatacttagtcttgcatttgccgttccagccatgctggttcaggggcaagcttatgcaggtggcaagcgacttaacgggtccggcggaaaattttcagattttctatacgcatccgcttccacgggcaatcttggcctcattgagataaaaaagccgcaaaccgaactgctaggaaaatctccctatcgtggagatgatgtttttggcccatcgacagaattgggtggagcgattgctcaaattctagatcagcgtttcaaattgcagagtgaactacccgtcataaaaaataacatgaaccgatacgacctccacagctatgcggttcgctgcatagttgtcgctggcatgacgccacaagagcatcagcaaagaaagtcattcgagctcgttcgaaatgcgttcgcagagatcgtgatcgtgactttcgatgaactacttgcaaggctaaccgagattaaaaatgcgctccaaccgattcctaccttagacacggtgccgttctaa

SEQ ID NO: 159008 - DNA, 2139 bp, Enterobacter cloacae
atgcatatatccaagctcagcctggtcaactaccggaactttcccaacacgaagctgctgttccagaagggtatcaacactgtcatcggcgaaaatggatctggcaaaaccaatctctttcgcgcaatcagattgctgcttgatgacaacatgattcgctctgcctaccggctggagcataccgactttcatcgcggcctagggcgctggcagggacattggatcatcatcagtcttgagtttgaggaaatctctgcggatgaatcagtgcaggcgctcttccgacatgggacgggcgtaattgaggaagaggcgaacggcaaggccacttacaacctgatctttcgtccgaagaaggaaatcaggctgcgactttctcaattgaacgatggtgatcaggcaggcctcgacgctatcctgaacccggtcaccatcgacgactatgaaacgattttcacaggtcggagtgaagccgacttcaacgacgaggccttctataaggatgtggtcggcgacttcgcgaatgttcgattcaatgaagaggttgaatttcgtgttatcggcgcgaagattccgaacgtgctgtccgtctccaaagaaatttcgttcactttcgtccaggcgctacgggacgtcgtctccgaatttcacaacaaccggacaaatccgctcttttcgcttctgaagggcaagagcggcgatatcgaccccgtggcgttccaggctatcaccgacggggtaaaggcattgaatgactccatcgaagcgttgccagacgtgcaggtcgtccggacggatatcagagacaccatcaaggatgcggcgggtgaggcgtattcgccgtcttctctttctatcaagtcggatctgccagacgaagctgacaagttgttccagtcgctcaagctgttcgttggcgaatcgggggagagccacgaaggaccgatccacgagctgagccttggtggagcaaacctgatattcctcacgttgaaactgcttgaattcaagtatcaaaaggctaaacagtcgatcgccaactttctgcttatcgaagagccggaagctcacattcacacacatatccagaaaacactgttcgacaagctcaaatacgacgacacacagatcatttattcgacccattcgacgcacatctctgaggtcagcaatgttcagaacgtgaacatcctcggcagagaaggtgatcgttgcgaggcataccagcctgcaattggcctaaacccagaagagatcggcaacattcaacgctacctggatgctgtccgtagcaacttgttgtttgccaagagcgtcctcttagtggagggcgatgcagaagaaattctcgttccgatcctgatcaagaacgtgctaggcgtcagccttgatgaactcggcatcagtttaattaatatccgcagcactggatttcagaacgtcgcggttcttttcgatgatgcccgaatccggaagcggtgcagcatcgtcaccgaccttgacaagtccatcattgacacaacgccggcggcgggagactccgaagggctgctccggcgcaagggcaagtatcaggcatcccaggaaaaaggggtcgccaggaaagcgttattggaagacaccttcaaagataacgggtgggtttctccattctttgccccccataccttcgaggtcgacttcattgccgccggcaatgcgcgtaaggtggtcggcatccttcctgatgtctacaaggatgcaccaaccatcgcgacggccaaggcggagctcgaatcagcggacatcgcgttgttcggtcagcgcgcattgaccatggcggacaactacggcaagggatggtttgccatcttgctgggaaagaagatcgatccgcagaccgccattccgaagtacatcttggacgccatcgcttttgcgcatccggtggtcactaaggaagtctggtttaacgtgctgagctaccgcgtgaactacatcgatgcagaagatatcttcactgcgtctgccgtattcgacgactttagggccaagctgctggccttccgaaatggagacatcgacttcgtcggcatccgaaacgagatgcttgccacgttcccagatgatcgcatcaacgatgtactcgcggtgttctga

SEQ ID NO: 159009 - DNA, 1800 bp, Enterobacter cloacae
atgttcatgtggaacaaagatgatctgaatcccgagcaggaagcagccattctgaagccagggagcgtctttctcatcgcttgcccgggcagcgggaaaacgcgcacgctcacctacaaaatcgcctatgagttgtccaggctgaaatcgaacaagcagtttgtcgttgccatcacttatacgcaccgtgccgccgacgaaatccacgagcgcattgagagccttggggtggatacatcccgattatggataggaacgatacattcgttctgtcttgaatggatattgaaaccgtacggcatctatcacgaagcgttggatcgaggcttccgtgtgatcgatcagcatgagcgcgagaaaatcctggaggcattgtgcaagccttaccagaagccaaaaataacattctgggattgtgagttttattacaccgaaactggatatgtgctctcctgcccacaagattggaagcattcgggtcttcacgtcatattgggcaagtattttgagattctgcacgaaagtcggcagctagactttgagctcattctttactatgcgtaccaactgatcgcacgtcatcctgcgatcagcactcttctggcacagttgttctctttcgtgctgatcgacgagtatcaggacaccaaacgaattcagtattcgatcatcaccgccattctgaaagctggtcaaggtgcgaccaaggcctttattgtcggagatcctaaccaggcgatttatcaatcgcttggcggatatccgattgccttcgaggatttcaaggcgatggccaatatcgatttggacgaactcgaactgtcgcggaactaccgttcttctgagcgcatcattgagtacttcggaaactacaacgttcacaacacacgcatcgaagccgcatccgaggacaaggcgtacccaagccttatttcattcgacgacacagtgagcaaaaatgatctggacgctgagctcatccggctcatccgtttcaacattgagactatgggcatctcacctcacgaggtgtgcattctcgcgccacagtggacgcatcttgcaagcatgacacgtcgtttggtcgccagcatgccggagtactcattcgatggccccggtatggttccctttgcacgggacacagagaatttctggtacaggctttctaagattgcacttactcaggcatcgccgggaatgtatgtgcgcagactgcggtgggccggggagattctgaatgacctagaggcggccggggctagcgtgtcgaagctcacgcggaggtccttgttgagggagtgcaatgcaattaagatcgatgaaacagatggtcttacctacttgagcgcatttttcgagcgtctgtttgcaaacttagcaatcgactttcgccttttcacgctgcttcaagagcatcacgttgccttcttcgatagttcgcaagcccgggtaaatcgattgaagagtgaaggtagcgaatttataggcgatattgagacattcaggaaggtatttcagcataggactggaatcaccatctcgacgatacacggcgtcaagggagccgagttcgatgcagtgatcgcttatgcattattagaagatatggtgccgcatttcaatgatccgaacggtcaagaaagcgcgatgaaattgctgtatgtcattggttcgcgggcaaggaagaacctgcaccttgtttcggaacgaggtcgagttcgccagtattctggcgaagagtatcaagtaactcgcaagcttgcctcatgcagttttggatacgatcaaattccatag

SEQ ID NO: 159010 - DNA, 297 bp, Enterobacter cloacae
atgaaaaatatctttgaagaaatcaatgaattttcttcggaaaaaatcgcgttattcagctttgggaaattttgctacgtctttcttaataaagacccgatctttgtcaagaaattgcttcccctcatccaaacctctctggcaaatgagagctttcaggcagacgtaatgcgtgcttatacggagggctgcatgaatgaaaaggcggccattctgaaagaatttgaagccaaacgcgaccatccaaacgcagccaagttttatgggccacagcttgatctaaatagctgcgcctaa

SEQ ID NO: 159011 - DNA, 927 bp, Enterobacter cloacae
atggactacttaaataattatctcaacgagtatccgggatcgctagaaattctcaacaattcctacaagcatatccatgacgaagatggtgtttcgtacataaaagaaaattacgcaaattatcgcattggctgcattttttattccaagcaccaatcaatcatggggagggctgagatgctggagctaaaatattccaaggtagttgaacgtgagtacgagaaaattggaattgacataagaaaggaagatgctcagttctctaaatatagtcttgtcagcctgaacgagaatattcagatattcaacgacaaggatagtcagacaatacgcgatgaacgcatagggcgacacttctggataaaagttccgaggaagctgcttacctctatcgaggaactcattgaaaaaggaatgctgtccgaaatagcattcaggattgattacgtctccgattatgtccctgcaatggaggagatggagtttggcgctccgttgcgattgaaaatatcttcccttcctagattgtcaaagttctactccaccgataaatatgagaacaatctatggattcaccatgacgcagagaagctaagtttgacttttgaagaattgatggaggactttgaggtggcaggcgacgacgtcgtaacgcaagtcatccatcttgaatacagttcaaaaggcgatgatttttttataactcacttggatcacgaatttatcgtatatacgttggatagctatcaagaaagattgagcaatgccaacatcaaggggcatagaaaaataaagacattcaaaatagataactcaatgatcccgtttgatataaatattagcggggatctttttctgtttcaggttctcgattcgtatttaaaaaatgatgacttgattcgtgaatattttgaaaaaattaactga

SEQ ID NO: 159012 - DNA, 1068 bp, Enterobacter cloacae
atgacccggcgcaaggcatccgtctcagcgccagcagcgccgcccgcgctgctgggcgacatccgggcactgatcgaagcgtcgcgccagcgcgtcgcctcggcggtcaatgccgagctgacattgctgttctggcgcattggccagcgcatccatacggaagtgcttgccgggcagcgggccgggtacggcgacgaaatcctgccgaccctggcggcgcagcttgtccgcgactacggacgtagcttcgcggacaagaacctgcgccggatggtgcagttcgccgccaccttctcggacgagccaattgtcgtgacgctgtcacgacaattgagctggtcgcatttcgtggcgctgctgccgctaaaagacccgctccagcgggactactacgtgcaaatggccagcgccgaacgctggagcgtgcggacgctacgcgagcgcatcgactcgatgctatacgagcgcacggcgctgtccaagaagccggacgagacgatcacgcaagagctggcggcgatgcgcgatgcgcagcgcatgtcgccggcgctggtcatgcgcgacccgtacatcctcgacttcctgggcctgcgcgatacctggcaggaaggcgacctggaagccgcgatcatccgcgaaatggagtcttttttgctggagttgggcgcgggcttctctttcctagcccggcagaaacgcatccagatcgacgacgaggatttccacctggacctgctgttctataaccgcaagctgcggcggctggtggcggtggagttgaagatcggcgagttcaaggcagcatacaaggggcagatggagctttatttgcgttggctcgacaagcacgaacgcgaaccggaggaagcctcgccgctgggcatcattctttgtaccggcaagaagtcagagcagatcgagttgctggagctggacaagtcgggcatccacgtagccgaatacctgacgaccctgccgccgcgtgcggtgctgggggagcggttgcagcaggcgaccgaacgggcgcggttgcagatcgagcagcggcagcctggcgagaagtcctga

SEQ ID NO: 159013 - DNA, 1200 bp, Enterobacter cloacae
atggctaagatcaaactcactaagtccgctgtcgatgcggcgcaaccccaggcagaggccgtcgaactccgggacacgctggtccccggcttcctgtgcaagattaccccggcgggtcgcaaggtgttcatgctccagtaccggacgaacgctggcgagcgccgcaagccctcgctaggactgtacggggagctgaccgtcgaacaggcgcggtcgctggcgcaggaatggctggcccaagtccgccgaggcggagatcccgccgcagagaaggcggaggcgcgccaggcacctacgatcaaggagctatgcacgaagttcatggaggactactccaagaagcgcaacaagctcagcacccaagccggctatcaggctgtcatcaatcgcaacattattccgctgctgggacgcaagaaagttcaggacgtgaagcgtcctgaaatcgccggactgatggaaaagctttcgtacaagcagaccgaggcgaacaaggtattcagcgtcttgcgcaagatgttcaacatggccgaggtatggggctatcggcccgacggtaccaacccttgccgtcacgtcccgatgttccctgccggcaaatcgactcacctcatcagcgacgaagaaatgggcaacctgttccgacagctcgacaagatcgagtcggaggggctggagaactacgtcatccctttgggaatccgcctgcagttcgagttcgccggccgccgctcggaaatcatcgcgctggaatggaactgggttgacttgcagaaccggcgcgtcgtctggcctgacagcaagacaggcggcatgtctaagcccatgagcgaggaagcctatcggctactctcgacggcaccccggcaggagggtagccgctatgtgctgccttctcctagccacgctggcaagcatctaaccacgggcgagtattacggtggctggagccgtgcgctcaaggcggctggcgctacgcacgtgggcacgcacggcatccgccaccgttcggcgaccgacattgccaattcgggcatcccggtcaaggtcggcatggcgctaacggcgcacaagaccgtcgtcatgttcatgcgctacgtccacaccgaggataagccggtgcgagaggcggccgaactggtggcgaatcggcgtaagacgatcaccgggatgcagggagccaaggaggtggccgcatga

SEQ ID NO: 159014 - DNA, 849 bp, Enterobacter cloacae
gtggtgcttaaaaccgaaacggggaatgtgattgacctacccgccaggacatggacagagagtgattttaaaacaaaaaacgcggtcatttcctatgctgatctgccggacggcaaatataccgttctgtccgcctatgcaagagatcttgtgggcaacacggcaaactacgtgataaatgatttgcttaccattgactccactgcccctctaatttcctaccggtatctgaatgatgatcctgaaggcaaactggttaagggactagaaaacctcagaattagtgtagctgacccttcaggtgacgcctcgcttgaatcactggtgttgagcggtggaccaaacagtgaacaggtgacattagcttattccagtcagggctcaggagtttatacgccagagtacccgcgtatctttcccgtaatagcaaaagaggatggcatttatacaattgaagctcacgcagtcgatgcctctggaaaccggtcctcgaaaaagctcaatttcctctatcaaccagcaaacatgatcactctggacaggctacgtacccttgctactgcggctgcactaaagaccacggataaccagccactggcttttatccggacaagcgtacttcgccgaaaggatggttctgtcattactgggcagttaaacggtacgctgtccgtgcggaaagatgctgacttcccggtaagtgtagctggcgtaaccgttgcgccaggagagacaaaggcaatcatttttgatatggggcagggtgaagaacgtatttattctgtcacaccaggaaagagtggcgtttctggtacatctgagtttgccgtggaattcccgcagttctga

SEQ ID NO: 159015 - DNA, 480 bp, Enterobacter cloacae
atgggcagaacaacgtacaccccacagcaacgccagcaggtgcttatcctcggcaaagaaccgggtgcaactgccgccagcgtcgcacgtcagacagggatccccgccagaaccgtgcgggagtggttcgccaacgccgaaaaggaagaacagcagccggacaacgtgaccagcctcatggagcagcgcgaacgcgcacagcagctgcttaacgagacacccagcgcgaagatccgacagctgcggaaccacttcaccgcccagcagttcgagctcctgcaacaacacgccaaagacctgacagggctcagggcccgccagcttaaagccgttgtagacaacgacccccagatgacccgcgccgtggcatccgcgatcctcgcactgctcaaagcgcaggaggctgagcgccttatgtacgacatcaagcccggtacagaggcagacattatgcgcggcggaatgaaccgccagaagtga

SEQ ID NO: 159016 - DNA, 1545 bp, Enterobacter cloacae
atggcagataacatcacaattcccgttaacctgcgggataaactcatcgcggtattaaaccgctctctttctgtggatttgttcaagattccagaagaacaaaaagcgccccggcttgccgatttaggcatcaattttaaagctatcgatcacgcactcagcatgtcgctgtggttgccgggtcgtgggaagtttttatttatctctcctatcggaaagcgtaccgagctgaaagaggataagtttaaaaacatccaggactttaccgggccaatcttccgcgctaccgatgcagccaaggcagcagccaaggcgcttaaagatgggggcagcacaaccaagggatcagacaagattttgactgagaccgcctcagcagtacgcagcgtggtctcagactggattatgactcatcgccagtgcatcgcgctctcctccattgtcgatatgtttgcagaaaggccctccctcacgctcaatgaggacgatgcggcaacgttaatccttacccatatcccatacccggtgattgatttcagcgagaaatacgaggctgattttcttgagcacttcccgcagtttcctgagctgttggatctcatcgctgcgggccgtttcgcgccagaccgcaaaaaggcttacctgtttattcatgcggtctctgacttcggtaagggcttgctgtttggcggtaacggggcatttactcagctgggcgtggttacagaagtaaacgagaaagagctggataagatgattaatgccgggaacatgggcaggacggcgcgagagttcacgcgttctctggtgctgcttatcaatgaatgtacccgcattaacaattacaccaagcagctggaaaacacgctgtcagtaacgacaaagtttgccattaccgagcggtgccagatgtacaccaagattttcaccgccgccgatccggtgtccggtctggtgagtgaaactggggtggatgagcagattgcaaaccgtttcggctatttccgcgtgaccgagaaaattgatgatcgcccgctgtttaaaaagaatccgggcttgtacgtcaaacgcctgaaagacatcattgcgcaccgcatgaatgagcgcattaatacttacattgcactgggtgaggatgagagctcccgcgttgcctcactggctttgaaggctttccaccagaagcatggcatcagtaaatcattcggcgtcattaccgatcactatgacgagatccgcgatgccttctacgagcacgtttactacgatatcgcgcagaagaaaatcggtgaggcattctttaaggtcaaagatggcctgctgcttaccaatcctgctacatggtggaaaaacttcgtatatagctatctggctaagcgtgatggtcatgacgttcacacactgctgagggatcgtcaaatcattctgggcggtgataaatcgccgtatgtcccggagcgtaaaaagtcagtgaaaggtgtagtaataccgctcccccctgagaatattgcggtgaatatccaccgcaccgccgccaacaattaa

SEQ ID NO: 159017 - DNA, 549 bp, Enterobacter cloacae
atggttaatgactttacgcatggtggaagggtttataggctttctcacctaaatccttctgttatcagcgttacacgtgctgctactgaaacgtacccggctaagacagtcagattttttgttacctacagcaatcactgtttcaccaaacactttgcagagaacgatgatgaaacgcttctctatgaggatagccgtcgatacttctgcactgagcgttacgcaggttcactgctattacccggtctgatacccatacttatcgaaaataacatattgctggggcttacgatgaaggagcggcgtgagtcattcttctatcttgaagaacatcatatgggtgttacgtatcgcttattctttgacatatcgtccagcaatcacccggcaagtgacataaggcttaaggtcacaacagcatatccagaggatgattgggcggctgatgttggcgtacatgcccgatttaatatctggcgagtaattgatgcgcgtatgaacggcgagaagctggcaacgaaagagcagcagagacgcaggcgaagataa

SEQ ID NO: 159018 - DNA, 453 bp, Enterobacter cloacae
atgaattacagcgtaatacactcagaaagcaccgacgccgttgtagctcttatcgagagggaaatggcggagtggcagctggctgattacgccattacgctgctgcctaacttctatccgggtgctcgccagatgttgccgggcggggcctctgtggttatcgaccgcgcaggctttaccaaaagcccatggggagggacgccgcagtttatggcggatgcacgcaaagccatggcagttaagggcagcaaacagcgggcgcgtgttgtgcggtctgtctgtgattctgagcgggaggcactcgctacggcgcttatgctggagctgttcggcattactgacctcgatccccttctggcccgtctgcctaaaattgatgagctcacgctgctgaccgttggcgatgcagataaaaaggctatctctgaggcgttcagcgtctggctgagatag

SEQ ID NO: 159019 - DNA, 858 bp, Enterobacter cloacae
atgcgcctcgatacgcagcagcaggcccgccgcaaatacggctggcgtctcgatgcctaccagcaggaaatgaacaccttgcaggacaagggcgtcggtatgcagaccatggggccagatggcgaccgatacagggcactgaaacgccagcagcacctcatgcgtcagcagcagctcaactttgtagagcagggcaatgcaaatgcacacgcagctgcatacggcccgcaaacagcaggagaggctgcgctcgacagcaactatatttcttcaccatccgccgccgcagctggcagcggtgctgccggaaactgggcagggaacaatgtcggcaacgtgaaagacgttaacggcaactggcggcgcttcccatcccagcaggcaggcgtcgcagcgtcggcggggcagctgctgcgctatagcaccggggcattcaaaggcggacgcaagcgcaccctgcgcgagattgtcagcacatatgccagtggcgatccagaggtgccgcgctacatccggcaggcaagcgaatggacagggtacgggccagatcagcaactggacttaaccgaccagaacacgctgctgaacgtgacgcgggccatcctccgcaaagagaacgtgaaaaatgccagcatcccgcaatcagtggttactgagggcgttaacatggcactgaacaatcagaacaactacaagatcgcccctgaaaccatgccagccgggcaacgcggaggaaaaattgatatttcagacgccaatatcaatgtaaacctgcaataccctgatgggcgcacacaaacgcaaagcgtcccggtaaaaagctctttcacgcagccgcgcagctttgccagtcgatag

SEQ ID NO: 159020 - DNA, 801 bp, Enterobacter cloacae
gtggatcactttttacccgttgttgacaccatggaattgctggaaacccttcgtcgtatggaaaagcgtggtgcattagaaaagatgcgcaaagtcagacagcgctgcggtgaagtattccgtcatgcaatcgtgaccggacgcgctgaatacaaccctgcacccgatctcgctacagccctcgctacaccaaagaaaacgcattttcctttcctgactgctgaagaactcccccactttcttagagatcttgcaggctataccgggagtgttattaccaagactgcaactcaaatcatcatgcttacaggagttcgaactcaggaattacgttttgctcgttgggaggatattaattttgaaaagcggctctgggagatccctgctgaagtgatgaagatgaaacgaccacacattgttccgatgtcggatcaggttgtcgagctctttgagtcacttaagcctattaccgggctataccccctagtattcgtcggacggaatgatcgaacgaagcccatctcaaaggaaagtgtcaatcaagtgattgagttgttgggatataaaggaaggctgacggggcacggtttccgccacaccatgagtaccatcctgcatgaagaaggttttaactcggcgtggattgaaacgcagcttgcgcatgtggataagaatgcgatacgtgggacttacaaccatgctcagtatttggagggacgtagggagatgatgcagtggtatgccgacaacattagctctctggcagaagtttcatttttacatattaaaacagcgggttag

SEQ ID NO: 159021 - DNA, 837 bp, Enterobacter cloacae
atgtctaaggttagtctctgtgacaagcaggttttcaatgagtttaagggatatgcatcattattgttcggttttatcggtgcagttgttatttttgtcgacattcctgcaaatcaaaaaattgcggcaggtttagcttgcattgcagtgcttattatcgcctatctttggttatggtacagagcaaatagcttgagggagattaatctaaccattgaggaaagtactgttatcattaaaacaggagatatcttcaaacaggagggtttgaaagcgatcgctttcaatgaatattttgatactcaggttgatgagcgaattattgccggaagtagtctcaatggtaaatttatcaacgaacatttatcttgtactgtaagtgagttggatgattacattagtaactataggttcgatgccgaagagataaaagatagaaatgaggaaaggattgaaggtaaaaagcaaaaatttgaaattggcactatttgtgtttatggtgattacatactcactgcgctatctaagtttgacgagcacaatgtagctcatctcacaatgcctgagtatttaggttttctaataagtttttgggataaggttaatcgagtctatgctcaaaaaagtgtttctgtcccaatctttgggtctggacttacaagaataaaaggccacaaaattatcgatgagcaagatctattaaagataatgctttggacttttaggataagcgaaatgcgatttaaacatccagcgaaattaacaataatgatccatgaagggaagatagataaagtcaatcttttagaattaaagacagcaagaaatggcttgtga

SEQ ID NO: 159022 - DNA, 555 bp, Enterobacter cloacae
atgagtgggaattactgtgcattttatgttgctgagccttttcatgagggcgctctgggagctcatgctacgaaagacttcgtttattacaacacactgagaatgtggaaaggagcggactccggtttcccttttaccaattcacacgatacaacttataacgttcgtgatggcagtaactgggagcaaactttaatgcctcgcctcagacagcgtctgcggaattctaagaatattattctattcctgagtgatcgaactataaattctcgcgctctacgagaagaaattgattacggtattaattccttggggcttcctgtaattgtaatataccctgactatgacacaaaagaaagtttgctagttaacaacattttaaagcagcaaatacaaaatttatggtctaagattcccgcattcagagattcaatgcatttagttcccacgttgcatatcccaatgaataaagctcttatcagacaatcactggcagatagtaagtttatggtgaaaaccaaaactgttccagatgtatatagatatagcgcataa

SEQ ID NO: 159023 - DNA, 216 bp, Enterobacter cloacae
atggggttaaaaatggcgtacatactttcgatgagtgaacaggttaaactgaaagcgtttttggcggcagtactcgatgactataagctgggagctatttcgcagcagcaagctgttggcgggatcactagcctggttgatgctcttgagatcagtgactcggggaaaatcagccaaatgctatcggaaggacgtaaactcctccggacgggataa

SEQ ID NO: 159024 - DNA, 774 bp, Enterobacter cloacae
atgtataatgggatagttgttcgggcctcctctttggtcgttatcacggatgaggggctgttacgactgatagacagtgattgcacacattgggctaagggcaacaaaatgacggcgtcgcgaattacacacctaataacgtcctgtaccaaaggtaagcacttccagtgcggctcccgtgcggaactgagcatccgggccggagagacacctgaagaggctatggccagttgggcagcgaccataagacggtcgcaaagtgcatcaccggtacccgccctatcgctctatactgggaatcactggtcaacggcaaaagagattttacggacgacggaaaacctggagttgtgggtgatctctgccgggttgggttttttgaatagtcgggacctcgtcgacgtatatgaagccacctttcataatttaccgttcagtcaccgccattggtggcgggaattaacaaatacattcgggaaggaaagatcggagaattccatagggacgttaatggaagccaggcctactgatgattacgtgatcgctgcctccccagtttatatcgctgcggttgaggacgatatcctggcaggagtaggtaaactaaataatcccattgcccagttgaccgttgtaacatctggggcatattctggggggctggaaccctatttaattcgtagtgaatcccgcatgatgccggaactttcaagcaacatggtatgtctcaacatcaaactcgcgcaatatatcattagtagtcaacgcatttag

SEQ ID NO: 159025 - DNA, 411 bp, Enterobacter cloacae
ttgaaagcgattatccatgttaattcgacaaatgacagtattactatccagctatgcggagttggcgctactgaggtacaggccagagagaaagcatttggcaacgtaaatcgcgttgttaatgtctccagtcagcagtatcagggcggacagtgtgtcacagcatctcaagaatttatagatgcctacaatgtagaacctgtttgggactcacgatttgatgagactggtaaggttgtaaatagccttaatgaagactcacatcagtttattgttgattttttggaaagtctgtttattgatgaaaatggcgaactgaattgccgtgtgaaatctgtacagaatgaaacttctgataaaaaaagattagtaaatgagtcttcggcattggtgatgctgccaacttactga

SEQ ID NO: 159026 - DNA, 1059 bp, Enterobacter cloacae
atgagcagcgcgacggatacgttttaccgtttgggtggcgacgagtttgcccttctctccagcggcctgacggaaagcgctgcggtttcgcgcgccaatgagatcagcgatcatatcagccagccctatacgattaataaccagctgataaaaattgccacctgcgtgggtattgttttatcggataacgaacgacgctctgattatctttacaagtttgccgatctcgccctctacgaagccaaaaaagagggctcgcagcagataaaagtcttccgtcagtggatgctgcaaaaactgcaggaaagcagaacccttgaacatgatatggcgctggcgctcgaccaccatgaatttgtggtgtattaccagcctattgtcgatgcattcagcaatgatatttacggctatgaagcacttattcgctggatacacccgcagaaaggaatactgtcgccggattactttatctctgttgctgaaaaaacagggatgatcaatgagatcggtaaaaatgtgcttgagcttgcctgccgggaggccgtttcctgggcggttccggcacggatctcggtgaacgtctcgcctgttcagttaggcacgaaatcctttacggcgatggtgcagtctattctgaaagagactgggctaccggccaatcgccttgagttagaagtcaccgagtcttcactcttcagtgacagcaacacgccagtcactattctcaaaaagctcagatcgctgggggtaagaatttcgatcgatgatttcggtaccgggtattcatcgctctcacggctcagtgaactcaactttgataaaatcaaaatagataaatcctttgtgaatcccatatccacgcaagatgaagcgctgaatatcgttaagctgatcgccggtatggcgaagagtcttaatatgagggtcattgcagaaggcgtcgaaaccgaagctcagctcgaacgtcttcaggcgcttggctgcgacctcgtgcagggctatctgttcggaaaaccgcaggctgaagtcgacaaaaaaataaaaagcggtgcagcgtga

SEQ ID NO: 159027 - DNA, 1515 bp, Enterobacter cloacae; identical to SEQ ID NO: 140571

SEQ ID NO: 159028 - DNA, 195 bp, Enterobacter cloacae
atggcagaacggaacaataagcagcacgataaaggcggtacggttcatatcgatgctgaaaccatgaagaagatcgaggagtaccaggcattcatccgtaagaatcacccggagatgcctgttcctactaaaggccagattgtgcgtagcagtgtgaactactggcatcaccagacgctgggagcatggatatga

SEQ ID NO: 159029 - DNA, 1104 bp, Enterobacter cloacae
atgtatcatgtaataaaaaaaggtgcttatatgaatcattgcgactatcagattattgaaatcagcccaaaagatcttattatcgagcctggatttaatccacgggaagcggtaatcggtgatctttgttacgaacaggagccagtaaaatcggcaattatttctctcaagcaagcctataaagaggggcgacgtgttgatttaattaaggtagtaaagaaggactccaagtacgttgtccggcaagggcattgtcgttacagagcattattgcttgctctcgcggaaggagctgacatccagctcttttcagtcgtacttatgcactacaaggataaaatcgaagaatacctagagaaccttgatgggaacaggaataacagtctcaatcccgttgcactagcttacgcactcgcagagaccctgaagcttggctctaccgttgaatcccttgctatgcgctatcagcggtctggcacagcgattcgcaatcagcttaaaatccttgatatgcctttagaactgcaacgtttaatcagcctaaaccttattaaaaaaacactcgcgattgaaatcatgttgaagtattccaatgatcatgcaaaagtccttgcacacttggagtcctgttcttttttagtgccatcttctggcgtacttgatttatcgaaaccaacaaccgttgaaacagcaacaaacagtgagccactcgaagaacaggaaaaacctcctgtacatattaaccctaaagacattaaaacaaagtctatcactcgcagttcgttaggtattaaacgtctttcacataaaaaaactgaacggttaaaaaatgaatttattggtttgattgataatgtagggtcaacaatgtcagacaataataaactgacagaattaattttagacggacagcattctaatttatttatgaacgtcagtaacactttaatcacaaaaacaaatgaaagtgtaaagatcactttagatgaagcaaaacttcaacttgtattaagtcttctaaatgatgaaaatactgcaatcatcattccaaaatctaaggttacagaactgaacgaaattcgtgaccttttgacaaatgagtag

SEQ ID NO: 159030 - DNA, 519 bp, Enterobacter cloacae
atgccgtttgattgccccagatgtgttatcgacacgaatgtgttatctgatttttatgaaggcggatgtttagggttaatttggcaagtttacccgggaggcgtttggatagatccctatgtctgcgaggaactaaaagctaaatacaatcttaatgtccaagaagagttagccagacttcagcttgcatacaattttacaaatgattatgaaccagagcatttagttgagatggcagaaattaaaatcagaaggagagccttaaaatatgctgatataagctgcgttgtcaatgcaagcatccatgatgcgacatgtttgtccgccgataatgctgtttataaaacatgcgaagagcgtggtgttaaagccgctcgtcatggtggattgcttcaagaagctgttcgccgtggaattattgacaaacatcaagcactcgcatattttcagtttttcttagataatgggttaacaatgaaatctactattcgtcaacaaatcatagctagtttttcatga

SEQ ID NO: 159031 - DNA, 1089 bp, Enterobacter cloacae
atgagcgcaattgctgtcgcagatgcgatcggtgttgtccgtcaaacctacagtaaatttgagcaagctcagggcgttccaagcgttacgcaactcattatgctctgcaagattttcgacaagcctatcgggtatttttatgatcaagatgaaggcgagtttcgttttgcaatgcgagcagatagcccagatttgttggacgcgaaactccgcaatgagttgattgaaaagttgaaaaacatcaacgcaattgaggaggctgctgaggcgaatttgcctgaagatcttcctaactcaatgcctatcttcactgcaagagaagaagacttgcgaagagtagaagataaggctatggaagagcgtttccgtctgggtatcggtaacgctacctgcgttggtgatattgttgctattctggaagcgtctgatatccgtgttatccctttcaatcgcgaggaaagtgataaaggaatggtgttcggattttctgcgttttcgaacaattacggcactgcaatttatgtgaatattcatgacagcatttccgtagaacgccaaattttcagtatttgccatgaatatgcacatcttatcttccatcgtgaagagtatgacggtcctgccaaaagttataaaaccaaaggtagagcgacttctccagaggagaaggttgcaaaccactttgccgcttgtttcttggtgccagaaagcgcattaagaaaacaatttgtcatgcaaggtggtggttgggcttatgaagaaaccgttttaaggctaaaaagcatttttagagtttcggctacttgcatcattgatcgcctcagtaaatgcaagttaatcaatcaacaaaacactggttatctatgggcaactgccaatcgtaaaggttggatgaggtatgaaccgaatcctattagagaagcactaaattacaaaggccgtttaaccgttttgtcgcgtaaagcatgggaagccggttccgcgtcggaaaccttcatatctgaacttttagaactggatagaaaagctctcagtaatcttctggatgagtggtacgacgaacaggaggccggagaggatgccgtttga

SEQ ID NO: 159032 - DNA, 300 bp, Enterobacter cloacae
atgtcaatgacacaaggtgagaagttaagccttatcagggaatctgagcgccttacaaaacgccaacttactgatttaacagggttgagttattcaacttatggcgggtatgaacgtgacacgaccaaaatgacccttgagtcggctatcaagctctttggacatccgcgatttaataaatatcaagactggtttatgtatgaccggatcgacccaagccgggggcagattgcaccggctctcgcacactctgggcaagaaacaacgcaattagaccactccggcaaacagactggttaa

SEQ ID NO: 159033 - DNA, 144 bp, Enterobacter cloacae
atgattctgaaacttggcaatgatactgcgctcaaatgcgtgcgcatctgctttcctgtcaaacttccgccgaatgcgttttccatcgcgcccgcgcggccttacatccacttcatagcgaccatcttcgagcctcttaactga

SEQ ID NO: 159034 - DNA, 522 bp, Enterobacter cloacae
atggctgtaaaattttcatatatttttaaatttgtaaaagatgatttatttattcagcggttcaaaaaagcatgggaactgcataagtataggctttcagctgcttctaaaaagaataaatcatcaagacgctgtggaactgacaacaaagaagttgtagcaacacctatgcctacggtctcaaagccggaaagttataaggatttctcgtctgagagaagtactcgtgaattcaatactggtttatcgcagcctctgcacattgcgcataatacagaggtcgttttggaaccaagagaagcatatcaaaataataaagatgagaatattgaagttatgaagccaactcattcaggaagcaaccaaaaaggtataaatccccctgggacagtaattaaatatttgcaatcctcatccctgaaaagtactttaccgtaccagcttataagcatggcgagtgacggacttgatgcaattgctaaaacagcgagtaaagtaaaagagaagaaaaacatcaagtaa

SEQ ID NO: 159035 - DNA, 435 bp, Enterobacter cloacae
atgctgaagtctccctcagccttgcttttcagtgcagcattgttctcaacctctgcacatgcagtcattcaggaacagcaatggcaccactggtttggcaatatcagtgttatggagtttgaaattaactctcagaattctgcaggcgaagtgctcactttgacctgtacaggcggaacgttagctctagcttatagcgtacctgcagaggactaccgcgtttcttccctcacaggccttgctgagcctggtatcagtattaacggtacaaactattctctagatgaaacggcttttacagcactcaaatctgcaggaaataacggtgtaataaaaatcacctcttcgaatacagcaatttctaaaaaattcagtactaaagggctgaatgaagcgctgggtgattttacctggcaggactgtattcatcactaa

SEQ ID NO: 159036 - DNA, 804 bp, Enterobacter cloacae
atgcataaattaatagctttatcgttcagctcagcagttctgcttatcccatctatctcttctgcattgacagttcacggagatatacatcccgaacgctatacctttttcctgacccaagaaggaagcaaccaattaaaacaggcgaatgagcgactagccaagaatccacaggcctacacgcttgatgtgaaccatacgggcattcagccctttgaggcagtccgctgggatggtaagcctgtaaaggccgtcacctgtgtgttggtagatggcgttatgatgggtaaaaaagctacttggtcacaatgcaaagatgaaagtggtgcagaatattttggcaatgccgggtggccggtacgtgattacgtggcaaaggcgtgtgaagtaggtaaatcagattgtccagtttacctcgtctttcagacagacccaccgactatgcggaacgatatggctaaatttacacctgcgcctaagaacttcaatgcttcaacaaacctgacggatgaaattaaaaacgacggatgtcagatggctaacaattcctttgaatatgcaaaaagcagtattcgttgttctgcaattaacgccgtacgttttattcgtaaacaaaataccgaagccacatatgaagctgatctcatcactacttcaggcgaaaagatgacaatgactatcgggtacacctatgggaatgcatccagtaaagaaccgggctggcgcaccatttctgtcaagcaggggggcattattactgatatccgcaaacagggccaatggctccctaatggctataagtag

SEQ ID NO: 159037 - DNA, 198 bp, Enterobacter cloacae
atgcacagccaaagcgaattgattacaaaccagccagatcatgaatccccatggcccgactgtacgtggcaacttgtcctgtgcgtaacagggataacgttgatgcgaagccattcgatcacggtaaaagctctgggtgcaggtttgaccacctttagcctgataaaggcaataaaaaaactcgctgcacttgcctga

SEQ ID NO: 159038 - DNA, 477 bp, Enterobacter cloacae
atggcaggaggcggaagttcaaaggataaaaagactatggtcgaaaatggaacagggaaactccgtagccttaaagaaaggctgagtttttcacgcgagaaaacacctgcagaaaatctggatgcatcattaagtgagctcctaccggaaaacacggtcaaatcttcgataaatggatctgataaatacaggctattactggagaatattgtaattaatggtttgttaaatatcgctgaagataagcttaatgatgatgcttttgttgaagttgttttcagcaaagcatatgagcttttgcctgccccagtcaggattgtactgaagcgggaatggtgtttgagctacctgcagtcacaaaaagctccaattctgaagaaattacaactttaccgtgcagataagctcagtcctgccgaactatctgcgttgccccagtcagattcagaaaaggctgcatcgcaggtttcaccttaa

SEQ ID NO: 159039 - DNA, 1392 bp, Enterobacter cloacae
atgacatatgcaacgatcaatcccttcacgggagagctcatcaaagaatttcccaatgccactgatgccgaagtcacagaggcaattgaatcggcccaccaggcctttttgagttggcgcaatacctcttttgccaacaaggctgaaatactcaatcgggctgcagccctgctcagagacagcaagcgccgctatgcagagctgctgaccctagagatgggtaaagtcattggagaggccgaggccgaagtagaactgtcggcgcagatcctcgaatactatgccgagcatgccgagagactgctggcaccgcagaaactgcctgtggccgatcccgccgaaggggaagcgctgctggtcaatgaacctcttggggtcttgctggccattgaaccctggaacttcccctattaccagatagccaggatcttggctccgcaactttctgccggcaacaccctgctgctgaaacacgcttccaatgtgcctcagtgcgccgccgcttttgagagcctgatgcgggatgccggactgccacagggcgccttccagaacctgtatgctacccgggatcaagtcgagcagatcatcaactcacccaaggtacatggcgtggctctgaccggctctgaaggtgcaggcgccgttattgcctctcaggccggtaaggcgctgaaaaaatccactctggagctgggcggctctgacgcctttatcgtgctggaagatgccgagcttgagaaaaccatagattgggcggtattcggccgtcactggaatgccggtcaggtatgtgtttcatccaaacggatgatcctggtggaagccatttatgacaagtttatggaaggctataccaaaggcgtagccgcgcttaaagccggtgaccctatggatccgaacacgactctggcgcccctgtcttcccagggtgctgccgatgaagtgaagcagaaaattcgtgaagcggttgagcatggtgccacagctaccgaagttggtcccaaagtgccggagcaaggcgcttttgtacagccgaccatacttaccaatgtgaccccggacaacccggcttactattgggagttcttcggccctgtctccatgatcctcaaggcaaaggatgaacaggaagcgattgccattgccaacgattcgcccttcggcctcggtggctctgtgttcaccgccgatgaacagcgcggtctggcggtagccaagcaagtctctaccgggatgatgttcgtcaaccaccccaccatggttaaggctgatttgccctttggcggcatccgccgctccggctatggtcgtgaactgatcgacttaggcctgaaagagttcgtcaaccacaagttgatcaacgtggtggatatcaacgctcccttctga

SEQ ID NO: 159040 - DNA, 189 bp, Enterobacter cloacae
ttgccgctgactctggcagatatggggctgaaacaattccgtgaggaggagtggcgtaaagttgccgaaatcgcctgcgccgaaggcgataccatgggcaatatgcctatggcggtcagtgccgatgatgtctatcaggcaatgatcgcagccaatgccatggccgaacgctatagccaccagaactga

SEQ ID NO: 159041 - DNA, 351 bp, Enterobacter cloacae
atgaccctgccgcttgtcaccgctgatgaacgcgcccggctgctggcccacggcgcggcgctcgccgctggtcagcggctcgacccgctgcccgtggtgcgcttgttcaccccggacgcgcatgtgacctggctgctggtgtcgctcgacccggcggatggcgacacggcctacggcctgatcgacctcggtatcggtatgcctgagctcgggatggtcaagctgtccgacctggcgggcatcgtcgggccgcgcaagctgccggtgcggcgggatcggtatttccaggcggtgcgcccgttatcggagtacgtccggctggcgcaggagaacggcgcgatcacggactga

SEQ ID NO: 159042 - DNA, 267 bp, Enterobacter cloacae
atgctgctgatcgcagcatcgcacgcacagggtttcggcagttgccccatgtcccgcatgtccaaggccagcattgcattggtgatggtcgaatggctcgaagcccgtggcagtaggaacagcatggcgtgtcggcgcattgcgccgccgggctttcgggctgcgccccatgccgccaatggcgtcatgtccattcggcttcaatccctcacgccttcgcgcctggcggcgctgcgcgctccgcttgcgggcattcagacgcgctag

SEQ ID NO: 159043 - DNA, 279 bp, Enterobacter cloacae
atgctggccgcgcatcgccagttcgcccgcgatgtgcgtggcgagcgtggtcttgccgacaccgcctttctggttgagcagagcgaggatcatggcgcggccctccctgctggaaagccgggctttacctgccgtgcaaaacgctgttcgccgtgccgtttctcggttgtccaccgaaacggcgcgcttctactaaaagttatgtatttcttgttaggtaagttagagggaacgcaaacccgcgccgttgttggctttccggcgttttcgtactcctga

SEQ ID NO: 159044 - DNA, 819 bp, Enterobacter cloacae
ttgcagcgcgaacagctcgatctgttccgagcgctgccgggcgacatggcgccacgcgattcccaggacttgatggcctttccgttcttctcgctggcgaagtcgcggcgtaccgcgccgatcgacttccgcagcgggaacgtcaccattcgcgtggaaggcacgcaggagcacggcatcgcaacgatatgggatgccgacgtgctgatatgggccgcctcgcagatcgtggaggcgcgcgacgcgggcctgcgcccgtcgcgctggatacgcgccacgccttacgagattttgcgcttcatcgggcgcggcacgtccctcaacgactaccagcgcctgaaggtcgccctcgaccggctgcaatcgaccacggtggccacgtccatccgcgaaaccacgggaaggcgcttgcatcgcttctcgtggatcaacgagtggaaggaactcgccgacgccagcggcaccccgctgggcatcgaactgatcctgccggactggttctatgccggcgtgctcgacgccgccctggtgctgaccatcgacccggcctatttccgcttgaaaggcggtatcgaacgctggctgtaccgcctggtgcgcaagcacggcggcaagcagccgggcggctggcaattcgacttccggcacctgcaccgcaagtcgggcagcgcggcccgcttctcggacttcgcctacgacgtgcgcgccctggtggcgcggcagtcgttgcccggctacgtcctcggcatcgagcggatgccggacgacggacaagagctgctgaccttccggcccgtgccgcacgcggcacggggataa

SEQ ID NO: 159045 - DNA, 927 bp, Enterobacter cloacae
atgtatatattaggtgatatgtttctaatcgaaaaaaactgtgcactgataataaaagctaatgtgcatatagtgatattggactactatgaattcggtatatctgaaacgagttcaaagagagaaacgatgagtacagaacataaagtagctgttgttactggtgcggggcagggaattggtaaagcaatcgctctccgtctggcgaaagatggatttcgtatcggtagtctggacttcaatggcgaaacggcacatgaaacggtgaggcttattgaagaaatgggtggcgaggcactggcagtagctgcggatgtcgcagatcgcgaacaagtttttgcagcagtggataaagtcgttgcaaagtttggccgcctggatgttatggttaataatgccggtcttggcccaacgacaccaattgaggaaattactccagaaatttaccgtaaagtctttgatgttaacgtaggaggtgtgtactggggtattcaggccgctgtgaagtactttaagcagcgtactccggcaaaaacgggggacattatcggtaagataatcaacgcctcatcgcaggcaggccaagtgggtaaccctgatctggccgtctacggcgctacaaagtttgctgttcgcggtataactcagacagctgcaaaagatctggcgaaatttgggattactgtgaacgcgtattgcccgggaattgttcgcacccctatgatgaatggtatcgcacaaaaagtcgcagatgaaaatggccagtctctggaatggggccttcagcagtgggcgaaaaatgttgccctcggacgcatttctgaatcagaggatgttgcggcatgtgtttcctatctggccggtgtggattcagattatatgacaggtcaggcactcattattgatggtgggatggtatttaactga

SEQ ID NO: 159046 - DNA, 690 bp, Enterobacter cloacae; identical to SEQ ID NO: 96029

SEQ ID NO: 159047 - DNA, 216 bp, Enterobacter cloacae; identical to SEQ ID NO: 133521

SEQ ID NO: 159048 - DNA, 213 bp, Enterobacter cloacae
atgctgcatgcagtgaatacgcagcatggtctccagcggatagggccgtcggccattgcccgccttgggataaaacggctcgatgacagcggtcatattctgccatggcagaatctgctccatgcgggagaggaaaatctcttttcgggtctgacggcgcttagggaaggtgcgaataagtcaccaaacgcaaaaaaacgcctatgtaagtga

SEQ ID NO: 159049 - DNA, 723 bp, Enterobacter cloacae
atgttgacgcattcgtttgaagatctggctcagtcatttagagtgcttttagaatcacatttttcctttagcagattacttcatgttgatcgagctgaagcaataggtaatttagaagcagggattaatactcaacttcaagcttttcatagcatgtacgataatatgatacagcgaggtgtaaattttgactggtatacatgtcccgaactgctaactatattagtaattaggaatgctcgtcatcataacaaggctaataaaatcagaacgttgttcaaccatcatcgtttaaatgcttttcctccgactactgtaaaaaattatttttatgtcgactttccttcccctcctgaagaagcaggaggggattgttttgacgtacccgtttcttgggcagacatcgatgagatgctcactcttcctcgtaaagaatcacacttaagaccagaggttagagagagaattagaaaatatttaaatgccgatagttttgaaagcgctgcttcagaggctggtttgggtaagcaacatattttcataaattacgttcctctttctttgaacgcagccatagcgttgtatccaaatgtcgtcgatttagtcactccacatgaagattcaatagaagcgaaatactttttacatcatttccagacaactgcaccagctcttacaaatgtccacgaacaaggcgttttggcatttaacttacctgaataa

SEQ ID NO: 159050 - DNA, 207 bp, Enterobacter cloacae; identical to SEQ ID NO: 7030

SEQ ID NO: 159051 - DNA, 411 bp, Enterobacter cloacae
atggatcaggtagtcatttttaaacaaatatttgataaagttcgaaacgatttaaactatcaatggttttattctgagctaaaacgtcacaatgtctcacattacatttactatttagccacagagaatgttcatattgtattaaaaaatgataatacagtgttattaaagggcctaaaaaacattgtgtctgtcaaattttcaaaggataggcatcttatagaaacgacctctaataagctgaaatccagagagatcacatttcaggaatacagaagaaaccttgctaaagcaggagtttttcggtgggttacaaatatccacgaacaaaaaagatattactatacctttgataattcattactatttactgaaagcatccagaaaactacacagatcttaccacgctaa

SEQ ID NO: 159052 - DNA, 546 bp, Enterobacter cloacae
atggaagtcaacaaaaagcagctggctgacattttcggtgcgagtatccgtaccattcagaactggcaggaacagggaatgcccgttctgcgaggcggtggcaagggtaatgaggtgctttatgactctgccgccgttataagatggtatgccgaaagggatgctgaaattgagaacgaaaagctgcgccgggaagttgaagaactgcggcgggccagcgagacagatctccagccagggactattgagtacgaacgccatcgacttacgcgtgcgcaggccgacgcacaggagctgaaaaatgccagagactccgctgaagtggtggaaaccgcattctgtactttcgtgctgtcgcggatcgcaggtgaaattgccagtattctcgacgggatccccctgtcggtgcagcggcgttttccggaactggaaaaccgacatgttgatttcctgaaacgggatatcatcaaagccatgaacaaagcagccgcgctggatgaactgataccggggttgctgagtgaatatatcgaacagtcaggttaa

SEQ ID NO: 159053 - DNA, 1926 bp, Enterobacter cloacae
gtgaatatatcgaacagtcaggttaacaggctgcggcattttgtccgcgccgggcttcgctcactgttcaggccggagccacagaccgccgttgaatgggcggatgctaattactatctcccgaaagaatccgcataccaggaagggcgctgggaaacactgccctttcagcgggccatcatgaatgcgatgggcagcgactacatccgtgaggtgaatgtggtgaagtctgcccgtgtcggttattccaaaatgctgctgggtgtttatgcctactttatagagcataagcagcgcaacacacttatctggttgccgacggatggtgatgccgagaactttatgaaaacccacgttgagccgaccatccgcgatattccgtcgctgctggcgctggctccgtggtatggcaaaaagcaccgggataacacgctcactatgaagcgtttcaccaatggtcgtggcttctggtgcctgggcggtaaagcggcaaaaaactaccgtgaaaagtcggtggatgtggcgggttatgatgaacttgctgcctttgatgaggatattgaacaggaaggctctccgacgttcctgggcgacaaacgtattgaaggctcggtctggccaaagtccatccgtggctccacgcccaaagtgagaggcacctgccagattgagcgtgcagccagtgaatccccgcattttatgcgttttcatgttgcctgcccgcactgcgggaaggagcagtaccttaaatttggcgacaaagagacgccgtttggcctcaaatggatgccggatgacccctccagcgtgttttatctctgtgagcataacgcctgcgtcatccgtcagcaggagctggactttactgatgcccgttatatctgcgaaaagaccgggatctggacccgtgatggcattctctggttttcgtcatccggtgaagagattgaaccgcctgacagtgtgacctttcacatctggacggcgtacagtccgttcaccacctgggtgcagattgtcaaagactggatgaagacgaaaggggatacgggaaaacgtaaaaccttcgtgaacaccacgctcggtgagacgtgggaagcgaaaatcggtgaacgtccggatgctgaagtgatggcagagcggaaagagcattattcagcgcccgttcctgaccgtgtggcttacctgaccgccggtatcgactcccagctggaccgctacgaaatgcgcgtatggggatgggggccgggtgaggaaagctggctgattgatcggcagattattatgggccgccacgacgatgaacagacgctgctgcgtgtggatgaggccatcaataaaacctatacccgccggaatggtgcagaaatgtcgatatcccgtatctgctgggatattggcgggattgacccgaccattgtgtatgaacgctcgaaaaagcatgggctgttccgggtgatccccattaaaggggcatccgtctacggtaagccggtggccagcatgcctcgtaagcgaaacaaaaacggggtttaccttaccgaaatcggtacggataccgcgaaagagcagatttataaccgcttcacactgacgccggaaggggatgaaccgcttcccggtgccgttcacttcccgaataacccggatatttttgatcttaccgaagcgcagcagctgactgctgaagagcaggtcgaaaaatgggtggatggcaggaaaaaaatactgtgggacagcaaaaagcgacgcaatgaggcgctcgactgcttcgtttatgcgctggcggcgctgcgcatcagtatttcccgctggcagctggatctcagtgcactgctggcgagcctgcaggaagaggatggtgcagcaaccaacaagaaaacactggcagattacgcccgtgccttatccggagaggatgaatga

SEQ ID NO: 159054 - DNA, 207 bp, Enterobacter cloacae; identical to SEQ ID NO: 7021

SEQ ID NO: 159055 - DNA, 1602 bp, Enterobacter cloacae
atgaaaacgtccaccattcccacccttctggggccggacggcatgacatcgctgcgtgaatatgctggttatcatggcggtggcagcggatttggtgggcagttgcgggcgtggaacccaccgggtgaaagtgtggatgcagccctgctgcccaattttacccgtggcaatgcccgtgcagacgatctggtacgcaataacggctatgccgccaacgccatccagctgcatcaggatcatatcgtcggatcttttttccggctcagtcatcgcccaagctggcgctatctgggcatcggggaggaagaagcccgtgccttttcccgcgaggttgaagcggcatggaaagagtttgccgaggatgactgctgctgcattgacgttgagcgaaaacgcacgtttaccatgatgattcgggaaggtgtggccatgcacgcctttaacggtgaactgttcgttcaggccacctgggataccagtccgtcgcggcttttccggacacagttccggatggtaagcccgaagcgcatcagcaacccgaacaataccggcgacagccggaactgccgtgccggtgtgcagattaatgacagcggtgcggcgctgggatattacgtcagcgaggacggctatcctggctggatgccgcagaaatggacatggataccccgtgagttacccggcgggcgcgcctcgttcattcacgtttttgaacccgtggaggacgggcagacccgcggtgcaaatgtgttttacagcgtgatggagcagatgaagatgctcgacacgctgcagaacacgcagctgcagagcgccattgtgaaggcgatgtatgccgccaccattgagagtgagctggatacgcagtcagcgatggattttattctgggcgcgaacagtaaggagcagcgggacaagctgaccggctggattggtgaaattgccgcgtattacgccgcagcaccggtccgtctgggaggcgcaaaagtgccgcacctgatgccgggggactcactgaacctgcagacggctcaggacacggataacggctactccgtgtttgagcagtcactgttgcggtatatcgctgccgggctgggtgtctcgtatgagcagctttcccggaattacgcccagatgagctactccacggcacgggccagtgcgaacgagtcgtgggcgtactttatggggcggcgaaaattcgtcgcatcccgtcaggcgagccagatgtttctgtgctggctggaagaggccatcgttcgccgcgtggtgacgttaccttcaaaagcgcgcttcagttttcaggaagcccgcagtgcctgggggaactgcgactggataggctccggtcgtatggccatcgatggtctgaaagaagttcaggaagcggtgatgctgatagaagccggactgagcacctacgagaaagagtgcgcgaaacgcggtgacgactatcaggaaatttttgcccagcaggtccgtgaaacgatggagcgccgcgcagccggtcttaaaccgcccgcctgggcggctgcggcatttgaatccgggctgcgacaatcaacagaggaggagaagagtgacagcagagctgcgtaa

SEQ ID NO: 159056 - DNA, 1320 bp, Enterobacter cloacae
gtgacagcagagctgcgtaatctcccgcatattgccagcatggcctttaatgagccgctgatgcttgaacccgcctatgcgcgggttttcttttgtgcgcttgcaggccagcttgggatcagccgcctgacggatgcggtgtccggcgacagcctgcctgcccaggaggcactcgcgacgctggcattatccggtgatgatgacggaccacgacaggcccgcagttatcaggtcatgaacggcatcgccgtgctgccggtgtccggcacgctggtcagccggacgcgggcgctgcagccgtactcggggatgaccggttacaacggcattatcgcccgtctgcaacaggctgccagcgatccgatggtggacggcattctgctcgatatggacacgcccggcgggatggtggcgggggcatttgactgcgctgacatcatcgcccgtgtgcgtgacataaaaccggtatgggcgcttgccaacgacatgaactgcagtgcaggtcagttgcttgccagtgccgcctcccggcgtctggtcacgcagaccgcccggacaggctccatcggcgtcatgatggctcacagtaattacggtgctgcgctggagaaacagggtgtggaaatcacgctgatttacagcggcagccataaggtggatggcaacccctacagccatcttccggatgacgtccgggagacactgcagtcccggatggacgcaacccgccagatgtttgcgcagaaggtgtcggcatataccggcctgtccgtgcaggctgtgctggataccgaggctgcagtgtacagcggtcaggaggccattgatgccggactggctgatgaacttgttaacagcaccgatgcgatcaccgtcatgcgtgatgcactggatgcacgtaaatcccgtctctcaggagggcgaatgaccaaagagactcaatcaacaactgtttcagccactgcttcgcaggctgacgttactgacgtggtgccagcgacggagggcgaaaacgccagcgcggcgcagccggacgtgaacgcgcagatcaccgcagcggttgcggcagaaaacagccgcattatggggatcctcaactgtgaggaggctcacggacgcgaagaacaggcccgcgtgctggcagaaacccccggtatgaccgtggaaacggcccgccgcattctggccgcagcaccacagagtgcacaggcgcgcagtgacactgcgctggatcgtctgatgcagggggcaccggcaccgctggctgcaggtaacccggcatctgatgccgttaacgatttgctgaacacaccagtgtaa

SEQ ID NO: 159057 - DNA, 333 bp, Enterobacter cloacae
atgacgagcaaagaaacctttacccattaccagccgctgggcaacagtgacccggcacatacggcaaccgcgcccggcggattgagtgcgaaagcgcctgcaatgaccccgctgatgctggatacctccacccgtaagctggttgcgtgggatggcaccaccgacggtgctgccgttggcattctggcggttgatgctgaccagaccagcaccacgctgacgttctacaagtccggcacgttccgttatgaggatgtgctctggccggaggctgccagcgacgagacgaaaaaacggaccgcgtttgccggaacggcaatcagcatcgtttaa

SEQ ID NO: 159058 - DNA, 1026 bp, Enterobacter cloacae
atgtcgatgtacacaaccgcccagctgctggcggcaaatgagcagaaatttaagtttgatccgctgtttctgcgtctctttttccgtgagagctatcccttcactacggagaaagtctatctctcacaaattccgggactggtaaacatggcgctgtacgtttcgccgattgtttccggtgaggttatccgttcccgtggcggctccacctctgaatttacgccgggatatgtcaaacccaagcatgaagtgaatccgcagatgaccctgcgtcgcctgccggatgaagatccgcagaatctggcggacccggcttaccgccgccgtcgcatcatcctgcagaacatgcgtgacgaagagctggccattgctcaggtcgaagagatgcaggcagtttctgccgtgctcaagggcaaatacaccatgaccggtgaagccttcgatccggttgaggtggatatgggccgcagtgcggcgaacaacatcacgcagtccggcggcacggagtggagcaagcgtgacaagtccacgtatgacccgaccgacgatatcgaagcctacgcgctgaacgccagcggagtggtgaatatcatcgtgtttgatccgaaaggctgggcgctgttccgttccttcaaagccgtcaaggagaagctggatacccgtcgcggctctcattccgagctggagacagcggtgaaagacctgggtaaagcggtgtcctataaggggatgtatggcgatgtggccatcgtcgtgtattccggacagtacgtggaaaacggcgtcaaaaagaacttcctgccggacaacacgatggtgctgggtaacactcatgcacgcggtctgcgcacctatggctgtattcaggatgcggatgcattgagtgagggtattaatgcgtctccccgttatccgaaaaactggaagacatccggcgatccggcgcgagagttcaccatgattcagtcagcaccgctgatgctgctggctgatcctgatgagttcgtgtccgttcaactggcgtaa

SEQ ID NO: 159059 - DNA, 396 bp, Enterobacter cloacae
atgacgaaagatgaactgattgcccgtctccgctcgctgggtgaacaactgaaccgtgatatcagcctgacggggacgaaagaagaactggcgctccgtgtggcagagctggaagaagagcttgatgacacgggcgacactgccgatcaggatacccctctcagcccggaaaatgtgctgaccggacatgaaaatgaggttgtatcagcgcagccggataccgtgactgatacggctgatctggtcacggttgtggcactggtgacgctgcatactgatgcacttcacgccacgcgggatgaggctgtggcatttgtgctgccgggaacggcgttccgtgtctctgccggtgtggcagctgaaatgacagagcgcggcctggccagaatgcaataa

SEQ ID NO: 159060 - DNA, 354 bp, Enterobacter cloacae
gtggctgatttcgataacctgttcgatgctgccattgcctgcgccgatgaaacgatacgcgggtacatgggaacgtcagccaccatgacatccggtgagcagtccggtgctgtgatacgtggtgtttttgatgaccctgaaaatatcagctatgccggacagggcgtgcgcgttgaaggctccagcccgtccctgtttgtccggactgatgatgtgcggcagctgcggcgcggcgacacgctgaccatcggtgaggaaaacttctggatagaccggatttcgccggatgatggcggaagctgtcatctctggcttgggcggggcgtaccgcctgccgttaaccgtcgccgctga

SEQ ID NO: 159061 - DNA, 579 bp, Enterobacter cloacae
atggccataaaaggtcttgagcaggccgttgaaaacctcagccgtatcagcagaacggcggtgcccggtgccgccgcaatggccattaaccgcgttgcttcatccgcgatatcgcagtcggtggcacaggttgcccgtgagacaaaggtacgccggaaactggtaaaggaaagggccaggctgaaaagggccacggtcaaaaatccgcaggccagaatcagggttaaccggggggatttgcccgtaatcaagctgggtaacgcgcgggttgtcctttcccgccgcagacgtcgtaaaaaggggcagcgttcatccctgaaaggtggcggcagcgtgcttgtggtgggaaaccgtcgtattcccggcgcgtttattcagcaactgaaaaatggccggtggcatgtcatgcagcgtgtggccgggaaaaaccgttaccccattgatgtggtgaaaatcccgatggcggtgccgcttaccacggcgtttaaacagaatattgaacggatacggcgtgaacgtcttccgaaagagctgggctatgcgctgcagcatcaactgagaatggtaataaagcgatga

SEQ ID NO: 159062 - DNA, 396 bp, Enterobacter cloacae
atgaaacatactgaactccgtgcagccgtactggatgcactggagaagcatgacaccggggcgacgctttttgatggtcgccccgctgtttttgatgaggcggattttccggcagttgccgtttatctcaccggcgctgaatacacgggcgaagagctggacagcgatacctggcaggcggagctgcatatcgaagttttcctgcctgctcaggtgccggattcagagctggatgcgtggatggagtcccggatttatccggtgatgagcgatatcccggcactgtcagatttgatcaccagtatggtggccagcggctatgactaccggcgcgacgatgatgcgggcctgtggagttcagccgatctgacttatgtcattacctatgaaatgtga

SEQ ID NO: 159063 - DNA, 741 bp, Enterobacter cloacae
atgcctgtaccaaatcctacaatgccggtgaaaggtgccgggaccaccctgtgggtttataaggggagcggtgacccttatgcgaatccgctttcagacgttgactggtcgcgtctggcaaaagttaaagacctgacgcccggcgaactgaccgctgagtcctatgacgacagctatctcgatgatgaagatgcagactggactgcgaccggacaggggcagaaatctgccggagataccagcttcacgctggcgtggatgcccggagagcaggggcagcaggcgctgctggcgtggtttaatgaaggcgatacccgtgcctataaaatccgcttcccgaacggcacggtcgatgtgttccgtggctgggtcagcagtatcggtaaggcggtgacggcgaaggaagtgatcacccgcacggtgaaagtcaccaatgtgggacgtccgtcgatggcagaagatcgcagcacggtgacggcgacaaccggcatgacggtgacacccgccagtgcttccgtagtgaaagggcagagcaccatgctgaccgtggcattccagccggagggcgcaaccgacaagagcttccgtgcggtgtctgcggataaaacaaaagccaccgtgtcggtcagtggtatgaccatcaccgtgaaaggtgttgctgcaggcaaggtcaacattccggtcgtatccggtaatggtgagtttgctgcggttgcagaaatcaacgtcaccgccagttaa

SEQ ID NO: 159064 - DNA, 423 bp, Enterobacter cloacae
atgttcctgaaaaccgaatcatttgaacataacggtgtgaccgtcacgctttctgaactgtcagccctgcagcgtattgagcatctcgccctgatgaaacggcaggcagaacaggcggagtcagacagcaaccggaagtttactgtggaagacgccatcaaaaccggcgcgtttctggtggcgatgtccctgtggcataaccatccgcagaagacgcagatgccgtccatgaatgaagccgttaaacagattgagcaggaagtgcttaccacctggcccacggaggcaatttctcatgctgaaaacgtggtgtaccggctgtctggtatgtatgagtttgtggtgaataatgcccctgaacagacagaggacgccgggcccgcagagcctgtttctgcgggaaagtgttcgacggtgagctga

SEQ ID NO: 159065 - DNA, 435 bp, Enterobacter cloacae
gtgttcgacggtgagctgagttttgccctgaaactggcgcgtgagatggggcgacccgactggcgtgccatgcttgccgggatgtcatccacggagtatgccgactggcaccgcttttacagtacccattattttcatgatgttctgctggatatgcacttttccgggctgacgtacaccgtgctcagcctgtttttcagcgatccggatatgcatccgctggatttcagtttgctgaaccggcgtgaggctgacgaagagcctgaagatgatgtgctgatgcagaaagcggcagggcttgccggaggtgtccgctttggcccggacgggaatgaagttatccctacttccccggatgtggcggacatgacggaggatgacgtaatgctgatgacagtatcagaagggatcgcaggaggagtccggtatggctga

SEQ ID NO: 159066 - DNA, 2562 bp, Enterobacter cloacae
atggctgaaccggtaggcgatctggtcgttgatttgagtctggatgcggccagatttgacgagcagatggccagagtcaggcgtcatttttccggtacggaaagtgatgcgaaaaaaacagcggcagtcgttgaacagtcgatgaaccggcaggcgctggctgcacagaaagcgggaatttccgtcgggcagtataaagccgccatgcgtatgctgcctgcgcagttcactgacgtggccacgcagcttgcaggcgggcaaagtccgtggctgatcctgctgcaacaggggggtcaggtgaaggactccttcggcgggatgatccccatgttccgggggcttgccggtgcgatcaccctgccgatggtgggggccacctcgctggcggtggcgaccggtgcgctggcgtatgcctggtatcagggcaactcaaccctgtccgatttcaacaaaacgctggtcctttccggcaatcaggccgggctgacggcagatcgtatgctggtcctgtccagagccgggcaggcggcagggctgacgtttaaccagaccagcgagtcactcagcgcactggttaaggcgggggtaagcggtgaggctcagattgcgtccatcagccagagtgtggcgcgtttctcctctgcatccggcgtggaggtggacaaggtcgctgaagccttcgggaagctgaccactgacccgacgtcggggctgacagcgatggcgcgccagttccataacgtgacggcggagcagattgcgtatgttgctcagttgcagcgttccggagatgaagccggggcattgcaggcggcgaacgaggccgcaacgaaagggtttgatgaccagacccgccgcctgaaagagaacatgggcacgctggagacctgggcagacaggactgcgcgggcattcaaatccatgtgggatgcggtgctggatattggtcgtcctgataccgcgcaggagatgctgattaaggcagaggctgcgtttaagaaagcagacgacatctggaatctgcgcaaggatgattattttgttaacgatgaagcgcgggcgcgttactgggatgatcgtgaaaaggcccgtcttgcgcttgaagccgcccgaaagaaggctgagcagcagactcaacaggacaaaaatgcgcagcagcagagcgataccgaagcgtcacggctgaaatataccgaagaggcgcagaaggcttacgaacggctgcagacgccgctggagaaatataccgcccgtcaggaagaactgaacaaggcactgaaagacgggaaaatcctgcaggcggattacaacacgctgatggcggcggcgaaaaaggattatgaagcgacgctgaaaaagccgaaacagtccggcgtgaaggtgtctgcgggcgatcgtcaggaagacagtgctcatgctgccctgctgacgcttcaggcagaactccggacgctggagaagcatgccggagcaaatgagaaaatcagccagcagcgccgggatttgtggaaggcggagagtcagttcgcggtactggaggaggcggcgcaacgtcgccagctgtctgcacaggagaaatccctgctggcgcataaagatgagacgctggagtacaaacgccagctggctgcacttggcgacaaggttacgtatcaggagcgcctgaacgtgctggcgcagcaggcggataaattcgcacagcagcaacgggcaaaacgggccgccattgatgcgaaaagccgggggctgactgaccggcaggcagaacgggaagccacggaacagcgcctgaaggaacagtatggcgataatccgctggcgctgaataacgtcatgtcagagcagaaaaagacctgggcggctgaagaccagcttcgcgggaactggatggcaggcctgaagtccggctggagtgagtgggaagagagcgccacggacagtatgtcgcaggtaaaaagtgcagccacgcagacctttgatggtattgcacagaatatggcggcgatgctgaccggcagtgagcagaactggcgcagcttcacccgttccgtgctgtccatgatgacagaaattctgcttaagcaggcaatggtggggattgtcgggagtatcggcagcgccattggcggggctgttggtggcggcgcatccgcgtcagacggtacagccattcaggccgctgcggcgaaattccattttgcaaccggaggatttacgggaaccggcggcaaatatgagccagcggggattgttcaccgtggtgagtttgtcttcacgaaggaggcaaccagccggattggcgtggggaatctttaccggctgatgcgcggctatgccaccggcggttatgtcggtacaccgggcagcatggcagacagccggtcgcaggcgtccgggacgtttgagcagaataaccatgtggtgattaacaacgacggcacgaacgggcagataggtccggctgctctgaaggcggtgtatgacatggcccgcaagggtgcccgtgatgaaattcagacacagatgcgtgatggtggcctgttctccggaggtggacgatga

SEQ ID NO: 159067 - DNA, 330 bp, Enterobacter cloacae; identical to SEQ ID NO: 39306

SEQ ID NO: 159068 - DNA, 699 bp, Enterobacter cloacae
atgcaggatatccggcaggaaacactgaatgaatgcacccgtgcggagcagtcggccagcgtggtgctctgggaaatcgacctgacagaggtcggtggagaacgttattttttctgtaatgagcagaacgaaaaaggtgagccggtcacctggcaggggcgacagtatcagccgtatcccattcaggggagcggttttgaactgaatggcaaaggcaccagtacgcgccccacgctgacggtttctaacctgtacggtatggtcaccgggatggcggaagatatgcagagtctggtcggcggaacggtggtccggcgtaaggtttacgcccgttttctggatgcggtgaacttcgtcaacggaaacagtgacgccgatccggagcaggaggtgatcagccgctggcgcattgagcagtgcagcgaactgagcgcggtgagtgcctcctttgtactgtccacgccgacggaaacggatggcgctgtttttccgggacgtatcatgctggccaacacctgcacctggacctatcgcggtgacgagtgcggttatagcggtccggctgtcgcggatgaatatgaccagccaacgtccgatatcacgaaggataaatgcagcaaatgcctgagcggttgtaagttccgcaataacgtcggcaactttggcggcttcctttccattaacaaactttcgcagtaa

SEQ ID NO: 159069 - DNA, 744 bp, Enterobacter cloacae
atgacacagacagaatcagcggttctggcgcacgcccggcgatgtgcgccagcggagtcgtgcggcttcgtggtaagcacgccggagggggaaagatatttcccctgcgtgaatatctccggtgagccggaggcgtatttccgtatgtcgccggaagactggctgcaggcagaaatgcagggtgagattgtggcgctggtccacagccaccccggtggtctgccctggctgagtgaggccgaccggcggctgcaggtgcagagtgatttgccgtggtggctggtctgccgggggacgattcataagttccgctgtgtgccgcatctcaccgggcggcgctttgagcacggggtgacggactgttacacgctgttccgggacgcttaccatctggcgggaattgagatgccggattttcatcgcggggatgactggtggcgtcacggtcagaatctctatctggataatctggaggccacagggctgtatcaggtgccgttgtcatcagcacaaccgggcgatgtgctgctgtgctgctttggttcatcggtgccgaatcatgccgccatttactgtggtgacggcgagctgctgcaccatattcctgaacaactgagcaaacgagagaggtataccgacaaatggcagcgacgcacacactccctctggcgtcaccgggcatggcgcgcatctgcctttacggggatttacaacgatttggccgccgcatcgatctgcgtgtga

SEQ ID NO: 159070 - DNA, 543 bp, Enterobacter cloacae
gtgaaaacgggggccgaagccatccgggcgctggccatgcagatcccggcgtttcgtcagaagctgagcgacggctggtatcaggtacgcattgccgggcgtgatacaggtgaaacggaattatcagcccgtcttaatgaaccgctggcaaatggtgctgtgatccatatcgtgccgcgtctggcgggagccaaaagtggcggtgtgtttcaggctgtgctgggggcggctgttatggcggttgctatatggatgccgggggtaggaattatggcgagtaatctgctgttttctctcggtgccagtatgacgcttggcggtgttgcacagatgctggcccctaaacccaaaaccccccgcacacagacaacggataacggcaaacagaacacctatttttcttcactggataacatggttgcccagggcaatgttctgcctgttctgtacggtgaaatgcgcgtggggtcacgcgtggtttctcaggagatcagcacggcagacgaaggggatggtggtcaggttgtggtgattggtcgctga

SEQ ID NO: 159071 - DNA, 3480 bp, Enterobacter cloacae
atgggtaaaggaagcagtaaggggcataccccgcgcgaagcgaaggacaacctgaagtccacgcagttgctgagtgtgattgatgccatcagtgaagggccgattgaaggtccggtggatggattaaaaagcgtgctgctgaacagtacgccggtgctggacagtgatgggaataccaacatcgccggtgtcacggtggtgttccgggctggtgagcaggagcagactccgccggagggatttgaatcctccggttccgagacggtgttgggtacggaagtgaaatacgacacgccgatcacccgcgccatcacgtcggcaaacatcgaccgactgcgctttaccttcggtgtgcaggcactggtggaaaccacctcaaagggtgacaggaatccgtcggaagttcgcctgctggttcagatacagcgtaatggtggctgggtgacggaaaaagacatcaccattaagggcaaaaccacctcgcagtatctggcctcggtggtggtggataacctgccgccgcgcccgtttaatatccggatgcgcagaatgacgccggacagcaccacagaccagctgcagaacaaaacgctctggtcgtcatacaccgaaatcatcgatgtgaaacagtgctacccgaacacggcactggtcggcgtgcaggtggactcggaacagttcggcagccagcaggtgagccgtaattatcatcttcgcgggcgcattctgcaggtgccgtcgaactataacccgcagacgcggcaatacagcggtatctgggacggaacgtttaagccagcatacagcaacaacatggcctggtgtctgtgggatatgctgacccatccgcgctacggcatggggaagcgtctcggtgcggcggatgtggacaaatgggcgctgtatgtcatcggccagaattgcgaccagtcggtgccggatggctttggtggcacggagccgcgcatcacctgtaatgcctacctgaccacacagcgcaaggcgtgggatgttctcagtgatttctgctcggcgatgcgctgtatgccggtatggaacgggcagacgctgacgttcgtgcaggaccgaccgtcggataaggtgtggacctataaccgcagtaatttggtgatgccggatgatggcgcgccgttccgctacagcttcagtgccctgaaggaccgtcataatgccgttgaggtgaactggattgacccggataacggctgggagacggcgacagagcttgttgaagatacgcaggccattctccgttacggtcgtaacgtcacgaagatggatgcctttggctgtaccagccgggggcaggcgcaccgcgccgggctgtggctgattaaaacggaactactggaaacgcagaccgtggacttcagcgtgggtgcggaagggcttcgccatgtgccgggcgatgtcattgaaatctgcgatgatgactatgcggggatcagcaccggcgggcgcgtgctggcggtgaacagccagacccggacgctgacgctcgaccgtgaaatcacgctgccatcctccggtaccacgctgataagcctggttgacggaagtggcaatccggtcagcgtggaggtccagtccgtcaccgacggcgtgaaggtaaaagtgagccgtgttcctgacggcgttgccggatacagcgtatgggggctgaagctgccgacgctgcgccagcgcctgttccgctgcgtgagtatccgtgagaacgacgacggcacgtatgccatcaccgccgtgcagcatgtaccggaaaaagaagccatcgtggataacggggcgcactttgacggcgaccagagcggcacggtgaatggtgtcacgccgccagcagtgcagcacctgactgccgaagtcaccgcagacagcggggagtatcaggtactggcccgctgggacacgccgaaggtggtgaagggcgtgagtttcatgcttcgcctgaccgtggcagcggatgacggcagtgagcggctggtcagcacggcccggacgacggaaaccacttaccgcttcacacaactggctctggggaactacaggctgacagtccgggcagtaaatgcgtgggggcagcagggcgatccggcgtcggtatcgttccggattgccgcaccggcagcgccgtcgcggattgagctgacgccgggctattttcagataaccgccacgccgcatcttgcggtttatgatccgacggtacagtttgagttctggttctcggaaaagcggattgcggatatcaggcaggttgaaaccacagcacgctatcttggcacggcgctgtactggatagccgccagtatcaatatcaggccgggccataattattatttttacgttcgcagtgtgaacaccgttggcaaatcggcattcgtggaggctgttggtcagccgagtgatgacgcatccggctatctggattttttcaaaggcgagatagggaaaacccatctggctcaggagctgtggacgcagattgataacggtcagcttgcgcctgacctggctgaaatcaggacatccattacggatgtcagcaatgaaatcacacagaccgtcaataagaaactggaagaccagagtgcagcgatccagcagatacagaaggttcaggttgatacaaataataatctgaacagcatgtgggctgtgaagctgcagcagatgcaggacggacgcctttatatcgcgggtatcggtgccggtattgagaacacccccgacggcatgcagagtcaggtgctgctggcggcagacaggattgcgatgattaatcctgcaaatggcaacacaaaaccgatgtttgttggtcagggtgatcagatattcatgaatgaagtgttcctgaaatatctgacggctcccaccattaccagcggcggtaatcctcctgcattttccctgacaccggacggaaagctgaccgctaaaaatgcagatatcagtggcagtgtgaatgcgaactccgggacgctcaacaacgttacgataaatgagaactgtcagattaaagggaaactgtcagccaaccagattgaaggcgatattgtcaaaacagtgggtaaggctttcccgcgggactcccgggcaccggagcggtggccatcagggaccattaccgtcaggatttatgacgatcagccttttgacaggcaaattgttattccggcggtggcattctgcggcgctaaacatgagcgggagaataacgatatttattcgtcatgccgcctgatagtgaagaaaaatggtgctgaaatttataaccgtaccgcgctggataatacgctgatttacagtggtgttattgatatgccagctggtcacggccacatgacgctggagttttcggtgtcagcatggctggtaaatgactggtatcccacagcaagtatcagcgatttgctggttgtggtgatgaagaaagccaccgcaggcatcagtatcagctga

SEQ ID NO: 159072 - DNA, 600 bp, Enterobacter cloacae
atgcgtaaagtttgtgcagccattttgtccgcagccatctgtctggccgtatccggtgcgcctgcatgggcgtctgagcagcaggccacactgagcgcagggtatcttcatgcccgtacgaacgctcccggcagcgataatctgaacgggattaacgtgaaataccgttatgagtttacggacacgctggggctgattacgtcattcagttatgccaacgctgaagatgagcaaaaaacgcattacagcgatacccgctggcatgaagattccgtgcgtaaccgctggttcagcgtgatggcggggccgtctgtgcgcgtgaatgaatggttcagcgcgtatgcgatggcgggtgtggcttacagccgtgtgtcgactttctccggggattatctgcaggtgaccgacaatacggggaaaacgcacgatgtgctgaccggaagtgatgacggtcgccacagcaacacgtctctggcgtggggggctggcgtgcagtttaacccgaccgagtccgtggccattgatgtcgcttatgaaggttccggcagtggcgactggcgcactgacggtttcatcgtgggtgtcggttataaattctga

SEQ ID NO: 159073 - DNA, 591 bp, Enterobacter cloacae
atgtctcgaatttttgcttactgtcggatatcaacgctggatcagaccaccgaaaatcaacgccgggaaatcgaaagtgcaggttttaaaatcaaacctcagcaaataatcgaagaacacattagcggctcagcagcaaccagtgagcgtcctggttttaaccggttgcttgctcgcctgaaatgtggtgatcaattgattgtgacaaaactggatcgccttggttgtaatgcaatggatatcaggaaaacagtggaacaactgaccgaaacaggtatcagagtgcattgcttagcattgggtggcattgacctgaccagtccaacaggaaaaatgatgatgcaagtaatttcagcagtcgctgaatttgaacgagaccttttacttgaacgcactcattccgggatagtaagagcccgcggcgcagggaaacgttttggtcgaccacctgtgttaaatgaagaacagaaacaggtggtattcgaacgaattaagtcaggtgtaagtataagtgccattgcccgggaattcaaaacctcgcggcaaaccattttaagagccaaagcaaaacttcagacacctgacatataa

SEQ ID NO: 159074 - DNA, 234 bp, Enterobacter cloacae
atgaaatcaaaagacaccctaaagtggttccctgcgcagcttcctgaagtaagaattatcctaggggatgctgtagtggaagtagcaaaacagggaagacctatcaataccagaacattgcttgattacattgaaggaaacataaagaaaaaatcatggctggataacaaagaattattacaaacagcgatatcagttcttaaagacaaccaaaatttaaatggtaaaatgtaa

SEQ ID NO: 159075 - DNA, 516 bp, Enterobacter cloacae
atggccagaaaacctaaagaaatcaaaacagacccgttagaggtcatcctgtggaaagcggctgacaagctacgtaagaacattgatgcagccgagtacaagcatgtcgtgctgggcctcattttccttaagtatatttctgattcttttgaatctcattatgagttgctgaaggctggtgaaggcgagttcgcaggcgctgacccggaagataaagacgagtacaccgcttacaacattttctttgtccctgagcttgcacgctggaactatctaatatctaaggccaagctacccgaaatcggtaagctggttgatgatgctatggagcttatcgaagcgggtaacccacagctaaaaggtgtgctgccgaaagtctacgctcgtcagaacctcgacgccactgtgctgggtgaactgatagatctgattggcaacattgcgctgggagatgctaaagcgcgttctgctgatgtattaggccacgtattcgaatacttccttgggctttgttga

SEQ ID NO: 159076 - DNA, 276 bp, Enterobacter cloacae; identical to SEQ ID NO: 129452

SEQ ID NO: 159077 - DNA, 321 bp, Enterobacter cloacae; identical to SEQ ID NO: 127019

SEQ ID NO: 159078 - DNA, 240 bp, Enterobacter cloacae
atgccccgaatttcagatattcaggccgcctttattgcggccatagagcttaacccaaagggctaccgctacctgagaacagaccgcttcatacaaaagttgcgtggttttaactggcactttacccgtgacgatgcaaacaagtggatagagcgcaaccaacctggtttcgctgataaaacgacagacggtagcgaaaaccgttactggatcttgcgtaacatggggagggtgcactga

SEQ ID NO: 159079 - DNA, 1296 bp, Enterobacter cloacae
atgtccgcaggaacactgactctgacgaataattcagccgcggtaacaggcagcggtaccgcctttaccaccgagctggccgtcggcgattttattgttgtgacggttggcggcatcccttatacgctcgccatcaaaacggtgaacagcaatacctcccttacgctggtcagtaactataccggaccaacgcagggcggcgcagcatggtatgccgtgccgcgcgttgcgatgaaccttgttactgctgcgctggtggcacaaagcgcagaagccctgcgcggactgaactatgacaagcagaactggcagcggttattcagtgcatcgggaaatataaccgttacgctcccggacggttcttcattcaccggtccgtcatggcagtacatggttaatacggttgccacaaaaacgaacggggcggttcctgttaaccagggcgggaccggggcaacgaatgccgctgacgctcgcacaaacctcggtttgggaagtagcgcgacacgggatgcttacagctcttcaggaaaaatgctttctgagggggatttcggtgttggtgggaaatcgctcaatttatcatgggattcgcttgcaggaaaaaatcaattcaactcaaactcaaatggtgcatttcagggcggtaatgttgttctttttggtgtcagtatttcacaccatgcaaatgatgcatatgcttatcagatagcgggccggggaacatatggcattattcatcgttcacttgaaggtggtgtatatgggcaatggagaacctgttacgacactggtaatacaactaaggcgagtgatggcacactaaaagcggcatcgcctgttgctcgcattgttaagtctcaggaagagaaccagcgcacggatatatccgaggatggttttgcatggtgcggctgcggtactgcgaacaccgaagctgaaggaatcaaaatttcccgggtcgatgttggtgtttatgtgctgacaggttcggcaggcctggcatcagaaggctggcagctgctgccgccaatggacccgggtggaatgggagaactgggtgtagttgaagctgagcagacagaaagcggtgggctgacgattcggctttttaagcggaaatacatactcaacgaagaaggcgaaattgttaaaacgaaaggggctcctatagatgttcctgccaacagctggatcgacgttcgccttgatatgccagaggatagcatctggaaaacaagagcttccgaagcttctcttgaactgacagagcagcctgaggacattcagccttaa

SEQ ID NO: 159080 - DNA, 183 bp, Enterobacter cloacae; identical to SEQ ID NO: 17660

SEQ ID NO: 159081 - DNA, 180 bp, Enterobacter cloacae; identical to SEQ ID NO: 17661

SEQ ID NO: 159082 - DNA, 357 bp, Enterobacter cloacae
gtgagtgcaccggcaaccattcttgatatgtgctgtggcagccgcatgttctggttcgataagtctgacgaacgggcgatattcagcgatatcagaaaagaaggatacacattacgcaatgggagacgcttgattatcagccctgacattatcgcagattttcgtgcattatcatttgcagacgcatctttttcgatggttgtattagaccctccgcatcttgagagtgttggtgataacgcctggatgggaaagaaatatggacggctgaataaagatgcctggcgtgatgattcgcgacagagatttaaagaagcctttcgggtgttgaggccgcacggcgttctgattttttaa

SEQ ID NO: 159083 - DNA, 966 bp, Enterobacter cloacae
atgagccttctttttgctgaacgcccactggttataaacacgcagctggcaatgaaaattggcttaaacgaagccattgttttgcaacaactgcactactggttgagagataccaactccggcatggaatgtgatggtgttcgctggatttataacacaacggaacaatggctggaacagttcccattctggtcagagtcaacgttaaagcgcgcgtttgcaagtctgaaaacgctggggcttttgcgttgtgaaaagctcaataaatcaaagcgcgatatgaccaatttctacacgatcaactatgggagcgagcttttagatggtggcaaattgagcgaatccatcggttcaaaatgcgccgctccatcaggtcaaaatgacacgatggaagaggtcaaaatgaaacgctccattggttcaaaacgacccaatgtcatcgggtcaaaatggcctgatgatcttacagagaatacaacagagattactacagagaataaaaacacttttcgtccggaagcttcgcaaccggacccgcagacgactgaacaggattctttaacccggaactccgacgcggttgtgtttagtgcgaaaaaacgccagtggggtagcagggaggatttggcgtgtgcgcagtggatctgggggcggatcgtgggtctctacgaacaggcagccagtgatgatggcgagatcatgcgaccaaaagagcctaactggactgcctgggccaatgacgtgcgcacaatgcggatgctggatggcagaagccacagacaaatttgcgaaatgtttggtcgggttcagcgagatccattctgggtaaaaaacatcatgagcccgtcaaagctccgcgaaaaatgggacgaactggtcatccgcctgggacgttcacctgtacagcgttgtgttaatcatatttctgaaccggatacagaaattccgcctggtttcagaggataa

SEQ ID NO: 159084 - DNA, 522 bp, Enterobacter cloacae
atgaaaatcactcctgaacaggctcgtgaggctctggatgcctggatatgtcgaccaggaatgacacaggagcaggcgacgatattaatcactgaagcattctgggctttgaaagagcgcccgaacatcgatgttcagcgtgtcacagatgaaggtggcgcggttgatcagcgagcgcttggtgttaatcgagtgaagatattcgaacgctggaaggctatcgacaccagggataagcgtgaaaagttcacggcgctagtgcctgcgattatggaggctatccggattagtgatttcaggttgtatcgtgaaattactgacggaaaaagcatcacgtgcatgatcgccgggttaaacaaagaatatggcgatgtggtggagtccggactgctttttgctgatcctgccgtagtggatcgtgaaactgacgaacttatagaaaaagcaattgctttcaagcttgcgtatcgacagcaataccaacaaaaagctggatggaattatgagccttctttttgctga

SEQ ID NO: 159085 - DNA, 228 bp, Enterobacter cloacae
atgcttaaagttgacgcaattactttttttggcagcaaaacaaagcttgccaatgccgcaggagtgaggctggcaagtgttgctgcttgggggatactggttcctgaaggtcgcgcgatgcgtctacaggaggcatctggcggggagcttcagtatgatcccaaagtttatgatgaatatcgtaagacgaagcgggcggggcggttgaacaatgaaaatcactcctga

SEQ ID NO: 159086 - DNA, 219 bp, Enterobacter cloacae
atgcagaaacgagaacccgtcatcatcgcgccagactataccgatgatgaactttatgagtggatgcgccagaaaattaatgcagcgcaggatttgaaatgggccaatgaaaccagggctaagcaggctgaaaatctgtccgctctggagcaggatatcaccaatctggaaaaagcagcggcattaagcattgccagaatgattacatacccgcgttag

SEQ ID NO: 159087 - DNA, 1065 bp, Enterobacter cloacae
atggccttgggtacccagggctacaataggatcctttacttcgttcgcagcatcagcaatcccattttgcggtctgagcaatggattatgacacgctggaacaataaacaactgccggtaataaactcgatatcatatgacgagactaacaagcagctggatgtactggcgtcacttgaaggcgatggtaactggttcgactcggtctcattgagggaattttatctttccgataagaacaccggtacccggatgtcacccacaggcgtaatcaaatctcgtatctcaggtaactacacgattgcttatgatttatcccgtcagtctgaaggaaaatacaacgttgaggtcaacatcagggacttcttccagaaccagaccaataaaactttcggagaaattgctctggataacactcctccgacagtggccataacattcgacggaaagccggtaaaagacgatacggtagtgtacggcctggagaacctcaggatcgctctggcagataatctgacaaccccgaggataacccgtcttcagctcgtaggtggccccacagctgataacgttgagcttacgtggtcaccggcaggcaaagatacatacatgcctgagtatccgaggctgttcccaaatttcgaaccatctgaaaattattcaattagcgtaacagttgccgatagtcagtcgaataccaaaacctatactcagaagttcagttatctaccgaataaccttgtgcagttacataatctacgcacattatcggtcagttcgcctctcaaaacgacagatggcgtaccccttgcgtacctgtccactaacgttctgcgtaagacaaatggagaaattgctaaaggggtccagaacgcaacgctgactgtgcggaaggatgcagccttcggtattaaatttaacggggcacaggcggctccaggtgagtcagttgaggtgcaaatagatatgggccagggggataatcttctgttacccgtttatccttccgaaaatgggaaagttggcacctcagaattcatgattcagatcgacgagttgaagtaa

SEQ ID NO: 159088 - DNA, 2088 bp, Enterobacter cloacae
  misc_feature (2062)..(2071): n is a, c, g, or t
atgtcagattcgaagaggactaacctccatgcacaagagaatttttatcggcctattcttgagtatcgtagtgcctcaatacttttgatttgttcggtttctatgctttatatgggactttcttcagacggactggacatcgccccaatagttctgttcacctcaatattgctttttttgctgtgcctttatcgttgcaaaacagcagcgccatttttgatggctcattggcgtgtattcaagcgacatttcatgttcgttagtcttgattcactgcgtgtaattaacaaaagtaactttttctccaatgagcgaaagtatcgtcaactggttcaggattatcaaaataaaaataaggatatacccgagcgaaagtcctatttttgtgatgggtttgagtggggtccggaacatgcggatcgggcatatcaaatagctaacctctccagtgataaacgtgagatcgagttgccattcgtcttcaacccaattaagagacattttgacgcaatggctcgtaagatgggcggcagcaatgcaatttttgctgtggaacgtagggaacccatatttgtaactgaagacaattggtttggtcatactctgataaccggaaacgtgggtaccgggaaaacggtgctacagcgtttactaagcattagcatgcttcatcttggtcatgttgttgttgtcatagatccaaagaacgatgcagagtggcgagaatctctaatggaagaggctaagaccctcggtcttcctttctataaatttcatcctggccagccagcatcttcggtctgtattgatgtctgcaacacctatactaatgtttctgacctaacatctcgtcttttgagcttggtgacagttcccggtgaggttaacccattcgttcagtatgccaaggctctcgtttccaatgtgatttccgggctttcttacatagagaaaaagccttctatttatctgattcacaagaacatgaaaagccacatgtctattgtgaatcttacagtcaaggtaatggagtcatgttacgcgagatattatggttacgatgtctggaccgaaaaagttaagtacgtcgctaacgataccttgccggtacgtttcaagcgtctcgctgaatggtttacggctcatttcatgaattacgaggggtccgaacaaatagactggttagatactgtttcccagcttattgattactcaatgtccgacccagagcatatggctaaaatgaccgcaggtattatgcctgttttcgatatgctcattgaaaaacctttaaatgagcttttatctcctaacccgaactcagtatcatcaagagaaattgtaacaagcgaagggatgttcagcactggcggggtgctatacatttcgcttgatggcctttcaaaccccgatacagcagctgctatttctcaattaataatgtcagatctgacctcctgtgccggtagtcgctacaacgctcaagatggtgatatgtcagctaattccaggataagtatttttgttgatgaggcacactcagccattaacaaccctatgattaaccttctggcgcagggtcgtgcagcgaaaattgcactgtttatttgcacccaaaccatctccgactttattgctgcggcaagtgttgaaactgccaatcgaattacggggctctgcaacaattatataagcttgcgagtcaacgatactcctactcagacgcttgttgtagagaactttggtaagagtgcgataagcacaaatatggtcacttatacgaccggttcagaaacatctttgccgcataataacttctcaggttcaatctcagaaagaaagcagacaactttagaagagagtattccaaaggatctcttgggtcaggtccctatgtttcacatagttgccaggcttcaagatggcaggaaggttgtaggccaaatccctattgctgttgctgagaaacaaatgaagccaaacacaactctgtcggaaatgcttttcaagaaggccggaaaagttactttgcgtcaaaatctcgatatcaaaaatcttaatnnnnnnnnnngttgcattgatggatga

SEQ ID NO: 159089 - DNA, 1140 bp, Enterobacter cloacae
  misc_feature (1110)..(1119): n is a, c, g, or t
atgatcaccgccctaaacgtttatactgatgggaatgactttttgtctaaatgcgtgaggaccgctgatttctattctactggtacagaccttaatgttttacgtgaccctatcatgggtctgcgttctaatgatgcagcagcaagggccattagtaccatcaagcacaactttaccagtatcaatatcaacaattacaatgctaagcctatgcacatcattatcgtaaatggtgaggtataccttaacgagaacgcattccttgattttgttctcaatgatttcgaattacataaatataacttccctcagggagaggctggtaagaccgtattggtagaatccctagttcaacgtggttacgtcgagccctatgatgatgagcgtgtcgttcactacttcattccgggtatctattcggaaaacgaaatatcaaacatctttagaaatgggatagggaaactagaattctataaccttcttaagctaaggtggattggtttaatctttgattcctataaaatccctgactcagtgccgggtctttttagcgttaatgccaataaagactttatttacattgacgagcaaaaaacagttactgaatacagaagaccagtgcccggtcgggacgttataactaaaattactgatactgttgagacggctgttcttaaggttaatgatttaggccgctcctctgcctctattgatgttgatatacattctaagaaaaatgaaggctcatccgacgattttgagaagaaagccgaaagtgataatgaaattgataatgacacgcagatagttaaatctgagggtgaggaagcagctgatcctgtcattcctgatatagaagaaagtgaagatgaatcggcaaaggacacggaatcccatgtcctggtcaaccaacttcatgaactccttttaagcgctccactttccaatgactatatagtgtgtgttgatgctgtcccctacctcaacatagataccactatggcattgctgccgggattagatgaaaaagcattcagtgaagagccctatttccaactgacattcagagaaggctctctcgatggaatgtggatagtaagggacattgannnnnnnnnncttctatgtatcaggcattag

SEQ ID NO: 159090 - DNA, 792 bp, Enterobacter cloacae
atgtccagcttcggtataggtcagcttaagcagatggcaatgaagaaagcctacgaattgctaccagatacagttcgtgactttgtctttaagaacgttgctactaccggaggagaggttgtcttctcggctgcggttcaaaactttatgcttgcattaaacgtgatcggttggatttatacagcctatcaggtcactaaaatgcttttagaaatgttggtagcatgcgaccagaaagagatggaagcttctattcataagaatcaaaaatcctgttttacattagatacggaacgatgcgtcaaatatctgaatgttggtttcacaaagaaatgcgttaaaaaagcaacagacatgtgctgttataattccatgttgtcacgcgttattatgcaacaagcttatccgcaattaggaatagaccctgtcgcctctaattgcgtggggctatcaataaagcaaatacagcaactggatttcgataaaattgatctgacggagtggattaatgatgcagttcaggtaggagaagttcctgatcaatattcaaaattctccgaagaatcaattgtggaaaacttaccattccagaatgagaactatcaacttccatcagaacgtaccaaggaagcaatgggcggtgaagaaaatatgataaaggccagacaagaaaatgctcaggctataaaagaggaaaatgtagattgtagctatttacctcgaccggccatatgtgaggtaggttcaactacgctggatccggttacgggcaagcagttgccgaaatattga

SEQ ID NO: 159091 - DNA, 627 bp, Enterobacter cloacae
atgattccgtattccgtctggaacctcaagggaggtgtagggaagagccatactagtctaactctctccgggtatctggccaatcagggtaagcgtgtggcactggttgattatgacccacaaaacggggctatgatctgttcagacattgccaaagcaaatggaagccctttaccctttttggttgttaaaagcctgagtgaaataaaccgcgacgagatagatgctgttgtgttcgatcactccccaggtgttaaccctggcggtcagcttgcccctatcgttatcattccgactatcctcgatgcagcaagccattcaatcactatcaagagtgttcacgaactggacggaacggacaagctctgtatcgtcattcctaatcgtgtagaactgcaaaacaaagagcataaagacctgctcgaaatgcagtttgaaaatgtcccctacatgaagaagcgagtctcttactctcgtgcctacggcatgggtgtaactatctattcggaaggtacaggcttaccgaacctggggatcactcgccaggagttcgacggtgtagctaaatacattcataaacgaatcgaaaaacacattgctgatatgaaagcaaaagagaaggcataa

SEQ ID NO: 159092 - DNA, 336 bp, Enterobacter cloacae
atgagcaagaaaaaaaactcatggcttgatgatatgcagtcgtttgaaaagattgccgttgaaacagctttcaatgccggtgactcttactggtcgcacgaatattttgcacatagtaataatgctgctcatgtcgtcactaatgtaaaaataagagcaaaagaagacgaaacccgtttaaccaatattcgtattcctgcacaactggaagctgttcttgcacagatcgcccctggtgttcctatcgctacggctttattggtgcttgcagatttaaaagccagcgagcttgttaaggaaaataaagccgtaaaaatatcgaataaaggggagtga

SEQ ID NO: 159093 - DNA, 1911 bp, Enterobacter cloacae
atggcaaaagttaatgcaaaaggtttaaaaacatataaccatcagggttttttaacttcaaactcaggagcaaacagcagtgatagtcctctatacccaacacaagaagatgcttattatatcgatgcctggtcaggtatagagattacagatccaaatcctgcaaaacttgttaaagatatagaggaaggtgtatacgataaagttcatttccctacaaaaagatttcttaacgatttaaaagtgaaagatcttgcaggtggtttaaagaaatttaataagcttcacgagcttgatgaacaaccggaaggtgagcactttgtcttttatcttgatggtgttcccaagcacctacaatcaaaaaccagggaaattatcataagagaaatctctcaccccgattttatattcagaaaagaacagaatagcggtagaaaaccacagattatagtcaataaaggtctgcaaagtgtgcttgcctgggggattcaccgcaaccagacagatcatttgggaaatgtaattccagaccatttccacctcttccgttctgctcattgtatcaccgataagaattatggtgtttcaacgaatgataaaggagagtttattccatttataaatgcagcaaatcctaataaaagaattgtcaatgctgctttattactaaaagataacaaagtaagaacgattgttgaaaaccagataaatatggctttggcagcggctgggatagaagcaacggtaacccttggttctttacaagaggaaattggtgcgacagatgaaattaaatcagaaaaattaaaaaaagaagcagaagaaaataataagcctcttgctgatgtagcacaagaacatatcaatgacgaatctcttgatgatgaagaaatttccgactctttaatgcaacatggaaatctttcagaacaatccatagaaaaacttgagtctataattaataaaacagcatttgacagtaatgaacaagtaagaagaaaacaggctcagataaaagagctaatggctgaacttgtcgaaagagaacaggaattacaagctatcaataaaggtatcctttatgaagctaaatacattcatgctaaaaatcttttaaatgaaacttcaagaaagcttgaatcagtaaataaagagcttgaagagtctaataagctgaatgacgagttcaatgaaaaaatcattgaaaacacaaataccatctctaacttaaatgacgaattagcaagagaaagaaaatataacgaagaacaagaattacaacttaaccagttagaagcagatcttgaactcgaaaaaaatataaatgcgaaaaactccgagcttattacaactcttaccgataagaatgctgctttagcggctaatctggaagttgagcaagagaaaacagcagaactgacagccgaaaatgcagaacttaaagagaagcataaagttgagatcgctactctccgtagtgagttcgctcagaaactggttaaataccgtaaaaactttgtggctcgtgtcagaaacaaagtggcaacggctgttgaacatgcaattcaggcatttaaagataaccaattgccatcattgcttaaagatgcaacaaccaaagcagtgagtgaatataaattaaaagaattacctggcaagcttaaaaaggtaagagaagaagaagctacaaaatcagcaaaagaaattaaagcattaaccaacgatgttaataccttaacggctgataaagatacattgcagaaagattttgacgaattgttcaatgccagcaaagaaaaagcaacggaaatgaataatgaaattgctcgccttaaagaaattcttaaaagcaatggaataaaccccgatggtgataactcaccaaaaaagcctaaaaacgataagaagtaa

SEQ ID NO: 159094 - DNA, 741 bp, Enterobacter cloacae
atgaacataaacaacaataaggacagaataaaagaaatagagagtcttggtgtaagcggggaggaaactccccttaccccacctgatggcattgtgggtgcgattaatgagttaagggaagaagagtgttctcttcccgatcccttgttcgtcggcaagctggttaaccctctcattatgaaagataagccaggttatgctaaaaaaatgaaggaaagaaagcatattacttttaaacctaatgaagacgggttagatttacttgaatgttattataatgatttttatatcgagctttacactcgtgattataatgaacatttacaggctatacctaaaaagaatttagaaaagctggcaagagtcgataaaaaattccaaacctatatggaagaaaccgaatacacattttatgagaacatttcagagttgtttgatttattcggtgatacgatttacgaatggggtatggctacaccatcggtagatagcagtgttatattcacaaaagcagttttaacagaagccgtattaagaaatatgcctgtctatcctgatttaatgaatgaacagcaaggaagaattttaagaagattatttatcgacattaagcatgaatacaaaatggtttaccatccagagatgacaaaagaagtaagaacgacacactatatttgtggtaaaaattattatgagtctatgagtaaaaataaaagttatttattatcatcaggttattga

SEQ ID NO: 159095 - DNA, 2280 bp, Enterobacter cloacae
atgtacgatcctgatgctgtatcggaagaaactgaacaggaacaggaagaagaacagcttcaaatcgaagaaaacaatcttgataacgaatctgaaaatgaagaagagtatcaggaagacgatgaatacacggaagaagaagacgagcagaacgacgaataccaggcttcaacagtaattggagaagcacaggaagctggttcagaagatccatctaacaaactggacggactaccttcccctattcgcagaaagaaaaaagaaaaagaaataactctttatgaaagttttgtagggaaaattactacacatggtatgtatcatacctccagaaaatcagtaaaaggaaaagtagttgttaaagatattcttgttcataacttcccgattttaccagtagaagttattaaagcccttgatggcacaattgacgaatcagtaacttatattaaattggttttcaagagcatcgacggcgaatttaaagaagttattatcccttctggtgctgctaacgattttaaagaagtgaagaaagcgggttttcttgccccttccccattaaatcattcaaaagttcttgctcttattaatgatgttatttctaatggctcgttaaataaaaagacaggctattcccagtgtggctggacaagtgatttaatgcaccatatcagacccgacaatgatttgtatgtgggtaaaaaagtaaaagttacagaagttaaaggaagtgctgatttatatttcccaatgctttctgaatttgttttaaattgtcctcagatggcttttggtcttgcattcgcagcggctggatatatgcgagggtatattaccgtaacaactttaaccccgttctatatcctttacggtaaagctcatatgggtaaatctaaaacatgtcagcttatcgcaagcttgcagggcaacccgataaaagggaagggtaataatattgactggaatactactatgattggattccataaatttcttgcaaataataatcatggtgttttagttgttgacgaattagataacctgtttctaaaaaataacattgctcatgctgcaacaatgattatggatataacaaacggtggtggtcgagcttattcagaccagtacagaaacacttatcagggcgaaagctggaacaactctgttattgcttcaactaatctacgtattgaagatgtggcaggtggaacaatgaaagaacaagctttgttcactcgtctaatgcaaatcgatgtcgaagattcggttcttcataactacactggcggtcaatacaggctcgaagaactcactcagatcatgaatgaaaactacgggcatttctacccaaaagcgattgaacaaatcaaagcaaagggcaaggaatataaagcaagacttaaagaactttttaatgaattaacatctgatattaagctggttgacttgcagaacgaacctcgctcactcgaaatgctggctctcgctcaggttggtgctgaactggtcggtgatgtattaggtgaaaaagaaggtgcagcttgtcaggcagccgttgacattatcattgaacgattcaagagatcggaagacgaactcatatccaaaaagcaaaatgaagatgctaacacttatgaaatgctaaaaagtttcataacagataatgctcaaagattccgttgggaaaattatgcttattgccagggtaatcgcttagatatgaaaaagtctcagatagatcaggcgattgaattttccagtaatgcgacaaaagcaagtaccggtgcattaggtgttgttgtgcaggaaacggttatggatcatgccctggattacaacgggtatgtgttacttaatccgagtgcatttgatagccttgctcgttatgggatttcaaaagataagatgatttcagcagccaaaaatcttggaatgttgagagaacagggcggcaagaacactaaaaaacttagtgacaagtataaagcaatgctttctggattaagtcgtgcttacaaaattgaacttaaagacattagcgatatcctggaatttgaagtaccagaagttgcaccagaagaaaatctgaaggaagttgtacccgcgaaagagtcagatttcacgacagagcaccttccagagcacgggaacgggcaactttcccctgaaatggaacaacagttagacaaaatcatggaagactatgacaaattcggctttaccgactgggataacataggagcttccattcaaaatacaaccaacaaaggagagtga

SEQ ID NO: 159096 - DNA, 261 bp, Enterobacter cloacae
atgaaagacagatacacccttaaccagggcagaaatgcccttatagacagtgaagcagatcagccagtcaggattttttttaccaacaatgtttatgtgtgcaagactcaaacaggcatgtttaaggagcgaagccccgaagaactggcaagattgcttaaccgaacggcaaaccagcaaaaggtatcaacagggtttaaggcaggtagacccaaaacggtagaagaactatcgaagctgttagagaagaaccagaaataa

SEQ ID NO: 159097 - DNA, 252 bp, Enterobacter cloacae
atgactacttcacacgatttatcaactatcttaatggcatggggtgtattgtttttatgtgtatggcttactaagcattatacccgtttagaacttagtaatattctgacttctggaaaagtttctatccaatatgttgttgccaaccttgcttatcgtgctggcttcattgctttggttgttgcttgcctggcttcgttagcggtgtcaatcgggttttctgtcggttatttcggttcttattacccttaa

SEQ ID NO: 159098 - DNA, 411 bp, Enterobacter cloacae
atgaaaactaaattctcacaaaaactaaggcaatatcattataatgaaaaaaaactaagaagaagatatatagagttttgtatcctttgctatgtttcatattctgttttgatcgctacggtggtctttggattcttagcggaagatatatttcagttgtattctgctgtaatctttggcttgataatgtcaactctgacattcagatttagtctaatggcatatggagtaaagtatcaaacaacttacactcatggttttttcagaaccccaggggaatggcttcctgatttttcttataatacggtctggaaagaagaatggaatgaagaacccattgatatgttagcaatagaagaaactaaatctttaccatacaaaaaacctaacagcttcaatgacattatgtaa

SEQ ID NO: 159099 - DNA, 1152 bp, Enterobacter cloacae
atggcattttacaagaaaagaacttccagtgatcccggaatgagtaaagaagataaaatgaacttattcatggaaacacgaaaagcagaaattatagaatctcttaaccaattacccgacgataaacctatctggcaatcccccgtttttacaaccaaatacataaaccctgtgagtggtgctaaatataatattgaaaactccgttttgctgttaggtcaaatgagagaacgagctttaaagaatccagacgaaaaagaaaaacttcccttctttatgacttttaatcaggctaaaaattcgggtctaatcgttccaaaaggaacaaagtcttttgcgatattaaaaagattcgggaagaagtacgaagtaactaagctggacgaagcgacaggacaggaagagatagaagaaagattcaggagagcagcttcaatagatttcgtcttcaacatttcagatctggaaggagagctatcagcgaagctacaacgaaacatgagtatggggtttagtaaagccaccaatgaagaggcaaaagtcattctggaagcactggaagcgacctcaccggtgaagatcaccagggtaaccgactttaacagttcgtcaggctcttactatgtgccgtcagcagagtttatcaaccttcccccgtcttccctgttcaggaatgtcatagaagagatctccaccctggcacacgagatagcccactcctgggggcatagcagccgtttaaacagggaaaccctgaatacatacagccaggacaacaaagcacgagctgaggaggaactggtagcgaatgtggcaagccaggcagtcgttaatcattttggtctggaactcgacgacaagagacagtttgagtcctacgagaagaaccatgatacctatgattttggctgggcgaagcttcttaaagacaacccggacagcataacaacagctatccagaatgcagataaaacagcgggtaaaatgattgcagaagttgaattatggttatcgaataaattgaaagataatccagatcttgcagtatcggaatttattaaagacagaataaataaaaaacaggaaaaggaagaaacaccagaagaaaaccccactcctgaaatctccaccaggagaaaaccttctatctga

SEQ ID NO: 159100 - DNA, 606 bp, Enterobacter cloacae
atgagcttcgatccagaaataaacacaaaagaaaaatttcaagatttaatggatatatgcaaatccaattttcaaatgactgatgacgaagcaaagtgcttttacattatgatgaacagaaattcacataaacgaaacatgggaaatggtagacctgaaataataaccaatggattaccaaaaacaattctggaattatcaaaaaggcttgaggtttgggagggtatatatacaggaaacagcacagtaggcatggatggatatcctgcaaatatcacaatggaaagaaacaaggctcttatgaaggaaagcgattttattgatattttcgatttcatggtgtttgatcaaaaatacaatatcaaaaacatacctcaacctccgtcaaaacttacaatggcaagaatatttaaattccataaagaatctggtctaccactaaccactgatagaatgtctgtaagaaatttgaataatagaaagctttaccctatatacgaatcatgcgaacaaataatagcagaacatgaacagcaaaagatatcacaggttttccagaacggcacacccggcagcggggcaagtaaacccaaaagaagaatgtaa

SEQ ID NO: 159101 - DNA, 549 bp, Enterobacter cloacae
atggcattaagaatccgagacaaaaaagaaagagtaaatttattcctggaatactttgattgcacttatgaagtaaaaccacgaaccccatttaatcagcctgatgtgcttacaatgaatttttactatgccttaaagcttttctgtaaaaattacaatgaaatctatgatgcccctcatcactggaaagataaaataccagctttattcactggatataaaatgctttttgaaagtgaagagttaaaagtgtcttttatttgtggaacaatggcaaaaaaggcaagaataagggaaaagtatcatgtatctcatgctgttactttccgtgttccttatcactggaatggttcaagagaacccgtaggcattgccacctatcacctggcgattgataaaactttaaacgacgaacaaatagaacaagaattttacaaactactcactctttttgaatactcattaaagtatcatcaagggaaagtacccgtctttaaaatagatttgaacaatccagaagtgataagaccgaaatacgaaaaagaataa

SEQ ID NO: 159102 - DNA, 354 bp, Enterobacter cloacae
atgaatttactacacttcattgaaaccaaagtctttcagagagtgattgatggattgctttcacctgacgaactccgggagtttcaggaagtgttaaggcaagatcctaccgctggcgataccatatcaggtacgggcggttgccgtaagattcgctgggctttgcctggtatgggtaaaagtggtggtatcagggtcatatactactatctgacagcagataacgaagtattccttcttatcgcttatcctaagaacgagaaagacaatctcaccaatgctgaaaagaaccagttgaagaaagccgtagaaggtatagagcaagcctcccaggaggcaagggggaagaaatga

SEQ ID NO: 159103 - DNA, 291 bp, Enterobacter cloacae
atgagaaaagaactctttgacgacctgatcgagagtgtcaacgaagccgtagccatcaaacggggtcttgttgccccagctcgtgttacgacctttgagatgcccgatgtgaaagctatccgcacgaaagcgaagctcaaacaaaatgagtttgcccaggtagtgggtgtctccccttctctggtgcaagcctgggaacagcaaaagagaactcccaccggtagcagtcttaaactgttgcgggtcattgaaaagcatccagatatgcttaacctgttcagaacagcataa

SEQ ID NO: 159104 - DNA, 624 bp, Enterobacter cloacae
ttgaaaaatttaatccgtagaattgaaaaatattttaatcaggaaatggatttcaatgatatttcatcgactactattgacggaaacgaaaatcttttatctggtgctattactttcttaatgcacaaaaacattgatagtgaagtctcattatctttacttcgatatttaatcgatcatggtgttaatgttaatcataaaattgaagagtctaacagcccattaataaaagttttcctgtatcaatggaagaacagcgagtttaaagcaaaggtcattgaaatacttttatcaggtggagcagaccagaacataccaggtcacaaccttcttgaatatgcaacggcgaaagaatgtaagctcttactggcttatggtgcagatctggaaagaatcgctgataatcgctcacagacggctatctttgattgttattgtctcgataagctgtctgtgctgattgattcaggggcaaacattaatcactcaaacaaaaagggtaaaacctgcctggcttgctattacaagaaaagcgaatatgtcagattcttactggataatggcataaatgcagacattttcctgaatgatagtgattatacggaagaacaaaagaataaataa

SEQ ID NO: 159105 - DNA, 216 bp, Enterobacter cloacae; identical to SEQ ID NO: 7031

SEQ ID NO: 159106 - DNA, 168 bp, Enterobacter cloacae
atgaagctggacatcgatacgaccatcggatggggtgataagacccttgccgcttttgccgtcaaaggttttgacaattcctgtcattttacgggacaaaaaaattccttaatactgataacttggcgcactatacacacgttcctgaagaaagctatagttttttga

SEQ ID NO: 159107 - DNA, 753 bp, Enterobacter cloacae; identical to SEQ ID NO: 7033

SEQ ID NO: 159108 - DNA, 1050 bp, Enterobacter cloacae; identical to SEQ ID NO: 7034

SEQ ID NO: 159109 - DNA, 252 bp, Enterobacter cloacae; identical to SEQ ID NO: 7035

SEQ ID NO: 159110 - DNA, 612 bp, Enterobacter cloacae
atgtataaattacgacaagataaccaacccgtgatcgcagactgtgatttaaaagtccttgaagagtgtgtgaatcagggattagatatgagtaaatttagtaaggaaaaccatttcagtgttagggaagatagtcctatgctaacaaatgaaatatctcatttccttgaaaattttcaaaatataaatttcgttgacgaaaagaagcttgagttattcattgatagaggagtttttaatagtaaaaatgcgagtgattttaatgggtgtgttccattatattatttctgcgattcacgctatggaggaaaacttagtgatgaattacttgataagctaattaatgtttacgacaaaattgatataatagaagaacgaatatttgatcctgataatgaaagagcgaaggattttatcttcaaaagatacattgaaaccagcgaggataaacagggtgcaattgagcatgttaaggagctttttgaaaaggaaggattagatattgaacaaagtgaaagaattatagcaacaatagccagatttgacaatgcagcaatcaaggaagctttcacacaaaccgcaccaaaacccagcaccagaagaagaatgtag

SEQ ID NO: 159111 - DNA, 909 bp, Enterobacter cloacae
atgattataactataaatgatagtgaatataacaagctatatgaggctggaaatttagatagagaagccattattgatacaatcgttaaggcagggggtgccgataaagttaaaattaaagttgattatgatcaagacaacccttgggatagaaccataaatgatgaagataaagagacattaaacaccttatcctttttaaaagaaatatatcaagatataaacaatgtgattattggacatacacctaacgacacaatctgtatagctcttatgaaatggggctatgatatgacacagcttgatgattttggtataccccatattgctaacttcggtaaggaagcactatcagaagtgataaagaacggattagatatgagtcaatttacaagagatgatcattttgattttaatcataaccatagattctctcgttttataaatacaagtgaaaaacttgaagtctttcttcagtctggattaataacacctgacaccataaaagactatgaatgttttgaacatcacaaactttataacaaacctgatttaaatctaactgataagggattcgaactgctttttaaatgctatgacaccatatcattaaacaccgaaatgatgagttcatatagtattttttcaggggaaaccagaactaacccggcagtatttatattaacagacaatgataaacatttagatcatttgtttaaacgatatatagaagtgagtccagataaaattgaagctgttaacttcataaaagacctgttccagaaatcagaatctcacgatttgaacagtgggaactatcctaatacagttacgacaatagaagataatgaaatacagaatgtattcaaacaatcacaaccaaaaaccattaccagaagacgaatgtag

SEQ ID NO: 159112 - DNA, 924 bp, Enterobacter cloacae
atgataataaaaaactcagaaggtcaagagatatacaataaaagaagtaatggtaatttagatactgacagtatcataaatgccatagtaaaagccgggggagtagataaaatccatgtcaaactttttgataatggcttcactatgaatgagtttattaactctgtcaggtttctaaaatcaatcaattttgatattaaccaactaccaattgaacagtataaggagtacggaggcattgaactaatcaaacaaggatatgatatgtataaacttggagaagacaatatcccagttattaccgaatgtggttatggggttttaaaagagtgtattaaaaaaggtcttgatttaaataagttcaataagaaaaaccattttttagaatttatcgaatgtgacgataatggcgaatatttaaagaaaaactatcgtatatctaattttataagagacaaagaaaaccctaagtttatagatatcaataaactcgatttactgatagataatggattgcttaataataacaccttgtctgatttagagggggagattgagcgactatattataactgtgaattacttatgctttgccctgatgatacatttaaaaaacttgttgatgcctatgaagtaatagaattaaatgaaaaaggacttttcgaaatagattcaatagatactaccggagagttgaaggctcacttactgaaaagatatttagatacaagtaagaataaagatgttgccattagtaatatctatcgaatatttgaaaacagtggaggtgaatgtttacatgaaaaaacaaacaaaccaactattgaaatgataaataagtatatcaaagaggaaagagaagaacttcattcgatactttctcaatcctcaacacctaaacccagcaccagaagaagaatgtaa

SEQ ID NO: 159113 - DNA, 627 bp, Enterobacter cloacae
atggaaaacattttatctaaaaaacaaaaaaaagaattgaagaaaacctatctgaatacagaaaggaaaatcaggaacagcataggcagcaacaggaaagcattttactgtggtatcgccgttcttgccgttctgacggcatacagcttgtttaaaccgaaggaacagcaaacagtgatcccacaggttaaccaggattacgaaaactgtatgtcatggaacaggagcaacagcataaacaggaaacaatacctttcaccggtacagattaacggtgttgtcgtggattcagccgttaatgatttctgtgcagcagacaagaacaggaacagagtaagctcagaacaaaatggactatggttaatgaactttgaaaactgtatgcagcaattacagccagatcgcatgttcatagaaacaatgaacttaactgtattcgataaaaaatatactggtgtaaaaaaggaaacagttaaccagtgtgtaagatatgcagcaaccaacaataaatatgatatttacgataactatctgtatgccgtttatatggcaggaacttttatcaagagtgatagtgttgatgatgtgatattttccattaagactaacttttataaacagatataa

SEQ ID NO: 159114 - DNA, 447 bp, Enterobacter cloacae
gtggaacggatcagtattggcaaactacgatatatagaaccagtaatttaccagtcaaaagaagatgcccgtaaagcttccctgtcgggggaatttattgtctatgctcttggtctgaccgagcaagcttatcgccgtctggaatcgttctgcattaaaaacaatctggttgaagtctataacatggatatcctggacgacccacatgatatttttaatgagctacgaacaaaagagttcatgttaagagagagaagcacgaacggcagggaaggggagtttagagtttactcgtgcaatgtctatgatagtcagatcctgggtaacgaccgtagcaagcggtatcgttctggtaatcctaaatgtcctactccaacaatagaacagctttactttaaacttataaaagaaaacggctccgtgataaaaatggcttattcaatataa

SEQ ID NO: 159115 - DNA, 447 bp, Enterobacter cloacae; identical to SEQ ID NO: 159114

SEQ ID NO: 159116 - DNA, 786 bp, Enterobacter cloacae
  misc_feature (32)..(41): n is a, c, g, or t
atgtcttccttacagcaattgatgcaatcctnnnnnnnnnnagatgatgtcttccttaaagcaattgatgcaatccttggaatttatgaagaaaattctgagtataaaaaatatttagattcaggattctctgaagaagaaatcatcactaatatgcctttttcaacgcatctgccaaacttggacgtaataacggcttttccgacagatgctcgttttaaagataaatactggcaatgttctagagaagaacgtacgtctttgttactacgtttcaaggaagttatcttaccggtactgaagcagaactatgatttgattattatagacactccacctgaagattcacctttgatctgggctgctgacgaagcggccgatgggattcttgtcgcagtgtcaccacgtgaatatgattacgcctctactacagacttcatgcttacaataagtgaaaggtttaaacaatcaccaagtaagggcgacaatttaaaatggttcaaagttcttgctgtcaatgtagatgacaaaagtccatatgaaagaatagttttggataaattaatcagaactgttcaggaccttttgatgtccgctaacataaaaaattctgaagcatttaaggcagctgcttccaaagggcgtacagtgcttgatatcaaaaaatcagaggaactttgttccgcaaagcagcttgatgtcgcagaagaatctgtattacaggtatatcagcaatttataaatgaaataaaaagtttttcagctaagcaaggagttaacgcatga

SEQ ID NO: 159117 - DNA, 561 bp, Enterobacter cloacae
  misc_feature (546)..(555): n is a, c, g, or t
atgaatttacttgaaaagatcgccctcgttggtcagcgcatgaaaagcgagcagatttctctaaaggaatctctgatggcttcatcaagagtatctgtttctgatgatagtgttgatggtgttgatagactgatctataaccactgtttgaataaaaaaaatctctctgatttttttgggaagtcacgagtaacgttcaataaaatactttcggacttagaagaaaaagaacttgttggtgcacctatttatcaaaacaaaaatcatctttacacccgctgggatgttcaaaaaataatggatgccctgggttatcccaagtaccgcgatcattactttagcagagctattgttactcagaatcataaaggcggtacagggaaaagcactacatctgtagctttagcagtagcagctgctttagatctacaactcaatgcacgtgtattaatgatcgaatgggacccacaaggttcgattggaagcagcatgattcaaagtgtctcagaagatgatgtcttccttacagcaattgatgcaatcctnnnnnnnnnnagatga

SEQ ID NO: 159118 - DNA, 249 bp, Enterobacter cloacae
atgcctacctgttttgtacatatcatagccttgcttgataagttcaatagctacaacttcttcgtattggtctatcggaagcttgttaatgtcgtagttgatatttttcaaaaaccttattgctttaatagcttcgtcatcatagaaatcactggcatgaaaagtcaggtcaatattttctatgccacctgcttttactacggcatcaatgattctgtctggttcgaaatcgtttctgtttctgtataa

SEQ ID NO: 159119 - DNA, 186 bp, Enterobacter cloacae
atgataataaaagcggaagaaatggaaaaggtaatgtatggcgacagggtgaaagaatttattccagaaaagaaaaaaaccaaactactcgcagacatttatcatgctgaaagtcttttcaggaaaaatagaatagacaaaataaatatattagataaaatagaattagtggtcaacaataaataa

SEQ ID NO: 159120 - DNA, 435 bp, Enterobacter cloacae
atggacttcctgttaaccgatagccacacacagttgaagctggacgacagatacggggggatagctgatacagggcatatgttcgctatcctggtggaagatcactacaagaagaagtttaaggacataacaagaaaggggaatgtagtaaccattaaggtagcaagagacatactggtagggttcagattcagctactcgccaggctctctatccgtttactacaaaatcagggttaaaggaaaaaattataaggagggaataaaggtaattgatgggtttaacagaacatcagaaagcataataaacaacatcattaacaaagcaagacagcaaattgtttcaatgaaattcattgctggtatgactgttttagccatatctggtgtgggaatgttttatgcaatatttaatttaaatacactaatcacataa

SEQ ID NO: 159121 - DNA, 594 bp, Enterobacter cloacae
atggcgaaatttaatctcattggtaaaaatcccgaacaagcgaaaaaatatcttactttctggacaatcgttaatgcaggggaagaagaaagatatcaggaagctatgcagttatctcttgaaccaggattcactataaacaagacaaaaaccaatggcatgtttttcatggaagacatgatgatttcttgccgtaaagagttcttctctctgttcatggacacacaccgtcaaacggtcaaataccacttatcccgcagatcttacactatcccggaactggtcattgcaagatacatgggtagttataccaggcttgcaagtgatgaagaaaggatagaccacttaacagcaaacattgtctgttttctcgatgccatgttggccactggcacacataagcgattacagcacctggacagctacgagaagcttatagcgaaggtggaagagtattacatgggggttatagccgatttgccgtctgtaaggctctatgaggctctcaaagcgaaagcggcaggtaatgagcaagcggagctgaaggaagtcatagcagcgacgacaggaacgacgaagaagagaagactgtaa

SEQ ID NO: 159122 - DNA, 264 bp, Enterobacter cloacae
atgattcagtattttataagtcagacaaacagaactgatagcataaaagaagaattaaaatccgtttcgattgaaatcactgataaggtttttaataaggttaaagctgacgaccagactttaatacttatcactcaccatgaagttatgaagcagttaatcaaaatggattggtggaaagataatgaagctaaaagaatggaaattcttaaagaaatagaaatgagaaaagaacagttagggggtgtttatggcgaaatttaa

SEQ ID NO: 159123 - DNA, 2292 bp, Enterobacter cloacae
atgagtacaaaaaatataacgaggtatttaggaagtatattcttacttctttcactaacaataacacaaaatgcttatgcagaaggatttgatctctttaaaccaaatgatgataactggttaataaagaatatattcattcctttgttttatcccgatacttcccctttttcccccatatctggtgtcttccttgcgggtatacttgcttttggtggtgttcttgcaggttataccatgcttgccggcacactacagacggcacacgatggggagatgttaggtaagaaatggtcttctctctggatacctatcaggacaaccctgggtgtatctatgattatgcccatcaaaggcgggttctgtgctatacagcttatcgtggtatggctggcagttcagggagtagggcttgcagatcagacctggaatgcttttgtcgaaaatccattaaaaggttctgttttgcctcaacctgttattgacagacagatcagcacactttaccaaagtgctgtaagtggatatgcctgtatagcagctattaagaaagaccagggcgaaaatgaagctgacggaaaaagtgctggtattattgataaattattaaacataacaaaagaagaatggaatccaggagttacaacctcaacaaccagcggcactaacaatggtaaaaaacttgttatcgagtttggtaataaaaatagagaggcttcaagaaatgcctgtggttctataatttatgatatgtatgctacttccgataaagttatagcaaatgcaccccaggcagcacttgaccttgttgatcttaacaaaattcaaagaagcttgattcctgttcatgtaacagcattaagtgctttattagcaagagcaagcgatgtaggaaacagaattgctaatgatgatgattctataaccgctgattacatagctaacgatatgaaagttgcaggtgaagcctataaagtcgctattgctcttgcagctaatacggcttaccaggattcaatttcaaaagatactgttgaatcattgaaaaaagacgggttcgtatcagcaggagcatggtttatcagaatcgcaatggctcaaagtgctgttaacaatgtagtaaataatgttcctattggtacaggtgttacaggtagtatgttggaagaatcaacaagctggtttggtggttctgataaaacagattatccttctgttgataaaatcaagaaaaaggtaaaaacatactttgcaaaagcaaatatgttgaataataacagtgcaagtggtgccggtgcaggaacagaaggtgatcaaagtcttttagataaattaatggctgttttctctccttctgagcttgctgctcttttcactgcacaggcatttactgcaaatccagttgtagcaattatcaacattggattatctttaattaattttgctcttgtaacatatggagtcatgacaactgttgttttaggtattggtaccgctgctaatgttatacctggtggggttatttcagctacgacattggttacaccattggttacaggactattatttgcactgttctgggcaggaatcagaatggcttatgttattgcatggaaacctttcatagtctggttcggtgcgattataggttggttggtgttagtagtcgaatctatgtttgcagccccattatggatggttgctcaccttgcaccagatcaagacggtgtagtgggtaaaatggggcaaggatacatgttgatactgtctcttatcctccgtcctgttcttatggttatcgggttcgtagtagctctatcactcatgaccccatgcttaatgttgataaatgctttcattgcttttactggcgatacgataggagtcggtgcagccgctttcataggtaaaatcgttatgattacgatctatctaaaagttgtagaagaaactatgaacaagctctttggcttaatccactctataccagacagtattctacaatggattggtggtggtttatctcgctcaatgggggattatgcaaatggtatcgaaggtggttcttctcacacgactgaaaaaatcggtggcggtagtaaacaagctgttatgagtatgagtagtgcatctacaagaggagtacaaagggctcaggagcttagggaaagaaacgaagaaaataccatgaatgcagctaacggacatgatggaggtggttctggaaatgataaatcttctgataatgcaccaaaaacaagatcagcaggtaatacagatacaccagaataa

SEQ ID NO: 159124 - DNA, 513 bp, Enterobacter cloacae
atgaatagtttaatgataaaagcgagtcctgaaaagctaacagagatttattttcttgaatatcttcatcaccggcataatattgatatgccatacacttatacagctgaggattttgttaattttactaccaacaatcccgtaataaaacacacaatgaaattcttagctttgcaattatataactctcatagagaaaaaccgttacttaatttattttacatgctatatataacaaaagaaatcaatatttcagaaataggagggaacatatttttcattgagccatattcttgtattgttgatatgagtggtccctatgatttaaaactgctcaaacaaaaagaattagaatttatagatgaaataaccgttgttagcgaaaaagacaaaaaagatttacttatagtaagggaatccattgcttccactattgccaaaatagaacaaaaagaaattgagcaggtaatgaatgaaaagccagttaccattaagaagaaagcccgattgtaa

SEQ ID NO: 159125 - DNA, 402 bp, Enterobacter cloacae
atgacaaactttaaacgatatactctctttaagggaatggtaattattgataaagtagcaacagggaaaacgaattttctaaatcgtattgttaaagaccatccagactcaattttaaacttagacagtgatttttatttcgctggtaaatcttcctatttgtcagcaatcaatgaagcagaagagaaagggaagtttattattatgtctggtagctatattggtgatacagaaaagagtgaacttattaataaaggctatctggtgttccattcaatagctcaggcgatgttttactattcagaacatttaagccctgaatcaatcgcaaggaaagaacagcaagccattaaacaaataatgacgggtgaaagaatcacccgtaaaagaaacagactataa

SEQ ID NO: 159126 - DNA, 927 bp, Enterobacter cloacae; identical to SEQ ID NO: 154128

SEQ ID NO: 159127 - DNA, 534 bp, Enterobacter cloacae
atgtgtttaaacgggttcgtcaggacattggcttatatctatggactaaatatcagtataagaagaagagttgaagaatatacagacagtgtttcttatagttcggcaaagagcaccagtaaccttaataaaatagaacaggcattcaaaaggcagactcaaagagatttggaaaaatgtatatgtaaattaccaccaggttataaaaagaaaggtctggaatttatcagtaattacaaggatattcaggacaatgagatttattttaaattagccatgtctgaattaaattacaaagccaattaccagacaatacatccttttaatttcaccaatgttgtctctggtagattaaagacagtatatttttgttatgatttagagaatatgagaaaagacttagcaattaaagctgcaaaaaaatatgggtatacatacatagaatacagtgtgtacgactacctatataaagacaacatgaaagtgataatttattcatttttatttacggatgaaaaagtgggtacgaattaa

SEQ ID NO: 159128 - DNA, 282 bp, Enterobacter cloacae
atgaacaagacagaactaacacatagactatatgaagctgatttgataaataactatgccattaccggaagccaggagagttatctctttatggctaaccagaacggggaagggtactactggataaaccataatggcgagacactggggtttataaaagaagatctggacaagatttacagcgaagcaaaagagtatgggttatcggataaaaaattccatgtggtttctaattgcatggtatatgaaaaacattgcagcacaataatgataaatttctaa

SEQ ID NO: 159129 - DNA, 789 bp, Enterobacter cloacae
atggaaaaacaatttaaaaaaacactggcaagcattcaaacccgttccaaccgttcaagctctgatacagtcagagagttctttaattgtgtgtcttacacaatgataatgaatagtcttttccagttagaacgaagagagttattctattcaggaagtaatatatatggtttcaaccagcttgctatacaagctggttttattgagaaatcaataatgttaactgacaggcataaattcagtattgaagaaaaattttataatcagtttgatactgaaattatagatacagctaatctaatctcgcttgaaatacaaaaacaacctttaacagatgttttcaatagaatatttgaagattgttatttaacaggaaaaaaaggtgaatggctggggcagtttttaacacctaacaggcttgcagaagcaatttctagatttgtaggctgggaaaaggatattaaatacaatattggcgattgttgtgcaggtacaggctctttactttttcccttacttagagaaattcatagcaaagaaggatatgaaggagtccagaaaatagagcttctttataatgagattgatccattaatggcacaattgtttatggctcagatattaaccaacatgacttatcataatctcgattttaaatctcttcatgtttatataggtaatgcgattacagaatatgatactgtaagcactctttttttgagatttaagcaaaataaattagtagctcaacgggtattagaaattgatagagaaaagaaagcagcataa

SEQ ID NO: 159130 - DNA, 177 bp, Enterobacter cloacae
atgaacaaccagatcaataaagtgccttacagcagcggtgataaaccagaacttcctaaaaataaaaaagttaagttttatcacgaagacgagtatgcttttgctcatttcatgtatgacgatacagcagccgaacaagacaatgcagaaactaacagtgaaaataaaggggaataa

SEQ ID NO: 159131 - DNA, 363 bp, Enterobacter cloacae
atgacatgcccctttaacctgaccgcccttcagggtgcgtttgagaccgtcagaactgataagctgaaggttaaccagcgcgccggtatcgtcatacagcgggacaaccacatccccggcgcggaacgtcacgccgccggttttgtgtgtggccgacagtaccggacattcccggtcggggaagcccttgcgggtcaggtaggcgttgccgctggcaggtcgggtgttctccatgagcctgacggccagtgcggccgccgctttacggtcagcttcggtttcagcctctgctgtcgcaatcacttcgggggcaaccggcggcaggttgccggtcacggtgttcaccttcccggcagcctctga

SEQ ID NO: 159132 - DNA, 465 bp, Enterobacter cloacae
atgattactattaatgaaagtatgacatctaaaacagtaacagatttttctttgggtgctcagtggtccggaatggtttcagcggtagcgctaatggggttatatgctcgacgcgtttggaaagagaagaagtccttatttactggcgctttcctggcctcttccttaatggcctttatttttactgacagccttgttttcgtatcccagaaggacaccggcgttctggctactttcgtactcgataaaaacgctggagatattgattgtagtcgcccggctatgattgtccattacagtaaaggtgttccaacggactggcgttgcccaaccagtatcatgttgatggcgtattcttcatatccttttttaccttggcctgagtatagccatggtaccagccagtctcttacggttgttattgatacatttatggaaaacgctgttaatctcagtcaaaaataa

SEQ ID NO: 159133 - DNA, 900 bp, Enterobacter cloacae
atggatactaaaaaactacttaagcacgtgccctgggccatcctcgggatcatcggtgctttctgtctggcggttgttgcattacgccggggcgagcacgtcagcgccctgtggatcgtggtcgcgtcggtttccgtctaccttgtggcttatcgctactacagcttgtacatcgcgcagaaggttatgaagctcgacccgacgcgcgccaccccggcggttattaacaacgacggcctgaactacgtgccaaccaaccgttacgtgctgtttggtcaccactttgccgctatcgccggtgcaggcccgctggtcggcccggtgctggccgcgcagatgggctacctgccgggtacgctctggctgctggcgggcgtggtgctggcgggggcggtgcaggactttatggtgctgtttatctcctcgcgccgtaacggttcgtcgctgggcgagatgatcaaagaggagatgggccgcgtgccaggcacgatcgctctgttcggctgcttcctgatcatgatcatcatcctggcggtgctggccctgatcgtggtgaaagcgctggccgaaagtccgtggggcgtcttcaccgtctgctctaccgtaccgattgcgctgttcatgggcatctacatgcgcttcctgcgccctggccgcgttggcgaggtgtcgatcatcggtatcgtgctgctggtcgcctccatctacttcggcggcgtgattgcgcacgacccgtactggggtccggcgctgacctttaaagacaccaccatcaccttcgcgctgatcggctacgcattcatctcagcgctgctgccggtgtggctgattctggctccgcgtgactacctggcaaccttcctgaaaatcggcgttatcgtcgggctggccgtattgtga

SEQ ID NO: 159134 - DNA, 795 bp, Enterobacter cloacae
atgctcatgcacccgcagagccttgtcgctggcgctcatggccgtaaattccgcctcgctcatggtatcaaacgggctttgcgccggtggccggatggcgtcatatatcgctttccgcgtggcctccccgccgtgctgcataaaagcatcattccagtcaccgaacaccggcggcagggcaacaacgccttcacaggcttctgcggccgcagtggcttttttctggccgttgccgttaaggtcacggtcggcggcgaggacaatctgacaggccgggtgtttctgacgggcaaggctcgccagagaaagaaggttcacggacgacagtgccaccatgacagtttccccggtcaggtgatgcacggtgagcgcggtcgcatagccctccgcaatccacaggcgctttccggcctgttttttcccttcgatgacatgacatgcccctttaacctgaccgcccttcagggtgcgtttgagaccgtcagaactgataagctgaaggttaaccagcgcgccggtatcgtcatacagcgggacaaccacatccccggcgcggaacgtcacgccgccggttttgtgtgtggccgacagtaccggacattcccggtcggggaagcccttgcaggtgaggtaggcgttgccgctggccggtcgggtgttctccatgagcctgacggccagcgcggccgccgccttgcggtcagcctccgtttcagcctctgcggccgcaatcacttcgggggcaaccggcggcaggttgccggtcacggtgttcaccttcccggcagcctctga

SEQ ID NO: 159135 - DNA, 276 bp, Enterobacter cloacae; identical to SEQ ID NO: 129452

SEQ ID NO: 159136 - DNA, 705 bp, Enterobacter cloacae; identical to SEQ ID NO: 151764

SEQ ID NO: 159137 - DNA, 1395 bp, Enterobacter cloacae; identical to SEQ ID NO: 151775

SEQ ID NO: 159138 - DNA, 297 bp, Enterobacter cloacae
  misc_feature (20)..(29): n is a, c, g, or t
atgtcaataaacgtgatgannnnnnnnnnaaataaacgtgatgatgatgaagaaaatgattatatattcaatcttatgacaaagtcagcttattttgaaatcatactcgatgaagttagaacgttggattttacagtcgaggatattgaaggccaagggttggaattgtatttagaagatgaagatgaagatgaagatgaagatgaagatgaagatgaagatgaagacgaagacgaagatgaaaaagaaaatgatttagagaaaaaggttactgttaataaaacttccattcattaa

SEQ ID NO: 159139 - DNA, 567 bp, Enterobacter cloacae
atgaaaaaaattattaaggcatcggtattacttctttcattaagtaccgccttcacgatgaatgccgagccggttaatacaatggtactgccagatgcagcccgggataagctcaaagccattgggctttcaatcgagcacgtcgaaccctcgccagtaaaagatatttttacggtgatttccagggagggggtaagttacgtgagcaaagacggagattacatttttaccggaagcttattccacgtgaaaggtaaagatgtggtaaacaccactgagcaggccattttaatgggcgtccgggaattcgcatccaaaacaaaatccatcgactacaaatcgccaaacgaagctctggatgcagcgatgaatccggtttcaactatcccggaaggacgtcctgatgaggcttgcttaaacattatcaaatcgcatttccaggtggcctcaacaatcccgctgcaaggtactcctaccatggtgacactaagcggcaaaccgcagttatttacggggtggctgagcccggaaaacctggtgacccaaatgggcgctgcgcaaaagtaa

SEQ ID NO: 159140 - DNA, 738 bp, Enterobacter cloacae
  misc_feature (710)..(719): n is a, c, g, or t
atgaaagacgctaatggaaaggacctctgttacaactatgaagaaataaagagtatgcctgatgcatgtagtgcttataaaaatgatgcagcatgtgtactcgataaacaaacatgtgcagagggttggttcgatgagggcactaacagttgctacatgtatgaacagaaatacacctgtgacagagggaaggatgtagttcgggaggttgaatcttctacaaatgcctgtgttggcatgatcccatgttcaggtggaacatgcgaaactgggccaaaggaagagaacaacgattttggaaaagttgcggcttattcaaacatggttcagtacatgcagggcgaagccaaatgcgaagaccctaacgatgccaattcatgttccgtctttgaaggaaaacctgaatggtgtggtcgttcagtaggctttgtaaatggcctggcaaagacggactgctgcgaagcaccacagggaaccgcaggagcacttgaaggtatcatgcttgccggatctatgatcagaaacacaaactggaccagagttaatgctcagctaataaaatggaccggcggtgatacaggtacatgggcttctatgtctaatgcggtcggagagtggactgcatcagctggtaaaacagtagggcaaatgtggaacaacgcattaggtgaacatggaaaaattactgctgaagtggcggaaacaatacnnnnnnnnnnccttaacgagcgtatatga

SEQ ID NO: 159141 - DNA, 1005 bp, Enterobacter cloacae; identical to SEQ ID NO: 31749

SEQ ID NO: 159142 - DNA, 393 bp, Enterobacter cloacae
atgctcgaaaccgaacaggaaaaaatagatagtccaagagtctgcaaaaatgtgatttcggcttttgccgactcaactctttctctgccggtgtttaacatcggcctaaacgagcagtacagatactggacgccgtggggcatcaactttatagaattttcccgccaggccgcaaaagcaaggaccgctgtatttgttcctgatgtgggacagatcgagtggaaaagcgcagagcataaagaactggcggagttaagcctcatcgaccaaatcatacctaaacagtaccactggctcctgggtatcccgacgatgtggcgtaacaactattgcaatcacgatcagaggctagctctttttcgtgaatggagggaaagcaatggctgcggataa

SEQ ID NO: 159143 - DNA, 279 bp, Enterobacter cloacae
atgatctccgctgatgaattaaagaacactattatacttgccgcgaagggcatgaatctgatcgatgacgcttcgttccagtcaactctagatattaaaaggcaatataccatcggcgatgatggcgttattaccgttaataaatccgaaatggaatcagacccattcctacttcaaaaaataatggaccaaaaactcgaaggctatgacatgcctacggccgatccggtcaattatctcaatgctggcggcagttttggaggcacttatgcgcagtaa

SEQ ID NO: 159144 - DNA, 1131 bp, Enterobacter cloacae
atgggattcggaactaacgaagctttaaatgcagaaaaagaacaaaacacagaacacttcaacacccaacagcttgaaaaaacttatgctgatgctgttaacaatgtcattaagctaaggagagatctgaaaggatatgaagagacaaacaaccaggaagcgattgacaagacttacgaacaaatagcagagcttaaaagcatacagaacactacctataatgctctcggctatgttccacagtttgatgacctggaaaacgaagaagaagtaatccccgacgaactgaaagtgtttgctcaacagaaagacaataaaagtttaaccgctgccgttgtatcaccggcaaatgacgaacccgccacacccgcaccagtgcaacaacctaccagtgcagaaccaacagaagaagaactgttccccgtagagccgaaggacaacggttttactgataaagcaccagtagcagctatgaccgtggcgaacgacgatccagggcctgccgttaaggacactacggaacaggatattcttgaactggaagaacttcacaatgcaaacaaaggtcagtcattcaattctaaaacccgcttcctggacgacgaagattatcacaggctttttgataatgtaggtcgtattggtagatcacttgatgggcaaaaaagaattgtttatttcaaagacaatacacagttgcttgaaaaaacagattctattgttgttatggcaagaaatcagatcgacagtgcaagaagactcgttcttgtcgctaaggaaaaaggctggaatacggttactttccagggaaattcttcttttcttgaaaatgcttacttacaggctgttcagaacggtgtcggggttaagccattaagtgaagaacaaagacagttttataaagaagtccatgaaaaatttaaacttgatgaattaggcattaattttttaggaaaaaaatctcttaaagaactggaagacgaaaaaaaggagaaggagttagcgaaagtcagtaatgccgaacccgaaaaaaagcctgatataaaacagcaaaaagcacctgagacaccgaaaccagaaaataaacctgatgaaatcaagaagcaaagaaactttggtcgtcgtagataa

SEQ ID NO: 159145 - DNA, 306 bp, Enterobacter cloacae
atgaatactgaaaaatatcaaactattgaagaaaagatcctgagtatctactctggcaaagctgaaaaactggctcaaagaaaaagtgctgttcttaaagaactcattgcggctaacaatgcgaaagctattgaagaacttaccagagaaagaatggttatcgacaaaaggctttttgtctgtaaaaacatactcaacagtattcgtaatgcttcatctaagaaaaatgaaaatttttcaaattatgttgtcgtgctttctaccgaagcagcaagattaaatatgctgacaccgtacaccgtttaa

SEQ ID NO: 159146 - DNA, 345 bp, Enterobacter cloacae
atggagtatacaataaatttttttcacaaccttgacgacatattaaaaggtactcatttaaggcttgtctttgtggctatcattggatttgccatttttatgaaaggtatcaggcatgttattaatgattttccagtgctggtaagctattacaaacgagctaaacgagaaggatatacagatttccagttctttattaataatgctcacaacattggaatgtatcttttagttttgtttgccacggttttgagtgcctatgcaatttattttagtgcagaaaggataaacacaatgcaggaattgcaggaaaatacagtcattaccacacccaaaaataaataa

SEQ ID NO: 159147 - DNA, 276 bp, Enterobacter cloacae; identical to SEQ ID NO: 129452

SEQ ID NO: 159148 - DNA, 636 bp, Enterobacter cloacae
atgggaagaaatattgaaagtaaatcatttgcaagcatatggaaagaagtaaaaagctatacttgcacagtaaatgaaatggaaacatttgaaatgctattattggtaatggctggcagaggttttaaattctctaagcaggaatttattattctatcgacaagagggcaaatgagaagccagaagatagaaagaaatagccaaaataaaagattcttctacaattccgttgaagaaaaaatgaaatcagttttccataatttaaaagatattcataacaagtcagaaaacttaaacgaatttcgcctatatagtggaagagacacgataagaagccgactacacgaaagacttagctttaaaaatgcctgggatgacttagtaaatttcaatttcactcttgatgaaattgatgcctatgagtgtttcatttttttaatcagggatgtaatcaaagacattaaaattacagatgcaggtatagcctttttaaattctgaaataataaggtcactccaaaagaaaaaaataatgagagaatatcattcgataccgttttcattagattccgttaaagaagaactaaatacagcatatgaaataataacaaggaaagttaaatatgacaaactttaa

SEQ ID NO: 159149 - DNA, 435 bp, Enterobacter cloacae
atgatattaaatgtagtcagcattcaaaaaaccaaaaaaaatgaagccgctttaatggagtgggtaaacaactgcgaaaatctggaatgtgctcttagtgataataatgttgtttcaatagacaacaattttgattctgaaaaattctacaccgaaaattcacgatatagaaaacaatggattgatatttactataaaagtgagaatatgaacttaagccttttattagaactttgtagaaagtttgatagctatgtttcaatagtattaattagtgaatgggctggggatctaagaagttgtggaactctttgcctttccccggacggtgaagaatactttaaagcgcaacaatcaggaatgactttgtattcaagttggccccagtatgtaaaaaaagttttcccaaattgggttaatttagattctatctaa

SEQ ID NO: 159150 - DNA, 765 bp, Enterobacter cloacae
atgaaaaaagaaatagttaatatcttaaatgaagtggtagctaagtcaaaatttgcaaacacagaaaaacacttcttcaattgtgtatctcattcaatgattatgaatgcttttattcagtttgaagaaaggaagaaattctacctccaggacgactatgcttttaatcattttatgagcgaagaaacaataacaatgtttaatagctatgagtttaaaaagaataataaattcttcaaacaatttaaaagcgaaattgttaaatccgcaatgattttatctaactgtatagaaaatgagcctttaacagatatttttaaagaattgtttgaagtttactatgcacaaaacgatcagacaaaatttgcaaaatacattgacagtaaattaacaaaagacctgaaagttgaatatgttagctttaactatgataaaaatgatttttgtaatgtagaacccaccggtggcactggttttctcttatattccttgttaaataaaataagcagaaaagcagggctggaagaaattcaaaagctaaatatcacatacttagaaagcgatcctttttttgctcaaatatttattgcacaaacactaactaacatgttcaatcataatcttgactttaaagtattagatatctatatagcaagtaaagcacggtattacgactgtggaggatataaagaagcaggacatgtaatgatagtcaaccaaaatgagtttgtagcaaaacgagttttagaaatccaaaacaattaa

SEQ ID NO: 159151 - DNA, 192 bp, Enterobacter cloacae
atgataaatagtaaatataattgcaaagaaatatttgaagagttaaaaagtgatggtgttttggattcattcgtcgcatgggcatcaaacatatacccaaacatacatttaagtcagccatgtttcgaaagttgctatgaaatatataaattgaatgagaatttctttaaagaagaatggaataaaaaataa

SEQ ID NO: 159152 - DNA, 2115 bp, Enterobacter cloacae
atgagcacacaacctaccaatttgcctgtaccaagcgaatcaccgcgcgatttgaagtttaacgccgggaaaattgatgagtttgttacatcacctgctcatacatacactgacaggtttggtaatcagcaccggacaattgctggcatcaattacacagcatcaacggctatttcaagcctcgggtatatcactcttgatagcttcgaagatgggaataatcttacgcttcctaatcaggtgctacgctatgaggctaccggcgaatattatcgttgggatggcgagttaccaaagagcgtagcacctggctctacgccggaaacatcaggaggaatcggacctggtgcatggcttagcgtaggcgatgcatcactaagaactgatcttgccagcggtgaaaaggcaagtctggtcggatacggctcatctacagtaaaagatgctcttgattcggttgtaaataaacgtgtcctttacttctcccgattcggtacgctgcaatctttgcagtcttacatcacatctaataacctaaaaaacgttgaaattatttttgaccaggttgtgaactttggcccaggtagcggtggcttaggtacgatcgtaaccctgagcaatatggactggcttgaaatccgcggactggttatcagggacaccctgctttactccggtgcatttgacctgacgcgcgtgttcgacctgacgaatatcaccaatctggtgtttgaagtggatgcatcttccacccttgagtatgtaggtgatgacaaacgcggactgaccccactgcgcctgaatggatgcgataacttcacatttattggtaagacatctaaatgttatgaagggtatgagtgcgttaatgtaaaaaacctttatgctcgcagtgtgaataatgatacacgatatcctcatatgttgggcacagttggaaccgtagatatacacacggtcaataatggttgtcgccgtgacttctttttgacgaataattgcggtggcggccatattacagttgatgctgtggacacccagcagggcacgccgatcaagatgtatttctataatggaaatatggacaatcagatatctaatttggttgtcaattataaatacagaagtacagggcgttatgattcaatccttccagcaagaacacctcccatttggctagagtggggatgggatagcaccacaacagagccattgataaacggtataatgcgcaacatcgagattaattatgatgtagttggtgggacttggggggctgtaattggtaccagaaaactcatcgacgaaactgtaggtgatacaaattctcgtggttacgtattctctaacatcacagtaaaggggagaattgaacttggcggtggcggaactggtaataatgcagttttcttcaattttcgagatgctgacaactggaaggcaggagatactgtcaatgggtttgcatgcaaagatctggtagtagtgaaacgcaatggtggtaacgttgtcctaaatgtcagtcagttaatgtctgctgttacaaactacggcggtgtcacgttcgataatgtgtctgcaccagcaggtgttactgatacaaccgattacagcaaagttaaatttagagattgcgttttttcagatttcgctagcatgggagcaactcctgacgtcagtaaaagcgccagtggttcttttatgcttataaaagccgcaggagattcaagaaactttaaaattggcacaattagcacataccgaaatgtcagcctctggacgattgatatcgtggcaaactcaccatggtcaggcgtcacaagcgcatggcacggaagaatccaaggaacactatcggcaggcagcactccagcagcacttacaatggagggggccgtacaaagcacctatacgaaaggaacagcagctacgccgactgtatcagccgatatcaatggtaacgtgttccttaactttgctggatgggattcactcgaagctaatatagcagttcgcgttagcatgcagtacgatgaatttagtggaggtgttaacaaatcggttagaggaatgctaggcaaacaaaatggtggatttagcctagcattaagttag

SEQ ID NO: 159153 - DNA, 1428 bp, Enterobacter cloacae
atgaattcctatttaagtgataaaagtcttaaagcaatagtcattatttcattggcgtatgttacgccaatagttttaactggcggtctttacattgatgatattggaagatcattgacaggtcttgcatggatgcatgatggtagagttctgacctctgcgttgatgattttgttgtctggtgggtatccagtaacggatatttacccaattggcaatattgcttcatcacttcttattgctttatctggatttacaattgctaaaagcttcggtattaatacaagatctttagttccaatttcattgctaatacttttctctcccttcatgcttgagaatttatcttatagatttgattccttgagcatgggaatttcaatagtagctatatgcataccatttctttggtataataaaagattattatttataatgacatcagtgatatgcgtttacgtgtcactacaaacttatcaagcatcatctacatgctacctagtgatagcgtgctttttttgtgcggatgaattcaggaagtcattcaaaaatggtatgctgcttggtatagcatcatgtttgtcttttttaacttccaccttgttatcatctataacatggaaagctctttccttagatatgaatggtaggggtgggataattaattcacaagaagaactaatagataacatctataaatacattgatttattatctgatgccactagctatcagcttgtattttcattggctttactattgctaccatgcgtattatttttaatgtacgttgtcaggtcaggacgtaaatttcatatgaaggcgcttcctatcataatggtggctttagcgctgataatttcaattggacccggtatttttttaagtggcacatggtggacacctagaataatgataggagcccctgtatttttaacatgcctttgttgctgggcgttagctgtaaatggagataactggctaacaacagttggatcatggttatatttgtttgctggtctgattctttgtgtatcatatgcgaatgccaccaaggcaaataatgaatatattgattcaattatttcaatggctcgtccttatatatcttccaccgatgaatcaaatttagttattaacggtgaagttaaaaggccagccagagtcaaaatttatgatgataaattccctataattaaacacttaatcccaacctatatgtcaaattcatggatatggggtgtggctcagtttaagaggacagactccattggtgaaagagcctggggcttgaggggtgaaagaagagtcaatgctataaagaacatatgtagcatgagagttgctctagcgaataaagattttactctttattctgactctaatatatcaatattagacttcaataaagttaagtgcgcgaactaa

SEQ ID NO: 159154 - DNA, 2406 bp, Enterobacter cloacae
atgcctatagacattaaacaattagtacatgacataacgcctgaaaaaaccgttttattttttggtgcgggttcatcaattccatctagagcacctagcgtggaaggaataattagaaaactggctgctagatttaaagaagatgcaaatggatatacccttagagagttcacaagcatactggaaaccaaatataccagatatgagatgatcaccgaattaagaaagatgtttgaagatcttaaacctactggtggaatactcaatactccactatatgactggaagtcgatatacaccacaaactatgatgagttaattgaacagagttataattcctcccaaaaaagaataagacccatttcatccaactttgacttttcaagtgccgggggggcggacactttaaaatacttcaaattacacggcacgatagataaggatatagttgacggcattcagtctaggataataattagtgacggagattacgatcaaactgtcgaatatagggaaaaactctgggatagatttaaaaatgatattagtgactctcatttaataataataggccattctctagcagatgctcacattaaagaacttattgaaaaaacagccaacataaatgcaatttccgggattggtaaagtttctttatttctttatagccgtgatgataacagggctatgctttatgagaagagaggatttaaagtttgcttcggaggcattgatgacttttttgcggagttagcagctgctaaacctcaggttgggccacaaagaaacgatcaagattacttttacaatactattcagttaagagccaccactcaagatgttaatcatttaatggctggagaaggtgatgcgattgcaatgttcaatggatggccagcactttattcagatattaaatcaggattgacgtttgagcgcgatattatagggttgagtgaccaacttatatcctcgcaagatattacctctctcataattcttggagctagtggtgttggaaaaacaaccgcagctagacaaatgctagttagatgcgttgataaagggatcatttgctgggagcataaaaatgattttaatttagaagctctagcctggctagacgtaagtaaagagcttgtaaaaaatgataaaataggtattttgtttatagatgaagctcattctcaattaaacgcaattaacgaattaattgatagattacgttctgataatatttctaatttgaagataatttgtgcttcatcgaagaatctttggaatcctcgcatcaaaacgcctaatatatacaaacatggtaaagatgttagcctgtctcaactatctagtgaagagatagatcgactcttgttcctgatagaaaacaatacaacaatgagagggttaactgaggagaattttagtggtttctccaggccagaaagaaaaaggcgcttagccgttagatgtgagtctgatatgtttgtttgcttgaaaaatatatttgcctctgaaaaatttgatgacattattttacgagaatatgcacatttatcatcggaacttcaagagatatataaaattgtagccgcaatggaaagtgcaggagtaagggttcatagacagttgatcatcagactgctaagcatccctagcgatgctattcaggctatcttagttaatctctcagagattataaacgaatataccgtcagtgaacgagagggtatttatggttggagagggcggcattcagtaatagtagacataattgcaaaatacaagtactcggacacttcagatataatatcattatttgacaaagtcattgattgtatttcaccaacatatgatatagaaatccgcacaattagagaactttgtaacatagaaaatggcttacagaggatttcagacaaaacagcgcaaaaccgactgttgcgtaaaatgatatcaatagcgcctggagaaagattgcctagacaccgactaattcgaaatatgattgatttgggtgagtttgataaagcagaaacagaaattagaatttttgacaaagattttagatctgacagtgcaattatgcgatacaaagtttctcttctgacggcaagagcagttaataccccaggaatcatgactgaagatcggattacaatcttaagggaagcagagaaagtagccatcattgctttgcagcgctatcctgatcataaatatatcttaagttcttattgttctcttgggctcgaactttatagaaaatcaaaagatataactgtatttgatgatgctataacaaggctaaaacaagctgaagagagaacatcagacccagaaatcagtaaattaatattaaaatttgaaagaattattactggtcaattaggaagtgaagaataa

SEQ ID NO: 159155 - DNA, 1158 bp, Enterobacter cloacae
atgttattgcgtgagtggtacaagaaggtccgagcttgttacgggataggttttggaaagcgagttgcgataggctctggattatttaacctagatggtgagattatcaaaggtgtgcatttaatcgagaaatcgcagattagctcaagattaatgactttggttaaacgggtcgagcacgaggctaagttattaccgcgtatttctagcttgttggaagaacatgcatcttggttaggtgagcaaggtgtattgatgcaatcttaccgacaggtgcggaatactctcattgccttgcagggatggtttatcaatccagatatatcattagagcagatgactcattcctccgagattttgcaaaacataaacgatcttcagatatcccttgaaaatgactcgttacagttaggggcgtttttacaattaaccccattggcttgcggtgcgtataaaaataatcaactgacgttagacactattaacgacacgctgaattttgccgagcaactggttgataagataaattgcgtatccttggctacccagatcagacatttggctagtggtagtgattacgatttactatgtcgtgatggtggggaaatagtttcgaaatggaatgaacagattaaaaatgctgagttatatgcgctagaaacaaagttagagcggagtcagtggctcaagtcgactgatggttctcttaatacattaatcgagcgcaacgaaagagcaatacagcaaccccgttggttgaacgggtgggttaactttattcgttgttacgagcagatgcatgaaaatggattgcagcgaatctggagtgctgtacttgcgggctcgctcccgattgaaaaagttgaattgggtttagcattagcaattcatgaccagctggcgcgggaggttattcacatccaccctgaattgatgagagtttccggctcacagcgcaatgctttgcagaagtcatttaaagattacgacaaaaaactgattgaattacaacgtcagcggattgcagcaaaaattgcttgccgaaatataccagaagggaattctggcggtaagaaaagtgaatatacagaactagctttgatcaaaaatgagttgggtaaaaaaaccagacatattccaattaggcaattggcctaa

SEQ ID NO: 159156 - DNA, 1092 bp, Enterobacter cloacae
  misc_feature (1065)..(1074): n is a, c, g, or t
gtgggggctaatgcagaaatatatgagcacccttggagcggtgtgaataacacacaaattcaattgtttgacagcgctcgtatagtcgatttgctacaaacttggcagacatcaattatcgactttcaacatagctatcaagaatatgtagataagtgggcgttagaaggcgaaagccttaatacgcttcaatatattgagcaattggtagaagatcagtcgaatcttccagtgttgtgtggttcagagcatttcccagcacttagtgagctagattcacccgatgccattgcacgggtgcgtcactatttagataggttcgagttgctacaaggtcattatgtggccttgagccaggttatcgagcctcaaaagctacgacttttagaacaaggacaatcgtgtgactttcctcgtgaagagctggaaaaatatggtgcagcagaggatttcactttacgtgatttggtcaggtggcttgaatccatccaatcaattcatgatgagttatcatctatttatgcgcaattaaacgatttcaaaaatgctttgccagatggtattgcttcgtatatcgatgattcgcaagctggattgctattctgctctgagttgttgtcgattctgggtgctttaccgactgagcttattagagttcgagatcctctttttgatgatgatgatatcgatgcagtattgcgcgacttaatgtgtcaaatcgaaacattgcgtcctttaagagatggtctatctactttgtatcaattggaccagttgccttcccaagagatgctcgcgcatgccgttgctgttatccagcaagggggattatttgcatggtttaagagtgattggcgtagtgccaaggcactgctcatggcgcaatctcgtaagcctgacactaagtttgctgagttaaaacgctgctcagctgatttgctcaagtattcggagctgttacaacggtttgaacaaagtgactttggtaatcaacttggtaatgcattccgagggttggacaccgactgtgaacaactcatgttattgcgtgattggtacaagaannnnnnnnnnactcatgttattgcgtga

SEQ ID NO: 159157 - DNA, 1056 bp, Enterobacter cloacae
gtgtttggcgctctcgcgcggtttgcggagctgcgtaacgagcacactgatgggcgccgccagggaagcccttctttcattatcgtcgccaaccaggcgccaggtccacatctgcagaagatgattgaggataagacgcttcctgctgatgtccgttttatctggccccagtcaaccgctgagcgccatcccgcacttcccactgcctgggacaccgtggctgatgcggccgcgtggtgcatcgcgcaagcagagcaactgaatttttcgttattgtcgccagaatccctgatctggaagctggccggtctggtccagctcgccgccaccggaggtgatgctgacggacagcatgcgttttatacccgggatcttcctgccctgttcgaacagctcatcgttcagttacaggacttccctgcaccgccgacactctaccgaccacaaagagaggaaccctcttttgtgtcggatgtgcggatacgcatcatttgcggcttgtccggtgcaggtaaaacagcttgggcagcacaggccgcccagcacagtacccaagtgtgtgcgtattacgatgctggcgaccttccaggccctgcacttgccagtacgctggttcgtgagctggcagcccggtttgcgactcaggagcaaggtggcctgcgaagaatactgctccctggtgccagtggcattgaagcgctgagaacgttcgacaccttcttgcagcaatggaacgacaacctgctgctggtactggataacgcgcatcgtatccctgtggagaacttgcaggatgttctgcacgccacaacccgtatccattttgtgctgctgtgccagccccatgacaatgtccgtcaactggaggcgatgactggacttcagcgtgaatcgttacagggatgggatatcgacacagtggctgccgcagtgaacgatctcggtgggcacgccagtgcgctgggatatgagcagctacgaagctacaccggagggttgccgctgtatgtcgaaagcgcggcgagagttgccgcagaggaatacaaagttgcttaa

SEQ ID NO: 159158 - DNA, 1167 bp, Enterobacter cloacae
atggcctcgttctatcgcatgagaaatggcgtaaaaaattatgcctggggcagccggacggctctgaatacgctgtttggcgtgccgaatccggatgagcagcctcaggctgaaatctggatgggggcgcatccggcagggtgttctgaaattgaagttggcgcgaacacggtttcattacaggacgcgatcgcaaaatcccccggccccgttttaggggaacggacgatggaaaaattttcaggacttccgttcttactgaagatactgtctgcagaaagcgcgctttcgctccaggtccatcccgataaacgccaggcggtagagggctacgccaggcagggaaatcgagctggagaagattataacgacgcaaatcataaacccgagttggtctatgcaatcacgccttttatggcgatgaacggttttcgtccctatcatgagattgtgaatcattttctgcgtctcagctcgcctgaactcatgcctgcgctggttcattttcgccataaccttaataatgaggggcttgaaaacttttttgtcggcctgatgcagcttgcaccacaggagaaacacactgttctgcggcagttggatgagagccttcaggctggggcctttgtccatttacaggaattcctcatccgcttgcagcgggactatccgggggatatcggcgtcctcgcaccgctgtttttacactgcataacgcttgagcctggcgaagcgatgtttttgcgggccggtaccctgcacgcctacgtttacggaaccgccgtagaagtgatggcgtgctctgataacgttttgcgcgcaggattaacaccgaaaaaaattaatttatctgaattagttaactgtacggcttttagtgagactcatgaacataacttaaagcttgttcctgatattgctggaaatgaaagccattatcatgttcccgtagaggatttccgtttctctgtaatagaaaactgccagcaacacagaattgaagtctttagcgcgcaaattttactagtgcttgaaggctacactacgttgcgcgatacatacggtgaagagatgacgttctgcgtcggtcagtcggtatttataccggctcagacagaagcttattttttgacacaaagcggacagtgctgcctggttcagtgctga

SEQ ID NO: 159159 - DNA, 1419 bp, Enterobacter cloacae
atgaatcggtatcaatttccggaagattttttttggggcgcagcggcgtcgggtcctcagacggaaggcatagcgcataagccgcaccgttctatctgggatagttggtatgcagaacagcccaaccgctttttccagcagattggtccgcagaaagtatgtgaaacctacagcaaatataaagaggacgttgcgctgatgaagcaaacgggatttaactcgtttcgtacatccattcagtggtcacggttgattgatgattttgaaactggcgccccaaacgcggaagccgtccggttttacaacaactacttagatgagatgatcgccagcggcattgagccaatgattaatctttatcatttcgatatgccggagattttgcaaaagcagtatggcggttttgaatcaccccatgtgacggatcttttcgcacggtttgcccgcacggcatttgagctatttggtcataaggtcaaatactggatcacctttaatgagccgatagtacctgttgaaggcggctatctttatgatttccattatccttgtaaaaaagatggcaagctggcggcgcaggttgcatttaacattatgctggcgcatgcaaaagcggtgcacatataccgagaacttgacctgcctggcgaaattggcgtggtgcttaacctgaccccctcgtacacccgaaacaacagcgacgaggataaaaaagcagcgtggtatgccgacctgttctttaatcgcagtttccttgatccgctggtgaagcatgaattcccgaaggaattatgtgaagtactcgcagcccatgattgcttgccagaaataaagaaagctgatgtagatctgataactcgttcgagggtagatttcctgggggttaactactatgttccgcgtcgggttaaagcgcgcgaatgcccctatgagcttgattacttcacgccagagtattacttcgagaactacagcgatcccgaagggcgcttcaatccgtatcgcgataataacgagatttaccccgaagcgatttacgatattgcctgcaacatccgcgataattacgacaatatgaagtggtatctggctgaaatcggtatcgccatggatatccagtcagaaggtccggttctggctgatgggtttattgatgacactttccgcatcgaattaatggaagaacacctccaacagctccatcgcgccatcagcgagggggcgaactgctttggggtacaccagtggacatttattgataactggtcttggataaatagctttaaacgtcgttacggtttctggcgactggatctggaaaccggagagcgacagataaagcgcaacgctatttggttcgctcaacttgctgcctctaacggatttacgcccggggcatttataaagggcaacaaataa

SEQ ID NO: 159160 - DNA, 315 bp, Enterobacter cloacae
atggaattagaagaacaagttatgggcatcatcattaacgcgggtcagtcgcgcagcctttgttatgaagccctcggctgcgcaaagcaaggtgattttgaagccgcagatcaactaatgaaagaggcgactcattttgcccgcgaagcgcaccttgttcaaacccagcttattgaagctgatgaaggcgaagggaaaaccaaaatgacgctggtgatggtgcatgcgcaggaccacctgatgacctccattcttgccagggagctggtgaccgaacttattcacatttaccgtacacgcccgcaccaggcataa

SEQ ID NO: 159161 - DNA, 906 bp, Enterobacter cloacae
atgcattatcttggactggatatcggtggcacaaaaatggaagctgtattgctttcagctcaaggcgattatctctggcgtaagcgccagccgactcagaaagaaagttacgctgagtttatgctgcatctggtgagccttattgatgatgcccgcgcggctagcccggaacccttcaccgtaggggtcggtctgcctggcgcaattgacccgcaaacggggctcatcaaaaattgcaattgcctggttcttaatggccacgatctgaaagccgatcttgcctcacgtatccagcagccagtgtggattgccaatgacgctgattgttttactctctctgaagcggtagatggcgctggtgcaaaggctgacaccgtatttggtgtgattatcggtacggggtgtggcggtgggatcgccgtgcgccggcatttgttacaaggtccaaacgccattgccggcgaatgggggcacaacccgcttccggggtacgcaccagcgattgacggccccgctcagccctgctactgcggcaagcacaactgtattgaatcctttatttccggtaccggttttgcccgtcgtttcccgggaaaccttacctctcaggaaattatcagctctgcagaacagggagaaccgaaggcacgcgaacactggcggcattttattgatgcatttgcccgtagcctggcgtcagtcatcaatattctggatccccaggtcattgtgttaggaggaggattgtcgaatgtctgcagaatctatgatgacctgcctgtcgcgattcttccttatctcttttctgaaacctgccatacgcgcattgttccggcgcgctttggcgacgccagtggcgtacgtggcgcagcctggcttccccggctgagcgcgaacgaagcatga

SEQ ID NO: 159162 - DNA, 1503 bp, Enterobacter cloacae
gtggctaagataatcattaaaaaattacggcatattaatagtcttgagtttgatattcctggtcctggagtttggttacttacaggcgccaatggtactggcaagtcctctgtcctaggttgcctgcgccgaattgggtataggaacgcttttcctgtccactttccggcatcaagaaagtcagatcgacttgactccaatgagggtgcctcgattggttacgtgaccagtaatggtgaagtagcatacacttacgttactgaacgatggtcaccaactcctaaaagtgctagtaagtttttacaaggtttaggttaccctgaaactatttatgtagccgctgatgctgaccggattgaaccccgaaaggaggatttttcaccgaagaagcttcgccctgctcagcaagatatcgtcgatgctgctaataaaatatttgggacgcaaaagttttctgctttgaaggtaaccaacgttcgaacgggtattggttctcaagcgtttgttttagagctgccgggtcctagcaagcaagcaaaaagttactactcagaaaagaattttagccttggtgaaatctgtattctaaagcttttgcgtaagctatcgtcatgtaagcgtggagcgatgattttaattgatgagatcgaactggcattgcatccgacagcgcaagcagaattgcttgaatatctaaaaagaatcgctaaagataaatctcttacaatcgtagtgtccacgcactcggctaccttaataaaacaagctagccgaggcagtattctgcacttgcaatcggatgagaatggcaatgtaatttgcgctaagaattgcttcccttcctatgtgttaggtgccttggcatatcaagaggaatcagcctctgacgttatcatatatgttgaagatgaagctgcccgaacgattctcgaacagtttatacgaagttttctggcagtcacaattgcccagcagcatttaacgccaagtgtcaccgtaattgcggtgggaggctttgtagaagtattgaggttttatgtccggcagcggcccatgctaccatcaattactcggtcttacgtgatgcttgatgccgatgctgaagttgatctcgagaatgctacgaagcaagacctgatcagcctctacaaagaggagaggcagagaatatcgtttttaccgttcacgccggaggaaggggttgctcaatatttacacatgaatagggatcacttagtgactgaaattcgtctgtacttcggactcaatgttatacatcttcgatcgcgcgatgtccgccaacctcctcagcagggaacccctaagtcgcgtgatatttgtaaggacatagttaatgaagtttgtgatgtattattggcccagattccgaacgcgacattcataagtgtaaaggaggctgtattaaagatttttgctcagcactactttgcagagaatcggccagctatcatgcagctaattgggccaataatccgaggttag

SEQ ID NO: 159163 - DNA, 1014 bp, Enterobacter cloacae
atggaaatattaattgatgaatcaggttcatttactcctgaaagtgaactagaaaattcttggagtgtagttgctgcttatatttgtccggaaactgaaaaaaggaaatataggaatgccctcaataatttaaaaaaaaggaatggtttgggcagacaagagataaaattagttaacattagtgaaagtaactatattttgtttcttcaagaaatttcgcagctgaacggtagtcttttttgtgttgtaacagactcatattataataataaaagctttatcgaaaatcataaagatacgcatgtgaaaaccatagtaaatagtattgagcagatgcgttatcacgagggaaaacttgctcaacatttgatggcaaaagaattattgtctgtatctctcccactttatattcagttgatgtgccaaataagattagtgcatacaataatctcccaatctgtaaattactatgcacaacgacaaccacagacgttaaaaaaattcaaatggcgtttagatcaaaaacagccgtctcacaaaactaagtatgagttgatatttgaaaaattttcaccagctttgttgcaaatgtatacccttgaaaaccctttaggtatagtgaatggttttaactataaatatatgagagagtttatttataatgaaggagagatacctaattatctgatcgagaaaaaaacatccttagctaatagccgcgcttttaacatccaaaaaatattacgggatgacattagctatgaggattcaatgaaaaatgacggtttgcaagttatagatcttttggcttctggtatgcgtaagcttttaaaaatgagatttgcagataatactttaatagccaatctactcggcagtctcatgatacagcagcaatataataatccgcccatagacataattgttttcgatgaaaaatctgctgctttaagaaaagaattagatgagcttgtaaaaatattaattaaaaactcaaaacgaatgatacgttga

SEQ ID NO: 159164 - DNA, 159 bp, Enterobacter cloacae
atggaatggaaggttgttgagactattgcgagcccggaaagcggaactatcttttgcaaagttgaaacacagtatggcctgaattatatcctgtggttaaagggagattattacgttcgtacaggtgaaatcatcaccacctcaaaccaggtgtcctga

SEQ ID NO: 159165 - DNA, 330 bp, Enterobacter cloacae
atgtacatttcatctgtaccggccacggtgccgtttttgtcacgcctgtcacccgtacaggtctggcagcaactgttagcgtatcttctggaacatcattacggtttggcacttaacgacacgccattccaggacgacgcggccattcaggaacatatcgaggcgggggtaactctagccgatgcggtgaattttctggtcgaaaagtacgaactagttcgtatcgacaggaagggattttcatggcaagagcagaccccgtatattttcgtagtagatattctgcgagcaaggcgctctaccggcttgctaaaaactaatgtgaaataa

SEQ ID NO: 159166 - DNA, 300 bp, Enterobacter cloacae
atgcattgtaatataacagacttggttccgaaaactattcagtataaatatatcaaatctcatggccccctaaataaatatcagctaaagcggatagagcagacagttgataaagcactggatgaataccctagggtgctggcgataagagtggagcttcatatgcctgtatgcaggccgctctgcgatctgctccttgcagatgattatgccagaacagatgccgctgcaatctcacggttcaatgcttcacttaatgcgaagataaagcactatgagctcaaacaagcgggtacgtga

SEQ ID NO: 159167 - DNA, 132 bp, Enterobacter cloacae
atgagcattaaacccggcccaaagcctattgctaaatcaactggaaaagaagataaacgacaacgtgtcacgccagaaagcaaacctaaacaccctagcctaaaagatcacaaccacaaaaagggtgaatag

SEQ ID NO: 159168 - DNA, 501 bp, Enterobacter cloacae
atgccggatccagtaaatactacgacaacaattgtttggacaataagagatatactctatgcctttggggctggtatttcgacgttagctgccagtgtcgcagcattctgcgcatatagaaccgtaaagcgagatttaaactcattaggcgattccgagctaaaaactcttgaaatgataacaaaagcagaaactgattttgccaagtacaatgccgagatcatgaagcatagagaagaaaaaggtgaagacttctgcttgagtcaatctatgaaagctctttgggatgtacaccttcataatgtactcaatacctatgaaatatcatgccagcgttttcgcgatggaaagttggacaaaaaacgtttcggtaaaacctatgctcgccgtatcaccacaatttgctcaagccccgtctatgggccaataattaacgcctcccctctgaactacagtgcgttgttgaaagtaaatattgagttaaatgaccctgaagactaa

SEQ ID NO: 159169 - DNA, 474 bp, Enterobacter cloacae
atgtctaagaaatgctatccgccactcttcacaccaggttttcatgatattgatgacaaccagttgaaaaaaatatgtgttgatagttttcctaagtcaactcgtagatccatgctatactgtaatttcatacagttaattaccaacttgcgcgttcttaataagcaatttaattgctttctggaaatttgggtagacggctcatttacaactgaaaaactagatcccgatgatgtcgatatactagttgttatggattttgatgctataaatgccattcctataatgtttgcccctcaggttgaaagtctcttggatagggattttataaagttaaattatcatattgaccttttacctcttttcaaaggggatccaaagtctgattatacaaacgacaggatgtattggcgagggtgctttggatacgatagagaggaaacgccaaaaggtttagcgagggttgtagtatga

SEQ ID NO: 159170 - DNA, 933 bp, Enterobacter cloacae
atgagcacagagccaaaatttataccattaaaacaaaggattgcgttcattcaggatcgtatgaacaaaatcggccctgctcatgaaatgactcttgccgacagaattttagcgcgcagcttagattcccatttaagcgatttgagggctgaactgagatctgctgagatagagcacccgctccaagatttcatggagttaaggttcaaaggttttcttgttgacgcaggaactatgcctctggaattactttctgtcatttctggaaaccttgctggcctagttcaaaaagccgtacatcggatttcatcaggaaaagactcacgcaaggtacctgtagggataaagcagtctctagatatgagactggctgatttgaggcctggttcaacaaagctagccgtaacgttctccacaggggcatgtgaactggttgatacggtttctagccatgctgtaaaagaaattttctcagtactagaggccactgacgaagattcatttatttctaaacttgctgaaattgggtcgaattcaacgcataaccttaaaaacattgtagaagagtgcgagcgcaatggcttagcagtagaattatcttggatcggaccgttaagtgaaggtaggcgttcggtttccttaaacaaagaagctattgataggctcacaaaaaggttagctttcacggaaatatccaaaccgtggaatgaaattatcacaggtgagctatcactgctctctatgtatggcaaactcgaagtggtgaacgctgacggaaagataaaggcatcatatcctattgatatgcttagtgaaatacagtcaagatttaaagtaggctcacacgtatcaatggttgctagcgttacagaaattcataatgacagattaaagatctctagacgtaactatatgattaaaagtcttaactaa

SEQ ID NO: 159171 - DNA, 885 bp, Enterobacter cloacae
atgtctgatttcacagaacggggcattaatgtcctgaagcaacatttatccattcttcccgggcatataaccagtatggtgctggaacatatacgccagagcattcattacgaaccggtgattggcatcatggggaaatcaggggtcggaaaatcctcgctttgcaatgccctttttgaacatcctctcagcccggttagtcatgcggaaggctgcacacgtaaacctttgcactttaccctgaatgcaggaggacgctgcctgacgctggtcgatctgccgggcgcaggtgaatcgctgaagcatgatgagatatatcgtcagatgtatcaggaacagttaccgaagctggatctcatcctctgggtgatgaaagccgatgaccgggcctgtaccacagacgaagagttccaccgttttttactggattgtggcgtatcgacagacagcattgttttcgttatcaaccaggctgataaagctgagccagcgctggaatgggatcgtgaaaaagtttctccttctgcagagcaactgatgacgctcacagccagaagtgctgccgtttcccgtcagttctttaccccttacccggtgcatgcagtctcagctaaaaccggttacaacatgtctcgcatggtagaaaccataatttttgccctgccaccagaggcgaccagtggtgtgtttcgccagatcaaagaagaacaccgcaccaaagaatcggagacgaaggcacgaaaggattttgcggatttgctgggagaattagtgagcaggattctggaggccattccactcccaagcgtgatacgcaacgggctgggagtgctcagagaagggctggagaatgcagctaccgcaatatggcactggtttttttga

SEQ ID NO: 159172 - DNA, 891 bp, Enterobacter cloacae
atgaaaggtgtgagtgtgatttttgatgatttatatctacagctgcatgccgcctttgaagacaagtttcttgagctgggaaggaaacttgaagttgaaaagaaaggggaatgccaggatattctgcgtacgtacaggcaaagcgctcgcgataaaattgaagaatttaaaattattgaattggctaaaaagcagggtcaacctgattttgatagatcttgtagtgataatattcggtactcacaggagtttataaatcttcatgggataatggttgagaagcctttagtctataagaaaacgtatgaggaagttcgggataaaaatcgtagcgacatagttggtcataaactgacagggcttgcgagactatttgatacgcattatgaatccttatatatatctatggctgttgaagatttttactgggcacaatttcaatacgagtcaggtaataaaaaggagagctgtaaattcctgctcgatgcattttcttatattaatagcagcatttcacgtgatgatagtacagaatcacaggagtatcatagattcaggcgtgatttcgataaagcatgcaggaaaacgaattcaagcaagggagggaggaataaactgcaagatcttgagcatctgaagcattgtgttgtgatttgtgttgagaatctttctgccttaaatggtgttcctgttggtggatgggaatcgaagcagaagttttatgaatacatcattccagatctctgtatgtatgataaaaaaataaatcctggcagatggtatggtgatgcggggaacagggaagaatctatccgtaccaaactcgacacatggtcaaggggggagcttaaagatgtaatcaataaggttttaaggtccccaaaaagttga

SEQ ID NO: 159173 - DNA, 168 bp, Enterobacter cloacae
atgcaacaactgtcggataaggaagtagacgacgttcatctaaataacttatatgggaatctctcgcaagtacgggcagatcttttcctgataagtcagtctatgcttatcttcggcttcatgagctatgatggacacccgtactctccgttctcattagcaccatga

SEQ ID NO: 159174 - DNA, 141 bp, Enterobacter cloacae
atgtacagggtaaagcagtggttcggtggttcactggcgtcgcgtgactacgatggtcaggttgtagagactttggccatggtgcgtgcgctgaacaaaatggcaaaagcaggcatgccagaaagcgtgtgtattatctga

SEQ ID NO: 159175 - DNA, 1134 bp, Enterobacter cloacae
atgctcaaaatcagaatgcttaaagctggcaacggggactgtatttttatacagacagattgtgagtttatcttgatcgatggaggaaccgcgcaatctttcaatgactggaaagagtgcattattggacatgtagcaaagattgattcaattatcgttacacatattgataatgatcatatcaatgggataatcaaattgctagaccatccagattgcccaactatcggtcaagtatatttcaatggtgcagagcagctgtttggtaaactgaatgagttttctcaaacagagcgtactgttgaaatgaaactacttgctctctcagaagagtgttctgctattgaagaaaaagagttaattggatactctgaaggaacatcactttcttatatattatccagtaaaggcatcgagtgtaatccagttgtctctggtggtgctgtttatcggggcgtttgcgagtttttcgaaattggttctattaaattcactctaattagcccaatccaagattctctctacgaacttcagcagttttggcaatgtaaattagcagagcggaggataaaaccacgcgtcattagcaaaaattactatgatgctttcgaaaaatatattggagaaataagagaggatgtgaatgaaaataataaaatttcctctgtcaaccaatgctctgtagaagcactagcaaatacgaaatttgaggatgatacttcgccaacgaataggagtagtttttcattcttagttgagtttgacggtaaaagaattctttatttaggggattgtaatgcgactgttgttactgattggttagagctacaaaatgagaaggttttaaacgttgatattgttaagatctctcaccatgggagcaaaaacaatacgaatctagaacttctaaggcgaataaatagcccgaaatactttattagcaccaatggtaattcgcatggacacccggacctagaaacattagcaagaattgcttttgttaatagcaataaagaaatcgaaatatattttaactatgctcttgatgtaataccagactggttcatcgctgacattgcaaaaaactatccaatgataaagtttttaatgaattcttgtgaggtggaactatga

SEQ ID NO: 159176 - DNA, 756 bp, Enterobacter cloacae
atgggtgacaagttttctcaaactacagttacacagttagcaaagcgtgcgggttatatatgtagtaatcctaaatgtaatagaatgacaattggaccgagcaaaaatgcagatgattccattattgcaggaatagcgtcacatattagagcaggtagtaaaggtgggccacgatatgacgttaaccaaacgtctcaacaacggaaaagtatcactaatggactttggctttgtgggacgtgctcttatatgattgataagaataatggatccgattactcagtatctcaattagaagactggaagaaacttcatgagggaatgattaaagatgcacttgagggttcaaagagaattatatttagaatgctacagagcacccctggagattaccgtgcagctgaagaaattgtgactatcctttctgataaaggaatgcttttacttccttatgacatggaaaatcctgaatacgtcttacgttcagtagaggcaatgcgcagagatcttgtaattctggcaagagatttggatacaaactcgaaagtgaaaattattactgagtctatggctaaggcatgccgttcttacatgaaccacacatccgtcaataatgactttacgaaaataaatacagcacttggagcgttcaggaagattattggattgaatctgggtgagcttttatatgtttatgaagtcgaaccagtgaatgaagagttgcttagtattattcccaagtttcacataagctaa

SEQ ID NO: 159177 - DNA, 1362 bp, Enterobacter cloacae
atgactcggagtgaaataaacgtctgggatgtgagacgaggcacaaatagtcctcgagttgaggagattcgatctgaagctcagcgcgacttttctcgattgattcactcgtctactttcagacgattgcaatccaagacacaggttcttggtctgggtgaaagtgatttctaccgcacacgactgactcactctatggaagtcgcccaaatcggttcaggtcttcttgctaagctgaaaataaaatataaaggtaaagaggaagagcaatttttaccagataacgatctgatgcaaacagtatgtctcgcacatgatattggacatcctccatttggtcacggcggtgaggtagctcttaactactgtatgctggattacggtggttttgaaggaaacggccagacgcttcgcattctctcgaaactagataagtataccttagaacacggactcgatcctacacgcagacttctgctaggcatactgaaatatccggttaaatactcggatctagtggttaaaaaagaccgtattccggccactaacggatcaccgaactggctctttaagtcatctgattttaaacctccaaaatgctatctagattcagaatgcgatattgtagaattcgctctatcaccatttactgaacaggatcggaggctttttacttccgttgaagatggtcagaccaaatccgatcataaaaaagcttcttataaagctctcgatacaaccatcatggatcttgccgatgaaatatcgtattcgctgcacgatttggaggatgctatttctctcggaatggtgacacgagaaatgtggattgagcatttcagtggacatgaaactctatttactgactgccatggaaaaacattttccggaaaatgtgaatctgtcgctgatagcctttttggtaaaagttacaagagaaaagagtgcattgggatgctggttcacctgatgattacaagtgttgagcttaatacaaagaatgcagcattcgaatgtggcatgctcaaatataatgcggtccttcctaaagcggtcgaagcactaaggttgaaaattttcaaactggtcaaaaacaaagtaattaagcatgaaaatgtacagcagcttgaattcaagggacaaaagctgattgttgagcttttcggtgtgctggccaatgatccgtgtcggtttctacctgcctcaacgagggaaatttacgagcagcagattagcttagatgagaaggctggtatgcgagtcatttgcgactatgtttcagggatgactgatgactatgcaactaagctttatgagaagatccttgttccacgcaaaggatctatttttgaccatctctga

SEQ ID NO: 159178 - DNA, 279 bp, Enterobacter cloacae
atgattaggtgccacctgaacagactgatgggtgaacgcagattaaaggttgccgatgtggtacgcgatacaggacttccccgtagtactgtcacagcgctctggagagataacgccacccggattgagctgccagtgctaagcatgctctgtcgttattttaattgtgatgtcagtgcgttactggagtttagttcggatgagaattacgttgaattatctcgtccagaaaataattcaaacaattttttacctcgtgcctggtttatgcgtaaataa

SEQ ID NO: 159179 - DNA, 192 bp, Enterobacter cloacae
atgacaggccctttctcaggagctaactcagttgcaaagtcagagttaagacgttatgcgccctaccagctgcgtgatgtagttcgctataacaaagcgttaaaatatcttgaggatattggtaggatatatataaaaaagtacaaaaacggtaacggcactgtcagtcaactgattgatatcaatcgttaa

SEQ ID NO: 159180 - DNA, 471 bp, Enterobacter cloacae
ttgctgagtattcaggcgaagttctttatccagatgttcacggattgtacgtctaatcatatggcgctggatgagcatcgggtcaatatcacctacgacatcacctactttcatataatatgtattagaaggcgtttccagtgtaagatagccttctttgcccgtgcggatctcgcttatccggtatccctgataaatatcacgtcctgtttcgtcatcaagtgtcataccgtcatacactgtaatctcagaacgatttacgctcccttttttatcggctatatcaacaataacagtcgcgttaatgttatttttattactgttaatactgaccagttttacataggggctgttgcttgcattctggacttcaagcccggcaacttcgatctgtttgaccagcttctgattgtaagcatcaatggcatcgagacgatagaccatatgatgtttatgcacatgtgtcgctga

SEQ ID NO: 159181 - DNA, 750 bp, Enterobacter cloacae
atggattctgacgataaaaaatcaggtaaattttcaggtgcaacggcagcttttggggcattaggcagcatcggtaagaaagttcttgcaaagaaagacaccgcccaaagtgaggatggtgaaatcactgaatcaaaagtcatgcaggtactggactgggcctatgataaagcctgtaatggtgttgtaggtttggattcggcgcaagagcttgctgcaccatatttgaatggtgatggagaacttgttgataaggttaatgcgctaatacgatggcaaaatacaaaagcgggaacatcaggctttatcaccggccttggtggaataataacgctcccggtggccattccagctaacatttcaagcgtcatatttatacaagttcgtatgatcgcagcaattgcacatatgggcgggtatgatttaaaagatgaccgtgttaagacacttgtatatacctgtttaaccggaaatgctgcgaaggatatagtgaaaaatataggtataacaattagtacaaaaatgacaaataccttaattaaaaatatttctggtgaaacaataaaagctataaataaagcggtaggatttaggcttataactaagtttgggcaaaaaggtgctattaatcttggtaaagcaataccactagttggtggcgtcgttggtgctacatttgatagtgtatccaccaatactattgggaatatatcccgtaatattttcattgaagaaaaaatacctgaatga

SEQ ID NO: 159182 - DNA, 141 bp, Enterobacter cloacae
atggatgatcagttaaaacaaagcgctctcgattttcacgagtttcctgttccgggtaaaatccaggtatccccgaccaaaccgctcgcgacccagcgcgatctggcgctggcctactcgccaggcgtagctgccccgtaa

SEQ ID NO: 159183 - DNA, 1218 bp, Enterobacter cloacae
atgaaaccatcaatcaggcgctcaaccgcagcgctgctggcatcgtcattgttattaacaattggccgcggggcaacgctgccctttatgaccatatatctcacacgcgtgtacgatatgagcgtggagaatattggctatgcccttaccgtggcgttgaccatcggcgtggtgtttagcctggggtttggcatcctggcggataagttcgacaaaaaacgctatatgctgatcgccatcgtggcctttatcgccgggtttgtggcgattccgctggtgaataacgtgacgctggtggtgctgttctttgccctgattaactgcgcctattccgtcttctcaacggtgctgaaagcatggtttgccgacgtgctgacctccagcgaaaaggcgcgcgttttctcactcaactacagtttcctgaacattggctggacgatcgggccgccgatcggcaccctgctggtgatgtacagcctgcaactgccgttctggctggccgccttctgcgccgcactgccgctcgggtttatccatttctttgtgcagaaaagcatagcctcagacagccctgaggagaaaatgccgtggcagccctcggtgctgctgaaagaccgggcgctgttctggtacacgctctccggcctgctggcgtcgtatgtgggtggatcgttcgccacctgcatttcccagtatgtcctcgccgcacatgcggacagtgatttcgcagaaaaggtggtggccgttgtgctgcccgtcaacgcggcggtggtcgtcaccctgcaatacgcgcttggacgtaagatcaccgccagcaatatccgtccgctaatgaccgccgcgacgctttttttcatcctcgggctgggcgggtttatgctttccggcgagaacctgatttactgggggatcgcggcggcgattttcaccctgggtgaaattatttatgcaccgggtgaatacatgctgatcgacaatatcgccccgccgggcatgaaggcgagctatttctccgcccaggcgctgggctggctcggcgcggcggcgaacccgatgatcaccgggctcatcctgacccatctgccgcactggtcattatttatcattatgatggccgccatcattgcggcctggctgatgatattgcgcgggatgagcgtgaaaagtgaagatagcgtgtcgggtggcgctgcgcttacccgaccgacaaaaccctaa

SEQ ID NO: 159184 - DNA, 1416 bp, Enterobacter cloacae
atggaaaaagaaaaaattggcgcatttcctgcaaaaagattttttgtggacatgctcacaagggatattgagctacaagatgcgattttagatcttcttgataactgccttgatggggccttacgctcagtctcagagaatcccgataaccgagacagagaaaggatctatgaaggttttgaagcaaaaattaattttgatgaccatagcttcacaattgaagataattgcggcggcatatcggggaaattagcgacagattatgctttcaggctaggacgaccaaacgatagagagggtgagaaaatacctaccatcggaatctatggcataggtatgaagcgagccatattcaaaatgggcacggcatccgaagttttaagcaaaacgaaagacgaacaatttaaagttgccattactcctgaatggatatcagacgatgataaatgggaattagaacttgaaagaactaatgttgatttgaatcatccgggtgttaagatcagcgttagtgaattgcgggaagacgtaagcaacatatttacaccagacagaggatttgacgaacgtctaaatattgctatcgcgaatcattacagtctcattattaataaaggctttaaggtttatgttaataataaagaggtgaaacctaatctgacaaccttgatgatagatgaaaatgctttcactgaaggtaataatggtataaccccatatttttataagggcgagagtaaaggtgtatcaatcaaaatcgctgtagggttttatagagatttagtcactgatgatgaagaacggtctatcctttctggaaaaacaacaactgagaaggctggttggacagtaatctgtaatgaccgtgttgtcttacatgcagataaaacccgtctgactggatggggtgaagcgggcgtcccacaatatcacactcagtttatagggatagcaggcgttgtgatctttacttctgatgatgctgaaaaactccctataactacaactaagcgtggtgtagatggtaactccgacatttaccttgcaacaaaagattttatgagagaagggatgaaactctttaccgattttactaatcgctggaagggtaattctgaagcaaaaagaaaaatgttttctgacgcaccacaaacactctcacttaataacaaaaacgttgacagtgtagttcctgaaaataaatggtcaaaggtcaccaggtctattggcggcaatgcttacaaacctaaacttcctgttccaaaggaatctgaccctctcaagcaaatcaaattcaacagaaagtcgagtgaaataaaactagtttcacaattccttttcgatgatgattccttcgcacctacggatgttggtaattattgcttcgagcagtttctggagagagcaaaaaaatga

SEQ ID NO: 159185 - DNA, 345 bp, Enterobacter cloacae
atgattcccgttcatcttcagactggcgaaaacatcgtagtaaaagctttcagtgtgattctggtttgccagcgtgcgcatgttcaccagtccgagaaccgcactctgtacacgaccaacgttcagaacaccgtcatatcccttctcacggcctttgagcgtacagcctcgcgtcatattataaccaaagtcctgatcgcacagagaacgtgccaaagcgctatctgtcatgccgcgaaatttttcgttaggctgcatgtttgccagcgatttttgcactggcgcaaggttgagatcggcaaccagcagccgctggacgggcttcttgtttccggcataacctaa

SEQ ID NO: 159186 - DNA, 219 bp, Enterobacter cloacae
atgttaaatctgctgattggtggcaagaacatcatcttgaggccgaaaagaaggtggctgaatgcaaggcttctggcagtgatagtgacaattgtcaaaatgctaaagatggattgtttagatataagcaattacatgcagcagaaccttcctttaaagatgcatttaaggggattgttaaagataaaaattaacgggagctgttatggcaacctctga

SEQ ID NO: 159187 - DNA, 243 bp, Enterobacter cloacae
gtgaaggaagaaatagcatggttggttgaggcggattttgagggggaagaccttgataataatgaataccgtctgttccttacgtatgaaaacgatgaggatttaaaagaacagattgatgatttattccgtgaaatcaatatgttcgctgacatgaggaattgtgtcgtggatgatatgacgctgacaaacgagaaaacaggcaagagctggaatgagtatgacggcggatggtatgtgtag

SEQ ID NO: 159188 - DNA, 153 bp, Enterobacter cloacae
atgcactacagcgaaaaggcacttttcgcccttacctatctctccgctaaaagtcagctaaaaacttggtctggcagggaggggggcaaaatctggttaggtgtgctcgttgacaccaggagcaagtattcctattattgtgttgatagttaa

SEQ ID NO: 159189 - DNA, 243 bp, Enterobacter cloacae
atggccagaacaacaagcgttacgattggcgaacaactcgattcgtttatcagtcgattaatagacagtggccgttatggctctgcgagtgaagttatgcgttctgctctgcgattactggagcaacaggaaacaaatgatgaagttgttcgccaggcagtaattaccgggctggaaagcggtgaaagctcgctatcactgcgggatattgcagaaaaaagaaagctgagacatcgtgtataa

SEQ ID NO: 159190 - DNA, 285 bp, Enterobacter cloacae
gtgtataaactcaccgaacgggcagcagacgacttcgccgggatttatgactatacgctcttgaaatttggtgaagctcaggcagatcattatacagacgcacttgaggcatttttcgagacacttgccggaatgccagatatgggacgtgactaccatgccgtttctggtgtgatgcgcattgaatttcagcgacacgccattttttatacggttcgtgatacggatattctgattgcacgtattttgcaccaacagatgaaccataaacgccatttactgtaa

SEQ ID NO: 159191 - DNA, 228 bp, Enterobacter cloacae
atggcactgactaaacaacagacatcaaaaacaatgagtttcggtgagcatcgggatcttgaaaaagtcgtcaatagcacacccacgggaaagcaaaagagagtcaatgttaactttgatgaagaaatacatatccgcttcaaagctgcgtgtgcaaaacaaggcacatctattactgatgtgataaaggatttggtcgataattggctgaaagaaaatgacagttaa

SEQ ID NO: 159192 - DNA, 621 bp, Enterobacter cloacae
atgaaaattatcgcgttcctcaaccctaaaggtggctccggtaaaacgacggcaacaatcaacgtcagtagctgccttgccagttcgggtaagaaaattgcagttgtagatacagacccacaaatgagcctgactaactggaacaaagcagagaaagcagcattcgatgtttataccgcagcatcagagaaagacgtttaccaggtaagaaaggatctggctgaatatgactttgtgattattgatggagccggttctctgtcagttattacttccgcagcggtgatggtcagcgacctgattatcatcccagtaacacccagccctctggatttttccgctgctggttctgtagtcactgtgctggaagcccaggtttataatcgtccggtagaagctcgattcctcatcacacggaaaatcgagcaagccaccatgcttaacgtcctgaaagatagcattgctcagacgggtattaagccgtttaaaactgcgatcacacaacggcaaagttacgttaaatctgtcatggagggtgagagcgttttcgataccaacgatggagcagctaagggcgagatagccattttgacacgagaaatacttgaatcatttgagtaa

SEQ ID NO: 159193 - DNA, 303 bp, Enterobacter cloacae
gtgacaaccacactgtgggtgccggtgcagaacggcagcaaatttacccgtgggaagaaaaaggtcagagaagatattgcctggctggttgagtgcgactatgacggaaaggtgttggacattaatgagtacagcctgatttttacgtatagagatgaggccgatttgaaagagcagattgacgaactttttgacgagatttaccgcactgctgagatacgtaactgcgtgatcgatgacatgacgctaaccaatgatgcgactaatcgaagctggaaggaatacgatggaggttggcaataa

SEQ ID NO: 159194 - DNA, 2688 bp, Enterobacter cloacae; identical to SEQ ID NO: 128574

SEQ ID NO: 159195 - DNA, 696 bp, Enterobacter cloacae
atgtctctgatccgaaaagccttcaaacgcctgcattatcctgccgatgttatcgcccagtgcgtccgctggtatctggtttattccctgagtctgcgcgatctcgaagaaatgatgactgagcgcggtatccccgttgatcattccacgcttcatcgctgggttattcgcctggtgccgttactggacaaagcgtttcgtcgacataaacgttccgtgggccgccagtggcgaatggatgaaacgtacatcaaagtcaaaggtcagtggaagtatttgtatcgtgcagtcgatacgacgggtcagaccatcgacttcctgctgaccgccaaacgaaatgctgcagcggcgctacgtttctttcgcaaggccatccggcgccagggcgaaccggaggttgtcaccattgataaaagcggtgccaacacggccgcgttggccacactcaatgctgatcaacctgatgaagaagccatcaccatcaggcagagtaagtacctgaataaccttgttgaacaagatcatcggaatatcaaacggcgaatacggttgatgctgggattcaaatcattccgacgggcacagacgcttctggccggcatcgaattgcttcacatgatacgcaaagggcaatatcaacatccgcaaagtgatggattgtcacctgcggaacaattctatctgctggccgcttaa

SEQ ID NO: 159196 - DNA, 123 bp, Enterobacter cloacae
atgacgattttactctggattgttggaggtctggctgcatggtggctctttggcttttgctggctcagattgtttgtcggtgatgaaacagaaaaagattatgaagaatgcccctatgattaa

SEQ ID NO: 159197 - DNA, 273 bp, Enterobacter cloacae
atgagcatcatcgaaatgatattaggcggtattgctgcgctggtggccgtcgcgatcagtggtttttttgccgggaatgttcgtggaaaagcagaagaaaaagccaggcagcagcgcaacgaagagaacgcagcggctgccgttgcggcggcagaacgtaaagcggaagtcactaaagaggccagtaatgtccagcagactgttaatcacatgcctgatgacgatgttgatcacgagttgcgcaaaaacttcacccgtcccggaggtgattga

SEQ ID NO: 159198 - DNA, 216 bp, Enterobacter cloacae
atgaacaatatagcgagtgagagacaatctctcggactaacacaagagcaattggcgttgatgtttgggtggcgccaatcgcgcatctcgaactatgaaaatggcactcgcaaaccaaatctgagtgattgccgccgcatagttgaaaaatttaatgagctcggatctcaatgtaccctcgatagcatttttccacctaactcacatgaggagtga

SEQ ID NO: 159199 - DNA, 2154 bp, Enterobacter cloacae
atgattgccctggcgctaagcctgattgcgattcctttttctcgttatatctctccacgggccatcgtcagcgaaaatgatgtttatctggcgtggttgcccttaagtgccatgctcgccatcgtgttgttatttggacgacgggcaatcattcctttgctgttaagttttagtattactaatatttataatcttgatttagcaccactacaatctgccgtattattatgttgtcagacgtttaccgtcttcgccgcctgtggcgtcatccgtctggtgctgggcaagcgctggcgacacagcatgccgaataagtacattggcatacgtattttctggctcggatttatggtgcctgtgggcatcaaattatcgatgtatctggcgggatatttatttgatttcccggtgacaatctcctcctatttcggcgaaggctctgcaatttataacgttatcgatattcagagtctgatttgtgccgccctgattttcaccatgatgttctattatccgttaagaatgattattaatcctcgctatgcccgaacattctggcggcgaagcgtgaagcccctcttttgtcacaaaaaagcgttatttatcgttgtgtggctgatgctgttgatctcgatgatcgctattttatgcgcgccttttgagtcgcagtttattgcgggttatttgatgccaatcgttttcattcttttcaccctggggattggtcgtctgaactatgcgctcatctctttattctgggcggcctcggcgctcatgctgttgacctataattataattttcttaatggcgttgaatcgggccactcgctctcctttatcctgtcggtgcttatctctttcgccatctgcctgctttacatgtcgcggatctatcagaaaagtgaatggctgaaacaggggtggcaggagagggcgcttaccgatccgctcaccggtcttcctaacattcgtgcgctggaagtgtttttacagcaccatcccgaggccaaagtctgctgcctgcgcctggataatctcgaattcctgagccgtcactacggcatcctcatgcgtgtacattgtaaaaagatgataaccgcgtcgctgcaaccgttattgcaaaaagacgagaagctcttccagttgccgggcagtgagctggtagtggtcttgctgggtccgggcacggctgaacgtctgcaatatatggttgatcatctgaacagccgtaagattatctggaacaagactgagctcgacatcgagtttggcgcctcctggggtgaagtgccggatggagaaagcctgcatcacacgctgggtcagctgagctggctctccgagcagtcctgtgccgggcacaacgtcctggcgttaaccaacagtctggatgatgtctccggtcagacgacggacagagtgctgatgctggcccgcataaaacgtgcccttgatatcggtgggcttcacctttacgcccagccaatccataacgcgcgtggggaagggtactttgaaatcctctcaaggcttgaaagcgagggggagatcatcgcgcctgatcgctttattccgctgattgctcagtttaacctgagccaccgatttgacctgaacgtggtggaaaaattgctgatgtggatgcgcagccatccgtccgaacgggccggaacgcggttctccgttaatctgatgccgctgacgctgatgcaaaatgagatagcggctgagatcatcgcgctttttgaacgctacgccattgcgccgcaagatatcgtcattgagatcaccgaggaacaggctttctctgactcgggaagcagcatcaacaatatccagcagctgcgggattacggcttccggattgctattgatgactttggtaccggctatgccaactttgagcgcctgaagcggctggaggccgatatcattaagatcgatggctgcttcgtgaaagatatctgcaccgacagcatggatgcgatgatcgtgcagtccatttgcaacatggccaaaacgaaatcgctttgtgtggtggctgaatatgtggaatcggctgaacaacgcgagatgttgctgcgattcggcgtggactatttgcagggctatttgattggtaaaccactgcccctgacggcgctggaggcataa

SEQ ID NO: 159200 - DNA, 357 bp, Enterobacter cloacae
atggctgttctggcgctgtcagcgtgtgatgtgaatgatgcggatgtggccagccgcaacgtcagcaaagccgcggacaatttcgaagctcagcgtcgctttgttttttataacggcattaccggcgaatttatgctggagatcaccggactttgctccaaagacaataccagcaccgatcgtaccctgggagtcatctgcaagaccgggccgggcgtctacaaaaagcacatgctcggcctatcagataacgtgacctggttcatggaagatctgagcggcacgaacgccagcgtgaaccattatcgcgtcaccttcaaaccttccgtaatcatccctgacatcgatatccgctaa

SEQ ID NO: 159201 - DNA, 144 bp, Enterobacter cloacae
atgacgctggccgtctcgcgaggattcaccccgcgcgctaccgcatcggtgatgatgttggccaggtcgccgcgggctgtatcgctgatgaccttccagtcactgaacgttgtcagcctggccgctgatatctggttcagataa

SEQ ID NO: 159202 - DNA, 207 bp, Enterobacter cloacae
atgttacagaaaaaacatagcatcaaaattgaaatcgcatcagatcgcaaactctttgaattagtaggtgtttcaacagaagatgctcttaaacttattgaggctgcaagtggcattaaggtctcacactctgaagatattgaccttttagaggaggattcaacccatgctaatgaccccaatgaaaaaggtctacgacaaaaatag

SEQ ID NO: 159203 - DNA, 186 bp, Enterobacter cloacae
atgactgatacaaagaatgatttacaccaatcagtaaaagaggttcaagttttacacagctaccatgatggagttacaaaattgaataaaatgctgtctgaaggctggattttacttgcaacagcctccggacaagatgatcagggttatcctatccatacgtggacaattggtaggactcagtaa

SEQ ID NO: 159204 - DNA, 957 bp, Enterobacter cloacae
atggtatcacgtatcattagcaacgaatatggttggctattcaaacgaaaccatcaagagcatgatttcggcattgatgctcaggttgacatcattttgagtgatggtactgtgacgggacaaatgcttgccttgcagattaaatacggatcatctttttttactgagaaaaataaatgggggtatatatatcggggtgagaaaaaacattttaattatttatcaaactatcctgtccccgttttaattttaatttgtcatcctgaagaaaatgaatgttattgggcggtgtttgaaccattgcaaactttccgggcgggtgataattggaaattaacaattccctttgagaacaaactatctttatctaaagatgagatttataatatattacctccgcctgatgattatttaactgaagtgaaagattattgggcgatgaatgatgtgttagttcaacatactcattttttatatataatcgataaggaagatgttaaaacaaagaatttttcagatttagagggcttttttgagcgccttcggagtagcagggaattagcagagcattgccagggtaaagttgaattatcgtttcatggctatgataatgactcacgagagctatatgaaattcctgaagtgcgtgcttatgcatcagtaatttctaaatcaataccagatttattcttctttgcttatacaggtgcaaacgcgcatggcttgaaaacgatagcattctgtcttacagatgtgaaaagagtatctatgcattcagttccacatgggaaaattccggttaatatatcaatgaaagaaataattatatttatagaagaacattggtctggacttaatgaaatgacggattggttaaaaatgccactggaggaaaataaaagaatttcattcaatataatgagagagtttggttttgagcctccagaggaatattga

SEQ ID NO: 159205 - DNA, 219 bp, Enterobacter cloacae
atgaaaaatacacagttacctgctgtaagtgaaatcaagctcatctcatcactatggcctgaaaactcaggcgtcatgaaagtaaacgagcttctaagctccaatagatggatcatgttaagcacatccagcggtattgatcacgatggcagaccgatgcacgaatgggtgatgggtaaacttttagatttttcagtacctgacgaagaacttttctaa

SEQ ID NO: 159206 - DNA, 477 bp, Enterobacter cloacae
atggaaaatattaatacgttaaaagctaaaatcgatacaaaggtaacgaagtttgtattgctgtctgttgtaactggtggcatttaccccatgatgtggttatatctgaaccagccaaagttaacagagcacatgaagaatgagtttgttgccagggattatcccctttggctggctattgttactggatttggatggctattgactgatataagttattctgtaagtgaaagtgaaacggtgttggatcatattgccacactgctttctgttgcttcaactgtaatgattatcgtctgggcttttaaagctaaaacagctttacaggcttatgctttaaatgaatttaaattcgaattaaagatgaatctattctatacatttatttttagcatatactatattgtttattgcatcaacgatatggaatcagagttgcagaaacacaacattatttatagtaaacaaatttcctga

SEQ ID NO: 159207 - DNA, 369 bp, Enterobacter cloacae
atgaaacgtgaacttgctatcgagttttcccgcgtcaccgaagctgccgccctcgcaggctacaagtggctgggccgtggcgacaaaaataccgcagacggtgcagccgtccacgccatgcgcattgtgcttaatcaggtcaatatcgatggcactatcgtcattggcgaaggcgaaatcgacgaagcgccgatgctctacatcggtgaaaaagtcgggacgggcaaaggcgatgccgtggatatcgcggtcgacccaatcgaaggcacgcgtatgacggcgatgggccaggccaacgcgctggcggtactggcggtgggcgataagggctgcttcctcaacgcgcccgatatgtacatggaaaactga

SEQ ID NO: 159208 - DNA, 456 bp, Enterobacter cloacae
atggactccacccttatctccgctcgccgcaacgaggagacaccttcgcttaaccgcgcccgccgcgccgctttaggtagcttcgcaggcgccgtcgtcgactggtatgactttctgctctacggtattaccgctgcgctggtctttaaccgtgaattctttccccagatcagccccgccatgggcacgcttgctgcgtttgccaccttcggcgtcggttttctgtttcgtccgctgggtggggtaattttcggccacttcggcgatcgccttggccggaaacgtatgctgatgctcaccgtctggatgatgggcattgccaccgcgctgatcggtattttgccctcctttgcctcgattggctggtgggctccggtgttgctggtgacgctgcgcgccattcagggctttgccgtcggtggtgaatggggcggcgcggcattgctgtccgtgtaa

SEQ ID NO: 159209 - DNA, 648 bp, Enterobacter cloacae
atggttgttttcaaagataaccgaaacaatgaacagcgtatcgaaaatacctttgttgtcgatgaacaaacgccaatgaacgttgagatgacacccaagttctctaacaaatatatgagagctccactcgatgtaaccttaaggtcaaacatcaagctatctcattcggcggactcgatagatacggtcacatacaaggtgaacggtgaagtaatacccagcggcaaaaattattgggctcaactgatctcgggtttaaaagaaaagaaatacgagattacaattgatgttgttagtaaacttggacagagaggttcagcatctgttgagtttgatgtcgttaaaaacgcagtgcctaattgtacattgagctacacggaaaccaacctaagctggagctttaccaataaatgtgatgatactgatggaaaaatggttagatatgaatggttcatcaacggcgaattaaggaacgttttcggtagtacggctacactttctaaaaaccttaaccgtggtaagcaggacataaaagtaattgcttatgatgatagtggagactttgcaacacagcacgtgacagttttcggaccggctgaagaggcaagtaagtctgaaaacactgtatcaataccaagcagtgagtag

SEQ ID NO: 159210 - DNA, 924 bp, Enterobacter cloacae; identical to SEQ ID NO: 36144

SEQ ID NO: 159211 - DNA, 672 bp, Enterobacter cloacae
atgaccgctttaaccgatattggcgaactatcaatcagcgacagccgcgaaggcgggagagattacctgctgaggccttcattcgaggccatgacgaggatcggcacgccggaagagattgtgcaggcgtacgccaccatacacggcaatgacgttgcacatctcattgaggtgtgcgctggcacgctggggcgctttcctgaatggctgtctccttctttcaaccgcgccgctgagaaacttttatcaacgtgcatgctggtgctgcaatcctgctgcgatgacgacttgacgccaatgataggcgagtggaaagggtggcggcactgcgtcgtataccgaccgggaagattaccaaagaacgacatcatcgtgctggcgcagcacctcatgcagcacggcattgtcggaaaagccaaggttcgccagttgcagcgccatgaaacaggagagcgcactacagagtttaaagcattcgattacatcagcgcggcgcgcagccacttcggcatgaaccgcgccgaagcctctcagttaacgatgaccgaatttcaaatgcttctggcggcgaaatacccggaccagaagggattcactcgcgatgaatacgacagcatcgccgacgaatacctggctaaacaggccgcgcgcagggcaaaagcaaagcaataa

SEQ ID NO: 159212 - DNA, 1434 bp, Enterobacter cloacae
  misc_feature (1384)..(1415): n is a, c, g, or t
atggcaacgcaaagcgaatacgagttagaaacgcagctggttaaccagctggtgggtatgcattacgaactggtcaatgtcaccgacgaaaccagtatgaaagccaacctgcgcaagcagattgaaattcacaatcggctagaggccgccccacttaccgacggcgaatttaaccgtatttttctgcatctgaccaaaggcactgaagtgatcgatcgcgcaagaatcctgcgcgatcgttaccagttgctgcgtgatgacggtacagagaaatggctcagctttatcaacaaagatgagtggtgccagaatgagtttcaggtcacccgtcaggttaatcagtacaacgccgaacaaaacacacgcaaaacacgctttgacgttacgctgttgattaatggcctgccgctggtacagatagagcttaagcgacgtgggctgggcctgaaagaagcctttaaccagattgaccgttaccatcgggatgcattctgggttggtagtggtctgttccagtatgttcagctgtttattatcagtaatggtgttgataccaagtattacgctaataaccgggctaaccatttcgagcagacctttttctggacagacgagaaaaatgaacccattaagtcgctggagaagtttgccgaagccttcctgaaagtttgccacatcgcaaaaatgatcactcactacacggtgctgaacgaaacccgtaagtgtctgatggttatgcgcccttatcagtactatgcctgtgaggcgatgatccgccatgttaaggacagtcttcacctaaagagcaaaccccgtaatggctatatctggcataccacaggtagcgggaaaacgttgaccagctttaagaccagccaggtgatcatgtccatgcctgaagttgatcgggttattttcgtcgtcgatcgtcgcgatctggattatcaaacagccaaagagttcaacagcttcgccaaagacagcgtagataccactaacaataccagtacgctgattaagcatctcaaaacgaataacagtaaactgacgctgaccactattcagaaactgaacaatgccattacccatgaagggtataaggcacagctggagcacctgcgtaaggaacgtattgtctttatcttcgacgaatgtcaccgcagtcagttcggtgacactcacaaggctatcgtcagtttctttgaaaatgcacaactgtttggctttaccgggacccctatttttgccgataacgttaatattaccaatggcattaagcaaactactgaaatgctgtttgataaatgcctgcacaagtacgtcattgtcgatgccatccgtgatgagaacgtattgcgctttgccgtggagtatgtaggaaccnnnnnnnnnnnnnnnnnnnnnnnnnnnnnnnntaggaacctatcgccgtaa

SEQ ID NO: 159213 - DNA, 231 bp, Enterobacter cloacae
atgccggcgaacatcggcagcaggatgccaatgaatagcccctcgtactggctcaagaagcccagtccgatggccgcgccaaagctggcgatggcaggaaaacaggcggcgcagcccatcgcggaaacgacgctgccgagcgcgccggttttgccagcgatgcgcgtgatgagtcccatgtgtcgctcccgagttcggttaacggatcagcgtttgaggctggacggatag

SEQ ID NO: 159214 - DNA, 303 bp, Enterobacter cloacae
atgccaccagaagcgcagcaggagcagaagaagaaggtcatggatatcgttgacagtgacgtcacgctgcgcagcaaacgcgaactgattgataacttcatcgaagaaaacctactgcatgtttcgcacgatgaagatatcacccagacctttgaaacctacgttgaacgtgagaaacgtaaagctgttgcaacgctatgtgctgaggaaaagctggatgaaagcaaagttgcagctttattggataactatctgtttaccgatataaccccacgcgaggacgaggtatctacagcagcctga

SEQ ID NO: 159215 - DNA, 303 bp, Enterobacter cloacae
atgttcctgacaggatttgacagtcccagccttaatacgctttacgtagataaaaacctgcgttttcacgggctaatacaggcattctcccgtaccaaccgtattcttaatgaaaagaaaagccacggtaacatcgtctgcttccgcaacctcaagaaagccaccgatgatgccatagcgttattctctaacaaagacgcgtcttcagtcgcgctggttaagccttttgaggagtacctgagcgactatcaggctgctgtagatacctcgtcctcgcgtggggttatatcggtaaacagatag

SEQ ID NO: 159216 - DNA, 456 bp, Enterobacter cloacae; identical to SEQ ID NO: 25798

SEQ ID NO: 159217 - DNA, 228 bp, Enterobacter cloacae
atgagtaagttaaccggagaagttatccatggaattcttctttccttacctgagtttattgatatgccagaagtgctcgcttaccaggtcagggatgaaattcttgcttttaacactcgctgtggagacgggatctttcatggttggaacacggcttcagaattgtggaagtttgaaatctttccccgcaccaccatcatgatgcagcatacttcggcaatacattaa

SEQ ID NO: 159218 - DNA, 249 bp, Enterobacter cloacae
ttgttattcagaaatctcgccacaatttcaagtatatttaacggtatcgatattctgtacaaagaagccacggaagaagaagttaagtcgtttttaagtgaatccttcattgtactttcaactgactatgatgtagaaaaggtatcaaagccaaaccgaaagagaattgcattagctatggatactcttgcagcgatgccagtggaagacagaggtgagatgctgaattacattaatgattattgttag

SEQ ID NO: 159219 - DNA, 708 bp, Enterobacter cloacae
atgaaattatatgagaacgtggttattggtaattttctgtacggattaggcgtctctgtcggggctcaacttcgtggacatgtgttgccagcatctgtcaatctcctccagcagacgcctgaagacaaggcgctggctgatgtcctgctttccttccccggcacgctgcggctgattgagttcaagactgcggataaccgttccggtaaagaggcggcccgcttcagaaagctctcgcatgctctggaaagtgatgcgagactgacgccgctttctcaccggatccactggtatgtcgaaaccatgcctgacgttcagttgggggtgaaaacctacttttcaagttatctcagcgccctctcccgacctaatcgtcaggctgagcccctgaatcttgagaaatttattgcgcagacaacccgtagcatcttttcgagtcaggttcatgccgaagatccggttgccgtcagtaactacctgaaactggtcaggtggtgccagggcgtggacgcagagggcaacgcgggcgcgcttatcgtcgtgtgtgacggcagcggcaatctgaaatatgcagagctgaagaacataatggagttgtcgatgacgcatgagaaatggctccagtataggcatgaaatagatcgccagacagagctggagagagagcaaacattagaccacgacaaagggattgagctgagcctatga

SEQ ID NO: 159220 - DNA, 582 bp, Enterobacter cloacae
atgaaaaacataaattccgtcagtgaacacgacatacgtctcttttttgaagctgcagacaggctccttcaggccgcacagcagcagggaaaaacagcagacagagcaacgtcagcgctgattcattccgccgtagctcatgaaaaacagatgagagaggtcaggaatgaagtcatcagtgccgttacagcaatggccgaatcaactgctcagagatctgcacaacttctggcggaacatttcagcgaagccgatcgggcagcagacggggcaagtgaccgctatgaacgagcctgcaggactcttggctggcgaagctggctctggtttctggctgcgcaggttgtgctgtgtagcgtggccattgtgcttatcctgacgcttattccctcgctggatgagatacacgatcgacgcttaacgctgatgcagcttcaaaaggagacggagggcttcccgttatactggggaaattgcacggttaacggcaaagtcacccggtgtttccggacggatgataaagcaggaaattttacgtctaaagatggcagcacctggcacgttccatggcaaaagccttag

SEQ ID NO: 159221 - DNA, 891 bp, Enterobacter cloacae
gtggtccgggacgagcagtacaacgacagcgtcgaattccgggaggaggacgtgatccccgtgattcgtaaacttgcggccgacgatgagaccgctaaaaccgaatactatacccgcctgacagtgtcactgggccgtacacccctcagagtcatgccggacgatctgcgctaccactttatccgtctggtgagctcgctgacttgctaccagatagcgtttgcccgggagcttaaaatccgaaaaacggtaccagtgcgcgataccgcctcatttgaggaagccgaactggcactgaccggcctggatagcggcatggcgatgcaggcagtacggaccttgcagaacgcggggctgctcaaggaaaagacctatcttcctcgggagcaaaaaacggagggtatcctgtacgaaatcacatccgactttaccaccctaatgcggctgctgtttcacccgtccgattttgagccggagacagtgggcctccagcgcaaggagataagcgacatcattattgtcggaaaaatagggtttatcgataacctttatgtgacatatctgccagcagcgctgaaaaaagccggactcaacgcaaaattcgtggagagtaatgataagcacttaacaacagactgggcaccgctctatcttcagacaggcgtagaaggagacggttatgacagaaggatcaagctgtacctcacgcgggaaagcctccccccttggaagagtaaggcggataattacctgagttgcagctttgaaacaaggacctatgtgcgggataaaagcagcagcaagaaagaagcagactatttcagggaacagatggatcgggtcgttaccagtatccagacgcaatttaataaaatcaaatcgtcatcctaa

SEQ ID NO: 159222 - DNA, 1482 bp, Enterobacter cloacae
atgctcgatattgatccccaggaaatccgtgtttgcgcaacctgcatcggtgaaccgtttctccgtgcccacattaaaaaaacgggtacccgtagtacttgccactactgtgaggagacacatgcctgttttacacttgaagaggtatgtgatttaactgaacaggctgttaactcgcatttttttcgcacatcggatgagccttcagatcgcgaatttgccatgatcaaatactgcgatcatgagtggtatcgatccggagatccaataagcgaggtcattggatacctgcttgagaccacccaatctgtggcttgcgatattcagcagttacttgaggaaaagtattcacattatgacgaagccgggcttgaaaccgactttgcgtccgactcttgttatgcagagcgtggcaaggtgagcactgagtgtctggattctatgtgggccacgtttgtgacctcacttaaacaggaagcccgctatatcaacaatactgttaagacaacgctagacagtatatttaggggactcgataccctccagaccggtggggaaagaactgtgatcaccgaaggtggacccggcaccgacatcgctcatctttatcgggcccgatggagtcgcaaccacaacgaactggagcaatttataacgattccggatcgggaattaggaccgccgccacatcagttcagtggtgcgaaccgcatgagtcctagggggatttctgtattttacggtgccagctcggtggacacggccatttcagaaatacgcccaccggtcgggtgccatgttgtcagtgcaaaattcaacatcatccggcctctgaggttactcaatcttccggcacttaaagatattctcgatacaggcagtatgcttgatccggaatatattgtacggcgtgaacaggctacttttctgaaaaccctgacaaactggattgtcaaaccggtgctaccgggagaagaggattttagctatattccgactcaggtcattgcggaatatctggccgattcagagcagctgaaccttgacgggatactgtacccctccgtacaacttgacggttctctggtaggcgagaactataacgtcgtactgttcaagaaagcttcccgggtaaacctgatggcattaccggcacttaaagactgcttaattaatttcgtccgtcagtgtgatgaggacgagtgggaaatggatatctgcgtgacagaaatggtggatatggcagatatttcccctcctcacgacatggactgggatgatctgtcccccgaaaccaatgacagccgggaaccgtcgttagagattgatttgtcctcggtctgtgttcatcacatcgaggcggcgcgctttgagtactcaaccgatattgttagtcggaacaaacacgtttttcactcccctccatctgcggattctagtccccgtgatttcggcgcaccccctgatgatttccccttctag

SEQ ID NO: 159223 - DNA, 831 bp, Enterobacter cloacae
atgaatattgaaataaaagtgcttgaccaaaatattgcaaggattattacttcaccagacctggatggaagtatcatttcatttaagagggaatgcatttctgctctttctaatttggaaatcatcccttctagtccaatgtgctacattctctatcatgattattatgatcgcactctagataggaatgaagtttacatcggccagacagatgctgggatgaatagaataaaacaacatcatcaacataaagaaaactggaataagggcttgttgtttataaataagaagccttcatacgactttagtttcaggcttgagagtgatttaatacaattagctaaagagtctttgaagttttacgtatcaaacattagaaatgaaaatagagggaacttgtgtgattgccaaatagaagaatatgataactatctaaataatctacaatctatactaactgctattaacattgatatccttgagcgaaattatgatggtgcgttcatacatgatactcaattaaatcttaaagcccatttaactaaaaaaacattaccatatgagataaaaattcttgctggtagttatgctgaggtatgtagattaggttatacaaaggatttatttaacaagtatgacgttaaaattgaggttcgtgataaagaaattattacaaaccgaaaagacaattgttcttacatcataaaagaagaatatttcatttttgatgacgatatgaatcttacaattgaaaacgaagaaaagatggctctatacaactttttaagtattaatggtgttcgaatgtttaactatattgataaggtttaa

SEQ ID NO: 159224 - DNA, 261 bp, Enterobacter cloacae
gtgacgcaggcggagatcatcgccaccaggaaggtcaataatgactggacaacgccttccaaggctgaacgcgattcggcgaaacaggagcttgctaaggtgggtaaggcaacggatgacgttgcaaccattgacgatttcgttaaaaccggggcgatacaggtggaaattagtcagtcacagtggggagtgggtggtggtaaccggcgtattgttgaggtgatacaggggctggctaacgtcgagagtcagtatgtatag

SEQ ID NO: 159225 - DNA, 585 bp, Enterobacter cloacae
atgcgtccacatgctttagatacagcactcatcacagagaatgcattccaacttgtcgtctggtgctcaggtaatcatcatgtgctcgaccactttttagatgatggagaccataattcatttgggcctacaaagccaaatttcatttaccatctacaaaaaaaagtttgtgagttacttattgtaacggcgacaaaaattagaatcctgcaggattccctcaccgatacatatttagaccatgaagaactcataaaaccagacaaaaggatcacgacttttaacccatgtgcgcaagaactgcattccttaaaaaatttatcaatccgtgagacctgtaataaaataatacacgccacctcagttgctttcattatgtgcaataaagatggccacaaggaacgatttttatattggtctgaagacttatacggtttttggttcagcggagtagtggaacttcatgggaaaataaaaggtaaggaatggatcgtcacattagagccatcaaagcttggagtaaatattattagctacattcatgaacttgaatcagagcatgaaatttatagagcatgggaataa

SEQ ID NO: 159226 - DNA, 981 bp, Enterobacter cloacae
atgctaattgaacaatccttttattcattgccggaaatacttcacggttctggttatcaaactcaaaattatgaatcaggattgatgacagctttcactttatcattacttcaagtattaaatggtcgtaatgttcctaatccaataggatgcttacaaagtgaaaaattatttcgtagtaatgggctttataaatcagtcagttcgcctagatatttacgtgctgacttatttgctgattttagtcgcctatatgtggcaaacaagaggcttagtcaatatggttggcgccatcattcttggttagagtgtaaatttatgcgcggacaagcagggcttaacggtgatgtccatgcctctaataaatcaccagtgaccggagcagttttagctgatttactaagattatcccttcttgttcctgaagatgaaaatcacagtcgacaatctattcctcgtcaagatgaagacaagaaaaaaactagaagtagccgatattttctccatgtctatgatgctgaccccaagttttatctaactgttaaaagtcggttgtggtgtaaaaacttagtatcagtaggcgcccaaaaacttcattttttaaatctcgatgccgagcctttagctttcaaaaagctaataggagaattaccagggttagaagtaaaattgagtgttactaattttcattcagggcctatgcacgttgcacatcgacctgtctattggttctggttgactcggattgacaaaattgaagcatcgcttggaaagcataaagttgtcattgactatgatagaataattgaacagagtgaatgtggattagatgaaatttcatcttttatagcacaaagactttctgttgttcctgagtcatcagatactaaaccaccactacctgatgaacaagaaaatgatactgaacagttgaatcaagaacatttcatcttgaacgaagtctacccgcttgatgagtaa

SEQ ID NO: 159227 - DNA, 222 bp, Enterobacter cloacae
atggttcactggggttgcttatattaccgccctttcctcgatggtcaccaccaggacgtattaaatagcgtctctaaagaaatcgatgagctgatagctgtttctgattgcgtcggcaatgcccacaatccactaatttctatccacgaaacaacgcagatcgaagtcaagtcagtaatagcccgttgtcatttgtatcacgttaaaggttatgaacaatga

SEQ ID NO: 159228 - DNA, 636 bp, Enterobacter cloacae
atgaaaaacaatattgagaactttgacacttttattacggaacaaaaagcctggttcgacgagaatttggcagcagattttgcagagtcatgggatagccgtacctgggtatgtgggagcaaaggctccggttggttacgtggcaatggagtcaatgtattgcgttttgatgagattaaccgactcaaagggatcgatgatcaccatactgtatccgggccttttcagttgttcatgaaagccatgctggtactcgtctatagagatagaaatcgcagcatttcccctgcggttgctgtagcaactctgattaatttgaaacgctggtattgcgctctcttcaagttaactggacaaacgcatcccatctatctgactacagatgtcatacgtagcgcaatggatgctcggccaggtgatgccaacatagccaacaacaaggggcgttgcgttaagattcaaaaattagtaaaccatcacgccttcacattagtagcactacaatatgtatccgatgatcgttataccaatcagactaatttgacacggaaagcccgagaaacaatcgttctaaaacaaaaagacaagctggatgatacggccaatatttcgactatacgtcatccagacctgtag

SEQ ID NO: 159229 - DNA, 1257 bp, Enterobacter cloacae
atggtgcctaagggttggtcacacacaacttttgagaaacacattgattgcttaaccggttttgctttttctagtactgaatattcggctgaagaacacgatatcagattgctaaggggagacaatattgaacctggtaagcttcgctggataaatgctaaacgttggcctcgaaacgtacaaggaaatatggataaatattttcttttggaaggcgattttgttatagctcttgatcgtacatggatatcaggtggcttaaaagttgctgaagtgacttgtgatgatctgccttgcttgcttgtgcaacgagttgctcgaatccgagcaaaaaaaaccttggcgcaagggttactccgccagtatttctcaggatacaaatttgagcaatacgttaagcttactcagacagctacagctgtacctcatatcagccccaacgatattaagcagttttcgttattacttccccctattgcggaacaaaagaaaatcgctcaaatcctgtcaacctgggataaggcaattgcggtgactgaaaagcttctcaccaacagtcagcagcagaaaaaagccctgatgcagcaattgcttaccggtaagaaacgtttgctggatgagaatggggagaggtttagtggggagtggaagtttaaaagaataagtgaaatagcaacgcgtgttcaacgtaaaaatgatacttccgaacatcctattttaacaatatcttctttgtctggatttgtcaggcaggatgagcgttatagccgttatatggcgggagagagtataaaaaactatatcctgcttaaaaaaggcgagtttgcatataacaaaggaaactcaaaaacatacgagtttggatgtgtttttgatcttgataaatacgaagcaggactcgtacctcatgtctacgtatgttttaaattaaaacaaggtcttagtcatcgttattttaagtatttatttgaggccgattacctcaagccacagttaggggcgctagttaacactggggtcagaaataatggattgttaaatattaagccaacagaatttatggaaacacgagtcccggttccatgttttgaagagcaggagcgaatcgccgatatgttatataactccagcaggattatacgagttcttcagggcaagctcgcctgcctgaaagaagagaaaaaagccctgatgcagcaattactgaccgggaaacgccgtgtcaaagtagaaatggaagagaccgttaacgcataa

SEQ ID NO: 159230 - DNA, 1743 bp, Enterobacter cloacae
atgcgtgctctgccccgctccgccggtacagatgttgcggcccagtgttttttgaacgcgctgctgcgcgaaacgaaggactggcactatcttcccgcaacccgtgcggatgagttatcgcagatacatatcccgctctccccaacccaggccatccgggttccggtacgctatttctcccccacgcagcatcaccagtattgtttcccggccacgctgattcaggccgacagcgacggcggtgacacggtcacattccatcaactgattgatttcattattgaaaaagagacagtaaaaggcgctctggatggcgatacgctggcccgctttaagcagcgcgtcctggagagccatacgcacacctggcaggccattgatttacgccacaactgggcaaacctgcgcgataagccgctgacctttgccgaagcggaacaggcgctgctggtcggccatgcttttcatcctgccccaaagtcgcacgagccgtttaacgaggccgaggcgcgccgctatctgccggatttcgcctcgcgcttcccgctgcgctggtttgcggttgagcatgaactgattgccggggacagcctgaacgtctccctgcgtgaacgtctgctgcgcttcgcggcccagagtgcgccggatcttctcggccacttcaccgacacccgttggctactgccgatgcatccgtggcaggctgcctatttgctggagcagccgtggtgccagcgtctggttgaaaaaggcgccctgcgggatcttggcgaggcgggcgcacagtggctgcctaccagctcttcccgctcgctgtacagcgaaaccaatagcgacatgattaagttttccctcagcgtgcggctgaccaactccgtgcgcacgctatcggtcaaagaagttaagcgcggcatgcgcctggcgcggctggcgaaaacggcacgctggcaggagctccaggcgcgctacccgaccatgcgcgtgatgcaggaagacggctgggccgggctgcgcgatgaaagcggcgtcattcaggaagagagcctgatggccctgcgcgtcaacctgctgtttgatacgccagatacccaaaccaacgtgctggtgagcctgacccaggcggcaccggacggcggcgacagcctgctggcggcggcggtgcgccgtctgagccagcgtctggatctcccgctcgctcaggccgcccgctgctggctggacgcctactgcgaccgtgtattgcttccgctgttcagcgccgaggcggactacggtctggtcctgctggcgcaccagcaaaatatcctcgttgagatgcagcaggatttccccgttgggctgatctaccgcgattgtcagggcagcgcctggaccgaaggggccgacgcgtggctgaaagaggcaggcgaaaccgaggtggaaaaccgcttcggtgagagccagctgctgcgctacttcccttattacttgctgctgaactctacccttgccgtcaccgccgcgctcgccgctgccggcttcgacagcgaagagaacctgatgccccgcgtgcgtgacgcgctggccaaactgcgcatgacggcgaagcagacccgctgccttgattatgtgctcgacagcccgacctggaactgcaaaggcaacttcttctgctacctgcacgatcgcaacgaaaacgccatcgtcgatccggcggtgatctatttcgactttagcaacccgttttataaggagaaggcgtga

SEQ ID NO: 159231 - DNA, 1107 bp, Enterobacter cloacae
atgaaaatcctgataactggagccgatggttttatcggacgtaacctgtgcttacgccttcaggaagcagggtacgatgaccttgttaagatcgaccgcggttcgagtgcggctgagctggaacttggtttgcaagaagctgattttatttatcatcttgcaggtatcaatcgacctaaaaatatcgaagaatttgcagaaggtaacagcaatctgacgcagcagatagtggattatcttctagcaaagaaaaaaaacgtacctataatgattagttcttccatacaggcagaactggataatgcgtatggtcagagtaaagcggcagccgaaaaacagatcgagcgctatgcagctaaaagtggcgcagcatactttatctatcggtatccgaatgtttttggtaagtggtgtaagcctaattacaactcgttcgtggcgacattctgccataaccttgccaacaatattggtattactatcaatgacccatctgctccggtgaatcttgtatatatcgatgatgtttgttctgatgcgataaaactcttgtctgatacggttgaaaacgggtacaaaactgttgaaccaatttattcgacgacagtaggtgaggtggcggaattactttatcgctttaaggaaagccgttccaccctcgtcactgaagatgtggggactgggttcactcgcgcgctgtattcaacatggttgagttatttaccagcagataaatttgcgtatacggtaccgtcttatggcgacgcccgtggcgtgttttgtgagatgttgaaaacccccactacgggacagttttcatttttcacagcgcatcctggcatcacacgtggtggacattaccatcacagcaaaaatgagaagttccttgttattcgaggtcaggcgaactttaaatttgaacatgtgattacaggtgagaggtatgaactgaatgtgtcatctgatcagttcaaaattgttgaaacagtacctggctggacacatgacgtgacgaacattggtgatgacgaattgattgttatgctctgggcaaatgaaattttcaatcgtgatgagcccgatactattgcgagacctctgaaatga

SEQ ID NO: 159232 - DNA, 1239 bp, Enterobacter cloacae
atgagtttaataagaaatagcatttataatttagctggattcgctatccctactatcgtcgcgattccagctttagggcttcttgcaagattactagggccagaagctttcggattattcacattggtctttgcattgattggctatgcaagtatttttgacgcaggaataagtcgagcagttataagagaaatatctttatacagagaagataaaaaagaaaaatataatattatatcaacggcgagtctggtggttataatattaggtttattggcattaataataatggctctttctaccccagagatcgttcaattattaaatgtttctcctggtttaagagaagttactattaaaagctttttgatagtctcctttataatccctttatatttgttgaaccaagtctggctaggttatctcgaggggctagaaaaatttgcaaatattaatattcaacgggtaatttctagcacttgtcttgcattgttgccagctttattttgtttaattaaacctacacttttatatgcagcatacgggttagttgtaggtagaatattttcatttttactaacagcaatgatttgtaagagtgttatatacagcgcaaaattttcattcgacattaatactttaaaaagacttatatcatttggtggatggattactgttagtaatattataagcccgataatggcatattttgatagatttataatttcgcatttgatgggcgcatcaaaaattgcgttttatactgctcctgctgaaggtgtctcacggcttattaatattccgtatgcattagcaagagcacttttcccaaaactgtcttactgtaatgataaaaaacaacgaagaactctcctgttacgaagctatatcatcataagcgtaatatgtttaccgatcgtgttaatcggtggtttctttgcgtcaatgattatgggtatttggatgggggcagaatataccaatgttgctgcaaaggttttacaaatcctgttgatagggttttattttaatgcgctcgcacaaataccttatgttagtttgcaagcgcttggtaaagcgaaaacaacagcagttttgcattttattgagttactgccttatctggcattattatttttactgacaactaaattcggaataataggaactgccattgcctggacggcaagaacgttctgtgatttgatactattaattatattgtcgggacgaaaatga

SEQ ID NO: 159233 - DNA, 1023 bp, Enterobacter cloacae
atggtcacttttgagacagttatggaaattaaaatcctgcacaagcagggaatgagtagccgggcgattgccagagaactggggatctcccgcaataccgttaaacgttatttgcaggcaaaatctgagccgccaaaatatacgccgcgacctgctgttgcttcactcctggatgaataccgggattatattcgtcaacgcatcgccgatgctcatccttacaaaatcccggcaacggtaatcgctcgcgagatcagagaccagggatatcgtggcggaatgaccattctcagggcattcattcgttctctctcggttcctcaggagcaggagcctgccgttcggttcgaaactgaacccggacgacagatgcaggttgactggggcactatgcgtaatggtcgctcaccgcttcacgtgttcgttgctgttctcggatacagccgaatgctgtacatcgaattcactgacaatatgcgttatgacacgctggaggcctgccatcgtaatgcgttccgcttctttggtggtgtgccgcgcgaagtgttgtatgacaatatgaaaactgtggttctgcaacgtgacgcatatcagaccggtcagcaccggttccatccttcgctgtggcagttcggcaaggagatgggcttctctccccgactgtgtcgccccttcagggcacagactaaaggtaaggtagaacggatggtgcagtacacccgtaacagtttttacatcccactaatgactcgcctgcgcccgatggggatcactgtcgatgttgaaacagccaaccgccacggtctgcgctggctgcacgatgtcgctaaccaacgaaagcatgaaacaatccaggcacgtccctgcgatcgctggctcgaagagcagcagtccatgctggcactgcctccggagaaaaaagagtatgatgtgcatcttgatgaaaatctggtgaacttcgacaaacaccccctgcatcatccactctccatctacgactcattttgcagaggagtggcgtga

SEQ ID NO: 159234 - DNA, 780 bp, Enterobacter cloacae; identical to SEQ ID NO: 29743

SEQ ID NO: 159235 - DNA, 153 bp, Enterobacter cloacae
atgattggttgtcacccgaagttcaacaccccggccaccgctcaatgtaaaagttgcaaggttatcgtcttcactatcatcgtttcgcacaaccgcctcttttttcttgatgtcagcgagccattcttttggcggtgctttcacggggtctga

SEQ ID NO: 159236 - DNA, 303 bp, Enterobacter cloacae; identical to SEQ ID NO: 104039

SEQ ID NO: 159237 - DNA, 1593 bp, Enterobacter cloacae
atgagtcaggactatctcgcccgtatcgctgcgctggaagacgcgcttcgccagaaagacagccagctcagtctcgttgctgagactgagtcgttcctgcgttcggcgctggcccgcgcagaagagaaaatagagaacgaagagcgtgaaatagaacatctgcgggctcagatagaaaaactgcgccgaatgctgttcggtacccgttcagaaaagctacgccggcaggtcgaagaagccgaagccctgctgaaacagcaggagcagcaaagcgatcgttacaacggccgggacaatgatcagcaggttccgcgtcagttgcgccagtcccgtcatcgtcgcccgttaccggaacatcttccccgcgaaataaacagactggagccagctgaaaccagctgtcctggttgcggtagtgatatggcctatctcagcgaagtcagcgcggagcaactggagctggtctccagcgccctgaaagtgatccgcacggtcagagtgaaaaaggcctgtacccgatgcgactgcgtcgttgaagcgccagcgccctcacgtcctatcgaccggggcatcgccgggccgggtctgctggcccgcgtgttaacggccaaatactgtgaacacctgccgctgtatcgccagtgcgaaatctttgcccgtcagggtgtggatctgagtcgtgcgctgctctccaactgggtggatgcgtgctgccggttaatggccccgctggatgaagccctctaccactacgtgatggactgccgcaaactgcatacggatgacactccggtgcccgtgctggcgccgggcagaaagaagacgaaaaccgggcgtatctggacatatgtccgtgataacagaagcgcgggttcatcagatccgccagcggcatggttcgccttctcaccggaccgacaggggaaacaccctcagcaacatcttcggcactatcatggcgtgctgcaggcagatgccttcgcagggtacgacaggttgttcagcgcagagcgtgaaggtggcccgttgacagaagcggcatgctgggctcatgcgcggcgcaaaatccatgacgtctatatcagcacccggacggccacagcagaggaggctctgaagcgcatcagtgagttatacgcgatagaagaggaaatacgcggccttccggcatctcagcggctggccgccagacggtcccgaagtaaaccgttgctgatatccctgcatgactggttggtggagaaaagtgccactctgtcgaaaaaatcccggttaggcgaggcgttcgcttatgcactgaaccagtgggatgccctgtgttactactgcgatgatggtctggcagagccggataataacgctgctgagcgagcgctacgagcggtctgtctgggcaagaaaaactacatcttcttcggcagtgatcatggtggtgaacgtggtgccctgctgtatggtctgatcggaacgtgcaggctgaacggtatcgatccagagggttaccttcgccatatcctgagcgtattgccggagtggcccatcaacaaagtggccgaactgctgccatggaacgtagatctcaccaataaatag

SEQ ID NO: 159238 - DNA, 351 bp, Enterobacter cloacae
atgatacccttaccgtcaggcactcgtatctggctggttgccggggtcaccgatatgcgtaagtccttcaatggtctgggcgaactggtccagcatgttcttgatgacaatccgttctccggccacctgtttatcttccgtggtcgtaaaggtgacaccgtgaggatcctctgggctgatgctgacggtctgtgtctgtttaccaaacgtctggaagagggacagttcgtctggcctgctgtacgcgacggcaaaatcgccatcacccgctcacaactcgccatgctcctcgataagctggactggcggcaacctaaaactgcacgccttaactcactgacgatgttgtaa

SEQ ID NO: 159239 - DNA, 171 bp, Enterobacter cloacae
atgacagatgtaattagcggaaagaataggaaacggcgagccagtctcaaagtggttttacccatctttactcagcacgttagcgaaggagatggttatttcttctgcagaaatgcatttcaccagaatgaacagcggtttgagaaaatttaccagatcaacctcttatag

SEQ ID NO: 159240 - DNA, 426 bp, Enterobacter cloacae; identical to SEQ ID NO: 140555

SEQ ID NO: 159241 - DNA, 1998 bp, Enterobacter cloacae
atgagtattatacaatggggtaaaaaatcccacgaacaaatgagaataagtcagggtataaaaggtggcaaaaccagccctacagtagaaactttagaaggtgctgatttttatgatcctatagctcaaaagtgggttcatgaagaaaacggtcttgagttaatacgtgagctggaaggttatgaagcgcctattgctgacgatcctgaaaaacaagaacgtagccatgaaaaacatttcgatcatggtttgttttcaaagcaatatcttttagataataaagttaaagttggtgatgaagcaaggcttaaagtaaaaaatagtcttattggtaatatccaacaatcagaaaccgaatgggattattgtcaaatagatatgagtatttttgctcctaaagatatgccgagagcaagaaaaataatcattgaaagaatgtctcatcctaaatacctcgcaataaaagacaatggcccagcaggtatgacctacgttcctattgatggtgatagggctgtttttgcgtggggtaatcatttagatcaagatattgctccacatcttcaattgtggcgtcatcaccatgttattaacaataaaaagttagtatacgataaagatttaaataaaatcattgataaaacagatgactctggtaatagatacattactcaggcaacgtcattagataaagattttatcagaaaaatagaactcgaatggattaacgagggcttacgtgaagctcacttgcctaccattgataatatctatcttaaaaacgaaaataaagacgatgataaagcagaagctaaacttcgtgttgaaaatgaagatgttagtaaatggcaggagctttatgataagacagtagaagagaataaagctaacagaaaagctgaaatagatattaactttgatcctaatagcgctaaggacgcaagccttgttgctgaattgaagctgttagatgaagttattaaaactaaaaaagagctttccgctgaattccttgctaaagccattaaggaaaaaaatgaagttgaagcttttgaaaaagctaaaacaaccgttgttgctcttcatcaggaacaagagcttaatagacagcttactgaaaagttagaaattacagaagaaaaacttcttgagtctattaaatcacttgaagaagaaagcgcattaaaagcaacttttgaaaataaactcaaagaaacaagttctaagcttattgaaacagaagctaagttaggtaatgcggaacttgaatatgaaaatcttggtaaagaatatgatgagttagaacagactcatacagctacccttgaaaaacatagagaagtcgttgaaagcctcaatcaacaactacttcaacaagatcttgaccatacaaatgaagttgagttgttagaaaaaactcatgaacacgttattaacaagcttaatattgagcataaaaacgagattgaaacgcttaaaactcaacaagcatctgttgttaacggattaaataccgagattaccaatcttaaagataccgttgtaagtatcacagcagaaagggatggtttcaaattcgataaagaacagcttgagtctgaattggcaaaagctaaaaaagctattattgatatggaacgtaaacataaagacgaacttgaaaaacgtgatgcagagaaagatttattcgaacaaaccataaaagatttgaaagacgagaagattgaagctgataaagctattaaactccttactgaaagtaatggaaaacttattgaagaagttaaccaacatattgactcttacaataaacttaaggcagaacatgttaagcttaaaactgattatgataaagagaaggaagaaaactctacattaaaatcagaaaatgaacagcttaaaattgataagcaagctttagaagaagcaataagaaaagatatagaaaaaaagaataaagctgataacagcaataaaaataaaccaactaaaaaataa

SEQ ID NO: 159242 - DNA, 552 bp, Enterobacter cloacae
atggtggtggcaaaattcggatcgttccccagtgctgctgccagttcatttagcgtgtccagcgcagccggtgatgacgccaccagtgccgcaatagctgatttcacaaatgcagtggtggcaatctgcgtattgttgactgtctgcgcagcagtgggtgccgttggcgttccggtcagagccggacttgccagtggggccttaagcgccagcgcgttatttagcgcagtgaccacagcctgcacaaacgctgtgctggcaatctgcgtggtattggttccggctggcgcagtgggcgcttttggcgtgcctgtcagcgtcgggctttctttcggcgcgtactgcgtgtgcggatcagcggcggcgatatgcttcgccatcagatcatccacatacaccttaagctccagcaccttgtcatccacgtatttgcgggttgccagcaccactgacgggtcaattttcagggtgatattatcggtactgctggtaatcagcaccatgcgcacggtctgcgtgcgcccgctcccctccgccagctgcggcttgtag

SEQ ID NO: 159243 - DNA, 498 bp, Enterobacter cloacae
atgcttgatttagatattaaaagagaattgctgttcgctgaaacagcagaagatatagaaacgttagttaatgctggcgctgatgttaacggttcgtttggtagtgtttttcctttagcgttagctgttaacgttgaagtagcaaaggctttaatcgctaatggtgctgatgttaacctaactaataaaaaaggtgaaacagctattttttacaataaaaatattgatgttgtaaaatacctcgtttcacaaggagcaaatataaaccatctgaataatgatggtgaaacagcattgtttaaaacatccgatattgaaatggttaaagcacttattaagttaggttgtagtccattcattaagaataagaatggagagcgccacgatttcaaaatcaagcccgcagataaagaagaataccaaagctttatgaataagcttaaagaaatgatcaggaacgcacttgaacaaaaaaagcagatactacaagtagcgtaa

SEQ ID NO: 159244 - DNA, 1173 bp, Enterobacter cloacae
atggctaaggattaccaccacggggtgcgcgtcgttgaggtcaacgatggcacccgcccaatttcaacagtaagcacggcaattgtcggtatggtctgtaccggcgatgatgcagatgcgtccgtgttccccctcaataaaccggtcctgcttaccgacgtgctgaccgccagcggtaaagcaggcgagtctggcacgctggcccgctcgctggatgcaattgccgaccaggctaaacccgtgaccgtcgttgtgcgcgttgcacagggtgaaaccgaagcggagacaacctccaacattatcggcggcgtgacagctgacggtaaaaaaacgggtatgaaagcgctgttatctgcgcagtctcagctcggcgttaagccgcgcattctgggcgtgccggggcatgacacgcaggcggttgccactgagctgctgagcgtggcgcagagtttgcgcgggttcgcctatctgtcagcctacggctgcaaaacggtagaggaggccattgcctaccgcgctaattttagccagcgcgagggaatgctgatctggcctgatttcatcagttttgacaccgtgctgaatgctgacgcaacggcttacgcctcagcccgtgcgcttggcttgcgtgccaaaattgacgaaaagaccggctggcacaaatccctgtccaacgtaggcgtgaacggcgtcaccggcatttctgctgatgtgttctgggatttgcaggacccggcaaccgatgcggggctgctgaaccagaacgatgtcaccacgctgatccgcaaagacggtttccgcttctggggttcccgctgcctcagtgacgatcctctgtttgcctttgaaaactacacccgcaccgcgcaagttctggctgacaccatcgcagaagcgcacatgtgggcggtggatggcgtgcttaacccgtcactggcccgcgacattatcgaaggtattcgcgccaaactgcgcaacctgaaaacgcagggctacatcatcggcgccgactgctggctggatgagtccgtaaacgataaagattccctgaaagccgggaagctcactatcgattacgactatacgccggtaccgcctctggaaaacctgatgctgcgccagcgcatcaccgataagtatctgctggatttctccagccaggtcagcgcgtaa

SEQ ID NO: 159245 - DNA, 216 bp, Enterobacter cloacae
atgaataaaacagaaaaaccaattaatattataacttcttcaatctttaatgtggcgttcagtttagggataacatcattatttgatataacaaacaatattccaacaatgatagcaatagggattttaacagagattatgactttaatagcatacaaagaggaaataaaaacactaataaaaaatagaaacctaaaccgcttatcggatagttaa

SEQ ID NO: 159246 - DNA, 207 bp, Enterobacter cloacae
gtgtttgataccagcgtcccaccagtggcgctggtactcgaacataccggcgcggaaaatctcttccagcttttcgacctgttcgtcggtaaacaggtttttttccggcggtttgcgcgggcctttattgcggttggccacgttggggttcaggtctgcttcattcccgccattgttaaatttgccgatcctggcctgtcgttctga

SEQ ID NO: 159247 - DNA, 429 bp, Enterobacter cloacae
ttgccagtaaatagacaggttatccagacgggtgatcagcatggcgttagccgggaagaacggcgcgcgaacggccgggaggttgccgatacgcttctggctgatgatgagatcggccgccatcgcttcgctgtttggctggtcgcggttgacgatcgggaaatatttatccgcaagcaactggcgcccgacgataaccacaagctctgtatcttcctgataccacggcgcgattttctcattcacggcgcccataaccagcgcgtccagattcaggaaatcgccgcctttaccgacacggatagtctgagaaaccacctcgccctcggacacaattttgtccagaacctgaacgggtttctcctggcggattttctccagccagccgatattcacatcctgcagcagcggataggtcttgcggtctga

SEQ ID NO: 159248 - DNA, 150 bp, Enterobacter cloacae
atgatcgaggatgctcatcaagtcctgtactaccggcaggtcaagaaactgagcatccgtgaaacggcagatgcgaccgggtacagcccctcccagatatgccgcattcaggcactttaccgacaatcagaaacgagtaattttggttaa

SEQ ID NO: 159249 - DNA, 216 bp, Enterobacter cloacae
atgatggcaagagcactggcctgtcccggcgcagcaggcacaggattccggagcccggaactgtatgacgatggccagctaatggctggttgccgctacactctgatgttcccggacggacgttctgaagctggtgttaccgatgaacacggggttaccggatggcattatgctgaatccgctgaaaatattaccctgaatatattaatggattaa

SEQ ID NO: 159250 - DNA, 1179 bp, Enterobacter cloacae
atgactgtttatcatctcagtacccgtattaactctaatgtcccggctgattctttgctgtatgacctgtgcatttatcgcatggactccggcaggaataaatcccttctgttggatgtgaagcaacagccgtttctgggcaattatgaaacacagagtcacatgaccgaagatataaatgagtcactctcgacaatttatattatggaaatgaagctttatcgaaaaaccatgttgcatacgcactgtgtaacgcctgttccgttcactaagatgtacacgctggaagaatttgcgtcaggcaaagcctggtctccggtgaagcgggaaaacccctgttattttgagtcaaaagggacaatgaaacctgagagtcaggggggcgaaacaaagcagattaaaatcaccatcccggaacgtccgtttattgcgaaagaatatcctatcggaacaccacaggatccgtttgaaaaaaacaaaattgagtctgagataaacgacaaattttatcattattcttacccttatcaggatagggcaagtgtatgtggacctgctgcatttttttactgtgttcaaatggaccgtcctgatgtatatgcacaagctgccagggaactatggcggtatggaaatactaaaataggtgcactgaccatctcccctggcgaagggtgtaaacacccttcaggtatgttttatacaagtggaggtcagccaaggatcttagggcttgactggatgactctggctgggcttagggattcagagaataccatgctgagctttgatgctcttgattctcctgttgcaggcatcacaatgtggcaaacactgactgaatggtttgaaaaggccggttatgaaaaggtgttcagtaatgtagggatcactcaggcaggtgtccaggggatcagagatttaaataagtatgtagagcaaggctataaagttgtgacattaataaatgatggactgcttgaaggtagtacaaacaacacaacattacctacgcactggattgtatgggatggctctgtaacacaggataataatggatatgttaatttgaaattattttcctgggggcaatcagctaactggattaaacagaaaaaagatttacaattttttatcaatagatttttcggggggttggttttcaaaccattaaaatag

SEQ ID NO: 159251 - DNA, 189 bp, Enterobacter cloacae
atgagcaaattaacccgtgaattagtagcaaacgccatgctgagtagcattgaaaactacctgtttgaggttcttgattctgttcagactgacgcgggagagcttacgccagaggagtgctacagccccaacgcgtgggtaagaagcgctgtggaaaaagctgcatccgaagtggaggccgcccaatga

SEQ ID NO: 159252 - DNA, 249 bp, Enterobacter cloacae
atgactcaaagaacttatgtacgtgttgctgactatattcgtcagctggcaagagacaacaatgttacggctaaccgtgatggtatgagccgcatggcagtgaccattactgcgcttgctggtgactctgttgagctggataatatcgagcaattactggtaaatcttaaaaagaaaggtgttctgagtaaatctgaaattctgcagcttcagggcctctacttccgcgagcaaaagcgttttctttaa

SEQ ID NO: 159253 - DNA, 984 bp, Enterobacter cloacae
atgagtacaacgatattctattcatggcaaagtgatctagatgcaaagctaaatcgcttttttatccgagacagccttaaagctgcattaaaaatgttgagccatgagcctgagtatggtgagtcggttcgacttgacagtgatacatccggtgtccctgggactcctgacatagcttcaaccatttttgagaaaatagataacagctcagtctttgtcgcagacataagttactgtgctagcgatgatgctacgggtaagaaattccccaactctaatgtaatgattgaattagggtacgcactagcaaaaattagtgacatcggtgttcttaatattatgaacacagcttacgggaagccagataatcttccgtttgatttaaagcataagagatggccgattcagtacgaactaaccaatgaaatttatgctgacaaaggaaaaagagaaaaagtaaaagaaaggctaaccaaagaactttacgaatttattaaaatcataattgacattaaaacagttgattctgaacaacctaaaataggtgatgctccttcgctgtcatatatcgaaaaatgcataacaaactctgactcggcacaggggtgggatgtaagttcagttcaatctaaaacagttgccgtttatagaaatgatgtgaatttgcagattaaagttgattggtctgaagaggggacacaatgtgaagactttagagagccatgggcaaattgttacccagacagtcgagcatcgggttattgggtagatatctactacggtgtaagtcacataatatcgatgagaagtatactggtttcagttgatggtgcccgagcaaccctgcctattccaaggcaaaagggagtttctggacaaattactgaagtacttcctttagactataaatatgcccagatatttgactcattaggcactttagatgaatacatgtggcaatctaaacttactctagcgcaataa

SEQ ID NO: 159254 - DNA, 705 bp, Enterobacter cloacae
atggaaaaaatcaaagctccctgtccgtactgtaaaggtgaaaaaaattgtcacacaataggctataaaaaaagagaatggagtggggatgatgggaacaactatttttgggctgaaagtgaatacaaattattagaatgcatggggtgcgacggaatatttacatatattaaatcccgtcatagtgaagattacgactatgaaagagatgagtcaggctatgattgtatggtatataactatcatatattaacatatcctacgcaggagcaagaagagattagacccacttggtttggcgagatattaagcaaagattatcagctgtatgtaataatgaacgaaatgtacattgcatttcaaaataaatcactcattttagcggcgattgggcttagaactatttttgacagaacagtcgatgttttaaacattcacccaggacatacattaggccagaaggttgacattcttaaagaggaaggctttataggggaaacagaaaggagccaacttaaaattgtaaccgaagctggcaattcagctgcacacagggcatgggcaccgaacgaagctgaatttaaatcacttttggtaattatagaaaattttgtaatgcgaacaatactaaaagatgaggatatatttaagattgcagaaaaattacctgagaaacagccaaggcctcccaaaaagcaagaataa

SEQ ID NO: 159255 - DNA, 867 bp, Enterobacter cloacae
atgcaaagaattattcctgataaaaattggtgggataacgagagtcataatcgaaatgcagcaactgtatgcccatacgcgaattcgcatagctgccctcgataccatgacagtgtagttctgcttaaacgtagcaaaatgatagcgggcataacggatacaaaagaagaggagttgagtgagtattgggaaagaaccaaattttcatctttatgtgatgaagaattaccctcagtttgttcaaataaaaatggaggtgtttcatcgatcagtaatttttgccctgaaatatcatataagtatttttactattatgctgattacatgtgtaaatatgtcgatgaaatagatcaggatacaggtgtgcgtattgcgaaaaacgataatataaaaaatgactggaagtattcatggatgaccgttactcctaggttttatttggattgcgatgtctttagtcatgttaaacagttcaatgaaactttggggaatgattacttaaaaagattgcaccccaatattgttcagcaaataagtagaatgaataattgtttagattccaatgacccggcaggagcgttgcacgccgcctctaatattttagaaacaatggcgaaagatatttctcaaaacccaaatgtatcaaatcaatcattgggtggtttttttgaacagttcaagaaaaagtcaaacctatctaataaccttattgttgcgattaaagatatttatgatttgcgtaacaaattacctactgctggacatggaagcctagacaagcctgaattgactatggcagatgctatagctattgcggcaatgacaaaggcgatattagaaattgaatatcgaagcaaggccatctaa

SEQ ID NO: 159256 - DNA, 636 bp, Enterobacter cloacae
atggacagcatactgaaagttggagtcaaagcacttttcgctagggctgcgaacctaattgatagggaatctttcgagcaggaacctaactataccggagcgttgtttggaaaacttcacggtgaatctgtggagcatgaagggattgtaattaattttaaagcttctattactaatgacagagggcctggcagtgctgaatcaattacaggaatagacataggtctcattgtttcttgggaggatgaaaatggagaggtaaaaaaagttaaagctgtccttatacaagctaaaaatcatctatataacatgtcaaaaactgacaggggcgatctagatgctcaatgtcaaaaaatggctaaaatatctgattcttatgctgtactagactgcccttatgatggaagcataccaacgatctgtcaaagaaataaaacacctccaccacactgggatatagatactaaacaagatttagcggattacttacttgatgtagttatggagtgcaatgacggggatactaacccagaagtaatcaaaattgcaaaaagggctgatcgttgtattaaagtgaaatcgaatggccctgttcctgtgtacaccccaactaagaaaagtaagtataaaaggtga

SEQ ID NO: 159257 - DNA, 813 bp, Enterobacter cloacae
atgagtaactcaataataaagaaaattcttaatcaaaaagctaaaagatttaggggggctttttctgatgatgctaaagacttatatttcggtgacgatgaaaagctatttcatgcagcggaatatgggcgatttagagaaagcatagcttccgattttttgcgattatttatacctcgatatatatctattggtaatggctttatcgtttcctcgaaaaatgaaaggagcactcaatgcgatgttattttttatgatggtgagcttacccctttaatacaagatgatcataataatcaattttttccttcggacagcataaaagggattggggaagtaaaatcagacctcacacaaagagaacttcttgatgctcttttaaaactatctaaaactaagaggatagcccatgaaattggacttggttctgttggttcaaatggggatgaatactcaagattgcacttcactgattatgcttacagttttttaatatgtaataaaatcaaaggtaatttagaggggttaggagaaaaaatagaaaaatattatcatgagaatggtgttgaaaatcaatatcgccatagttttattctttcattagatgggaatgctttatgctataaaagcaaaaacatcggtgtttgcgcttatccattcacttttggtaatgatgactatccaacaggtaatccaacacatcatatatctacttttgatgaagcaataactgcgttcgctcaattaacttacgtagccttaacttcacagcaaagagtcattattaactgggttgaatatattaattcttag

SEQ ID NO: 159258 - DNA, 522 bp, Enterobacter cloacae
atgaggcttgccagttctggagagcaatgtattatcatgacattgattggcatagcatcagcaattagagatcatagtctaatatttatagatgaacctgagataagcttgcatcctgaatggcaagaaaaattcatagaattactaaaaaaagccttcaaacaatatgaaggatgtcttttcataatcgcaacacactcacctcagttaatctctaagctcccagagaaaaattcttttatatataatttagcacaagaggttttatctacatcagatgggtttagccatagatcatctgactaccaacttgccaatatttttaactttccagggattaataatgagtatttatcacgaatattaatcacctggctggtgaaattttctaagaatgaatcgccatccgattcagagaaaacagaaattaaagaagcgctcaagttaaaaaaattactatctgatagcgatccggttaagaggctcatgttaatggttgaagatacaatggggtcgatataa

SEQ ID NO: 159259 - DNA, 717 bp, Enterobacter cloacae
atgcatctgtatccatttaaaatacataaccctgttatttatcaaggtagcgctcttgatgcatataaaaaacacaaagctaaaaaacattctgaaaaatgtagcgatgattggaacagcgatgatccagatatcactaccttaaaaaaaaccataaaagatttctatatcttagaacaggactttacttgttgttattgtaaacaaaaaattgttgtggtacataatgggagttgggatgcggaacatataattcctaaaagtgaacatcctgcttttatgtttgaaccacagaacattgccatatgctgtaaagactgtaatggtgaaaaattagcgaaggaagtgttaacgaattctagcgttaagaatagaaaaaaattcctcacagataaagccgcttatctgattgttcatcctcattttgatgaatatgatgaacatatagaaattcgtcagaattttagaatatatcgaggcagaactgataagggggtaaataccattactatatgtggtttgctaagatttggtaaagacactaattacagtaatgtatcgtcttcaactttagatgaagttactgaggttcaatcgcgacttgcacaagccatgaatctagatgagcaatatgcgctattgctggaattaagtgatgtggttgaacataaaaaagcagaggtctataaactacgctccgagagaaggaataagtaa

SEQ ID NO: 159260 - DNA, 699 bp, Enterobacter cloacae
atggcaatttcagaaaaagcgataaagattttatggtctaatgctgctggtatatgttcttttagcggttgcaatgaaaaactttcagtggcggaggctgctgaaggtgccccatatactattggggagatggcacatataaaagggaatagaccaggttccaatcgctatgacattgaacagcctgcttctgaacgagatagttacgagaatcttattttactctgtccaacccatcacacattaattgataaagttgaaaacgttgatagatttagcgttgaaattctccatgaaatgaaaagagaacatgaggtgtcgatttctaaccgattagctattattaaatttgagtctgttgataaactgaaagaccaaatttctacatacttagctgaaaatcatcaaagttgggaacaatatgggcctttatcggataatgctaaaaagaatcctaacagtgagcaaatttatgccgtatggacatctgaacgcctctcaataatcgttcctaataatagagaaattgttaaaattctccaggggaatagagagttgttttctcggaacgagcaaagattagtaagtaaatttattcaacatgctgaaagctatgaaagatgggttaatgatgaaataccttataacgccatacaaagatttccattagactttgaaaccttaattttaggagagtaa

SEQ ID NO: 159261 - DNA, 411 bp, Enterobacter cloacae; identical to SEQ ID NO: 82131

SEQ ID NO: 159262 - DNA, 309 bp, Enterobacter cloacae
atgttcagtcgcccatcatttctattactggctctgctcacagggacgcaggcctgggcctccccggaatccacccagctcgccctcgtgctgaagcaactcgacggcgtaaaaacctcgctggagcgcgcccaaaccagcgccagcaccgatccacagtcacgctacttcttcgattaccagcaggcgcagcaggacatcaccaccattgaacagggcatccgccgttaccttgtcccggcaagggcgcagccgcgcaccgttcagcccctgagcgccagctaccagcgggagacccccgatgactga

SEQ ID NO: 159263 - DNA, 2001 bp, Enterobacter cloacae
atgatcgacaaggctattaccaatcctggatttcataagcaatttcaattagatagattcaacgaacaagaaaagaaaatattaaaatcactagctagaggttggtatcttaccaattctggtgcagagttgagaatcgcccaatctcgatataattattttcttatgaagcctacccataatacttctgagatgttcaacatagaacgagaaattatttgtgtctttagtgattatgactattttgagcccagagcattagatttttttgaattagttaaaactcggcttcctaggatgcgaacggaaacagtttgcgcagttcttataggaaaagctcgtgatactgaatctaaagttgaacatcttttgaaatcagatccagagcaccaaattatagttcctgttagctataatgagatgttgcaaaagaatgcactaataactctcgaaaataaattcaggaaacatttctattccagagatttattctcattcttatcacctcttaagaaagacacttatttctttggtcgttcaaatcttataaatgaaattgtaaaccgattcaagtctggcgaacatacaagtttatttggcctcagaaaaagtggaaaaacatcgatcgtttatgcacttcaacggcgtcttgaaatgaatggtgattgctttgtttcattagattgtgaaagcccatctatacatggacttcgctggaatgaattacttgagaggctagttcgactttatcaagatgccatgcaatcaaaattaaatatcgatacttctgatcgatatgctcctaaaaatgctgctgatagttttgagtgcgatatcctaaaaatatacaactcaaataaaaattctgggacagttttcatttttgatgaaattgagagaattactccaaaaacaggagcctcaattcactggagagaagattccgatttcatatatttctggcagacaatgcgaggtttctaccaaaagcatccatctgttttttgctatatgttagtaggtaccaacccaagttgcattgaagcttcgtcaatgttaggacatgataacccaatttatgcttcaattccaagtcagtatgtaccttcctttactgtagagcaagtaagtcaaatggtttctcgccttggcgattatatggggttaaaatttgatgcgctaatcgctgcaaaattgacggaggattacggtgggcacccatttttaatccgtcaagcatgcagtcaaattaataagctggtttcttcggaacgaccttttaaaatagataagacactttataatcattccaaagaagagtttagaataaactcacaagaatatttagaaatgatgattcatgtgttagcggagtggtatcctgatgagtatgagatgctatgtttgcttgctcaagatgatagacaaaaatttaatgcatatgcgcaagacaatatgtcttatacacgacatttagttggatatggacttgttcagaagggagcatctggatactcctttaactttgaagagatttcagatttacttcgtaagaaacataacaatgagaggctcaatttaaccgatgatgaaaaagttcaagaaatctccattagaagaaatcgcctagagaaagcaatgcgagtatttatccgaaactcattaaaaatatcaaaaggtagtaacaaagctaaagacactgtgattgcagcagtacctgaggggcgaagatccatgttaattaattatgatttatcaggaatccttgatcgagactcttctccattgttctttcttgagttaataaatatagttaagagggaatggactaactttgaaaatgtctttgatattgagaaagccaagcttatcctaatgcttgaagagattaatgcgacaggacgtccggatgcacatgcaaagtatgttgacgaagatgagtttcagcaattaagactctatttcaaaaaacttgagtcaatgcttcaagaatggctctaa

SEQ ID NO: 159264 - DNA, 633 bp, Enterobacter cloacae
atgagcgaacaacgggccccaccttcgcctccaccacaaggaccgattggctggctattgtcactggccggacggattattgggctggttatcggtgcgctggtgctgcgagtggtgctggaactagtggggctctatttctggtggccgcaggaggggagcaggcatgtttttcaagtgatgaggcaggagcaggcggaactggttagcgcattacaaccgcatccgctgaggaatgaaatggtgatgttgctggagaacgggacaactcacggacttttggctaacaggttcctgcagaaaccgttcaccgccctggcctatacgctgatgagttttatgcagcgcctgacatggctggccgccatgttccccctgctctgcctgtgcgtgttaaccgggctgacagaaggtctggtgcaacgggatctgaggcgctttggctccgggctggaatcggtttttctccaccgttatgtcatcaggacaggcagttcagtcgccaccacactgtgggtgtgttatctggcgcagccactatttctgaccacaatgttgtttttactaccagccaccttttggttggggataacggtatggatggcggcaggtagctttaagcgctggttataa

SEQ ID NO: 159265 - DNA, 1389 bp, Enterobacter cloacae
ttgatagctgaactcatcaaaaattttcttaagcaagcagacgaaaaatcatcacaaagcacgtcttcatacaataaagaatatcgtaatctaaaaataacgctgagctttggaaaaggaagttacgcagatgtcccatggatcgcatttcttggtggtgggcaaacaccgtcaaatgggatttatcctgtaatattatattataaaaattacaatgaattaatccttgcttatggtgttagtagtattacaaaaccagaactatcatgggaagggttgccgcctaagaccatcaccattaatgattactttaaggaataccataataaacctgcagagaaatatggcacttcattatttcactctgtttaccaaaccaataatgaagttgattataactctctagtatctggactgaatgaagcaattgataaatataataatttaataaacaaagaaactcataccaacaagttaaataacaacaaaaatgaaatcaccacatataatttcaataatgccagcgaagatttattccttccaactgacacactcaacaagataattaaaaagctgaacaacaaaaaaaacataatactacaaggtcctcctggagttggtaaatcttttattgccaagagattggcatacctccaaattggaagtaaagatattaataaggttggtatgattcaatttcatcaatcttatagttatgaggattttattcaaggatttcgacctaatacgaccggtttcactagaaaaaatggtattttctatgagttttgccagaaagctaaagatgaccccgaaaataattatgtatttataattgacgaaattaacagagcgaatttgagcaaagtattgggtgagctaatgatgctcattgaagcagacaaaagaggccccgagtgggcaattcctttgacttattccgaagatgaaaaggacacttttttcgtcccggaaaatatattcattatagggttaatgaatactgcagaccgttctttggctgttgttgattatgcattacgtcgtcgtttttcatttattgatatagcaccgggattcgatactgagcaatatcgctcctatatgttatccaaaggtgtaagcgaagaagttattaatctcattcgtaccagcatgcacaaattgaatttagagatcggtcatgacaaaaataaccttggaaaaggatacataattggccacagtttcttttgcccttcgagtaatatcgaaaaaggattagactatgaatggtataaagaaaccatcatgtctgacattggccaattattagaggaatattggttcgatgaaccagaaaaatatgaaaaatggttaaacatactcttggtgaatatcgatgaatga

SEQ ID NO: 159266 - DNA, 453 bp, Enterobacter cloacae
atggtgcgagtgaaccacacagcgttggatggaaaaatagcaggtaatttgcgcactttgattgatgaggaagcactggcgcaggccagagggcaattgattgcacagggctggctgacagcagatgaaatatccctgttgatggatttcactcctgaacagtttgctaattggaaatgcgagcactgtattttctcggtacataaaaaaggtgctggtgagatatccccctgctatgagctggatgaaaacctgcggccattaccggtgatgaaatcgattctggatattctgacaaaggggaaaactccatggggcatagccgagtggtttgctacctcaaatgatttattagcaggcaagacaccgcaggagatgctatcgcactatccggccaatgtaactcaggcggcggaagcagttgcgagggatattttaagtggttcggagtaa

SEQ ID NO: 159267 - DNA, 705 bp, Enterobacter cloacae
atgctgctcatggctactttcaggaagcatttaaatatggcatttgaatggaaagacgtcatcacacctgtagttactttttctggcgtctggcttggtgcaagattcgcattagggaatgatattcggaaaaaatcaattgagatggaaacagagcgattggaacgactctcagtccaatgtgacttttgtttacggaatataaatctatactgcatgagattggctcgcttacttcacgatctatctaatgggtataaaaaaaggatcacgcttgcggaagtaactcttgggctgaaaaagtcagcagaagcagggactgctcttgatttagaatgtggcaggtttttacagaatacattagaatttcatagggatactgatttccaaaaatggaaaagtgtaatgcttccattattaaaacatatcgataatgttattgcctctccctctctggcctcagacgatggtactgatgaacttagccgtcaattttgggaaccagaacaagtcaaacactttaataaggagttggctgttttagctgaaccgctaccggaattcagaaaacaacttttgcagagcattgctaatgatcatcgaatgctgctcaatccagccaatttaaatttttggattcttattgaacgatttaaacatatagtcaaaagctttttccagaagcctccagttccattctcatga

SEQ ID NO: 159268 - DNA, 2541 bp, Enterobacter cloacae
atgaaattaacccttacccagcttgaaacattgctgctccgcgcttgtgatgacctgcgtggcagcatggatgccagtgaatacaaagaatatatttttggcatgttgttccttaaacgtgccagcgacctgttcgatcaacgtcaggctgagctacgtaagcagtttgaagctcaagggatgtccaaactggatatcgagctggctcttgaagatcccgacaactactcaggtaagtatttctatgttcctccgcgtgcacgctggaacgaagagtgggaagagattatagaagagaaggatggcactaaaaaagcggtcatccgaccggccctgaagcatgtgaaagttggggttggcagtgcgttgaataaagcgctggaagcgatcgaagaagccaatatcgatgttttacaggatgtactgaaaggtattaactttaaccgtaagattggccagcgtactctggacgacgataccttggctgattttgtacagaacttcgagaaaattccgcttaaagatgaggactttgagttccccgatctgcttggtgcggcatatgaatggttgattaaattctttgctgactctgcgggtaaaaaggctggagagttttataccccggctgaagttgtgcggatctgtgttgagatctgcgatcctgaagagggcatgagtgtttatgacccgaccgttggctcgggaggcatgctgattcagatgcgtgactacctgcgcgaaaaaggcggtgatgcggatgaaatcgcgctctatggtcaggaaaaaatcggaaccacctggtctatctgcaaaatgaacatgctactgcatggaatttcgcatgctgatattcgccaggaagacaccctgcgtgaaccacagcattacgatgaaaggaatgatttaagacgttttgatcgtgtggtggctaacccgccgttcagccagaactatatcaagaaggatattaaacaccccgggcgttttgctgtttggctgccagagaaaggcaagaaagcggacctgatgtttgttcagcatatgttgtctgtgctgaaacatgatgggcgtatggcgaccgttatgcctcatggggtgttgttccgtagcggtgatgaacgcgaagcgcgtaaacactttatcgatcacggttatctggaagccattattggtttacccagcaacctgttctacggtacggggataccagcctgtatcttagtgatgaataaagaaggtgctgcaaaacgtaagtcagttctgtttatcaacgccgatcgggaatacagcgaagataaagcacagaatcatttgcgtccggaggatattgataaaattatcaacgcatatcgtaagggaaaaacgatcccgggctatgcgcgcgttgttccaactgatgagattatcaaagaagattacaactgtaatattcgtcgctacgtggacaatgcgccgccgccggaaccccatgatgttcgtgcgcatttacatggcggtattccgctgtcggaaatcgaaagtcttggccatttctggcaaaactatgccgggttacgtgcagatatttttgcgccccgtgatgctgagtatatgaatttcgctcccacgttgacggaaaaacgtgatattgctgagtttgttaaccgacatgcgggtgtactacaagcgaatcagacattcatgacgcaacttgaagcatggtgggagcagaatctcccgattgtggaagcgttagcccctgacgctgccaatcagcaggcccggccacgtaatgtttatgtaatgcgcagccagttgatggacagcattcatgacgcatttgcgcagcaaaacttgttaacttccttccaggtgcgcggcgcttttgccagctatgtgaactacctgaaggcggacttcaaatctattgctgccagtggctggggggctgaactgatcccggatgaggatattctgcaaagccagttccctgaggtactggaagagcaggctaatgcacagacccgtttagccgagctgcaggcgttatttgccgcggcggatgacgaggactttgaagattccgatgatactggtgtgatgacctctgaacaggtgaaagacctgaaagcgaagctgaaagatgcgaaaggcatggttaagcagtgcaaacgcgatccgggattgggaagtaccgaagagtatcaagaaatggtcacacaaatcgaagtacagttgaagcgtcataaggtgctggaagatgaagctaaagagctgaagaaagttattaagactatagagaacaagcgtgatgagctggttttaagcgctcgtgaaaagatctcacaggatgaggctcgtgtggttattgtagcccggctgaaacagctattaataaatacctataatcgctatctgcgtacagaacagcgagtttgcatcactgcaattgaaaatctgtggtcaaaatatgcagtaacggccaaagaaattgaagctgaaagagatatagcctctcagcagctacagatgcttttggtggagttagggtatgagtga

SEQ ID NO: 159269 - DNA, 1257 bp, Enterobacter cloacae
atgagtgagtggattgtaaactctcttggtgaacttgtttcctttcagaaaggaagaaaagtacctaccagccaattccttctaaatggctatgagccctatctaggtgcaggtgctttatcaggagagcatgatggttatgctgtgtcctcatttgctattaaagccaatgaaaaagatattcttatgctttgggatggagaacgaagtgggctttgttgtagtggcttaaatggtgttgtctcatcaacagtttgtaaattgacacctaaagacaatattaacagcaaattgttatattattttttagccaataaatttgaatggatccaaaaccgaagaactggcactggtgttccacatgtacctaaggacattggcaggatattaaaagttaaatatccaaagtcattagaagtacaaaataatattgtggaaattttgtgtttagttgatgctactatcgaaaaaacagaaaaattgattgaaaagtatcaaagaattaaaattggaatgatgcaggatttgtttacgcgtggtattggcaacgatggtaaactgaggcccacttatacgaagtcacctgatttatataagaagacattagtgggattgattcccaatgattgggaagttgtgagattaactacagttttggattctgttattgatggaccttttggctcaaatctcaagacagaacattacgttgtagagccgggagttagagttgtcagactacagaatattgaggagtatctatatgatgacagtgataaatcttacatatcggataaacatgctagtttgctgattaggaataaagtcttaggtgatgatgttttaatcgcagggttaggcgatgaacgttatcctgtggggcgttcttgtacttaccctgctcacctgcctgttgccgtgaataaggcggattgctttcgtgctaggtgcaattctgacatgaaaaataagtttctcatgttgtacttgaataatgaaaaagcaagagtacaaattagaagttacgagcaaggtgttaccagaccgaggattaatacgggtaatctaaagaaattattgattgtgaaaccatctttagatgaacaagaggctattgtttcaaaatttgaaaatatgcaaagtgctttaaaaaaagaaaatagttatcttgccaaaatgaaagagtataaaaagggtttactaaaagatcttcttactggcaaagtcactgtacaaaaccagaggacgcagaggtaa

SEQ ID NO: 159270 - DNA, 3285 bp, Enterobacter cloacae
  misc_feature (222)..(231): n is a, c, g, or t
atgtctgaatacacggaagttgaacagccctttctgcagcaattgcaatcactgggctgggcgattattgaccagggacaggacattccctccgatccggctaaaagtatgcgcagcagcttccgacagtggctgctgccgcagatttttactcacgcagtagcgcacgtaaatgccggatcagacggaaaaacatggttaactgacaagcaattacaggannnnnnnnnnttacaggatctgcaagagcagatcctgcgacaacccaaccgtactctactggaagctaatgaggcgatccaaaagctactgtttaaaacacaggtggatatgaataatgccaccggtgagtctgacccaatagttaaattaatcgatttcgaacacccggaaaataaccactttttggcgataaaccagttccggattgataccccgggttgcgtaaaacaatttatcattcccgatattgttttatttattaatggcattccgctgattgtcgtagagtgtaaaaaaggtggtccaacctgttctaacccaatggctgaagcatatattcagctccagcgttatatgaacaaccgtaaagcgacagcgctgcagggattaaaagagggggagccacgtttatttcacagtaatttatttgcggtcagaacaacaggcgttgaagcggattacggcacgattacttccggggaggaacatttttatccttggaagacacaatggccgcaggaagataatgttgccagcgatatgaatgcgcagcaacagctaatcaatggcatgttaaataaagcgaacctgttatccatcctgcggacatgctctgtatttatggatactgatgccggcccacgcatcaaggttatctgccgttatcagcaatttcgcgccgctaataagatcttacagcgtttacatgaaggtaaaaccacggaagaaaaaagtggtgtagtctggcatacccaggggtcgggtaagagcctgacgatggtttttattgcccgaatgctgcgcgtttcaaacgatcttcacgattataaaatcatactgatcaacgatcgtctcgatctggaggagcagttaacagcgacggcaaaactgatcggtggacgagtcaatgttattgaaagcagcaatacgctacgaaaagaattagccaccaacacttccgatatcaatatggtgatggcgcataagttcctggtcgcgcaggaaagcctccccgtatccgttgctaaagcgctgggaacctaccaggctattccaacgggcaaaacatttggcgtagtgaatacctcttcgcgaattgtgttaatgatcgatgaagcacaccgtacccagagctccgatctgggaagtaatatttttgaggctttccccaatgcggcccgcattgccttcaccggaacgccgctgattacagaacgccacggtgagaaacgtaccgtcaaacgctttggcgaatatatcgataagtacaaattgatggatgccgttgaagatggcaccacgttgcagatcctttacgaaggcaggactgctgatgccgcgctgaacgataaacatggctttgaaacgcagtttgagaatctctttaaagaccgaacggaagaagaattagacgctattaagaaaaagtatggcgccacaggcgacattctggaagcagagcaacgtattgccgctatcgcgcgcgatatggtgaaacactatctggagcatatttttcctaatggctttaaagctcaagtggtgtgtcactccaaactggcggcagtccgttaccagaaggctatccatcaggcattaaaagagaaagcggatgagcttgaatctgcggacgtacctgaccacgcattaattaatcggatcaagttcctcaaagctgcggtcgtgatatccagtgatggcaccaacgaagcggcatttattaccgaaacacgcaagcaagcccgtgcctggaatacggtagaaaatttctgtaggccatttgcgtttgacgatcctgataaaccttatacaggaattgccttcctggtagtctgtgacatgttattaaccggttttgatgcaccgatagagcaagttatgtacctggataaaaaaatccgcgagcatacgttactacaggcaattgcccgtacaaaccgggtgaaaaaagggaaacaacgtggttttgttgtggattatatcggccttactcaccatcttaccgaggcattaactctctatgcagccagtgacgagcgccaggagctggccgaaggattaaaaaatatcaattcagaagttccggtgctgcaggaacgctatcagcgcttgttgagtttgttctcgtaccatcaggttaatggcatccatgatttccttgaggggcgattacccgacatagcagcagaagcagccgcggtgaacgatgctgttcgtttgctaaaagacgagaaactgcgggcggattttgatgtgtatctgaaaaaattccttagcagtctggatatcatcctgccgcatagtgcgggccaagtttatcgtattcctgcaaagcgtctgggatatatccagcgagtgaccaaagagcgttataaagacgattcgctggatttgggagatgccggccagaaggtacgcgatctgattaatcagcacctcatcagtctggggattaaccctacggttcctcccgttgaattgctctcagataacttcattgaacagctaaaccagcataccaacggcaatgatgaggcgaaagccagcgaaatggagcatgcaattcgtaagcattgcaccgttcaccatgatgaagatccagctttttataagagtctttcggaaaaagtggaacaattgatcgacctgtatcaggatcaatggaagaagctggcggaagagttagagaaactgcgtaacgttgcgattaccgggcgccaagagggggaagaggggatgagccgggaggccactacgttttatgaacatattgctcatgaagcgttcgcgggcggagaaatacccgtttcagtaaaacccaaaattaaagcgctgatggaagcaattgttgaacttctgcaacaaagcatcggcagcatcgactactggcacaacagtagcaaacaaaaaaaaacgcgcagtgagatcaaaacggctctgacgctaaccggagttcctgaattaaaacaggcaagagaacgaattgcggtagaaattatgaaactggcaaaaaaccgacatagtgcgttactccagaactcagcggagagcaaaaaaccatga

SEQ ID NO: 159271 - DNA, 708 bp, Enterobacter cloacae
atgatgtacagacgggtgaaggacatcgactatcatctcgcgccaggtaccacccggcgtacaacggatatcgttatcgaaagagacggtcagatcattgttcgcccgccagtacactttactcctgaacaggcggataccgttgtttttcagaaacgcatgtggatttatcgtaacctggctgagtggaaagatcttaatgccactacggtggcgcgtgaatgggtaaacggcgagacctttctctatctggggagcatgtatcgcttatctctggtttccgatcaacatctaccgttactcctgaaagatggacgcttctgccttaatcggcaacttattgaaaaaggcggcatagccgcagcgaaaggcgcgtttgaagacttttatataactaaaggccagcagcgcatcagagaacgcactctgttttttgcgcctaaagtcggagtgaaggcagaaacaatccgggtgaaggaaatgggatatcgctgggccagttgcggtcatagcggtacgctgaatttccactggaaatgtatgatggcccccgcgaagatcctggattacatcgtggtccacgagctatgtcattttcaccatcgcaaccatacggacgctttctggaatgaagtggataaggtgatgcctgactggagagagcgcaaagagtggctgcgtaaacatggcgctagcttagacctgtag

SEQ ID NO: 159272 - DNA, 231 bp, Enterobacter cloacae
atgataggcacacagattggcgcaggtgccatctccccggccttcgccctgcccgcgttgtttgccatcaacgtgcaggtcggctgtgacttcgtcccggtgggcctttcgatgcaggaggcgaaaccggagaccatcgcaaaaggtgtacccgcctttctactgtcgagacaactgaccggaccgctggccgtcattatcggctggctgttttccctgggcttattctga

SEQ ID NO: 159273 - DNA, 954 bp, Enterobacter cloacae
atgaaaggattattaaaatcaggctggttggtgctggcgttatggctggttgctttcggcacacaggcttcatgccggtttgctaatggtgtgacagctgaaatccccggctatatcagctttggcaatgtgtcagtccagcgcgatgcaccagtgggcagtattattgctacagcaacaacaggggcctataacggtggcaataccattgcggggtgcgataccagttggacttttcgctgggagttgagtaagtggagtacattaagttcgcagggcaataaggtttacagcactaatgtttcgggcgttggtcttcggatgaccgccgtggtttccggcaacgtactgccgtatgatgcgacgcttaaagcaaataattatgcaaccattcctggcgatggtattaaagcggagctcattaaaacaggcgatatcacgggaggaacactggataccggtgtactggcgcgagcctcggtgattaaccagttttatatcgcgaacgtcacattaaatggcacaaataccattacctcggaatcctgctccgttaccactaacccggttaatgtcccgctgggcgaccatgataaaagtgagttcaacggtccgggtaccggaacggcctggcagacattcaatatcaatctgagttgtgttcagggcgcgcggattaatgtgcgtattgacgccacagcagatagcgacgcaggcgtacccggcgtcattaaactcgacagcgatcccgttaatgccagcggtgtcggcgttcaggtctggtatcgctatgaagacagcccggtacagttcggccaggagcggtattactacacctcgccatcaggtggtaacgaatatgttcagcttcaggcgcgctattatcagactacgcagagcatcacggccgggaaggcgaacgccacggcgacgtttacgctgacgtataaatag

SEQ ID NO: 159274 - DNA, 243 bp, Enterobacter cloacae
atgaacacgtcaccgtggaacaaagaccgtatcataggccaaaaaagaccacttcagatatctcatatctggggtatccgaatccgacttgaactggaaggtaaaacgcgcaatttagctctgttcaacataccctggacagtaagcttcaaggctgtgatctggtcaaactcaaagtatctgatgttgcatatggtagctctgtttcaagcagagctaccatatacaacagaaaaccggtag

SEQ ID NO: 159275 - DNA, 699 bp, Enterobacter cloacae
atggtcttacagtattttaatgtactgaatgaacttagtaatcaggctatttcttctttgaatatcggagccttttcagcatcggaagtattaaccagggttataatagaacaggctgccaatcaattttatatagcaatagataatggtgaaaatgcacaagcattgctcaaggctagtaagaaattagttcatagtaatggaaatcggtggctggagtgtttaaaatccaaaggaatgactaatccagcagcaaatgaaaggattcgcatgggaaaagaactaactgatatatttaatggattgtggcccaatacacctgaatatccaggaaccagaaagctttttgaagtaattggttgggaaacacattatcatgctcactacgctcccctttgtgattcaatacatacattctctgatgatatggcaaatatagtatctctatataatgcaatccaaagcgatgaaactactgctatcgaattaattcttgcagttaaacaagaaaataaacggctggcaatttataatgttgtaattgctacggcccttcggtgtgaggccttagtaaatgtatttaactctttaggttatcaggacattataactgaaatgacaccaacaatagatacagtcaaccagactataattcgatatgatgattttgatcattccagaattgatgattgtcaataa

SEQ ID NO: 159276 - DNA, 252 bp, Enterobacter cloacae
atgaacgtaacctcacccaaaatgctggctcaggcagtcagggatgcacgcaagcaacgtaagctgactcaacgcgaagctgctgaaagtatgagcatgaagcaatcaacggtttcagagtttgagaaccatccggaggggacacggctggacacactttttaagctccttgccgctctggatcttgagcttcaggttgtaagccgtaagggtaaaaacaaatcatctgagggttgggaccaggagtggtga

SEQ ID NO: 159277 - DNA, 1014 bp, Enterobacter cloacae
atggactgtgttggggcgatacagctctggccttatgaaaccgatattccgtctgttcagagagtggatgctgagcccttaactgaaaaagaaatagaacatctgctgcagggatacaaagatgccccattgggtatgcaggcagaggtcgatgattttcgcatttcgctggcgggtgcgcaggagaaaacagccctgctctggtggaataatcgatggtgcaggccacgcggcagcacgccgacaagccatatttttaaactgcctattggctatatcgccaataacggaatagaccttcgcgagagcgttgaaaatgagtggttgtgttcaaaaatagcggcggagtttggttttcctgttgcggatacccgagttgcgtattttgggcaacaaaaggttctgattgttgaacgtttcgatcggcgatgggctaaagatggccgttggctgatgcgtttgcctacagaagacttttgtcaggctctgggcgtggctccggcacttaagtatgaatctgattgtgggccaggaatcgccaagagcatggatttgttactgggttctcaacaaccgcttgaggacaggattttgtttttcagaagtcagatctttttctggatgctggcggcaattgatgaccacgccaaaaacttcagcgtattccttgaaccaaacagtgcttaccgtatggccccgctatatgatgtgatatcagcctatcctctgatgcacccgaaaggtattccccccagaaaggctaaaatggcaatggcactatccggacgtaatcgccattttcactggagtactatcatgccccgtcattttctttccactgcgcgagaagtgagctttcccgttttgcaagttgagcaatcgctggcggagatgaaacaacgaactgaatcggtgatctcaaaagtggaaacgatgttgcctgctggattcccggaacacataagcgaagctatatttgaaggattaaggcatcagtcagcgcggattccgtag

SEQ ID NO: 159278 - DNA, 975 bp, Enterobacter cloacae
atgttaaataaaatctataaatatactccattaagattcgatttctttgataatcttcttctaagagccagtcaaaaatatgcgttaaatgatccatttgaacttaggccaagccatcatagtgaaacaaatagtatcgacatgaagcattttgaagaactttcaaacgcttcatattttgattatgcagtgatttcgctttcagaaacgaataataatcttttgatgtggtcacattatgcagatcaacataaagggattgtcattgagtttgataccagcaaaccattattcgaaagttataaagattttactgctctaagatttgacgaagatattgaaggggaaattattgacatagaagaaaacgaacgaagagaaaatataaaagcggggcgtattcaaagagtgcgttataattcaaggcggcccaacattaaaaactttgaaaacatcctcgaacattttcttataaaaagtgaagaatggatatatgaaaaagaacatagaataatattaccacttctaactgctgatttcataatcacccatgaaaaattcctagataaaattgcgtttactttatatgatgatgagtatttcaatagaacatcagtaggcaattcgatgtacctaattgatattaaaaatttattaaatagagagggtgaacgttatcttagtgagttatatgaatctcctcttgtatcatatgaagaaacaaaaaactcttttatagaatctatttatcaagaatacctgaaagaaatatctgaagacccaagaactatcttcctttacaaaacccctcccgaatccattaaatctatttaccttggttgcagagttagcatagcagatcgagataagctcatgaaaaaaatcacaaatagcagtaaattatctcatgtaaatatataccaagctataacaagctctacgagatttgaactggaatttcaactattaaaataa

SEQ ID NO: 159279 - DNA, 255 bp, Enterobacter cloacae
atgatccctaaaagactgaaggaagctcgtttgcgagcaaagctgacacaggaaaagcttggtgtacttgcaggtatagaagaggctacggcttactcgcggttgtcgcattatgagaatggtacgcataagccgacatttgagttggtatgtgagtttgcgcgagtgctggatgtgcctgagtgttatttttatactgtagatgatggatttgctgatgcggttcttaaattatacctcagccataataaatga

SEQ ID NO: 159280 - DNA, 375 bp, Enterobacter cloacae
atgatgacctactgcgcgcgtattgtcgccatcggcctgtttgtcgccgacggtctcaccgacaagatgctcatcaccttcgacagcaacgggccgaaggactgtctggactactccctgtcactggaaccgaccatgcgggaagaaaatctgttcattctgccgggagataccctgttactggccggatacagctacctcattacggctgtgggcagagaagcacagcaatcgctgtttgaactcggccatctgacgatgaaatttgacggcagcctgaatgccttccatcccggtgtggtccatctgtccggcccggtgccattgctcccggccctgcacggagaactgatgattgcggagggacggccatga

SEQ ID NO: 159281 - DNA, 960 bp, Enterobacter cloacae; identical to SEQ ID NO: 102785

SEQ ID NO: 159282 - DNA, 966 bp, Enterobacter cloacae
atggatggttataataagaatgtaatttttcataagttgccatattcagggctaaaagggtatattttaaacagaaatgcccttattaaaactatccgaaaaattaaccctgatgttattaatgttcattatgcttctggctatggaacccttgcgaccgtttcaggagtcaaaaactttattctttcagtatgggggtccgatgtatatgatttccctttcaaatcaaaattacactacaaactggtaagcaataatctcaatagagctaagataatttgttcaactagtgaggttatgggacgttttgttaaagataatttcagtataaatccagacataccaatagaaattacaccatttggagtggatatatctaagtttaaaaaaatagagagaaattcaacaactgatactcttgtaattggtacagttaaaacattgagacctaaatacggcattgataatttaattcgggcttttagcattcttgttaataaaggatatgaaaatatcgagttaaagattgcagggaaaggttttcttcatgctgatttgcaggcattagctactgagcttggagtgaaagataaggttcaattcttgggatgggttgaaaataatgaagtccctaatttattaaatacgtttgatatttatgttgcaccaagtacattagatagtgagagttttggtgtggctattgttgaagcatcagcatgtaatttacctgttatagtaacaaatgttggtggattacctgaggtggtaataaatgatgtgactggtatagtcgttaaacctgatagtgttgacatattaagtgatgcaattgaaaagctccttaaaaattcaggtttacgtcatgccatgggagaagctggccgtgataatgtattagcaaaatatgaatgggacttttgcgttcgtaaaatgatagacatttactccagcgttgcacattaa

SEQ ID NO: 159283 - DNA, 759 bp, Enterobacter cloacae
atgtctcaacaagaaatcagcatcattaacctcgaccagcttgtgtccatgacctcagttgaaattgcggagctgacaggaaaagaacataaacacgttttacgagatattcgtaatatggtcgaagagcttaacgggtccaaaactgagcagcgagattctggcagctcaactttgagcagcgagcttaacgggtccaaatttgggcgcgttggcgaggaagtatacaaggacgcgaaaggtgagagccgaacaatgtatcgtctcgaccgtaagcatacttttattctggtcgctggctattccgttcacctccgcgccaagtgttacgaccatattcagacgttagagcgtcgagtccttcaactggaagagcagaagacccgagccgccgctcagtccgctaaccgtcgaggcgtgacttggggtgactactgcaaaacctatggtctacccgctcagaagctaatgaccgcacttcttcagcatcgtggtctctttcgtaagaacccaatcagcaacgagtggtctgtaaatccgaagtattccgactgctttcgtatcattaagccgtcagaccagaagttctcagcaggtggttataacttccggttcaatgctaaggggctggaggtcttcggtaagcctgcgacagtcgataggctgagaggcatccttattgccttcactggcaccgaccagcagaagcaagagcacctcctgaagcaggcccaatccggcaagctggagggactctaa

SEQ ID NO: 159284 - DNA, 228 bp, Enterobacter cloacae
atgaacgataacgccccatcacttgccagcctgttaaagcatggttgccaggtcacgcactaccgcaatactcgcgggtggattgaatgcccggacggacgtttctttaagccggaaccgaataaggtacgttttgttaaaggtatgagtaagccttttgtttatacgaagaagataaacaaaggtttatttagtgccttagctgggttatttagaaagctgctttag

SEQ ID NO: 159285 - DNA, 432 bp, Enterobacter cloacae
atgtttggtatgttcaagaaaaaaaccgctgctgtaaaagttgaattaaagaaagttgaaaaccgcgatctgatggaggccattgttggtggctgtctgctggttgctgctgctgatggtgaaattgagaaagaggaaaccgcaaagctcgatcagctgctgcgctccaatccccgcctgagccattacggcaacgaaatcaccgcgctgatcactcgcttcactgagcagcttgaggctggtttccgtgttggtcgcatgaacatcctgcgtgaaatcgaagatatcaaaaacgaccagaaagaggctgaggaggtcttcgtcaacatgctgaccattgccgaagctgacggcgagatcgagccggaagagcagaaggtactggaagaggttgggcgtcgtctgggcctgcgcgttgaggattacatctga

SEQ ID NO: 159286 - DNA, 183 bp, Enterobacter cloacae
atgaaccagatgctgagcatgttgcggcctgcgctggttctgctgctggctttcatggtggtagcggtggacttcaccagttatctgctctcagcagttggcgatctgttcttcgtgggggcgctcgttgttctggtatggcctgctattaagccagccaaagagcagcagggcgacgagtaa

SEQ ID NO: 159287 - DNA, 393 bp, Enterobacter cloacae
atgagtatcggacaagaaaaaccagtatccgggcgtcagatgttccttgagcagcgcgcccgcttgcagtcgagcatttcagtttcccgcaccaatgacacggcgagccgtttcaaccgcctgggcgagactcagaaaaaggcgatcatcctgctggcaaacgaagccgcgcagcggtttaaagatctgccgtcgctgactcattcacatctcaccatgcctttcgaacagttcagctctcaggacaaaatgagcctgatgttgggcattaagcgccttgctgagctggctgcggcgttgccgtgggagtttccagatcatgctgcgccacgccttgaaattcaggcgttacgcgaatcaccaccacccgcgccggatggcgtagtcaattaa

SEQ ID NO: 159288 - DNA, 921 bp, Enterobacter cloacae
atgattcgatcactactcaaatggcccggtggcaaaagccgcgtgatgcctgaattactgccgcatttaccaaaggctggttgcctcgttgagccttttgttggcggcgcttccgtgttcctcaataccgattatcgccgctatatccttgcggatatcaacccagacctgatccgcctttatcgtgaggtcaaaagcaaccctgagctggtgattgatcttgcccgcccgctctttgcgacaggcaattccaaagaggaatacttacagaaccgccgcattttcaacggtacaaaaggcttgcttgatgtggcccgcgcggctctgtttctgtacctcaaccgccacggctacaacggcttggtgcgttacaaccaaagcggcggttataacgtgccgtttggtcagcacaaaaccgcgccttacttcccggaagcggagatccgccagtttgctgagaaggccaacgacacaaaagctattttcctgtgcagctcgtttcaaaacaccatcaaagtgatggttggaacggatgaagccatctactgcgatcctccgtacctgcctgccagcgaaaccgccaatttcacccaataccacaccgagccattcaccgagaagcaccaccgccagttagcggcggagctgctggaagtgaaccgcaaatatggcgcgccggttgtcatttccaacagtgacaccgaaaccacccgcgagatttaccaccgtttccgcctgcatgaaatcgacgtgcagcgctctgttagcactgacgccagcaaccgccagaaggccaaagaggtgatcggcactctgggcctcagcatttttgagggatatgcggcagatggttgctggagctgcgggagttgtgagagctgcgggcaatgtctgggtattgataacgaagaaacatgctga

SEQ ID NO: 159289 - DNA, 237 bp, Enterobacter cloacae
atggcgagcttaattgaatttttagaggcggttggtctggaaaatgtgactgttcaaccacttcaccagtgcattacgagcgtagcgatggagagaaaaggcagtgcaagagtcagctttttgaccaatgaaataaccccatctgacgcattcggagagatgaaaagaacggcgttcatcgtttggatggacgctgagaaattcgatgccgcacttgaaaaaacgaagggcaaatga

SEQ ID NO: 159290 - DNA, 309 bp, Enterobacter cloacae
atgtcaaagatctatatcgctggcccaatgagcggattgcctggctttaatcgccctgcgtttcaccgtgctgccgtgcacattgtacggcgcggaaatgttgctcttaatccggcgatcctgccggatggcttagagcaagcggagtatatggatatctgccttgccatgcttcgctgcgctgatggcatcttcatgctggacggttggcagcagtctgctggggcgaaggcagaatacgcgcttgctgaaaagttggggctggatattcagcaccagatgattgatcggtacgtgggcgcacgatga

SEQ ID NO: 159291 - DNA, 2628 bp, Enterobacter cloacae
atgaccaccgcagcaagtgggcgcagcgctccaacgccgccccctccgtatccgggtagtgctccagacgctacccggtacgattacgaatggcagaagccaaaagctgccatttgtgttgataagactcccgttgttgatctagtcgagctgggtcaagaacaggagtttttggcgtgggtgaaagtcacccttgcgccgctacctcgctttattcgcctgcgtctggcttcccgcattgacagtattcacaccatgaagggcaggcacatagcccgtttggcgctgcgcgatatcatccgcagagatctgccgcctatcaacatggtgaatgagcaatacgctattgcgatgaccgatgaggctaaatctcaggctgatacagcattcaaagggttaaacccgctttaccacacctttaacaccctgcatggattggttgagcgctttaaccacctgccggacttcacgccggaagatgttgagctgctggcgcaggatatcgctatctatatgcggtctgtgctgagtgaagttcacgaaacggtagagactcagagtgatcggaaatatgccggatacctttacaccgaagcggctatcctcgcgcggcttttcttcctgacgcctccgagctgggcaaagtattgccggggggcgctgtttattgatgaggcaactactggcattagcaagatgctggatgatcgctactggcaccgtaacctgaaaaagtacgccgcgcgctggcgtgagcacctgcatattgcctttggtgatgtaaagcgaggcgctgcgccgtattgcagtaagcaccacgttgatgaatgggatgccagacgcaagcgcagccgcgcgatcatggcccgccttgagctggaagaccaggacaccaaagaacgcatttcacttattgagcagatcgataagagcatatctaacccggcattgcgccgcgttgaacttatgacccgtatcggcggctttgagaaagttgccaccgaaagcggctacgcgggccagttttttactctgactgcaccatccaaataccacgcatataccgtattcggtcatcgtaatgccaaatggaatggtgccagcccaagagccacgcagcgttatcttaatcgggtatggcaacagatccgcgctgagctggcccgccgtgaaattccggtctttggtttgcgggtggctgaatctcaccacgatggtacgccgcactggcacggcctgctgttctctctgccggaacattccgccgagctgctggaagtgatggaagactacgccacccgcgaggatgcggaagagttgcagggtaagcacggtaatcagccgcgttttgatatgaagccgatcgatcaggaaatcggcagcgccaccggctacgtggtgaagtacatcagtaagaatattgacggctacgcgctcgacggtgaaaccgacgacgagagcggcaggccgctgaaagaaacatcaaaacacgctaccgcctgggcatcgtgctggggcatccgtcagtttcagtttttgggcggtgcgccggtatctgtctggcgtgagctgcgccggttccgcaatcaagaacaggccgacaagataaacccgttatttgctgagctgcaccgtgctgcggatgctggcgactggcagcaatacacccaattgcagggcggggcgttggttgcccggcgtaagttgccgcttcgcatctggtatcaacagaaagaccaaccaaacgaccatggcgagtatcagaaccttatcaaagggctggtgatgccccacaccttcctgccaccgattgaaacccgtctgcattcctaccgcatcgtgcgtaagaaaccggagattctggacgactccgggcaggccgttgactttgattttgaccttcggggcgcgtccgcgccctctaggactcgtgtcaataactgtactgaggtcaaaaaacatacaatttcaggaggtgacaattcgccaccagttgagcctgaacagtatgaaattggtcaaatgaccggcgagcagaaaaaacggctcaacgagagcctcagaaacttcaaaccggaacggcaaaaatcacctgccgatgtgtttgagtcgcttgccagcgctataaccgcgtcagattgtgatgacgtcgatcaggcgcgggctgaaaactacatgaaagtgtccgcagcaatccgtaatgaagtgccaacccgtaaaaacagtaccgtgcagcctgtgccactgacggaatcgcttaaatatcagctttcagcctggggtataaaatcggaactcgatattcatgctctccggtgcggtgcggcgctgtcttttggtgatcagctggtttacctgaaaggtggctatctggtagaaaaaaccaaagcgtcatattgtagggcgaggaactgtaatgctgaattaacccaggatgataaggcatacggtaacgaggggctgtgtctggcatgtacggcgaagttgatcggaacggcagcaatcgaacagcgtcgtgatgatgccgaacaaaggcaaaaagcagaaagaaaacaggagaatgacgcgcttctgggaaggcttaaggttgcgctcatcaacagggggctgcatgggaaggtatcatga

SEQ ID NO: 159292 - DNA, 288 bp, Enterobacter cloacae
atgggaaggtatcatgatgatgattttgagcgggaagacgattaccagagttggctttattatcgcgagtcctcgcatgaagaacgtgaattacagcgaaagcgggcgcgttcaaatgaaaagcagaccagcaataatccggagcctgtgatcccgccagtcgattggccggtatcggatgtatttcgcgactatcctgagcaccaggcgcgcgttgcagcggcagagaagaaatactttgaatccagaaaagcgcctgatgctgaagatgaaaacgacagtcattga

SEQ ID NO: 159293 - DNA, 222 bp, Enterobacter cloacae
atgcgaacctataccacatctcaggcccggcaaaacattgctgaggtaatggaagcggctacggctggcgaacctgtagaaataacccgccgcgatggctctgccgctgtgcttatcagccgggatgatttcaatgcgtggcaggaagcaaagcttgatgctgaatttgccgaaattatggggcgacacggtcgtaccattaaggcgctggccgacagatga

SEQ ID NO: 159294 - DNA, 384 bp, Enterobacter cloacae
atgaaatggatcagcgctcaggaggtgatagcgtttcatgatcgtctgcttgcagctttgcccggcgttcaggggatgccagaaccgggaagagcagaggcgatcatttatcgtgttcagaaccagctttactatgaaggcgttgaggatatccacgaactcgctgcgatgtatctcgtcgccatttcgcgtggtcatatcttcaatgatggtaacaagcgaactgcctttttcgttgcgatggcttttttaaagcgcaatggtattgatatccgtgatgaaggtatcgaactggaagaactgaccgtatccgcagcgacggggtcactaagcagcggtgatgttgctgctgttttgcgccgactatccatcaatccccactga

SEQ ID NO: 159295 - DNA, 693 bp, Enterobacter cloacae
atgacaatgacaacatgcaggaagtgtgggagcgaagtcgctcgtaaagaaaaaaaatgcccgtattgtgatgttaaaaaaccaggggatagatggtggcaccctttagctgccctcgctgttctcatagtggttttgggtgtgattccaaaggcgtgctcttatataccagaggcaccaaatgatacatcgtctaactataaaaatacctcactcaagcaatggcgaagtttagaaaaaggtgagcgttctaaaattattgaaagctatttatctcaagctggcttatctctaagcgcatcaaccgatttttacaaatgtattagccagcactcatatacgaaaaatgatgatatcaaggcttccgaggcacttgattggtgtaagcaagattatcaaaaggatccgtctgcattatccaggatggtagattttgacgttttcaaaagtaacgtcagattgtttgatagctcataccaaccgcttattgccgcaatcaaagccgacatgaatgatccgtcttcattcaaacatttggaaactaagtatcggtttgtcctggatggtgctgcaccttacgccattgccacaaccacttatcaaggtgccaatagttacggcgcaacggtgaaaaatcagttatcctctaaaatcgatctgaagactggtcatattgtcgaatacttacgatga

SEQ ID NO: 159296 - DNA, 660 bp, Enterobacter cloacae
atggaaactattttagacgcactgaaagcaatgggcaaagctacttaccgtgaggttgcagcgcgccttgatatcgagcctgtggaagcgctgaacatgctgcgcgaacagaaagagcagggtttatgtgatttcttcgatggagcctggtcagtcggtaccgcaaaagaacaggcaaagcagcgagctgtcgcgccagtgaataatgcaccacgcctgaaaggtgaggaaccggctcctgttgctgctgatatgatccgccgactgctccgagataatagcgcaatgaccacagcggcgttggctagcgcagttcagcgtaacgctcgtggaatggtctcagtgatgctggcatttgagcgtcatggggttgtcgtcaagaacgggcaggggaagggtgtaacatggtctcttcctgaaaccgaacctgttgcaactgatacggctaggtatgcaaagccaggaaaaacgaccgaagaaatcatccaaaccatacctgcatttactgcaagaccaaatgatctaattgtcccgtcgccccgatttatctcagcagaaatccgtcgtacaaaggcaaagctgacaaatctaaaacgacttcaggatgccgttcgccagttgcgccgccataaaaatctattggagttactgaccaattaa

SEQ ID NO: 159297 - DNA, 918 bp, Enterobacter cloacae
atgagcatggaactgatggttcaggcgatgaaggtcaaagtaggaaacccgctgcgcaagctggttctcctcaagttggctgataacgccagcgaccagggcgagtgctggccgagttatcagcatatagctgatcagtgcgagatcagccgtcgttcagtcatgaatcatgttgccgcactttgcgagtctggactgatgcgaaaagagacaagatcgggaccgaaaggcaatggcagcaatttctaccggctaaccctgagcggtgcaaaccccagtgcgaagttagtgaatgagattcaccagggtagtgaagcaaattcaccagggggtagtgcaggagattcaccagatggtgcaccacattcaccagggggtagtgaaggagattcacccagaatcagtaactcttttgaaccagtcaaagaacctttaaatccttcttgtccggacgcttcgctatcggacggaaaaatgacaaatgctgaatttttgaaacgtcatccggaggctgtggtttgtagctcagcgaaacgccagtggggcagccaggaagatttaacctgtgcggaatggatctggaagcgcgtgctgaaactttacgaggaagccgcgacctatgacggcgaagtggttcgtccaaaagagccgaactggacggcctgggcaaatgatgtccgactgatgcgaacgcttgatggtcgaactcacaaacagatttgcgaaatgtttaagcgagttcaaagcaataccttctgggtgcgccaggttaaatctccggccaaactccgcgaaaaatgggatgacctggttatccgcttagcttcaccgggggcagggcagtatcaggctggtggacgggacatcaaccagatttcccgtccggacaactccgttccgccaggattcagggggtaa

SEQ ID NO: 159298 - DNA, 1887 bp, Enterobacter cloacae
atgtctgttgaattaaaggttttcggcggtgcttattttccaaaagataaagccttgaaaaaacacccggacttaaagccgcttgctacagcagtaaattcggctacaaaagccattgctgaagctgttattttcggcaagctggcggctgaacatcctgaacatatagatgattattttaaggtgaaaatttgggagcaccacgaagaccttccatgtcctgagcttgatgtgtttagcgctgatttctttggtgagcacgttgtctggaataccaatcgaggtgaaccagctgctgcgccacaaccagaaatcgataataacgaaaccgtgcacgcggcgggtatgaagattgtacgcaaccttgaccaggactcccgcgcggcatgcctcgccctcttcggcgcagtggaggagatcaccgattcgcaattcggtcaggtagtcgatttaaataacgacgacgatggcagcttccaacgagaactggcccaggcttttgtgaaggaacctcgcgtgtttgccctgagcggtgagcggcaggaagaactactggcgtggattcgcaaaactatgaaggtctcaactcagtggcctgatatcaaaaaaggtatcactaaatggatcgacactccggcagcaaagcgtgagcctgttgctaccgacatcaaaccggacacagaagccagcctgggcggtaatacccctaccgatcgcagtcctgatctggtgcataatctcgcaactctccgcctggaaaccgcactgggcattctctcggccgcgatggattttgatatttatgccattccatccgaaattatccgccgcgccaaagagatggaaagcgagggaagagatccgcgcttttctgcctggtggaataaattacgcggcactccgggcatcctggacttctcccgcgcctccattatcgcgctgattaaaaccgctccggaagacctttacctgaagccggtcgatctgcgtgcatatattaaccgcaatctggttgaatcgaatcatgcgaaaccggatcagaaaacaatcgatatcgcatgcggcaatatcaagctggagactgaaaatgatgaaaccaaaccgtctgtaccgggcgaaactcttccaccagcagtttgccctggcaaagctgcgcaactcgacaaagaactcagcgaggcattcgctccgaacacgactcctgaaaagcaagccggcggtcagccgcgtgtcgagaacctgggtggaggagtcttctcagtcgatgctctaataaataccccctcctcaaatgaagtcgaaaaacaggaagtgcctccagctcaagacgttcgcgaagcaccagacgaacgcgaattttcgattttgcacgcactaaatgatctgatttctggccgcaccaatatcatggggaaagaagaggctgagggcgtggtggcatgcacaggtcacctcgtttccgatgttatcccgctactgatggaagatatcaccaccactgaatattgcctgtctcctgtgtttaccaacgaggagatccacgatgtggcaacaaccatgctggatagctggtccgacgatattcgcgttcgtcagaaaatagctcttgatgcgatcgtggaataccgccgccccgaaccaccaaaatcggtattgctcgatacaccagctgtaacagcaaaacctcaaaaggcagctgatcctgaccgtgaggaaccagatctgtcggcggcatcctcatacctgcaacagctaacgatctccgcactgcagggcttatgttccaacccggcttattgcaatcagtatgaggaattaccggctatggccgccggacttgcccgtagcgttatcaaccatcaggaaggctcctgtgcgtctgattaa

SEQ ID NO: 159299 - DNA, 1221 bp, Enterobacter cloacae
atggaaagggaaaacatttcaaatgatctgaatgagttattttctattatagtcagaaaaaagaaactgaaattaccatctactatagaaactgacatcattagcgatttcaaagaaaagtgccaaatttactttaacattctaaatgattatgttgaggagaatgacaatgagttatcgcgacgattaaaaaggcggctcgaaagaataacaaaaatttattttggtattgttaatgctttgtcagactttctttcaggtgacattaaatccgcatatgataattttgatagtattttctccgagagaattacggcaagatatattcaaagcatatcaattccgttgaaaaatatatgcaatacaacaaggccacttttccgtgtaagaaagtcaaacacagcgataaaagatagaaaggaaatttttcacattccgttttctatgcgacatttggtggatgctcaaagatactccgtagctggactaccatgtttatatttagggtcatcattatatgtttgttggcttgaaatgggaaaaccagactttgataagctttacatatcatcattcatttcaaacgaagaaaattcaaaaatactcgatttcacagcagacattctttactctcatttttatggtataagtgtaaatgatagaatgacttctactacaaaacttgcatatctatctttaatgcccctcatctatgcctgtagtttcgctaaaaaaaccaatagcacttcattcactcaagaatacataatccctaatttattaatgcaatggattagccgaagaagcaaatctaatattgttggcattgcttatagatcaacaagaatggtcaaaacgaaccatggggaaaaatcaattaatgtagttttgcctccaaaagttaactaccagcaaaccatcacaaatgatttttgtccaaaattaataaaaatgtttgagcttaccccaccagtatcatggcaagtgctgaaaacgttagactatacctgtgagcctgacgaagatgatgagattcgagccgcctcaagattcttgaggcgcaaagagcgactggcaggaattcagagttttgatgatgacatcgtgaatctttatcctcttacggatttttataagcttgaaaaatgcatggataacttgcttgagtatgacggcatcattgataaaaatgatggcggcaatttggcggcggagcattaa

SEQ ID NO: 159300 - DNA, 225 bp, Enterobacter cloacae
atgaagttttacctgtctaaagtgcaactattacatactggaatgcccggtgattacgaaccagaagccgggactccaaatgtcagagttaccgtttatggtgagcacggagaaagcatcactaatcatatgttcattgaggatgcgaagaatcgcgctcttgtagatattgaaaaagaagtaaatcagtacttcaatggattatattccgcctcagtcgagtaa

SEQ ID NO: 159301 - DNA, 189 bp, Enterobacter cloacae
atgactttagaagaacgtgttgcagcgctggaaaaagaaatgctggagattaaaaaaagcggtcaaaatcagaccgctgaacttgcattagttatctcaaaagctgcggaagatggtgcggtgacagctattgagaaaattaaacaggactttataattcgcggccctctacgccgtttactcgactga

SEQ ID NO: 159302 - DNA, 177 bp, Enterobacter cloacae
atgatgcgaacagagtggggggcggcgctggtttcttctgtgctggcaaacgtaaaccgttccaaaaacacccctgccttcagcattgctgatttcgcgcctcacattgccgctgtggagcgggaggccgcaaacgagccgatcaaacttgaagacgctatgcgtacatggggctga

SEQ ID NO: 159303 - DNA, 561 bp, Enterobacter cloacae
atgcaacaacaaagcgctattgcaagaagacttagtgcagcattcactgagtttggcactaaagactacgaaaccaccttacttcatctctttcctgctttagattctacggcgaaaaaaagaagaccaaaatccggggttggagacagaatccgtaagtttcttgaagatgatgaagatcttctatcctttatcgcccttgggttctgtgtaactaacattgaagctggtggtaaaaccatacctcaagcaatttatgagtatggtcgctgctcaatagaacatgagggtgaacttgacaaaaggctgacaataaccgaagaacaacaaatgctattaggaggccagtgggtactcccagtaggatatattttcggcatgatgatgctagttttagtcgcgcctgagaacaaagatgaaaagtttacctccgattttggcattatcgtgaggggtgtacaattcaacgctaatgaaagttggggtcaaatttcgacgtgcagagaaaaaattggtctcaatgccatgaaacaaagaatctcttcaagtcgtcacagttaa

SEQ ID NO: 159304 - DNA, 579 bp, Enterobacter cloacae
atgatcaatccttcagaagttggcaaatccggcgaaatggttcgccttcgcactctcgaaagcatctgggtacagggtaagctccgcatgtggggccgctggtcatatattggcggcggctcaggcggaaacatgttcaaccagctgctcgtatctgggaaaatcactaagaccgcaatcaacgatgcgctgcgacgcatgaagaaagccggtatcaagaagcctgagctggaagcctacctacgcgaaatcctcgacagcaaaaacaaaagtggccttgcgttctgctcagatgatgaagcgctgattattaactcagttctttgcaagacactcgttcaagctggacataaaaacctatattggctgcttgaagatcgctatatctggcgctttagtaagaaagcaatggctcgcgatcttaataaaaaacaccctgaatggtgcttacgcacttgcgaaagcagaattgacgtgtggctaaatcttgcagaatcgctgctttatagaccaatgtgtgacgcgttcggcacaaatggcgacagattttacttgaatagttgcgcaggaagtgcttaa

SEQ ID NO: 159305 - DNA, 273 bp, Enterobacter cloacae
atgagcaacatcgacaaacgcgcattacgtaaagccgccgaaaaacatggagatgacgacattctggcgctgctggatgagctggaagccaaagacaagcgggttgctgagctggaggcgcgggaggtgaagttgcctaagcccattagtgttttacatcgtcgagatttcatggatgcgcaccggtctatctatgcatatccagaggcggaagttaatgctgctttagccgatgctggcatcaacgtcgccgcagccgctaaaggagagtga

SEQ ID NO: 159306 - DNA, 1746 bp, Enterobacter cloacae
atggaatcccctaacggaaattttattataaaacttacacacctcctcgaaaacaagagggacggattaattattattgatggtaaatggggaactggaaagacattttttattaagaatgaattctccagatactatacccataatgctttttattatatttcattgctaggggttaaaaccatccttgattttaaagcaaaaataattgactgctattaccttaaaggcattaaatctcttcaatcaggccttgaaactattacggcagtcgggggaattagcagtggctcaccagagagctcgagtgttatcaatggattactaaactcaattggcgctagtgttcgggaaaatatactttcaaaacttagcggggtatttattcttgatgacattgaaagaatcactgataattccctcgccaacgaaattttaacatattgccattcattatattgtgaatcagtaaccaataatttagattttattatcatctcaaacacatcttcagaatcagaattggaattacatcataaagaaaaaatcatttctgactccctccatttcaactcaaccccagaagaaatattaaacatgaggttgttcgaagaaaaattatcacttcttcctgcagaagacgcaaatatattcagagagatggcaattagttatggcatagtaaatataagacttttaatgcgcactctaataatttcaacacctttatatatatatgcagcccaacatccagaaatggcatggaatgtatcgtcaaaattcattcttagctctgcctttgcttattttacattattatattcatataataagactatggatgaacttaatgaaggacaaaaattctatctcccatttcctgatgaagatgctgaccccttagaaatgcggttattatcgattttgaacaactatcaaattacattcgatcttaaaagttacttcagtggatatgcctcgttcaatgatattttggaagtggttttttcaagaaatgatccttttgacatgattaatgttgtttcttcagcaagccccgaattaaacgaagtagatgaggatgtttttttcaaaaccattgttgatgtaataaccaagagattgccatgtgacttgaatacttggcttagaacaataaaaaattatgtttatttaacctctaataaatatttaaaaaaatctacagaggttgatttaaaatcaatactgctaagtctagataagttcagcgatgatgagattatagaatattttaaaaataacaaggagcaagaacaatcaagagactttgccagtcactatgatgacatcaactcattaaatgaaaaattatttgatcgctatgataatatcattaaagaacaccaactcattaatataaagacagaactagaaacctcaggctggaaatcatttaacgttgaaaaactaaacagtttagacgactttggaacatataaagcacttgaacttcttagtgcaccgttcataacaaaatgtttactacaaaaatgggacaccaaagacatccaactattcaacgattttttggccagtaattaccgtgttagtaacatatctagctttgcttcaaatgaaaagttaccacttatttacctaagtcaaaaaattgaaatatttttccttggaaggaaagaaagcttcaaatttggtgcgctttatcgccttaacaagacgatacttcatgctgtatcttgcttataa

SEQ ID NO: 159307 - DNA, 345 bp, Enterobacter cloacae
atgactcagtcaaagttagctaaattcttggaccttacagatgaacaactggaagagtcgggaattgatgaagatctgatccaagaggatactggcaattctggcgatatggtatattcatactacttcaacgttcccgaagagacatcaaaagaagtcttggatgaaaagcattgggaagtaggcgatcgaattgaaataccactttggttcttcgaagatgaagatggtccagatgatggttgggaatcgctacctgattttgatcctgaagaggctcagcgtgaaagagaacgaagcgacagggaaatcgaatctgacatcaagcgaagagaagaaccttaa

SEQ ID NO: 159308 - DNA, 324 bp, Enterobacter cloacae
atgcaacagagcagatcgcactgggcgcatcgggagcctcagcagatatcaaggttgctgttgcgaacgatgattgtgcccgccgtcctgttcctgatggcgcagttaagcggctgcaacaatacgcggacggtttacatcaaggtgccagtggtgccgctcccggtaaacctcacagttgagacgccttacccggcaataccggaccccatgtcatggggccaaagtctggacctgaatgtcggcctgctttctgcacttgggcagtgtaatcgcgacaaagccgacataaggcaggctgagaaagcaagagccagccaataa

SEQ ID NO: 159309 - DNA, 1053 bp, Enterobacter cloacae
atgaaagctgtagacttgatcaaaggaatgcaagctcgcaatatctcgtttagacttttacaatgcgagttgaaacattatggtatgcgttctgccagaggatgggcagacttaattgaagaatataaatcactttccaccaaaaaagacgatgataacttcaatacgatatacaacaacttcttaaaatacagcgatagagcagtattttttatagaaccacatgataaaaaacatatcccattgataaagaaaatctttctaaacatggtcgatgcaaatgatcgggattataaaatctatgagaaagcctttcctcttcctgtgaatctaggcaaacatattaaattaaaaaaactaagacccgtttgcgttgatgtctgcaaagaaaaaaatatcatattacttacaaatacatacctgcgtccattcaaagagcgaaccgttatagatactggcactatgagttcgtccacacaaaatgagttaaatttctttgatgaaattataggaatcaaagatagatatattcagtgttttgatacaatttcattagataccaatactggagacatatcttttgagatagatatgacaacgaacttaagtgcggaagaacttgagaatgcagcaacaagatatagaaggacacttagagtactgtgctataaagcaacaaaagcgcatgtccttttttccagaaagaatatttttgcagcaatagacactctttatcacagtactgatggcactgttcttaaattaggtcatgcgacaaagacaggctcaataaaagaagaaaaaatgagacgaaaaaaagatgatctcagaaaagaaacttatcattctgcaggattagcagctattggcggaaaaactaataattacagtatttccaaacaatggcaaggttctcataataacatcttgactatacatatacctggtcatttctctttaatttcaagcacacttcctttcataaactatgctataatagaaggatgttgcaccaaaactgattatgaacttttaatatccaaggttatttaa

SEQ ID NO: 159310 - DNA, 393 bp, Enterobacter cloacae
atgaaacaacaggagataattgaaaacatcaataagcatctcgcatacaacagagagcttaaagatgtttgcatgcacatcttctgctatttaattaatgaaaaacctgaagacttaaaatacatcaccattaataacttaaaaaaagcagcagaaacagaaagtaatataatatatgatgcaataagttattttacaggtgaacgcgtgtccttgctatccgttggatatgagtacatagatggtgatgatgtatatactttgtccacatcagacattatagaattacgaactaacaaatgcttttatcatgatgggtacgccattgagaattgggaatcaaaaattttcatctatttttatgcttcggaattattaaaggagttaaagtaa

SEQ ID NO: 159311 - DNA, 660 bp, Enterobacter cloacae
atggactccagagagaacacttttaattatgaagcattaaagatcgcagcaaaattcgatccaatggctgcgcgtttcttaagcaggttagaatgtgacacttatgataaatttatcatgatgttatataaggatattgagactattcttgctttattagaaaagacggcaagccttaggcaaaatgatggtgaagatcgattatcaattgagataattaatattttgattggtgcaggatatctggctagtcatgaccaatatatcaatggacattctgacattgttgtttctttcaatagttttacttggattggtgaggcaaaaattcatagctcatatgattatctaatggaaggatttatgcaattatgcgaccgttattcaaccggaaatgaggatgattgcgaaggcggactaatattttatatcaaaggaaacaatgctttggaggttgttgagagatggaaggctgatctcatcacaagaaatgttgctggacttaagactttcaattgtaataatcgaaaaaacctgagcttctattctacccacacacactcaaagtctggccttccttacaaggtcagacattttggtgtaattctcgggttcaacccaacagataaaagtgctcgtggcgccaagaagaataactaa

SEQ ID NO: 159312 - DNA, 324 bp, Enterobacter cloacae
atgggttttccatcaccagcagcagattacacagagcagtcactcagtattaccagcatctgtggctatgacgccaattgccgcacattagaaacgtcggctggttatgcgatcgttaacgttgccaaacaaccttccgtgggtgactcggtactgatttccttctgcggaaaaatggacattgtgacagttcagggaaaagcactcatcacacaggagggagaggccattgaaggtgattcactggacgatgcgaaggtaatcggggttgtcacattccttctgaaccgtgtttcagtgactgataacttaccggttatttag

SEQ ID NO: 159313 - DNA, 1722 bp, Enterobacter cloacae
atggctggagtaagagaaataaccatttcaggtataaagaaaagattactatccagatatggtgaattcataaatatggataatgtaggtggaagtgaagaatcaaaagaggtagtcaaagtctcaagagcaatagccgcattagctataaatgtattaaatccagaactaagtgaggatgtttgttctgattcagtatgcgatggcagcgatgatagatgtatagatgctgtttatgtcaatcacgataaaaaacaagtaactatagtccagtcgaaatttgaccaatctggaaacggctcaatatccagacaagatatggcggattatttaacatcatgcagagatgtactgatggaggaatataatctcttcaacgaaagatttaaaagattctcagaatcactagaagttgcctatgacaattcctacaaatacttttttgtttttgcttatagtggaagagatgaattatcagaggatgttcaaagacaaattatacaacgaaaggaagagtttaactttgatcttgatggtgattatattgatattcagaccctacctttaagtaaaataaaagactatttgagtagaagatctcttggaaatattgatatatctgatgttgagatttttcaatatggagtaacagaagaacctttgaaagctgttcatgggttgattactggtgatcaggtcgctagttggtgggcaacctatggcgatctacttttagaagacaatattcgaggaggattaggtgaattatccgatgttaaccaaggtataaagaaaacactgatagacagtcccgaaatgttctactattttaataatggagtaactatattagttaattctattactccaaaaatgagaaatggtaaagcaaggcgagagagcggtggatttgacttagttaatgtgaatgtaattaacggtgctcaaactattagcactattggcaaagcctatttggctaatgaagtcaccttagatcagttggctgaagtaaaattgccttgccgttttatcaaagttgaagactatggcaatgaagatggtagaggattagatatcgctctttcaataaccatagctaacaacagccagaataaagttacagctagagatttcatctcaaaggacccgttccagatagagttgaagaggtctttctctttcgaagagccatatgtttatgaaatcaagagaagtgagcaagattcaattaaatcccctagtgttaatatcataacaatagaagatgcactttctgcattggtttgcaatttaaactcacctcgatatatggcgttattgaaatcaaatagaggacgtttttttgaatctataaccagcccactatataagggggtgtttaatcctagtgttcattgtgtaatgttaatcaatacggtaaacatttatcgctccgcgaatgaagtacttagctccatggaaaaaaacagaaaaacaaagcgcgacgaaaagattgttattcatggtaagtacattttcatttctttagttatgaataaatatcgaaaattaattgagaaaaactcagttattcataatgatagcatcccagatctgaaaccatttatcttcgagaccttcaagaaaataaaatctcatatagatgataattatgcaacaagccacatgcctcgctttttcgaaaatcaaggtaaagtgaaagaggttatgtccctataa

SEQ ID NO: 159314 - DNA, 318 bp, Enterobacter cloacae
atggaattaccttcagattattaccagcgcgtttacgctggggtattagggaaattgatcggcgtgtatctgggtcgcccttttgaaggctggacctggcaaaaaatcatgcgggaactcgggccaatacggtattacgttaatgaaaaattcaatcgccctctggtgattaccgatgacgacgtagccggaacattcacatttattcgcgcgcttgaggattacgcgttaccgccagacctgacagccgaacagatggggcactgttggctgaattacatcattgataagcgcactatcctctggtggggggggtaa

SEQ ID NO: 159315 - DNA, 1338 bp, Enterobacter cloacae
atgaagttggatgaaaaaatcgtaatgcaaggtgtgttctctttgggtgatggtggtacatatgacttggctggtgcgttagaaataagtgagtctggtgagatttatctcgattgcatacacaagatgagcgcttctaatttacttcagaaagatatggtcaatctaacaggcgaaacatcagcatttggaaagattcttctgattgatagttttactgtttcttcagaacataaattctcaggtgatttgtctcgatcaaaattattttgcaataaaatggtttgcgttgataaaaactatcagggatatgacctaaaaatatcaaaaatgacattcgagatagaggacttagaaaaatggatagccaagccaataataaacagtgaatggaaggataataaaaaaatttactcatatgacttacctgacagggaaaggatagagctaggtgatggtttatctcttaccctaagccatagcatgactatttcaacaggtaacttccatgaaaggacggaagtaagaagcaaggcgtttgcaatatttgagagcgcagaagaaaaagacttggatttcttcatagataatggcgtcaccctgtcaaacttagtttcattcgcattggactcagtgtgtacgataaaaaattcttattacggtgagaataataataacagagtaatttatcaaacaccaaataaaataatgaaaagaaaagaaatcaatttagtcaattattactttacgatgcaaagtgctggagacagatctgctgaaataataaaaaactggtttttgttatcgaaaaaactacgaccaacaatatccttgtatactcaattaaaatcaggaacacatcagtatacagaagctgcattcctatcacttgcacaagctgctgaagcactgcatagacgcacatgtaacgacaccccagtgtcgaaatctgattatcgcgcaatggttagagatataatagaaaaagctggggaaaaacatgaggtttttttaaaagaaaaactatcttatgggtatgagtattcattcagacagagactagaactgatgctatcagtttgctggtctgacgaaaaaataaaagaaagagatgatgatattaggaaaatagttcaagccagaaatatcttcactcactacccaagtaaaggtgacaaaatactcaacgagaaattatctaaagatctatacgattacactcagttgctagaaaacataatagtatccaatattttatttatcatatcttcgaacgataaagaatggactttatcaataatgcaaaggataaataaatttagatatagaggtttttaa

SEQ ID NO: 159316 - DNA, 495 bp, Enterobacter cloacae
atgaccgaaggtattgatcagcttatttataacgacgagtttcccgggcttgcgtacaacaaatttaccggccagttctttggaaggaaaagtggaaacccgatcggcaggatgcacaacaagggttactggcgaatagcttgcggcaagaagtgctatctcgcccatcggctggcttggttcttctgttatggggtttggcccaaagagattgaccatatcgacaataacaagctcaacaactccatcggcaacctacgtgaagtcacccaccaacttaatcaattaaatatgccactgcgcagtaataacacgagcggtgtgaaaggggttaattgggataagcatcgtaagcggtggcgcgccagggtgattattaacggcaagtatttcactgccggacacttcaaggaaattgcagatgccgaggtggcaatcagggcactccgcgagcaagtccatggagaatttgcaaatcatgggggcaagtcatga

SEQ ID NO: 159317 - DNA, 231 bp, Enterobacter cloacae
atgtttggtcggcgtaagaacgcaccgaaaccttgtcgtacatctgcaaaatacttgtttgcccgtgcatttttcaagaacgtcaagcctgggattttaatcggcacaatggcaggtaaagagcagttgcgttactacatggacggagcatggtggaacaatgaccctatcattgcagcccggaatattcaccgtaactggggaggaattcaaaaattaccttccgactga

SEQ ID NO: 159318 - DNA, 195 bp, Enterobacter cloacae
atggatcaggctggaattattcgcgacctgctcacctggctggaaggtcatctcgaccagcctttgtcactggataatgtggcggcaaaagcaggctattccaagtggcatctgcaaaggatgtcaccggtcatgctatcggtgcctatattcgcgcacgtcgtttatcaaagtctgctgtcgcgttgcgcctga

SEQ ID NO: 159319 - DNA, 234 bp, Enterobacter cloacae
atggatctcaaaacatttcttaaaacttctggtgtacgccagaaagcatttgccgcactcgtagggcggacccaggggtatgtcagccgtgtcgcctccggagagtgtctactgggggctgccacggcacttaaatgggctgctgcaactgaattccaggttacaccgcatgatctgcgtcctgatttatatccgaacccaaaagacgggattccagacagggcagcagcttaa

SEQ ID NO: 159320 - DNA, 222 bp, Enterobacter cloacae
atgaacattgaaactttaaaagacattctcgctcgactggatgctcaggaatcagttattcaaagaatgattggcatccttacacctgagcagctggaacagtttcacgaaagaataaagcgagactgggaagccgctgagaagaatgtctctcccgatctggcagaaacgctacaaagaacaaaaaaatatgctctgaaaatttcaggtgcaaagatttaa

SEQ ID NO: 159321 - DNA, 333 bp, Enterobacter cloacae
atgatttcgtatgaggttgagttcccgacccaaaaatctgtaagtttaaaaattgacggcttaaatgcatctggatttccgaaaaccatggtgactgatgctattggtggtgatgttaaagtacagctcgataagaaaactatgctgactgtgccttatcgtgaagacattacggcagacttcactcttgaaggttacaagcagcgcgcagagcatcatgccgaggctgtggtttcgaagcttgtagaagcggccaaacagcaggccgcctatgattctaatgctgattcgattgtcgagaatgcgagaaagaacttaaatctttgcacctga

SEQ ID NO: 159322 - DNA, 1041 bp, Enterobacter cloacae
atgcgttatcaaaaactgggcaataccggactgtttgtttctgaactctgcctcggcaccatgaccttcggcggtgaaggcggcatgtggggcaaaattggtcagcttcagcaaagcgacgccgagcagctggtgggccgcgcgctggacgccggaatcaattttatcgacacggcagatgtctactcggaagggcgttcagaggagatcaccgggcaggcgctgaagaacctgaaaattccgcgcgaaaacgtggtcgttgccaccaaggtgttcggtgaaaccggcacagcgggggtgaactcgcgcggtagctcgcgctatcacatcatcagcggcgtgaaggagagcctgcgtcgcttgcagctggatcatatcgatctctatcagctacacggtttcgaccccgcgacccccatcgaggagacgctttacgcgctggataatcttgtgcagcacggtcacgtacgctatatcggcgtctcgaactgggcggcatggcagattgccaaagcgctcggcatctctgagcgtctggggctggcgcgttttgcctcattgcaggcgtactacaccatcgccgggcgcgaccttgagcgcgaactggtgccgatgatgcagagcgaaggcgtcgggttgatggtatggagcccgctggcgggtggtctgctgagcggaaaatacgatcgcgacgggcagagcgcggccggtagtcgtcgcctggcgttcgacttcccgccagtgaataaagatcgcgccttcgactgcgtggacgtgatgcgtaccatcgccgaaagtaaaggcgtttccgtggcgcaaatcgcgctggcgtggctgctgcaccagaaagcggtgaccagcgtcattattggtgcgaaacgcgtcgatcagttggatgacaacattgccgcaaccggcgttcagctgagcgatgatgagctgaaacagctggatgcggtcagcgcgctgccgcgcgagtatcctggctggatgctggagcgccagggcgagtaccgtcgcaatcagttagcgcaacaataa

SEQ ID NO: 159323 - DNA, 810 bp, Enterobacter cloacae
atggacgtggagaacgcccgggcgcagctgggcaatcttgaagcgcagctgccgcagtatcaggcgcaggaacgccaggcgatgaacgggctggcgatcctgctcggcaaaccgccgggcgcgctggatgccgaactgcaatccgtgcagccgatgcctgccctgccagatattgtgcagaccggtattccgtcgacgctggcccgccgtcgcccggacgtgcgcgaagccgaggcgaatctccatgccgccacggcgcagattggcgtctcggtggcagaactgttcccgagctttaccctctccggacagtttggcctgcgcaacagtgaatctaactggctgaccgactggagcagccacttctacagctttggcccgcaggtttccataccgattttccagggcggtcggctggtctccagcgtcaaggtggcgcgcgcgcagcagggggcggcagtgctggactatcgccagacggtactgacggcgctcggcgacgttgaaaacgcgctggtgagctatcgcaccgaccagcagcgtgaagcgggcctggcgaaaaccatcgacgcgctgcaaaacgcctttgatctcgccagcgacagctatcggcaggggatcgccagctttattgacgtgctggacgcccagcgtcagctcgctcaggccgaacagcagcgggcgcaggcgcaggtgcagagcgcgcttgacctggtggcgctctacaaagccctcggcggcggctgggagccgtatcagcaggtgcggctgccagactacagcgtctttggcgacgccccacgcggatag

SEQ ID NO: 159324 - DNA, 771 bp, Enterobacter cloacae
gtgctggcgcttgataaagcccccgcccagtccgaatggcgcggcgggtcacccagcgggcaattgcttacctcggcgcgcactctcgccggggaatcgcgccgggttcggctctatctgccggacgttgatgtttcgcagcccctcggcctggtggtactgcccgatggtgaaacctggttcgatcaccttggcgtatgcgcggcaattgacgccgccataaacaacggacgcatcgtgcctgtggctgtacttggcatcgataatatcgatgaacacgagcgaactgcgatactcggcgggcgcagcgagctgataaaggatatcgccggccagttgttgccgacgatccgcgccgaacacccgcagcggcggtgggcagaccgttcgcgcaccgtgctggccggacagagcctcggcggggtcagcgcgctcatggccgctcgttacgcaccggaaacgttcgggctggcgctcagccactccccttcgatgtggtggacgccagagggtgccagccggccaaacgtgttcagcgaaaccgattcgtcatgggtgagcgaacatctgctttctgccccgccgcagggcgtgcgcatccgcctgtgcgtgggatcgctggaaggttcgacggtaccccacgttcagcggctgcatcagcagttgcttaccgctggcgtcgacagccattgcgcaatgtacaccgggggtcacgattacgcatggtggcgcggcgcactgattgacgggcttggtttactccagggttga

SEQ ID NO: 159325 - DNA, 957 bp, Enterobacter cloacae
atgtatgcccgcgagtatcgcccaacacactcacgcaaggcgcttgtcactcttctttctggtctcacccttatctggaatgcgcacgctttcgcaaagccggatatgcagccactggggccgaatatcgccgataaaggctctgcgttttaccatttcagcgtcaactcgttcgactccgacgatggcagccgccattatcgggtatggacggccgtgccaaataaatccgcaccggcgtcgggctacccgattttatatatgctcgacggcaacgcagttatggaccgcctgaacgacgacctgctcaaacagctggcagaaaaatcaccgccggtgattgtggctgtcgggtatcagaccaacctccccttcgatctcaacggcagggcctacgactatacgccagcagcagaaagcggcaaaacggatacccgcaacgggcgttttagccgtaagagtgggggtagcaacgacttccgccagttactggaaacgcgtatagcgccaaaggtggaacagggattgaatatcgatcggcagcgtcgcggcctgtgggggcactcctacggcggcctgttcgtgctggatgcatggctgtcttccccttatttccggacgtattacagcgccagcccgtcgttgggcagaggccatgatgcgctactgagccgcatcacggcggttgagccgtcgcaatactgcgccaggcgcctgatgataatggaaggttcggcgacaccgggcgataaccgggaaacgcatgctgccggagtgctgacgaaaattcatgccaccctcgccacgctggaagataaaggcgtcaatgccgccttttgggatttcccaaacctgggacacgggccgatgttcaacgcctccttccgcggagcgctgttagatatcagtggtgaaaacgcaggtaacacagcaggctgtcattcattaagccgctaa

SEQ ID NO: 159326 - DNA, 2175 bp, Enterobacter cloacae
atgagaattatcaagatcttctggccgctcactgcgctcctggcagggttgaacagtcaggtatcactggcaaaatcctccgatgataacgacgagaccctggtggtggaagccaccgctgagcaggtactcaaacagcagccgggcgtgtcgattattaccagcgaagatattaaaaagaaccctccggtcaacgatctctccgatattattcgcaaaatgcccggtgtcaatctgaccggcaacagcgcctcgggtacacgtggtaataaccgccagatcgacattcgcggcatggggccggagaacaccttaattttaattgatggtgtgccggtgacgtcgcgcaacgccgtgcgttatagctggcgtggagagcgtgatacccgcggcgacaccaactgggtgccaccggaacaggttgagcgtattgaggtgatccgcggccctgcggcggcacgctacggttcgggcgcagcgggcggggtggtgaacatcattaccaaacgccctaccaacgactggcacggttcgctgtcgttatacaccaaccagccggaaagcagcgacgaaggcgctacgcgtcgcgccaacttcagccttagcgggccgctggctggcgatgcgctgaccatgcgcctgtacggaaacctgaataaaaccgatgccgacagctgggatattaactcctcggccggtacgaaaaacgcggccgggcatgaaggggtgcgcaacaaagatatcaacggcgttgtctcgtggaaattaaatccgcagcaaattatcgatttcgaagccggatatagccgccaggggaatatctatgcgggcgatacgcaaaacagttcttccagtgccgtcactgaaagcctggcgaaatccggcgaggagacgaaccgcctttaccggcagaattatggcgttacgcacaatggtatctgggactggggtcaaagccgttttggtgtctattacgagaaaaccaataacacccgcatgaatgaaggattatccggtggcggtgaagggcgtatttcggcggatgaaaagttcacgaccaatcgcctgagctcctggcgaaccagcggcgagcttaatattccgctgaatgcgctggtcgatcaaacgctgaccgtgggtgcggagtggagccgcgatgagctcgacgatccttcctctaccagcctgaccgtggatgacagtgatatcggcggcatttctggctcggctgcggatcgcagcagtaaaaaccattcccaaatcagtgcgctgtatattgaagataatattgagccggttcccggcacgaatatcattcccggcctgcgctttgattatctcaacgagtccggcggtaacttcagccccagcctgaacctctcgcaggaattgggggattacttcaaagtcaaagcggggattgcccgaacctttaaagcaccaaacctgtatcaatccagcgaaggttatctgctctactcgaaaggcaacggttgtccaaaagatattacatcgggcggctgctacctgatcggtaataaagatctcgatccggaaattagcatcaataaagaaattgggctggagttcgcctgggaagattaccatgccagcgtgacctacttccgcaatgactaccagaataagatcgtggccggcgataatgttatcgggcaaaccgcttccggcgcatatattctccagtggcagaacggcgggaaagcgctggtggacggtatcgaagccagcatggcgttcccgctggtgaaagatcgtctgaactggaataccaatgccacctggatgatcacctcggagcaaaaagacaccggtaatccgctgtcgatcatcccgaaatacaccattaataactcgcttgactggaccatcacccaggcgttctctgccagcgtcaactggacgttatacggcagacaaaaaccgcgtactcattcggaaactcgtagtgaagatactggcggtctgtcaggtaaagagctgggcgcttattcgctggtggggacgaacttcaattacgatattaataaaaatctgcgtcttaacgttggtgtcagcaatatcttagataaacagatttaccgatcttccgaaggggcgaatacctataacgagcctggccgggcttattatgccggtgttaccgcgtcattttga

SEQ ID NO: 159327 - DNA, 123 bp, Enterobacter cloacae
atgaacgagcaacttaagcaaaaagtgaaatcaatcactactcaaactgcgcttggtgaggctaacgccactgaaccttcccgttcttcccgatatgtacgtctgaataaactgtctttttaa

SEQ ID NO: 159328 - DNA, 345 bp, Enterobacter cloacae
atgagagatagcgcactgactttagttcaaaaaaacgattgggtaccttcgtcttctggtaatgcctatatcgggaaatacacgattggacgatttcacatgacagagtcgttcatcgttgagtatatgaagctgatacatggaatcgaaatacctgattcatggctcaatagttgtttcactaacatatcagataccgatactcgtaaggttatgtacatggaaggttgcgacatgttatctaaagacacaatgaatgagatccgtaacgcagtaaaatccccgcctgtaggcattaaaatatacagcaatggcaaacatttaactaaaataaaacttacgtaa

SEQ ID NO: 159329 - DNA, 516 bp, Enterobacter cloacae
  misc_feature (347)..(356): n is a, c, g, or t
atgaaagggtatgatgctactgaacaaacaaactcaaatggaacagttgatttaaccatacgggatgctcaaagtcgttttacatggttggctgaagcaaaaagaggttataacttaaattcagtattcgaagggcttttgcaattaattacacggtacgtgaaaagagagcaatatgccgggttattaatctatcatcaaaaacctggtgctatgtccttccttaaggattggtatacgtacctatcgtcagggaattataaaaactatgcaaaaatcaaagatagaattgatgaatgtaataaatgcttcaatttatcacctgttgcatattctatgatacctannnnnnnnnnggataaaagtgcaggtacaaatgccagccttgcaaaggggcaatgtaaaatatccataactgatatatgcacacaatgggagtctgatggacaactcccgggtgatgttaatgtcatcttccaatatttaaaagatttgcatccagaatattttgcttaa

SEQ ID NO: 159330 - DNA, 618 bp, Enterobacter cloacae
atgatgaatgtccgtatctactgccgtgcatctactgaaggccaacatgctgaccgtgcattagttagcctgcgcgaatttgcgcaaagcaaaaactggtcggttgccgcggaatacattgagaatgcaagtggtgcgaagctagaacgtgttgaactcatgcatctactggctgaagcacaacccggtgatctacttcttattgaatcgattgatcgtcttagtcgtcttcaatatgaagaatgggctgaactcaaagctaagatgaacagtaaaagactggttattgtatcaatggatttaccaacaagctggcagatggttgaaatgtccggtaacgaccttaccagcggcattcttcgggcagtcaatgctatgctgatcgatatccttgcgacaatggcacgacaagattatgagacccggcgtaaacgtcaggcgcaggggatcgcgaaagcaaaacaggcaggtttgtataaggggaaagaaaaagatctggaagcccgtgagacagttcgcgaaatgctggtacagaacgttaaaccagctcacataatgaaagcggcaggtatcagtcgcgccacgttttaccgaatcaagaaggagttaataagctaa

SEQ ID NO: 159331 - DNA, 186 bp, Enterobacter cloacae
atgagtatcaggtatctggtaatcctcaagatgcagtttttgatgtttactttgctagagaaaagcacggtatcgcatttcaaattagacattcaacacatccgtcggcacaagatggcggatggctacaagtgcaccactatgagggagagcctgcggattggggacctgcattacattcactga

SEQ ID NO: 159332 - DNA, 429 bp, Enterobacter cloacae
atgaatatcaattcaaaagagatccttgcagaattacttgagaaagatcctgaagcgcgtgctgaatgggaaaaagattttaagttgaaaaacgatccgcgtattactgctattggtcacttcattcgtaaaacgagtcttgatgagttacctcagttatttaacgtactcaaaggtgagatgagcctggtcggcccgcgtccggtcatccacgaagagctggaacgctatgccgatgacgttgaatattatctgatggtaaagccaggcatgactggcctgtggcaggtgagtggacgtaacgatgttgactacaccacgcgtgtttattttgactcctggtatgtcaaaaactggtctttgtggaatgatatcgtcattctcttcaaaaccgtcaatgtggttctgttgagaaaaggcgcttactga

SEQ ID NO: 159333 - DNA, 627 bp, Enterobacter cloacae
atgttttttattggcgatttaaatacctttatgccaattcgccagattgatgtgagggtgttatcacactttattctgactgtaatgtgtgtgttttggtttggcgtccgcttacgtcattatgcacaaaagaaacccttctggtctgaacttaaagaaacactgcgtactattgtcattttttcgatcttcgatcttgcattagtggcattttctaaatggcacttttctcgctatatttgggcctactgttggctatatgccatcattatggttccgttatcgcgtgaaattacaaaaatcattcttaacaaatttggctactggaaaaagcgcaccgttattttaggttccggacgaaatgcgcgtgaagcctattatgctttacaaagccatgaggtgtctggtttcaaaattgatgcgttttgtgattttgatgcgacagccgatattatggaagagtgtccgatcgttaaagatgaagagacattgcttactcattataattcgttttcaactcagttcgtagtcgcgtgcgattttgacgaaaaagatacactagtatgtcatttatatttagccacgaagtattacttcttcaggttcacaataatctgtctaaactga

SEQ ID NO: 159334 - DNA, 216 bp, Enterobacter cloacae
atgaaagatgttttagacactttgcgccgagtgcgtgagaagagcaaacacactgtagacaatagctctttgaaagaactggatgatgcgatacaagcccttgaagagagaatcaaggaaaattcaaaaggctggtctgccttagattatcttccctatgttgctaggatcttggctgtagttaagtttctacacggtgattctgatattcattga

SEQ ID NO: 159335 - DNA, 414 bp, Enterobacter cloacae
atgtttaagcctctctggcagcagggccgggcgatctgctttgctgatggttggtttgagtggaaaaaagatggtgacaaaaaacagccctacttcatccaccgcgccgacaaccagcccattttcatggcggcgatcggcagcacaccgtttgaacggaatgatgaagcggaaggctttctgattgtaacgtctgcagctgataaaggcatggtcgatattcacgaccgccgaccgcttgttctgtcacctgaagcggcaagggaatggatgcgtcagaacattggagcactagaggcggagaagattgctactgaaggtgctgttccggcagaaaattttatctggcacacagtgtccagatccgtaggaaatgtaaaccagcaaggtttaaaacttatccttccaatttga

SEQ ID NO: 159336 - DNA, 1320 bp, Enterobacter cloacae
atgaacaatgttctgggatttcttgaagcaaaactgatgccgctggcggcgaaaacggcccagcagcgtcatcttggggccattcgtggggcctacgtttcattcatgccgtttatcatcgtcggctccatcctgctggtgatctcctccttcccgaatcaggcctatcagcagtttatgtctcaggcctttggtgagagctggagtgcgattatagagattccattcaacgcggtattctcaaccatgtcgctgtttatcagcttcctggtggcctaccgcctggctgagcactatggcgaggaccgcatctcctgcggcatcctggcgctggtcgccttcctgatcctgacgccctttatcaaagtggcggaaaacggcggcattaccgtgatgccggtggagtggattggcagcaaagggttgtttgtggcgatgatcggttccctgctgtggacggaactgttctgctggctgaagcgcaaaaagctggtcattaaaatgccggacggcgtacctccggcggtgcaggagtcgttcgcggcgctgatcccggccctgctggtgatgattctggtgcttattatccgcatcatatttgaaaacacccactaccacaccatccaccagtttatttatgaagtggttgccaccccggtgcgccactacggcacctcttatttcggtgcgctgatgaccgtattcagtatcaccattctgtggtcagtgggcattaactccggttcgatgatcaacggcattattcgtccgctgtggatggaaaaccagaccgacaacatcgccgcgatccaggcgggaacgacgccgccgcacatcatcaccgaacagttttttgacatgatctggatgggcggcgcgggcgccacgctgtcgctggtgatagcgatgctgattttcgcccgcagcaaaaacatgcgtgaggtggcgcgcctcggcgcaggagcctcggtatttaacatcaacgaaccgatcctgtttggcctgccggtgatcatgaacccgatcatgctcatcccgtttaatctggtgccgctggtgctggtcaccgtgcagtatgcggcgatgaaaattggcgcggtcgccgtcaccaccggggtgtttattccctggacgctgccgccggttatcagcggctttatcgtcaccgggcacctgagcggcagcgtgatgcagctgatcaacctgctgattggcgccatgctgtacctgcctttcatgcgtatcctggataaacagtaccgcgccgcggagctgactaccgctacgcaacccgacaccacccttgcaaaacaggagtaa

SEQ ID NO: 159337 - DNA, 1110 bp, Enterobacter cloacae
atgagttatcccgatgcggatattttcgctgtatgtgatttcttaaagccaaaagaaaaacattttcttaataataaaaaagtcactacaacatttattcagcgtttgccatttgcagcaaaaaaattccagtcttatctgccgttgatgccgttggctatcgaacagcttgatatgtctgcttatgacgtagttatttcaagtagtcatgctgtttccaaaggggtgatcactggccctgaccaaattcatgtgtcgtatgtccattctcctatccgttacgcgtgggatttccagcaccagtatctgcgggaatccggcctgaacaaaggtctgaaagggtggcttgctaagtatctcctgcataagattcgtatttgggattaccgtaccgctgcgggcgttaatcattttattggtaactcacggtttattgcgcgccgcattaacaaggtttatggcagacaagcagacgtcatctatccgccggtgaatacggataagttcgaattcagtgacaaaaaagaggatttctatctggctgcttgtcgcatggtgccttataagcgtgttgatcttattgttagtgcgtttgccaaaatgcctgataaaaagttagtggttatcggtgatggttctgagatggataagatcaaacagctggcgatggataatatcacgctactcggctatcaggatgacgctgcaatggtcgactatatgaagcgtgctaaagcttacgtatttgctgcagaagaggattttggtatctcgcctgtagaagcacaagcaagcggtacgccggtcattactttcggtaaaggcgggtgcctcgaaacggttaaaccccttggtagcgataaaccgactgggctgttcttctttgaacaaaccgcagacgccatatgcgaagcagtgaatacctttgaaaaatacgccgatgaaattaagccagaagactgtcgcgaacatgctttaacattttcagagcagcgtttccgtgacgagattagtcagtatgtcgatagtgcctgggctcaatactctgagtcgctgatcaatactcaggctgcgcgagtacagaacagttatactcatccggaaaaataa

SEQ ID NO: 159338 - DNA, 153 bp, Enterobacter cloacae
atgaatatcagcgatatcatccaactggttgttctgtgcgcgctgattttttgccgcttggctactatgcacgccattccctgcgccgtattcgcgatacgatcagattactgttcgtcaaacctcgctatattaaacccgccggaacactga

SEQ ID NO: 159339 - DNA, 465 bp, Enterobacter cloacae
gtgctcgccgtcgtagcggtagtgccagcgggtctggccattatccttctccacgatgcggccatggatgtcataacgccagcgaataccgttgagctgcgtcagacggttgtgcgtgactttctcagcagccccctcgagcgggttaccggccgcatcccagcgccactgctcctgaccgggcagcgtgccgtcctgaacgagcaggcgccctgcgctgtcgtactgccagcggtaccagctgaacgggttatcgtcccgctcttcgcggacaagattattgcgatagtcgtaatcccagcggcgggaccagcggcgcggcgacgggcgctgggcattgccggtaaaaacgtcccggcgatgcagtcggccaaggcggtcgtattcgctgcgggtggtcagcagcctctgggtgcggctggtctcacggtggagttcgtcgcgggtatactgacagcttattga

SEQ ID NO: 159340 - DNA, 447 bp, Enterobacter cloacae
atgttaaaagccattcgcgattcaatttcaggaagaggcagcatttgcaatcttgatatgtctcatattactaatacacttgaaaggcgagagcgtgaaaagcaattgcaggaatctataattgctgctctagattctttggttaaatcattttgcaaaaactcaggaattgagcgttctgaaggtggggacgcgtttggttcagaggaaaatatcaatgtatggactgatgtaaataaagaatgtaattataacttcaatttcatatataaaactataaatggtcacagcaatcatttcgtgaccagcattaaatgtaagtgcgaatgcggattcatctatgcatctatagctaatggggagtggaataaaatatacattgatgaagataattttcatattttacaagaaataataaatcactcgagtctaaaaataagcccctaa

SEQ ID NO: 159341 - DNA, 717 bp, Enterobacter cloacae
atgaatgagttggctcttttcgcaggcgctggcgggggaatactcggcggacacctccttggctggcgaacagtttgcgcagttgaacgtgatgcctacgcagcacaagttctcgcgcaacgacaaaacgatggaatcctcagagctttcccgatttggtctgacgtgtgcagttttgacggaaagccatggaagggaattgttaacgtcgtttctggaggatttccgtgccaggacatcagctcggccggtcatggagcaggaatcgatggtgacaaatcaggcctatggaaagaaatggcacgaatcatcgatgaggtacgacctgaatacgtattcgtggaaaactcacccctccttattggaagagggcttgccgtggtcatcagtgaccttgccgaaattgggtttgattgccagtggagtcgtgtttcagcaaaagaacttggcgcgcctcataagcgagaccgtttgtggctggtcgggagaaatgttcgctacaccgcaggcgagggattaccggtccggttctctggacagatggaacgatccgcgacgctcacgaaacctcaacgaccaggttggtggccttctgaacccgaggtgggaagagtggctaatggggtggcccatagggtggaccaaattaaagcccttggcaatggacaggttcctcgagtggcagcaacagcattctccatgctcacaaagccatga

SEQ ID NO: 159342 - DNA, 231 bp, Enterobacter cloacae
atgaccaaatacgcgaagcttgatagcgaggtgttaagcgctatcggcgctcagcctacctcgttttctgaactatttagcccttccgtcagacaggagtgcctcatcattgctgaagcagaaggaaagcacccaatggacgtcttccgcatccttgaccgccgactccagtcgctcaggaagcttggcgttattcagcacgtcaaaggtaaagggtggatacagccatga

SEQ ID NO: 159343 - DNA, 1674 bp, Enterobacter cloacae
atgctacaaaacaaccctgaccttcaaagcgcgatcaaacgcctctgggataaattctggagtagcggcattagcaatccgctcacagccattgaacagattacctacctgttgtttatgaaacggctagatgaactcgatcataaaaggcaagacgaaggtgaaacgagtggtgagaaatacatttctaagtttgctggtacttggattccaccagaggaaagaaaccgccctgttgcggaacaacaccctatagataaacgcacgcttcgctggagcgagttcaagaaattgcagcccgaagagatgctgcaacatgtgcgagacaaagtttttccttttctgaaagatctgaatggtgctgaatctaacttcactcatcacatgaaaaacgcagtattcattatcccaaagtcagcattgttggtggaggcagtgaaggccattgacgaaatcttcgagatgatgaaaagggattctcaagaaaaaggccaagcttttcaagacattcaaggagatgtatatgaattcctgctgtcggaaatcgccaccgcaggcaagaacggccaatttcgcacaccacgccacattattaaattgatggcagatctggtccagccgcaactgggacaacgtattgccgaccctgcctgcggtacgggggggtttctgttaggtgcctaccagtacatccttactcagttgtctttatctcaaaacttaaaaagagataattcaaaaggatctactcatgatgaagatgggttctttcgcacttctgtgactgccgctctgaccaaaaaggcccggattcttttgcaagagagtctgtatggttatgacattgacgctactatggtgcgtttaggcctaatgaacttaatgatgcatggaattgatgagccgcatattgattatcaggacacactaagcaagagctatagtgaagaaaccaaatatgacatagtgctagcaaacccgccttttactggcagtatagacaggggggatattaatgagaatttgaaactctcaaccactaaaaccgaacttttgtttgttgagaacatctatcgtttgctgaaaaagggcggtaccgcctgtgtgattgtgcctcaaggagtattgtttggctcgggcaaggcattcaaagaactacggcaaactttagttgagcgctgcgacctcaaggctgtcattactctgcccagtggagtgtttaaaccctacgctggagtaagtactgccattttattgttctccaaagttttcgggccgggggataaaatttccaaacctgctaccgattatgtctggttttatgagatgtcttccgatggttactcattggatgacaaacgaaataagcttgaaggctacggcgacctgcaagacatcattcaaaaataccattcccgtgatgaggcgtctgacacagatcgtacagctaagtgttttatggtgccaagaatagatattgaagcggagaattacgatctttcgctgtctcgctataaggaagaaatatttgaagaagtgcagtacgaacagcctgaagctattctggaacgactaattcaagcagaagtggggaatgtggataagaaagtgcttaataaagtacaaagtggcatcttgtacgagctactagagttaaaggggatgatagtatga

SEQ ID NO: 159344 - DNA, 1566 bp, Enterobacter cloacae; identical to SEQ ID NO: 27070

SEQ ID NO: 159345 - DNA, 1785 bp, Enterobacter cloacae
atgaagctattacgcctaaaaatctctgatccgtccggcttccgtagtctgccctgtggttttgaacactattttagaaccgaatgggatttacaggaagaattgaatcaacatgaaggctttgcgccttttgtgtgtgctggtcccaacggcagtggtaaatccaatctgcttgaagcattagcagctatcttctttcagttggaaattttgcgggtccgtcgaagttttttgcctgaggtattgcaaagtaccgatcatgatttatcaccaatctcatttgagctggattatctaattcgagtaccagaagagtttcgaatctctggcggacaagaatgggcaaaagtctccgtgtggaaaaacaacggggaatctgtgcgtttccattgggtaaatcagagtgactttgacacaaatgctgatgaagttttcaagggaagccatgccgatattctattgcctcagtatgtgttgggctactcgtctggcgagaatgaaattctcagtctaccgtttttcaaaatgcgctttgtacagttcgacgagtactggaatgccttgactcgacaactgagctactctggccatccggagtcgaggttggcctatcttgacagtggtttcagccaagctattttactttgtaatctgctttttcaaaacgaaactgcgcttcaacctttccgtgaggatgttggtatagaggcgttgcgggagtttcgtattattatccgtcgcagtattcctcttgcgccggagcagttgacctcgtttgccagcgaggataaaaaccagcaccaatcacttgatgacattttgaatagtaaccctgctctgcatgtggatatggatgaagaaagtggtcaaagttaccatttaaacctgatgcagctgctggaaggggatgacaaatcctccttggtagtcagcgcgcttaaacgctgcgctagcttgtattacgaggacgagtgtaacgacactctaattctggactactgggttaatgatgctactcgacaggcttttcgcgagaattttaatggttcggcactggctctattccaggcgttccaagtattgctgacactcaatttgtataaggtgagtgataatctcaaaactgatctgtatcgctcaacaagtcactatgtcagtgaaacggtaccaacgttggcgtccgacgaacgaattatgcgcttcaagtttgtgcgttttactaaacaaggagtggaagagccaatgatgctcaaggaactctcggacggtgaacaccaattgcttcatagcctaggtctatgtttactgtttagagaaaccaacagcctgtttctgttagacgaaccggagactcatttcaacccacattggcgtgccagttttatcactcggatgcgccaatgtttatgtaacactgagaatgtggagcaggaaatgttgatcactactcatacacctttccttatctcagatagtaaacccgaaaaagtactggttttttctaaggataaatatagcggtgcggtcacaataagcatacctaaatacaacacacttggtgcatcaatcaataaaattactatgaataccttcggcaaacgtgaaactatcggtggccatgcgcaagcagtactggatgatttacgcagacgttttaacgaaggcattgaagacaaggaaactctgatcacagaaattgatgaacaattgggtgactcggtggaaaaagtattactcctcaaggctatttttgatagcgacaatccaacgaatgacgaggtttag

SEQ ID NO: 159346 - DNA, 1059 bp, Enterobacter cloacae
atgctgttttcatatatctatgtgccacacaaaatggaaaagatgcaggcattcattgattttattttttatgaggtatggtgcaaagcgcgggtaagagggcctttttgtcttaaactgtttgaagctaacgcagaattgtatgaagtgatggaggatttttcttcctcggatacacaaggtgctgttttcttttataaccatgtagagaaaatttatggcttgttttcgtcactgactgaggtacaaatcgatcagtttaaacagtggtatcaagggaataatgatctggaaaaaatatgtgctaatgacccttcaatacaagttgtccgttattccgatattgccattcaccacaaagatatagcagaacaacttgctgttttctttaagggcttatactcacagtcactgcttgatctcgctgtactgcgtgccaagatcggtgatatacacgatcactatcaatcttttgcagcagtgaacaaggcgggtaaatgtcctttttgtggtattggagatataaagggtgggaaccatagcaagcgcgaggcctatgaccattatttgcccaaagctttatatccatttaattcgataaatttccataatcttgctccggcctgtcatgagtgcaatagcacatataagttatccaaagatcctattcagagcggcgctcttcgtcgtaaggccttcaatccatttgcctcagtggatcatgtaattcaattacagattactctacaacatgcaaatatcgatgcgcttgagcctgctgatattattatacagttcggtcccgatacgctggaggaggaactagaaacatggaaagacttgtacggtatagaagaacgttataaagccaaagtttgtgcagaaaatgacggtaaatactggcttactcaggtgctagatgagtggaaggaggaggggttgagtcctaccgaattcatgagaacattagcacgtcaagcgaaaaagaagccttatgctgaatgcaatttccttaaagaaccttttcttaaagcttgccatcgaataggtgttttttga

SEQ ID NO: 159347 - DNA, 264 bp, Enterobacter cloacae; identical to SEQ ID NO: 27074

SEQ ID NO: 159348 - DNA, 315 bp, Enterobacter cloacae
atgttagcatgctttcctgccggacgaggtgatactgctaaccaggggcgttttgttcttaaaatgcctcgttccggcatcaatcactaccgagtccctgccgtccccttattgagcgccgcgtacagtttattcactaccacccatagtgagcgatttagtgaaacaggccacagcgccgtaaccgcgggcatcatatgccgtagtggcgatctgtcttattctcagtgcccctctatcagtatgcgcccatgcaaactgacattccccctgtattatgttgacagggagagacctgccagcctactggcgtga

SEQ ID NO: 159349 - DNA, 630 bp, Enterobacter cloacae
atgaaattttctggatacccaatttccagaagctgcgaaaagtcgcctccggtatggcgtcgcagtcgcacctgcgcacaacctatttttcgacgccgtcgacgctggcgcacggcgcttatccgttctggtcaggggagctgtttaaccggggacgcagtaaccgcgacgaacgtgtcgacatcgatatcagtcatcaggcgcttgccgggggcatgttatgcggggacggccagtggcggcaaattgtcaccattgaggacgcgctcgccgggggctgtaccctgtttaacctcgaccagctcagacaggaaaacagcgcggatgacttccgtaacctgtttatgtgtgagttcgtcgacgataaggcgtcggtattcccgttcgaggagctccagcgttgcatggtcgatgcgatggaagaatgggaggacttcgagccgtttgctgaccgtccgtttaactggcgcccggtctggattggctacgatccgtcacataccggcgacagcgcaggctgtgctgttctggctccgccgctggttgccggtggcaagttccgcatccttgagcgtcaccagtggaaaggcatggattttgccgcgcaggccgaggccatccgtgcgctga

SEQ ID NO: 159350 - DNA, 2658 bp, Enterobacter cloacae
atggctaaaagtactgctacaacagcattaaatcatcaagactttacaagcgtttttaatttattgattgagcatttgtttttgaaaaatagaggtaaggaagaaaaatataaaatatctgatgaaatgattaggagagcaacttggcttgcatcacttggatcatcaggcaacgaaaccgataaaaatattgcaagtgcattcggtacattgctctatttatacgacacaagtaatgatctatatctcaaagcttgttatattctgcaatctagggctggtaatatagtctctgctaagcatttagaaggtctttttagtcaagggaatattattaaacactttagttcatcattggattttgaactcacaagtcaaaagtttcttcttgaaaaaagagtttctgacaataattatatttattttactcattttcaaagaagtctgtgggacaaactagaacgcggtgaaaacgttgctgtatctgcaccaacatcggccggtaaatcatttgtaattaaaaggtatatttacgatagtgttatatctgcaaatgatggttacttcgtttacgttgtaccctcaaaggcgctgataaaccaagtcggcaatgaaatgtctagagagttaaaagacatagctacagtgatgacaacctataaggattcagaaaatgatgatttaaaaatagtatatgttctcacgcctgaaagatgtatgcgattgttaaatgagaatggtaaaaaagcacctaaaatagttttttttgatgaaatacaaaatttagaggataaaagtaggggtaatgtttttgagaacgttatctatagaatgacaagcttatggcagtcaactcaatttattatggctggcccatacataataaatttacatcattcactcaataaaattattgaccttaatctagttgagcaaacaacttctacaaccccggttttgcagttaaaagttgtgcttacagtacataaaaataagaaaaccgttaattataaattaataagcccggttggggatgcggtgttaggtgagtacgatataggtaaggcattgtatagtaaattatcttcatcaaagggtgcagcattaaagcatatcacttctattctagattctgatgaacaaaatataatatacgcacctaagaagaatttggctgagggatgggcgctggcaattgctcaaactaacaatgaagattcggagctagatgaagataatactgatttagtgtatgattcaagaatagatagtttgtgttcatttttagaaaatgagatacatcctctgtattctcttgttagatgccttaagaaaggggttgcatttcatcatggtggcttattggatgtggcaaggctcgaggtagaggatcttttcgctgatggtgcgattaggaatttggtgtgcacctcaactttactacagggcgtaaatcttcctgctgatagaatgattgtaatatccccaaagattggtgactatgagttatctcattttgattttttaaatcttattggccgtgcaggtaggattagtacatctttatatggtgagattttttgcattcagcttgttgatgaagagtgggctgaagataagattgagtcggatgaaacaaaggagatacaatcttcagttttaagaaagctcaatgaatatggtgagtcagttgtaagttacattgatgtctacactaaagatattgttgatactcaaggagagcttcatgctgtcaatcttgcctcctatctgcgaggccagtttttagtagatagagagcattatgagaaaataataagcaactccaatcttactcttaatcaaattagagtgatgacgaatagattggaagcgttggaagatattttaaatgtaccgaaggatataatatataaaaatcctttcatcgatcccctcttgattgatcagctttattttttggttgaaagcgaaggtgtcaataaatggatgattgataaatatcctagagttaaatctggagtggcagatcccaatgctgaatttcagcatatgaattattataaccaatataaaagcataattttacggctgaatgatatttttgagatagagaaagagattaattataaagaagatggtgtgtcaagaaaatcaagtcatttcgtttctatctttaagttagtaaacgactcacataagtggatgcaaggtagaaattataggttttttatagatgacatgattactaagaaattaataaataaaggcattccagttgattataagaaggttgacgggattaccaattttgtaactacacacatcaatactaatttgacattcattttggttaaatatctctcgctttgggctgacgtagtaagctcatttatgtctgaggaagaacgtacgttgaatgcatttttcctcaatctctcatctatgttagaaatgggtaattatgatcctcaggttttagaggtgatggcttatggaataaatagaagtactgcaattgaattattgaaaaaacaaaaaataaacaatgagcaaaccacttggcaatatttagtgcaatataatttggataagctttcaccattgcataggaaatatttgcaaagagcgggctttgggtcttcaaagcctgcataa

SEQ ID NO: 159351 - DNA, 948 bp, Enterobacter cloacae
atggacagtgtagaaaagctcaaatcgataaactggaaagagttgattacgaacaatcacaaatggattgaatcaaggttggttaatcacccttgtgagagtcaagctaagatagtttcaaggatttttaccatcccattcagcggagttatacaagagcatcatcacttagttgagtctatggctgatgctattgaacactacgtttttgataaagaagctcttgctaaaatgaaagcggatggcgttaccccttttagaaaagctgcacagttttttggggatactaatccagtcaaggatggtaagtacggggagttgctcctttatatcctatctgaggctatacttaatacaccgatggtctcacataaaatcactaatttaactaacttaaacgatcaggttaagggtggtgatggtgttttcttcggtgtgtatagagaaaatctttcaattttaattggtgagtcgaaaatatataagagttttagtggcgcgctggaaagcgcatttgactctcttgacagatttacaaaaagttatactagtggtgcacttggtcatgaacttttcatggctagaactaatatatcaagtaattttgattttgaaactatggagttaatttataaagcatttactcctggtgatgatatttactctgagtgtgttaaaacacaccccgttctgcttatatttgaagatgcagaaattaagagcatagaggaaaaagcaataaacaaggcggaggccgaaagactgtttgatgcatggcttactaaaaaaaaggaagcgataaagtcagacatcgatgcaaagttaatcaaataccctaacgttaaaccttgcttcttagactttttcctaatacctatgacagatgttggtgagttcaaaaagtcgttgtatagagctatccacggaatagattacaaagaaaattaa

SEQ ID NO: 159352 - DNA, 315 bp, Enterobacter cloacae
atggaagagactgaactgctgctaccgcgtgaaaaaatgctgcgtcatggcgtcacgttgttaaaggacgacgagctgctggcgctctttttacgcacaggcacgccggggaaaacggtatttacgctggcgaaagaactgatagaccatttcggttcactgtatggattgctgaccgctgagctggaggcgtttacgcacgttgagggcattggcgtggcgaaatatgcccagttgcggggcattgccgagctggcccggcgattttacaacgtgcgtatggaggaagaagacccgatcctcaccccgacatga

SEQ ID NO: 159353 - DNA, 207 bp, Enterobacter cloacae; identical to SEQ ID NO: 146792

SEQ ID NO: 159354 - DNA, 3036 bp, Enterobacter cloacae
atggaaaatgcgctgttcataaatatcagtgacatacatattaaaaaagacaacaaagatagagtgataaaaaaattagatgcgtttatacgatatattaatgtattgtctatagattataataagatatttgtattggtgtctggggacgtagcttatagtggtagggaagaggagtatggttatatttacgaccatttcgaagaattagctacaaaatatgatttgattatgtgcccaggtaatcacgatcatgatttttcaatttataaatcgattgttcgtaatcaattattaaaggctgacgtcgatactcttgatgatcagtcaatagatctaattactgagggaatgaattcatactataactttgaaaagtctttaacaacatttgaacccaggcatgagaataagctatcaaaaaactatattcttgacttaggccataggaaagtaagtattacaactttcaatacagcatggtgttcacaattacatgaaaaagggggcggtatgtccttccctacaaaatatgtaatagaaccttcgcaatgtgatgtaaatataaccatgttacatcacccattatcatggctcgagcctaataatcacaaagagctgaggaatattttacgcgagtccagcaacattgtaataacaggtcatgaacacattgaagataacttaagaatggaaagcgaaagtaataagtgccttatgcttgaagccatgtcatttgatgatgactggagtgaggataatggatttacaactttcagattcgaagaaaatgatatcgttgtaaataattataaatggcaaggtgaggactacacaaaaatcaatgaagttagacagagtgaaattattaagagtaattctataagtattaataatcacattgtcaagtttgattatctaaaatctttaaaagatattggagttaacttcattcatccggataaggatgatttagatcttgaggatgtttttatctatcctaatcttaaaaaattagatggtgataacaaacttgatatgaaaaaattctcgtctgaaaatattctttcgggtgatcatagcagagtaattcttatcggtgatgaatactgtggtaaatctacattattaaaaaaatattttcttgatgctgcaaagaaaggatgtctgccattgttaattgatggtggggcgctcaagcgtgctggattagagtacaataagatattaagtaaacttcttgattctcaatatgaaaatttgagcttggcagattttatcaatagtgaatttaccaaggtggcattgatcgatggatttgacttaatccgtggggatagaaagtccgtagagattttcttggaaaaaactaatcgagtattcgatgttgtaataatatcagttagtgatagctttgactttaacggaagtgagctaattggtgaaaactattttgatgagacttatgataaatatgagatattgcgacttggttataaactcagatatgacttagttcataaatggaactcactaaaagaagagtgtaataatgaacgtaaaatcttgctagcaaaaaacgaccttgcattcaaaactataacaagaattattggaagaaattacataccgtccaccccattctttctcttgacaatgttacaatcaatggagaatggaaattccttggatgtcaatgctagttcatatggttattattatgaatacctcattacacatagtttaggaagtgcgtctgttagaaaagaagagctagatgagttttttaattatgtgaaggaattatcatatcattatttcattcagaatattcaagaggagacatcagataatctttgggactttaacagtacattctgtcatgattatggtgtgaggattgattatgaaaatagaatgtctcttctggtcaaggctaagattatggagcagaaggatggtggttattacaaattcaaatacccatatgtatattatttcttcatcgctaaacatttggcagaaagcattagggatgaaaaaacagttgagataattaatggtctcgtaagcactcttggtaaaagaaggagtatgagtatattaatgtttctaactcatcactcaagagatgaatctattcttgaaaaggttgttgaacaggcgagtaagttattcgggaaaaataaacccgcaaagcttgaaatgaatattaaattcattaatgacatcgtggattctcttccaaacattaatttccaaaaacaagatcgccttcagttacgccgacaaatagaagacagtaaggacggatttgagacagggggggatattgatagttttgaagatgacgttcatgttgaaaataaggatgttccaaaaactgaggaaggtatagatctacttaaagaaatgaacctgacatttaaatccctagagatacttggccaattgtctaggaattattacggttctctaaaagttcctcagaagaaaagattattgggagaggccattgatgctcctcttagatctcttgattttttcatgggatatattaaggatgaaactgaagttgtactggatgctattgaaagaaaaatatcagagcaaaatggtgaaaacctaactcagctgcagttaaaagagatggcgaaacacttcttatttcagttggtggtagggttgagttatacatttttaacaaagatttcttcttcaatcggtagtaataatctacagccagtaattgacgagctatgtgatgctcatgattcaaacgcaggtaggattcttaagttggcgaccatgcttgaattagggaattctatatctgttgagcatctgaatggaatactccaaagtcttgagaaaaatccagttgcagataatttagtgaaaagtatcatattaaattatttgtatatgtttgaacgctctgatgcagaagtgcaacagatttgcgccgtatctgggataagttataattctgtttcaagacaaataggacttgatagattaacaacaaaaaattga

SEQ ID NO: 159355 - DNA, 474 bp, Enterobacter cloacae
atgcattcaatcttccccttatgggtaacagacgtcgctacgatagccacactggtgggtttttttatgaccttatgggttgtccgcacaaccaatcatcttaaggacaagttcaaggggagagtaagaatccctgaaatatcagaggatctcaatgtaagcgcctctaaaatcgcagaattattgcgtaagagagaggggcaaggcaattgggatgcgataaaagatgatgtttcaaaagaaattggtgattgtatacctcttatcgaaagcctcattgataaggtcaacagcggagataaatcgtcagtcataatgttgatggataagttcgctccaaaatgtggttttttaagacgacgtaaaaaaataactgggcttgaccaaaatcttgcttgggatttatatagtgaattaacctctctcattaagagacttgagcagattcaaaaagacatgaggttcgatatatga

SEQ ID NO: 159356 - DNA, 375 bp, Enterobacter cloacae
atgaccaatcgcgatactgattcaacaaagttgtatgtaaaacttaacaaattgacaattattaaacagattaattggcagttagctgaagatatcgagccgcttgttgaagcatcagaagatcgaattcaaacagcgtattgggcagtgtatggcaataaaaaccttgctatctatttgcgaaaatacaagcactattttgatgacattgagtgggcgtgggcagaagaagttcagtttgccattgttactgaagacttccatatcctatggaagagtcgaggccatgaccaagcactaactgaattgtatgaaacagtatctcgtcaagtttcaggtttttacgaattatttgatgatttgattaatatttaa

SEQ ID NO: 159357 - DNA, 819 bp, Enterobacter cloacae
atgaatttatcggctgaaaatcacctatttaggttccgaggagataacataaatacaattaatgaacttgttaataattcaatctggcattccaaaattagcggtcttaatgacccatttgaaatgttttttaatttcgatagggacgctctgaagcaacttaacaaaacggatattgcaactattcttaagaagacaaaatttctcgaagagaatgcaaaggagattgaaaggtgtttttattatgatgatatggagccaatttataagtacatagatgctcactggggggatggttttgctattggacttttaaaagagtttcagaagagtgtggcgactgcttgctttacaaaaagatatgatagtcgattaatgtgggggtattacggtaatggtatgaaaggaatctgctttgcatacaacaaggagaaacttaaatcttccggtgttgagttttctgatgttatttatactcatgaagcacccaaaattaatatttataagcaccttcttgagaaaatgcgtggagagcaggttactatagatgctggtttttcactgactaagcatactgattggagcggtgaagaagaagtacggagtttaaaatatcttaaaggcgagaatgtttatgaacaaattccgggcttcgctgtaccacttgaaaagtgctgcgttgatgcagtgatcgttggtgaacgtttagctggagatatgcgagtttttatcgagagtttcgcccaaaaaaataatattgagatactgatagcaaaagctgattttacaaactataaaattcaaattgaatctaaataa

SEQ ID NO: 159358 - DNA, 231 bp, Enterobacter cloacae
atgcgcacagtttctatatttaaaaacggcaataaccgcgccatccgtctgccccgggacctggattttgacggcgtcagcgagctggagatcgtccgggaaggggacagcatcattctgcgtcccgtccggccgacctggggctcattcgcgcagctggacagggccgatccggactttatggcggagcgtgaggatgtggtcagcgatgaaggacgctttgagccatga

SEQ ID NO: 159359 - DNA, 417 bp, Enterobacter cloacae
atgaagaaaacctggatgctcgacactaacatctgctcgttcatcatgcgcgagcagccggcagcggtgctgaagcgcctggagcaggcggtgctgcgcggtgatcgcatcgtggtctcggccgtgacgtacgccgagatgcgcttcggcgccaccggcccgaaggcctcgccgcgccatattcagctggtcgacgcgttctgcgcgcgcctcgatgctgtcctgccctgggaccgcgccgcggtggacgccacgacggacatccgggtggcgctgcgcctcgccgggacgccgatcggcccgaacgacacggccattgccgggcacgccatcgcggccagtgccgtcctggtgacgaacaatgtgagagagtttgcgcgggtcccgggcctgatgctggaagactgggtaaaataa

SEQ ID NO: 159360 - DNA, 921 bp, Enterobacter cloacae
atgatcctttgctgcggagaagccctgatcgatatgctgccctgccggagccgtgaaaatgctcccgcctttacgccctgcgtcggcggcgcggcgttcaataccgccattgccctggggcgccaggggatagcggtcgcgctgttttccggtttatcggacgattttatgggtgacatgctgcgccacacgcttgaggcctctggcgtggattattcgccctcaacccgcgcaccgctaccgaccacgctggcctttgtcaggctggaaggcggacaggcgcgctataccttttacgatgagaatagcgccggcagaatgctgactgaaagcgacctgccgacgctcggtgatgacgtatctgccgtcctgttcggctgcatcagcctgatagccgaaccgtgcggcagcgtttatgaagagctgatggtaagagaggcgccgcgccgggtgatgttcctcgatcccaatatccgtgaaatcttcatcctggaccggcagaaacacctagcgcgcatgatgcggatgattgccctagcggatatcgtcaagctttccgatgaggacctcgcgtggtttgccgaacccggcgaagaacacgaggtcatacgccgttggcttgctctgggaccaaaacttattgtggtcacccgcggggctgacggcgccgatgcctggaccgctaatttccatcttcatgttccaggagttcgcgtaacggttgccgataccgtcggcgccggggacacggtcaatgccggtattctcgccagcctttcgcaggccggactccttgagaagcctaaattagtcacattgtcacgagagcaggtgcgccgcgcgatcaatctcggtatgcgtgccgccgcggtgacggtctccaggccaggggctaacccgccgtgggaccatgaactctga

SEQ ID NO: 159361 - DNA, 1371 bp, Enterobacter cloacae
atgacatatcacattacgctgacggacccgatgaacggtacccgggatcgcgaaccgattacgtttactctccccgagaaactgcaggagcccctgtggtgggcaatcaccagcgaggaccaacggatcctttgccagcgcctcactcatgagtcgacgcaaaacagtaccgcctttatcgcaacggtaagcttcagcggcacgctccggatgcggcttgaccggccgctaacggcggcagaagtcggtgacgtcgccggtatccaccgcctgcctggccgggagaaagactgttttgtccgcctcaataccggctgcttcgatctggaaatgtgtcggggaaccgcccagggcgtgggttcatccaagtggggactgcgccattttcgctgtctgcaggacaacgtcgagctgcttccttccgggaataacgccatcggcggtttttacggtccgttctttaccccggaaaatgggctgattaacccgccggaacataccctcgtagatattgaaattgttgaggaaggcccagtctatcatcactatcgcatgcacggcacgatccccgatggattattagcggagctgcgcggtaagcacttcaccatcgactggaagttcagctggaataccccgtggtttcagcggcgctactgggttgatgacttttcgacggtcattaacgggcgttcagtgaccaacaagatcaccgtcggcgacgagtttgaaagcggtccgggaaaactgctgtttgaccgcttcgcggcctacggcggtacccgctatcgcgcaggcgatccctacgccgaagagctggtcgccatggtggctcataccgttaccacctctgaaaaccagagtccgaaatttgccgaattccgcgaacagctcgccgatatggcctccgctcattgggatctttactggcgaatgttctgccgctgggaaaacgtgctggatgaaactgaaatccgcgaaaggcttggcgtagtgcgcgcccgggcgcacgtacgagccgacctgaatgaacggaaatggcacctgactgattctcccgtcaacgtttccgctgtgccggatgaaaccgtgttcccgggaccagccagtaaaaccgtcgagtacgattcagcgagcggccgggcgatgatctggtggacctcccgcccctccggcgcgtttcagatagtccagcgccgtcagtccggttgggtgaactggggcagcaacggggaaaacgagtgtccggagcttccggtcggggttgatatcaaaaccgcctgcgggatattcgctgacaactggatgcaggtagccgacaatctggaaacgccgccgcaggtcgcggtgagtcaggaggaaaagccatga

SEQ ID NO: 159362 - DNA, 1020 bp, Enterobacter cloacae
atggacaacaataaacctgtgacggaactgccggtcaaagcgccgtttgattttgcgaaatggtgggatcgggtggggatcttaatcgttctgctggtgctgctgatcctgatgtcgacctttgcaccaaactttaaccgcgtcgataatctgctgaatatcgcccgctcgatttccgtcaacgctattctggcggcgggaatgaccttcgtcattttaaccagcggaattgatttgtccgtcgggtctatcgtcgccgtctccggcgtgatctcggtggttgcggcgatggccgggatccctgcgccgctggcgattctggccggcgtgggcgtgggcgcgctctgcggtctgctgaacggcgtgctcaccgcctatctcgctctcgcgccctttatcgtcactctcggcacaatgaccttcctgcgcggtatggcctataccattaccgaagggcaacctattgtatcgagtagcctgagcttccgcgagctggggaatggctatctcgccggcatccctgttccggtcattattatgctggtggtttatctgctggcgtggtttattcttgagcgcacgcggttcggtcgtcatatctatgccgtcggcggcaacgcccaggccgcgcgcctggccggcgtccgggtaaaacgcgtactggcggcggtttatatgattgccggcgtctgcgcgggtctagcgggcattatcttcgccgcccgggtcatttccgcccagcctacggcgggtacgggatatgaactggacgccattgcggcggtagtgctgggcggcaccagcctcgccggaggacgcgggcgaattatcggcaccctgattggatcgataattctcggcgtgctcagcaccggcctgattctgctgagcgtcccctttttcacccagctattgattaaaggcatcgtcatcattcttgccgtggcgattgacggactgaagcagcatccggaactgtttaccttctggcggaaaaaagagatcgcccgtacccgctag

SEQ ID NO: 159363 - DNA, 1533 bp, Enterobacter cloacae
atggccgacatcacttcatcccccttgcttaggctggaagggatttcaaaacgctacggcgcgaccctcgcactgaacaacgtacgctttgatttattcgccggagaggtccatgccctgatgggggaaaacggcgcgggtaaatccacgctgatgaagatcctctccggaaacgagcagcgcgatagcggcgcgatctatatcaacgggcaggagattgatattcgcacgccaagagatgcgcgcaaatatggcatcgccatcatccatcaagagctgaatacggttcccgatatgactgtggcggaaaatctatttctcggccaggaacagacctctttcgccggtattctcgatcgcaaacggatgctccgtgaggcccgggagaagctggaccggattaacgcggacatcgacccgcaggcgccgctcggctcgttgagcatcggacgtcagcaaatggtcgagattgcacgcgccgtcagtgaaaacgcaaaagtactggtgcttgatgagccgaccgccgctctgtcgcgggcagagaccctccagctttaccggcttatcgagcaaatgcgtcaggatggggtcgggatggtctacatctcacaccgcatggaagaggtatggcagctggcaaaccgggtcacggtgttcagggacggcacgtggatcggcacggaaactctgagcagcgtctcgaccaccgatatcgtacgcatgatggttggccgtcaaatcgtcgatctctatcagcacgaaccgcgtacgcccggcaaagtactgctggaggtcgcggatctggcgggtagcgcaaccggcccggtctcctttgaggtcaaagcgggcgaagtcgtcagcatgtccgggctggttggctctggccgaaccgaagtggcccggctgttattcggcgccgaccctcgtagccaaggaagcgtgcgtattaacggcaaggtaagccatccgtcagatcccaccgccgccatcgccgacggaatcgggatggtgaccgaggaccgcaaaacccagggcctgtttctgggtcattcggttgagcacaacattgatatcagctcgctggagaactttgtcgccggcggcgtggttaaacgcaaaaccatccgcgccgccgtccttgagcagatgcgacggttacggctgcgggaaaatgcggtcgaactacccgtcagcgccctgtccggcggaaaccagcagaaagcggcgctggcgcgctggctgctgcgcgattcgaggctgctaatcctcgatgaaccgacccgcggcgtggatatcggcgccaaaagggaaatttacgaactgatagacaaactcgcccgcgccgggaaagccattctggtgatctcctccgatttaccggaggccatcggcatcagcgaccgcgtgctggttatgcgcggcggccgaatcgttcaccagttaccctcatattcagcaacggaagaagaagtgatgctgcacgcaacaggaacctttaccagtcaatccggagaatgccatggacaacaataa

SEQ ID NO: 159364 - DNA, 954 bp, Enterobacter cloacae
atgaccaaacttcacaaagcatttctggctgtcgcggttactgcggtaatcaccaccatgacaggatttatccccgccgccagcgccgcgccgcaggagagcaaaaaaataacccatatcggcttaatggtgcaggacatgtctaaccctttcttctctgcaatggaaaggaacgcaaagcaggccgcggcaaaaatcggcgcaactcttaacgtacaagatgcgcaggtcgatctagcaaaccagaacacgcagattgacgcctttattcagcagaaagtggatctgatcattatttccgccgtcgatgagtccggcatcgagccggccattcagcgggcaaaagccgccggaattatcgttatcgcggtcgatacgcccgccaggggcgctgacgcggcgatcatgaccaatgccatccaggccggcgaaacctcctgcgaatatctgttcagccaaatgggcggcaaaggcaaagtgctgctggtggacggcacgccgattcaaaccattattgaccgcatcaaaggctgtaaaaacgtcgcgcaaaaatatccagatatcaaaatcgtcgggcagcaggcatcccgcaacgaccgcgcttccggcctgatggtcaccaccgatatgctcaccgccaatccggatgtctccggtattttcggtatgaacgatcctgcggcgctcggcgcggtgctggccgttgagcaggccggcaaagccggtgcgattaaagtcaccggcgtagacggcagcccggaagcggttgaagaactcaagcgcagcggctcaccgtttattggtaccgccacgcaaaacccgggcgaaatggtgcgccaggccatctcgcttgctcaggatatggttgatggcaagcatattgcgtcccctaccgtattgatccccagcgtgctggtcacgcgcgacaacgtagatagctatcctggctggtaa

SEQ ID NO: 159365 - DNA, 1032 bp, Enterobacter cloacae
atgcgtaaagcaacaatgcgggatgtgagcgaagcaacgggattttccatgtttaccgtttcgcgcgcgctaaacggtggcgatggcgtcgctgacgacagccgggagctgattttaaaagtggcgcgagagctcggctacgtacccaaccgcgcggcccaggcgctacgccgttcgagcagagactcggtggcggtgatcaccgcccatgcgtcgaactattactatctcaacctgatgtccggcattcagcagatactgcagccttcacagtggaccgtggtgcttggcgatattgcggtcaacggcatctatgaccgcgcgcaggaagatcggatgattaaccgcctgatagagtcacggatggccgggatcatttcgacggtgacgctgcagccggaaagcctgactctgctggcgaaatgggatatcccggtcgtcttcgttgattccccgccccgcggcgagcacaactttcccagcgtcacgaccgacaattaccatgccagcctgctggttggaaaccatctggcgcagtacgactataaaaactggctgctccttatctacccggaccgctggactacgcgttttgaacgcgagcgcggaatacgcgaggccgccgagcggtgcggcgctacgcttggagttgtcgaaacggaaaacgacgcgcagtcggctgcagacaaactgagccagtacctcgaccgccagaaagcgctgccggatgtccttattgccggtaacaaccctattctgctgggttcactcaaacagctccagcagcgccagatagccattccagaggatatggccctgattgcctacgacgaattcgactgggcgccgctattaaatccgccgctgacggtgctcaatgaaaatagtgaagagattggcagacagtcggctgaaatgcttatccagttaattaacctggaagggaaaggagaaatcaacacccaacgtaaagttcccgccgagctggttattcgccagtcctgcggctgtaaaaaaacgcataacaattaa

SEQ ID NO: 159366 - DNA, 198 bp, Enterobacter cloacae
atgattaaagttcacgatatcacttatggcacaccgacttcctctgtgaaagatttgaatgaatggttagattcacagagtgagcacatcgaaataataaatattgaaaccttaatgaatatcagtctggggtcacgcattaacagttaccttaaaccggaatttatccgggtatggtacagaaccccaagagactga

SEQ ID NO: 159367 - DNA, 531 bp, Enterobacter cloacae
atggacaaaatcgaggccactaaattacacagctgcatgatcagtcagctctgtttaatggttctgctcgtggtgacgttttcggccacagcggatatcaacggtcggattgttcgtgttctggacggggataccgttgaggttcttgaaacggacaaccagctcacgcgtgttcgtctggccggcatcgatgcgccggaaaaaagccagccctttggtcagcgttccaggcaggcgctagcatcaatggtggcgcagcgtaccgtcactgtcacgggcactgacatggatcgctatggccggctgttgggtacggtgtggcttggcaaagcggatgtgaatgctgcacagatccgcaacggactggcttgggcttatcgatttcatggaaaagccatccgggacgactacgtaaccctggaagacgaagcccgtcgtcaggcgaccggtctctggtcagtcgcgggtcagacagaaccctggcgctggcgcagtctgcatcagggcacggctctgtcaaatagtgaatga

SEQ ID NO: 159368 - DNA, 402 bp, Enterobacter cloacae
atggtcaggacggttgctaccctgggggggttaagtgagaggaaaagacttatcgccgccggaaaaaatgcttgtacagaggcaagagagggaaatcacaaaaaaactcgcgaacccaatctggtatttcctcgaacgggcaaagcgtgggttcaggaagacattgacctcattcattccattattgatgatatcccggatgaaagtattgacgaccacattttgtggctatcaaagcagcaggggcgtacgccctatgccatcgccctgaagattgtcagtgaaggaagaatgaataaagagtgggctaaaaaggtatggaaaccagcagctaagtcgattcgcgaagatttttcccggctccagaccaacatgccagataacaaagagacagatgaataa

SEQ ID NO: 159369 - DNA, 957 bp, Enterobacter cloacae
atggtaatcggcgatattccaacaacctttttaagaaatgaaaactccccgcaaggggagtgtcattttgtatcatgtgaaccgtcttattctcattcgtcacgctacttctttaactttttcggtgagagcgaggttacaatatattttggtaaagcagaagggaaaactttaacatttaaatttaatatactagcaagaaaagaaaatgcaaaattagcagaagaaatgttgggttttattagtgataatgttgatgataccgtagctatttgtttttcgagaagcaaaaccggaggtggttttaataatgaagaagaacacaagtttagcaagtatgatgcagtcatttacgctgtaaattatttatcgcaatcattacctgcttttgttaatgacaaaaaaactcactggaaacagaaggtaattctatcccaaaatggacaaccaacgggtcctgattctgtatactgggcacttacgaatttagacagattatctccttctacggccgacaactataatatatacttcaataatcgtggttatcattttgatgaacaacctaaggaagtgcttattgatgatacaaatgtttatgaaaatataatcataaactcgttcttgtacaatgctgataattttttatatgccttaaagaaacattattctgaactcgcatgtgaagatgttggttattctgatactgaatatgttcgctttgatcatactatgtcaaaatatgcgaaaatagctttgaaaatgagaattaaagaaattgaagaaaatcatgaattagtaaaaaaactgatttacagctttaaaaaaataatgccttccaagattagccctaacatcctccctaaaataacttcttttgttgcaaaaaaaggacattatcgagaagcttttagattgataaatatcgcgaacttatcatcagcacggctttgttga

SEQ ID NO: 159370 - DNA, 192 bp, Enterobacter cloacae
atgaaacttgcaacggaaacccgcgagatcctgcgacagtacaaagcgcttattaatgcccgccgccgcgagaatgggcagtcggcgcttcggacagaacaggtgatcgacgaaatatgttactacatgacctgtcagagcgctgtttacctttgcggccagtttatacgacaggacggatacggccagtaa

SEQ ID NO: 159371 - DNA, 423 bp, Enterobacter cloacae
atgttactttttgtcgcccccgaacaggagccggtgccgtccactgccccgctgttcaccgaacgttgcccggcgggttttccgtcaccggccgccgattacacggaggaggaactggacctgaatgcctattgcatccggcgtccggctgcaacgttcttcgtcagggctatcggggattcgatgaaagagatgggcctgcattccggcgacctgatggtggtcgacaaagccgaaaagccgctgcagggtgacattgtcatcgcggagactgatggcgaattcacggttaaacgcctgcagctgacaccccgtatcgccctgctgccgatgaacccggcctatcccactctctatccggaagacctgcagatttttggggtggtgacagccttcatacacaaaacacggggcatggactga

SEQ ID NO: 159372 - DNA, 744 bp, Enterobacter cloacae
atgctcaccactttattctgtactcctgccagttcacaggcagaacgatggttggggttattatccgatctcggcaggtcaccggcgacaattcatgcctaccgcggcgcacttactcacttctttcacttctgctgccagcgggaattgccccccgagcaggcaagctttgaagatatcgctgcgtacattcgcccccagttacccggcatgcctcagcctgcagccagtgcaacgcttcagcttcgcctttctgctatacgtctgtggtttgactatctgatttacatgggggtaattagccggaaccctttaccgcgagcaggcacaccccacatgccttcagcaggacgcggtatggtccagcgaataacacgactgccacaaattccggatgacggccagtggtatcatctcttgggttatatatcagactgttcattgcgcgatcgcctgatgctagcgctggcgtatcatggtgcgctaagacgcactgaggtgacaacaataaccatagaggatatcgatcctgcccacaggcttatacggattcgcgccgaaaacactaaaggcaaacgcgaacgggtggtctgctacggcccggcgattacgccggtactggcagcacatctcaggaacctgaggcaagcgggtattactggtggagcactgttccgttcgttttctgacagaaattatggctcaccgctttcatactggagctggagtaaaacggttcgctag

SEQ ID NO: 159373 - DNA, 516 bp, Enterobacter cloacae
atgaaattaactttgaaagaaatgaacgatcttcttaatggtaaatgccttccttctgatctgattgttggcgaaacgcttgctgaatacctggtgcgtaagttctctgatttagagcagaagcttgcagtgtctcagcgcgagttccgtgctgctgatgcgactatcgagaatcttgaagctaagtgcgcggcactggctgcggagttgagtgcattcgaaagaatctgcaacgaggcagtgttcatcacagatgagcactatgagcaatgcccaccagaagtgcggaagatgattcgctcgctggttgtgttgaagattccttcgtaccaggctttcatggctgaagtgcgggccagagagcttgatagcctcgcaggcgtggcagagaccatgctggttaaattcagcaaccagaggtgctcatccgatatgcatgaggttgttggctggaaaatggttcaccagcaggccagtaaccgcgccgcccagcttcgcaaaggagtgcagtcatga

SEQ ID NO: 159374 - DNA, 282 bp, Enterobacter cloacae
atgagtgtaatccagtacgtcgcaagcgatgcaggtacgtttcccgaggatgcatatttcctcgaccctcgacatatcgatgagctcacttctgagtgggaatttgaaagcttggcacaagatgctgcccttgattatttcgacaatcatgacggttgggaatcagactggccgttggatatcgagctattcattgacggcgagagcattggcgtcttcgcggttgagatggagcatgttccgcgtttcagcgcaaggaagaaacaggagaccgcccaatga

SEQ ID NO: 159375 - DNA, 270 bp, Enterobacter cloacae
atggctacttttgattttacacacctcaatggattaacacaaatcaaagccttgtttccagaacttacagagaaacaatttagggttacgttaagttgggtttttggaagtgaaatcattgatatagcgagcgagcatgagtgctcgattgaagcggtaaaaaaaacattgcagagaagtaagctagctcttggttcggagcggcttgaggctgtaagagtaatcttcttgtgcaggataatggctgatctatggactagggtaagataa

SEQ ID NO: 159376 - DNA, 1011 bp, Enterobacter cloacae
atgttgccagtagaggtgaatacgcgagagggggagttaatatttcaatcaaatgctattactgatggtgtttataaaataacacttgatgaatttcgtttgttaaatttagctatatctaagatctcaaggcacgataaacctgagaaacgtataaggattacaacaaaagagtttgttgaagtctttaacatcaaggataaaaacgttaaaaataggttatcagcaattgctgatgggttgctaggaaaaactattgacacatattcttttgaccaggactctgggaagaaaacaaaaagaaggcgcctgtggttgtcagaggtagagtatgatattgaaggtgaagaaaatgtatttttagaaatcgttttttctaccgaaatatcggatcttttatttcaattgaaagataattttacgttatttgcattaagagcaatatcagcatttacctctcctcattcttttagaatatatgcttggttatgtaaatatagaaacatgtataattatcgcaagggagagttgattacaactgatacaatcagtgtttatgattttaaagtgatgttgggattagaaaaatcctatgaagagtataagtttctaaaacaaaaagtaattgaaaggtcaattaatgaaataaatgcatcaactgatatttcagttgttttgaatgaatataaggcatccagaaaagttattgccatatcgtttagttttgttcgagaggatcatccaactttacaatctataaagccaaagaggcggcgcttaccggctagaccaagagttaagtcaggttctaatgctgaagttgagtgggctaagaaatgtattgaaataatattagaatatgaaaacgcgctaaaattatatgataaggaagctaggttgcctcttcctgatttagaaaaattagtagggtattatgaattatgtggggaggataagaaaatatcagaaaggaattgtgaactaaaagaaaggaagtccaaacgtaaatga

SEQ ID NO: 159377 - DNA, 324 bp, Enterobacter cloacae
atggaaaactacgctaaatttgttgctactgaaattcttaatcagcttggcggaaatcgcttcattgctatgacaggcgcaaagaactttgcctgttttgatgaaaatggtgagtgtggtctttgctttcgtttgccttcaaattttgcaatgaagggaattaatttggttaaaatcaaattaaccttctctgatacatacctggtgacattttcccgtgtccgtggagctacagtaaaagaaatatcaaaatttgataatatttattgtgatcagcttgaatgtttgtttaatgaacaaaccggacttgcaaccagattgtaa

SEQ ID NO: 159378 - DNA, 210 bp, Enterobacter cloacae
atgaaagttcttattggtaatataaatattgataattatcatatgctgtctgcattagctgggattgcgggatttgacaggagcattcagtttacatgtgaaatatcagcaagtatcgaaattatggaggatgatttcgtaaataaagctggtatattaaagatgttagatgaatttattgaaaatgatttttcaataaagctcgtttaa

SEQ ID NO: 159379 - DNA, 225 bp, Enterobacter cloacae; identical to SEQ ID NO: 22632

SEQ ID NO: 159380 - DNA, 261 bp, Enterobacter cloacae
atgaagataagaaaaggtgacagacaatattatctgaataaagaaggtgatacgtttcatctggtgaagcgagtaaaaactttttctaagtctgcgactttaggaaaaacgaaagcaacggtgaaaactgttgccgatcttgtttttcatgagaaggcattcgacactatcgactttgccagcgacggattaagagagaatgataaagaaattatttttatgatgattcaggaaatgagtgagggaaaaaatgccaaatga

SEQ ID NO: 159381 - DNA, 243 bp, Enterobacter cloacae
atgccaaatgaaaacacaccagaaaacattaaacgtctgcggcaaaaaattggcctgacacagaaagaatgtgccgaaatatttagcatgagtccgcgtacctggcgtcgcaaagaagaacctgtcggaactgcaagcggtacagcacttacaccagtagagtttaaatatcttcagcttttagctggggaacatcctgaatacgtcctgcgcaaaagggataaacctaaatgtagtgaatga

SEQ ID NO: 159382 - DNA, 330 bp, Enterobacter cloacae
gtggaagcattaacttttaataacggcactgtttctgttggtgatgtgtttgtatcttcatggggatatgagcaaactaacgttaatttctaccaggttatttctgttcacggtaaaaaaaccgtcaccgtccaggagattcgcgcttctgttcttctgactcgttcaatgagtggatataagaccccattgcttaatgatttctgtggggagccattaaagcgtcgtgtgcgtgattgttacagcgtacctgcaatagagattgaatcatttgagatggcctataaaactcagccagaagagaaacacgaatttacatcatattactaa

SEQ ID NO: 159383 - DNA, 279 bp, Enterobacter cloacae
atgcattttacaacttttctgaaaaaacatttcgatatagaaaaaattgttggcacttctgattctggaaatgataccgaatctatttatgtttatgaaaaaggaaatgattgcgaaccgttgtttattctgcgtgagtcgtggataaatgcagaaattaagaagtgtgggatatggactgttggcaacatatattccacgttggaacatggaaaggagtacaccgaatctgaattaagagaaatgattaagaaaggaaaggtaactagcaaatactaa

SEQ ID NO: 159384 - DNA, 135 bp, Enterobacter cloacae; identical to SEQ ID NO: 37994

SEQ ID NO: 159385 - DNA, 438 bp, Enterobacter cloacae
atgtttttttctgtgggtgtcgaaacaccgaaagatgaccatacggcatatggtataaccgttccggcttttgatcgttttgattttggctgtgtctctgctgccgatactcaatcagaaattcctgtgatggcgcgagaagcgatattggctattgtggaagaaatggttttaagtggttcttattctgttgatgatattcatgatgacggctgtttaacatatgccgcaaatcaggactatagtcactgcgatagctggtttgtaattgatgttgatttgtctgaaattgaaggtaaacaacaacgtattaatattgcgttgcctgatgtgttgattcgtcgtattgatggatttgtcagagaaagtggcggtgtttacagagatcgtagccattttcttgctcaggccgcgcggcatgagctttcatataaatga

SEQ ID NO: 159386 - DNA, 705 bp, Enterobacter cloacae
atgagtgatattgaattacaacagcccgaaagggctgttcatgaagcagaagatcagataaatgattttgttgttgatgttttcaagaaaacaggggtaagaatatcaaaagatgatcctgtactatccctgctatttctccatgaaaaaattcaaaagagacaatctgatttattaaaagatgatttcaccactttagctgatgcattcaagaatgtattaagttcattagaagaagaaaatattcagcgattcagaaaaattgtagatacttgtggtgatcttgataacgaaataaaagaagccatagagcatggcaaaaatgaaatcaatgatacagcagtcttagcgaaggaaaaattaaacaatgaaataatagatattatatccttactaagaaaaaaccaggaggagctaaacaactcttacaaaaagagcattgctgaattttcaaaaaacacaaagccatttagtaaaagtacagcaatagcattatgtgtagcctgcaccattggaatttcagccgctttttctggtgcgttctggtatgttgcgcaatcacagaaagaacaggcgctacagttctatgcatccggctacatggatatgcaaaaactaacaaaagaaacgatctctctactacctaaagaacagcaaaaaattgcaaccgctaagttaaatgcactggaaagccgcagtaggtaa

SEQ ID NO: 159387 - DNA, 762 bp, Enterobacter cloacae
atgaatacttcaatcaattttatattgcaaggtaaaggcggtgtaggtaaatcttttgccacatcaatactgtctcaatattttattgatgaaaaacaacttgaaaatgttgttgttgcggatacagacccggtaaacacaactacagcaaaagtaaaacgccttaatgctgaaattatcaagattgtagaaaacaataacattgtgcaatcaaaatttgatagcatgtttgaatctattcttgaaggcggaaacattaatttcgttattgataatggtgcttctacgttcttgccattacttcagtatttcgatgacaactgtgtaatggatatgttcaatgaagttgaacaggatgtttatatccatactattattgttggtggtcaggctcaagcggatacaatagaaggttttgaaaatatcgttaaacttgtaaaaggtacgaaagttaaaataatcgtatggattaatgagttccagggcgaaccgatactttcagggaagcatataactgaaacaaacttttttgaaaaaaataaagacgttattgctggcgcaatattgatcaaagatcgcaaaagcgatgcttttgatactgacataaaaaaattaacagccaattcaatgacactgactgaggcgcttgaatcgaaagagtttggattaatggctaaatcccgcctcaagcgcgtttttaacgatgtatatgtacagcttgatgcaatctatgaccctgaaagtgtagaggccaatgcatga

SEQ ID NO: 159388 - DNA, 654 bp, Enterobacter cloacae
atgacaaaactatccctaaattgcaatgtgtgtgcccttatgtgtgtcattgtgtgtgtcattttgtgtgttgtcaaggttttttgtgtgcttttatgtgtgttcttttgtgtgccattatgtgtgtctgtggtgctattgtgtgtgtcgttttgtgtgtctagtctgaatcgttttctaaaacacaggcacgacaccgattgtacacaaatccgttccggatatgttacaatcgacgtgccaaagggtgttccctttgaaaccccgaacgacttgagccgttcttattcggttctacgaaccttgagggctaagatgaaaaaaacaaacaagagcgtacatgtcacatttaggttaactgaggatgaatatgcaccgtttgctaaagcaatagcacagcttgatataagtaaatctgaattttttaggatgttgacactcaataggatagagaactatcagcctgattatcgacagcaacctgattataagcgttgtctttttcttatgaacaaaacaagcaataatcttaatcagattgcacatcgtttaaatctggatcataacaagggaattatatcatcttcattgtatgaaagggcgctcaataccttgataaatatccgtgatttattgcagggcgcactaaaatga

SEQ ID NO: 159389 - DNA, 3198 bp, Enterobacter cloacae
atgataatacgctatggcggtggcaatcatggtattgcagaataccttgaaaatggaagaaaagcggagcgtgagtatacccgtgatgaacttgaccatagatttatcattgacggcgatctggctacaacaaataaaataattgaatcaatagaagataaagggcaggagcgatacctgcatattacattatcatttgcagaaaatgaaatatcagaagaaacactgaaaaacgtaacttctgatttcaggaagatgctcatgaatgcctatcatacagatgagtattctttttatgcagaagcccatcttccaaaaattaaaaatattgttgataacaaaactggtgaacttgtggagcgtaaaccacatattcacattgtcattccaagaacaaatcttgtcacagggaactcattaaatccgccaggagatctgacaaatctcaaaactcagactcaacttgactctgttcaggaatatcttaacaacaaatataacctgataagcccaaaggattccgttcgtgtaagtgatgaaaactatgcaaacgtgctgtcacgagtaaaaggcgatttataccgtgaacggaacaatgaagtaaaaaaggaagtcttctccagagttacaaatgaaaatattaactcgacggatgcattcaagaatttattaatgcaatatggtgatgtaaaaattcgcaatgaggggaagactaatcaatactttgctgtgcgccttaaagatgacaaaaaatatactaattttaaaaacccattatttagttcatctttcatagaaaaacgtgaactacctttagtaaaaccgaccccagcacagattaacaataacgttagtacctggcttgataaaaccagtcacgaaataaaacatatttattcaaaatcgagtaaaacgcgtgagcactataaggcgcttagtgagccggaaaagaaaagtttcctaaaaaacaggattgatgactatgacaaaaaatacaaacttaacacaaaaaattctgaaagaacgcaaggacggtcttgtggtaacaagttcagtattgaatcaacttccagattcagtagaactaaaacaagagtcggcgtgccacgtttgccccaacgcggtttggtttacggaatccacgggagaggaaagccgcccgaatctgtccgtattttgcaggataatgaacagcgtaatctggcaaacagaatggaaaacagatcgcattctgattcagcaatgcgacggaatgctgatagacgattctcagaacgaggaataaaaaatatcggtatatcaacgccattacatgaagcattatttcagaagttaaataatgatgcagaacgtaatgagttaagcacaatggcagaaatcagaaaggaaattgatcctgaacgttttctttctgcgactgctcgtgaatttaatgttgtgcctggagaacatgcaatcagtaaagcaaaagatggttctccacgttttgcagttggcaacagaaatcttaatgcgtctgattttttaactaaatatattaatttatcatggtctgatgcaaaaaaattcttgcttaaaacatatggagaacaactgtctgaaaaaacgtttgagccggtagtaacaataagaaaactgagttatgaagaatccagagaaagattttcttcctttaaaaaaacagacatttctttaaggaatattattcgtgcagaaaagaaaaatatgtataatgaattgcgcgaaatgcggcaacagatttattctttacctaaagaaaatcgtgatgtagctaaaggtattttagtttataagaaaataaccactcttgaacgactggatgatatgtatgctgcgggacgtagttttatcaaccagtatcataaagactggaatgaggataaaaatgctatgaaagcaattgataaactcaaaaattatcttaataaagaaaatgaaaacagcatttctggtgctgaaattgagctatcactggaaaaagctgttcaggcacaaaagcgattgcaggaactgcaacaaacaaataccaggttgaaagatcttgtaatggataaacaagaaaccaagattgtttatcgtgaccaaaaaacagagtcccccgtatttactgataagggtgattttgttgttgccggaaagaatccttctaaagaagagatcggcatcatgctggagtattcgaaggagaagtttggcggtgtgctcaaacttaccggaagcgaagagtttaagaaagaatgcgctcttgtagccgcagaacgggatatgaatattattctgcgccctgagaaataccaacagatgatgctggagcataaagcggagcttgagtctaaagcaatgcagcatactgaacaggaatcccagcaacagactcaggttgataatgaaatcagcaaggcagatgttcatcagaaccaggcgccagcggaagaggctaaacaagaaatttatctggtcagccatacaaacgtacacgaacagaacgaaggggtcattttctattcaaaagaggctgcttacagctactttgaagaagacaagaaaatggcaatcgagaaatacgaagcgaacccacatttgggaaatggatttgaaggtgcgttgcttgtttccaagaccatagcggccagcgagctgtcctcttatccagaaaaactgacagcagaatttgataaaccctacgaaatcctggctgattcatacaaggaatacacccgtacacctgtatatgttgtttcgttcccgaaagatgaactcaaccagcctgttaagaagttcgaatcgctttctgaagctattgaatataaaaataatactgcaatgcttcatgatctggataaaagggaagttattgttaaatctgtaaccagagaagaattagggatgatgggagagcaacttgccattaaagaagcggaacctgttccacgacatgaacttgaaaaagcacaaggtcgtgatgtcaatgagcaggatggtttgatactggatgccattgatcgctatcaggctaaatttgaagctgagggattagcatttaaccgtcaggagactgaggccgaactgttacatcacgatttcactcgcgaagtagcagaagatcgtcttgaacaacagttcgtacaggaaaaagcagaacagcaaaatcagcagcaatctgaacaggaacgataa

SEQ ID NO: 159390 - DNA, 630 bp, Enterobacter cloacae
atgtatgctcacccattttttgtttgtacccaatatcagcccctggcagggatggctttttcttactgtcgcagtaataaccattgctgccggatgtatttccatctacgaaaacagaactcacttctcatggacagatgcggttatggttctgatttattgtggtctggcagtttttttagctgtttgcggtatacgggcgcttgggcttatctgaataacaatagtgtgtattgttacacaataaataacaggaaacataacatggtcagtctttttctgttcttatcactattgatactcctgataaggatattctccgccaggctaataattccggctgtgtgcgtatttctgcctgtgtcatcactctggatgggatttactatgctcaaacaacatgaatccccttgcctgaatagttcaggttgtgttttatcaccatttgctcagttcagcaccctgctcggatggctttttattgctgtatcaatattaaccacatgtgcttgcgtatgttttcttcgtaagaataagaaatgctggtcatggcatgatgcacctatgcttctgcttgcaggtggcctggcaatttgcggcacctggatgctggaacttctacagttgtaa

SEQ ID NO: 159391 - DNA, 249 bp, Enterobacter cloacae; identical to SEQ ID NO: 38970

SEQ ID NO: 159392 - DNA, 294 bp, Enterobacter cloacae
atgaaaaaaaatttttttaaaaacgacactgttttccctgttaacaatttctttgtcgctttaactcttgtgtcttctctgcttaactctgtcggaatattttttcccatgatatctcattctggtaatgttattgagatgtgttttttcgtgatgttttcagtattactggctgcattcagttttgtaagtacaatggggcttgcgaacgcaatagcacccattaaaaatgcgtttccgcttttattgttggttattgtctttattactaattataatatttacctccgataa

SEQ ID NO: 159393 - DNA, 711 bp, Enterobacter cloacae
ttggtttttaagttgatccaaaaaatcgaaattgccgtgcgtagttcttttgattattgggttactggaataaataaaaattctttttggtatctggattcctcattatttaataatagtgataatcatatcaaaactgtttctaatgtgagcgcctcatttagaaaatcaaaagaagagttcgcaaaacattataaagaaaagtattttaatgaatactgtccgtttcatcgtggattgcctcctggttgggtgtcaattgagttattaacattcggcaatttaaaaagtctgttagaggcttttaactctgaagctattgatagtttgaaactggacagatatgcttccagaattgcaggagcaaaagactatgcaactcttttaaactggttaagtgtcattcatacagtgcggaatgattgctgccatcacacccgactatttaacagaaacaggcttgcaccgaagtcggtgaagaatttgcttaatcctgaaattccgcttgtgaaaatgaatggtacaaaccaagatcagcgtaaccgtatatatacatctcttgccattattcagaatatgttaagcgcattcggatttgaaaagtttggaagagatcttcaggctcttttcgacaaatatccggtatctaaattattctatgcatcaatgggatttcctgaacgctggaatgaggaacggttatttttttaa

SEQ ID NO: 159394 - DNA, 228 bp, Enterobacter cloacae
atgaaaacattagtttatgtaatgattctgtcgatgactaccttttctgcttttgcaaaacagaactcggctaatagtcagaaaacaggagcaagtaatgttgaaagacaaagctatgagaatactgatgcaggaaaaaaacaagctgaatggatgaaaggtaagtttgttaaacctgattgctctccttctatgaatcgtattggttggtcagaaggttgtaagtaa

SEQ ID NO: 159395 - DNA, 1533 bp, Enterobacter cloacae
atgaaagtaaccaaatctattatagctgttttagtaggactgtttgctgctagtgcatatgcagattgtgagtattaccttacaggtaataaggaaactcttaacatttcggattgtgttgatggtgtgaaagacattgctaataatgccttgtcaaattcacagaatgcacaaaatgttgcaaatggtgctgcttctaccgcccaaaatgcacaaacaaccgcaaatgcggctaattctgctgcgcagaacgcacagaatacggctaatacggcacaaaatacagcaaactctgctaattctattgcacaaaatgctcaatcgacagctaaccaggcaatcaaagatgcggcagaaaaatctgaggcagcagaaaagaacgcaaacaactatacagacaataaaattactgatgttaaaaatgaactgaatacaaatattgatagtgctaaaaacgacgcgatcagttcatctaacagttacactgacaacaaaatcagtgatacgaagacagaactgaacgccaatattgataaggcgaagaatgacgcgatcagttcatctaacagttacactgacagcaaaatcagtgatacgaagacagaactgaatgccaatattgataaggcgaagaatgacgcgatcagttcatctaacagctacactgacagcaaaatcagtgatacgaagacagaactgaatgccaatattgataaggcgaagaatgacgcgatcagttcatctaacagctacactgacagcaaaatcagtgatacgaagacagaactgaatgccaatattgataaggcgaagaatgacgcgatcagttcatctaacagctacactgacagcaaaatcagtgatacgaagacagaactgaatgccaatattgataaggcgaagaatgacgcgatcagttcatctaacagctacactgacagcaaaatcagtgatacgaagacagaactgaatgccaatattgataaggcaaagaatgatgcgatcagctcatccaacagttacacagacagtaaaatcagtgatacgaaaacagagctgaataccaatatcaacaatgccaaaaatgaggcaattagcacatcaaacaactatacggataagaaatatcaacaaggtatcagttatacaaatgaaaaatacgagcaaagcatacagtatgctcaaaatgcggctgataaagctgaacaaaatgcgaataactacactgataaccgatttaatcagttaaacaatcagtcaaatcagcgatttgaacaattgaataaaaagattgagcgtgctgaaaaacgtcttaatgccggtattgcaggtgtcgccgcaatatcttcaattccatatgtagctgagaataatttttcatatggtgttgggcttggtaattatcagaatggaaacgcaattgctgcgggtattcaatataaaacatcagcaaatacaaatgtgcgccttaacgtctcatgggattcatctcataacactgttcttggtgcaggttttgcgggtggctggtaa

SEQ ID NO: 159396 - DNA, 1968 bp, Enterobacter cloacae
atgaagaaaaaaatcatattagtggtttttttgttgcttattctcgttgcttgtcttattggcggtaattatcttgggggatatgcagcattaaaatattcaggcttgagtattgacatgttgcaatggaatacatttaataatgtcattacacaatttagcggaaaacctgaatataaaaaattggtcgcaattacatgggctggatttgccgcaccatgtgcaatatttattggttttgttgttattgtcatagttggactgatgccaaaaaaagttatttatggcaatgctcgtcttgctactgatatggacctggctaaatcaactttttttccaacagataaagaactgagagaagcaagattaaagaacagtaaaccatattgttttccacctattcttattggtaaacactttaaaggaagatttaaagacaaatatatatatttctttggacaacagtttttaatcctttatgctcctacgcgttctggtaaaggtgttggtattgttatacccaactgcgtgaattacccggattcgatggttgttctcgatataaaactcgaaaactggtttttgtctgccggatacagaaagaatgtgttgggacaggaatgttttctgtttgcccctgcgggatatgcagaaaatcaacaggaggcgaaaaaaggtaatatcagatcacaccgctggaatcctctggactgcgttaatcgttctgatattcagcgttctggagatttggaaaagattgccgctatgttgattccggcaagtgatgatcctatttggtctgattctgcacggaagctcttttgtgggcttgctttatatcttctggataaggaacgattccatcttcagcaaaagaaaaagggtgttgctgatgtacctgatgttcttgtgtccatgtcggctattatgaaactctctgtccctgaaagtggtcagaaactatcagcctggatgggtacggaaatagatcagaaagaatacctgagtgatgaaacaaagagtctgtttcgtgaatttatggcagcgccggagaagacacaaggaagtattattaccaacttctcgtctccattgagtatttttaagaacccaatcacagcagcagctactgatgcaagtgattttgatgtgcgaatggtcaggaaaaagcctatgtcgatatatcttgggctgactcctgatgcattaattactcactcacggcttgtgaatctgtttttctctatgctagtgaatgagaatacaaaggagcttccagaacagaatcctgagttgaaatatcagtgtcttgtccttcttgatgaatttacatcaatgggtaagtccgaaattattgaaaaaggtgttggctttaccgctggttttaatctgcgattcgttattattttgcagaacgaagggcagggtaaaaaagatgatatgtatggcactcacggttgggaaactttcgttgaaaactcggctgtagttctttattacccgccaaaggctaaaaatgaactggcgaaaaagatctctgaggaaattggagtcagagatatgaaaattatcaagaaatctgactcacggagtggtggcaaaggtggtagttctcgttcccgaaatcatgaaatagtcagccgtgctgtattacttccagaagagattgtcgagcttcgggattataaaaataaaatgggtaatatggctgttcgtgaaatcgtaatgagtgaatacacgcgcccatttgtagctaacaaaataatctggtttgaagaggaggagtttaaaaaacgagtagatatagctaaagaaaatccggtagaaatgcctgtattgttcgatgaagaaatgagaaatcagattctggaacaggcaaaaatatattcagatgatattagtatgttttctgatgttatgactaaaccagatcttgagacacacgatctggaggatgtttctgaataa

SEQ ID NO: 159397 - DNA, 1020 bp, Enterobacter cloacae
atgagtgaagaacatattatcgctcgtcaatttctggtgcaaacagggattcaggaattactggatatggatgatgttaccgaaatcgccgtaaatcagcctggcaggatatggtttgaaggtcgtgatggttggtgctttcgtgatacagataaggtcagttataaggcattaatggggctggcctatgcgctgtgtaacataagtgggctggaagatgccctgaaaccacataacccgattgcgtcggttgttcttcctggtggtgaacgtggccagattatcgttcctcctgcaaccgaggataattgtgttgttctctcaattcgtaaaccatcactaacgcgtttttcacttgatgattacgttaattcagggcgttttgaccgagttaaaattgctaaaaaacacacagcagtgttaactgagcggcagaaatatttattcgagttatcgcgtaagggtgatgccgcaagtattgctaaatttattcgtgaggcggtcaatgatcgcctgaatttcctgattgttggtggtactggttccggcaaaacaacagtaggtaaagccattgcggatttgtttcctcctgaacggcgttatgcaacaattgaagatgtccacgagatgacgctcccgaatcatccaaaccatattcacctgttttataaaaagggaattgtggatgccaagtcgattattgaagcctgtatgcgccttaaaccagatcatatctttctggctgagttaaggggggatgaagcatggagttatcttgaagctcttaacacagggcatgaaggctcaataagtacgattcatgctaacaatacttatgcgtcgttctcgcggctggcgagcattgttaaacaatcatctgttggtatgacagttgatatggatttgattatgagaacgattaagacatctatagatgtcatattattttttaaccatacatatatgacggaactatattacgaccccgaagaaaaaaatcgtctacttagcacaatgtaa

SEQ ID NO: 159398 - DNA, 234 bp, Enterobacter cloacae
atgttgtcattgcttggtgatggtatggatattctgaaaaacaccacacaaaaatcggggaataacagcaatattacctatgataatacatctgatacggcgcaggagttggctaaaacaacacttgagaacacgattaatattcctccaactgcatatattaatcagggaactgttttatcagtgattgttccgaggaatattgacttttctgaggtttacggagtgcagtaa

SEQ ID NO: 159399 - DNA, 279 bp, Enterobacter cloacae
atggctatccgtattgaagtaggtgacaaatgggttattaccagcgaccagtatcaattcatcctgaatgaaaagaaagtcgctcaatccgggaagaaagctggcgaggaatggctcgacactattggttattacccgaagattaaccagcttatttccggtctggcacatcactatatccataattctgagcttcaaactctgaatgatattgcgtcagaaattgagcggttggggatgttatgtgagtcagcctttcgtgctgaaacagctaaataa

SEQ ID NO: 159400 - DNA, 825 bp, Enterobacter cloacae
atgggcgtggcagacgttattcattaccacggaacacctgtatggggtgacgccggtaacgttcaccgtattgcggtaaacggtgctggcgcatttgtatcgtatgcacgccctgaccaattagctgcatcaattaaatacgccatctctattgctatagataatggagctttttcagcttggaagcgcggccttgttattgactggcagcaattctatcaatggctgattcctcattatcatcatcccaaactgtcattttttgtcatccctgatgtggttgaaggtgacgaagctgataatgacgcgcttatcgctaggttgccacgctgtttcaaagataaggctgcgccagtttggcatttgcatgaatccctgcaccgtctagttgagctgtgccgggagtggccgcgagtgtgctttgggtcgtcaggtgagtacgcaacaattagaacccagctctggcatcgcagaatgtcagaagcgtttgaaacaatttactgcaaacataatttctcaacactggtgcacgggctccgcatgctcgatggtagggttttgggtaactatcctctggcgactgccgatagcacaaaccttgcctgtaatgtgccgaaattcgaagtcaaatacccggagctcacaaaatcaattcgagaagccgattatgcgaaaaacctttctgaagaggaacttaaagccgtcattctcaaacgccgttgcgccattctgaaaaatactattgaggccgtatcccctccatcgattgaaagctggctatcaaaagggttggctccgcttcaattggagttggctatcgcatga

SEQ ID NO: 159401 - DNA, 231 bp, Enterobacter cloacae
atgataattaacattactctgaaacctgttcaaaacatagacgacgcaaggctcaactcgctcgagaaagaactcaaccggagagtgaacaagtcattcccctcctctaccgtcgttgtcaaaaaaggctccataccgaaaatcgatattaagggtttcccgagcgactcagaccgagaacgattaggtgttatttttgaagacgtctggcaggacgtaacatggcattag

SEQ ID NO: 159402 - DNA, 801 bp, Enterobacter cloacae
atgctgcgtattaataatgttgatgttagaaagcatcttgaaatttttgagcaaaagagaacgccggacaacggcagaattagtttaatgtatgagaatgccataaattatgatatgtattccgtttatataaaaggtgatgatggtaatgaatatctatttgatagatatattgatggagtgataaaggcaaagcggtgggatactcaacgtaatgtatttaatgttgacgttgaacttaatccagagcaatttaacgctaattctttttctggtatattttattatcatgcgcatgaatttaaatttaattcactggatgaattggggtgttataaagtatggaagctcaaaagatttgcgaatagtgaaaacaaaaaacttagtcgtgagaagtttctttatcgtcaacgtaaacaagaaattactgatgcaatgactgtcttgacctcagttgtcaggatttatagggaacagcaaggcgaaagaccattcagcgagattcttataatgaatgatgttgccggtaggttatggatttatcatgatgatccttccaggctaaaaaaagagcttcgtttatgccttgactcacttgtagaaaatggtgaccttttaaagtctcaagagggatacaaacctagcggaaaatcggttaataccctagctaacttcaacaaaaccgaacaacgttataaagagaatattagaagccagcgaagtatgttttgggctactttatttgctgccataggtggtttgggaagtatgattgccgcttttataggagtaatgaagtaa

SEQ ID NO: 159403 - DNA, 282 bp, Enterobacter cloacae; identical to SEQ ID NO: 146795

SEQ ID NO: 159404 - DNA, 204 bp, Enterobacter cloacae
atgaagaaaatccttatgattgatgaagttcttgcgcttgcccagcttagccaggttgcatttgataaacccataaaatatatggatgacacggatgctgaactcatcgctcgttttaaaaaaaccatcacaccagaacttattgagcagatgtgtctcagaatacttgagcttgaagcgaagtttcagactttaaacgaataa

SEQ ID NO: 159405 - DNA, 231 bp, Enterobacter cloacae
atgaagcatgtaaaagtactgggtacaggctgttccggttgtaaaacaaccatccgccttatccagcaggtggctgatgagagaggcgtcgctattcagcttgaaaaagtggagtcactgtctgaaataatgaaacacaaagtgatggcgaccccggcggttgtcgttgataacatcgttgtacataccggaggaataccatcaagagacattatcgaaagctggctctga

SEQ ID NO: 159406 - DNA, 543 bp, Enterobacter cloacae
atggagcaactgaacggcacgccgccttgccttatgaaggcgtggaagaagcatgaacacgaacttctttgctggttactcagacaagtgggtaatgaggctgatgctgatgatctgatacaggaaacctttctccgggcaatacgacaacatgggaaattctgtgccatcgtgaatgccagagcctggctgtttgaggttgcccggcatctgcttattgataaaagccgccagcagcgtccatttatgcctctccacgatgatttatcattgccggataatacgcctgaaactgtcgactcactggctggttgtctgccccgcatcctggataaaatggcagagtctgatcggattatccttacgctctgtgatcttgaggggatgaaacaggctgattttgcagaccgaaatggtctgacacttgcggcaaccaaatcgcgtttatcccgggcgagggataggctgcataggaaactttccagcaattgccagatcagactggatgagtatggtcgggtatgttgtttcactcccaagtga

SEQ ID NO: 159407 - DNA, 453 bp, Enterobacter cloacae
atgtcggcgcgcgtgatgaactgcctggaggagctggcccccagggtggaacagtattcgatcgacgagatgttccttgacttgaccggtgtggagcactgcatggacctggaggatttcggccggcagctgcgccagcacgtgtatgactgtacccgtctgaccatcgacgtgggtgccggaccgacgaaaaccctcgctaaatcagcccagtgggcctctaaagagtggaaacagtttcgtggtgtgctcgccctgacccgggggaatccacagcgaacgcggaaactgctttcactgcagccggtcgaagagatctggggcgtgggaaaccgtattgcacgcaagctcaatgtccttggcatcaggaccgcgctcgatctggcccaggcgaacccggccttcatccggaaaatttctccgtcgttctcgagcgaacagtatgcgaactga

SEQ ID NO: 159408 - DNA, 180 bp, Enterobacter cloacae
atgcgtttcaccatttaccttttcaaggataacggttgtgtcaaaacctacctttttataatccatcggattaaaagtgttctctggcgaatctgttgcccaggaatacgcaccatttttacaccatttagcaagtctgatacgcagttcactatcgttaactatctggagcaatgctga

SEQ ID NO: 159409 - DNA, 321 bp, Enterobacter cloacae
atgaatgatacagagaaaccaaaggtcgtctttctttcctataacggcctgaatcggcctgtgatggttaggggtgttccattgatgctttttttgtctgtgggatttcttgccgtgtttggtggttttggatgcatgtttatgtggggaatttctggactcatatttcctgcattatgcttcttgtttctgttcattgttcgcatcatttgtgaaaatgacccaaacgctcttagtgttatgaatctccagttgaaggggtattttcttaaagtgatgcacagagactcaattattggtttttcctctgtggagcgttga

SEQ ID NO: 159410 - DNA, 315 bp, Enterobacter cloacae
atgtttttggagattattcgaatgaataagtttgcgaacgtaaatcgttttgtttttgcattatttttcatggtgttttcagggtttgcggctgcggcaggtggccttgattcagctactaatgctcttacgaacgtgaaaacctggctttttacctttgttggtattggtgcacttgtttatatgctttattgcatcctgatggcctttatggaacgtaaaagctggggggatgttggtatggctcttggctattgtgctcttgcaggcggtgcagtagtcggcggtacgtgggcgctggaattgttccagtaa

SEQ ID NO: 159411 - DNA, 612 bp, Enterobacter cloacae
atggtattaccatcggtaatgctagctagtcttttcgtttcctgcgcccctctagttgcaccaaatacactaaatgcggttattcaaactgagtcttcaggagatccatttcgaatagccaatattagtgatggagtgtctcttagatttaaaaaaatcgaagatgctattagttatgcaaagaaattagataatgccgggaaaagatatagtgctggcttgatgcaaatatataacggaaattttaatttctacggggtttctgctgaaacaatatttgatccatgtaccaatattaaaattggtgcggatattctgacaaaaaactatcttgctaaaaaaggaggaaatgaacaagagaaccttttgaagtctttgtccgagtattattcggggaatagcacaagaggtttcaagaaagaagctcaatttaataatacgagttatgtcgaacgagttatgaagaacgcttatgttgttcctgagttgcgagtagataaacctgaaaatgcgaaagcaacaaaagaacagagtgttcaggaaaaaggtaatcaaagttttgtttcacactcccaggactgggatgtttttggagattattcgaatgaataa

SEQ ID NO: 159412 - DNA, 642 bp, Enterobacter cloacae
atgttaaaagaactgttttcagtgattttaataggatgcatgtgctctaatgtcgcacatgcttatatccctgttgtcgatccgacatcaattgcaaaaactgttgaggaaggtttagctagggctaaagaagctgctgataatttacaacaactgaaaactcaatatgaacaatctattaaatatgcagaggatcaaaaaaagagattagaaggattcactgattttagtagaggctttgatacagcttcaagctatatgcgtggctctcttaaggatatcgatagcgattctcagattggattagattctttacgaaagaaatattctttaaccagttctgatgctaacacgcaaagacgctatgatgctgttcttaagcaaataaatttttacgagcagttcaataaatcaatgtataagcgggcggaacgtgttcaatcgttacagtcattatttgcaaatgccactacgccgcagcaaaaagctgatattgcaaatcaactgtcgattgaaaaaatgacaatagagttgcaactgaaacaatatgaactagcatctaatcagatgtccgttgatgaaaatgctaggcaagaacaagctcgtaatgagtggctaagttctcatagttacaaacgttag

SEQ ID NO: 159413 - DNA, 225 bp, Enterobacter cloacae
atgaaaaaagttgttccaatggcatttgtatccgttctgtttctctctggttgtaacgataaagtgtatgatgttgattattattttgcaaaccaatctgaggcaaaaaatgttatagaacaatgctctaagggaaaaatcacaaatgaaaactgtgataatgcaaaggctgcaattcaaaaacagaaaagagaagattggattaaggctcacggagggaaataa

SEQ ID NO: 159414 - DNA, 978 bp, Enterobacter cloacae
atgaatataatatctacgtttttaagtactgttacaacactagttgaatcaggggcagccagtaacgcagcaaaaattgcaaatgcaatatcacctgtattttttgcagccattggtgtttatattatttttgttgcttacgaaataatatattcacaacgtgatgtggttatgtcggaagttactaaaaatataatgaaattggctctggttggtgttttcacatatagctcaacatattattcacaatatgtaattcctttcgtaatgcattctggagatgaattgtcttctgctttgactggacagtctgatatagccaattcaatagataatctttggcaagcattgtcagatacaatggagcaattttggagtgatgctacgggacagcttggtatgactgattttggtctatggattaaagcaggtcttatatggatcacagggtatgcaggaggatttttgcttgttttttatactaccgttttcctttgcgtatcaaagtttatggtcggaatggtgttatcggtaggtattttatttatatgtttttctgcattctccccaactcgtggtatgtttactgcatggtgtggtagttgtttaaactacattttgctaaatgtattttataccatatcttttggcttcgtattgtcactaatacaacaaacggctaacttggatgcaaagaccattacattcatgtctgtggctactttattagcggttgtgttaatatctgtttacctgatagagcaaattgggacgttgtgctcatctctaacaggtggagtaggtattaatggattgactgcctcagctaacggcgcagcaaataaattagctgctgtttcaggtgtaagggctatgagcaatgcaggtaaaggattggctgcctctgttgccaaaaaagctggaaatagagtagtaagcctggcaggtcaattaggaaagaatgtattaggagggtaa

SEQ ID NO: 159415 - DNA, 990 bp, Enterobacter cloacae
atgcgttttattatctctgaatccataagaattgatgatgagatttttaaagcattgaaaaataaaaattacaatgaatttcttcaaaaagagtatggggaagggttggctggattaggcatgtctataagctcaccgaatgatttcactgaagaatataaacatgacctaagaagagaaataaaactttctaacaaatctaaatctgccatacttcatatgctaaatgaactcattaaagaagtaaacttagagatgaactcaacaaccaatgagttttatattgaatttaaaaagatattttataatcatttctttcttggtgatggaaatatagatcatgatggttggcttaaaatacttaatgaagtggtcaatagaataaaagacagtctactcgacgaagatttttatttcccgatactagccaacggtctagaaaaagatgagataaatttaggtatcgcttcgatcattcccaaagaaaacatcttctcggatatccaacccaattttacaaccgacgtaattgaactagccgaagagttttgtaattcacaattacatccttataaacacttccttaaaataaccataaaaaactgctctaaagagagaaggaagtatttatctaagcaaatcgccaactttatcgttggaataatacaattatttagtgaacattttcaaatagattcagacgtggttgctttatcattaaacccgtatcctaactacgagtccttttacattacaaataatgatgatggatacaattattgtttttcgagcaaaggaacaattgttcatagcgcagtgttttggcaaaaattcaaacaagagaatgcatcagaacttggtagcataataaaacagattataattcatgcaacaaccccaaaatcgaatcccgttttggtggataggctcatagatgcaatatttatttttagaagggcaatgcaagataatgatgactcatcaaaatga

SEQ ID NO: 159416 - DNA, 291 bp, Enterobacter cloacae
ttggtactggatgagtttgatattaatttacatccccatattttaccacacttattagaattctttttagaagaagaaagtaattctgcaaatgcacaattaatttttactacccataatactgagattctcgattttttagggaaacatcgcacttacctagtgaataaaaataatacagaaagctattgttacagacttgatgaaatacctagtgatattcttcggaatgatcgtcccatctctcctgcgtataatcaaggtaaaattggaggggtgccaaatttatga

SEQ ID NO: 159417 - DNA, 513 bp, Enterobacter cloacae
atgagtaagaaatttggaaatactaacactataaattttcttaagtcttttgaaggtttggaaagtttagattctcaagagtgtaatcttgctttaagatgtaaatttaatttctcgtattttgataagaaccaggagaattcaggaaaaatcactgactggaatttagataatattaacgatttttttgataaattgatcgattactctacgaagtctcttgcccaactacaacagattggtataggaaaaaatcggcagagtttattatcactttatgattcttatccgaatcatagcaagttttcaaggcctaagaacgttcctcatcaagcgaggtggggacggtttcgtctggaccaaaacaaaaggttgattggctttgttgtgcctgatgaatatcatggtaccagacatgaaaaaacaggtatgctctacgataaaaatactttctacgtggtttttatcgataataaccatcttttttatcccatgaaaggtaagaaaaaataa

SEQ ID NO: 159418 - DNA, 393 bp, Enterobacter cloacae
atggaatttttccattttatcaaagcaactcctgaagctcgttcagagattgttatggatcatgctatcccacttgatgacgccctcctccagctcaaggattttatcgctgagaatgcagccaacggcatggacactgtccaagtctgggataaaggtgccactttcgataatgttcttctggagtattcatacacccggaccgggattccctgcccagggaattactggaacaaccgtgatgtaaggaccatcgttgaactgggtaaagccgtgggatatacgccttgccatgaaataccgttcgaaggagaaccacataatgctatttccgatgcccgccacaaggtgaaatatgtttctgcactctggcagcacctgactgaacactga

SEQ ID NO: 159419 - DNA, 780 bp, Enterobacter cloacae
atgattaaaaagtcgggtcttatcggttgcttatctttgctggctgtttgtgcatctccggcaacaattgcggcaacatatggtcaggggtcagcatttgactccaggattcagagtgttgtttttaatgaaaacgatgttgttaatgtcagagtaaagaaaggtgctgtttcggtagttcaaatcgccaaagatgaaacgattaaagatgttggcctgggtgatcctgctgcatggaaggtgtccgttcgtgaacatacagtcttctttcgtccggcagtagaagacaatccaagcacgaacgttactattgtaacggataaacacacgtactcattgtaccttacggaagtgtccagtaatccgacatacgttttgcgatatgactatcctaaacctgtaacagccaaagtatttacggagaaaaaatatccctgcactgatggtggtgtaattaatggacactatcaattaaaggggagtaagagcattttcccttaccaggtctgggacgatggtacttttacctgtatgcgctggaacagtaaacaggatttacccgtgccttatcgtgttgatgctgatggcaatgaaaaccttgttaataagcatatggaaaataacacaatggtattacatgaagtgtctgataatttccgcctgagaataggcgatcaagttgttgatgtaagaacatcttcgacggttcctaaaatgtggaataaaaaaggtactacaaatggaaaggtgagggtggagaaatttaattatgaaaaatga

SEQ ID NO: 159420 - DNA, 570 bp, Enterobacter cloacae
gtgctgttgatttccaatattgctcttgcagcagccatcgcttttttgtctccgttaaagactgctgttccttttgttattcgtgtggataacaatacgggctatacagatattgcaccgcaattatcaggagcaaagcaaacctatcaggaagcggaaacaaaatataatcttgcgaagtttgttattaactatgagtcatacgactggcagactatccaggaaatgctggatacggtaaatgtcatgtctaataacaaagtgttctcacagtacaatacagctattcgtgcagataactcgccgctgaatgtactgaaagacagttataagattaaaacgaaaattaagtccgtcactttactgaagcctgatgttgcgcaggtcagattctcaaaaatgattctggactcttccggctctttggctcccgaatacagagttacagactggattgcaacggtcgcttttgattttaataaagatgttaagacggaagaacaacggcttattaatcctctcggatttgaagctgtcagctatcgtgtagacgcggaggctattaaatga

SEQ ID NO: 159421 - DNA, 537 bp, Enterobacter cloacae
atggaattcaccaaagagcagttaacaaaaatcattgacgccgctaacgaggtaattacggcgctggctggtgaaaatgaagatttatcaacatcaaataatctcggaatggttcgcgcatgggattatctgaatgacgacgccgcgccgccagaggtggtaaaacgcctggctgaaatcgcactggcagcactaacggggtcatcagcggagcgcgaacagattcggcacaagcatgctgagtggtcacaatctgcattcggcagtgttggtccggtcgggccgcttaagcatctgtcacaggaggcgttggaagccgccgcagcgccagaagatttaagcgagtgggctgacatgcaatttctgttatgggatgcacagcgccgcgcaggtttaagtgatgagcagattaccctggcgatgattgaaaagctggagataaacaaggctcgtcagtggccggagccaaaagacggtgagccaagattgcatatcgcagcagtacctcgacaagaaggtggtagcgatgctgagtga

SEQ ID NO: 159422 - DNA, 432 bp, Enterobacter cloacae
atgaagaaatatttttatgatgttcttacaaatgctttttacccgatagctttgaaggatatttatgaattaaacggaatgaactttgataatgctcaggaggttgatgaaaagctttttattgagtattcaggcgaaccaccgaaagggaaaatccgtattgcaagtgaagatggtttccctgcttggggggatattcctccgccaacgcatgacgaacttattgcagccgctgaagcacaaaagcggctgcaaatagaccatgctaacaagcacatgaatagcaagcagtggccggggaaagccgccatggggcacctgaaagacgatgaaaaggcacagtacaacgcttggctggattatcttgatgcgctggaagcgatagatacgtcgactgcaccggatatcacttggcctaattcaccaatctga

SEQ ID NO: 159423 - DNA, 1323 bp, Enterobacter cloacae
atgtcagaaaataactacgccgcgatgatgataaaatctgctgttgctgtcggtgacgacataaacgcgattttatcgccaggcatttacatcatcccgccagccaatacctcatccccggatgctacaggtggcgtactcaccgtacatactggcactcccatcaggcgcactttcacatcagacgcggttattgccttaacatctacgagaaacggtggcgtatggacagcatggaaggggccattatcacgcacacatccaggtgcagatattaaagctgatggcgtggcagcggttgcggagtttctcgcaaatattggtttgggagagctgcaaacttccttcacagataagacgggtaaaattgctttaaatggcgggtgggggcttgggataaaggcagatcagataagcggaaccatggcggggttagatgttagtcgcttcgactatttcgccccatcagataatctcggcccttatcctggccagtgggctggtggtatatcatttgctaattcaggttcaacggggtggcaaatttgcggtgcctccctcagttctgtacctgattttagtgtgaggattaaggcgagccagtccacattttcggactggtataaactttaccacacaggatttaaacccactccagctgatattaacgctatccagcgtgatgcgtgtgacgtggctggttttatttctgataaccaacaagacccatacatgaggcatttggcatcgaaaaacctcatacagcttgccacgcgaaaatctgttgatgaccttagtaaaactgtatccgaattgaatgcatccgatgtaaatgctatccagcgtgatgcgtgtgatgtggctgggtttatttccaacaatcaacaagacccatacatgaggcatttggcatcgaaaaacctcatacagcttgctacacgtaaatctgttactgatttaagtacagctgtttccaactttggtacagcagcaaaaaaaaatgtgggtacaggtgctggacaaataccggatatgtcaagtttttcgagtggtgctggctgggcatctttacctggagggactattatccagtggggcattgcagcctctggtcaaattggcgatccgcagaccatcaatttccctgtcccttttacaaattacaacacagttcagcttgttgcttcgtatgataacgcggggtcttcaaatgcaccttatagttttgcagcgcaacctatcagtaatactcagttcaaattattaaattcaacatcatcagcagccgttatttacgctcgatggattgcgatcgggagataa

SEQ ID NO: 159424 - DNA, 702 bp, Enterobacter cloacae
atggacagcaatatcagtgagttagtgaagttagggcatgagcgggccgacgaacttaaagcggcatgtggtgcagttgacgtgcgcagcgtggcgcaactgattagtgatctggcgtcgcagcttgaagtgcagtatgtgcgcgctgaagagtcccggcgcgaattcagctctgctgatatcacaatgcagaatctggaggctcaactgaagcaaagcaagattgacgccgactgctacaagaagggcatggaagcgtcaaatgctcgactggtacaactggctgcggagaatgcaaagcttgctgactgcgcgaacttttatcggctcggatttaagccggcaaagggtgcttttggtatcgagtatcgaccaacggagcaattgcttgatgattgcggaaacaccgcgcttgaggccattaaaaccacggcaaccgacgctttcctggctgaagtgcgggcgcaggtttggattgaaggtaacgagccagcagaatttggtcgttactgggtgcgttacgaaaccgacgtcgggccgcaatattgctccgcgaagtggatggaacacaacttctgcgcaggcagcgacaccaatatccacaaaatctggcttgcagaccactcccgctctatcaattcactgcgaggcgtcacgcattacacaaaactgcctgattcactggaaggagccgcccaatga

SEQ ID NO: 159425 - DNA, 276 bp, Enterobacter cloacae
atggctaaatttacagacgtacacgacctgttaaccgcttatcagaaacaggctcggaagataccccctaagggtgtttatgcctcaaggcatcgtcaggttgaagtgcaggcggcacacgtacgcaagttaatgcgcaagcgtcggcggtctgtcggcaagtcaaataagcttggctgtcgttttacggcggaaatgcgcgtagcgctgatttgcgatatgaatttctgggcgctgatttgccgctctaatcgtcagaatgtgattaaggactaa

SEQ ID NO: 159426 - DNA, 273 bp, Enterobacter cloacae
atggtgagcaaactcaaacagcggcgcttgcgccgcctcaaggccgatttagcctggtggatggcagaagcgcaggactggaaagatatcgcgctggagcatgcagcggagatagacaggctcaagaagttggttattcgcgtgccaatgccggtggtggtgccggcggatatcatccagggaattaacgtgaagggcgcgtttgcgatgggaatcgaacgctatggtgatgcgatgctgaagttggcgaaaaaggagaaaggcaatggctaa

SEQ ID NO: 159427 - DNA, 267 bp, Enterobacter cloacae
atgagcgaatcagcacaaatgccgcgctatcagtgccacaaaaaagtgtgggcgttaaaactagccgatgtaaaggtatacaacgacatggagggaaaacatttcgctttatatccggaggataaaaattatgcaccattcttcgtcgacaaagagtggttcagaaagcacaatccagagactggcggttactatgtggtttatgaagatggctataaatcatatagcccggcagaggcattcgaatctggctacacgctaatttaa

SEQ ID NO: 159428 - DNA, 2274 bp, Enterobacter cloacae
atgacggtatcaaccgtagttgaccataacgattacaccgggaacggcgttactacgtcattcccgtacaccttccgcattttcaagaaaacagacctgaaagtctcagtgattgatctgagcgaaaacatcacggtgctggtgctggacaccgattatacggtgacaaatgcaggtggttataacggcggcagcgtggtgctcaccacaccactggcaacaggatggaaaatcactgttgcgcgggaactggcggccacgcaggaaactgacctgaggaatcagggtaagttttttgcagaggtgcatgaggatgcatttgataagctgacaatgcttatccaacaggtctggacaatgttcagcctcgcgctacgcaagccgaccagcattgctaactggtatgatgcgctgaataattacatccggaacctgaaagacccacgtgacccgcaggacgcagcaacgaagaactacgttgacacactttcgaccaccaatattggccgtactctccgcgttcctgagcagatacctcaactccctaacgccgctgacagggcaaataaaatgcccgcatttgacaatcttggaaacccgatcgttgtcattcctccatcaggttctgcatcagacgttctgattgagcttgcaaaacccactggggccggacttgtcggtacttcatccggcggaaccgttcaggcagatatcgacaagattaataagcagaacgattcctttgcttacatagaggattatgccaaccttgtagttggtgatgactggaccgctgctgtgcaggcttcctttgatactggcaaggaagttatcggtattaaaggaaaacagtacaaagtaaccagtattattaattccaaaggtcaaagaatatcaggtgaatttattattaatacaactagatattcactagggaatgtcttggcttcatctgaaacacaggttagctattcagaaaagctaagaatatgctacgtagagtcagcctatgatttagccgagttactttacataaaatctctgggatttaatgcgattaaccactactgctactttgataacaatggtactactgactccgcgggtacagtgaccaaactacttaataatgcttacacagcgggtttaggtgtttttctcggtacagagagtacagctgcaacaacagaccttacgacatttattacgaacactactgatcatgctgctgtacttgggtacgctgtttatgatgaacctggggcacgcggtatttctgttgctgatcaggaatccaaaattaccaccatgcgggcagcaacgtccaaaagccttattatggtagaccaaatccctgtcggagcaggtccctttgaacagtgttactcaactaaatatgacatagtcctatgtaactcatactcattagcacagcctggggttactactgacgaggcagtagaagaggatttgatacgtatgcgcttagattatggtggcttaatgcagatgcttaatactacgcgtgttatccctgtggtagcagccttctctggtacaaactttggttccgtagagcagatgcaaaaagcgggtgatatcttcgggcaagctggcaatggtgaatttggtgcttttgtatgggatggtgtcggtgatgccggaatcacagcaagaatacgagatacacaagggtttagggacctggtaaaaggtctagctgcgaaaacctatgttaaaccactcgttactgaggcttatctatttggtggtgggagtacatcaggaactcattggagtttaggtggtttactccaaaaggctatgcctaaagaccagaatagtgatgatggtttgatcacccataatgcgtggcctacccgtataattacggcttctgctgatagtgatcacacaaccacccaggcatctgtaaaagtatccggcatagcatttaagggcgcatcgtccgcattagcaacgacgataagataccgaaaaggatttagtgcatgggtacaaatgatagcattaaatggtggggtgtctataaatggctcagtgctgatgggtgcaactgaagatggttattttgagcaggatgttaccaatacgccaattacctctgcagcgccattcaaattcgggatgaaaaatgctgtggcggcaccaattaaaggcaaaatgtcaacgattctgtttgtgttcccagccagcacaacaacaatatacagaaatctcatgagaggtttatttgtttatgctgactggtaa

SEQ ID NO: 159429 - DNA, 1911 bp, Enterobacter cloacae
atgaatataaaatatagacccgaaatagacggattgagagcgatagcagttttactggtcgtgatatatcatgccttcccttctatcatacctggtggttttataggtgtagatatattcttcgttatatcaggtttcttaatcacatcaattctaaaggcggagatttccacaggtaaatattctataaaagaattttaccgcaggcgcattgataggcttttccccgcactgcttatagtaatgttctctgtttacatctttggatggtttacgcttttttctgacgagtttatgcagctaggaaaacaactcgcaggtggcgcaggattcatagcaaacatagtcttatacagtgagacgggttattttaatgccacgtccgcaaccaagccattcctgcacttatggtctcttggtatagaagaacaattctatcttttattcccaatcattctttacttctcttataaaagaaagcttaacctagttttggtggtgttcgttctagctgtagtttcattctcccttaatatttttagcataaaagaaaatatcgagaggaccttctatctacctcagtaccgacattgggagttgttgctgggtgctgtacttgctttacaattacacggagagaaaggtaagcaaccgaataagttgttggctgctactttaactgttctgtctgtgtcaatcatactcataactgcatttctattaacatcatctgtgccgttccctggatggtatgcattacttcctgtggtagcgtctgtctttcttatattcggcttgcaacgtgatggactagttaaatcaatcctttcctctaagccatttgttttcgttgggttaataagctatccactttatctatggcactggccacttttctctcttgctcacattattaatggcagtacaccaccagatgaaattatgttgggtctgctggttgcatcgttcgtgcttgcaattttaacttactggcttgttgaaagacctttaaaacgagtcaaatcatggaaagtaaaaacaattccaatgcttgtattgatggcaatgattggaattgcaggttacattacatttgtaatgaaagggattgataccaggtcgaatattgaagcaagcaaggaggttagcagacagctcaatggtgccttgtggcaatacagcaaaaacgacaactgcatatctagatttaaaactcatctggctaccgatttaccctggtggttctgctcgcttaaacgcaacgccgatccggatgttttattgcttggcaatagttatgctaaccacttgtacccaggcattgcattcaataagaatttgaaagatttaaacgttttgtcaattggaatttcagatgttacatctcaggtcttatcgcctgatgataaaaaccaatatgaccagttaatgtttataaatgacattatcaaaaacaatgcatccatcaaatatatcataattagtggaattgaccctaaggctgatgatagatacattgatggcctccttaaaaggatgcaaacagtaacatctcatagtgcgaaagttgttattttctatccacatgttagactcgccgatgacatcaaggcttgtttttcaagacctctgaaaagccctcaaagctcatgcgagtctgatttagcagaattaaatgatattagaaagcatatggattacttaaagggaagggtatccaagttttatcctgatactctgtactttgatgttaacaaggcattctgtgatgaaacaaaatgcacttcagtgaaaaacggactcccaatgtacagggatgagtacaaacatttctctgaatatggtagctatcaggtcggaaatgcgttctcatcttgggctaagcaacacatgccagatattgtgagataa

SEQ ID NO: 159430 - DNA, 267 bp, Enterobacter cloacae
atgctggtaggggcgctgttcctcgtcgtgcatatggtgctgggcaatattctcgaaccgcgcatgatgggtcaccgtctgggcatgtcgacgatggtggtgtttttatcgttactgatctggggatggctgctgggaccggtgggcatgctgctctccgtgccgctcaccagcgtctgtaaaatctggatggaaaccacgaaaggaggcagtaaactcgccattctgctgggtccgggtcggccaaaaagccgtttgccgggataa

SEQ ID NO: 159431 - DNA, 546 bp, Enterobacter cloacae
atgaagtcgatacagtgcggtatatgcggtaaaccagttgaacaaaacgttttgtaccaacacctggtgaataaccaccgctggaaggaaatagtctcacctgtggctgcagcatccaaacctgcccctcagaacctaccgcaaccaaagcaaacccgctgtccagactgtaatatgttgtttgagtccaaagcgtcatacaggcggcatcgcaattcatgccagcgcgtcaatgcagcctacagcaaagaaaccgtatctacgtccagcacgccatcagttgcaagaatctgtccctactgtgatgctttaatttcccctaagaagttcgacaagcatgttcgttcaaagtgccctaaaagaaaaacagtccggcaggtcagcaaaatcgatagtgagttttgtaccgatcctgcaattaagaagtacctggaacagcaccctgaaccatcgaaaatagggaaatttggcgttccgcaggcgaaatttaaatacagcacctatggaagaagcggcatggagtacgacacctggggtaagagctga

SEQ ID NO: 159432 - DNA, 1185 bp, Enterobacter cloacae
atgaaaaaaccaacttacaataaaagtgatcgactgcaagtacgcaaaaataatcctcatacgcctgaagcaaaggagcgggtgattgatgggctacgagcctctgctacagctgatttcgtttttattgttcgttggttaactgctggaaaatctaacggtgaaccaataccactggcaagatgcgacaatcttcgtaacatcatcagcaatcttgagacgctaaaagccggtatccaacccgactggcgtaaagcgcttacattgatgtctcaagaagtacattcaagacacaaggttactaatacagcaaaaccgccatcaaaaatcgcagttggggtaatcagcaatttgaatgaaattagccagaaaattgcatcaggtaaagccacgcatgacatgcctgccagactcaattacatgctacagcttactacgagtctggaaggcggcgacgaactggccgatagtatcagagaagttacaaaaagtgccgaaatggctttacgtggttattccaaatcaccgcagaaacaaaaaatattaaaacacacccagctcccaatagtactacgtgacgataaagctttccgggatgaatgtgcacatctggcaggtatcagtgatattattatcgtagcaaattgtctcattgctatgtcagcacggctaggggtttctcctgtcaaccttgcaaacagagccgcagccttaaaaaatgttatcaagccggagatactccccgaacttctggatttgcttcagcaggatgttgatataactgccttagttccccctccaaaggtcaaagatgataatagtcgcagcgatggcggaaaacttgtaggactgacgggaatagttgaaggaggcgcatctattggcgttgaagctcagcggattatcacagcagaactgaagaaacacatccctctcacagctgttcaacgaattgctctcgatactgcgcgtacgagtcttgcactggaatgtgacgcattcaacgttatcgaagaaatcaaacacatctcagctaaccttaacttgaggcctttgactgttgctacctatgcagctcataaatcgccaggaatcagatcagatattgctggggatgtaattactttgcttgctcaggatgaggttctttcatctaatgatcgtcgcagtaacggaacatcttaa

SEQ ID NO: 159433 - DNA, 315 bp, Enterobacter cloacae
gtgaccttacctttcgttatccagaacgggcaggtgtttatccgggaaaccttcattcaggacggcaccatcggcaacaccaaaataggaaactacattcagtcttcaacatgggacggcaccggaaatgttggctggcacatcaacaagtctggctacgcgacgttcaataatgtgaccgttcgtggctcgatttacgccacaaacggtaatttttctttcaatggctccggcaacacaacggtgattaatggtaatggcgtaaccattaatattccgggtggcggccgcatcgtactggggacgtggacatag

SEQ ID NO: 159434 - DNA, 921 bp, Enterobacter cloacae; identical to SEQ ID NO: 150331

SEQ ID NO: 159435 - DNA, 1137 bp, Enterobacter cloacae
atgtcagcgatggatttcaaaaaacatacggatctcaactttcctcactatgctcccccggcggtcagcgctaaagaaatagatcttctgggtctgctggacgtcctgctggcagcaaaaaaacgcatcatcaccattgtctttgcatttgcactggtcggcctggcaatcgcctttctgataccgcaaaaatggaccagtaaagcggtcattacgcccgcggaacagacgcagtggagttcgctacgccagatgatggtggcgctccaggtgcttgatgtcgacgtgaaaattacccgtgcggatgtgtttaatctgtttatcaaaaagtttcagtcccagtctctgcttgaagagtacatgaagaactcaccctacgtgatggctcagctcgatggcgctgaggttgacccgctggagctgcaccgcgcggtggtcaatattgccgaaaagatgaaggctgttgataacacgcaggaaaaaaacgctgataaagcaccgtacctctcctggacgttaagcttcactgccccaacggcagaggacgcgcagaaagtgttgaatggttacattcagtacatctcccgcatcgtcgagcaggagaccatgcaaaacattcgcgatcagctgatcctgagaaccaaaacggttcagcagcagctggagctggatcgggtccgcctgaccaatatccacaataccaacctgcaacgcctgaactactcgctggaagtggcgaacgcggcagggatcaaaaagccggtctacagcaatggacaggcggtgaaagacgatccggattattccgttgccctcggtgcggacgggattgcgcagaaattgcagattgaaaaaaatctcaaggacgtttctgagctgaacgccgatttccagaaccgcgaatactatctggcacagctgcaaaaactttccttcgaagatgtgagcctggagccgttcaaataccagctctctccttctatgccggtgaaaaaagatggcccgggcaaagccctgattgtgctgctggcgtgtattctgggtggactgttcgcctgtggcagcgtgctgctgcgcgaggctatgagcacccgcaacccgctgccggaacaacttcctgagccggttacggaataa

SEQ ID NO: 159436 - DNA, 321 bp, Enterobacter cloacae
  misc_feature (277)..(286): n is a, c, g, or t
atgacaaagtcacctgaagctgtcacttctcaggttaaagcaaaggatcccgaagagttcgctgaaaaattcagtggtaacctcttctatatgtcgttcatggatattgataagggaacgatgaacatcggaggggtaacggagttatccggttataaactggcagaacaacttatgtctctcgtaggtactgtcattatcaactgggatagcaaaggcgaaaaagcgggaatggaagtccgcccgtctaccatgactgtcacggattacatcatgnnnnnnnnnntacatcatggggccaccagctggcggatcaattaa

SEQ ID NO: 159437 - DNA, 510 bp, Enterobacter cloacae
atgtccggtgcactcaacgcttcgcattttagccgggcgatccctcaggcattcgctgccgagattgaaagggttgataccgaactctcagcttccagggctgtttcttatcagcatgaaggcctgctttatggcgaaggcgggaagttactgatgtcccagagaggtgggcacttacatcagatgacgtttcctacactgaaaaaagcgatgagcatggctaaacgaggcgggcaaaaactggtatctcttggaaacggtttttattgcatgaatggccatgactgcgagtttaaggcggttgttcagtcagcgtcctgcaatccgggatgtgagaacatgctggccggagctgattctgttcccgtgtggaaacgcaggatggctcattatgacaaccttctggagattgccgtgcgaaataatgctcctcaggctgacagggattttctgatgcttgagagagatttttatgcagatgctgtccgcttttttgaaaaggatgaatag

SEQ ID NO: 159438 - DNA, 195 bp, Enterobacter cloacae; identical to SEQ ID NO: 36234

SEQ ID NO: 159439 - DNA, 354 bp, Enterobacter cloacae
atgaccgatatccagctcagtggtgaattactgcctcatctgccgcgattcacggcagccgttactgcgtcgccatgcacctggcgcctgaccgtactgacgcttaaagctgcggttgaaggactgctgagagtcaaagcccagcgcgatcgccacgttcagaatcggttcatcgctgtgggccaggcgctcaaccgatttttgcagcttttgcgcgcgaatatattcggcgagaggggagccggtatgttccttgaaaagccgctggaggtgccatttcgaatagccggctcgcctggagacggtttcaatatccagacggctatcgaggttgttgtcgatccagtcgagtaa

SEQ ID NO: 159440 - DNA, 852 bp, Enterobacter cloacae
  misc_feature (822)..(831): n is a, c, g, or t
atgactgggaacgataagcttaaagcagatctgcttaatggttatcagttggactactacgacagaagtatgcataagcctttaaaacctgatcatgataaccttatgttgagggattttcaggtatggatctcgctatcgattcctttacagtctgcccttcctaccgagctggaacattcgcgtatcgattcactttactctgaacttgtaagtaagttaattacgattggattgcatccgtttaaggtcgatgcagaaaactggctctattgtatagataaggtcgtaaaccccggaaagaactcccggtgggctgaaggtttcatagacgttaacactatgaaaaggcttaatgaacaagttaacgttcccggccgtaagtatacagtcacagaaaatcatttctcatcagtcacacaaagtgacgacgaatctgagcatcgttacttcaaacaactttccgttgtaaagtttcctgaatacgtcaatttcggttgtatgtatgagttagtagttaactggatgcatggacgtaagacaattttcagcccatttatgatcactcagactgttcagtttgccgatccgctcaagttgtcaaaagaaaacgtccgctacaaagcaatcactaataaacaggcaagtataccttcagttgtcacattctgccctcgcctgcgggatatggataatgactacatggccgtaactcgcgagcttgaggatggcgcaaagcttttaagagggtatcttactttcactgttatgggtagtaatgccaattctgtgcagacagcagctaacgatctcaaatccttnnnnnnnnnnaaagacaattttcgaccttga

SEQ ID NO: 159441 - DNA, 216 bp, Enterobacter cloacae; identical to SEQ ID NO: 142298

SEQ ID NO: 159442 - DNA, 492 bp, Enterobacter cloacae; identical to SEQ ID NO: 131575

SEQ ID NO: 159443 - DNA, 216 bp, Enterobacter cloacae
atgacagagctggaaaagcagttgctgagcgtattagagcagctacagcaggactactcgcaaaggctggacgaatgggagagcgccttcgcggaatggcggagcatgtgtggtcttatgcaacgggagaacgcggtgctgaacgagcgcgtgtcggacttgagcacgcaggtgctgagtttaagcgagcagctgcgccgcttgtccgggaactga

SEQ ID NO: 159444 - DNA, 492 bp, Enterobacter cloacae; identical to SEQ ID NO: 156123

SEQ ID NO: 159445 - DNA, 216 bp, Enterobacter cloacae; identical to SEQ ID NO: 142298

SEQ ID NO: 159446 - DNA, 492 bp, Enterobacter cloacae; identical to SEQ ID NO: 131575

SEQ ID NO: 159447 - DNA, 492 bp, Enterobacter cloacae; identical to SEQ ID NO: 131575

SEQ ID NO: 159448 - DNA, 216 bp, Enterobacter cloacae; identical to SEQ ID NO: 142298

SEQ ID NO: 159449 - DNA, 453 bp, Enterobacter cloacae; identical to SEQ ID NO: 127216

SEQ ID NO: 159450 - DNA, 216 bp, Enterobacter cloacae; identical to SEQ ID NO: 142298

SEQ ID NO: 159451 - DNA, 492 bp, Enterobacter cloacae; identical to SEQ ID NO: 131575

SEQ ID NO: 159452 - DNA, 231 bp, Enterobacter cloacae
gtgcagcttatagaaccactcggcggtcttgcgcttcagtctgccatctgtagagcgatcagagcgtttagccagaaccatatcagcgcctgcctgccatttctcaataagatgaggaatgacttcgatggggtcctgcaagtctacgtcaatcgggatgatcgcttcaccggtcgcgtggtcaagaccggcgaaaagggctggctctttaccaaaattgcgagtgaatga

SEQ ID NO: 159453 - DNA, 195 bp, Enterobacter cloacae
atgttttcgaaccccgtctttcatcgctttcagtcccgcctcaacattaaacggagctatctcaggcaaattgtgcttaagcccggaaattgcgtggaattgctcctcaacagctctgtctttacgataggttgtcatggctgtagtgcttcctcgaacatggccgacaagttgggcgatcatccgttcacttaa

SEQ ID NO: 159454 - DNA, 2058 bp, Enterobacter cloacae; identical to SEQ ID NO: 32296

SEQ ID NO: 159455 - DNA, 1047 bp, Enterobacter cloacae; identical to SEQ ID NO: 30071

SEQ ID NO: 159456 - DNA, 843 bp, Enterobacter cloacae
  misc_feature (804)..(813): n is a, c, g, or t
atgaaacttagaaaaacgatagcttcaactattattgcatcaatgattgccaatactatgagttgggctttttatatctctctcataaatatggtaatgactcctcgtatttatgcggcagacgctatatttgaccagctcgaaagtaactttaatcttgctaatcctaacgcaaatcgcaatgcgacaaccagtgctcaggacattgttgagaagtacaagaatgcggattcaggcgagaatgtcagtgggaagatcaccgagaaatacgtgggtaaagccgaatccgctaatcttaatctcggaaagtatggggcagggaactcaaatgaaagtgtcatgaaaaatgccgcatccgatggaaagtccattggtagcgccgtacaactgccgagtatgtctggagggacaatcaattcaaactataccaaggaaggggcaaagctgctctctcgggatgctaatggcaacattggtataagcagtaatcccaatactactcctggaaccaaaacaaataccggagagattttcagctcagagcaaaagcacagcgatattaagttcaatgccgcagatcgttatggggatgaggatggctttgtaaacgatataaagaatcggaaaagccagttatttgatgctcaaagttatgatggcgttgcctaccgcaccctcgtaaatgctaacaaggacaacccggcatcatctataaagcctaacgatcccatgtttactgcggggagaaatgagataacaaatgctgttgctggtactggaaactggcttcagaactgtaatgtnnnnnnnnnngtaatgttgagacctctaaaaaaacagtaa

SEQ ID NO: 159457 - DNA, 579 bp, Enterobacter cloacae
atgacctatcggcttcagacaagcctgtttagtaacggaacccgaccaaggcaattcaaccccgcttcgtggaaaaatgtctaccttttccccggaacacgtatcactccgtatcgaaacttcaggacaggtaacaagtgggacaacatctcgtggcaggtctaccacaaacgcactgacaacgctcagaaactacctgtagaagagcaacgcgctcgtgttgaagtcacgttaaaaggtgctgcgctcactcactactctcttcaccgtcttagcgacatgcagcgctttcgatttgaaaccctcactcacctgttcaaatttcgcaaaccaattgaacctgaaatgatggctaacggtgatatgttccggtttaccgctatcaacgcagttcgtaaggtgaacgacgcaacagccgagcgcggattgcattctttcaataacatcggacgtagggataaacgtagctggatgatggtcaacggtgacaagcgcctgcggaaagaaagctctcatctggcagttgttaacgatctacaaaacgccgtcaagggcgctttacgtcgtctccacgtttga

SEQ ID NO: 159458 - DNA, 447 bp, Enterobacter cloacae
  misc_feature (334)..(343): n is a, c, g, or t
atgaagagtcgagaatacaaagctgccgaagcagaccgcaaatcctttaaggtttcagccgggatcgactggctggacataaaagttagtttatccaaacggacccagcatcgctacgttcaggaagaactacttagaatcacagagttaaaactctgggttgaaccttgcggcatatgtatctcaaagttgtcatcatacgcaccccgtcccgataacaacgtcaaaacgtgggtaaaacccatgattagcagcactaacgatacttttcggattcgcttccatgatctactggcaaaaaaccatggcgggatgctggaagcagtgctcgaannnnnnnnnngcaaaaacgtttcccctttgtgcatgagccgcaaatcgtgggaatcgaagttttctgcgatttctggcataaacaacggtcagtatcagcgacacgagcaatga

SEQ ID NO: 159459 - DNA, 195 bp, Enterobacter cloacae; identical to SEQ ID NO: 36234

SEQ ID NO: 159460 - DNA, 492 bp, Enterobacter cloacae; identical to SEQ ID NO: 131575

SEQ ID NO: 159461 - DNA, 618 bp, Enterobacter cloacae
atgacaacccagtatggattttttattgattccagccgctgcaccgggtgcaaaacctgcgagctggcctgcaaggattacaaagacctgaccccggacgtcagcttccggcgtatttatgaatacgcgggcggcgactggcaggaggataacggcgtctggcatcagaatgtcttcgcctattacctgtcgattgcctgcaaccactgcgaagatccggcctgcaccaaggtctgcccgagcggggcaatgcacaagcgcgacgacggttttgtggtggtgaacgaggatgtctgcatcggctgtcgctactgccacatggcctgcccgtacggcgccccgcagtacaatgccgccaaaggccatatgaccaagtgcgacggctgccacagccgcgtggcggacggcaaaaagcccatctgcgtcgagtcctgcccgctgcgcgcgctggactttggcccgattgaggagctgcgcaaaaaacacggtcagcttgctgccgttgcgccgctgccgtctgcgcacttcacgaagccgagtattgtgattaaacctaacgccaacagccgtccgacgggtgacaccaccggctacctggcaaacccgaaggaggtgtga

SEQ ID NO: 159462 - DNA, 279 bp, Enterobacter cloacae
gtgcagcttatagaaccactcagcggtcttgcgcttcagtctgccatctgtagagcgatcagagcgtttagccagaaccatatcagcgcctgcctgccatttctctatcaggtgcggaatgacttcgatagggtcctgcaagtcaacgtcaatagggataattgcttcaccggtggcgtgatcaagaccagcgaaaagcgctggttctttaccaaagttgcgagtgaacgacagtggaaccacaagcggatcggcaacagcaagcgcgttgataattga

SEQ ID NO: 159463 - DNA, 3156 bp, Enterobacter cloacae
atgagtatcatgaactactggccgtcacttgaaaatatcgagcagtgcatccgtaacgaagccgaagagttgcaggatgatgtactactagcggtacatgagccaatggtgcttacccgtcgtgatgttaacaacaatcaggtagccctccgcgacgaagacatgtttacacaactgctcaccaccgagcgggctatcccactcatcggccgttcagggatggggaaatcacatctggtgcgctggcttgactgtcgtctaaaaagccatctgcatgcaaacggcgaactggcacagtgggaaattgtccgtattccgaaaaacgccagcctgcgtcaggttctgctgctgatcctgaaaaatctgcacggtggaatttttgatgacgcgcgtaagcgtgttgatgatgtggctgaacaacactccgctaaagatctcgctgatctgatgctgaccatgatgtctcatcaattagaaagcatgtataacgaagcgatgaagatcggccaagattacgaatcgcaagggaaagagatcccggcagatcttctgaaccgactcgaagccatcattgaagaagtcgaaaacggcattggcaacctgattactgaccctaactttaagctgaatctgctcaaacaagatcattgcctctataaacgcgccagtcgaatgagcgatgggcttaaagaggaggatgaggatcacgataattacgaactggcacccgccgatctctttttccaagacaacatagatgacctgtcgtcgcttgctcgtgaatatattcgacactcgcgtattgatgaacatgataatgaaaaagcccgcattcaggctgtaagcgttctgaatgaagcgatgcatgcggcgttaaaatcactatttgccaaactctttacattcaacggcggtaacttccaggagttgttccagcagattcgccgtgagttgctcgcacaagatcgccgccttgtgatcttggtggaagatatggcagctatttcggccattgaagatgtactgattgacagtctgatcgaagaaggcatgcgtgatggagtgaaaacactatgcccggtgcattcggttattgccgttaccgataactatccgggctacaaacgccgtcaggaaacgctgatgacacgagcgggctacgagtggatcattgagcacaccgacagagacaacaacgaagggcgtattgtgtcactgtgcggtcgttatctgaatgcagcgcgccatggcgcaacggcgctgaagcagtcgcgggcgcaaaaccaggcaaattggccgactgtctggcaagacgaagaaaagccggaatggttggcggactttggtatgacagacaaacagcaagttccgctgttcccgtttaaccgcgaagctatccgtgcgctggctgataaaaactgccgtgacagcagcggccaactgacttttaacccacgaattgtgattaaccgtatcctgctggatattttgcgtgattgccgtgttgaggcagagcgcgggctatttccaccgccgaaccttgcaggaattgacgttggcacagaaatacttcacaacatcaatcagttaaccagaaacagagttaccagtgcagcgtcattgaccgcactttggagctatggctgcgactcttgggaaaaagtctgcaatcaactgccgccgggagtagcaaaagcttttggtctcactgagttggccgaacgtattaacggtaaaatttctgccccaccagcaggaggcaacgatgatgaaaaacttaacaaaccaaccggtattacagttcctgaacctaaacctgaaccgaaatctgagctagctttcatcaaacatctcaaagcctgggtcgatgaaaaaaccgttttacctcaattaattgccagtgatctgcgcgcaggacttaacaattgctatgaactctatgcccaagtggaattttccagtatggcagagcgaccttcactgattgagcgtaatcctttgattagcctgccactggcggcctcagatccctcgaacgctattgtgaaattctatgaactcaaagacctcaacgatccgctacgcaggatagagatctacaacgtgtcgctggcgattttgcgtatccagcattacgccaacttaagcgaagggcttagctaccctgaagctatggaagactacgcccactatgaaaactttgccagttggtgggtgccgcagaccgcggagattgcaatcaaccatgcccgggcgcggaaactgaagcctgcgctgcgtaatcattaccaaaaagcgctgctgttgggcctgttgactggcaaagaaaatccgacggagctcattgatgcactttgcctgacgcagaaaggcgtcggtcgaactgagggtaagaatcaaggacgaacaatcaaaacaagcccatccgatctctgtttctacggactcgaggccaaccagaaaccacattccagcataaaagtggctgaagcccggcaggcagcacttcaggggtgggacgacgcccgcgacgcatggctttctctggttgccgtccctgaattaagttccgggctcacctcagtccgagcacttgaagccgaagtggtaacctccgcgttgcgagagatccagaaggaaccgcttggagcggatgtgcagcgtgcggcagagacagcccgcaaagagatcgcatcaactatcgaaaatgcacaactctttgaaaatataaaaaatcaggatgacttcattgcccttctcgatgagtggcagatgtttatcgaagcggtacgcacccaatattacccttcggaatccgagcagatcagaaactcatcatggttgctgggtgaaattgaagcattaagagtagacgcagaggccagcctgaacacgctgctcacgcttaattccctcgtcagacagaaagatgccttcatgctgtggcatgacatttcccatctggatggtgattacgtcagccgtatcggtaaccttcttgcgcaatggcagaatattcaatcgaaaatcagctttacgctacagcagataaacagtaagggtgacgcaccgaaactgaaaaatgcctgcacgctagtagaagagcgactgaaaaatctggcggctgatatcagcgcctctggagtgaatgaatga

SEQ ID NO: 159464 - DNA, 168 bp, Enterobacter cloacae
atgccctttagcggtagctgggaaagctacagcgcgtttaacaagattggcttcgttaaggcgatggtaaataaacgcctgacgttgcgcgacggtatttacctgatgaaagttaatgcgtacagcgatgagcgtgtcgattttgatgttttcatccccatcctgtaa

SEQ ID NO: 159465 - DNA, 309 bp, Enterobacter cloacae
atgccacgtacagcagacatacacgccgccttcattgcggtaacagatccactctcttcttcttcggccagaatagttgaaatacagggaggttatgatgtcgttgagggctcaaccctgtttaagcgcggagacactttgctcatctggttttgcggacgccagcagcttgcatactgggccggtgacgcgctcattactgatgatggtgaagccattgaaggcgaggcgcttgatgatgttcgcctggtaggtgtagttacgcataccattcgcccagttgtttcagacgaaaatcccttcatgtag

SEQ ID NO: 159466 - DNA, 330 bp, Enterobacter cloacae
atgaagaagttaactttagcattgcttgcagtggtttcttttggcgtcgtcgcgacggaagaaatgagaattccaaccgataccaaagccacttatacagtcctcgataaagacattaatggaagtatggcgaccatagtcacaaaaagagtgggaccttccgggaccatttttacaaagcgcctttatgattgctcatcgtggaccgtgaaatatttaggtgagggtgagtctcttgagcagatgaagtcatcaaaatctgattcaagaatggcgaatatagttgaaggctcaatagcagattacataggccgaaaggcctgtcagtga

SEQ ID NO: 159467 - DNA, 522 bp, Enterobacter cloacae
atggctttaaatggaacgttgatacttaacggagccgactatgcgccatttaatctgtatggagtcggcgtgtttatggcgcactccggccagggtacctatcgaaataatagcgcttgtggtggagttagagactcaggccctattccgcttggtaaatactggattgttgatcgtggcactggtggatttttttcttcattaaaagcaaaagcacaagatcaatggaacaaagtaaggtcgggagcagaatacggccgtgatgagtggtttgcgttatacagggatgacttcggtatagacgatggtacatgggttgatcacgtacatcgaggtttattcaggcttcacccggtaacaatctccgaggaatgcatcactatcgctcataactccgattacgggatgataagagatgcattgatggccacaacgctaatgcaagttccctgcatgcgttctcttatggcgcggggatggatcgaggtgattgacggtggctataccaatacctgcccgtaa

SEQ ID NO: 159468 - DNA, 837 bp, Enterobacter cloacae
atgaaagtattaagtttagttaatatgaaaggtggcgttgctaaaacaactttggccgttaatttagctgatgttcttaataggcgagaggaaaaaagagtccttcttattgatattgatcctcaatttaatgcaacgcaatgcatcatggatggcaacgcttataaagaatatttgcaaaaacaaggtaatacagtacttgatgtttttaatgatgcacctctgagtttagtcagttccgttaatggtacaacgacaataccacccaaggaagtagaggaactggtacctgttaatattagaaaaggatttgatctattacctggtgctttagaattgcatcgattagaaatggggtctggccagggtaaagagatgcgtttaaggaactatattaattatttacgtgaaaaagagctttatgattgggttattatagatacacctcctacaccatccgcttggatgtctgctgcattaattgcatcagatttctatttaacacccgtacgacctgaaccattatcagccacaggtattgatttattaagagtagtcgttaacagtataacatcaaattatggattaaaactttcatgtttaggtgtagtacttaccatggctgaagaaaatactattgtatattcagatgcagtgaattttattgataataatacttattggaaaggaaaacgaattgctcgatctttacctaaaagaacagcaattgctagagggcaagggaatcagtcattcattttagatcttgatgatcatgatttaaatgtttcaatgtcaagaatcacaagtgaaataatgtctagagcgggggcttaa

SEQ ID NO: 159469 - DNA, 495 bp, Enterobacter cloacae
atgttaaagaaaaatgaaataacaaaaatgaaaaaactcattgaagaactttcttggattatgactgagtactcttcaatggatctaatgaaaatttataatgccctagactcttcaaatgttatagctaatggtatttcagaaactatcggatataaacctgaaaatcctaacaaacatttcctcactggcgctttacctgcattatttttagatcttaatttatttaagacaaatgacgaaattgcattgttttctgaacagattatcggagtgaagattccaagatatcataaaaaatctaagtatgagattattggacatatcgtttgtgaagcaaattcattagacgataatgggctgaaaaaaatcgtaaaagcacttgagaagattgtatctgatgaagcgagtaaaaaatcgatttataataaaaagaatagttcatcttctttcagttggaatgaagtgatccaagctctgaatgaggatctctga

SEQ ID NO: 159470 - DNA, 708 bp, Enterobacter cloacae
atgagagaaatcaatagagattttattgagttacaaaaattcatcagtgaatataaggttctaaatttagaaccaggtacagaattcaatgaggctttgaagaggatgcataaaagatactttgcttttcttgcattgcatcatgaattattagtagaggatggttataccgcaaatcttccgaaggagcaaagtgaaatctttaaatttaggattggtgaagtattatctgaactaggtacaatattattcctttctgtgcatggttgctataaagcagcaaagcttgtaatgagaagcagtatagaaaatttttctaaggcagtaggctgtttagtagatattgagattgtaaatgaaactagtgtttacaaagttattgaaactgcgctttcacataatgtttttttaaaaaaggccgttctagaaaaaaactacctatatgagaagtactctatgctatgcgaagatgtgcacactgcatcaataaaaaatatgcaaagaattgaatgtgttggtaattttccaatatccgattttcaagcattcaattttttagcagattcatttataaaactaataaatgttttaacgtctatactaataaaaatagagccaaatattttccacaaagctcatcattcgcgcaaagatcttatatcattaattctttctaatgaagataaaaggcttattcatcagctctaa

SEQ ID NO: 159471 - DNA, 312 bp, Enterobacter cloacae
atgaaggaattacgtttttatggtgcaagcgatgaccttttcgaatgtgaaggcgctattcgcgaggaaattggctgctttaacaagcctgccatatatcacctgaaatctgctgagggtgaaatgcaagtagtcggctattacctcgactccgggttgtggagcgtgggtgtcagccaaattgccgaagacgtgccgctgccagcatggccagtgcaatatcaggtgtatgagcatggatatagcccattgctcacccttcacgttcctgatgacacagccttagttcaagatgatgaagaagacgactga

SEQ ID NO: 159472 - DNA, 195 bp, Enterobacter cloacae
atgcagcatgaatcttacgccagttattggattgccattatcatcaaaagccttgagatccagcttaaaccagatcggagtgcggccctcgctaccattccaagtaacaccattaaaggttacttttttgggacgagaaatggcctgatcaacctctttctgagtaggcttaaagtcaccttatttagccactga

SEQ ID NO: 159473 - DNA, 315 bp, Enterobacter cloacae
atggcggaatatggtgttcagacatgggatgcctcaggcaaggtcaataactatggcgttaagcctgtcagcgtttgtggctatctccagctggcccagaaccagaaaacaggctcttactccgtagcgcttccaccgggttgcaggcttacctgttttcaggtcatgaacggtgatcagtttggaacgagtcggaggaagatcaccatttcagggggaaccgcaacagtgacagcagcaggcgataccgactactcagcagggactgagcctgcggcagcggcttatcttattttccagatcgagagggcataa

SEQ ID NO: 159474 - DNA, 2292 bp, Enterobacter cloacae
atggaacctgtattcgagcaggcgctggtggcgcggtacggcttcaatcagctggaaatgacagccatcggctgtaccagacagtcagaagcgaaccgaaaggggcgctggggtattctcaccaacaacaaggatcgcgttgtttcgtttgatgtcgggctggacggaaacataccccagcctggctatatcatcgctgtggcagacgagctgctttccggaaaggttatgggcggccgcatcagcgccgttaacggtcgcgttatcaaacttgaccgtgtagctgatgcagcagcaggtgatcgccttatcctcaaccttccctccggagcgtcacagagcaggaccattcagtcggttaacggggaatcggtcacagtcaccaccgcgtacagtgagacgcctcaggccgaagctgtctgggtggttgagtcaaccgaactgtacgcacagcagtaccgtgttgttagcgtcactgataacgatgatggcactttcaccattaccggtgcatggcacgatccggataaatatgcccgaatcgataccggagccatcattgaacagcggccggtgagcgtgatcccaccgggaaatcaatcaccgccagacaacatcgtaatcagttcgttttcggtggtgcagcagaatatcagcgtcgaaaccatgcgcgtgagctgggaccaggcgcagaacgctatcgcctatgaagcgcaatggcgccgcaacgacgggaactgggttaatgtgccgcgcagctccaccacgtcattcgacgttcctgggatttatgccgggcgctatctggtacgtgtacgcgccatcaatgccgcagaaatttcatccgggtggggatattcggaagagaaaacgctgacgggtaaagtgggcaatccgccgaaaccggtcggcttcatcgcttccgataatgtggtattcggtatcgagctgagctggggattcccggcgaacaccgacgacacgctgaagacggaaattcagtacagtctgaccgggacggaagacgatgcgatgctgctggcagacgtaccctatccgcagcgcaagtatcagcagatgggccttaaggcagggcagactttctggtaccgggcgcagctggtagatcgaagcggaaacgaatcagggtatacagactttgtgcgcgggcaggccagcatcgatgtatccgatatcaccgatgcaatcctggaggacatgaaaggctccgatacgttcaaagacctgatcgagaacgcggtggacagcaatgaaaaaattgctggcatggctgacgatatcaaacaggccaacgacgaactggcgcaacaggcgcaggaaatcgccaaaaacgcccaggatatcgggaaagttcagaccagcgttacaaacctgtcgagcaaggtcggagatgtgtcttcttctttgagcgagcttgagcagacagtggcaacggctgataccgcgctgggccagcgtatcgacagcataagcgtgtctgtggacggtatgacgggaggagtgaagaactccgccatcgcgattattcagggcaacctggcgcaggtggcggcgcgcaaaacactgtctgcgtcggtcgccggtaacagcgcgcagctggaccgcattgatgaggtgatcgtcaacgagaaggaggcaacggcgcgttcgctgctgagtttgcagactgacgtgaacggcaacaaggcatccatcaacagcctgaaccagacgttctccgattaccagcaggccacggccacgcagataaacggcatcacagcgaccatcaacgggcatacgtcagccattaccactaacgctcaggccatcgcgaacgttaacggggacctgaaggcgatgtacagcatcaaggtcgggttatccagcaatggtcagctttacgcggcagggatggggatcggcgtggagaatacgccatctggcatgcagtcgcaggttatcttcctggctgaccgcttcgccgttactcaccaggccggagccacagtgatccttccgttcgttatccagaacgggcaggtaattatcagggatacggtaataggtgatgccactatcacgcgagcgaaacttgctgaaactatcagctcggttaactacgttcagaaccaggctggcctgtccataaactttagaaccggcacgcttgagaactacggttcaaccgcgggagaaggggcgatgaagcagactaatcaaacgatcagtgtcaaggatgccaacaatgtgttgagggtgcagatcgggagaatcacgggcacatggtaa

SEQ ID NO: 159475 - DNA, 435 bp, Enterobacter cloacae
atgctcaataaagaacggcattatgcaattttgacctggcttaacaggtacgaacgggcgacggtgaatcagcttgcgaaagtatttaacgtcaccagggaaacgattcgcagcgacctgaacttattagcgcaggaaggcggcattgagcgatgccacggtggggcaattatcaaacgccgtatttttcatacccaatcagtcaataatttagatagcaatatcattcatttttttgactccgcgcagtcaagaaaaacgatcaaatcccgacataaagggcgaaagatgaaaggtaaagtctgtattctgggttcattcaacgttgatattattgctaagtcgatcgttttccgcaaagcggagaatctattttctccgaaaatacgattattggacccggcggcaaaggcgcaaatcaggcgctggccgtaa

SEQ ID NO: 159476 - DNA, 666 bp, Enterobacter cloacae
ttgctttttgaatcaacaacttgttcgtttaccagtagttaccgcccttatctttcctccggccccgcttcccggtggtacaaaataggcattatgataaagcctaccaaagaccgaaacggcacctactatatccgcaaagcggttcctcaggagctacgcccagctatcggcaaaggcgaactaaaacattctcttgagacgaaaaaccttgaacaagccaaactcaaagcccctgccgctctggctgaaatcaacgcgattatccagaacgcccgagcagagcgaaccgtaacgcaggacgacacagaagtgatcgcttcagtatggatgaccagaatcctacagcaaccggaaatcatcaaagcacgttatgtacggcaatacaattatggctatggtctgaccgctgataacgagcagttaagtgaatgtctgcggaagggtgagtatgcatcgaggcagatttccagcttgacacccaacttatgcagtcggaactcgaagaggcccttcggtggacaactgccgagcttacaccagcgtggaggcaaaaactcgcgtggcatcttgcagaacacaggctcagtgctgcggaaatgtacatcaccaatgaactccctgtgtacaccgcaatcactgctacacagaaaaagaaaagtctga

SEQ ID NO: 159477 - DNA, 768 bp, Enterobacter cloacae
gtgcagcgtcgacatcaccaggtgaccggtcagcgacgcctgcaccgcaatctgggcggtctcaccgtcgcgaatttccccgatcatcaccacgtccgggtcctgacgcagaatggcgcgcagcccgcgggcaaaggtcatgtccacgcgcgggttaacctgcgtctgccccaccccttccagctcgtactcaatcggatcttccacggtcagaatgttgcgttcgtggccgttcagcgccgaaagaatggcgtacagcgtggtacttttaccggaacccgtcgggccggtaacgaggatgatcccgtgcgggcggtcgatcagccctttcagcttctccagttcttcatcaatcagccccagcttgttgatgtcgggcttgagattgcttttatcgagcaggcgcatcaccacgcgctcgccgtactgggacggaatggtcgagacgcgcacgtcgatggccttgcgaccgatgcgcagggagatacggccatcctgcgggaggcgtttctcggcgatgtcgagtttcgacatcaccttgatacgcgacaccagcagcggggcgagcttacgcgccggttgcagcaccgggcgcagcacgccgtcaacgcgaaagcgaatgctcagggtgcgctcgaaggtttcgatatgaatatccgacgcgccgtccttcaccgcctcgccgagaatggcgttgatcaggcggatcaccggcgagttttcgtcgttatcgagcagatcttcgttatccgggatctcctcggttaa

SEQ ID NO: 159478 - DNA, 198 bp, Enterobacter cloacae
atggataccttgaccaatgcagatattgaagcgctaaacaggctcccttccggctggttcagggctgagcaccttccgttcaatcgtccaatgtatcgctgcgaacggcttgagcagcgcggaaaattgcagcgccgggtgttgggtgattacccaaatatctggtctgaatacaaacgcattgatggtgaggactaa

SEQ ID NO: 159479 - DNA, 153 bp, Enterobacter cloacae
atgagcagatcacccaaagaaatgtatgtggttccagagtggatgcgttcgctcctgccgttattccataacacagggggtaacgacgttgaggagctgctgcacgatgaagacaccaatatgtttgccaactgtgttcgccgcagccggtaa

SEQ ID NO: 159480 - DNA, 609 bp, Enterobacter cloacae
atgattaagggtatgaaaacacgaggcgaacgactgaaagcacgccgtttagagctgaaactgacgctgaagcaagtggcagaagctgtaggaatctctcttccgggcgtccaaaacttagaacgtggcgacgtaatgccgtcgctggaaatcgggctgtcgctggcaaagtgcctgcgtaagcccgtgcaatggatactgtatggcactgaatctgatccagaccgcgttcctgttattggcacgacagagagtggtccggatagagactggcagcctggagaacctgccaacaccgagcgattcctgccgtttgtgagtcaacggagtaccgtttacgcactgacggtcgggaaccagattcagcgaaactaccagccgggtgacgttatcctggtggattcctcgctcacgcttgtaccgggtgaggatgtattggtttgtaataataacggcgagatcacaattcaacgattagcccgttatgacgagcagcactactaccttgatagtgctaactctcaacgggttatccatgataaaagtgatcttcaatttgtgcaccaagtagtcggtacgatcaaatcgttcatggttgagggtagatga

SEQ ID NO: 159481 - DNA, 300 bp, Enterobacter cloacae
atgtcgactagcatgggcacggtgaagccagaggggccgtttgtcctcattacgtttgacggtgagggatttctttttgatgagcgtcatgagctcgtcatcatcaacggaaagccgaagcaacgggacgtcaaacgcaattattttgagtccgatcttggcgagggcaaggccaaatactggacattaaacatcaatgaggcgcataagttcgacacgatagatgaggctacggcgcagctttgtaagcttaaaaatccgcaccagattaaggttcggaagctgacagggaaggagtga

SEQ ID NO: 159482 - DNA, 330 bp, Enterobacter cloacae
gtgagcgatttgcagaatatgaccggcgatgagttagccagtttacagagcgccattaaggcagagcaggcccggcgtttggctgaaaagatgattcctgtttttggggtgaaaaccagcccgataaatcagtatgagttcgctgatccagcgcaggcaatttcctgtgctgcgggattgctggataaggtactcgacgaggttcgggatgacctttccaaaggtggattacaggggtggaacggtgatttgctgcgtatctacgttcagcatgtgaacgagagcgattttgccgttctacagcctcatttgaaggataaaaaatcatga

SEQ ID NO: 159483 - DNA, 354 bp, Enterobacter cloacae
atgatttatcgcagagggtgggtgccggttttgttccggagcgacctggagaaaaaactcaaagagcagggttttgagaattgggaaaggatttctcgttttctttgcgagggtgattcaggagcacccaaagactatgagcttgaccagtcgcagtatgcctatcaggttgtcgataatactaaatggatgggacatcgtgatgcgacgttctggcagcgcctgaaccgtttgtggttcgttccgctgtacctgctgacgattccgttccagtggctcattcgtggccgtatggggtttgaatcaacgtcgaaggtgggcgcgttcgtcagccggattaccgggctaaagtga

SEQ ID NO: 159484 - DNA, 1896 bp, Enterobacter cloacae; identical to SEQ ID NO: 117999

SEQ ID NO: 159485 - DNA, 795 bp, Enterobacter cloacae; identical to SEQ ID NO: 117998

SEQ ID NO: 159486 - DNA, 165 bp, Enterobacter cloacae; identical to SEQ ID NO: 117996

SEQ ID NO: 159487 - DNA, 126 bp, Enterobacter cloacae
atgaaacattccattatcattctggttttgttcgttgtcttgaaaacgtttagttcggctgaaggcccggcgattaatatcaccggtaataccttacagttcggctcgttcactcagaccaagtaa

SEQ ID NO: 159488 - DNA, 354 bp, Enterobacter cloacae; identical to SEQ ID NO: 159483

SEQ ID NO: 159489 - DNA, 330 bp, Enterobacter cloacae; identical to SEQ ID NO: 159482

SEQ ID NO: 159490 - DNA, 300 bp, Enterobacter cloacae; identical to SEQ ID NO: 159481

SEQ ID NO: 159491 - DNA, 213 bp, Enterobacter cloacae
atggctgatttactgctaacgctgctggccataggtgccttatcggtcctttggcactggtatcggtcgattaaggcgctgaagcgttgccagcaagatacccaggtccgccgcattaaggctcgtggcgcagcctttgagagcaactaccgcgtgtggaagtgggtttaccgggaaattttggttaactggaggggcaataatgtcgactag

SEQ ID NO: 159492 - DNA, 4005 bp, Enterobacter cloacae
atgaccttacaagaattctacgcggagcgctttagcagcgatccgtattcgttgcttgaagcagcacgggatgagctaagcgagctggcgcagatggccggtatcaactggcatgcctgcgctgacagaatccagcttaatccgcgcggcgataaagagcgctacactaagtacaacggttccttcccggaagcgctggaaaagagcctcaaaggccgcgtcgaaatctactcccgactggagcagagcaaagacggcatcagttaccccttcgtaaacttcgtccataaaggcagcgatgccggttcatggagcggcttctctttcctgttttctgaataccgccgtgagcagcagcggaactgtgcgaccgtggtcgctcagccagaagaagaacgcgcgcgcctggagcgccaagctgaagcacgccgccgccgcgtccagatgcaacgcatcaatgacttgaaaaacaaccagatagagcatgaacgtttgctcggctggttggcgttccatcatgcctgggaacaggcgccagctgaagatggttcctggccttatgcggttaaaaaaggtattcgtgacgtatttagtgcttgcgatatacgtcgcgtgaccagtcacgacagtgcaaaatggagccgtgggccaacgacttatatggctattcctctgtcccacctggacggaagaaaagacggacggattgttggctggcaacgtatcgatcaccagggcgggaaattccagaccagcgccatcacgaacggcgatttcgtcgggacgtgtttcgttattggcgacctgaaaggggcgcagaatgtagccgtaacagaaggcttcgcaacaggcgcttctgtctggctggctaccaggaaggacccgaaaaaacgctttgacgctgtggttgtcgcgatatcagccaacaatatgatccacgttgtcgagcagctggttaacatctatcccgcagcaaaaatcacctgcgcactggataacgaccgcaaatcgtcggctgagggaaaaggcaataccggtctgcgcaccggctttgagattctgtcaaagttccacggcataaagtgtgtttaccctacatttgaagatgatccccagctggagtgcagcgacttcaacgacctgcataaattacgcggcctccgcgaaacctcgcgccagctgtttgccaaatcaaaccgccttaacgccagcaccgacctgctcacactgacgctgaacaagctgaaaacccttaagcgggataaccgccgcacattcgccaaagagctgctgaacgcggtcgatattggcatgctgacatgcccggtaccgaacagcccatccgatctgttcaacatgttctgcatcgttctgcgggacatggggcttgagaacgtctaccgcgccaccgtcaaagaccatattgcccgtcgcctgaacagaaaatgccgcacggcacaggcccctcgttcattcagcgatcgcattaccgacccaaacaaacgaccacagcacatcacctataagcggttcgaaacatcggtcatgaccgaagatgttctgaagtacgtgcaggagctacaggggatcgtaattgtccgtgccggcatgggttctggtaaatcgacaggcctgcttcgcccgttgatgcataacgcagaacgcggcgtttcagtagcgcacagggtgagcctcatcggtgggttatgggaaatgatgacagaagggaaaggcgctaaggccgacattctgcattaccaggaccctggctatcaggaaatggcgccatacgccagcaagctgaccatctgcataaactccatcgtgaagggctgctggcaaccactgatgcgccagcacgactattttggttttgacgaggccacacaggggctccgtgccgtactttcaggccgcgcaatggaaaacccggtcgcggtgttcaatacgctgattgacgcgctggccagaacagaattacacccgatcatggtggatgctgatgccaacgatctgctggttgacctggcagaactggcaatgaagcgccgcgaagagctgggtcttccagcatggctgcaaatccacgttatcgaattgccggtcgacgttcgcaaccgcgaaactggtgaacctatccgcgtcttctacaccgaaaaggatcgcatcatgtccgaggtgatgaaggctgtagagctcggtgaaaaaatcatgctggccaccgacagttccacgttcgccgaggacgttaccgccaccctgcgcctgaattacccgcacaaaaagttcctgtgcgtaaaccagaaaagcaaaccagagccagaggtggaagagttcaccaacaaaccgaagaagatggtgaagaagtacgatggcctgatttacagcccatcaatctcatccggcgtgtccatcgagcagaaacacttcgatcgccacttcggcatgttctgcggtgaagtggtccccagcgacgctatccagatgctgcgccgcgaccgtaccgcgaaagaatttatcatcggttttgataaggttcgcgcaaaacgcgaaaccgatcctcaaaaaatcgaacgcgcttacgtccaggcacttctggccactgccggtatgaacggcgaactgacggacgttgtctttgacggcgacacaatttccatgggtgtggccaacaccgatttcaccaggatgaaaatcaaggcatcagccatcgaagcgacggcgcgaaacgattacgccagcaacatgatctgcattatgcacagcgatggctataaagtttcgccgctggccggagacccacaggcgaatgaagtcggcaaggagctgcgtaaggaagcgcgggaaatcgtctgggaacaaactctggatcttcacctgaacatcgatacaccggacgaatcagaacgcgaagcgattctgaaaaaacgagctctaaccctggaggaacaggcgaagcttgtccgctgggacatcgagcacgagctgaagctcccggttgacgaaggtaccctgaaattctacttcgacggcgctcgagataaagtccgccgctatgaaaccatgctgctcgacgaggttacagcgcgtcgctacgaccgcgaggagtcggcgatcaactttacctactcattcagacaagccgggcagtgggaatactttgtcgtcacggcaatgacccgcgaacaggccgatgaagcattccaggctaaacaccctggcatcgtcgattacaaagttaaaagcctgcctgtagtcgaggtggccatgcgcggcttctatggcctcaaatcgacagcgctgcgccagtactttatcgactgcggcatcgacccggagacaatgacaggcgaggccacccaggagcgcctcaaacgcgccagggataacctcatgaccgccgaacgccgggacatgttgaacaacgttttgcgcatcggtggctttatgacgccgaaaggtaagccgaaggtgccggaagccctgtttaaaaacatctgtgattcactcggcctgaagaccgacaagcgacgcgccagggatggggataagcggcctactatccgcttcgttgaccagcagtcggcagagttcatgatggacatcctcgccaaacgccaggaagacggcttgaacctacagacgcgtaaaaccgagaagaccgccaacgaagtggatcacgatttggatctcaatatatatatggatcataaatcgcgatccacaagcgagcaggattccgacgcccctcattcagtaataaccgaggcgctggccacgctgccggttccggttcctgaggcctgggcgctgaccgcgctgtccggcgacgagctggcaacgatggctacgtggtcaccagccagcatcgcgatgacctttgcctctctgtacctcacagagttcatggagcgcctctccagccacgagctgcgaagcttgcgtgaatacatcaccggaatgactacgggcggctacggcgcgcaggaggcgttctatggctga

SEQ ID NO: 159493 - DNA, 609 bp, Enterobacter cloacae; identical to SEQ ID NO: 159480

SEQ ID NO: 159494 - DNA, 738 bp, Enterobacter cloacae
gtggaactaaatagcattcgggcctgcgtgtccacggctctgtcagatattcactatctccagcgcggcatccttgaggttcagctggagcagctgcgtctcgccagctctgaccgtttcactgacaaaccgaccagaacgatctgcataggtgactcggagtcttacgaactgtcggttccagccgagcctattcgttatcacgttggcaaatcgttcaaacagtcctcaatgctgctaactgaattagatttcatgactgccagctggcggcgtgccattgagcagttaaacagtgaagaaactgcatggctgcattattgctatggatgcaaaccaaattataaaaatgatgtgattatttgccagtggttgtggctggattttttaattgctcattccaggtcaggctttaagaaaatgaaagcccccacaaaaaaaattatgcaaaagttaacttactacggaatacaggaagttaaatcagaaattctgcgtgatgtacaacgggatgagcaagaccgtgacgaacatataagttttttactggatatatctgtggatagctggcgtaaggattataaaaaacgctggttattaatgaaatcacgatgcatgcatcttaacgataccgcgttattaaatgcggcggagaagcgcagtgaaatcatcgaaagccatcgggcaagatgtgccaatctgcctgtgtcagcaggttatgtacaggaaaccagataa

SEQ ID NO: 159495 - DNA, 924 bp, Enterobacter cloacae
atggttaacatgcaaaaaaacattctggcgatgattatacataaatggctgaatagcgattatgtagtcatcgatacggaaacgacaggacttagcgaatatgctgagattatcgaaattgcgatcattaatatgcgcggtgaagtcctgctggatacactggtgaagccaacccaaccgatcccccctgaagtaaccgaaataaaccatatcaccaacgaaatggtcgccgatgcaccagcgtggtgtgatgtgttccctatggtactggcgatcatcactcaccacaaatggctggcctggaactctggcttcgatgctcgcatgctggaacagacgtgtttctttacaggggttttccccgaaaatcacccctattacgccgcagccgtaacgtctcgcattcataccagccatattgacgccaaagccgtttacgaccagtggtatggcgagttcgacgagaagcgcaaagcattcaagcgccagagcctgacaaccgcagctgcgcggcacggtgtatcagtggaaggagcgcaccgcgccctggcagattgcaagatggttctggccgttctgcaaaaagtcggctcccccgttacccaaacagcaaacgtatcagaaacagacctgccaccctgcccgttctgctatggccctccttcattgttcacctattactttgacggtgttcagcgtaagccgctttacgggccggtgcattacggcgatgacgggctgtatgcaggctcttttgtcttttgccatgagtgtggcgcccagggcgaagaaatcgagggttacgcatgcgacgattcacacgttgagcagctcgaagcggcagcgcggagtgtctggtccgatagaaacgagcgccactatgacctgtatgtctccagtcaggagaacaagtcatgctgctga

SEQ ID NO: 159496 - DNA, 243 bp, Enterobacter cloacae
atgctgctgaaaatgtacaccccaaatggccatgagattatcgactcttccgaagtcgctcagttttatccggatgcggcaagcggcaaccagctaaccaaaattgagacactctcaaccacaggagagagaaagtcggtgctggtaaaacactcattccaccaggttacgtgcgcactggccacggcatggagaatcgacgagcaaaaggccgagcaacaacttacaggagcaatccaatga

SEQ ID NO: 159497 - DNA, 153 bp, Enterobacter cloacae; identical to SEQ ID NO: 159479

SEQ ID NO: 159498 - DNA, 198 bp, Enterobacter cloacae; identical to SEQ ID NO: 159478

SEQ ID NO: 159499 - DNA, 408 bp, Enterobacter cloacae
atgagcgaacttaccaaagaatggctcctgacgaccattgcggagcttgaagaagagcgcgatgcgacacccggcgcagtaaacgaagatgcagccaaggcgctcgctgcgatgaagattgcgctggcatcgctcgaagcggagaaaggtgcccagccggtggcgaaggttgagactgttggggtttgttggtacgcagataacggtgtgcctcgcaaacctgctgttggtacagagctattcgccgctccgccagcaccgatagtaaccgtgcgtgaactaactatgtgggtcaagcggttagcccactccctgaggaacgccaaatcaggcagcaagttacccgatgatgctatggcctatttgagcgcgaagggactgattggcgttgaggatgctttgcgatga

SEQ ID NO: 159500 - DNA, 327 bp, Enterobacter cloacae
atggcactaacaccagcagaacggcaaagaatccgccgtgagaagctgaaaaagcaagggactaccaggcgggactgggttctggaaccagaggaactgcgcatgctcggtgagatttgcacgcagcgccgtcctggccgagagccgtattcagaaaatgaagtaattggtctgctgatccgcaaaaactacaaagagctgcaaaagaaactttccggttcgtgtacgcggtgtgggcaggaacttccggtatctgagtgtctgttcgatggcgagggtacgtgccagctgaccactctcagattgaagctggccattaaagcgtga

SEQ ID NO: 159501 - DNA, 222 bp, Enterobacter cloacae
atggacaaaaaagcgttactactcgaacgacttcgccagagaagcgaaagcagtctggccagcggaggagacggttttattttcccctcaatgctggcgttcgatatcggtctgaatacaaggacaattcgggaaattctgaacagcgctgtcagggatggaaccctggaaaaaatggagcgtggtgttggccgttcgcataagtaccggacaattcagtag

SEQ ID NO: 159502 - DNA, 288 bp, Enterobacter cloacae
atgaaagtaaaaggcatcccgtttaaccaggttaaagagaagctgctcgacaccccggaggccatccggggatatgaggaagccgataaggagctggcgatggtagaaatgctatacgaaatgagggagaaagctggcctgacgaagtctgcgctggccgaacgtatggggttgcaaccgtcagcaattagccgtctggaaagcaacccactcggtgccagcatgaagacattatctcgttacgctaaggcttgcggcgcaagcattgatatacatgctgtgtactga

SEQ ID NO: 159503 - DNA, 312 bp, Enterobacter cloacae; identical to SEQ ID NO: 152940

SEQ ID NO: 159504 - DNA, 222 bp, Enterobacter cloacae
atgaattatcaaggcaacaaaaaaatgcgcaaagacgcggcagatatttccaacgaactctatgagttgtggcaaaaagttaaacgttttgaacgtgaatacagctttaacagcaaggacctgacagagcgccttgcaggccgtcttgttggcacgatagaacctaaactggcggaactgaataaatttatggccgatgtcgattatcagttcgaagactaa

SEQ ID NO: 159505 - DNA, 228 bp, Enterobacter cloacae
atgaacgcgaaagaaatacgccggaacatgaccgaggaagcgttaagtattgagtccgtaatgcgtgggcatccacgcataagcctggcagagctgagtaatgcctgccggataagcgaggcaacagcagagtttatcgttgagcagatggtttgttttggggtcgcacagcgcggcgctttcggacgatactcactcacgaacgagtataaaaaaggaattttctga

SEQ ID NO: 159506 - DNA, 837 bp, Enterobacter cloacae
atgttttccggttcgcgccttgcggcaaaaattgaactgcttacccgcgaccgtttcaacgttctgaaccatatcacctgggcgaaaccgagcgggatgtggaaaaggcaaaataaagagagccttcgggcattcttccctgctacagaacgcatcatatttgccgagcattatggtgcatcaggttatgcgaagggccagtctggttatgcaagcaaatgtgcagacctccagaaagagatttttgcgccgctgattgaattgttcgcaagtgcgcgtcgccagttgggaatttcagccgctgacattaactccgccacagagaaaaaaatgtgttcgcactggttctcatcttcgcaatggcgtttgccatctttggttgatttccaaaagttgcaggctttattccagagcagagctgaggaaatgggtgttgcttgcccgcctccgttcaacgttggatatgctcagcatgagcaatattatgctgagctaaagcagaactatgagtcagtaaaagggaagtatgacgatcttaaagcgcaatatgaaaacttgcgccgaccgttctcagtgaccgcagatgtgccttatacggatgtttggcagttcccacccgtacagtactacccaggcaagcatccatgcgaaaagccagctgcgttgatggagcacatcatcaggagcagcacccgccctggagatgttgttgctgatttcttcatgggttcagggagcacaattaaggccgctttgaagctcggtagaaaagccataggtgtagagctagaagaggagcgatatttacaaacggtctccgagatagaaaaacaataa

SEQ ID NO: 159507 - DNA, 492 bp, Enterobacter cloacae; identical to SEQ ID NO: 152908

SEQ ID NO: 159508 - DNA, 489 bp, Enterobacter cloacae; identical to SEQ ID NO: 152907

SEQ ID NO: 159509 - DNA, 219 bp, Enterobacter cloacae
atgcgcgtaataacccagctgattatctgcgccgctttggccgggtgcgcgaactcaacaccgatggcaccgatactgaatccggctccgtgcgcagcggaaaaaccgacgattgatgtggttcacatcgatgggcatttcgttatttctgatgacgatatgggaaagctaactggctacatcgccgcgcttgaagcgggctgtggcgcacctaaatag

SEQ ID NO: 159510 - DNA, 312 bp, Enterobacter cloacae; identical to SEQ ID NO: 152945

SEQ ID NO: 159511 - DNA, 792 bp, Enterobacter cloacae; identical to SEQ ID NO: 152905

SEQ ID NO: 159512 - DNA, 507 bp, Enterobacter cloacae; identical to SEQ ID NO: 152947

SEQ ID NO: 159513 - DNA, 1842 bp, Enterobacter cloacae; identical to SEQ ID NO: 152948

SEQ ID NO: 159514 - DNA, 207 bp, Enterobacter cloacae
atggcaacacagactgaactggatgccgcgcgcgcagcgttacatgacctgatgatgggtaaacgggtggcaacggtacagaaagatggccgaagggtggaatttacagctacttcagtcagcgatctgaaaaagtacattgccgaccttgaatctcaggtaggaaacacatcacgacgccgggggccagcaaggttttacgtatga

SEQ ID NO: 159515 - DNA, 1344 bp, Enterobacter cloacae
atgacgcccgagctgcgtaatcttccacatatcgccagcatggcctttaatgagccgttgctacttgaacccgcctacgcgcgggttttcttttgcgcgctggcagggcagttgggaattacccgtctgaccgattccgtttctggtgtcacgctgggtgctgaacagatagcagagcccctggcgctgtttggcgatgatgacgatatgggaccccggccatcacgtagctatcaggtggcaaatggaatcgcggtgttgccggtttctggcacgcttgtcagtaaaaccagatctcttcagccctattctggcatgacgggctacaacggaattattgctcgcctgcaacaggctatcagtgaccccggcgttgacggcattctgctggatatggacacgcctggcggaatggtgtcgggggctttcgactgtgccgatatcattgcccggatgcgcgatattaaacccatctgggctctggcgaatgatatgaactgtagtgctggccagctcattgccagtgctgcatcgcgcaggatggtcacacagacagccagaacgggctccatcggtgtaatgatggctcatagcaactatggcgcagcgctcaaaactaacggcgttgaggtcacgttgatttacagcggtgatcacaaggtcgacggcaacccttacggaaaattacctgaagacgttcgcgctgattttcagacgcgtatcgatgccactcgtcagatgtttgccgaaaaagtttccgcttataccggtatgtccgtgcaggccgtactggacactgaagcggcagtattctccggccaggaatccgtagataacggactggccgatgagcttgttaacaatacagatgcgctcggcgtgatgcgtgaagcactcgacagacgcaaaaaaataaccactggaggaactatgccatcaccttctgcatccgcagccaccaataagacagctgaacaggtaacaactcagactactgcaccggctgaacaggtcaccaccattgacacgacaaccgctgccgcagctacccatgaagatgtcagtgctcagatttcggcagccgtgtccgcagagaacggtcgcatcatgggaatccttaattgcgaagaggcgaaagggcgagagtctcaggctcgagcgctggccgaaacgccgggtatgacggttgaaagtgcgcagcgcattctggccgccgcaccacaaagcgcccaggcgcgcaccgacacggcactggatcgtctcatggaaacagcaccaggcgcactctcagcaggcagcgcatcttctgatgctgcggacgatttgttaaacacccccgtttaa

SEQ ID NO: 159516 - DNA, 333 bp, Enterobacter cloacae; identical to SEQ ID NO: 151067

SEQ ID NO: 159517 - DNA, 555 bp, Enterobacter cloacae; identical to SEQ ID NO: 152954

SEQ ID NO: 159518 - DNA, 399 bp, Enterobacter cloacae
atgaaacacagcgatatccgcaaggtaataattgacgcgcttgaaggcgcgattggtactggcgctatttattttgatggtagaccagcagtacttgaagagggggattttccggctatagccgtttacctgacagacgcggaatacacagcggaagagctggatgccgattgctggcaggccattctgcatatcgaagtctttcttgaggcacaggtgcctgactctgagctggatgactggatggagacgcgagtgtatccggtactcgcagaggttccggggcttgaatcccttattaccacaatggttcagcagggttatgactatcagcgtgatgatgatatggcgctgtggagttctgccgacctgaaatattccattacttacgaaatgtga

SEQ ID NO: 159519 - DNA, 423 bp, Enterobacter cloacae
atgtttctaaagagcgaactgctggaaagtaacggtagcagtgtcacattgttccagctgtcggcgttgcaacgtattgaacacctcgaatacctgaaacaactggaagcggtagaagagggcgattttcaggcggccattaccctcactgtgaagagtggagcgtacctcgtcgcaatgtcactctggcacggtcacccactgaaaggttcactgggagaaaacgcggcggcggaagtggtcaaaattcaggatgaagtcatgcagtcatggccgactgaactcatcgccgaagccgaatataaagtgaaaatcctgtccggcatgattgcgcctgtaactgatgagcaggaagggccgggagaagagcgtaaagagcacacagaacctgttactgcggaaaagccctcgccagtgagctga

SEQ ID NO: 159520 - DNA, 1020 bp, Enterobacter cloacae; identical to SEQ ID NO: 153018

SEQ ID NO: 159521 - DNA, 168 bp, Enterobacter cloacae
ttgttaattctgtgcgacggccacacacagtttgcaaagctcatgggtgaagcgctaattactaacgatggcgaagcgatagaaggttccgcgttggaggacgtagaggtactggggcgggttacatttttcatcaaccgcgtgataagtgatgattgtccgttctga

SEQ ID NO: 159522 - DNA, 240 bp, Enterobacter cloacae
atgccacgcacagcagacatacatgccgcttttatcgcggcaatagaggttaacccaaaaggataccgctatctacgaacagacagcttcatcaagaagttgcgggagtttaactggcactttagtcgtaccgaagcgaactcgtggatagagcgctaccagtccggctttgcagataagacaactgatggcagtgataatagatactggatactgcgtaacatgggtagggtgcactga

SEQ ID NO: 159523 - DNA, 1179 bp, Enterobacter cloacae
atgatttatactactggcactatcgccatcagcggaaacacccttacaggtaccggcacaaacttcactgctgctggttctcttattcgtaacggctgtaccgttattgcaatgaccagccctgtgcaggtatttcagattaccaccatcggcagcgcaacaagtctcaccgtaacgccagcagctaacccaactgttcccgctggaacccggtttgccattcttctgagtgacagtctgagcgtggatgggctggcgcaggatatcgctgaaaccttcacgatgtaccagcgctacatgagcggattcgctgatgtgatgaacggtactacagacgtcaccatcacgattaacggtgtggccgtcacggtaccgggtcagaaatcgctggcgaagaaaggggcaaacaacgacatcaccagcctttccgggctgactaccgccctcagtatcagtcagggcggaacaggtgcaaagaatgcttctgacgctcgtgctaatcttggtgcggcaaaatctggaacaaacgatgaccttactctgatacgcggactcacggggcgtgctcaactgtggggtgacactgattattccacaggaacgctggtaagttacaccgggactactgtaggtgccatggtgcgagccactactgccattgttgcaacatctacttatgcggccagtgcatcctttggttactggattgatgcaaacagcattggtagcagtggacctatgctcgcaagcacaggctcgcaacaaaaccgatggatcttcagaaattcttctggtgctatcagtacggctaatggggacataaccccatcagcttctgacgagcgcgtgaaaaatataataagagagattaccgaagaggaggcggttgaattcatatcaggactaaaaccaatcaggtacaccttcaaatgggctcctgaaaaggtaaaggttggctatagcgcgcaaaatgttgaggctcttgattctgagttaatctcagtatcagcactgaccgttattgatcctgagagcagtgaaagcacaacatatgaagacggaaaaatcatcgatccaggagaggtcggtgctgcgtatttagttcctgtagttaaacagcttttgcgccgagtaagtgagcttgaggaaaagcttaacctgaaaagtgctcaatcttaa

SEQ ID NO: 159524 - DNA, 234 bp, Enterobacter cloacae
atgaaaaatatgattctttgcctggcggtagcggtattgctctccggttgcgctggcgttattgagaaacagcaacccgtatgcaccggaacagccctggtcggcggacaggaaagcagcgtccagatctacggagtccgtaaacaaaacaatcagacgcagtaccgcgccggttatccctttaactggtcatgggtgagcgccaacacattcaccagcaccacctgccactaa

SEQ ID NO: 159525 - DNA, 315 bp, Enterobacter cloacae
atggcggaatatggtgttcagacatgggacgcctcaggcaatgttaataattatggcgttaagcctgtcagcgtttgtggctatctccagctggcccagaaccagaaaacaggctcttacaccgtagcgcttccaccgggttgcaggctgacctattttcagagcatgaacggcgatcagtttggaacgagtcggaggaagatcaccatttcggggggaaccgcaacagtgtcagctgtaggcgataccgactactcagcagggactgagcctgcggcagcggcttatctcattttccagatcgagagggcataa

SEQ ID NO: 159526 - DNA, 348 bp, Enterobacter cloacae
atgaaaccgcattatctgaacgatttgcatgcaaatgaagccgccgatgacattattggcctgctgaaactgtgtcagcagctgcagtcagaaaaggacggcagggaacggccggcgcccggggcatattcacgcgatgaggatgcgtttgccgatcgtatccgcacagagtgcggacatgcccggcagcttcgccggctgctgccggtgatgacgacgctgagcgccaccggcgccgggatggaacgccggggtgaaatcagtgtgctcccgggcgaggattacgcgcagaaagcaccggctcgacttacagtgcaatatctgtcctccggggacaataaacaatga

SEQ ID NO: 159527 - DNA, 765 bp, Enterobacter cloacae
atggctgatattcaggctgctgccgataacttagtacctgttgcatcccatccggctaccgtacagataatcaaccagggggcggggatctggggaaacatagcaactgggcttgttactggcctgctgaccgggggcattgcgcttactggcatctggttgacgcatcttttcacacagcgtcgagagaagctgacgtcagaggataaactgaaacgggagcagcattttattgcgactgaactgatattcactctggaaaagttcgcagaaaaatgcgccaccatagcgacgcacggagcttatgaaaacaggtacagtctttccggggcagaggttgaacttcctgagattgacttctctgatgtcaaaggtgactggcgtgtccttccggccagactgatgtacagggtacgtgagctcccggtaatcaagcagtcctctgacagggcaatcaccactggctaccgtgctcctccttattttgaggatgcaacaactactcgctgctacgaatacacccgtctcgggatcagagctctcgttcttgcccgcagcctgcgtaaactggctggttttgtacagacccgttcggatgacactatctggccggccaagagagccctcataaaggtctggacgctggaaaagagaagacgccggaatatggagatgatttatgcgcaggagctggtgagagcagatttaaaccggagcgccagtagaaccacggacaataatcacgatagcggagtcagtttctga

SEQ ID NO: 159528 - DNA, 318 bp, Enterobacter cloacae
atgaacccgaacagaaagccaccacaaaaatttgacaggcttaatgatctcctcaaggagttaaatcgtgctggccaccccgatgaccagatatggttttatggtgctaacggagattacagtgaaccggttgcttttcaggcagctgactcacggctaatagcagaacgccatgctgatggttcatggtggaccgtcgaggggtactgggaagctaatgatccacgcatgcctgaacctgaagatgcctgggatgttgaatttaatcgtggtcagctggatatgtggtttgataccgaaataagggcaaatgaatga

SEQ ID NO: 159529 - DNA, 255 bp, Enterobacter cloacae
atggtcgccaccaatactacggcaaaaaaaccagccaggaccacccgtcagacaaaatctgcggaaaaaatcgtgcagtctggcgaggagaagctcgtccagctgctcgcagatacgcccgtgcaaatcttcccgtactcacgcctgtcacgcactgacttaaacacgcgcatcattccgcataacggtctggcaaaagaaagggcctcaggcctatgtcacctatcacaatgcgatctacgccaccggccataa

SEQ ID NO: 159530 - DNA, 153 bp, Enterobacter cloacae
atggccaactgggagtgtgggaaacacgtcaacttcgcggacagtcatgactgtgggaaagaggtcaacttactgaccggctgggactatgggaagcaggtcaactttatggccagctgggagtgtgggaaacaggtcaagttcggcatgtaa

SEQ ID NO: 159531 - DNA, 450 bp, Enterobacter cloacae
atgaaatataaaattgaagtattatacaagtggccaaatgatctgaagaaaattacgagtacccaacatgctatggatattaatgatttcataacgccaatgcaaagaagattattcgtttttgaaaggaatgaaatatatgagcatactattctttgcccatttctttcagatttaaaaaataacacattgattacagtgaaggccacagaccaaagtaattttatcattgaaaccttagacaagtggcctgaggggaaaagtccattaaaaggatttattccacaacagaaatataatcgtctagaattcgggtatttctgtatgtatggtcaatcctctttgattccatcgcatttagagttcaatgctctgattgaacattaccatgttcataagaataacaataaaaccagacctttaattaaaattgttaaattaacggattag

SEQ ID NO: 159532 - DNA, 189 bp, Enterobacter cloacae
atgggcaattttggtaacagacatccaaagcaatactatgaagtggttgaatttaaggaaaatggaaaaactttatattatatctgcataaaaggaacccaaacaaagatacaacctgaaaaaagttttgagcattacgatgaagctttagaagcctgtaatgccctatcaactaatccgttaatttaa

SEQ ID NO: 159533 - DNA, 669 bp, Enterobacter cloacae
atgagcatctccgcaacgaaaagcaggaagaaagaatctgaagctggtctttctgatgatcctcggcaaacggaaatcacgacacccaattttgtgctgtttggtggaactttcacatttattgagaccttctctgccactgtcatcgactccgatctaggcaatggtcatatctgggtaaaaaccaacacaggggatgagaagcagatttctgactatggtatccctttcagaagttcacacactatccataaatacgaacttcgccaatatagtgaggatggttcgtatgatgcatataaagatgcgcttatcgttaataagaaaacgggtgaacacgaggtaaacttaaaaaggaaaaccattattattcccgcttttatgacaatgctatttcatactgcctctacagcatcgtattacagagcaatgcctgttccaaaattgctcaccgttattttcattttactttgtgcttctgcacttatttcattcctcacactaccttggggatttaaagacggctacatgtggagcgaccacaaatacatgtggtttacatatcttttctcaagagttggaagttttatttgtatcaatttgatgaaaagaagaagccagaaatttgagaatgaacttagaaatcttattgagttagtaaagcgctaa

SEQ ID NO: 159534 - DNA, 1239 bp, Enterobacter cloacae
atgaaagggatgcagaaaatccgcagaggaaagagttttgctggtgtcgtcctctatgcgttaaagccctgttctcatcataaaaatgaccctatcgtgatcggtggaaatgtaacgatagttggcaatgccgctaaagatctgatcgctgaatttgatagcaccaaacagcttcgccctgacgtgcaaaaggctgtttggcacaactcgcttcgcttacctaaaggtgaatcactaacggctaaacagtggtcctacatcgcagatgactacatggcaagaatggggttctctgaaacgcatctcagatgctacatcctacatgacgacgaagacggccagcacatccatatcatcgcaagcagagtttctcttgatgcaggaaagctctacctcggcaagaacgagaatctggcaagcacaagaataattcagcaacttgaaagagattacaatctgacaagaaccaaaggaccgaaagcttctccagcagcgccctcacctaaaccgaagctcaaaaaatcccgtaatgagctgatgatagaaaagagaactggtgagctatgcccaaaagcaatcatccaaaacgcccttaatgaactgcttgataccaggcaatcgattaccgacttcgtgcaacagcttatggcacaaaatatcaggccaatccctaacattgcttctgcgggtaagatgaacggtttttcattcgaatatagggggattgctttcaaagcttcgcagctcggtaagggttattcttggtcagccttgcagaacaaactcaactatcaaccggaacgtgataatgctttcctgtttgaactgacagcatctgtcagtgaagcgccttgtacgttcatgactacagatgctcctgaaatcacaacaagagaggttcacagccccatagaagcgcttatccatgataaccgtgctggtcaggacgaatacactaacgcttttgtaaagcagtttcacttagaagctggtgctaaagaagcgttaaaagaagcccccgaccaaagctatgcagtttcagcgttcaggtggttggaatacatcccctacctcgatgtaatttatcgtatgttgaaaaacctcaaaatcccaacccttaaacgtcctcgaaaacacaaaaccatcactggcgtgagagtggtagagattatgcctctcccccaaaaaaatctcatcgaatcagcacctcaatccagaagagcttcgctttcgatgtaa

SEQ ID NO: 159535 - DNA, 615 bp, Enterobacter cloacae
  misc_feature (582)..(591): n is a, c, g, or t
ttgaaattatacggagaagctaatattattaagtgcaataatatcatatttgatgaatgtgcaaggttggcatctgccaaatattcaaaagtacaagcagttggaattggtaaagaacttgagaaactatgttcattcttaacaggaaacagaatgacgacctcatcatactttttctgggtaaatccgttaagacataaaataactcagagctggaaaggttatgaaccttcactcgaaggacactcaaaactaccagacataaaatccgtaatagctattgctgagattttctcaaaagatgaaagccaattgtcaacaagggacattttcactacttctgttcttgcactactcatgtgtgctccaggaagaatttcagaaattttaagtcttccagcggattgtgagattactgaaaaagatgacaaaggcattgaacgatatggtttaagatttttttcagcaaagggttatgctggggatatcaaatggattcctacagtaatggtccctatagctcaaaaggcgatagcccgattaaaaaaactgtccaaccatgcaaggtttgcctcaagaacnnnnnnnnnnaacaatggaagtccaaggcactga

SEQ ID NO: 159536 - DNA, 651 bp, Enterobacter cloacae
atgattaattacaaggaaagaggaatatcagaaatattacatttcacaactaatagaggattattaggaaccttagttagcaaaaagctcctatcaagatatcggcttacagatgataagttattacagcatatactatatccaaatgcagccattcgccctgaaatttcagaatattttgataaaaaagaaaactggatagactatgtaaacttatcaatttctgagatcaatagaaggtattttgatgtatccaagagatggcataaagatcaaaacatatggtggtcaatattatcttttgacccaatcattattactcatgaaaatgtttatttcgccactacaaataactcctatgccccatgcatacggcagtcagggagtactgggttcgattctctctttgaaccaatcatagagagaaaaacgggatggaaagcttttcgtcggaatcggccactatgcttgccaacttgcgaacaagctgaagtcctttaccctcaagaaatttctaccaattggctaaaacgcatctatgtgattgatgacgaaacacatgatatagttggaggatggctagatgaatttgagtttgatggaattgagatcgtgatttctccagaaaaatttgcggggatgccaaattga

SEQ ID NO: 159537 - DNA, 123 bp, Enterobacter cloacae
atgtgtcacgtaatgaatatgaacaacgtgataaattcaataatgatgaaaaacaacatcaaactgagacctgtgtccttaaaccaacgggaaaagaaattagtcgtttcccaagtcgtgtga

SEQ ID NO: 159538 - DNA, 300 bp, Enterobacter cloacae
atgtcagatatcaggctttatatgttccagtcgggctatcagcgttgtaaatatcacgatatcaggatgaatcagggtgaaggctccgactacattatacctgtcccctggtttttactgatgcatccgcaggggaatgttgttattgacggtggtcttgcggtggaagggctgaaggatccccgcgcctactggggaccgactgttgaccagtatcaacccatcatggatacaaaccagggctgtagaagacaactggcgaagctcggaataagaccagaatcggtgcgttatgtttga

SEQ ID NO: 159539 - DNA, 1281 bp, Enterobacter cloacae
atgattaataagttagaaactggctcaaccaagctctcatctactacggtatttaataatatttcgccggacagcattgcagggatcccatcaaaggggatctttatctttaaggatgtgttgtggcctgtacagcacgctgatgatgagcaagataaaaagatcatgggtaaagtcttcgaagctgtgaacaaagtttctactatgtccaggtttctagctgtcagatacgatttccatcttcctgtgtatagcccagataatcaggtggttagtgcctttcatgaattactgttcaaagaattaaaaaacagctatccccggtcatttatcagctatatctgggttagggaagagggagacgaaaagaaacagcattatcattatctattaatgatggatggtaactatgttcgatacccaagtaatgtgaacaagattgttaaaagctgttgggaaaacgctacgaagggtacagtgtattttccagtaaatacttattactctgttactaaaaatgatatcgaaaaatatacagagctgatgttccgcataagttattttggtaaaaaacgcactaaagaaactatcgctaagggaatacgacgtgttggacaaggtttcaaaaagccaaaaccttgtagttgtaaaccacagcatgccagagctaaagacatcccgaagacatccactgacttaaaagtctcaactctttcctgctgctttgcaggcaagttggataaatatttcctgggggaagctgagctcccaatgtttcaccgtaggcgttcatattgtgaattatacgacgaagaaaagtggtggattcgcgatgctcctcgctggtcagggcatcgacgcaactacctttttgaagcattaattacaggcgttagtctgtccgggtatgcgagaaagtaccgacttaatcctgaacgtgtctatgcaaattgccgacaggtaggtgggcagagtcttaaaatcatttactgggcgtggcatcgctattgctttttgcaaagcagaggctcagttgagagttacatcaaaaacaacaagctacgctacaaatcagcggccaaacaactatgcagaaaaccaatgagtgatcgctggaagaagcatttcgatgactactacttacgtttttggccagaagggtggagcgttgctgactactgtcgtcatgttgggatagtgccaagtacggccaggcgttacctggtagattttccgtattttggtctgatcaatccctttttacttcggccatggctttga

SEQ ID NO: 159540 - DNA, 3441 bp, Enterobacter cloacae
gtgtttcctcttgttgccgttctcggttttaccgttgtcgcagggacgatggcatggcttcttgattccgcaacggaagaagaagagcgccggcacgatgaactgcgtaatgacatccgacagcgtaatcagcgtttacgcaatatggaattcctccgtgaaaaccagagactggaatatgtcaaaaaagggttggctcagtctctgctggaactggaggttcatcgtcgggaattatttgcaaaaattacacccattgaagaagagttacatcgcctgccgcaaaaccttgagcaggagctgcgtcaagaggcgataagtccttatcgccgccgagcacttcagcaaagccactgtaagattgaggacgcgcaatcgcggctgcaggcatacaaagcctatcttgctgcatatcagtgcgatctcgatgcacaccatgcgcaactctcaaccactaccgatgttgaatgccttgaggagattctgaattctctacagccaccttccccaaccctgccagcggaatggctctatacaggtaaagtcgtgctggtggatcattctgaactcgatgctgatttaccgtttaacagtcgtttgcatttgaccaataaccggggattgcagggctggagcaatgattttcaacaaagcctgctgctgggttatccgaagcaagactctattccgttacagatcctgaaagaaaagcaatcacaatatggcaagcgcttgttttatggctgcattgcccgaggaagtgcctacgttgatgggatcctggcgggtaaaccgctcactttttctatagagcgaaaagtgccagcaggttatttcgcccatacggcaggcaaagcgattaacgcatttttgccccgacacctgaccaataatccactgattgatttactgccagggcagaccatcgaggcctatccggatttatacactctgacgctggatgcggttcccggcggaaaggaaaaagaccggcgtatcaaaataagtatgttgggtaatgtcgaactgggttcagtggaaagtacgcaactctatctttatcttgaggcggaacttatccatgaagagtggcaggagtcgttgtatgcgaacgatcccacaccttggcatctactttccagtgacgaaactggcataactatcgctcgtcacgaagttcgctgtgaatgccagatcgacgttgaaaatgcgtgtctgagagtgacgcatctcagcgaatttcagaccagtattgagggttatgagctcccgtttaccctgattccagcagacgcgcggctcgagaacgtgttgttgagaaatcccgatgcgcttgatgcgttgttggggttcattaataacgtctcttgtcaccgtgcagatgacgcagtgagactcgctcaaactcggttgctttccctgtggggggaggttctggagtatcagcaacggcagaatgagttccatattgaaggtcttgccgctgaggtgagcaaagaaggctatgacgccatcgtgatgttgcaaccaaatggatcgccagcgttggggctcttcctgaaggagtttcgggatgtgctgaaggccggatttacgcctcagtgccgtctcgcatactggggcgaaattacgcccgggcagtatggctggcttgaaccgcttgcggcttacgaaagacggcgtctcactgtgtatgaggatgaaaaccggattgcgctgcgtttgcctgcgataaaagctcgtgcgatcgcagaattgtctgctgatagttcgccagcctgtctattacgcctgagtttatatttggtggatgacgcgctgaagcgacaacgcgatgcactggattgttttcgtaacgacacgttggtggaaccacgaataaaagatattttgctctcaccgtcatcttaccgtgcagagcaggacaactactggcttatgcgcttccgtgaaggtattcagtggcagaacaggcaactcaccttatctcagaaacaggtgattgaatcggtattgtgtgaaaagtatctgtctttagttcaggggccgccaggtacagcgaaaacgacctgtattgtcgagttgttgcatcaaatctacacttatcgcccggaaacgcgggtgctactggtctcgcaacaacacgctgcggtagataacgcattggaacgttttatcgatctgaacagccagcagctagaggagcagcaaatccgattgctccgtattggtccagagaaaaaagtggaaggtaaattacgccagttcaccatccagcagcgccagcaggaatttgtgcaaaatagccgggttgcagtcactgaagcgatcgccagcggtggggaaacgcagatagcgttggcagagcgctggatagaggatgtgctctgcccggctagcgaggaaggacagaacggtgttgatcaggaactggtctggatgttgttaagtaataataaccttgtaggcgctacctgcgttgggttggcatcacgtaagcagagtatcgaccagcttcgttttgatgtggttattattgacgaggccggacgttcgacggtgcctgaattaatgatcccgatgcttcgagctaaaaaagtggtgctgattggcgaccatttccagctccccccgagcgtggcaccacttttacagactgatgatgccgcggaagaaatgccgtttttacaagaatgcttcctggaaaccagtttttttgaaacgctatatggtgcattacccgaatcctcccggaattttttgagcgagcaattccggatgccggtccagattggcgacctggtcgcacaccttttctacagtcctgaagggaagcgtttactgcataatggacagatcaaagatacctcgggttttatctatcctgtttcgctgatatggaaagatattcggggtatagaagagtctgagggcaccagcaaaaggaactattctgaggccgcgtctattacgcatttcttgcataatctggcgaatcaggaggggatcggttgtaaggatgtggcggttattaccccttatggcgcacaaaaaagattgctgcgtcaactgctggcgaaacactgtgaagaggataacggcgagtatcgtctgggaaacttgcgtatacgcataaacacagtggacagttttcaggggagtgaagcagatgttgtgctgtactcagttgtccgtacgcgcggtaacctgcgctttattcttgactggaagcgcctgaatgttgcctgctcacgggcgaaagagaatctgattttctttggtgactatggttttctgaaaagaaagcgtttgcctaacgaagagcgtaatctttttgccgaggtgatagcgttgatccctgaggacggtgtggtgcacgcggtagcgaaaagtgaacggatgtttggcaagaaaaaaggtataaatggctgtaaaaactga

SEQ ID NO: 159541 - DNA, 447 bp, Enterobacter cloacae
atgaaaacaccagcaaaggttgcaaaaaaaacaacgtcgtcaacatcgaaaagaagccgtagcggtccatccctgacaggggctcaatacgttgagggcgtacaggccgtgatgcaagttgcaggtcaggcaatgaacctcgcgagtgaaaaagagcgtacagagcaggtaaaagcccaaagcttgcgtgacatgcatctatcaaataacgaggtggaaattacgcatctgaaagtgagccagcggcgagatgagcttataaccgagcgcatgacgctgagtaacgtacgccaggacgctgacataaagcatgaagaatggatgcaggattataagatgcgggaggaaacaattgaattgctgcgtaaaaaattgagccaagggaccatatcgctccaggaactggagctgctggatcgcctccacatcccctccaacaaccagtaa

SEQ ID NO: 159542 - DNA, 549 bp, Enterobacter cloacae
atgaaaacggtaccgctttttgacaagggaatagggcagattttctctgaaagaggggctcgtaacatccgagctggcaaagtgctgtttcaactggtgacaaaagctgggaaaggagtcaatccggtaatcgtctgggtcgatgccgctatcgcggtatctgactgtattggtgcatatttgcggtatcagcaggcaaaagagataacggcacagctagagcatcaaaaacacgttctcgaccaacagattaacaattgccagaaaatactgcatatggaggccgaactttggcaagaggaagaacagcagcgccaaatgatgttggatgatgctcttcgccgagataagcaggctgcgcaacggttactaaaagtgatacgaaaccaccgtacaacactcgacttcctgttcaagcaattggcgacactgcgaaaccagcctcgttcgcgcactccagagcttaatgcccttgtctccagtgttgataggttaatgcaggcgcagctcgcctgtctgatagctgcttttgatgagtcgaatccatag

SEQ ID NO: 159543 - DNA, 1155 bp, Enterobacter cloacae
atgcagaaaaaacctacggaccctaaaatccacagacgtgccggtaatgtgtccgacagcacaccgttttcccaagacaggcctgcagtgagcaaaccagaaccgcgtgtcccactcaccacacccgccgtctccggggatagggaaggaaccttacctgctgagctgacactatttattccctttcgcaaatacaccttcactctgaatcaccaaatcctttccagactagggaatgtctctcagtttgtgtttcgtgcgctggccacggacggctgtgctattgatgatgtggcgaggttaactggcctgtcgtccacacatttagcaccaattctggaacgtcttgctggttttggatggtatgaccttagcagtggcgcactgacgacacacggccgcatgatggcacaagcggtagcattgcacggaagacgcttttctctgtggattgatagtcatgataatcgctcacaggcgcaaattctgctgtctgaagaccgattttgcgaaccggaaaaggtagtcacgggcactacgctaagtgagtttgaacgtgactggaatatcctcgccgttttgcaacagcagcgactttaccggcggcttggtggcgggaaagaacatcagggcgaacttcttccgctgctcaagactttgtttgattctgcctctcatggcgtgctcgaccatcaatctcaggcctgggatttccgattggagatcgaccgggatagtagccagtgccggtatctagccgtcacgctgccgcagggattctatcctggtgatgggaaaggcagaaaaaaactctatgcaccagtactgaattaccgcattacccgcactctgcccgcgtggttcgcagaggatatggcgccccccgctcctgtaagttttacgttctgcctgctcactggccacaaacttaacgagcccggacatgaagaacaggccagttcgtggcctgctgagatgatgttatcgcgcccggcactgatggataaaatgcgcgtaatgattccgccttccgatccattgttcggtcaggaagtgtccttgacgttagcgacgcgcaaactagcactaagctacgatgtccttgccagagaactggtgaaaagtatgccatcgcggttgggagacgaatcatga

SEQ ID NO: 159544 - DNA, 498 bp, Enterobacter cloacae
atggcatttaccgtcggtgaaaactatgctttcagggacatacagaagcgttataaatcgctgaaaccaggagaaaagggactgtcgcagggcggttttttaaatccctcacgtggcaattcctctacatcaattctcgccatctttgcgcgcagagaggtcaatggccccttagataatctgctgttcatttctggcgataatgcgtaccgaaactactttaaccgtcttgagaaagtgcaaaaggaatggagtccattcctctattttaaagaaaggaatggcgagtggtcttatatgggacacagtaaggtggatcgtttactggagcccggatcagaagaattaaccctcttgcttgacgaaatgggctgcacgctggaaaaggttggcgaggcggatggcaaaccattgtggcagctttccgcatttggatggcaaggttttaacaggccgcgtaaactggaatttattgcggtcttacagcaggatgtgtag

SEQ ID NO: 159545 - DNA, 576 bp, Enterobacter cloacae
atggagcagcaacgccaaagcagtatcaatttccgccccttcgttggctcaaaatacgccagtagccgttatggagttcgagtgctggtattaggtgagtcacattacgcggacgagcacgacgtaggccacgattacacgcagtacgttgttaaaacgcacgcttactgtgctggcattccgtttttctctaagctcacagccgtgttgcgtggtgatacatcgtatccaactgatgaagaacggtttgagacttggcagcacgtcgctttttataatttcgtgcaggagattgttggcgaaggctcgcgaattctaccgaccccagaagcatggaaggccgcagaagccccattctttgaggttgtccgggaattagatcctgatgtaatcctggtgctgggtaatcgcctatgggacaaggtgccaaatcttccgccagagtacccagtagaatggtgcagcataatgcaccctagcagctcttgcatgtcctatgaaccgtcaattgctgcactggctgactctatagcgaaggctggtggcacgtttgccaagcgagaagaacagttatga

SEQ ID NO: 159546 - DNA, 216 bp, Enterobacter cloacae
atgtcacgtacacgagcggagcgccgccatcatgagcgccgcataaagcagaagcgtcgccagtattttcatgttttcgccagcatgtcgccacgtatggtcggaatcattgcacgcaccccaacatcttgctcttgccctatgtgtggaaatcagcgtgagcaccatggtatgagctggcaggagattatcgaccgcttgcgatataccgattaa

SEQ ID NO: 159547 - DNA, 294 bp, Enterobacter cloacae
atgtctacatttaatactcgtaaagaccgtgatcgccacggtaaaccattgccacactggcgcgtgaagtatgcaactcgctgtcgtgtaaagcatattcactatgccgaccgttatggcgacaatgcgccccgagtaaactacagcaagaatccaggttactggaataacttgtatacgacccgccgacgtcgcgctgatgaacgtgccctggcgcatgctgtagtgactggcgcagatcctgatggcctgctttggttgccgaacaatcgccccttggaatattactggtaa

SEQ ID NO: 159548 - DNA, 1770 bp, Enterobacter cloacae
atgctgaaacgtctgttaagtaaactgacgggaaaccgtcagcagatagaacgccacctaaagaatcagtaccagattgaggaaaatgggcttagttttccgcaatcgttggttgatgactcagagctttgggctctggcatcgtggcttgagcaactagccgaagaagactacctgatatcactaacagaccgctggttgttgagctgggatgatttgtatcgcctggtggaagacgaggaacattccagcagtctgcctcttattggcgtcccagaggtattaccattacgtgccagcctgagttcgcgaggggcattaaacgatggtgattttcgtgtctgggtttctgagtggtctgcgattccttcccgccagcctattcgttttaatcgtaccggcgctatttttacttatgaaaatcaacagcacctgttatctcgggaaaactgggtactcttacaagctatagagcagctgagtacccagcaaattcagacgcctggcgaaaccactaaccagttgggatgggccgctattagcaaatgtgcgaaacaagctgccgcaaaatttgatgactacttagaaaagacgcacgttataaaaccgacgtcgttgtcattacgcctgcgtaaggcaacggttgctgatactgccgttatcgagattgagccacacttcgaagaccagcccgctaactggcttggcagttttgacaagaactcacaggttcacgatagctaccgtattcccggagagaacggcgagctcagccacgtcatcatcccacctgaagtaaaagaagtcctgaattcaatacactcaattcccggtcgccgggttgccggaagtgaagcgctatcttttgttcgcaacccctatactttcctgggcgaagacgccgccagtgttattgcccccgaggaacacgaacaagcactgtttgatgcccatattttctttcatcactttaggcttcagccccaaatcaatgatgagaataagatagagagcattacgctagtgctggaacctgtctcaccggtgccacaacccgagacgtcattcctcttctctgctccatgggagttagataaatttattcaggccttagggataagtgttgccgcacaaatgcctgcaggttcctggcagggttacgagctggaactgagccaattcactgaacaacaatggcatgattgccagtcgctgttgttgcgttggcaacaggaagtcgagggtaaggaatttaacgatgtcctggatctgggcaaatatggcgatcgcgtcatcggcattggtgagttcgaaaaaatatcctcgccctggctgaccaaggcaaaaagtgaagactggctccctgatgacatcgacttctccgcattttcggcgaagacgctaacgggctggcaacctgaaaacctgcagcatttcgatgaactgcaggagagaattacccaggcagaagcatctggcgaaacgcatatcatctccccctggaatgagactgaactgccgctggatacagccaaaaccctcagtaagaattgggaaaaacagcaaaaggcagcacaggaatcagagggcagtactgttgaaaaagccgcccgggctgtactcaaaattgaacagaacattgaagaagcggcctatatcaaacaacgccgcgattcactcctcaatgcacgtcatgctgaacctgaaattcctctgagccttaaagaacatatccgacttaaagaccaccagcgtgaaggcgtggcctag

SEQ ID NO: 159549 - DNA, 1377 bp, Enterobacter cloacae
atggggaataaaagagaattattcaagctaaacgaaattgtacaacttcgtaatggtgctgcaataaagcaaatgttttttacggattctaaatccggtgtggatttaataaaagtttcaaattttactgatgattctatagatgtttttggcgttacaaaagttgatgctgaacatgctattaaatggcgaactcatcaattaaaagttcatgatattttaatggctacagttggatcttggccccctaattggtcatcagttgtcggtaaagttgtcagagcacctatgagtgctcatggcgcgattcaaaaccaaaatacatgttgtattatacctggtgataaggtagatcaaaattacctttactatttactgaagacgaaatccttttccgaatgggttgttaatgttgctcaaggaagtgctaatcaggctcgagttcccgttaaaaatattggggagttcattgttgacttacctccattagacgaacaaaaaagaatttcagatattctaaattcactagatgctaaaattagcgtaaatcgtaaacttaaccaaaccctagaacaaatagcacaagccctgttcaaaagctggttcgtcgattttgaaccggtaaaagccaaaatggcggtgctggaagcgggcggttcgcaggaagacgcgacgcttgcggctatgacggcgatttccgggaaagatgctgatgcgctggcggtttttgagcgtgaacaacctgaacaatatgccgagctaaaagccacggcagagctgttttcgtctgcgatgcaggatagtgagttgggggggattcctgatggatggaattcacagcgattgtctaatatcgcaacacttcattacggaaaagcgcttaaaaaaacagaacgtatagaaggaccttattcagtttatggttcaggtggcatcactggctcacacatcagttatctcgttgaaggtccaagtattataattggcagaaaaggttctatcggtactctatattgggaggatggaaagttccatccaattgataccgtttattacgtttctaataaagatggggtcccactaagttatctatattatcttatgaaaacgttaaatctttcaaatatgaatactgatgcggcagtgcctggattaaaccgagataacgtctatcgactagaagtattgaaaccgattcaatccattttgaataaattcaataatcatatttcgactatcaggaatatgattcagaaaaataatttctcaacagcaacgttgactacacttcgcgacacccttctccccaaactcctctcgggcgaaatcaccctgctggaagccgagcaggcagtaagcgaggcggaaaatgtataa

SEQ ID NO: 159550 - DNA, 1146 bp, Enterobacter cloacae
atgctggccttcggtaataaagccgcgcgggaaatggctgaacgaatttcagaacgattgccagaaagtggagacaaattaaaagcgacaaccttccatgcgttcggcaatcgtattgttgctcaaagcgttggcgtcaagcgttcgcttacacgctttgctgagcaaaataatgagttacgacaatttattgaagcgacgttagaaacagaaataaatctcagcgatgattataaaacccaattagttaaatattttgtttgttacagcacgccagggcgatgtgagtatgattttaatgccattgaagaataccatgaatttctccaaagctgccgtctgattacacttactggacaatgggttaaaagtgtcggcgagttacgggtagccaactatttgtatttgtattcggtcccctttgcttatgaagcgaattatgaggttaatacagcaaccatagaacgccgccagtataagcctgacttctacttaccaggcagtaagacctatattgaataccttggcgtagatcgacaaatgagaacggccccctttgttgatcaagacgcttatcttgaaggattagcctggaagcggaaactgcatcaacagcacaaaacccgactggaagagttatacagctaccagttaagtgaaggaacgctggaagaaaatatactcgatttacttaatcgggtgggggagtcgcagcatttacgtgacacagacacacttctggatgagcttaaaagttcaggttcatcgccgtggcaaggctttatcgatttgatgctccgtttccttagtcttttcaaggaagggcaattttcgttttcagatctcctggcctcaccccaacgtatagatacggggcgcactcaggcgtttattgcgttatttaaacctgtctacgatgcctatgaagcccatctcaaagagcaacaagaaatggacttcagcgatatgatcgcggaagcaacaacggcacttcaggaaggtcaattccatcatcgctatgactatgttctggttgatgagtttcaggacctttcgggtgggcgagggaagttgttaaaggcattactggcaacccgggataatatgcgactgtttgcagtaggagatgactggcaggctatttag

SEQ ID NO: 159551 - DNA, 1059 bp, Enterobacter cloacae
atgttacctctggacaaaagttatcgctttaacaatcgtattcatgagctcagttccacctttgtcactcgcaacccggcgcagttgaagaaagagatcacgacgcatacccaggtggaacatgcggccgtccaactcctcgatattcaggaacaaattgctaatatccacattgccgatcgcaatcaaagaaaagctgaggcttatcgtcaacaaatcaggagagcgcttgctcgttgccatagccgggaagtgaggctcaacagtatccgtcgggcccccgtcatgcttattggtcgttatcgtctggaaaatatgagggatcttaaggagttggatctgaaggcgctaatgtccgagttcccacttcttgatattcaataccagacggcgcatgccagtaaaggcctggaagcaaattacgtgctcctgctggggctcgaaaaggggagttttccatcagccaaagaaaatgatgagttgatagaccttcttctcccggagcaagagccatacctgtttgccgaagagcgtcggttattttatgtcgccgttactcgtgcccgacactatgtgtttatgatctttgatagccagaatacctcagctttcgttgaggaaattgcaaaaatgggtaaacagctcattacaaaaagtgatgctcttgaagtcggtcaatggagttgtccagattgtgagtccggctccttaacgggcaaagtgagccgctatgataagaaattctatgtctgctccctctcacccgcttgtgattatatggccagttcctgcaagcaatgcagctcaccgatggtgatgcaaaatggcatgcaaagggtatgtgcgaatcccgaatgtcaggagattgaaattgtctgtcggcgctgcggtcttggcaccatggttaagcgtaagaacaaagacggcggcgctttttatggctgtaaccgatttcgtcgggataaggcagactgttgttatgaaaacattacgagcgaagagtttgagcgcagagtcgacactgcaaaacgccatgcagcaatcatgcaggagagatga

SEQ ID NO: 159552 - DNA, 813 bp, Enterobacter cloacae
atgaaatctaaatatgattggatacgtaaagcacaaagatgtctgcggatgctttcagagctgcatcgtcttggttttcagcacctcagagggatgccttacttcaatgctcagggatttagattcgcgatcgccccgcgacattacttttccgacaatggtattgcgattccatccgcgaaactttcagatgaattcgtcgcaatcactggcgcaggtcactatttcagctggacagatactgacggtaatgatgcccgtgccttggcagaaaaatttattactcgttttcctgatatcgcactcgctggaaaagggcgtgattgggagtatgcgggctggctatcagagctcattggttttcttgaacagggcgacatgatcccaaccgtatggtgggaagaaatgaacggtcggcctgaggatcttttagctctgcctgtctgggtcgaagggaaggacaatattgattggataggggagaggtctattatttctcaaacgaatcctcatttccctttgcctggcaaacccgagtcgtccggaagtgaatggtggggaaggcagccctattggacagacgccctgcatgagatgtctcaagccatgcaggatggtggccgtctggtcaccattgacgtaaagaaaattagtgatcagttattcatggagaatggccctgcttacaagctattaagcgccatgaattctgtgtcggagcatgaaggctacgagggttttaaaggcgctccccgtcttgtgttggccttgctttggaagctgcaggaaataagtgagcagcgtaatagttga

SEQ ID NO: 159553 - DNA, 243 bp, Enterobacter cloacae
atgacctacatcaaaaaaactacgtccaacgggcgcaatatgcagcgtgtttgttatgtcaccggccacggtctgactaaccaacgttttgaaagtttccgcgcattttgggagtccgaaaaactcgaaggtgatcatatcggtgtgcgtacaaaactttttcaagatgccgaccaggccaattaccaggggtacagcattcgcatggtttataaggctgacgacgaggcagggctaaagtga

SEQ ID NO: 159554 - DNA, 1203 bp, Enterobacter cloacae
atgggactacgtttccggcagacattcacgctgttccctggcgtgcgcttgaatattggaaaacatggatttagcgcgtcattcggcgcgccgggggcaaccgtaaacgtcggcaaacgcggaatacgagcgaccgtcggcattccagggagtggtatttcttacactcaagatctgtataagttcggcaaccagcaaaagtatcatcgccaaaacttgcgctacattgacccgcaggcgacgaattattacgtgcctgacgaaggcgaccacatgatccgaagtgccgccgtcgagcgtctgactagtgaaggcctgaagccgctgcgtgatctaattataacggccaacgcgcaacagaaggaaatccgcgctgacctgttagaggcccggcaggagaaaatacgacaaactgacttgctgcaacgtaaaaaaactagcctgtttcgtcgattctacaaaaagagtattgccgcgctggaagaaagccttccggtagttcgagccgaggtagaacgcctggaagagtgggaagagaacacaaagattagaatcgagttcgacgcgggcgagcactgcgcgtatgtgtacggcgaggttgtgcaggcgtttgaaggcttgcgccagtgtagccatatttgggatgtgacgtctgaaagcgacgttgaccaattccgtgaccgcaccacggccagccggtatctttaccgcaaaccggtacaattcgactttgtgagcaatgacctgatccaattcgaaggaaaagctatgcggtttcagaacgtcaacggcgaggacattctgatctatccaggcattgcacttattccgcgtgcggatggcgtttttgccctaatcgatttgcgagagctgaacatcaccggcgccagtaagcgttttattgagtccgacgctgtaccgcgcgacagcgaggtagtcgatcatacatggtttaaagcgaataaagatggcgggcctgatcgccgcttcaacggcaactatcagatcccaatctgcaaatatggcgagctgaatttctactcaagcactgggattcgcgagcagtatcaactttcgcagtcaaaaccggccaactacttcggcgcaatctttgccatgcaccaggaagcgctacaacaggcagcgggcaaaaacgaagcgccggggcgagttgcgaaccaatcgcaatatttaggtgaatag

SEQ ID NO: 159555 - DNA, 144 bp, Enterobacter cloacae
atgatcgcgttcaaatcgttccgtcgggcacagatggcgctggctggcatcgacctgatacacatgctgcgtcagggacaataccagcctccttgcggggacagtccgcccccgccagagcagttttacctgctgaccgtctga

SEQ ID NO: 159556 - DNA, 1326 bp, Enterobacter cloacae
atggaacagccgaaggttatcacccaagatcgacaagttgccagcctgaaaccagctgatggcaaagaccggatcgttgtaaaagtgcagtcaaaagcgggaccgggattgtcagtcgaatcccgaaccgggagccaaaccaagagctggctctatcgcccctacctgaatggtaaacagattaaagtgacattgggagcttatcctgcgatgtcgctcgctcaagtacgtgaagttcatgccaaagctgttgagctcgttaagcagggcatcgacccacgccatgctcgtatcgaagataaaaaggcaaatgagaagatgccggtcttctcggaactttgggaaaactggctcgaattccgcgcttcaagcaaaccaatcggcccgcgaacgcttaccgattataaaggtacatacagcaggcaccttgagaaaaagttggggaaggttcgcgtttgtgatttatcccggacatttctattcgagcatctgagcaacgtacgtcagacaagtgctgaaggcgtccgaaaagggctcatcatcttaaacatgactttggatcatgccagtctccaggggctcatcgaccacaacccagcgcgcctattaaaacctgccatgttcggtgcatctatgggtaaacctcgcgaacgttggttacctaaagacgaattgaagatgctctggcaatccctggatcaagcggttaatggcggaggttctgtatctgctggtggccgtgggattgcttcaagcgtggttctatcacattcggtagccaatgctttacgactcattatccttacaggggttcgtcgctctgaagcatgcgaaatgcgttgggaccaaatcaacggagatcgctggacaatacctgaaacaaaaaatggtaaaagccatgttgtaacgcttcatccactcactctttccatattgaaaaaacaaagaattattgctgagggagcctatgtatttgagtccaccagcaatcccggctttgctattacaggggatgcagtgacccgcgcacttgagcgtttgagaaaaaaatatctgggtgaaattgccacattctctcctcacgatctccgccgcagcgttgctaccggctgtgccgagtaccttgatgcgccagaacggttaatcgaattactgctaaaccatcttcctgcagacagaatggttcgtacctatcaggttggtcaacgagcagagaaattgcggagcttgtttatgcgctggggtgacttcgttgagcatgaggtatcagcgtccagtctgcctcataaagacaatgtcgtcacactgaaatttggcgctaagtaa

SEQ ID NO: 159557 - DNA, 444 bp, Enterobacter cloacae
atgttattaactcttaaaaaaatttgttatgataattttagatttgttttaagtggggcgttttttataatttcagtatccattgttgttattgttaattttattggtgcgcgttataatttggtcattaatcgcaccttggtttttgcttttctgttattaacacttctttgcatcaatagcaaaatattaaaaaaccttattggctttatagccttaacattaatcgctgctgatttatctcttcagatgtatgcctggaatcacttcaacgctaaatttgactatggttttgcattaagtgtaataaatactacaggtagcgaagcattttcaatgttaggcgtttattggagaagttgtgcaatttttatggggttgctgtgtttatttgttttaactatcaactgtagcacaagtaccctgccgttaaagtataggtga

SEQ ID NO: 159558 - DNA, 615 bp, Enterobacter cloacae
atgcgaatcaacgtggaggcgctgcagtcgtatgtaagcaatgagactcaacaggaattactggcggggattattcgcagcaacagccgggccgcccgactcgtcaatcaattattgctgatgatgcacagtgaagcgcgtatagataccgttatgcagccagtgccgctgacgacgctcattcaggagcgaatggctgcactggaaccgctggctacggagcgcaggatagagcttgaactcgtctctgatgatgaagtctggatcactggcatcagggagcgcctgatgtcgctgattgacaatttgattgagaacgcagtcaagtacagccctgagggcggacgggttgaagtagagatacgatcgcgggataaagccacgcagcttcgtgtctcagatgccgggcccggtattcggcctgaattgagggagcgtgtgttcgaccgattttttcgcgaccccaaccagatgcaaagcgggagtggactgggacttgccatcgtcaatgcggttgcgcagcaacacaacagcatcgtaggcctgtgtacgtctgcagaaggcgggctgctggtcactgtcgatttcccaactcagaaagccgaaaatgcgtag

SEQ ID NO: 159559 - DNA, 1368 bp, Enterobacter cloacae
atggaaagtgatttgacttaccctgagtcattaatattacctggagatattaatgacttgaaaaaaattagagttatgtttttctcgaatgtcttcgatgcaaattacattgactttcctgatgaagttgttgatatatctttgaactcaaaaatgaatcctaaaaacattcataaaaatagctttaggagattagaaagcgatcttgaaaagcagattagattcttgaattctcatgcggcaagaaaaataaaattacaaccacctactaaaattgaatatcgaataaataggacggtaaaagaaagcttgcgaggattgagtcggaaaaataactttcgaagctcaaatgatgaggcgagtagtgaattaagttatatttcagagggtttacagcgaatttttttaagagaagttcgtaagattggtcgtgataatcattttaatttgtccattacaattataaaacagcagttcatagccagtttgataaatccagactcaaaagttgattattgcattgctgatatattagaaatagtttcacccttattacgtgatgatgaaacatctaccgacgttattctgcaagcgatcttggacgagtcacagtcaagagacagtatttataattacacagaaaatcacattatgagtgaggttgttggttatgttttactcaacctggaatctatttttgaatcgttaaattttactcctgattcgtcattaagaaactcaaagataattttttcgttagactattctgaatgtagtaattggcaacatcaaaaactttcgaatatgtttgaagtattttggggttgtaatgcatcttggtccggcttaagttcagggcaaaaggcatatctgaatatattcagtttggtttgggcggcaatctctgaaggtgaacattcgcgcgatgaaatggatagtgttatatgtattgatgaaggagacttatatttgcatccacagtggcaaatcgacttcttgcaaacacttataagaagtcttcctgaaatatccaaaggtaaaattcaaatagtttttactacacactctccactgttagtatcagatgttcccaaacaatgcttgttaatacttaatggtaacaactcacagttgaatatgctagaagatattaatacgtttggagcgaatttttatgatatttactcaaaggcttttggtcttaagggggtgcgcagtgcatcaatctcaaactcttatatttcagaaatactgcatatacttgacaaagaaactttaacaaaacgcgatattaaaaaattgaaagaatcattagggttaattggtgatgagttggtcttgcatcatattctgaaaaggctttcttaa

SEQ ID NO: 159560 - DNA, 513 bp, Enterobacter cloacae
atgacattacaaatccgtgaagccacacctgccgacgcgatgttgcttaatgcgctgggctaccgcatctaccgcgcacactttgaacatctgtgggagtcaaagtctgaactggaagcttttttagcaagcgaatattctctggacgagctggaacagagcctgaaagagcaagcggtctgttggtatgtagcagagaccgataggccaattggttttgcgaaagtgacctatgaaagcagcatccctgatacgaatatgtcagggatgctgcttaacaaaatctatcttgatcctgcagacacccgtaaaggttacggtcaggtgatgtttgacaccgttaaagagctggcccgggccaaggggaaagactttgtatggttggaggttcttgaacagaacgaacgtgcctgtaatttctaccgcaaacagggcatgaccttaattaaaagagactatttcaaaacagcttcacagcagagcgtcatcaggatcatggggattgctgtctag

SEQ ID NO: 159561 - DNA, 1131 bp, Enterobacter cloacae
atgacaaccaacagtgatagtgcattattgctcgtcgatgatgataacgtccccgtattgacgacgcggccgatccccacaattgatagcttacctgagaatactttgcgtcttgatgagaagggcatctcgcagtttaatcaaatgctgagtctcatcccgcaggcaagttccacgatagctgcacattccaaacatattgtgcattgtaatattgcgttcgatcgcctgattgttcgtaaagatggtactggcagcctgggcatgacgcgaaatgccgcaaacggacaaatcaccgagcatgtcagtttgaatccagcggaaaaactcaaaagtgttgtaaataccggacttctgcttaatcttgcttccaccatcgtcgcgcaaaaacaccttgctgacatcaatgaaaagctagagaaaatcattgagatcttgaataaaacccatgcttttcagcaggatgaacgttcaacaaaaattgctgcttttcatcaaatgctttgccaggcaggcacaacccttgccaaaggcgacgccgtcagcgaatttacactgcaaacattgtccaacagcaaacaggaaattcatggtattgcgctgcatttgaaaaaaaatatcgaaacgagtgccgcgaagttagacagttttgacagcacaagtctatttggctccaacgatatccgtgatgacttaaaagagattatcgacgaacagtctcgtctgttcaaagagtatattttcagtatgcagtgcctgatgatggcaaatctcatactttattatcaagacgacctccgtcaggaatttaaagatgaagcggagcggcttatgaaagagattactgcggctggcggtgttcaagatatctggaaacaatcgcagcagaaaatcacgtttcagctaagtcgtatgaaaccgctttttgaaagaacggtgagcactgaggccaatgtacgtcatgttgagatccatgcaagaaaatccggagatgcattaatgtccgggacagccttactcgcgtcactgaatcagcggcttgaaccaatgtcagttggtgcattgctggagatcgaaaatgggaaagttgtgggcggtgtactgatcgatgacggtctgtttgatgcatag

SEQ ID NO: 159562 - DNA, 630 bp, Enterobacter cloacae
atgaaagttccaattgaatgtgacgaaggtattctcagccttctactcgcaaccgagaaaacacatattgattatctggttgatgttttgacggatggcagtcgagggaggttagcactctcttcttcggttaaggatttgttacttatggaaaaatctggaacggacccttattccgaagagatacttcgccagttacttcacgagtttcagacttatggtggccacagcattgcaaacatgttccgcaaagcaccgttaccttataaaacaatactccgggacgttcatacaaaactcagaggtgtagggactgaaagcaaaacggatctcaagcttgaacaagaaattgtgaccgggttatttggcagcgaatggaaagatatgccggagcatacaagactggatcgcagcacggagatgaacgttgtcagtggcctatttaacctgggaaaaagagtggagccgcaggagatggctcgcaattttggcgcgaagatttttagcaatgtcgccagtattgcgcgaacatatgcgaatctatcgccaatcttgagcatcagtgaagcttatcgtgtaacgatcccttttgtcgctcagttggcatatataaaaatgctgactgcgtaa

SEQ ID NO: 159563 - DNA, 573 bp, Enterobacter cloacae
atgcccgtcaccaatttttaccaggcccaaccggatggttatgtgcgctttgaatggcgtggcaatgccatagaaggcgagtttttccgctatgaggcgtgtggtcgggataccgatcccaaatggggttacatccggccatttgacagagccctcagacaacaactgatcgataatttacaaaaaacacatggcatcgatctccaaacattcacctctcagaatgacctgatcacctgtgatgcttttgtcacccataaagcactgcaggcagcacaccaggcactcatagagacgtttgatttcgttcctgaatctgagctgaccactgagagagaacacatcggttactgtcgggtcgatttgataaggcgccagtacattctggggagcaatcttaacgagtccagagcgtccctggacaacctcaataccgagttccgtaaatgggtaacgcctttctacacgccgctgcgttatgaacggacatggttaacccggcatcgcgaagggttgtttcgtttagccatcattgttgtggtcgcggttatggcctgtctctactacggctga

SEQ ID NO: 159564 - DNA, 135 bp, Enterobacter cloacae
atgattctgccaccgccggcgtttgtgacccgttttctgacagtctcgggggggggagaactggcgagtgattttttacgaaacggcctcaggtggggcggactcgaactcaagccgaaggcagatcgtcgataa

SEQ ID NO: 159565 - DNA, 744 bp, Enterobacter cloacae
atgtttaaaataccgctcaaaaaaactgtttttcaggccagctctttgctgaccatcctattaatcgctgcgccatctgtatcttatgcagccgaaagtattgatcaactggccacacgcattggaatggatcactttcgtgaagcgattaagaaaggtgaccgcaatgcctttaaaaccctgccggcaaaaggctataaaaacggcttaaccggcttactgcttaaaacgaatacctacgtcaatcccgcatacagctttgctgattgcgatacggacaccgttattacctcggcgcaggaacacaaaacgcttcctggctgccgcgtatcccttaagttagcgactaaagacgctgacggcagctaccacgataatggcattcgcatcgaatacggtattacccctggcgccaaaaagtttatcgccaacaattcagcatgggcgcaacatgccatcagtggagatcacgtgctggaaagctcgttgaagcaagatgctaacgatacggtctgcacggcatggtcaacgatggcgaaaaatatcgccatcgggcgagacgaacacaaccccatttctgtctatcaacaacaaatcgacaatctcagaggtcaacccggtatcactgagagtaatattgtttttgcccatgcccttgcaggcatggtgtacaaagacatggccgcaaaaaaaccgcaggaagttgaagcactggtttatcagacctgccaatcgggcatgtga

SEQ ID NO: 159566 - DNA, 873 bp, Enterobacter cloacae
ttggaaaataatcatttactgtcagatggcttactcacctcgctgagtgatctggaattattgtcgcttcatgccggaattttaaccgaattgcgctcccggtgtgtgatacgcacccagaataatcctgtcggtgactatgccgaatggctggtggctaaagcgctggggatgactcttctcagtaattcgtcggcgggtgctgatgccatcgatactgacggcatgaaagtgcagatcaaagcgaggagagtgacgccggataatccttcccggcaactgagtgcgttgcgtaactatgaggcagctgactttgattatttaatcgcgattatattcgatggaacctacaacgttcttgagggttacaaaatcccacatgaagtcatacgggattacgcgcgccacagcgagcacgtaaacgcacacatcattaacctcaagggtgccattcttgctgatcctcgtgttatttccatcaaagaaaacttaaccttcagccgttcagtttcagtaaacaacgtctctgtccaaaccgctaaggtcgacactatggcgggggtattgaatcagcaagcgaggataacgagccacgctacactggctgaacgcctcaaggctatcggaatggcgtgtttcgtcaactactaccattgttttgccgattcaaatttatccggcgcggacattattgagcaaatgcattcacgtgaaggatatacagagaaaagttgccggagtcgtatcagtaaagcgcggaaggtgatcagtgaggggttaagtattgacgcgttgatgtttatcgctgactcagggcgaatacaggataccgtcagaaatgatgcgcttaaacttatccgtgttcttgcgtga

SEQ ID NO: 159567 - DNA, 570 bp, Enterobacter cloacae
atggcgcgtcccctcagtgaagaaaaacgacaggcattgctcgatgcagcggcggacttcgtcgctgcatcaggcactggcgcgtctacggccaggattgcaaaggccgctggcgtttctgtgggaaccctgttcacttactttccaaccaaggatgacctgctcaatcagctctttgtggacattgagactaacctcacagagacgatgctggccccctatcccgcggatgcttccgctaaagaccgactattcgcggtctggaaccgtctgatcgactggggactaaagcaagccacagcacgcaaggcccttcgccagttgaaagtgtccgatcgcgtgacggcggaaagccggcgccagtgccatgccatgcagttggatgcgcgtgcgatggtggaagagtgtcttgccggccatgccgcgcctgacaggatagctttctacatagataccattcttttcgatctggccgacattagcatcaacgcaattacggccagaccgaaggaaagtgatgccatccgacaggccggatttgacctgttctggaacgggtcagcagcttaa

SEQ ID NO: 159568 - DNA, 1077 bp, Enterobacter cloacae
atgtccactaccaaacgccgcgcattgatcctcatctcttcgacccgacagctgccgctggccgaaccggacgacgtcaaatcgatctcaaccgggttcttcctggtcgagatggctcaagtgctcaaggagttcgagaacgattacgagttcaccttcgccacccccgacggcaacgccccgcaactcgacatcaatggcatggccctgtccatgcaagccatcgagaagaccggcattattaccgttcctctgcgcatgcagcagcgtcgccgctcattcgacgtcaaccgcttccgtcagcgccaccccgggctggtcgcccgccgcgagcaggaagtccagttgctggagcggcacatcggccggctcccggtctccgaactattgcccaacagcgaacccgagcttaccgagtatcgccccgaactgctccgccgcctggacaagctgcctgagggagtcttccactcgctgcaggacctcgtcctgcgccaccgcgacccggccgatccgttcactttcgccgacttcgacttcatccacgcgccaggcggtcacgccccaatggtcgacttccgtgacaacccgtggctcggcgaagccctccacctggcccgggagaacggcgtcatcatctcgctgatctgccacgcgcccgtagcggtgacctccacccgtcaacgcatcaatgctcagggtcacccctacctcatcagcgacaaccctttcctcgccgccgccatctctacggtcccgacgattggcgagctgttcgcgctgcggttcctctacccgcgcgtcccggggaggaagacacgactttcctacttcgtcgacaaggccatcaaggaagccggcttcaaactcgcgacctccctgaacatggctgccccgctgctggcctacgaaccgtccgtgcggctgctcaccggcaacggcccacaggccatcgatcagcaggcagccaggctgcgcagcgtcctcaccagcacccgaactgctcagcgcggcagcggcaatcagttgagaaaacaagccgtgaccgtccacgccaccggccacacacaacggtaa

SEQ ID NO: 159569 - DNA, 822 bp, Enterobacter cloacae
atgtctgaaaaaatctggttcatcacgggttcctcgcgcggcttcggccgtcagttcacagaggcagccctgcagcgcggcgacaaggtcgcggccaccgcccgcaaaaccagggggctggccgacctggtcgagcggttcggtgacgcggtactgccgctgcaactggacgtcaccgaccgcacccaggtgttcgaagcggtcgcggcggccagagagcggttcggccggctggacgtggtggtcaacaacgccggttactccctgatcggcgccgtggaggatctcggcgagcaggaactgcgcgaccagctggagaccaacgtcttcggcgtcctccatgtcgtccaggcggtactgcccgtcctgcgggagcagcgtagcggccacatcgttcaaatctcctcggccatgggggttgccaccttcggcggcaccggtggctactgcgcctccaagtgggcgctggaagggatgagcgaggccctctcccaggaagtcgcgccgttcggcatcaaggtcacgatgattgaacccggcgccttcgcaaccgacttcgcgagctcggcggtcttcaccgcgcatggtcaggacgcctacgggcccctgtacgcgtcgctggccgagatgggtgcctcctcccaggcgcccggccccgagggggtcggtggcgcaatcctccagatcgtcgacgccgaggagccgccgctgcgcgtgttcttcggcgaacagcccacccagtggatccccacggtgtaccagcagcgcctggagacctgggcccagtgggcacacgtctccagagccgcagaaggcaagtag

SEQ ID NO: 159570 - DNA, 819 bp, Enterobacter cloacae
atgagcaaagtttggtttatcactggcacctcgaaaggctttggccgcgagttcgccctcgccgccctcgagcgtggcgacaaggtcgcagcgaccgcccgcaacacggacactctgagtgacctggtcaagcagtacggcgacgccgtcctccctatcaaactcgatgtcaccgaccgtgaccaggtgtttgctgccgtgaagtccgcacacgagacgttcgggcggatcgacgtcgtcatcaacaacgccggctacgggctcttcggaacggtcgaggaaatcaccgagcagcagctgcgcgaccagatggagacgaacctgttcggcgttttccatgtcacgcaggcggtcctcccgatcctgcgcgagcagcgcgcgggccacatcatccagatctcaaccatgggcggcattatggcgtttccgacgcttggcgcctaccatgcgtcgaagtgggcgctggaagggatgacggatgcactctccctggaggttgccggcttcggcatcaaggtcaccctggtcgaacccggtggcttcgccaccgactggtccggtgcatctgccatcgtcgccgacgcgcaccccgcgtacgcacctctgcacgagaacatggccgcgcggcgggcacaggtagtacttccggagccagtcggcttcaggtccgcgatcctcacggtcgtggacgctgagaagccgccgctgcgcgtgttcttcggggagggaccgacatttatggcaccgcaggtctaccagcagcgcctggagacctgggcccagtgggcacacgtctccagagccgcagaaggtaagtag

SEQ ID NO: 159571 - DNA, 273 bp, Enterobacter cloacae
atgaaatctaaaaaatctgtttttattgaaggacatatcctgtcaaacagctgtcacgggcaggccggtcaacctttctgtattcaccgggtcaggtttagtaatggtaaatatgcgattatccgggtggcatccgggatatgtttcaaaccaggcgaaattattcaacgaaacgattgtgagtggttttataaacttaccaaaattcgccttctttcttttgagtaccttgatgatgatgaatcaagaagacaatttcttgagtatcaatga

SEQ ID NO: 159572 - DNA, 222 bp, Enterobacter cloacae
ttgttgcccgcaggtaacattagtgctatctacacgccgaaagacgagttgcatcaggtgttcaccgaaaaaggtgaactcatcagaccgatggcactgcggcttactggcgatatccgcgacatccctgctctgctggcacaatgtaatctgagtgctgaacggttgcctgatgatgatggtttttcggtgttccgtttgattccagaacttggtgcttga

SEQ ID NO: 159573 - DNA, 279 bp, Enterobacter cloacae
atgttccagtggtttggttttaattttggcctggtaacgatgttgggggcattagtattcccagcattatatttagtcagctatggatttattcgatttgatgcatggagactgggtaaagatattccacggcataaaatattgattaatgtatttttggctcttgtcatgggttttgttttgggtgggattgcccagcatctctttgacaaaatcagcacctgtttgcaactggttgataatttaggcagttgcatacgactgttgcctaaattttga

SEQ ID NO: 159574 - DNA, 921 bp, Enterobacter cloacae
atgaaagagcataaaataacaagctgtatcctgacaggcgtattatttctggcggtttcactgacctgggggacgacgtggatggcgatgaaaattgcgctgacatccgtcccgcccgtctttgccacgggattgcgttttctcatcgccgcgccggtactgattacgatggcgaaatggtcgggaaaaccgctggtgtttccccgcgggaagcgacgttttcaggttgtactttcgctattttattttgccgttccttttaccctgatgatttatggtgaagaaacggtgtcttcaggaatggcctcgttattgttttctgtgatgcctgtcgcgatagtgatttcatcctggttttttctggggcatgtgattacccgtgtgcagctggcgggcatggccatcgtgatgcttgctctgggcgtgattattattcaagagtctggcacaacggaaatagaaagctggaagggcgttgtcgccatcctgatggctgttgcacttcatgcggtggtgtatgttcagtgtaagaagtactgtgccgggatttccgtattgacttacaacgcactgccctgtctgggggcggccgtattgttgatgggctgcggggtgttctatgaacaggtgaatgtggctacgatgggcaccaggtcattattcgcgattgtttatctggggatagtggcgggcgtgctggggataatggcgtattttcagcttcaaaaaagggtggtgccgttttatgcttcactggtttacttcatttttccgttgattgctattgcgcttgaggacgttgtgacacagcaaccgatgtcaatgggctctgcattgatgattatccccttcatgagcggtatcgttattgttctctacccaatatgggcccgatcttctgcagtaaatatgaaaatataa

SEQ ID NO: 159575 - DNA, 639 bp, Enterobacter cloacae
atgaccggtaagttactgcccgataaccattttacgctctggacggtgacggatttaacctttctggaaaataactacggcacgatgccagtggcagagcttgctaccattctgaaacgcacgccgggtgcggtggcactgatggccgataagctgggctgccgacagaagcgaaaccgcccctggagtgaagcggaaatggagattatccgtaaacactttgcacagggggttgaggctgaagagctgacccgactgctgccagggagaagtgtcacggcgatattttcacgggcgctcattatgggcgttcagagtgggcgcttctggcgggaggacgaacttcgtattctgaaagcacaatacccggtggtcggtactgaagttatgcaccagctgccgggcaggaatgaggttgccgtcagggtgatggcgagaaggctggggctgaagaaatcccgtgaaagccaggtcggatttcgcccctggagtgatgaggagtgggcgttgctggaaaacaacatgcatctgagcattgctgagcaacatgcgacgttatttcccgacaggactaacagggcggtagaaaaagcacgggagcgacttttacgcaaaaaaaagctagcgacggaggattaa

SEQ ID NO: 159576 - DNA, 249 bp, Enterobacter cloacae
atgacacaaacgatgacggatgacgcaaaacgtattatgggcgcattcagagaagcgccggccatgacgttacaggcggtcaccaccatggcaggcctgagtgagcacaccacccgctttatcctggagcagttacggcaggccgggctggttctggaacgacagaagcgctggaggatggccggggataatcttacagatgaccatgaaagcagcgagcgatatgtcccggaaaggcggtgtgaatga

SEQ ID NO: 159577 - DNA, 303 bp, Enterobacter cloacae
atgattcgtcatattttatttattaagtttactgatagtgcattaccggaacaaatactggccgtcagaacggcattcctgcaaatccccgatcggattgaaggcgttacaagtgtggaatggggcatcaacaatagccctgaaggcaagaatagcggcttcacacactgcgtgctaatgacgtttgccgatgaagctacccgccagcggtatttaccgcatccggcacatgaggcgctgaaggtcatcttcaggtctatcctgagggacattattgtgctggattatacggtagacccctga

SEQ ID NO: 159578 - DNA, 360 bp, Enterobacter cloacae
atggttaatattattgatgatcttagattttataactcaggtgaatgtgtggtgtttaatttttacagttgggttgagttattaaaagctattatcgttaaatatgcaaagaaaacagagagtgaagcggaggaattagttttaagctccccgattgtatgcaatgaagttaatgattttatgtccgtagctattcgtagtcatgaaagtgaatatcattgggcaatgctaatagttcatggtgatgggtactggatgaacggtattgaacttgatgagcctgatggttattttgactgggaaaaagaatataggagaactcatgatcttaaagaaaagtgtttcgtgtatagcaattga

SEQ ID NO: 159579 - DNA, 4950 bp, Enterobacter cloacae
atgagtgaaaataaatcggcaacgctggtaagcagtaaagatgctgctgaaaagaacttttcaactgagaataaaatctccggaggctgcgttaagtgcggctgcgaggcgctgattcattaccattatgattccggaaagccggttcctgatgcgccctttgtgctgaccgacagcaatggcacgcagattaatggtaagacagacgctgacggcctttgttttatttacgacatgggatgcgggacgtttgaactgctgctggatgaaggttcagacacctttgaaccggaagaggcagagacaaataacccggtactgcaggaaaaccctgaatatgcccgtctggcgggagagtacttcacgctgtttctgctgcttcgtaagcaggggctactggaatatgatgctgaggacagcagcgataaacaggtgatggtcaatgataccggatggctgggggggattttcacctccattccggaaggttatcgtgacacgtatgtacgttttcgacagctcgaccggcaggttaatcagggcaatatcgcattcaaagaggctattaataaaattcaccaccgtctggccgcagaagtggctgaccatctgggggatgataacaccgcgcttttgctgttctgccagattgccctgggttttgtgcccgtggtcgggcaggccatcgatttttatgccatcggtgaatgggcatgggacagctggaaaaaaccggactccctgaatgacccgctacatattgctgatggtgtgttgtgcgccatcggttttatccccggtctgggggatgccatcaaagtctccgggcgggccattctgcgcggactggaaaaatcccatttgctcaattccggtgatatccagtttgccattcgcactatcagaggactctctgacggcaatctggtgaagggactgagttatctgcaggggcaacttaagcattatggcgcgcaggcccgggcgttgttatctgagatacattcagccctgtcaaaaaccctgacggatgcggccagtaaccgctggattgtgcagatgatccacgcggagtttcgtgcgctggtggatgtgctggaacgactcattgaaaaatttgatgcttcagtggcgtacatcacggccaggtttgatgagtttgtttcgaaagtggttacccgtgtatcggattctgcacgccctaaaggcagctatgaacgcaaaaatgccgaagggatctcagctgcaacagtatcggtgaatgcaggccgcaaccggggagaagtcgtggataaaacacggcttgagcaggacgcgctgaaaaaggatgaggcctgtctggcctccagcaaacattgccagacggaaggtgaaccggttgatatggcgaccggagctgtcgtggactggcgtactgatttctccgtaccgggattctttccgctggaattacgccgtttctatcgttccaccggcgagcgtcattctggcctgctgggttcactctggcgctgtcagtgggatatgcacctgaccctggataacggactggtcacgctgactgacggtgagttcaaccagcatgtctttgcttcgccggatgagggtcagcatcagcgggcggcttccggtcccgaatggcgtctgagtcgcgaacaggggaaactccggctacgccatgtcgacggcgtccgttatgagtttgagtatgcgcaaggcaaacagcttaatctgacgtcaatggaagatcgcacgggtaaccgtattactctgctgcgtgaccggggaacgttacgctggatcgtgctgccggactggcgtctgatttttgctgaaactgagcataatcgcatcaccacactgagattgtgtgacagggataaaagggcggttaaaacgctggctacgtatcgctatgatacacagggacatttacttgaagtgcgtgccggtgcaggacgaagcttcgattatcgctattcccccgaaggctggatgctccggtggaatgacctgtcgcaaacgtgggtggagcatacttacgaccacagggggcgtgcgcttaccgacagaacatccggcgactactggcgtggacgatatgtctgggacgatgagaccctcaccggccattaccataacggctttggtggagttgtgagctatacccgggaccacagaaataacatcctctgtcgtcgtcaggctgatggcggggaaaaccgttttgaatggctggacggcgagcttgcggcacaaaccgacccgctgggcaaccgcacggaatacctgaggaattcgtgggggcaggttgtcgccgtcacccggccagacggaaccagccagcgctatgattacgacgatgaaggcgtattgcaggcatataccgatcccagtggtgcgatctggcagtatgagcatgacccgcaggggctgctgttggcagttcaggatccggagaaccggcgccgggaacaacgctggacagaacggggacagctggccttcctgcattcgccggatggtcgtgaacagcactggcagtataacgcgcacgggctggcagagcgtattgaatcaacgggcatacctccggtgcaatttctctatgataaacagcatcgtcttattgaacgccggatcgttccggaaaacgggaaaatactgtttcgtcgctgggaatataagggaagcagtgaaacgccctgtctggtgcgttatgaaaatgccactgaaagtcatctgaaatgggatgcagagggcaatctgacttccgtacgtgacgcactggggctggtaaaccgttacacctggggggcgtttgataatcttaccgggataactaacccggagggggccaccgtcaggcttcactataacgcggaagctgagtttgcaggcgttaccaacagccatggccagaaatggatataccggtttgacgcctgtgggcggttatccgaagagcgtcactatgacggacggctgtaccggtatgagtacgatgtctgcggacagctcaacgcccgccatgcgccggatggcagcgtgctgcgttatggctacgataaggtccgtagcctcagtgacatcacggcttatcgcgcagacggagagcaggaaagcatcacgacgttcagctatgacgccgcagggcggttgctgaaagccgcaggtacagatgcggtggtggaatatgaatggagtccgtcgggaaagatactctgtgagcacgttaacgggcaggcgattcgttctgtctatgatgagaccggtctgcgggtgatcgctgacggactgctgaaagaactggggctcagctggcatcaggggcgtctggccgcgctgtcggtggggagccatcagccgctgatgttcagccataatggggctggcctggaacaacagcgcagcaacagtcagggattttcgctccggcatgaatggagtgacaccggactgctggtgcgtcagtctctggcaccggacggtggtcgggtgaatgacgtgctggagcgtcaataccggtacgatgtactggatcgcctggtgggtattgacgacagccactggggaaaccgggagttcaggctgaatggcaccgggcagataaccggagagcgtggcgggcgggaagcgcgcagaaagcccagagtgtttgcgtatgacagcgaactgaatctgaaggaaattcagtcactggttgccggtaaaacgccggagccgtcaacgccggtggtgcatacagagacaatgcattacgacgttgccggcagggtgatccgctaccgcgatacgcattgtcattacgatgcctgtggcaggcttattctcaaacgccgcgaacgtgccgggttcaggccggaagaaacgcactactcctgggatgcgcacgatcggctggtcaggatacggtgccctgatggtgcacgctggcgataccggtatgatgcctttgggcgacgggtgagtaagacccgtgaggggagtgtggattcggccaggagtcttctgcgagtggaatactgctgggatggcgatcaactggtcggtgaacaacagtggctggccgatggcagtgcagcccgtgccgtacagtgggtgtatgaaccggacacgttccgcccgctggcacaactggaaaagaaaaacgagactgtccggctacactacgtcgtgacggatttgaccggcacggcaagggagttgtgtagcgaagacggtgaagttcactggcgcggggaacaggcgctgtgggatggatatagggagacgaaaaagccagtatcccatcccatgttcccgggggatgcggctaacgatgaagtcagctgtgatctgcgctatcccggtcaactgtatgacgctgaaagcgggctatactacaatcgatatcgctattacgatccagagcttgggcaatatctgtcgtcagatccgatagggctggctggtggtatcagaccacagggatatgtgcataatccgctggagtggattgatccttttggtctaacaaagttttatcatgctggggatattcagggaccgatagaaccatctaaaggaaggcctaaattagattttaatccttcgggtaaaggtggtttttatgtcacggataatatgtcacaagctatgaagtggcagaacatgagaaaattgccaacaataacggaatttgatataccagaggatgagctgaagagtttaaatataaaaaaattcgaatcagccaatgatgagtgggctgattttgtaattaagggtaggagtggtaaacttatacataattatgatgctgttagtggcccaatgttagccaatcttgcagaggtaagaaacggtggggctgccagatctctgggttctcaattggctattttctcagatgaagcggctaaactatttgaacgtttcaaagtaaataaagggtgtgggaatggttaa

SEQ ID NO: 159580 - DNA, 918 bp, Enterobacter cloacae
gtggcgattttgcatccttatcttttacatcatcaaactacacatactcaatggcaccaagcactggcagaaggcggttgttttattcttgctgaatctgccattaacgatgcggttccctggcaagctgagcgccattccggaaataatgagctgacacgtttgtaccgggataaggttggggccattcatgcatccatttcgccttatatcatcccggtaaatcaggataactgggaacaagtgaaagaacatgtcctcacccttgacggctggggcgtaggtgtccggttgtcctggaaacacagttcccggagtgaagagaagcaattgcaggtgctttcacagcatctgcgctcatggctgcaggtgaccacgccggaacaggacgatgtgacgttacgccttgccgactggcaggttgtccgtccgctgctggaggccagtacccatcctgaagcaacggctttcttcggacctgttgctgaattttggcatcttgcgcccgatggtccggctgaaaggctggaactgacccatcacagtgaacattccctcaatatcacacaaccccgaacactcagcccactacagtggcaggccattctgacgccttctcttctgaataccctgcaacgctatatgacccacctccggcagcaccatccccgctggcacgatacagaaaacaccgagctgcagcagtttacggaacagcactaccagcaggcccttgaatctggttttcgtcatgaccgtgacattgtgcgctatctggcgctggcgagcgaactccatcccggctttatcggtgaagcctgggcacagtccattatgagggacgctgaatatacccccgccggcagtcgcatggaccgtctttaccgtaaagcggttgaaatgatggataacgcgtaa

SEQ ID NO: 159581 - DNA, 468 bp, Enterobacter cloacae
atgaaaagaatgttgttctccttttttctgtttagttcatgttcaattgcaagcgaatgcaataaaagtgaagtattagtggcctcttgtcatataagtggaaaggtttttcgtaccgcttatatctgtgcggataaaaaaggagtgaatggtcgttatgtttttgaaagaaaatctcatgttgaaatgagtgttgaatttaataagtcatatcagcttcagaggtggttagataagggaacgtatactacatattttggttttcaaaagagtagttactcgtatgtaataggtgttcctgaagagaattttggtgctaaagcatttttgaatgtaaaaaaagatggcaaagacgtaatgaataaagagtgtgattcaaactcatttggtgataagaaaaaaaatggagaatatgttaaagatctaaatgatgaagtcgtgttaaatgggaagtctattttcccataa

SEQ ID NO: 159582 - DNA, 933 bp, Enterobacter cloacae
atgatattcgctggtcagggaagtagtcagtcgatggtcgtgaagcatcacagtagatggtacggcggcagcgaaaatccgatatggaacggtgtacttgccacaatgtcagttgagtctttagcttatgttcagcagtggctggatgtgcatgagtggatgagccaggtgccggaattcagtaaagacgaagcggtatggcattttcatccggtggagtttttgagtattctggatccgggtgctgatggtgttacatatgaacaactgaaaactattttccctcaggcttctgatgaagatattaatacggttgtggacgaattacatggaaagcttaatctatataagctggacacccctacaaggttgaggcattttttctctcaaattaagggggaagtgggggctgacatgaaaggaaaaactgaaaaattccagttctctccagaagcattacgatcatttagtcagtactatcggcaacatccagatgagtctgaacaagacggttatgaaaaaaatgcaaccggagtgacaattcgcagagctgatgagcaagctattgggcgcaagcattatctccgactgaatggaaatagacagaatcatcctgatgatggttataattttagagggagagggttgatccagattaccggatatgggaaatatcataaatttatgctggattattctaattattggcaagatgtagttccagataccgtttctcatcctgataaggttaatgaaatgccatatgcaattcgcacagcgctttggtattggcttgataggaaagtttataattttgattctggaaatggtgtaggggatgtttcacgtattacatctattgtcaatggaggtcaaatgggactggctaagagaacagaagcctacaagttatgtgaggaggtatttaaatga

SEQ ID NO: 159583 - DNA, 387 bp, Enterobacter cloacae
atgagagtaatgatgatgttattaatgctcttttctggcttgtcatacgcaacagatttggagtgtaataaagtacaatcaagtgatcaggtttatctttgttctaagcagtcgatggaagctagcgacaaaaaacttaatcaagaatacagagagcttttgaaaagtgttagtgtccaatattcctctcatgatcaattaaaagatgaatttatcaaaaagattaaaacatcacagagatcatggattgatttcagagataagaattgcgaggtcctatcttatcaaatcgatgttggaactcaggcgtatgagacgtcaattaatttgtgtaaagataaaatgactcaagaaagaattaaggagcttggtcttatcttaaattaa

SEQ ID NO: 159584 - DNA, 2229 bp, Enterobacter cloacae
atggaaacgcgttacccgataaggaatgcaaacggcaaagattttgacagtcaggaggaaatactggcgttgctgcgccaggaaaaacacgggcgctggctgtcgggcaccaatgacatgtggcacggcggcatacatatcagccgcaatactgcctcctggtcggtgctgacgccggataccggtgacgatgcggtaccgctgcagtgtattgccagcggtgagctggtggcctggcgcgtatgccaggattacgttatgggcaacctcggcgacaaaccgctgcagtactcgccgtcatttttgctggtgcgatcggtccataaaccgacaaaagattcgtccacctggctgtgtttttacacgctgtatatgcaccttgcgccgctctcctgttacccgaaatggacggtgtatcaggtgacccccaggggcaacggccttatcatgcaccagtacagcggcagtgaggtgtcggggcagaaagcgccccctgaagtctctcataaagcccgtcttcatagtggtgagcaggtgctgattgagcggcaggaaacgttcatgttgcacagcggacaggcggaggtgtttggcctggcgcaaaggctgaaagacggtgcgccggtgggggataagttctggacttccgcccgtccggcctttgttgagcctgttggtgagcagtacggttatctgcccggctggatgtcggtagcgctgaaggcggggcagtttgataccgtggtgtgtcctaaggtgatgacggccatcagggccggtgatgcgataggatttttaggtaaagaagaagtaccggacgagtttagcaatgtgacagcagactggttctcgcacatcgaggtactgagcaacgatggcaggatgccgctgtttcttaataacccggcacagctgcataccggacgccagtttttgctggtacctgaaggaaaacagctttaccagcgtgaagagaaaggtagcagctattcctttgagtcggtggacctgacaaaccggggggatgctgcagatatcatcccggccgaatcagccacgtctgcgacagacagcgccagcgtggcgtatctgcaaatccgtcccggcacctggatacgcaaggatgatgtggaaacggtgagtcagaacgacctgacgaaactgaaattcaaagccatagggcaggagccttcgaagaaccaactccgcagcctggaacagcagtgggtcattgatgcgtttcgctggctgagtagccaaatatgggccggacgcgacatggagtccgggcagttgcaggcgtattacaccagaatggcggatgaactggaaaaggtgagcactccggagaatatacagaacgagaatcgggactctgtatccgacatgctacggcaccggaatctgtacgttgattttttgctacgcaggctggcggtgaaacacgaaagtgagtggcatggtggcagtgctaccccgaaatggaatggtgtgcttgccacaatgtcaggcgactcactggcttatgttaagcagtggctggatgcgcatgagtggatgagtcaggtccctgagttcagcaaagacgaagccgtgtggcattttcatccggtggagtttctggctgcttttaggaacactagtactggtctaaaaggaacactcacatataacgcagaaggaaataataccccaagttctcaattttacagtcgagtcattcattggccgggaaatgctgagtccggcgtgacgttaggacgtggttatgatatgggtaatcgctcggaagcaacgatttacaacgatatgattacatcaggtattgatagtacaactgctaagaaaatctcattggcaagaggatataaaggttcagcagctaatgtatttgtatccgacaataaagttgatattggagagataactgaagagcagcaaatcaatctattcaaccttatttatccagggtatgtaactagaacaattgctaactataatgcatggacatcagaagttgtaactgcaaagaaatgggagcaacttgatgatgttatcaaggaggttcttgtggattttgtatatcaagggtttactaaagggccaaatccaatgcttgctggggcaaataacgacaagggggaattaattgattatataaaaaacacacccagcatctcgcaatatgaacctggtagacatcgcgcaaaatatttggaggagaattga

SEQ ID NO: 159585 - DNA, 612 bp, Enterobacter cloacae
atgtacaatttaacaatggtgtatgtatatatgcaaaatgtaagactcattgacattacatctgatttctatgctttttcgcataatataaataattatactgaaatcataattagtgcccatggttttcaaaatcagataaagagaaatggtgagtttatagatgcttttcagcttgcggagttaattaagagttgggatgtcccttgtagtaggataatagtagcttgctgtttttccgtttaccttagacctgaagagttaattacaagactatcatatggatttacagcattatccatctataaaagtactctcgcctgtatgctttctgactatattcatggtgtaagcatagtcggttttattggtgaggtcacttcaagtgttgataacccacaagcctgggatctctatgaaaccatagacccagagtttggtcggggattgcttgaaaggacgttaagcgcaacatttaccatcagatttaatgcagcagttacggttggtattaataatccgtgcaggtatattgaattttttaatgggggggtgtgccagcaatatggccctgaagtaaatataaataatcgtattttgactgctttgtaa

SEQ ID NO: 159586 - DNA, 465 bp, Enterobacter cloacae
atgtcagatcttatatacatgagagttgaaggggaatctcaaaacattatatcacaaaatgcatcttctttttcgtctatcggtaacaagtatcagagtgggcatgaagatgaatgttatgtctacaatgtaaattcatctgcttatcgggatctcgccacaaatacaggacatatgtcattaacaaaattaatagacaatgctacccctttattatctttagcgttaaataatggagaggaattacggatagagatttctttctatcgacatgcaggaacacaatcgtgcacgttatattttaaaacaatccttgaaaaggcttatataacacagcaaaacatttcaatggctaatgacttcacgcagtcggacatggaaacactaatgctaagatatagcagcatagttcataaacatatgacggcaaacacacatggttatattctgtggtcagagagataa

SEQ ID NO: 159587 - DNA, 429 bp, Enterobacter cloacae
atgccaggcgctgcacgactgggtgataccggacaaggccacgcgtgttttccggatacgccggttattgaaggaagtcccgatattcgtatcaacggggtgccggctgcccgtcagggcgatgcggtggccctccatggctgcccgtgccccaacacgccgcatggtttgcattcgcggtcgatttcagtggggtcatcaacggtgcgttttaacgggaaacctgccgcacgtatcggtgatgcgattgggtgtggcggcatgattgcttcgggcagtggcaacgtcattatcggtgacaccccctggaagtctccggttcatgactgtgcgaagcaggctgtacttgaccgggctccgctgctggggctgtcgcccgcgctgacaccagaaccccttccggatgtgagaaagcttatctctcgctga

SEQ ID NO: 159588 - DNA, 2004 bp, Enterobacter cloacae
atggggcgtttatccgccagtacctttgcggtggtggagtttgagctgaaggaagccctgaataagccctttgagctgggcctgaaactggcgagcccgcagcccgggattgattttggggatgtgctggaccagtcctgcgagctgatggtctggtacaacggtgaactgcagcgacgggtcagcggtatcgtgagtcattttgcacagggggatacgggatttcgccggacccgttacgaggccattgtgcgaccggcgctgtggcgcaccggactgcgcaccaactgccggattttccaggtgaaaaagccgcaggacatcatcggtgaactcctggaagaagcgggcattctggactacgccttctcgctgcgccaggaccatgccgcgcgcgagtattgcgtgcagtaccgggaaagcgatctggattttatcacccgtctggcggcggaagaggggatgttcttctggcacgaatttgaggcggggaagcaccgggtggtgtttgcggaccatgccggggcgctggagaaaaaagacaccccggtattgtttaatctggcgaatcaggggctggagcaaggggcctatatccgccagttccgctatgccgaagcggtgcgaaccacggcggtggagctgcgggactacagttttaaaaatcctgcttacaaccagtcgaataaaaaaatcagtaacgagctggaccatcagcgtgaaccctatgagcactacgactatccgggacgttacaagcaggctgagagcggtaaagccttcagcgcgtaccggctggatgcgctgagggctgatgcggtcaccggcaatggcctgtcaaactgcgcagagctgcgtccggggttgcggtttacgctggaggagcaccagaacgaggcctttaacacgcagtggcaggtggtgtccgtgaagcatgagggaaaacagccgcaggcgctggaagaggaaggcggggacaagcccacgacctttacaaacacgttcgacgttattaaaggcggagtggcctggcgcatgcagatgccggcacgcccgatggtggacggcccgcagatagccattgtcacggggccggcgacggaagaaatctactgcgatgagcacggtcgcgtgaaggtgaaatttccgtgggaccgctatggcaacagcgatgatctgagttcctgctgggtgcgcgtcagtcagggctgggcggggggccgctacgggatggtggcacttccgcgcgtgggtcatgaagtggtggtgagctttctggaaggggatccggaccagccgatcgttaccgggcgcacctaccatgcgaccaatctggcaccttacgtgctgccgcacaataaaacccgcaccgtcattcgcaccgatacgcatcagggaaccgggtttaacgaactgagttttgaagatgccgccacgcgcgagcaggtgtttcttcatgcccagaaagaccatgacaccgtcatcaataacaaccaccggcagagcgtgggtaacgatcagcatctgagcgttgtacaggataagtttgaacgtatcgacaggcacagccaccgtaccgtggggcaggatgattacgaactgatccaccaggatagccatcagtccatcgggcgcaattttattcagagtattacccagtcctttaagcgctttatcggtggcggtgaggtaacccgcattgagggcagccgtcagaccacgctgaccgggtctgaagaagccatcattggcgctaaccagcgcatggtggtgaataacgatcattacctcaaagccacggatatcgtactggaagcgggacaatccttcaccgtcaaaggcccgggagggttcatgaagatagatgactcgggcattaccctgcagggcaatcttgtcaaagtgaatgaaggggggagcccgggtgtcgggacagccccggtctctgttgaacctgaatcaccggcggcaccttcgctgccggatgcaccattacgcccttaa

SEQ ID NO: 159589 - DNA, 519 bp, Enterobacter cloacae
atgccaacaccgtgctatatcagcatcaaagggaaaacccagggcaacattaccgacaaagcgttcactgcagaatctgtaggtaatatttatcagcaaggccacgaggacgaaatgctggtacaggaagtgaagcatgttgtcaccgttcctaccgatccgcagtccggtcagccagccggtcagcgtgtacacaagccgctgaaattcaccgtcgcgctgaacaaggccgttccgctgatgtacaacgcgctggcctccggtgaaatgctgccggaagtgaagctcaactggtaccgcacctccgttgaagggaagcaggagcatttttttgcgaccacgctggaagacgcgaccatcgtcgatatcagtctgcatatgccgcattgtcaggatgcggcgaaatcggaattcacccagcttgtcgaagtctcgctggcctatcgcaaaatcagctgggatcaccgcatatccggctcgtcaggcagtgatgactggcgcaaaccgatgagtgcataa

SEQ ID NO: 159590 - DNA, 1392 bp, Enterobacter cloacae
atgatgtcgcgcttttatctctcattacgcctgatgctggtggttgcggccgttggtctgagcgcctgcagtgcaccgctgtcaacgctgccggaagccgcgctgatgcagaaagcacaggccggggacgcgcaggcgcagtatgtgctggccggaaagctggcggcccgcggtgaatacgggcgggcactgacgctgatgaaacaggtggccagccagtcggctgcatcggatgcgtcgcgttcaacccgcgcggatgcggcgcgtcaggcgggagactggtatcacaacgggctgggggagccgcgtaacgaagcgcttgcccgtcagtggtggacacgggcatcgtctctcggtaatgcccaggccagtatgaatcttgcaggacattgccaggaagcacatggcacgtcgcctgtcgcggactgcatcagtcagtttgagaaggcggcacagcagggcaacgctgaggcacagctgatgcttgcccgctggtaccagacacagcctgagggtgaaaaaacggcgctgtcctggctacaaaaggcggctgcgcagcaagagcccgcggctctggccctgcttgcccgccgctatgaaaccggaaacggtgtggataaggcaccggatatcgcccgccgtgattaccgtcaggctgccgcgctgggtaacctggcggcacagcgctggctggcagagcacagcgaaggtacggaaaggctgatgtggtatcagaaagcggcgcagggcggggatgtggtcgcgcagcgcttcctggggcaggcgtatctgagcggcaacggcgtggcacaaaatcagaccgaagggatgctctggcttaagcgtgctgtcgataaaggcgatgcccgggcacagtatctctacagccagtatcaacccagcgatgagatgaaactacggtatctgatgctctccgcgaaaggcggtgaccttcaggccgggcggggacttgccgggtggtatgaaaagcagggcgatgaggttcacgccagaatcgcatggcagcagctggcagcacggggagatgcggaaggtcgttaccactacggcgacatgctgcgccttggtaccggcggaccacatgactatacgcaggcctttatgcaataccggctcagcgcgatggccggcaaccggctggcgcagtaccgggccggcatgatgagtcaggacggactggggctgccgcgtaaccgggttcaggcttatgcctggtactccctggccgcaacggaaaacgataaagacgcggtggatgcgctgaatgcgctggaagccttgctgaagcccgatgaaattaaatccgcacagacgctggcccgtgcatggaatctgcgtatcgctcagggacagaacgaagcagcccgctga

SEQ ID NO: 159591 - DNA, 1428 bp, Enterobacter cloacae
atgcatgatacacaacaggcgctgagcgtggggcgcgatccccgcttgttgccggaatatgaaagactgcgcaatgaaattaataaactcagccacgcgtcacgtccggaagtggactgggcgctggtgcatgagatggcgcaggctatttttgaaaagcagggcgtggatctgcagaccgctctctactttacgctggcccgcgcccggctgaatggactcagaggttttacggaaggctgcgagtttctgagctcgcttatcgtgacccagtgggacaatgtctggccgccggttcatcaggtccgggcccgggtggacatgctcgactggtttatcgcccgtgtcagtgatgtggtacgcaggtacacggtcgtgcatgacgacaaacgcctgatttatcgctgcgaacggtcattacagctcctgagcgaaaaactgcacaatgcgggcttagaccgggtgccgcggattgagaatctgctgcattttattgaagggtatacccgtctgtttgacgaatcagaaatcgtgattgtgtcacaggagcaggacgtactgaaaaaggagatgcaggtgccgccggtggtctatttccgctctgatgacgcggacgaaagtgtggtacccgatatggcgcagctgccagccggcagcattattgtcgggcgcgaaaaagggacgctgaagccgacggtgttgaaaattcagcctcataagcccccacgtccggcgtggttctggtttgtcagcgggatggcgagttgcctgctgccggtactgatggtgaccgggtgggttcactggagcgcactgcagtcttcccgacagcacgatgccaccgcgatgctggaaacgaatgcgctgacctggcctgtggcccctgatgcagcccggctgagcgatgcccgcctgacgctcggggaacaggcactgcgtgacatggagccccggataagccgggattatcaggctcagatggcgcatgtgcagcagctctcgccgctgtgggcgtatcagtatgccgacgggctgcgacgttccctgcgaatgctgtacccgcagtcgcttgcggtcagtgcgatggacagccagtggcaacagatgctcaatacacagcgtggtgtgacgcccccggtctccggctggccggatgccaccgcgcgggtagatgcgttgctgacagaactgcagagtctggaacgcctgcacaaaacggtcactatctcttacctcaaatcctcgctttatgacatccgaaaacagatggatcgtgatacgccctttactgtgcaactgaaccagctggaagcccaacagcgggcaaaccagacaatcagtcaggctgaactggatgccctgcagtcgacgctcaaatcctacagcgtgcggctttatcagctacaacctgcaccgcgggatttgtga

SEQ ID NO: 159592 - DNA, 3498 bp, Enterobacter cloacae
atgctgaaacacattatcggctttttgcgccaggggttgcagaaaatcaccttctcctggctgctgcttgcggcggtgctctgggtcatcatcctggtagccgtctggtgggctggacctcttttcacgtttcatgacgtgaaacccctggcctctctctggtcacggggattatttacgctgggatggctgtggctggcctgtattgtcatgctgtggcgggtaggacgcaatatgcgcagcgcccggcaggcgcaacgactacaggagagccggcaaaaagatccgctgcaggtgtttgttgatggccagcaacggttcctggacggctgggcacaggcactgaaggccctgcctggtcagggggccgtgtacggtaaaccctggtacatgatgctcggtcttccgggcagtggtaaaagcagcctgctgcaccgcgcctgcccgccgaacaaactcaatgcccgtctgcacaatacattacgctccctgcaggacggacagaaggtggattgctggctgggagacggagcggtcattgtcgatcccgacggtgatctcctgctccagacgggacgggggacggaagatcagaatgagcagaatgcccgcctgtggcggcatttgctgacgtggctgaaagcgcaccgtcgacgccagccgcttaatggtctgatcctgacgcttgatctgggggagcttgcgaggatgggaacctcggccaggcatgccagcgcccaggtgctgcgtacccggctgatggacattgccgatgagctgcagacccggctgccggtgtacgtggtcctcacgcatatcgatacgctgcacggcgcaggggattttttccgcaagctcgatgcacagacccgacagtcgctgctgggcgtgagcttcagccctgacccggcggagacaaccgcatggtccggcgtgctggaaactttctgggatctctggctcagccagcttaacgcggcgctgagtgccaccctgctgcacgctccatcgcaaacgccaccgacagatgcattcttgtttttacgccagcttgcgggactccagtcgttcgtgcagacgacgctgtcggacatgctggcgggagaggaaacggccgccttccccatacggggcatttatctgagttcggtataccagcagggtgtgccttttgatggcttctcccgggcgacggcccggcgttatcgtctgacggaagcggcatattctgccgcgcgcggcgagtccagcgtctggtttgtacgacagctctttaccggtgtggtgtttcctgaggcccatcttgcgggggagagccgtttacatcagctgtatcgccgtcgccggatgtccatcggcaccggcctcatggtgctgacggcgtctctttttagtctgggctggtatcactattacctgacgaaccgtgacgcgggacatcaggttctgctgtctgcccgacagtttattcgtgcgcatgaaagtgccggacaacaggcatttggcgctgatttgctgccacgactgaaccttatccgggaggctactctctcgtttggcgattaccggcgtaaaaacaccccactggcggacatgggactgtatcagggggggcgtatcggtccttatgtggaaacgtcctaccttgcgttattgcagcagcagtttctgccggcggtgctggcggggctggcacaggacctgctgcaggcccctcccgccagtgaaaaaaaaatgtcggtactgcgcgtgatgcgcatgacggaagatgcgtcggggcgcagcattccgctggtggagcagtacatggcaggacgctggcaaaaggcgtttccggaacaggggcaaatccagcaacagctgatgcagcatctggattatgccctcaggcataccgactggcataaagcacgggtacaaaaagacccggacgccattgctgcctggaagccttttgcacaacctgtcgctgacgcacagcaggagctgagccgtctgccgttatatcagcgggtgtatcaggggttgatggtgcgggccaccgcgatgctgccaccggatttgcgggtacaggatgaggccgggcaaagttttgacagcgtgtttgtgctgcgtgatgcgcatgccggtacggtgccgcgtctgttcacctggtctggctacagtgattttttccggggccagcataacacgctgtttgatttgaccgggctggatgcgtgggtactcgggcaacatgagcaggttcagctcagcgaggcggatcgcagtgaaattcagcgccaggtaagcgatcgctatatcagcgactataccggccactggcagaagctgttatccgcgctggatattcagccgtttgattcgccggagcaggcgctgtcggtactgaataccctgaccggcgatgagcagcctttccagcatattgtctccctgctgagcgataacaccgccgttcgtccactgaccggaaaaggggctgcacaacagcgggataccctcagccggatagcgcgtccctttacccaactggacgacaccctgaaaggccgtggaaatgatgcgccactcattcaggggataaaccagaaactcatcgcccttgcgcagtggctggagcagataaacagtgccggcgatccgggggctactgcctttaaggccctgcagctgcggcagagcgatccgtataaggatccggctttcagtctacaacagtatgcacgggggctgcctgcgccactggatcgctgggtcggtcagattgcgacgcaggttgcaggtgtgacgaccacgcttgccatgtcatccctgaatcaggcctggagtgagcaggtgctgacgccgtttaacgacaccctggctgaccgctatcctttcaatccggcctcttcgcaggatgcatccctgtctgaagtgacccgtttctttgcccccggcggcacgctcgatggtttttatcagaccagcctcaaaccgctgctggacagtggcgtcctgaaacaggatgccggtaacggcaatctgcaggcgctggtgaaccagcttgaccaggctcagcggatccgggaggccctgttgaatgctcaggggcagccggaagtgcactttgtggttgaaccggttgaactgaccgccagtaaacgccgcagcgtgctgaaccttgacggccagctggtggagtacagccacggtcgccgtcagaaagtgccgctggtctggcccaacgccctgcgtgacgggtctgagagcaaactgacgctgataccggatgacggtgcccgctcaccgcgaagcctgggctttactggcccgtgggcgatgttccgcctgctggatgccggcaaccggacgcaggtcagtcggggttcgtttgatgtgcgctttggtgtggatgatggcgccatgacctggcgggtctacagcgacgctgaccacagtccatttgcctcgggtctgttcagcctgttccgtttgccggaaacactttattaa

SEQ ID NO: 159593 - DNA, 1401 bp, Enterobacter cloacae
atgacattccggcatccctggagcccgcgcctgctggcagtattacctgatgagctgacagaaagtgcggtcagcgcggacgatccgctgtgggaaaagacagagactgaactggtgaaactgggttcgcttgcccacagtgaggtgagtctggatgcggtggcccttgactgcctgacgctgctggaaacccgtaccaaggatatgcgtgtgctggcgcaactggtgcgctgtcttcagcatccggcgaccgctgagtcgtggtctgcagccctggtcctgatggatgactggctgtcggcctggtggacacgcgcatggccgtccagcccggcacaaaagcagcgcctgatggtccagatggttcgccgctttgagggggcgcaggcacgcctgtgtgagcgggcaacggggagagaactcgaagaggtgatggtgctggttcaggcgctggcacggacctggggagcgctgatgcccgatcagggcggcctgtttgacggtctgatcagtacccttcaacgcaccggccgcaacctgcaggcgcagagccaggacagtacagaacgcccgtcttcccctgcatcaccggcaacagcaacatcaccagagcctgttattcgcaatgatcgcatgatcctgaatatcgacgatgccgatgaacgggcatggcagcagacgctgctgaaagtggcagaccgcctgactgaacaccagccgggtgaggcggtgggctaccgtcttcgccgttatgccatctggcacaccattacgtccccgccagttgtcagcaggggaaaccgtacgccgctggcggcggtgtcacctgatcgggtgagtgaatacgaagctgcacttgcctgtgctgatatcgccctgtggcgacagacagaaacgagcctctcgctttcgccttactggtttgatggtcactggctgtcggcgcagatggcgacagtgcagggatttacttatgttgcacaggctatcagggacgaagtcctgcatgtattacatcgtctgcccgcactgagaacgctgacgttcagtgatgacactccatttttatcgtcccgttgtgaacagtggctgcgggcagcagagacggaacgggaggaggtctgcggtgatgtgaacgccgcgattggtgcctgccgtgaagagcaggggctgaatgcggcgctggccctgctggaagacaacatcaggtcgcaaagtgagccccgcgaagccttttacgccggactgatgctggcggagctgctggatactgagggattaacgaatcttgctgagatgcattaccgccagctctggcagcaggcgcagcggttgtctctggaacaatgggaacctgggctggtgaaacgtctggagcgtgccgtccgggcgcgtcattaa

SEQ ID NO: 159594 - DNA, 552 bp, Enterobacter cloacae
atggggatgctgacattactgccgctgctggcttcgctgacgggaaatccggttgtgccgggggggctggaaaaatgtcaggccgagcaggagcctgcgttgcgtcttgcctgttatgacgccctggcgcgttttcgtcatgctccggcacaacaacaggcccgcgacagcggatttcagatgacgactgatcctgtaaagggcgatcgcgtactgatccgcacgatcccgtccgtcgggataatcacggtatcctgccagagtgggatcacccggctcagcgtgcgccctgccacactctggcagggggatacggtgacggcagaagttgacggtgaaccggcttccggtaactggtttgtgcgtgaccaggggcaactgctggaatttgcccggggtctgcctgccattgacgagctgcgtcacgggttcggccatcagaccctggcgctctcgaacgatcatggtcagtccctccacctgccgctggacgggctggaaagcgccatcaggccgttgcgccagcagtgccactggggaggtcagtcatga

SEQ ID NO: 159595 - DNA, 1539 bp, Enterobacter cloacae
atgctacaggcgatacagttcgcccggaccctgcttcagccggacaatgatgccgcgctggccgactggctgctcgctaccctcagggaatgctggcagcctgagggcattatcctgggactgtgtgattacagcgggcgtttactggcgtgtaccgggtatcaccctgccgggtcatttcatctggagttgccggtggatgacttcggccatccgctggccagcgtggtgcatgacaacgccccgcatctctgggaaaccctgcacgggggggcgcggacggaacatgcgggttttcgtgaactgctgatgaccatgcagaccaccacaggtctgctggcactgcctgtctgcgatgaaacgcaaaaaatgaccggggtgctcggactctttgataagtcggatgcccttcagcggtggtctgacagcgagttgcccgggcaacttctccggttgttttccctccagcgcagtcggctgcatcagatgcagcacaatcagaaagaaagccactgtctgcgtgattcactgcgcagggtgacggatgagcagacgaagcacgacaggctgacacatctgctggaaagccgtctggtcggtcagtcatctgcggtacaagcgcttcgggagcgcatccggtatgctgcagcccattccctgtcggtgctgattgaaggtgaaaccggcaccggaaaagaggtggtggcgcaactggtgcatgagtgctcctcccgtgccgggcagccgctggtcgcgctgaactgcgcggcggtccccgaaaacctgattgaaagtgaactgttcggctggcagaaaggggcgtttaccggcgcacatgcccataaagaagggctgattgcccgggcgaatggcggcacgctgtttctcgatgaagtcggcgatatgccccttgtcatgcaggccaaactgttgcgtgtgctcgaaacccgtcagtaccgcccgcttggtggtgataaggagcagtattccgattttcgggtggtggctgccacgcatcatgcgctcaggcagcgcgttaccgacgggcattttcgccaggatctgtaccaccgcctttgccagagcgagcttgttgttccgcccctgcgtgagcgtcctgaagatattccgctgttatgccgccattttattgccgctttcagcgagcgcgatgataaacatcccggcggcatcagcctggcatcactcagacgtctgctcggctatacgtttccgggcaatgtccgtgagttgcgtaacatgacagaggtcgcctgcgcacatgccgcagacggtcagaggattgacataccgggaccgctttcggaggtaccggaggggtttcgacaggcgacagtgtctgaacatgatgactacccgcacgtccgggatttacgtgaagccgttcagacctttgagtcgggtgttattcgctcacgtctggcattttttcgtggggatcgccagcgtgtggccgagagcctgaatattccgcgccggacgctcgatcataaatgtcagaagctggagagggtgtga

SEQ ID NO: 159596 - DNA, 2592 bp, Enterobacter cloacae
atgatccgcattgatttgcacattcttgttgaacgtcttcacccggtttgccgccatatgctggaagaggcggcggccttgtgcgtcagccagcagggcgctgaaattcgtgttgagcagctgttgctgaaagcgctggatactccgctaagtgatatccgcctcatactggatcatgccggtatcgcacgtgacgatgtgcgtgctcttctggacgtcgggggcgcagataaagccctggcaccgggctatccggcgttttcgcctctgctggtggaattactgcaggatggctggatgctggcttcggcacagatgaatcatccgcagttgcgcagcggtgtggtactgctggcattgctgatgacaccgggacgctatgtatcacctgccgtttcccgtttgctgtcgggcattaaccgggaacagctggcgcaggattttgatagctgggtgaagggttcggcggaaggtgagggacactcttcatcggagaatgcgcatgcgcaaccttctgtaacgggtgaactgctggcccgctttacgcataacctgacccgggacgcccgcgacggacgcctcgatccggtgctgtgccgggatgatgaaattgatctgatgatcgacatcctttcacgccgtcgtaaaaataacccgattatcgtcggtgaggcgggcgtggggaaaagtgcgctcaccgaaggacttgccctgcgcatcgttgccggtcaggtaccggacaagctccgggatgtggagctgctgtctctggatttaggtgccatgcaggccggtgccgcggtgaaaggagagtttgagaagcgatttaagggggtgatgcaggaggtgaaggattcaccgcgtcccgtcatcctgtttattgatgaagcccatacgctgattggtgcaggaaatcaggcgggagggctggatgtctcgaacctgatcaagcccgcgctggcacgcggggagctgcgcacgattgctgccaccacctggagtgaatacaagaaatacgttgaaaaagatgcggcgttatcgcgtcgctttcagttagttaacgtcggtgagccggatgtggcgcaggcgacggttattctgcgcgggctgcgtagcgtctatgagaaagcacacggggtcctgattgatgaggaggccctgcaggcagcagcgtctctgtcggcgcgctacatctcaggtcggcagttgccggataaagccatcgatgtgctggatacggcctgtgccagagtggcgattaacctgaccacgcctccccgcgaagtgagccatctgcagacccggcttgagcagcgtgggctggaaattgttcagctcgagcggcagtcacgcattggtcttggcgatcaccaggcccggctcactgagctctgtgctgaggaacagacagaacgtgcaaagctgataacggaagaagaaaactggcaggcgcagctcaggctggtgcaggcgatcgtcgcactgcgcgcgcaactgctggcgacagagagtgaagatgatgatgaaccggtggctgcactgcgacagcttgagcaggagcttgacgcgttgcaggcatcatcggtgcgggtgtcggcgcatgtggatgcccggcaggtggcttcggtggtggcagagtggacgggcgtgcctgtcaaccgcatttcgcaaagcgagctggacgtggtgatgaacctgccggcgtaccttggcgacgtcatccggggccagtcgcttgccattgaacatctgcaccggcatctgctgacggcacgtgctgaccttcgtcgaaccgggcgtccgctgggcgcatttttgctggtgggccccagcggggtcgggaaaaccgaaaccgtggtgcagattgcggagctgctttttggcgggcgtcattacctcaccaccatcaacatgtccgagtatcaggagaaacataccgtctcacgactgattggctctcctcccgggtatgtcggttttggggaaggcggtgtgctgaccgaggccattcgacgtaaaccgtactcggtggtgctgctcgatgaggtggaaaaagcccatccggacgtgctgaacctgttctaccaggcattcgataaaggcgaaatggccgacggtgagggacgggtaattgactgtaaaaatgtggtgttctttctgacctctaacctggggtatcagactatcgtggacaatgcgggggatccgcaggctctccacgacgcgctctatccggagctggcggcctttttccggcccgcactgctggcccgtatggagattatcccttatctgccactgtcatctgacacgctgagagcccttgttcagggcaagctggcgcatctcagcacgctgctggcgcagcgttttggcgcgagcgttgagaccgacgatgcggtgactgacgagattttgcgccgggcgacacgaagcgagaatggtgcccgtatgctggagtccatcattgacggggcgttgttgccgccgctgtcgctgaaattgctgcagaaaatgtcacaggctgaacccgtatcccgcatccggatcgggcttgaggcgggggactttgtggcggtggtggaggggtga

SEQ ID NO: 159597 - DNA, 777 bp, Enterobacter cloacae
atggcaactgatgcagtacaccacgacggcctgaaaggcctgcttcacgaggatgcgggcctgacggacagcgatcctgattatgctttccggatgcggggtaacagcctgaatccgattgttgacgcggtcactccgctgttcggcatggtggcccgcgtgcgcacgctgagccgccataacgatgtggccggtctgtatcagaccgtggcaacggaaatccgcgcgattgagcaagagctgcgggggctcgactatgagaatggcgtgatcctgtcgtttcgctatgtgctgtgctcctttattgatgaagcggtgatggcacatgaatggggacaccagagcgtatgggccgagaattccctgctgtcgcagtttcatggcgagacctggggtggcgaaaaggtgttttctgttcttgataagctgcgggacgatcccgtgcgttatcgcgatgtgctggaatttattctgctgtgtctgctgatgggttttcaggggcgttatcgcctcctgccggacggccaaaaaatgctgcaggaaataagtcagtctctccaccttcagttgaacccggatccggtcactcagccaccggtgctgcatcttgatttcggccaacaggccgccccgtatcgtctgtcccgtcaggtgtcactgcgtaccgtcgcgggctgcgcctgcctgctgatggccggtgtgtttctcctgttccatcatctgctcagcaaccagacgcaggatgtcctgcgtcagttgagtgaactcttaaagtga

SEQ ID NO: 159598 - DNA, 1338 bp, Enterobacter cloacae
atgtcgattcgtaaccgcgttatctggcgcgaagggctttttatcaagcctcagcattttcagcagcaacagcgtcatgtggactatacgctgcaggcgcgtctgggtgccatcagcgattatttcagtgggttgcagtcactggaaatcaatgaagagtacctgaattttgggcgtatcgcgctggtgggcgcccggggcgtgatgcccgatggcacggttttcaatattcccggtgatgatgcgctgccaccgccgctggaaataacggatgattcggtgacggggcagaaggtttatctggcaatcccgctggcggtcagtggggtgaatgaagtgcgtcagccggagcagtctgttgccacccgcctggaagcccaccgctatgaagttcgtgaccttcacagcgacggcggggatattaccgcacttgagctcgggcgggtgagtccccggctgatgctggagcgtgacgacagaagcgcctgggccacgcttgctgtcgcccgtattcaggaacgacgtccggatggtggcctggtgctggaatctgcttttatgccctgcagttcgtcggtgtcggcgatcccggtgcttaaacgttttctgggcgaatccgcagggctggtggccgagcgtgcccggaccctggcacagcgtattgccgcgcccggacaacagggggtggcggatgtagcggagtttatgatgctgcagttgctgaaccgcatgcagccccgtctttctcatctggcccgcctgggcacgctgcacccggagcgtctgtacgaaacgctggtggcgttttgcggtgaactgatgaccttcacggatgtatcccgtctgccgccggagtttccggcctaccgtcatgacgatccccgccagagttttgaaccggttatgcatgccctgcgtcaggccctcagcacggtgctgtcgccgcgcgcggtctccctgcagctgagtaaacaggcgtatggcgttcatcttgccgtcattgctgaaagcgaactgttgcagagcgcgatgttcgtcctggccgtacgcgccagaatgccgcaggaacaactgcgtaagcagctgctacagcaggtcaaggtggcgtcaggcgagaaaattcgtgagcttatcagcctgcagcttcccggtgtgccgcttcagcctctgccggtggcaccgcgccagttaccttatcacgcggggtacagctacttccagcttgaccggcaaagtccggcctggtcagtgctgatgaccggaaacacgctggcattccatattgccggtgagtttcctgaacttgatatgcagctctgggctattcgcagccagtaa

SEQ ID NO: 159599 - DNA, 531 bp, Enterobacter cloacae
atgcgcacaatgaccctgcaaaaaatagcggtgatgttgctggtactgacccttggcggctgcaccaccatgggcaagatggtgaaggttgccgccaatcctgatatccaggtcggtagtcgcgacgatcagccttcaacggtctccttcagcctggtcggggaaaaggacatgaatcccaatgagagtggggatgcgtcacccgttgaatttcagattgtgatgctggctgaagattcgcgactacttgccagtgattacgatcagataaccgctgacctgccaaaggcactggcgaaaaactatctcgaccaccaggactacaccctgttaccggggcagtttaaatacctgcctgctgctgagctggataaaaagacgcgctatatcggcgtcgttgcccgctatgcggatccggacagtaccgagtggcgcaaagtgatcccggtgaaaagtacgggacggcattaccaggtactggtgcacctgcgtatgaatgaagtggacttacaacagcaaacagaagaataa

SEQ ID NO: 159600 - DNA, 1212 bp, Enterobacter cloacae
atgaacaacagtacacaacagctttcattactggtcattaacagcgcgcagctggagggggactctcaggttcagcactatttcgggccggaaggcgggacgcttggcgcatcggatcaggatgactggcagcttcgggaaagtattggctcggttctgccggggcatgcacgcattagcgtcattgacgggcatttttgtctgcacgaccagagcggacaaacattcataaatggttcggggtcaccggtgggcggagaccggcacgtcaggctgagtccgggagatgaactgaccgtggggccgtttcagatccgggtgtccctggggcagagacatcacgatcctgcgctggatgaactgatggataaccgaccaccgcgggatatggatacatggcttgaagatactcagcacgacgccggaacgacgcatacggtaacaaaggcgcctcgacaggatgatcctcttggggcgctgcaacaggatagccacagcgtgttatcgcaggtagcagggagtatgcctcagcctgcattctcagaacagacgggcgaactttccggaggaaaagagacagtgaaccaggcatttattgaattaccggacgtgggacgtaccggccttacgcaagacgaaggcatggtggctgcgctggagaccgtgatgtccggcatgggagggaacctggctgttgtcggcgtgtctggcgccgcagagatgttgttcgatatgggcagaaccctgcgtgcgctggtggaagggctgctggcgcttcaggctgaacagggggcgcttgccgacaaactgctgcgtccgattgaagataacccgctgcgcctggggcttgactatcacgataccctctcgctgctctttgccgaagggcaaagcccggtacatctgtcggcaccggccgccgtggcagaactcctcagtaatatccgcctgcagcatgcggccagtcagaaggcgacccgtgttgcactgcacagcgttcttcaggcgttttcgccggaggggctgctggcccgcttttcccattatcgccgtggcggtcagggtgaaaatgccggatgggaatgggacatgtatcagcattatttccgggaactgacttcatcacgtcagcagggatttgaaaaactgtttcgccaggtttacgcccaggcgtatgaccgcgcggtgcgtgaagggctggagtcggtgtaa

SEQ ID NO: 159601 - DNA, 999 bp, Enterobacter cloacae
atggccggtgcaggcaggtcagcactcgatgatgtgattgcccgtggggaaattgcacagtttgctttcttcccgctggttgaattgcttcatttgctggaaaacgtcgatcccgaatctgaccaggatattcaccctgaacaggagcgggtgcgctttgctgccacggcgtcgctgggctttcatcccggcgacattgtcagcttaagccaggacgacagcgggctgcgccatcttgaagtggcctttctgggtctgcatggcagccagtctccgatgcccggttattaccttgacgaactggcctgggagtatgcgtggcaggaatcgcgtctcgggctgtttctggattttttccatcatcgtctgctgacccttcttcaccggatatggcgtaagtatcgctatcatgtccgttttcaggacgacggacgggacgggttctcccgtcagatgtttgcgctggtgggactcggtaatgaagccgtacgcgacagcctgcctgtcaaccgggccaaaatgctctcttatgccgggatgctggcaagtcccagccgttcacctgaggtcatctctggtctggtgatgcactgttttgaccttgaaagcgtggaggtggatgactggcagatgcgcaaagtggcggtctgtgaagagcagcaaaaccgcctcgggctgtccggtgtggtcctcgggcacgatttcatttccggtgagcgggtcaatgactgcgccggaaaattcgtattaaaaatcaataacctttcattccatgattttctccgttttctgccggatggcgatcagcatcagccgctggtgcgctttatgtccttcattctgcgcgaccagctggcatgggatctgagcctcggttttggctatcagcaggcaaacggaatgcgtctcgacagtcatcagggcgcgagcctcggctggagcagttttctggggacgccgcctgaggtggcccgcgtcacgatatgcgtgcaggagtag

SEQ ID NO: 159602 - DNA, 1767 bp, Enterobacter cloacae
atgtcgctggaacattattaccgggatgagctggcctggctgcgcctgcaggggcgtcagtttgccggagcccaccccgaactgacgcgttttttgtctgagcagaccaccgatcctgatgtggagcggctgctggaggggttcgcgtttctgacgggtagcctgcgcgccaaaattgaagatgagtttccggaactgacgcatggtctgctcaatatgctgtggccaaattatctgcgtcctgttccctccatgaccattgttcagtttacgccggttgcaggggctctggcacagcccgcgtttctggggcgcgggtgcgcgctcgacagtattgttaataatgagacggtgtgccattttcagacctgccacgatctgtggatctttccggcacaccttgagagcgtcagcgcttacagcggtacggatgtttcggcgatcacccttgagctgacatcacaggttccgatgacgctggagcagttggatctcagtaagctgcggttttatcttggcggtgatgcctggacggcgcgggagctctatttctggttatcggaccggctggcctggattgagctggaggtgaacggcacgcgttttcgtcagcctgccagtctgctcaggagcagcggatttacacgggaagaagcgctgctgccttatcccggcaatatctactcgggctatcgcatcctgcaggagtatttctgtttcccggaaagtttcctgttttttcacctgacaggcggcgactggccgaagcaaccgatggccgtgtcgtcatttaagctgcatttctgctttgaacgtccattgccccctgaactgaagatccgccaggatgccttcatgctgaactgtgtgccggccatcaatcttttccgtcatgacagcgaaccggtggcgctcaccggacagcaaacggaatatccgttacgggccagctacagccgcccagacagttacgaaattttttctgtggacaacgtggaaggctgggtggaaggcccggatggtcgtgcgcggggtggcacccgggtgtatcagccttttgaaagttttcagcaccagattgaacgcgcaaacgggcgtctggcgctgtattaccgcctccgggttcgcgaggccgtcagtggtgagggctttgagcattcactgtctttcgtccggggggacgaaagggaagtggttggaaaagatgaagcagtctctgtttcgatgacctgtaccaaccgggagcgtgcagcacagctgaaggtgggggacatttgcgttccgaccgatgccacgcccaatttttttactttccgcaatattacccgaccgacgcgttcgctgcgcccggtgctggacggcagcctgcagtggatgctgatttcaagtatgtcactgaactatgtctccctgctgagtccggatgcactgacgcaggttttacggacctgggattttcccgctctgtatgacaagcaggctgaacaggcatcgcgtaagcgactggcggggatcgaacgtatcgagaccgtgccggttgatcgcctgatacggggtatgccggtgcgcggcctgaaatcccgcctctttgtgcgtcagtcagccttcggaggcgaaggttcactgtatctcttcggcaccgtgctggcacattttctctccctttatgccagcgtgaacgcgtttcatctgctggaagtgtacaacctggacaacaaggagtgttaccgatggccggtgcaggcaggtcagcactcgatgatgtga

SEQ ID NO: 159603 - DNA, 432 bp, Enterobacter cloacae
gtgtcttctctcgcgttatgggacagaggaagtcctgccagcctgtttgatcggatcaggggggaggaggacggcatccggcctgcccgtgaaatggacaggctggtggattcggtaaaacgccagctcgaacgtgtgcttaatacccgtaccgggagctgtcgtagtgcgccggatctcggtgtggtggatctcaatgacgccacacagagtggcgctgatatcggggggcgtatacgtgaagctatccgtgactgtgttcgcgagtatgagccccggatagtcggggtcgaggtctttgcagtggataacaccacagcggtccccggtatgaccttccgggtgaacgcctcggtacaactggatacgctggcgcaggtcgcttcgtttgatatccatatggacagtaaccgccactacagaatgatgtga

SEQ ID NO: 159604 - DNA, 1479 bp, Enterobacter cloacae
atgtctgctaccgaaaaacaaacccgcacagacgttgccgggacgtcttcctcgctgcttgacgaaatcatggcgcaggcccgtattacgcccgtcgatgaaggctataacgtcgcaaagcagggcatcactgcgctgatatccaacatccttgacagtggcgatgcggcagagcctgttaataaggccctggttgaccgcatgattgttgagctggacaaaaaactcagcgctcagattgatgagatcctgcatgcgagcgagttccaggctctggagtcaacctggcgttcagcgaagctgctggtggacagaacggatttccgggaaaacatcaaaattttgatgctgcatgccaccaaagaagaactgcttgatgattttgaatttgcccctgaaatcacccagtccgggttctataagcatgtttactccaccggttatgggcagtttggtggtgagcccgttggcgcggtgatcggtgattatgccctgacccagagctctccggatatcaagctgatgcaatacctgagcgccgtgggtgcaatggcacatgctccctgcatttcctctgtggcaccgaccttctttggggtagacagttttaccgatctgccctccattaaggatctcaaatcggtatttgaagggccggcctataccaaatggcgcgccctgcgtgagtcagaagatgcccgctatctggggttaactgcaccgcgtttcctggcccgcctgccgtacgatccggtggagaacccggtcaaagggttcaactatcaggaaaatatcaacagcagccacgatcactatctgtgggggaataccgcttacctgatggggacagcgctgaccgacagcttcgcgaaataccgctggtgcccgaatattatcggtccgcagagtgggggcgctatctccgatctgccggttcatgtttatgaagcgatgggtcagctgcaggccaaaattccgacagaagtgctcatcaccgatcgccgtgaatacgaactggcagaggaaggctttatcactctgaccatgcgtaaagacagtgataacgccgcgttcttctcggccaactcagtgcagaagccgaaggtgttcccgaatacccgtgagggcaaagaggccgaaaccaattaccgactgggtacgcaactgccgtacatgttcattatcaaccgtctggcgcactacatcaaagtcctgcagcgcgagcagattggctcctggaaagagcgtcaggacctggagcgtgagctgaacaactggatcaagcagtacgtcgccgaccaggaaaatccgccggctgatgtacgcagccgtcgtccgctgcgtgcagcgcagatcacggtgaaggatgtggaaggtgaagcgggctggtatcaggtggcgattgctgttcgcccgcacttcaaatacatgggggcgaactttgagctctccctggttggtcgtctggacaaggaataa

SEQ ID NO: 159605 - DNA, 504 bp, Enterobacter cloacae
atgagtaaaaatacaggcacctcctctgtcgcgccgaaagaaagaattaatatcaaatatgttcctgcgaccggcgggcaacaggcagaggttgaattacccttaacactgatgatcgttggcgacctgaaagggcgcacagaagaaacgccgattgaagaacgtcagacggtgtcgctggacaagaataatttcaatgccgtcatgcgggaaagcaaaattgatctcgcttttaatgtgccaaatcgtctggaagacgaaagcgaagatgacctgcctgttcatctgaacatttcttctcttgctgatttctccccggataaccttgcgcagcaggtccctgagttacgtaaattgctggagttgcgtgaggcgctggttgcgctcaaggggccgctggggaatatcccgtcgttccgtaaccgtctgcaggatttgcttgccagtcccgatgcccgtgaacagctcctcaaagagctggatctgattaagccagaagaataa

SEQ ID NO: 159606 - DNA, 597 bp, Enterobacter cloacae
atgacgacattaaaatctgcattacgccgtgccttactggtggcttctggctctctgttgttgaccgtttttgctgtgcaggcagacacaaccatcatctttctccgtcatggtgaaaagccggagacatctaccggtcagttaacctgcaaaggctttaatcgtgctctggcactgccatcagtactgctcacccggtttggacaacctgacggcatttttgcttccgcgccaaaggaaaacaaaaccggcagttcactacgtccgttgaccaccattctccccacggctatccgggcagagcggccggtaattctgaaataccatgccactcaaacggacgaactggtcggcgaccttctgtcggccaacagtcaggacaaacgggtattcgtttcctgggagcataaaaacctggtggtggccgcgaaggcactggtaaaacgaaccggaggtgattcagaacaaatcccgcaatggaaaggcgatgattttgacagcctgtacgttatacagctgagcaatgaggggaaatttgtgtcattcaaaaaggaaaacgaaggactaaacggcgtaagcgaacgctgtcaggactaa

SEQ ID NO: 159607 - DNA, 357 bp, Enterobacter cloacae
atgcaaaagaagcttctgccaggattatgccttatcgtcggtagcgcctgcagtctggctcaggcggcagggcataacaaactacacctgccgacaaaaggtgttgtctgtgatacgtatttttgtgctgatgcaacgggcatttccgaccctctgacggcgaaatacctgggcacgaaaaaaggtcagcagctgaccgcgcagggagagtttgaccgcacggcttttacgtttgctaatggcgttcactgcgacacgaaagagaaagtctgtcgtaaggaccgttactttggtgccgatggtaaaccgtcaggtgcgattgacaagacgaccacacagctgttgtttgcgccatga

SEQ ID NO: 159608 - DNA, 420 bp, Enterobacter cloacae
ttgtctgtcgaacggttttttcatgatgtacccgccagtatcgccaggtgtctgcaattcgtactcaatgctgcgctgttgctgctgggactgatactggtggtattcctcggcaaggaaacgatacatctttcctgggtattgttgcagcctgcgacagagaacagtaaatacagcctggtggccgggttgatggtgtactttttgtactttgagtttattgcgctcatcgtgaagtactttcaggcggggtaccatttcccgctgcggtacatcatctatatcgggattaccgccattgtcaggctgattatcgtggagcatccgtcttcgcatgatgtgctgctctatgccggtgcgattctggtgttggtcatgacgctgtggttgtgtaattcgccgcgactaaagcgggaataa

SEQ ID NO: 159609 - DNA, 618 bp, Enterobacter cloacae
gtggggcgaattgactatcaaatcgagaagtatcagttttcctgtgccagtgaacctcctcggttaacccgacaatggggcgacgtgctggaagaatgcagacaactgaaagccggagcgggagagcggctgcgtattgccctgctgaacgtcgattacgtgaccagttttgagctgccttttcggctgctgctgatacgcacgccacaattaatcgcaggcctgcgcgacgaactgcaggtcagccagaaaagcgtcatcttcaacggcaaacgttttggctgcgtctggagcctgaagacagacctgagtgcgataccggatgcgtttcagtaccgcctggtgacccgcatacaccgacttgacgccaccgaaacgacagccgcgccttatcagcagattgccagggacgtgaaaacgccacgcgaacgactcaggttggcactggagagtgggttgcaggtgacagctctggctacccctctgcatactgagtctgacgttgcagtcgcgtgctggcataggctgccggtactggtgtgcttcctcgctctctttcccctcttctatttttttgtcgcaaaacttcggcgtattaaatgtattgaatttagttga

SEQ ID NO: 159610 - DNA, 654 bp, Enterobacter cloacae
atgaaacacactcacaataccttaccccctgaacaaaccgtggtcgaccttgcccatctggcatggtgcgcccgggttgccctgtgtcttgcacagcaggacggtcaggccctttcaccgctgaccattcatacgtttttattgcgctggcttgcggctgcacaaaaacagcgtcggttcccccggtcagttgcgcctgagcttaacagcctgctgagcctgggacggcaaaaagggcccgccgcgggccttgaacaacgcctggagggcctcctgaatgcctgcgataacccggtgacgtccccgccagatttgttacgtctgacccgggcgattgaacacctgaaatccctgggctgggttaacgcggtggtggcggatgatgaatggcatccacagacgctgattgctgagtacgcgggggtagcggcctttctggtgaggaagtctgaactgggacgcaagtttgaggtaagtggcagactgacgggtgagatgacgtttatggtggtcggggacagcggtgtggttgtcgatgcgctgagggcgagggggcttggctgcacgcttcgcgggcaacattcgggtgggtgtttgttgacgctggtgccggctgctgatttgccggagcccatagcgcaggttactcggtaa

SEQ ID NO: 159611 - DNA, 564 bp, Enterobacter cloacae
atgaatgaccatcacaccggcacagttgccggcaacgctgtggatgccgaaaacattcgcgcttttctgcaacaggccgttgaccattacccgcgtctggtggcattcagctttacgctggtgctgccgtacggcgaaactctggccgattaccacgcgttgattttacgctttcatactgaggtctggcagcggacgggtgaatactcacaggcgcgccagcgggaacgccggagttcgccaccgacattgttacgttgggtgtgggaggcggcctgcgcacctgaatgcaaaatggtcctgatgctcaatctcgatacgctggggaccgaacgaaacccgcaactgaccgacagtgcgctacaggcgctaaacggcatcatcgctgaagcatggcaaacggtggccggtacagcctgcacaggcgtaatgagtatggcgcagaacattatcagccgcgctggcagggacgctttcactacgccttttaaccggctaaaaacacgagtgcaggaaatgacgctgcccgtgatgacagccagaacgggcgttatcagactgtga

SEQ ID NO: 159612 - DNA, 423 bp, Enterobacter cloacae
atgtatgcaaaatcctttatggctctggacggcaacggccgtctcacgggagccagaaccgcgcagaccgcgccgtatgaccgctacagctgccatctgtgtgccagtgccctgcagtaccatcctgaatacgacactgaacgcccgtggtttgaacaccggcacgacaggctgacggataacgggcgacagcactgcccgtatgtaaagcccgggatgagggagacccgccatatccggcaactgcagtcttatgtaccggaagcccgtcccctggttttccaggccgactggcactgccacggctgcagcagtgattaccacggtgaacgttactgcatgaactgccggacgggggagcacagctatgcgctcaatgatgctgacagctggatagcggaggtgacggcatgcgcatgttga

SEQ ID NO: 159613 - DNA, 228 bp, Enterobacter cloacae
atgaccacactgaacacaatccccaccactctgcttagcgcagaagacccgctcatcgacatgacgttcattaccacgtttaccgggatgaccgacaaatggttctacaaactgattggcgacggtctgtttcctaaacccatcaagttggggcgcagttcccgctggttcagaagcgaagtggaagcctggatgcagcagcgtattgctgattcccgtggcgtctga

SEQ ID NO: 159614 - DNA, 570 bp, Enterobacter cloacae
atgagttacacctacgacccttactggcagcaacgcatcgccgatacctttaactgcgcgctgaacgcctatacccgtgtactggccctgcgcgttgacctccggctgccggattcgccagcggccaccgatgccgccgctatctcccgttttactgattccctgaaagcccgcattgacgcgtactttcagcgccatcgacgcgaggggaaacgtatctggcccaccacgctgcgttttatctgggcgcgggaatttggcgaaatcaaagggaagaagcactaccacgtggtcctgttgctgaaccgggatacgtggtgcgggccgggggattaccaggacccggagtcgctggctggaatgattaaacaggcgtggtgcagcgctttgaaggtggatgctcaggcacatgccgttctggcgcgttttcctgcgagccccgcatcctggctgacgcgtggcgatgaggctcagctgcagcaggcgctgttacaggcgagctatttagccaagctggagacaaaagcgaccggagacagcgagcgtaacttcggctgcagccggggctga

SEQ ID NO: 159615 - DNA, 813 bp, Enterobacter cloacae
atgattattgacgttgatgaagcccccgcgattgcgctggctaccctgaaagagaagctccacaactggcaagctccagccaacccaatatggccctcaacctggcctgtttttaatcgcctgattagacgtcatgacgagatggcggcggtatacagggagatcgcatccagcagtttcaccaggcaacagttctgggtgctgcttgagcagatcatccatgcgggcagctttggcaccgatgagcgttttgcacaactacgggctgatcatcaggagcttacgaagctgaatgacagtatcagcaccatgagcatgcaactggctgatatgctggagcgacgtgcagaactatgcgagaacggccacttacaatgtgatcgtatgcgtaaacttatcgaatttatcgatgatgccggagaggggaacggttattaccagtttcaccttaagtcagaattgcagcggcttaatagctttgagctcaagtactggcctgacattaccgggatcattcgctcgctggggatggaagaggtggaggtcacctttgccgatgaagcgacagaggcgatcatcaacgcccacaggccttcaatgacggatttcttcaggaagttatttgataatattaacgagcaaaaaacagattactcctactcattaccacgaacgtttaaactttcagatgctgcgctggcgaccatttttaatatcacacgcgatctgccaccggatgaactcattgacgcggcttatgtgaaacgaacccgccatcgactgaaagaacagggttttagtgcagtctggtga

SEQ ID NO: 159616 - DNA, 489 bp, Enterobacter cloacae
atggctgtaaattatgatgatggcaggcgaggactcataacgagtcgggacctaagagtttgcgcgttttatgccggatggttgaatgccagcaacaaaattaacaccagcaatgttcccaggcaggatgcagaaagctgccgacaggcgttaaaccagctaattaatcaggccatcccggataaaaaccagcaggcaggactgctgtctgaaatggaaacagcccgtgatgaaaatgtgcttccactggattgttttgactggcttcgtcagaatgagcgggccacgttctggctatgggcgtatctctgtaaggccggggattatgagtttggcattggcccgccagcaaatgctgaattcgggaaaaactggtatcagcgaataaatctgagtttatctccggcaagtcatcaggagagaatacatattctcatcgccttctttgacaacatttacatttccacccccccctgtgaatcaccttaa

SEQ ID NO: 159617 - DNA, 819 bp, Enterobacter cloacae
atgagactagccagccgctttgggcggacaaaccaaatccgtcgcgatcgtccgttaacccgcgaagaactgatgcaggtcgttcccagcgtttttggcgaggataaacacgcatcccgctcagaacgctacagctatataccgactataaccctgctcgaaaacctgcagcgcgaagggttccagcccttctttgcctgtcagtcacgcgttcgggaccctgaccgtcgtgagcacacaaagcacctgctccgcttacgccgggctggtcagataaatggacaacatgtccctgaaatcatcattctgaattcgcacgatggcgcatccagttttcagctcttaccaggaatcttcagaagcgtatgcacgaattcgctcgtctgcggacagtcgtttggcgaaatcagagttccgcatcggggcaatatcgttgagaaagtgattgagggtgcttacgaagtactcggtgtctttgacagggtggaagagaaacgtgacgccatgcagtcgctgcagttaccaccacccgcacaacacgccctggcaaacgccgcactaacgtaccgttttggtgaagaacaccagccggtgaccaccacgcaggtgctgacgccacgacggtatgaagaccggcaggacgacctgtggacaacgtaccagaggctgcaggagaacctgctgaaaggcggcctgcccggacgtaccgcgaagggtaaacgcagccatacccgtgccgttagcggcatcgacggcgacgtaaagctcaacagggcgctctgggtgatggcggaaagtctgctggagacgctgaagtaa

SEQ ID NO: 159618 - DNA, 255 bp, Enterobacter cloacae
atgccgcacatccctgatggcagttatcaggttacgccatatccgttcgtcctgctgagtctgccgggctgtcgctccatctccgatgacgacctgtgcgcctggtgctcacaccttctttatcggcccggcgagctcagcttgtgctgcttaagtcttcctgaaggccactggccatcacgctgtgatgaagatggctatacgcagtcctgcccgtcactcctgctgaacctgcatccccaaccagataaataa

SEQ ID NO: 159619 - DNA, 486 bp, Enterobacter cloacae
atgaccgacattattaaccttaacgatgccttccagttacagccacaacataccgatgccggttctgcgccagcactgaccgctacgtcggtaccggacgaacagcgtctcagcttctggccgcagtacttcggcagcataccgcagtggataatcctcgagccgactgtcttcgcgtggatggaccgcttctgtgcggactatagcggcggcatctggcagttttacacgctcagcaacggcggcgcgtttatggccccggaagcgaatgaggatactgatgaacaatgttcgctgttcaacaccctgaacggtaacggtggagagctcagcactgaggctgccggaattgccgtctgtctgatgacgtatagccaccacgccatgcgcaccgaatgcgacgccatgacggagcactattaccgcctgcgggactacgcgctcaaccacccggaatgcagcgccatcatgcacatcatcgactga

SEQ ID NO: 159620 - DNA, 480 bp, Enterobacter cloacae
atggaacaacagttaccgctgtttgcccgtgaattagcccctgccgaccagcagacagtcagggaagcattaaccctgctggaatgccagttacgcgagcccggcgcgtcatttacctccaccaccgccgttcgtgactggctgcgcctccagcttgccacgctggagcgcgaagagtttgtggtgctcttcctcgataaccagcatcgcctcattgctcacgaaacgctcttcagcggcaccatcaaccatacgcaggtccatccccgcgaagtagtgaaggccggcctgaaacataactgcgctgctgtcatcgtcgctcattgccatccctccggggaggcggaacccagccaggcagaccggcagataaccgaacgccttaaacaggcgctcgaccttgtgggcatccgcctgctggaccatctggtggttggcgggatggacgtcacctcctttgccgaacgtggctggctgtag

SEQ ID NO: 159621 - DNA, 222 bp, Enterobacter cloacae
atgaaaattatccccaaacgccaggcgatggcgatatatcgccagcatccgcagtcccggctgtttcgcttctgtaccggcaaatatcagtggtctggcagtatctgccactatgccggacgggaggtgcaggatatcagcggcgtactcgcagtattcgcagagcgtcgtcaggaccgcaacggcccgtatgtcgtattgcgcagcgttaccctgaattaa

SEQ ID NO: 159622 - DNA, 360 bp, Enterobacter cloacae
ttgtcgaataaaatacgaccagacagccacgatatcgccgaaccctggtgggggcttaaacgcaatatcacaccctgttttggcgctcgcctggtgcaggagggcaaccggctgcattacctgaacgaccgcgccagcatcaccggcaccttcaccgacgcggatttatgccatctcgaccaggcgtttccgctgcttttgaaacagctcgagctgatgctcaccagcggtgaacttaacccccgccatcagcattgcgtcaccctgtatgcaaaagggcttacctgcgaggccgatagcctcggctcgaacgggtacatctatctcgcaatttacccaacgccagcaaccgccgcataa

SEQ ID NO: 159623 - DNA, 378 bp, Enterobacter cloacae
atgaaaacacaatcagcctccgccacgctggcggctccgtcacgcccgtcccccgttgaaatctggcagcagctcctgagccacctgctggaccagcactatggcctcacgcttaacgacacgccctttggcaacgacagcgtcattcaggaacatatcgacgccgggatctccctgtgcgacgccgtgaattttatcgtggaaaagtacgatctggtacgtaccgatcgccgcggtttcagtgcagaaacacagtcaccgcttatcggcagtatcgatattctgcgggcaaggaaggcaaccgggctgatgacccgtcatagctacagggccgttaccgacatcaccaccggcaaataccgtggggtgcagcaatga

SEQ ID NO: 159624 - DNA, 492 bp, Enterobacter cloacae
atgaagttatccctgacggtagaagccgacgccatcaacgttctggccctgaatgcgggccgggtagccgtggatattgacggcattgaactggctgcgctgatcgatgtggtctgtgacaacgggcattcgcttcgcgttgctgactcccccgggaagcgggttgttgaagatcctcttccgcccgtcacccggctgaatggcattcagtgcagtaccgcccatatctccgaagctgataacagcctgctgtataccctttcgcaccagcatgaagatcatggtgacagcgaatggattagctataccggatccggttatctgatttatctggatgcctggcagtacccggtactccagcttaagaagcggggattatcgaaggcctgtcgtcggctaatcgtgacgctggtacctcgctatgccatcagaattatccatctggatgctctgggtgaactgctgcccggcttctccaccttcgactggtaa

SEQ ID NO: 159625 - DNA, 846 bp, Enterobacter cloacae
atgtcagatcttaccctcaccaaacctgaagtgttaaccggccataccgatgtgatttgctctaccaatattgagcgtatcgtcaccggacgcaacgcggcgctggcgcaaattgaaacgctgatacggcaactcgacgatatctctgccctgacaagtaatgtcggcggaggtaaagcgaatgaatggggagtacggcaataccgttacgactgctggttgatggagaaaccagaaacagcgatgaaagccatcacccgaaatatcgatcgcagcatctggaaagacctgatgcaacgctcgggaatgctggcgctcatggacgcacaggctcgtgacaagtggtataacagtctggagaaagacgatattcctgctatcagtgaagaaaatatccttggcacatttaaacaattgcatctgaataaaggtgaagtctttgaacgtggtgtgattagcgtgtttaaaggtctgagctggaattttaagacaaacagcccatgtaagtttggaaagaagatcatcgtgaacgggttggtcaaatacgacagatggggatttggcctgaactggggctggcagcgtgaccggttagcggaccttgagcgcatgctgatgttactggatgggaagcctgttcccgacaaccgcgccgatgttacccgccgtctcagcgatcatattcatgagaacaggcacagcaccagttatgaggatgagatgtttactatgaagtacttccagaagggaacagcccatatcagcttcaaacggccagagctggttgataagctgaatgacatcatcgcccggcactatccgggggcgttgcccactcaacagtaa

SEQ ID NO: 159626 - DNA, 390 bp, Enterobacter cloacae
atgatatcattttcaaacgctgatggtgctcagtacgattccgcaaaagaccagagcactgagccatcaaaaagagtccaaatggacttcaaaattcccgttcaaccgtcaaatttagacgccccgcagacgggggccttactgggggccttgtggtttatggaatacattaaaaaccatatatatcagtacacatacaaaaccaaattcattccgagtccgggcaccactattcagaaaacccgccctcgtggcgggtttttgctttctgagccaacaacttgttggttcaccagaagtaaccacccttacctctcccccaactccacttcccggtggtacaaaatgggcgttatgataaaacccaccaaataccgaaacggcgcttag

SEQ ID NO: 159627 - DNA, 1146 bp, Enterobacter cloacae
atgaagtaccgcattgacgggaaagagaagaagctggcctttggcccctacccggatgtttccctgcttaaggcgcgccacttccgcgatgcggcacgctgtaaagtgcgtgaaggagccgatcccgccgttgacaaaaaaatcgcacagcagaaaaagaaaaacagacagacattccgccagatcgccatgaactggcatgccgaccaccggcgctggtctgcacattatgcgacgaccatccagcgcaggctggaaaggtatgtgttttcggatctcggggacaaatatatccatcaaatcgtcacgaaagatctgctgtttaccctgcgtaaagtggagaacaaaggctttctggagaaagccgcaaggctgaaaaactacgtcaccgaaatcatgcgctatgcggtgaaaaagcagttcatcaaatcaaacccggcgctggatctggatggtgagtttaccccaccggggacgcaacattacccggccctgccgcttgaaaaactgcctgaactgttatcccggacggataactactccggcaggctgctgacacagtatgcgcttaagctgtcgctgctgttctttgtccgctccagcgaactgcgctttgcccgctggagtgagaccgactggcggcagaagctctggataatcccggaagaacgggaacagatcgaaaacgtgctcttctcccatcgtggcgcaaagatgaaaacacagcacatcgtcccgctatccgttcaggcgatcgcgatcctgaagcaaactgaagcgctctccgggcatctgacgtttattttccccggcgaatacgaccaggataagtgcatgagcgacaacactatcaacaaggcattacgtgtgatgggctatgacaccaaaaaagaggtctgcggtcacggtttccgggcgatggcatgcagtgcgctgagtgagtcgcggctatggagcaaggaggccattgaaaaacagataagccatcaggaaagtaacagcgtgggtgccgcctatatccataaggcagaatatctggaagagcggagcagcatgatgcagtggtgggcggattatctgaatgtaaacacagagcggtatctatcgccttatcagtatgcgggacacgagagagaagcgtcatag

SEQ ID NO: 159628 - DNA, 357 bp, Enterobacter cloacae
atgaaaattaaatgtctattacttattttatttgcttcatattctacagcaggttttgccacattttccgagacggaaaataatcaactggcgagcattaatcagaaaagttcaggagaagttaaatccgcactggacaatttgaataaatctattgatgaacaaatcgataacaatatagagcgtaagtctttgattttggatctgaaaaattcgtgggggcagatgattaataaaaaatgccagctggaaactatagagtcaaaagggactgatgcagaaatggccgaaatgaataattgtcttattaaaaactatcaggaagaaatgaagtattttgatgcaatgcttccataa

SEQ ID NO: 159629 - DNA, 2322 bp, Enterobacter cloacae
atggacatacgttacccggtacggaaggccgacgggcgggagtataagaactatgacgaattgctgaccgacatccgcaaaaatgcccacggttggtggttacttggcatgagtcgttactggcacggcggtatccatatcggatcatcctcctctccggcatcggtgctgagccagaatgcaccggaaacgtctgtaccgctccagttcatgatggacggcgaagtggtggcatggcgggtgaaccgggactacgcgaatattgaatgcatgcaggcgcaatcgcttcgccagtccggtacctttgtgcttgtcagatctgtgtacaagcctgatgaacgagatgagtcctcctggctgacgctgtatcagctttatatgcacctggcacctttgtcagaatatcctgaacgcccgctttatcgggttacgccgaaaggtcatggtgtgcggatgcgtaaatattcccgccatgacgacagccgcgaaattgtgccggaagtactgacaaacaaacacggtcagcgcaggacgctgatgcagggcgatacgctcgcagtactgcaacaaatatcgtttttgatggaaagacagcctgagccgttcgccctggtgcagcgccttcaggatggtaaacccgccggggagctcttctgggtttcaatgcgtcctgaatatctggagcctgacggtgaatgtcacgtgtgtctgcctgactggatgcacgatgcgctgaatcacggcatgtttgatgatgtggtggtgccacctgtcccacttaaagtgacggttaaggcgggtgattcggtcggattcctcggcgctcaggatctggccgatgaagataattacccacaaataatcaccacggactataaagcgcatatcgaattgctgagccttgatgagcatgtgccggattttgtggccaacgtgaagggcattaaaaccggcaaacagtttatcaagcttaagctgaaacgaccaatgtacctgcgaaacggagagaatgaagacagtacctttgagcagatgagcgccattacccgcgctgatgccggaagaattatcccgcgcgatgccacgtacccgtttacggataaaaccgggataacgtactttcagatccgcccacacagctggatgcaccaggacgatgtggagcagctcagtcagcatgatttagccgcgttaaactttcactgcatcgaagctgcccccacaaccgattttacccgcacgctggatgaaccttgggttactgatgccctgaaaagcatcgattctcactttgatggcgaaaaagggccacaaagttcacaggcaaaaatgttttatgacagcctgatccacaacgctgaaaacagaagaccacccagcccataccctgataaatcacaggaccagtatttgtttgacgcactgcatacgaatcagatgaatatcccggagtatgcgcgacggctgatagtgaaacatgacagcgactggcacagtacccgggatgatacacgctggtcatcggtatttaaggacaaggacgaaagtccagttgtgaaactggctaacggcggatttctggatgccacgcactggatggataaggttcagccgttcgccagccaacgttcagtatggcactttcatcctctggagttcttatatgtaatgtccggtgatgatgatatggatataaaatggttaactgtacctaaagggcagttaacgtttgatgctgaaggaaatgataataacagtagtccttatttcagtcgccatattcactggccgggtggtgtttcaggaataacgattggccggggatatgacctgggtcaacaaaatgatccaacatcagacctcgactctattgaattaagtcaaccgcttaatacctggcttgtcgaatcaaaaggtctgtctggcttagaggctcaaaatcgttatgaatcagcaaacaatgacattagtagttatgagataaccagaaaacagcaatatgatctttttgttattacctacaataggttagaagccgatgtcaaaagaatatgtcagaagcctgcaaccatcagggcatatcatccgaatcaaaatatcactccggaacaggcatggaatgatattccagaaaaaataaaagaggtacttgttgaccttagatatcgtggagattacacatctcatgctcgctctttaattcagcgctacgcatacactggggatctatctgcattcggtcagatattatcaaatagagctcagtggctaaatgttccacaagatagattcttaaggagagttagattttatgaaaattaa

SEQ ID NO: 159630 - DNA, 582 bp, Enterobacter cloacae
atggattgtctacgcacccttgtgaaagagggcaagatcaaccacatcggcctttgcgaagtgtcggcgtcaacgctgcaacgggcccatgcggtacatccggtcaccgcgctgcaaacggaatattctctgtggacacgcgatatcgaggaaagcattctgccggtcgtgaaaacgttaggcattggtctggtgccctactcgcctcttggcagaggcttcctgacgggaaaatacctgaacaatagcgaatttgcagagggtgatttccgtaaaaataacgagcgctttatgcagtccagcctcgatcataatcgccagctgctcgatgtcatccacccgctggcggcgaaatacggctgtaccgcgggtcagattgcccttgcctggctgttagcgcaatacgatcggctggttcccatcccgggcactaagcacactggctatctggccgagaacgcgcgcgctgccaacattgagcttgagaagagcgatattgaatcattgaacaacctgcatcgccggatagcgattaaaggcgatcgctattctgccgagggtatgaagggcgtgaacgcctga

SEQ ID NO: 159631 - DNA, 222 bp, Enterobacter cloacae
atggaaccaaagtctgtaaaaatcctgcgtgtatctgcacttgtcaagaagttaggcattggtcgttcaacggtatacgattggcttgaccctaattcagatcgtcatgatccgacatttccccaaagggtgaaactgggagcaaagacggtaggttggctagaatccgagattgatgcctggattttgaacaaagcaaaacaaccgctaacacctgtttag

SEQ ID NO: 159632 - DNA, 726 bp, Enterobacter cloacae
atggataattttagttttgatgattttatcgctgatttgaaaaccacgttcaataataagagcgcaagcttatcccatagactcaaggcggctgaccgggagcaggaaaaggtggtttcaggtgcaaatgaatatcatgagtttgtactatcgctggttgaaagtatgcttacgaacccggtagtacgccgtaggtttgatgatcaagtctacaggatgtcttttgatgaaccgggcacggttagcgaaactataggtgggcttgtttttctggctgatgttaactggcacctagggcttgggcttatgaactcgaataaaaatgaagcgataaagtgccaactcctagctattgaataccttgattactgtcgtggtattgaagatcaagaattgtggcaacagcaacagaccacaaaattagatgtttcggcgcaggggggcagaagtaaagctgctcgctttgattccattaaagccaaaattatcagtctcttgcaggaagcttgcccctcagacggatggaatactaaatcagaagctttgaagagcatagagaatgggattaacgaactgaaatggccatctgcccgcgatcagaacaatctgtacaaaactggagctgaaatatttgcaatgaagatgcgccaggttgaggtctggtcaagtcaggatcagaaaatcaaagctgcatttgatagtgtcgtaaagcctaaaaagaaatag

SEQ ID NO: 159633 - DNA, 585 bp, Enterobacter cloacae
atgcaacataattccttgaatgcttactaccaacaggcattttacgatgttattcgtaatgcagtagacgagtttccacgtacgttagcactacgtgttgatttacgttttccccgccactatcagtatggtgattcgaacaaagaggttactcgttttattgaatcactgaaagctaagttgctggtcgattgccaacgtaagaacctacgatggaaacgtaaccgatctaatagattacggtatgcatgggtacgtgaagtaggtgaacttaaccgccgtaaacattaccatgtattactgttgctgaataaagacttctatcacggtgccgggagttataatgcagatgacagtttatacgcattaatccagcaggcatggtgtagtgcgttaagtctagattcggaacaatactcaggtttagcgaatatgactgagaacggttgtttttatttaaacggatattccgctaattatatgcaacggattaacgaattgctgagacgtatggattacttggcgaaagaccataccaagtgttatgacgatggatatcgttcaattggaatgagccgcaggtaa

SEQ ID NO: 159634 - DNA, 1458 bp, Enterobacter cloacae
atgcaggagtttccatttaacgctttccccacgtcattacgtgaaactatttttgatattgaggaatgcacacaagccccgggggaaatgattgcattaacattgctgagtggattatcactggcgtgtcagagcctgattaatgtaaaaataacagacaccatgaagtctccggtgtcattgtattcattcgtgatagcagattctggcgagagaaaaacagcggtggaaaaactgctattaaaaccttttcatgagcatgatctgcgtgtattactccagtatgaaaagcagaagaaagaacatgaggtccagtctaaaatatggagcaagaaagaaaatgcacttctgaaatgcattgataaagacactatgaaaggactatgtacagataaactttcacggcagttagaaaagttatctgctgaaaagccagtacaaccgaaagccagaaggtatatttataataatgtcacccctgaagccctgcagtttgaaatgtatacccactcgccacaaacaggactaataactgatgagggggctaatatacttagcagacggaccatgagtgatttgggatttatgaactccatatgggatgatgaaagttttcatgtcaatcggaaaacagggccgagttttacgattaagaatggacgtattacgttgttagtcatggtacaaaaagcaatattttacgattttttaaaacgcaagggcgaaaatgcacgcgggagtggtttgtttgcacgctgttttatcttgtatattgatacgaaattatcgacacagggccagcgttttattagtcgtctatcttcccctcagtcaggtgagctggagaatcttaatcacttctaccagcgtatgaatgaactggtagaaaaaagtgcttctcaacacgggaccgggcatcagacatgtttatcattcgagccctccgccctggaggcatggaaagaaattcatgatgaaatagaaagcagtattggtcccgataaggaatatgcaaacatgaatgattttgcatccaaacttccgaataatgttgcacgtctggccgcgctgctgagttactataccgaaggtgaatgcgcgataaaaaaagaatatgttgaaaatgcctggttgctatgtgaatggtacatgcaacaggcaataaaggtctttggggctcaggagggctactatgaagcgctgctattatcatggcttcgtcgtgagtactatgaaacagagatggatcatgtcagatttaatacaatacgaaatgccgggcctaatgtattacgtaaaggcaagttactggaaagagtcattgagagacttgaaaaggaaggcgcgatagacatcgtccgctcaagacgcaaggcacgaatggtttatgcaggccgttattttcgcaacaatccgtttacaaaaaatgcagcgtataagcactactggccgcgatag

SEQ ID NO: 159635 - DNA, 888 bp, Enterobacter cloacae
atgaaacatccctcgggttatacccttatccgtcgccatctgcggcgttatccacacgcgctacgccagcatttgctgcaggagctcaacctactcgttacgtatgaaccggtgattggcatcatggggaaaaccggcgtcggcaaatcctcgctgtgtaacgcactgttccggagcgaagtctgtactgtcaatgccgtggaagcctgcacccgtcagccacagcgtgtccggctaagtttcggtaatcacttcctgacgctggttgatttacccggtgtgggcgagagtgttacccgtgatggtgaataccgtgaactgtatcgtgacctcatgccacaactcgatatggtgctgtgggtactcaaggccgatgaccgcgcctatgcggtggaagagcagttttatcaggacgtattcgcgcagtacagcggaccgcagccgccggtgttatgggtgctcaaccaggtggacaaaaccgaccccgccgagcagtggaactggccgtccgcccagccctcggcgttacaggccgagcgtattgcgcagaaacagcaggcggtggcccggcagttaggtatcgctgagcaggatattctgccggtttcggtcagggggcgctatcgtctgtcgcgtctggtggaggccatgattaccctgctcccaaagcaggcccgcagtccacttgtgccgcacctgcagaacgggtatcgcactaccagtatcatcagcaccgccagcagcagctttggcgatgccgtggtggacgttatcgataaggttattgacctggccccgctaccacaggtggcacgcattgcactgcaggctgcaacacacactgtcgcccgcgcggcacgctccctgtggggatttttcttcagctag

SEQ ID NO: 159636 - DNA, 3213 bp, Enterobacter cloacae
atgtcatttattttacacacagagtcaccttctactgaagacattattgatggaaacagtcacaataatatctcgataaaaattgctgatactctcatgcgagatgacgtaaatatcgttgggataaacggtccattaggctcagggaaatccacagttataaagcttcttgaaaaaaaccttcccaatgggaattttcattttattaatttcgatgcagagttataccagcaaggctcaacaaaaaaagctctaataactaaaatatacgatggtctggaacccaatatacctaattcacttaagccaaacctaagagagtttaaagataacgcccttggaaacaatgtaacctataagaagactcaagatagtgaagtaagcacttgggctatactgtttttattctctctttttatatgtacacagtcaatacggccacttcagactgagtggggcaagccattagaaagtatgagttatttgctcattggtttattcgtgttattcctcacatcaccactgcttctttatgcaatttttttcattcgttcattctgggataaatctttaaaattcggaaatatcattaagaaaaactctgtagatataatttctgaaaaaatacttgtttcaaaggatgtaggtagtatagagttgcataatgccattagtggatttaaagaatgtatacctcctgggctaaagtttcttttaattgttgataatttagatagaattccttctgaaaaagttaaagagctatggagcgacattgaattaataagtaattcatctgagaaaagactaaaattattaataccatactcatcagaacatgtagcaaaatcattatcacaggatatttatgagggaagggaatttatttccaagagaatacctattagtttccaaatcccaccaatattatcagctggatggcggaatgttttttctcatttttggcagcaaagttttccaaatgaattcgaaaacttgtaccatgatacatcagaactgattgaaatctggcttccaaaggcttatcaaccaataactccaagatatttaaaaaaacttatcaatgacatacagataactttgctatcaacgccttatgacgtaaggaatataacatgtgcatattatattttaactacaaagcataatgatcttcctttcgaaaatcttttaattgataattttgaaagcagcgatttggatgaaaatacaagagatagatataaaaagagcatcagaaaacttcaacgaatttataacaatgatcgtaagaaatggattgatgaattgctatgcataaattttcaaaccaacgctcagctcgctgaaggagagttaattgacgaacctcttaaactcgcactaactcagtataactcagaggaactagctcgaatttccaatatgtttggttttgtatcagcatggagaagagtaattgacactactgatccaactgattggttcataacgctttctaaaatgacctctgaaaagaacgatattataaaagaaatactgcctgaggttataaaagcattagataccatggacatatcaggtgcgtcaactttggataatgaaaacttcctcccttcattaaactctttaaaaaaagatggatttaatgttcatggtttatatttaagcaacatccaaaaaacaattgcacatgatatcgcaaagtatattacttgtaatgatgataagttgatcgagcttggtcaaaacaacacggaaatacaacaagcattacatcatggagaattgctttcacaattaatcggatacaatatattaagtgatatatcaagtgcacccaaaactgttttctacatacttaaccttaaagataaatccctatcatataagagcctagagattgaacagataaaattagaatcaaaagatttcattgatggcctacaatcactcttcgcaggtggcgttgactttaatcttaccgagaaaaatataaataggcatattgcatttgaaagtgacggaatcaaattagttttgaaagaaggattgcagccgggattggaatcaatttttaatagcttcacaagtggcatcatacctcaaaatattctattgtttgaaatgatggtgctaactccacaatggcattctacgaaccttaccccccattacacacgaattttaaattataatattgattggaagagtaattgtcttgcacattggatgtcacacatgattgcaagtaaaaatattacatcaatagataaccacaagcagtatatctctgccgaagatgatttaacttacttcttcagttgctacataaaatatatatctaacttcacgcacatatttgaagcattaaccaatgagaccttgaatgaatacttgattccttccttggaattattagcagataataagatgcttaaaattagcgatgtgaagcccattgtaactgactttttctcagttatgacacaatatctctcagatagtttcattgaatgctttatacaaaataatcgaagtgctttatgcgatgcaatagagaatacctacattaaagacattgatgattccctaatcgattatattgttaaaaatccagaatccaatgaattaacaaaatcactgattgaaagtttaaaaggtgaaatagatacacaagaaaaattcaacaaagtcgttaatgaaaattatccttcctactctaaaatcctagagtactcaaagaaaaatttagagcatttcgactttgctaaagatttcattttcaatttctatgaaacttataagattgacgctgttgatagaccggtccctcggcttatttttgataccttatcagataccatcaaagaaatagcactaagagaccttagcgatttgatatacatgcgagatcttgatgtaaaaagaccacttgctttattaaaatatttttcagacgtcttgaattattcagatgatgaatcaacatcaggttcaagagcaattgctcgtctatttaatcaagtcagcactaacgcagagatagcttcatggcttgaccaacaaaatataaacttttcgaaatggaacattagcgataaacagtctgtagtgactatcatcgcgactaatgctgagttattccctcgccttaaggaaaagggccccgttaaaagcaaaattcaagaattgagcttagagaacgattaa

SEQ ID NO: 159637 - DNA, 126 bp, Enterobacter cloacae
atgcaggtgcatgaacagcctcagggtgcgccagtgctggcgctggcgggggacctagtgtcgttaaaacgcatgcaaaaccatgcaccttatggatgcatggcttttttcgggaaaaatagctga

SEQ ID NO: 159638 - DNA, 957 bp, Enterobacter cloacae
atgcgcatttatatcgacgatggttcgactcatatcaaaatgctgtgggagcagcacggcaggacctttacccacctcagtcccaatagtttcaaacgcgggtggtcagccacgtttggcaacggtaagccgttcaactacaccacaggcaaagagaaatactcgttcgacctcatttcccccgacgccctcaccaccagcaatatcgaatggcagtacagtccgcttaacgccgtcgctgtacatcatgccttactgaccagcggccttacgccgcagtgcgtggatatcgtggtgacgctgccgctggcggagttctatgacgaagacgcgcagtaccgattggataacattgagcgcaagaaacagagcctattacaatctgtggaactgaataatggtcacgtctttaccatcacccgcgtcaccgtgcgcccggagtccattccttccgggattgcgctgtgcgatcaactctcacccaccaactcagtgctgattgttgatcttggcggaaccacgctggatatctcgcaggtggcaggccagatgtcttcggtatcgcgtatctatggcgatccggctcttggcgtatcacttgtgaccgacgagatacaacaggcattacgtaaagccggtatggcgctgtcccgctacaacgtggaccggttgattatcaagcgtttcgacgacacgtacctggcgaacaacatcaacgatccgagggctgttgatagcataaagcaggctatccacagcggtatcgcgcgttatcgtgcacgggtgctggaagctgttgatcgtttcaaaggttatactcatgtcgttgtcgtgggcggtggagcctgtctgctggccgatgccatccgtactcatgttaacctgcgtgaagatcgtttctttgttgctaaggatccgcagttcgctctggttcacggtttaaaagccattggttaa

SEQ ID NO: 159639 - DNA, 360 bp, Enterobacter cloacae
atgactcgcagaaaagtactgatttatctgcgtccccaaacacatgcctctgaacgttttgcggatgcgaggatagaggcacataatcggggcgaccgtggtgaactatcacgaacagcgttactggccggtattgcgctgagcgagattgacagcaggttaccatcggtactggcggcactgctggctgaaaacaccagcccggaaacattacgtaccatgctctcgtcgtttctgaacattcagtctggatcgtatcaacctgcatcgatagtaaccatatcaccgatacctgaagtaacggaaccgcctaccagcagtgtttcggcaaagaatctggcgggttctctgccagaataa

SEQ ID NO: 159640 - DNA, 294 bp, Enterobacter cloacae
atgaaaaagacccgttgtaccgaagaacagatagcgtttgcgctgaagcaggccgaaactggcactcgcgtcggggaagtctgcagaaagatggggacttctgaggccactttttataattggaagaagaaattcgccgatctaggcgtaacagaactacgtcgtttacgacagctggaggatgaaagcatgtattatgaatgtctgcaggacaaccatactcaaatctcccacattgcaggagatttgagtatgaacacgtcaccgggaacaaagaccaaatggtccgtttaa

SEQ ID NO: 159641 - DNA, 2115 bp, Enterobacter cloacae
atgtctaggctgactgatttaattgccaaagcgaaggccaaagacccgcaattgggtgctgacctggatcgggaaatcaagatcctgtcatcacgacttccctttggtcttaatttcgaacgacatagccctgaagttgttgagttgccattgcggcctattcgcaagggagacaaggttcgcgttctgccagagcgtgggcccattaagaaagatgatcaacggttgtggcaggttaaagccatccataaggcgaagaaggtcgctgatctcgagctgctgggcgcggctgatgtcgagactcagactgtagcgctgagcaatcttgttgttatagctgaatttcgtgacacgatctggccgggtctggttagtacgggaaaagtgcaacgcggtggagacaagcctttccattcagtcatcaatggcgagaactatcatgtgttgaaagcgttgacttatacgcataggggcaaagtggacgctatttatatcgacccaccctataacacaggggctaaggactggaaatacaataacgattatgttgagaaggacgacttatatcgacatagcaagtggctggcttttatggagcgacgccttctaattgcaaaagaattgctcaatcctgctaattcagtacttatagccactatcgatgaaaaggaatatctgcgtttcggtttgttattggaacagactttccctgaagcgcgtattcaaatgctcagcagtgtcatcaacccaaagggggttccccgcgatggattcgcccgtgtagacgaatacattttcgttgctcaatttggaacatgcactgttttcggagatgtgaaagaaggtagtgcaggaaaagaagttcgctggcgaggacttactaggactggtgcaaatggaatccgcagtaaatctcctggtgctttttatccgatcttttttaataaagatgggcaaattgaaaagatcggagattcactcccgattgatcaatcaattcgttctgtgcatgtaccggaaggattggtagctgtttggccgactcctcgcccggatggtgaagatggtcgctggtctgttgtgcctgaaacactacgagaccttatgcgaattggtgctgtgagaacagggaaagttgatattgagaaaggcagattcccaattttttacctgacttctgagcagctagcggcaattgattcgggtgagttggaagtcaagggtaagacacctgatggcgttctgcgcgtgtatttcaaggaggacggtggaagagtttcagcacctagaaccatttgggataaagttagccatagcgcaagtgaacatggttctatgttgctgcgagctttacttcctggtcggaaattccctttcccgaaatctctctatgcagttgaggacgtactgaggctctttgttacgaacaaacctaaagctatcattctagacttcttcagtggctccggtacgactgcccatgctgtaatgcgcctaaaccgccaagacggtggtcgccgtcagtgtatctcggttaccaataatgaggtcgccgctgacgaacagaaaaaactacgcgaacagggttctcgccccggtgactctaattgggagaaatggggtatttgtgactacatcactaagccacgcgtacaggctgctattacaggcaagacccctgagggtgaaccgattaaaggtgattataagtttaccgatgagttcccaatgtctgaaggctttgaggaaaacgccgagttcttcaccctgacctacgaagctgagaagtcagttagttacaacttggcttatgctcgcattgcgccgttgttgtggttacgcgcaggagcacaaggcaagcgcattgacacactgcctgctgaaggatgggcagtaactgatacttatggccttctatcggctgtggatcaggccacacctttcattgaagccattagccacgccagtgacgtgcgagtggcctttatcgttactgacgatgatcgccacttccaggccgtaaccagacgtctgccaaaaggtgttgagccggtacgtttgtacgaatcgtacctgaccaatttcagcttcaccagtggggaattaacagaatga

SEQ ID NO: 159642 - DNA, 627 bp, Enterobacter cloacae
atgtctttaatcaacaaagaagaagcacattcagtctgtcaaccctactacaacaccctaacttcagttttcgacaatgtttggaaaaattggcttcaaaacgatgtcgcacgacggttgattgataagcgtgttcgttcagctgttctccgcaatgacgcattgtttttccttaaagacagtattgaaacttctaatcttaaagggatcaaatatgtaaaaatgccatatcaggtaggctttctgattcaggatcgatattttgtaaggattaagaaaggtgataagagccttcgttcttccaattaccctactcaaagagccttggattttcataatcctgaaatggacatgtttggaggattagttcgtttagagctactctacatacttagtgacgatggtgtaggaattgataaaattgttctcacgcagcgcaatggtaagtttgttgcgtgggcaattgatttaacagatgaaaatctgtacgaaatgcctgtatctaagcttgaattgaacataccccaaccacagcctgttaagacggtttccccagcaaaaagtgttgtgaaaccaaaacgggctagaaaggcagaaccgaaggtagaaaatggtcgtggagattaa

SEQ ID NO: 159643 - DNA, 132 bp, Enterobacter cloacae
atgctttgtttacgcgcaaaaaagccctgcttatgtgcagggctgaaatcaatgttgctagagtttatttttattatttccctggcactgctcaacattcaggcttattacctgaatgttgagattcattaa

SEQ ID NO: 159644 - DNA, 273 bp, Enterobacter cloacae
atgaactctaaaaaatttgttttcattgaagggtatatcctgtcgaacagctgtcacgggcaggccggtcaacctttctgtattcaccgggtcaggtttagtaatggtaaatatgcgattatccgggtggaatccgggatatgtttcaaacctggcgaaattattcaacgaaacaattgcgagtggttttataaacttaccaaaattcgccttctttcttttgagtaccttgatgatgatgaatcaagaagacaatttcttgaatatcaatga

SEQ ID NO: 159645 - DNA, 237 bp, Enterobacter cloacae
atgatgaaatcagaagacacccttgactggtatccggcacagctaccgccagtgaaaattattcttggtgaagccgtgctggctgtgggtaaacagggccgaccgattaatacccgtaccttgctggaataccttcaggtcatgcaggacaaactaaaaaggcgggatgacaaaatcgctatgcagactgcgattgatgttcttagggataatcagcgcattaacggcagacgttaa

SEQ ID NO: 159646 - DNA, 783 bp, Enterobacter cloacae
ttgctcgaaacccacgcctgggatggtgaatggtatcggcgcgggtattttgacgatggtactcccctggggtcgaaagcctcacaggactgccggattgatgcgattgcgcaaagctggtctgtattgtccggggccgcgagcgcggggcggtgtgcaatggccatgcaggcgctggataagcaacttgtggataacgaaggggggctgattaaactgttaacgcctcctttcgatggacacggtccaaatccaggttacatacaggggtacctgcccggtgtgcgggaaaacggagggcagtatacgcatggcgccatctgggccgtgatggcatttgcccagatggggaatgccgaacgtgcctggcaactctggtcaatgctcaaccctataaatcatactctgaatgcgggctctgtcggggtttataaagctgagccttatgtcatgagtgctgatgtctacagcgttgctccccataccggacgtgcaggatggagttggtataccggttctgcaggctgggcctggcgtttacttaccgaggaattactggggataaaacgcattggcgctgactttactattcatgcccggttaccggatgcgtggccgtctttttctattacttatcagtatggcgtaagccattatcagattagtgtctcacgcggcgacgcagaatatcgcgtgacactggatggtgttctcctccctgatgacagaataccgctgaagaatgatggacaaaaccatacggttgagatcattcagaactga

SEQ ID NO: 159647 - DNA, 819 bp, Enterobacter cloacae
atgaactcagccatagttgaatatcttgataagcttgataatcagtggaaagagatagatagactttctgagttggctaaaaaaaatcagcatgacactgatttgtataactcattatgcagagcagccacggttttatgtgtgtctcacctagaaggtttttataaggatgctgttaagtattttatatcagatttaaatagcataaaattcaaatacttacccaaggctatgaagcgagtattctgtcaggggtttgttggatttgataactctaaagaggcgaatgaaaaagtagaacgattgatcgctgagtttgaatcccatgaaaaattttctttaaatgaaaaatcttttcttccagaaaaaaataaaaaccccaaaccatcagtcctagagacagtttgtagttcactagggacaaaggatttttttaattctttggatggaactattttcgataacattttctcgatgacacccaaggaaatttccagaagtgtttacttgctcaacaagagagttaaaaagaatatgtcaaatttcccatgtaatgttgatggttacattttcaaaaaaataacagaacggaaaccctcaaatcagaatggtgaaaaatcgaaaagaaggactttgtgggaggattttttagatgatctaaatactaaaaggcatgacatcgcacatgggaataatttcgataacaattcaagttatgattggataatcatatcgaaagataagtgtcgaatattacagcttgtatgtatattaatgattgccactaacgcttatgttgagccaaaaatagaaatataa

SEQ ID NO: 159648 - DNA, 1167 bp, Enterobacter cloacae
atgatgttctgtaccttgagaaaaacccaatacccttcccaaataagaaaatttaatatattatattcaacccacaacaaactggcgaaaaataaaatgtcattcaaatttgaattaagtgaattgcaaaaaaaagcaaaagaaagaactgtgaaaactcagaatattgaatatgatttagaaacattagtcaaaaaaatagatagaaaagtaataaagttagatcctgactatcaaagaaagcatcgttggggcgatgatgcatcttctaaactaattgaaagtctaatattaaacatacctattccttacgtttatatctctttagatgttgacgttgacgatgaaattgatgatgatgggcagtatcgatattcagtaattgacggccagcagagattgactgcgatttataattttttaaagaatcaatatccacttgtcgaccttgaggtgttagaaaatttaaatggtgcgtactacaaagatctacctccattcctcataagaagattagaggaaagaactttaaaatgcttaagaattgattcaactttagatcaacaagttaaatacgacatatttgagcggttaaatactggagccttaaaactagaatctcaagaacttaggaatgccatttatagaggcccatttaagaatttaataaaagaactttcaatgctccctgattttatttcaacttgtgggttaagtgagtctaaaaagaaaaaaatggaagaccaagagttgatattgcggttttttgccattaattacaatgacggatataatagatataagaaaggattcaaagaattcctaaataccacaatgcaggaatttaatcaactaggcgatgctgatttaaaaaaaatgaaagacatatttattagaaccttcacaaaaataaaagaatcaaatattaaacatcctttttcaaaatggaaaattgaagaagatggtagtttgaaactctcatcaaaattcaatgcttcggtttatgattcggtttgtcatatttttatgaaaacaaataaaaaaataaaagacgatgatttgagaaatatgtttttatcacaagattattttgatgcttgtacgggaagtgtaaatgatatatctaaaataaaaactcgcatggaaaaagctgaagaggtggcataa

SEQ ID NO: 159649 - DNA, 375 bp, Enterobacter cloacae
atgctgtatttgattgaagacagccgtcgcgccatcggtaagtatattgacgtctggcattatcctgacggtcataaggaactgcgcctgaatgatgtgctactcccctattccacctatgaccggttgtcggaagttgatcctgtcgcgattgttgataacaaaaggcttggccatgtgctggaagttgcccgtcaggtcaagcgagaatggtacaataatcgctcacaatcgataccttctggtgatgaaccttcccgaagacgtcatactccgagcataaacaaatcccagcgttcgctgaacgaagatgacctgcttgaagccatgaaaaagcttcaggggatctgtgagactatttttggtaaaaggtga

SEQ ID NO: 159650 - DNA, 1107 bp, Enterobacter cloacae
atggcagcgtcacatgagctaaaaataattgcagatgcattaagcgcataccaagaaacggatatcgaagctgttgacgaaatttttaacgtcgctgacggcttaaataaatctttctcaggttcatggttaggatatcactcgcgagtgtattatgaaaactttcaggccccgccagcgggtgccgtatttagccctgaatgggggttgatggaaatgttatatcaaggctctgttgggaattggtgcgaatatgcttacgatgatgtcataaaatacattaataaaaaatctagtaacccacctgtaaaaatttatgataaagccgcatcagaagtagcagcagagtttgatgagctaaaaagccaggcactttccattattcactctcatctccctgaatggccagaagataaatttctttctgggttattagcagagatagagaaaatagaggtgccgacacaaagtgatttcatcaatatccatagaccttcagggaagttgatgagtcgagatatgaatgctatccaaaatggtattcataccccaccacatatagccgtaatgtgtaaaattatgagtataaaggcaccctataactcatgcggtatgctttccaagctaatccttagattgtctaaacatatcaataatctagaaaagcaaaaagttgtggaggacagaatgggtgtaaatgtatttatcggtcatgggcgatctccgctttggcgagaattaaaagattatattaaagagaaattaaatctcccttatgatgaatttaatagaacgccggttgctggcatgactaatatagcccgtctttcgcaaatgctagagcaatctagatttgccttccttcttatgaccgccgaagatgagaatgcggaaggcagaatgcaagcaaggatgaatgtgatccatgaagtaggtttatttcaaggaagattaggatttgagaaggccattgttatcctagaagaaggatgtgatgaattcacaaatattcaagggctaggacagataagatttccaaaaggtaatattactgctgcatttcacgagattcgcgaagttttggaacgagaggggctggtgaaataa

SEQ ID NO: 159651 - DNA, 186 bp, Enterobacter cloacae
atgtattcagatatctatcaggatcttttcagtgagggattatacgttggcaaagatatttatgaggtagatatttttgctcactccaccgccaatgtttgcccggaaaatctcgttttcagctacaacctgctggaacagggttacgtccgcaccggactgctgagcgaagttttgttctgttag

SEQ ID NO: 159652 - DNA, 297 bp, Enterobacter cloacae
atgtttcacttgttacatacaatattgaccgaagaaaatagtggggttcttatcagatacgaaatttatgccaaaaaacaaaatattggcatctacggaaacatctcgaaggaaacttgtcgtgtgatttattcaaaatttgatgaaaaaatccaagtttttaaaattatagattcagatgtcaatcttcactttttatttgagaggtgtaagcctcattctgattcctggttttacgatggtcctgataaagtcaatatccaaatgatcattaactaccttacaaataatcagtga

SEQ ID NO: 159653 - DNA, 363 bp, Enterobacter cloacae
atgagcagaagaaaagcattcgccgggctggtactggtcactggagcggttttttcttttcctgccgcggcggcggaacataacaaacttcgtttacctgcaaagggcgtcgtctgcgatgcgtatttttgtgccgatgcaacggggatatctgactcgctgaccgcgaaatacctgggggcgaaaaaaggtcagcggctggtcgcgcagggcgcgtttgaccgcacggcgtttacgtttgccagtggcgtttactgcgatacgaaagaaaaggtgtgccgtaaggaccgctactttggtgctgacggtacaccgtccggtaagactgaccgcaaaacgacccgttggctgttcccccagtga

SEQ ID NO: 159654 - DNA, 834 bp, Enterobacter cloacae
atgaaccatgcacttcccccagtggtggaaagccactccccacaactggcatattccggcccagcccggcatcgtaccgtgctgagcgtacgtaacctgagcaaatcctggcgcgggcaagcccctgtcctgaacaaccttagcgttgagttttatgctggagaactgaccggcgtcattggccgatccggagcaggtaaatcgaccctgtttcatattctgaacggaacccttcctgccagtggaggagaaatcgtcagctatccggagcatgggaagccgcttgagatcacccaattaactggccgtgcacttaaggcctggcgaaatcggtgcggaatgatattccaggattactgcatcgtcccgcgtctcgatgtcctgacaaatgtcttacttggccgcctgagccacacctccacgttcaaatcgttgtttaagctgttcactaaagctgacaggatgcgcgccatttctctgctggagtggatgaacatactgccgctggcgttacagcgcgcggaaaacctttccggtgggcaaatgcagcgcgtagccgtttgtcgtgtgctgatgcaaaacccggagatcatactggccgacgaacccgtagcttcacttgatcctgccaatactcgcctcattatggatgcgcttgccgacatagccgaacaagggatctgtgtcgtggcaaacctccattctattgatattgttaataaatattgcaaaagggttattggcatagcgggcggacatgttatttacgacggcccgccagaaaaactggatcaggacgttctgcatcgactgtacaacgaagaaataagctaa

SEQ ID NO: 159655 - DNA, 939 bp, Enterobacter cloacae
atgacaccgcacttttttactcgcgtattttttacccccattctgggcataaccctggtatggcaggccactgccgctacgcaaccggcagttttaaatctcgggattttaggcgggcagaactcgacacaacaaattggtgataaccagtgcgttaaacaatttctggataatgaactgaaggtgaatactcgcttacgcaacgcgtcagactatacgggtatcactcagggtctgcttggaggcaaggtcgatgtggtgctgaatatgtccccggccgcttatgcgtcggtatatatccgtgatcccgacgctgttgatgtcattggcattactgctgatgataaaaccggggctcacagttatcattctgttgtggtggttaaagccgacagcccgtaccagtctctgcacgacctgaaaggtaaaccctttgcttttgccgatcccgattccacttccgggtatttgatccccgactacgtattcaggaataaattgggcggcaatgtggataatcagtataaccacttcttctccagcattaccttctccggcgggcatgagcaggatatccttggtgtgctgaacgggcagttcgctggcgcggtcacctacagctcaatgaccggcgaccacaacagtggttatagcgcaagcgccttccgcgcgctaatgcgtatgggctacccggacctgatgaaacagataaggataatctggcaatctccacccattccaggcggaccaatactcgtcagcaacgccctgccaccagagtttaaagccagagtgattagcgctattaaaaagcttgataccgaccagcatgcctgctttatcaacgcggtcggtggaccattacatatcagccagggaagtgttgccgactttcagttcatcatcaatatgaaacgcgaactgctgagcgcacgttaa

SEQ ID NO: 159656 - DNA, 1737 bp, Enterobacter cloacae
atgaacaccgaatttgaacgttactatcggcaggttcgccttcggcaaaggcgcgatacgctgggcgcgtctgctctgctgctggctgtctacttttccgcaggctacgttgccgaatttaatctcctcacactctggcatgcccttcctgatttagcgagttacatgtctgacactcttccggcacttcacctggcggacctgtttgaagatcctcacgtgaagggatctctcgcctggtggggatatcgcctgccagtacagttaccactcatccaggaaacactccagatggcactggcctcaaccattatggctgttgtcatcgccatgcctcttgcgttccttgcggccagcaacggaggtgctgtctggccactgcgccttgccatacgtacgctggtagcgttcctgagaaccctgccggacctggcgtgggcaatgatatttgtcatggcattgggtattggtccactggctgggacgcttgcgttgatgttgcacagtacgggtagcctgaccaaactgttctatgaagcggtagaaagtgctcaggacaggccggtacgcggtttaatggcctgtggtgcgtcagcactgcagcggatacgtttcgccctgtggccgcagatgaagccgatttttatctcctacacgctgatatgtctggaaatcaactttcgctcctcaaccattcttggactcgtgggggctggaggcataggtcaggagctgatgactaacatcagactcgaccgttacgatcaggtcagcataacgctgctgctgattattattgtggtgtccctgctggacagcctgtccgggcagctacgcaaaagaatattgtacggaaatcaaatgtcacctgcgcctggtcggatcgattacaaggtactgatccgggttcagcggcgctatttgtgccgtgtgtgggggctggtactggcggggttattgtacttctactggtttttctcacggtacggcatcagccccggccagttcagtgcaggcatcgggcaaatcggtttttatttgcacaggatatttatctggcaggatttcactggctggcctttaggttattaccttacgcaaatcttaatcacagtggccattgtattctccggaactctgaccgctacggctattgcacttccactctcactccttgcggcacgcaatatcatgcgggggcggcggtccggaatcgttgctctgctgatacgtcgcctgttcgatatactgcgcggaacagacatggctatctgggggttgatttttgttcgtgccgtgggtcttgggccgctggcgggagtgctggccattataatgcaggatacagggctgctggggcgtttgtatgctgaaggtcatgaggccgtggatcccgcgtccggaaaggggcttcatgctgtgggtgccagtaacctgcaaaaccatcgcttcgctatctttacgcaatcttttccggcacttctggctttgagcctgttccagattgaatccaatattcgctcatccgccgttctgggttttgttggcgcaggaggcattggtctggtctatgctgaaaatatacggctgtggcactgggacgtggtgatgtttatcaccctgctgatggtcatggtagtcatggcaatggacaccctctcagtctggctgcgtcgccgctatattgtcggtaatacagtgccgttgtttaaaaatgccggcggaacaaatgagtaa

SEQ ID NO: 159657 - DNA, 825 bp, Enterobacter cloacae
atgaccctttcaaataatccatggttctgtgccgacatcatctgtgccgctaagccagatttcacgcctcgcgttgcgtttattctcggatctggcctcggcgcactcgctgaccagattgatgacgccatcgctatctcttatgaaaagctgccgggctttccggtgagcaccgtcgacggacatgcgggtgaactggtattaggtcatcttgccggtgtccccgtcgcctgtatgaaaggacgtggtcacttctatgaagggcggggcatgacggtgatgaccgatgcaatccgtacgtttaaattgcttggttgcgagctcctgttttgcactaacgcggcggggtcactacgccccggggttgagccaggaagcctggtcgccctgagtgaccatatcaatatcatgccaggttcgccaatggtggggctgaatgatgcgcgctttggcgagcgtttcttctccatggccaatgcttacgatgcagagtaccgcgctgttctgcaaacggtggcagcggaagagggtttcccgttacatgaaggggtgtttgtctcctgccctggccctaattttgagactgcggctgagatccgcatgatgcaaatcatcggtggcgatgttgtggggatgtccgtggtgccggaagtgatcacggcgcgtcactgcgatcttaaagtggtcgcggtttcagccatcaccaatctggccgaaggcctgggcgaggtaaaactctcacacgcgcagacgctggcggtcgccgggctctctcggcagaatttcatcaaccttatccgcggttttctgcgccatattgcctga

SEQ ID NO: 159658 - DNA, 210 bp, Enterobacter cloacae
atgagcggtaataaaacacagcccgacaatcacttttctctctggacggtgaaggacttaacctttcttgaaaataactaccgcacaatggcagtggcagagcttgctaccattctaaaacgtagccagggtgcggtgggactgatggctaaccttatccccgaggaggcaaaaaacatgctgacacttgaagcctacgccgggggctaa

SEQ ID NO: 159659 - DNA, 303 bp, Enterobacter cloacae
atgattcgccatattttatttattacttttactgatagtgcactaccggaacaaatactggctgtcagaaccgcatttctgcagatccccgatcggattgaaggcgttacaaacgtggaatggggcatcaatgacagctccgaagagaagaatgcggggtttactcactgtgtgctgatgacattcgcggatgaaatagctcgccagcgctatctgccgcatcctgcgcatgtggatctgaaagcgatatttcgaccgattctgcaggacatcatcgtactggattataccctgactctctga

SEQ ID NO: 159660 - DNA, 360 bp, Enterobacter cloacae
atggcgacaattattcttatggaaaataaaaaaacaggtgaggctgtaaagggattttacggtttttcatggacgacgttgttctttggtgcttttccctcactattccgtaaagactttatgacatttttgggtgtcataattatcactattgttgtggggtgtctcacgtttggtattggtggttttattatttctatcgcgtgggcgtttatgtataacaagtattatacaaccagccttattaagaaaggctttgcatttgctggtatgcatactgaaaacgaaattgctgccggtcgcttgaagttaaaactgaatgcagataactgcctaaccgttccacagaagactgagtga

SEQ ID NO: 159661 - DNA, 621 bp, Enterobacter cloacae
ttgcaggcctttattaaaacccaacccgtgcagctatatcagaaaggatgttgtctgtatggtgcggataaagcgttcagcggatttttcgtgataacgtcaggggccgtcaaactataccggctgaccgaagagggcgatgagctggtgacagggttctgcctcccgggggaatggtgcgggctgccggatgcctcgtcgggaagatataccggatatgcgaagacacttgataccagcgcagcacgccgtctgcccccgttattgctggaaacggtgctggcagggaagagcagcagacgggagatatacacactgttgagtgatgtcatcagacaaaataaaacacggtattatcagataactaaagcacatgcgggtgttcgttttgccatgtttattcagaatttgtctcttcgttacagtcagcggggatattcgtcacgtgagttttgcctgccaatgacgcgtggtgatatagcaaattatctggggctgacaccggaaaccatcagcagggagatagcaaagctcgggcagcttaatattctccacttacggaaccatttaattactattactcatctaggagcactgaatgcacttgttatgaataaataa

SEQ ID NO: 159662 - DNA, 285 bp, Enterobacter cloacae
atgtcagacaagattcatgatggggtggcagaaaagctggaacaggcgagcttatggcgcagggccgcagcacgctggctggatgtcatgatgatgtgtaaaacggacaaggagcgggacgaagtccgtcgcagacgtaaccagtgcatatctaacgtttctctccccgttcctgaggggaaactgaatattcatgccattagccgtgctgccagccgcacgcaggaaagaatggggctcagtcagccagacggggctgcatttcgtacacattcaaaatcctga

SEQ ID NO: 159663 - DNA, 828 bp, Enterobacter cloacae
atgaaaatgaaaccggactcatcattggcgggggcaacagaaaaaaccgcaacgcggcgtaatcactacgtgcactggacggtggcagaaattgcctttgttgagaaatactacggcaagctcccggcacgggagatagccgcaactctgggaagaggaattgctgcggtcaggtcaatggcattgaaggttggtgttggtcgagcgggagctaaaccatggtctgagtgggaagttggtgtagtgaaaaaatattactctcatggggcaggtatcgccatggtgagggcgttgctgccacaccgtgataaggagtctgtcaggaaacaagcggcaaaggcggggctcaccgatgtacgggaatggcaatctgacgccatcgcatttcttagagagcattatgggcatatgcctgttgatgaagttgctgcatgccttaacaaaagtgtcagtgcggtcaggaaccgggcaaatgtattgaaactcgggaaagtgcggcagataagatggacccgggaggaaaacacaatattgacagagaattatgctcagtcaggcaatctcgcggctattcatgtgttactgccccaccgttccagaaaagccattgaaacgcagacggtcaaattagggttaaggcgagcagtgatgtggacgcctgaggaaatcagtattcttaagcaattttacccaatacttgggcgaaaggtctccgtgatggtaccaggcaggaaggccagtgcgatccaccataaggcggagaaactgggattacgacgatacgctaaaaaggagcctggcaaaccagagcaggacgacgcgagctga

SEQ ID NO: 159664 - DNA, 363 bp, Enterobacter cloacae
atgagcagaagaaaagcattcgccgggctggtactggtcactggagcggttttttcttttcctgccgcggcggcggaacataacaaacttcgtttacctgcaaagggcgtcgtctgcgatgcgtatttttgtgccgatgcgacggggatatctgactcgctgaccgcgaaatacctgggggcgaaaaaaggtcagcggctggtcgcgcagggcgcgtttgaccgcacggcgtttacgtttgccagtggcgtttactgcgatacgaaagaaaaggtgtgccgtaaggaccgctactttggtgctgacggtacaccgtccggtaagactgaccgcaaaacgacccgttggctgttcccccagtga

SEQ ID NO: 159665 - DNA, 267 bp, Enterobacter cloacae
atgacatttatacacagccgcatgcatctgacagcagatagtattgtttctgttcacagcacccatgaaagcaatattttattgcttgatgatgaaaattacagcgcttatcgctgcagggaccagtttatttaccatgggggtttttacaggaatttcccggctaaaatttcaataccatacacaggaaactggaatatcattttagcattaccatcagagcacattacaaaaatacgccactcaattaacattatccctgcatga

SEQ ID NO: 159666 - DNA, 180 bp, Enterobacter cloacae
atgaaagtctcagttgaagattttgatgaagtgatttggtttagagatgctatagcaggggaaggtatgacttcagagaagtataaaaaggacggaactcaggataggattgttgccgcccttgaagaggcattgcatcaagctaaagcagaattatcatgcagggataatgttaattga

SEQ ID NO: 159667 - DNA, 651 bp, Enterobacter cloacae
atgtttgatttattaaaagctttaagtctgggactcattgttctacttcccctcgcaaatccacttactactgtcgcattatttcttgctctcactggcgggatgaccattaccaccagaaatcgaatagcgttactcacatcattaaacgtatttatcatcatgatgataacattttatgccggacagcttgtgatgaatactttcggcatttccattccagggctgcgtattgcaggtgggttgatcgttgcatttataggttttcgaatgctcttcccgccatcctctcgttcagatgtatcaggaacggtgccagtcaatacaggcatcgccttcgttccactggcaatgccctcaactgcgggcccgggtacgattgcgatgataatcagtactgcttcaacttcagccgccagacatggttctgaatatgccccgtggatcatcatcgtggcccctcctctaatttttctctcagtaagcctgctcctgtggtgcagccttcgaagttccgggaccataatgcgacttgttggcactggggggatcgatgcgatttcaaggctgatgggatttctgcttgtttgtaccggcgttcagttcattatcaatggaacacttgaactgatatcacttaatcatggctaa

SEQ ID NO: 159668 - DNA, 1563 bp, Enterobacter cloacae
atggtaaaacgcatacaccaccttgttatggtaatgtttgctggtatgctttgtgcccagagtacttttgctaaaagcgtcattaatactgaacgggtttctcatggatataattcgtctattcctcaggatattctgacacctgataccgttcagacccggatcggaacgttaagttttgtcgatggtgttcctactgaagacacagcaaaatttgtgttcgataatcttgattttcttcggggtattgaagttttcctgaatatgatgcctgcagccagtgttgaggccatccgccggggcagtgtttctcttggagccataaaaagcaaccaggcaacgatctatgatcatcttgctgactccaacccgcttttgcttactgcaaatactgatactgtttacgcattctccatacttgatttggaaactgatggtccaacggtcgttgaagttccaccggggagtggacctggtacggtgaatgatgcattcttccgttttgtcgtcgacatgggaattccagggccggacagaggcaaaggaggaaaatatctgattgtaccgcctgactacaatggggaattaccaaaagatgtgaaagatggtggagattaccatattgctcgttcaccatcatatataaatattgtggtgttacggggattcctggtggatggcaaacctgatgttgcatcaaagatgtttcgtgatggctttaaagtatattctctcagtaaaactgataaccctcctgagatggaatttatcaacgcctcggggcagacatacaacacgatacatgcgaataatttcatgttcttcaaagaacttaatgatgtcattcaaaaggaacctattaattttatcgatcctgaacttcgaggtcttatagcctctattggtatacgtaagggtaagccgtttgagcccgatgaacgaatgacaaaaattctggctgatgcagtcgcaacaggtaatgctactgcccgggccatcagcttccggaatcgtgaccctcgctctatgatgtacccgcacagtcagtggagaaccagttttattggggatgattatcgatggttgggtggcgatggtgcatcagggcgcgatttggatgctcgcacaagttttttctacattgctacagttaatacccctgcaatggcagcaaaatcggtaggctctggttcgcagtatgcgatatcaagtgctgacgttagcggtaaaccttttgatggagcgaaaagctataaactgaatattccaggcaatgttcctgctaaggatttttggtccgtggtgatttatgatcctcagacgcgctctgaattacaaactgcacagcattttcccagcaaaaataacaaacgtgataaattgataattaatgtcgacgggtctgtggatttatattttgggcctactcctcctgtaggtaaagaggctaactggatgcaaacagtgccaggaaaaggctggtttacgatcttccgattatatggtccccttgagtcctggtttgataagtcctggaagccaggagaaatagaggaaatgtag

SEQ ID NO: 159669 - DNA, 195 bp, Enterobacter cloacae
atgattcggcatatattatttataaagttcaaattagaggccggaattagagaggttgaacatgtcagagtactgtttctcaggattaaaaacaaagttgaaggcattttaaacgtcgagtggggtgagaatgatagtccagagatgaaaaattctggctacacaacactgcgtgttgatgacttttgccgatga

SEQ ID NO: 159670 - DNA, 570 bp, Enterobacter cloacae
atgaagcagcgattatatcttacgcgtcatgaagtggctatattagcaaaagcagcatttggtggtaaaaatggagtgcgggattactgcatgttgttgctttgctatttacacggtttcagaaccagtgaattaaccgggttgaaattatcggatctcgatttatcaggcgggcgactgtcaatcagtcggctgaaaaatggatttagtacggtgcatcctttgcatactcaggcaagaaaggcactgagcacatggctatatacgcgacagcaacttattaatgatagcgatattccctggctatttatctcaaggaaagggggccgtctgtcgaggcagcgtttttatatgatttgcaaagagcatggtcgcctggctggactcccttttaatgttcatcctcacatgttgcgtcatgcttgcggttatgaactggcagagcagggcatggatacccgcttgattcaggattatctggggcaccgcaatatcagacatacggtacactatactgctggtaatgcggcccgtttttctcgggtatggcaggacaaagatgtatgctga

SEQ ID NO: 159671 - DNA, 687 bp, Enterobacter cloacae
atggaaatgactagagaaaaggcagagtacttgatctgtcagagaggctggctctcacttatgccggaagatttcagggtcagattgctggaaaatgctcttcttctgaaatttgaaacaggacaatttatctttcgtaccggagcccctgccggtgggatctacggccttgtcaatggtactgtcatcattaacactgctccgctcgatgagatccctcgactgattcacatcgcgctacccggagggtggactggtgaagacagttttctgaccggtagttgtcgcaggatagaagttctcgctcagagcgaaacatggatactgcatgttcccattaaagcaatggagcaaatggttgcagcgcatccaaatgatattcgcgctttcggaatgatctctatgcaacaggctgattcactcctgcgcattgtgcataacctgcagaaaagagacgtgagttcacgaatagcatccgcgctccatagaatgtcctggtcaacggatgcccccgtcacagtttcccaggaaaatctgagcattatcaccaatacatctcgtaaacaggtgaacactgttattaaaaaatttgtagaagagggttgggtggaatccagctatcgttcaataacagttaaagatcctgcggctttacttgcatatgccgaaaaggatctcagggactag

SEQ ID NO: 159672 - DNA, 192 bp, Enterobacter cloacae
atgcctggttattgtgctgtacacagtaattttataaatttttttttcaataactggcagtgttctatacttgccagagtaacgcctgttctgcattccttctcttccgtattacactatatgcccctcgccagaaagttttaccccatggtcctggcaatagattattcagttgattttattcttttgtga

SEQ ID NO: 159673 - DNA, 681 bp, Enterobacter cloacae
atgttacgtaaacatgcggaatcaatcgtaagtcaaagagggtggttaagccgcacatccgatgatttcagggaccggctgcttgaaaatgccaggctgcttaaatatgaacctgggcaagttatctttacgaagggtgatcccgcaggagggatttatggtcttgtcagcggcactctcgggatcatcgcggcaccaccttattccataccccgtctgatagatattgctgtcgcaggtgactggacaggcgaagactgtttcatctcgggaaaaccgagaagatctggacttattgcccagaatgaaacatgggttttacatgtttctcttgaaagcatggagcaaatggcctctcgggatgcaaataatatgcgtgcttttggcgcaatgtctattcttgctgctgattctatgctcaggctggtacatgatttgcagaaaaaaaatgccagcgccagaattgcctcagctctgcatcgtatttgttgggcagcccgtacaccagtaacactttcacaggaaagcctgggcacgataactactacatcaagaaagcaggtcaatgcaattattaaacgcttcgttgatgatggctggattgaaacaggttatcgctcaatcacggttattaaccccggagcactaaaggcccacgctgacgaggatctggcagaatga

SEQ ID NO: 159674 - DNA, 702 bp, Enterobacter cloacae
atgatattaatgtctcagggtttacgtcagagggcaaaaaagatcatctgccagagaggctggttgtcccggatgtcttctgaattccgctgcagattattacaggatgctgaatttttaaggttcagagcggggaaaacactcttccatcccggcgacccagttgggggaatttatggactggttagtggtgtcgttactgtcaaaacgtcaccttcgggcctgcctccacgcctgatacatatcgcagtacctggtggatggaccggtgaagatagctttctgacaggagaacccaggcgtatagaattgaccgcttacagtgagatccaggttatacatgtcccgttaccagtgatggaagatattgtaagcgctgaccctcaggcatttcgtgctttttctaccatttcggttatgtcagcagattcactgatcaggatcgtgcacgatcttcagaaaaaagatgtcagctcgcgtattgcctcggcactccacaggatggcctggtcaaccgatacgcccatcacggtgtctcaggataatctcagcatcataactaacacatcacgtaagcaagtgaatgtcactattcagcgttttatcgagaatggctgggttgaaatccgttatcgggctattactgtcaaaaaccccgaagcattattgcaatttgctgagcaaaaaatacgtttcgggtag

SEQ ID NO: 159675 - DNA, 1134 bp, Enterobacter cloacae
atgcaggtccgccaatccgtagcccttgcccttttgcttgcaccattcggtgtcatggcgcaggtagtagtacccctctggacgaccatcgagccgggtggcgaaacctcctgtgctacaggaacaccttatgtatttcatgtgaagccgggagaaggtgctgacgccgcgaagcttatgatttatttcagtggtggcggtgcctgttggacgggcaaacaatgcgaccccgatacgggggagggtatttatgttcctttcgcacgtcttcaggcacacgaccccggcggctggcggagtaccttcaatggtcgccttggactctctgatcaggttgataccaacaacccgcgcagctcaaagggaatcttcgatctcggtaacccgaaaaatcctgtcgctaaatggactcaggtctatgccgcctattgtacgggtgacgtacaccttggtaatcgcgatgtgacctacgagacggagaatggccggaaaatggtgatacaccaccggggccgtgcaaatgtggagtcggtactcaattgggtctatgagaatgtgaaaaaacccaatcgtatcgtcgtcgccgggtcgagcgcaggtgccattgccgcgccgttatatgcggcggaagtcgcggatcattatccggatgttcagattaccgctgtcgcggacggtgcaggtggctaccgctccccgaagattgcagttctattacagaattggggtttctgggatgaagcacccgactggactggggggattgatcgcaacaaagcgatgttcaaagatctcggtccggcggcggtggggcacgtgccacgtctgcgaattgtcgaactcgacactgcctatgacatcgcacaggaaaggttccagaaggccttcggaacgccttccagcctctatccgctgttgttgcagaaccgcgcagaacacgccaaagcgatccctggtttcgcaggctatacaaaccggggtaaggcccacacactgcttatgttcgaccgtttctatacctatgaagaggaaggtgtccgtgctgtggactggttccgcgacgtgacggaaggccgcgaggtccagagcgtcacttgtggagaaccggagtcctgcaagaaggaacctgaatag

SEQ ID NO: 159676 - DNA, 213 bp, Enterobacter cloacae
atgtttggaacagaaaacacgaccttattagaaatcgctttatatcttcgtttatgtagggcgaaaatacagagtgtgcagttgacttttacagtgaataatgcccccctgaacctgaaggaaaggcgcagtaagtctctttacatcagaaaacacaatcaccccaccgctactggcatccccttgcagcacagaagtaattatcaaacctga

SEQ ID NO: 159677 - DNA, 273 bp, Enterobacter cloacae
atggtcagtgatgaaatcgcagaacgcctggaaagagaagggctctggaaacgggtggcaacgcgctggctggacgtgatgcttctttgtgaaaacagtgcagaacgggagtggctcagccagcgacgctgttactgttacgcgaagagtgttcatcctgctcagtcagagaaactgggcatcagtggtatcagtcgggcggctacccggacgcaggagcgcatgggcatcagcctgcccggtggcgctgcgttccggcgaaagcaacgataa

SEQ ID NO: 159678 - DNA, 1146 bp, Enterobacter cloacae
atgaaaataacagcaatggcactgattattccggcgttactcgccgcaggcgcagcacaggctgcagaaatttataacaaggacggcaacaagctggatttgtacggtaaggtcgatggtttgcactatttttccagtgacggaggtcaggacggagaccagtcctacgtgcgcatgggcttcaagggtgaaacccagattaacgacctgatgactgggtacggtcagtgggaatataacttcaatgccaacagcacggaagatgagggcagccagtcctatacgcgactggcattcgccggtgtgaagctgggggaatacggctcctttgattacggccgtaactacggcgttctgtatgatgtggaaggctggaccgacatgctgccggagttcggtggggacagttacaccagtgcagacaactacatgaccggacgcgcaaccggcgtggccacgtaccgtgataacgatttcttcggcctggtggaggggctgaatgtggcgctgcagtatcagggtaaaaatgaaaacccgggcagaggagaaggcaccaataacggcgctgaccgcaatatccgtaatgccaacggcgatggtgtcggggtgtcaaccacctacgatatcgggatggggttcagtgccggtgctgcatatacctcctctgaccgaaccacggaacagaagcatgccgggaaaggtcattcccagttcgcaggcggtgagcgggcggacgcatggaccaccggggtcaaatatgatgcgaataacctgtacattgccgcaatgtatgcagatacccgcaacatgacaccgtatggttcgaatgacagccgcgatggtgggggtattgccaacaaaacccagaacattgagctgacggcacagtatcagttcgacttcggcctgcgtccggcgatttcgtaccttcagtccaaaggtaaggacctcagtcttattggaggaggttcagacaaggacctggtgaagtatgccgatattggcgcgacatattacttcaacaaaaatatgtccacctacgtagattataaaatcaacctgctggacggggacgacagcttctataaacacaacggcatcagcaccgatgatgtggtggcgatggggctggtttaccagttttga

SEQ ID NO: 159679 - DNA, 279 bp, Enterobacter cloacae
atgctgacgtataaaaatgtcttcctggatgtgcagcccgttgatatgcgacgcgggatcggcgcactgatgaagcattttcaggacgaactgaaatcatcgtcacacgaaggcgctgccttcatcttcaccgacaaggcacactcgcgtatcaaggttttacggtgggacaagcatggcgtctggctgtgcgttcgcgtccgcacaaaggacacttcctctggcctcgtgctagcgacaaagcctggtctcacactcaggataagttcagttggctga

SEQ ID NO: 159680 - DNA, 483 bp, Enterobacter cloacae
atgggtcttccgcgaaaagagtggttacgctgccgcctcgatatgatcacaatcagtatcatcatgaaaaaacgtaaatatctgtaccggcgtataatacccggtatggatatcgtgcttctcaacaccacaaatgacatcaaacagcttcgcgctatatcccttgccatggtgcagaaagcggtggatgagaatcataaccttcagttgcagaaaaacgccaagctgacatcaaaagatcaacgcatccgcctactggaagaggcgctgatactgccgcgccagcaacgcttcgggcgtaaaattgaaatgcagtccggcctgcagcgccagctcttcgaagaagatacagaagttgatatcgctggcgcagaaacgcaaatgaatgcgttgcagcagcaggacataaaggtaaacgcagaaaaatcgtctgccctctatgtcagggtagttgtcgcccctatttttcatcagagggcatga

SEQ ID NO: 159681 - DNA, 168 bp, Enterobacter cloacae
atggccaacaaacctattgatcctgaattgaaagagcgagccatcatgcatctttcagcagtgacaaaagtggtacacggtccagtcggcgatgacctccgccaccgtgcgcacctccacatccgggcacagcagcggactgccctgttgcagggcgtgcagctgtag

SEQ ID NO: 159682 - DNA, 342 bp, Enterobacter cloacae
atgacgcgtaggggggaagtacgtttctgcttccagcgcttccgctatgccgaacatcgcggcgtgcatatctcagacgaagccgtttactcggccgacatgctttcccgccgctatatcacgtgtcgtcagttgcctgacaaggctatagacctgctggacactgcggcggcccgtgtgagcatgagtctcaacacggtaccggacgccttcagccggcttgcggcacaggaaaacgcgctggtactggaagaagccgcgttgctggaggaccaggccgtgcccgatgaccgactgacagagattgcacagcaaacccgtcagctcaccaccgaacagtag

SEQ ID NO: 159683 - DNA, 1014 bp, Enterobacter cloacae
atgactcaatctactccgttcgtttgggaaccatcgcaagatcagatttattctcaggaccttggttcacaaaccctcaccgatggctcgtttgacaaagctgaggggaaagaatttacaatgggggctgctggttgcgaacttgtgatgaatgtcacggataaacatacccaggaatcaatatggtggttcgataattctaagcttaacgttgaggctggaacattcacatacgatttttcttattttatctcatctccattacaggcacccttattaatgcttcgaggaattaatgcaggcgttaaagatgatgttcaatcttgctttaaaattaaaaacccgagatttgttaatattttgggtgatattgaaataaaaagcaatggaatactctcagttgactcaatcagtgaggaattttacatctcatctgcagcatcaaaagtaaatttaagtgaaaatgcacaattgcttatcagcagagttcctagcaaataccctacagttggaattaatggggatgtttcacttgatggcaaatcgcaggcagtattcaatcttttctcactggaaaatgaggaaaacacaagttatacagtgaaaggtaattcgacgattagcatttattccgctgagattaatagtttaaacctcttggattttgtaataagctcaggaaatcctaaaatttcaataggtgaccctcaaggtatcttatgtgacattacatcctttggagaagtcgttacgataaatcccggagagcctggtgaatatagacgtgcaaaggggcgtttcaactttattgaagaggggaagggggatttttttggggaaattcatttgcattgtcggtactttaatggtgaagaattcgaaaccgacccaacaaatataaagtactggctctcttcgcatatgatgctttgcctcaatggaacccccctgagcgctaataaatttgatattactataaacaggaatgacgatttagtaataaagcttaaataa

SEQ ID NO: 159684 - DNA, 327 bp, Enterobacter cloacae
atgactaaaaatactcgtttttcccccgaggttcgtcagcgggccgtccgtatggttatcgaaggccaggacggttacgaatcacagtgggctgccatcagctccatcgcccctaaaataggctgtacgcctgagaccctgcgtatctggctgcgtcagtatgaacgtgatgccggaggcggtgatggtggcctcaccaccgctgaacgccagcgccttaaagaactggagcgggaagttcgtgagctacgccgcagcaacgatatcctgcgccaggcctccgcttattttgcgaaggcggagttcgaccgcctctggaaaaaatag

SEQ ID NO: 159685 - DNA, 300 bp, Enterobacter cloacae
atgccgctgctaccgggagtggaaaaaacgcgtcgtctctctatgcgccaggagcaccgcgccggcgaaaaactctttatcgacttctgcggcccgacgatcctcgtcgtcaacccgaataccggagaaatacgccgggtagccatcttcgtggccgtgatgggtgcatccaactatacgtatgtcgacgcgtgtgaaggcctggatatgatgtccaggctgaacgccaacagccgctgcctgaccttcctcggggggcaccaaagttgcttatccccgataacctcaaaagcgcggtga

SEQ ID NO: 159686 - DNA, 399 bp, Enterobacter cloacae
atgcgcagctatacgttgatggctaaaatgtatgctctcggcatactgagttcttactctcgtccccgggtcagcaatgataatccgtattcagagtcattgttccggactctcaaatattgtccctggtggccagagaatggcttccgcacaatagatgacgcacgaacatgggtaagccgttttgcaaactggtacaacgttgaacataagcatagtgggatcaaatatgtcacgccagatgaacgccatcagggtcttgatgtagaaatactggctgcccgaaagtcggtttacaggttggcccaccaacaacatccagaacgctggagtcaacagctacgcaactgggactatatttcggaagtctaccttaacccggacaaagaggcagcatga

SEQ ID NO: 159687 - DNA, 513 bp, Enterobacter cloacae
atgcctgcgcatgcagtaccgattgatgtgaaagaaaagggagtgatgtggcttttgcctccttatagctggtctctcagacaagtagcccgtaagctggatctcagcccttcagtggttgcaagatggagacttgaactggtgcaaaaaggtttactacccgaaaatgaaaagatttcctccattgatggtaatgaatggactccggagcgtcgattttctgttgtgcttgaaaccgctacattatctgaaatggaactggccgattattgccgtcgtatgggcttatttgtcgagcaggttaaagaatggcgaatgatctctattaaagcccatgaaatgaaaatgacggaaaatcttcgtgccgacaaagtgttgcgcgaaaccagaagcagattacgcgaactcgaaaaagaacttttacgcaaggataaagcactggcagaagcagctgcgctactgatgctacgggaaaagttcaatgccctctgggacaacagcgaggaagactga

SEQ ID NO: 159688 - DNA, 6057 bp, Enterobacter cloacae
atgaaaaattattcctccgcatggtggagagcactggtctggttaaatattgttgtgcaaatatgcttccctgcaacaatgacctttatgcccgtaattgtgagtgccgggactgagacgcatcccgggaataagtacagtgcggacagaactcaggtttatacactccggacaggtgaaaccaccgccaccgtggcaaaaaaatatggaatgagtttgccggaattaaaaaaactgaatcagttccgtatattttcgacggggtttgaaaatcttcagccaggtgatgacatcgatgttccactgtctgtcacctctgaggataataaacagcatgacaaggacgatcagcaggcgcagcaactggccgggtatgccacgcagaccgggagtttccttgccagtggcgtgaacggtgacgcggctgccgccatggcccggggaatggccacgggggcgaccagtgccggggttcagcaatggctcagccatttcggaactgcccgtgttcagctggatatggacgagaatttctcgctgaaaaattcgcagtttgacctgctggcaccgctgtgggagcagcaggacatgcttgcctttacccagggcagtctccaccgcaccgatgaccgtacccagtccagtcttggctttggttttcgctggttcagtgacagctggatgctgggcagtaacacgttcgtggattatgacctgtcacgtgaccatgcgcgggcaggcatgggaatggagtactggcgtgattatctgaaaatgggggccaacagttacctgcgtctgactaactggaaaaattcccccgacctgaatggctatgaggagcgcccggccgacggctgggatcttcgcactcaggcctggctgccagccctgccgcaactgggcggaaagctgacgtacgaacagtattacggtaatgaagtggccttgtttggcaaggacaggcgtcagcgggatccgcacgccttcaccttcgggctggactatacaccggtaccactggtcacgctgaacgcagaacagcgtcagggcaaggccggagagaacgacacccgttttggcctggcgctgcgttatcagccggggaccccctggaggcagcaggttgatccggatgcggtggctgtcatgcgcagcctggcgggcagccgtcacgatcttgttgagcgtaacaacaacatcatacttgagtatcgccggaaggatgacatccgcctgcgtacggtgtcgctggtgaccggctacgccggggagaaaaagtcactgggtgtatccgttaccagccataacgggctggagcgcatcgactggtcggcaccggccttgctggctgcaggggggaaaatagtacaggacgatccgcagaactacagtgtcgtacttcccgcgtatcagtttgagcaggggattaacaactataccgttaccggtgttgctgtggacagcaagggacaccgttcgaataccagtgagacgcagattagtgtccatgccccgaccgtcagccagacgagcagtacgtttatgccactcaacagtgcacttgtggccgacggacacagcagtcagctcctgacgttaacgctaagaagcggtcagggggagatactggatgcaccggttgcagaaatcagtatcagacctgacaggctaaaatcagccactgtatcagaggtgaataaaaaagaaccgggtgtttatgaggtgacggtgactgctggtacggatgaagaaaccctcctgctgacaccggaagtctttggcacggccctgaatgcagcaaggatcactatcagcaggatagggctgagtgatacccgttcgacaatcacgaaagacaaggattctgttatagccaacgacagcgccacggtggcactgaagttcacggcgaaggacatgaatgatactccggtgacggggctggccacgcaggtgaccttccgtgtgctggacagtaacaataacgcggttaccggtcctgcggtcacgacaggtgttacgtcagaagacaagcccggggtttacatggcgagcctgaagggtacaaaagcgggacattataccgtgataccgctgtataacgaccagcctgtaggcgcgctcagtaccggtgtggatttaacgcccggcccggtggacggtgagaactcgcactttgaactgccggatggcgggacagtggaggcggatgggttgtccacgctgacactgcgttttacggcgctggatatctacggtaatccggtgacgggtcaggaacaaaaagtgacattcagtgttcaggagaagaccggttcgaataccggactgcacatggctgccggcagtccggtgacggtaggggccacgacagaacaggggaatggcgtgtatacggcaaagcttagcggcaccagggcggggatatggacggtgacgccggtatatgatggtcaggtgctggcgacgctcgggcaggacgtgacgctgagtgccggcgaggtggatgaggggcagtcggactttatcctgccaggcgccacgaccgctcaggcagacggaacatctccggtagcactgaagttcacggcgaaggacatgaacggcaatccggtggcgggccaggcagcgaaggtgtcgttcagggtgctgaacggaaatacgccagttattgatggttcggtgacggtgagtaccgcgacagagagctctcccggggtgtacacggcgaacatcagtggcacaaaggccggggattacacagtgacacccgtgtatgacaaccagccgctggagtcacgccgcactgatttcagtctgaccgcggggggggtgaatggtgctcactcgtcctttgttccgacagggggcggtactgccacggcggatggcaatgccacggtggcactgcagttcacggcaagggatatgaacaataatctggtaacggggctggcaccacagctgacgttcagggtgcaggacggaaatgctccggttactgatgattcggtgacggtggatacggcgacagaaagctcacccggggtgtacacggcaaaactgaagggtaataaagcgggagagtataccgtggccgtgctgtatgacggggatccggtgggcgtgcccgatgttcatgtgacgctgaccgccggagaggtggatagcggggcctctcactttgacctgtccggggacaacactgtcggcgatgatgaggcatccagggtaaaactgacttttacggcaaacgacgtgaacggcaatccggtgacggggcagaaacagaaggtgaccttcagggtgctggacagcaaccagatggaagcaggtgccgcagtgacggtggatacaacaacagaggagagccccggagtctacacggcgatgctgtacggcacgaaggcggggacctggacggtgatgccggtgtatgacggtcaggcgctgacgacgctcgggaaggtcgtgacgctgagtgccggtgctgtggatgagggcaagtctggctttatcccgactggggtcacaagcgtcccggcagacggaacatctccggtagcgctgcagttcacgccagcggatatgtacggtaatccggtgacgggtcaggcaacgaaggtgacgttcagggtgctggatgcagagagtcatccggttactgatgattcggtgaaggtgagtaccgcgacagaggactctcccggggtgtacacggcaaacctgagcggcacaaaggccgggcattacacggtgataccagaatatgacagtcagccgctgaccggtcttcatgtcgaagcgacgctgaccgccggagagatgaatggtgctcagtctgtctttatgccctcaggcagcagtactgttccggcggacgacagctccacggtaacgctgcagttcacggcaaacgatatgaacggcaatccggtgacggggctggcatcactgctgacctttactgtagaggataaagaacgtcatccggtaagcagccctgcggtgactgtgggtgctgtgacagagggaagtgacggtatttatacggcgaacctgaaggggcagaaagcgggagtgtataccgtaacggtgctgtataacgggagccctgtggacgacgtggaaggcgttcaggtgacgctgacggccggagaggtggataaggcgttttccacattaaccctgcctggggcgggctctgcccttgcggacggggcagagccggtggcactgcagttcatggcaagggatgtgaacaataatccggtgacggatcaggcagcgaaggtgacgttcagggtgatggacagaaatgctccggttactgatggttcggtgacggtggatgcggcgacagaaagctcacccggggtgtacacggcaaacctgaagggtaagaaagcgggagagtataccgtggccgtgctgtatgacggggatccggtgggcgtgcccgatgttcatgtgacgctgaccgccggagatatggatgcgggtcactctgactttgcgtcgacagggagcagtactgccacggcggatggcaatgccacggtggcactgcagttcacggcaaacgatatgaacaataatccggtgacgggtcaggaagcgaaggtgacgttcagggtgctgaacgcagagaatcatccggttactgatgattcggtgacggcggatacggcgacagaaagctcacccggggtgtacacggcaaacctgaagggtaagaaagcgggagagtataccgtgaccgtgctgtatgacggggatccggtgggcatgcccgatgttcaggtgacgctgaccgccggagatatggatgcgggtcactctgcctttgcgtcgacagggagcagtactgcaacggcggacggcaatgccatggtggcgctgaagttcacggcaaacgatatgaacgataatccggtgacgggtcaggcaatgaaggtgacgttcagggtgcaggacgcagagaatcatccggttgctgatggtttggtgacggtggatgcggcgacagaaagttcacccggggcgtacacggcaaacctgaaggggacgaaagcaggagagtataccgtgaccgtgctgtatgacgggagcccggtgggcgtgcccgatgttcaggtgacgctgacggcaggagatgcggataccggtcaatcgggtattgatctgccggatggagatacgactatcgcggacggcgcgaccagtctgaccctgagactgacggcaaaagatgtgaacggtaatctcgtgacgggccaggcatcgaaggtgaccttcagtgtgccggacaacagcgacgtgacggtggcatccacagtggatgagggggacggtgtttacacggcaaccctggtcggtacgaaagcgggcgcctggacggtgacaccagagtatgatggtctgccactgacgacgctcgtaagagaagtgacccttaaaggggcagtgaaggatatacaggtgaatggttatacctggagtgcgacaagcggttttccaaaaacgggatttgtgggagccagatttaatattgagttagaaggtgcagatgctgcggattatgactggcagtcaagtgttccctgggtgaccgtgacagatggtgtggtaacgtttacttcggaaggcaacagggagcctgtcattataaaggcgaccccgaaagcaggtggaggtggtacagaatatatttacaggtttgctgtaaataactggtttatccactatgaatcaacccgtgtcaactgggccggctcggatgagtattgcacgtcaatgggcacagtgctgcctgatgcgacacaattaggcggcagtgcgcgaggggtgcataatagtaatgtccggggtgaggcgggttcactgtggagcgaatggggtgatttgactgtgtatgatgtcggttttaagaaaactgacagttactatatatcagatggttatgatgggagccgatatggtatcaatctgggctctggtgtgattaatcaagggaatggcacgcttccgggttatactgcatgcgttaagtag

SEQ ID NO: 159689 - DNA, 972 bp, Enterobacter cloacae
atgagaacaggcaatttgtggcttcgtaagtctgatgcacgggcggcactctggctgacagggagttccctggccgtcctgtctgcgggcgcggtgctgatgaccggtaatgccggacacctgcgggtactgctgagcctgatgtgcacggcgctgctgctggttgcgcgggccggggtgatgcaggccggctggcaggtctggcggacgcaccgcctgcgccgggccctggcccgggggcagatacgggcctggtaccagccggtggtgcggggcgggcagggtcaggtctgcggctgtgaggtgctggcccgctggcatctgccgggcggccgggtgcgcggggcggcacggtttatcccgctggcggaggaaagcggtcttgttgttcccctgacccgggtgctgatgcgtcaggtgcggcgggacctggcgcgcatgcaggtctggctgccgccggggtttgacgtgtcggtgaacctgagtgcggcccatgcgggcagcgacgcgttcctgcgggactgtcggcgcctgcagcagcgctttcgcggcagggccctgaaggtcactgcggaggtgacggagcgggtggtgtttgagcaggtgccgggcggtgcccggctggtagcctcgctgcaggcggcgggtgtccgggtgatgctggatgattttgcgaccgggtgtcaggggatgtcgggtctggatgtgctggcggcggacgggctgaagcttgaccgcagccacgtgcgggagctgcccggcgcgccggtgtcgcaggcggagctgattatccggctggccaggctgatgtcgctggaggtggtggcggagggcgtggagacccgggcccagcatgagtggctgctggcgcacggggtgcagctgcagcagggatattacttctcgccaccggtgcaggctcaggggctggcagcctgtctggcctccggggtctttatgtcacgtcagtaa

SEQ ID NO: 159690 - DNA, 132 bp, Enterobacter cloacae
atgagcaggacgacagtaaaagagactcccggcagtaacagtcaggtcgtgtctcgcgtgacggaatacatccgcaggggagaggggctgtttatgctggttgtcagggtgttgcgtgcaacggacgagtga

SEQ ID NO: 159691 - DNA, 555 bp, Enterobacter cloacae
atgaaaagtcgactggtcagaatcatgccggtgctgtggtttccgctgatggcgggcattcaccacccggtggtccatgcgggcagggtggcccagcgggaagtggtgatcgcctggcactatccgcatgcccggctgagggtggcggatggcctgcctgccggcacggtcatcagcagtgtggcgatccccctgccgcaggagcttcctgccggcaccagtgtcctcagtaccgccacggtccgggataaagagtgggtgatgctgaacaccagtcttgacgggctgaaagtccgggcggcgattgacagaaacggcgggccgcgtgcggacggtaaggggatgcagaccctgcttcgccttgagctggtgacggatgaggggacgcggtcaggctggctgacggtgccgtcacagttgttatggtgggatgtgctcgacccggtaacgctgagccgattgtggcgtgcccgtattgtgtggaagggaagactgaaagtggagaccgggaacggcgatgagcaggacgacagtaaaagagactcccggcagtaa

SEQ ID NO: 159692 - DNA, 648 bp, Enterobacter cloacae
atgatggtcagagagcggaggaaaacccttcagatgaccgcaggaagctcgtccgggcgggatgaggtgtgccttattccctcgtgcagttatgcccgggcggggcttgaggcgcttgcggatggggcgggtacctgtgtccgtgaacttaaacaactttctgatgttctgcctgtttattccgggcctttccggctgctgatatgccatctggacggagatattgcctctctcgccgggggcgtgtccctgctcggggacgtgcttcgcatacacagcagtacacagccggtggttatcctgacccgggcgaaaatgccctggctgtacggcacactgctgcatcttggcgggcgggctgagtgtctgaaatcggtgtggatactggatgcgtgctgtcccgtcagccacctggtggcactgatggcgggcacactgcctgacagcgccaggctcctgaaaggcagggcgagttacgctctggctgagggcctgacccgccgggagatggatgtggtgcagggagtactgcgcggtgaacggataggtgatatggcccggcgaaccgggctggcagcgaccgtgctgtacgcgcagcgcgcaggcgggctgcgtaagcttggcctgtcacgcaggggggcaaaatga

SEQ ID NO: 159693 - DNA, 441 bp, Enterobacter cloacae
gtgagtctgacatgggtggtgacggggcatctgttgctggcgcccctgctggtcctgagtcagccgccctggtccggatggctgatgctgatggtccgtgtggttgcggttgtgttgtttctgctggtactggtccgcatggtcgtgctctggcggcgcctgcgccgggcaggggcatcgggctttcattattttcttgactggttcattcccctgctgctggcagggctgggtctgctgctgctctgcagccaggaccggggcagcatggaccacctgttccagcgggtggatctcatgctgatgaatgagggccggccggggcaggctcccgcttttcatcccggtggatggtatgacacccccgtgaaggcggatgcggggctgaccggtgccggtgcgccgggggtggaaagcgtggccgataaacgttctgaataa

SEQ ID NO: 159694 - DNA, 390 bp, Enterobacter cloacae
atgaaaaaaacagaactgatatccgcccatgaagtggcagagccgcccctgtggttgcaggtggcgcagttatgtatggagacgggagggccggtgagtcgcaacgccattgcccgtttttttgacatcccgccacggcaggctgcggacatcatgctgtatatcacccgcaggcgaaatgatgtggtaagggcgcaccgtaaggtgaccgtgagggccggaggcatacgtgaggccaccctgcaggtattcagtattcaggtggccctgttacctgagcgtggcggcgcctctcaccgcgccccccgccagcagcgccggggggatccggtgcctgattcgctgcgggacctggcgctggggagacgcagaccgggagtgggggagtga

SEQ ID NO: 159695 - DNA, 387 bp, Enterobacter cloacae
atgaaagaggaaaagacaaaggcaaaggcagtaccggaggcagaagccggtgccggcacgggcgcgcaggcaggcgcccggacacagaccggggatgtcgccacccgccggggccggcggtcactgagtgatgagatgacgctgcaggcggacatcagtctgctgcgtcagagtgcgcaggcacgctaccggacgtttgccctggcggcggcgcaggatgagcgggaggggcgttttgccgcggccgctcaggcctggggggaggcgctgaagacggcgcgcggggacaacgtggagtggtgccagtcgcgcctgaccctgtgcctgctgtacgcccgctcgccgtccctgccgcaggtggtggcgggaaagctcagccgggactga

SEQ ID NO: 159696 - DNA, 132 bp, Enterobacter cloacae
atgcagttacagcagattgaacaacagcgacagcaccgcgccgggcggcgggagcggggcgggcacacggcgtttgtgatgctcgtgctggccgtctccgccgcgctggtctggctgatgataccggtataa

SEQ ID NO: 159697 - DNA, 864 bp, Enterobacter cloacae
atgcagagtctgtccttacagcttcatgtcctgcacctgcggctgagcgcagtgcgcagccgtatcgcaaccggcgtctgccctgctgccctgctgctggcggccctgacggccccgcaggcaatggcggctgcagccgtgccggaggcgatacctgtcaccccggtcacatcaccggcacccggtgctgcgccgcagtggcagttcaccgtgtcgccttacctgtggggagcgggtatccgcggtgatgtgggccatcaggccaccgggacgcagtttgtgaaatcggacttccgtgacatcgcccgcgaccttgacgtggcggcgatggtgacgggggaggcccgttacgggccgtacagcctgctgacggacgtgatgtacatcagcaccaccacgaagacccggctgcctgacggggcaccggcgaaacacctgaacaccgacagcaaaaccttctccggttttctcgggggcggggttgcgctgcgggacacccccgacgggcatcttgatgtcaccgggggcgtgcgggtctggtacagcagcaccacgctgagcctgcacggcggcgaggctggcgggacctccggcagcgacagcgccacctgggcggacctgatggcgggcctgcgcgggcgttacgccctgactccgtccgtctggctctcgggctggggaatggccggggccgggcagtcccgggccgactgggatgcggcagtcctcgtgagccgggcgttcacgccggcctttcaggtggcggccgggtaccgggcgacgggggtgaactaccgccacgacgggtttgtgtatgacatggtccagcagggtccgctgctgggcatcagcggccggttctga

SEQ ID NO: 159698 - DNA, 855 bp, Enterobacter cloacae
atgacactgaaaccggccgtgcgcatggccctgaagctgaaaaacttggcggccctggccgtctgcctgctgccctgcgtggcgctggcgaacaccccggagacaggtgccgccccggcggtaaccgacccgcatttcaggctcgcgccgggctacctgaccccggatggcctgcccctgcgcctggctctgctgggggccccgtcggccgcggggacggcggcgcttgcccgcgacgaggaggcgcaccgcgccgccctgtcactgaagggctcggcacgtgaaaggctggctgccggtgacgcggagctggccttcccggccccggcgaacgccttcgcctgtgcgctcgggacggacatcagcgagaaagccaccccgcacctgtacaccctgatgcagcgggtgcttaccgatgcgggtggctccacctatgccggcaagaatgcctggaaccgcacccggccgttcgtggtgcacgatgaggggacctgcctgccctcaatggagcccctgctgcgcaccgacggctcctggccgtccggccactcggcggcgggctgggcctgggggcttattctggcggaggtgcagccggcgcgggccacgcaggtgctggcccgcggcctggcctttggccagagccgggtcatctgtaacgcccactggcagagcgacgtggatgcgggacgcctgatgggggcggccaccgttgccaccctgcacggcaacagcgacttcaccgccgacctagcggctgcaaggcgcgaagtggcggccgccacccgggccggcattaaaccgggtcaggactgcgcggcagagcgcgtggccctgtccctgacacagcactga

SEQ ID NO: 159699 - DNA, 732 bp, Enterobacter cloacae
atgcgctatctgctgatgacggacaaccacctgcttgcacaccactttgcggtggtctgtgcgggccggggcagcgtgtctgagaccccctgcggcccggaggcggtgcgggatatcagcccggtctggctgcaggagaggcgcacggatgcgctgttgctggacctgccggagcgcctgaccctgcgcgccccggtgctgattgctgcctggcgggcccgctgtccgggcgtaccggtgatggtggtgatgcccggtgccacgccgtacaccgtgcgggcggtactggatgcgggggcggacggctgtcatgacgaccccggcgatatccgggtgctggccgcccgggtggaggccctggtgcgccggcgtcttggctggtaccgcacggaggtgctggactgtccgcccctgcgtctggagaccgccacctgccgcctgtttatccggggtgagccggtgtacctgacccggtttgagttccgggtgctggaggtgctggtccgccaccgcgggcgggtgctgagccgggcggacatcctgatgcagttctgtcctgaggggcaggtggatgagcgccggttcaattcgctgaacaccatcatcgggcggctgcgccgccggctggcgcccttcccgcaggtcctgagcggcctgcagacctgccggtcccggggctacgtgctggacattcgtccggaatgcccgccggccgtgcgccgtaccggctga

SEQ ID NO: 159700 - DNA, 933 bp, Enterobacter cloacae
atgagtcagaacgtacagaataacacatccccccgtcgcctgacggggagggcttcccgtcctgtggcacttgccgccgctgccggtctgctggcggccctcccgggcgtggccctggcggaagggacaggggcgattgtcccggtggaggaggccggcggcacgccggtgccggcgcatcccgcaccggcatccgccggtccgtccctgacggtggggggcgggatggcggtgaatcccctttatgaggggtcatcccgttacgagccgttcccgtccctgatggcgaaggcggtgatgccgtcggacaactgggggaccttcacgctcgccttcccggaggggctgcgctgggacctgccggatgtctccaccgtcgggctggcgcttctgctgggctatgacccgggccgtaaggaaaaaatccgctatatcgggggcagcagccaccacctgcgcggcatgggtgaccttgacagctcggcgctggtcggggcggaggcgtacctgcgcctgccggtcgggcgtctgtacgtgcgcggcgtgcaggcgaccagcagtcgggactacggcggggatgacctcggccacaccacctggctggaggcgggggccgcaggctcgctgcccctttctgccgccctcaccctggaggcgtccctgtacggcacctggagcgacagtcacgacatgatggcgcgctttggcgtgaccggacgtcaggcggcgcgcagtgacttcagcgagtaccacgccgggggcggtatgcgtgacgtgacgatgaagaccaccgccacctggcacctgcagccgcaggtcgccctgcagggcgggctgaaggtgtactccctggtttccggggcccgccacagcccgctgacggatgacaccgtcggggccggtgcgttcctgaacgccctttataccttctga

SEQ ID NO: 159701 - DNA, 1341 bp, Enterobacter cloacae
atgagaataaacaaggtaaccgcctcgctgctcctgccgcttgttctgatggcccggtgcgcgcagtctgaagaaccgcacgcacctgacagtcaggggctgaactcgctgggcgaaattctgcaggcagaagagggggcaccagccctgttaggggtggtgaagctgcagaatgacccggataagccggcgggcgcgcagaagaaaaaagtgccgggcccaccccggagcgggggcgtatccggtatcgccctgcattctgcaagggagcaggatttactgcagcgcgagacacggcttaaggcgcaggttgctgagctgacggcgaccgttgcggcactcaacacccggcttgcagcatctgtgccgggggcggacctgcagacggtccgtcaggcgcttgatgccagccgggccgaagccgcgaaactgcagcagcagacggccagtcaggaagaggccgacaaaaaacgggatgaccagagccagaaactgaaagccgttacggcatcgcttgaccaggcgaaggaagagcttacttcccggcagcagcagcttgcgcaggtcgtccaggaaaaacaggcgctcactgagaggctggaggcggccacccgggcgcagggtgcgtcagctgaccaactggcacagcgtgagaaagagctggcggatgtccgtgaggcgctggacagggcatccggtgaggccagaacagccgtgccgaagtctgccactgagatacgggactatgccgtaggtgcctcgcttgcggcagatgcgctttcactcctcagggagcgtgcagcagagggggtgtcggtcagtcaggacatggctctggcaggaatacgcgacagctttgcaggtaagctgtccgtacctcaggctgaactggataaggcgctggcgaatgcgacaactgaactcgacaaaataaagagtaaaaacacgcagaaaacggaatcagcgggtgaagaataccggaagcgctttgcggccagggccggcgttcagaaagatgacgagggtattctttaccgggttgattatccgggagacggcgcgatttctgacacggatatcgtctcgcttgtcgttaccgaatctcttccggacgggaccgttattaaggatatggaggcgagcggcaagtttatcagacagccgctgaatacctacccgcccctgttccgcaaggcgattcagcatcttaaaaatcacggaagtctcaccatggtggttccgccggccctggcatacggggacgccggatatccaccattaatcccgccgggcgcgaccatggtttatgccgtgcgtatacgtgatgcgggagacaaatag

SEQ ID NO: 159702 - DNA, 447 bp, Enterobacter cloacae
atgaaacgagtaaacatcttgtctggtattctcttcctggttacggtgctggccggatgtcagtcccgtacgccagctcatacaggtacggtgccggtccctgctgtcaggcctgttaccggtgctgatgacgccgcgaacccgatggtcgtccctgacacttcagggcgcagggatacggccggtaacagcgatggcttgaccctctgccggaatgacctgaactcgctgaagcaggtgaacgaaaaagcctggcaggtccgccagaaggatttcagcgcgctggtcgccggggcgtcagtctatgcccgtgtcaggggcgatgtgaatggcaacacccgggatactctggatgcactctatcgctataaaacgaaccagctctgcgcccgcattgaacgcgatgtgctggacgggctcgttgtacgcggggagagcatcaaatga

SEQ ID NO: 159703 - DNA, 1329 bp, Enterobacter cloacae
atgagtgatattggcatggaagacatcatgcaacgtgagcgggcaaaccacattgagcggttgcggcggctttatgagctggtccgcagatggcctgccgcacgtcggcggggctggatgtcgcagtatcacacatggtggaaaatatgggcgatggtcatagtcggctgtggatgtacggcaaatgcacatgcctcatttggcaccttgggtgaattagaccaaggggtcaaaaactgcatagacaataaatacctccggcccttgggggacggaacctggggtggcgattgtagcattcgtctgtccggccagaattctgcatcatattttgacgttccctccgccatcgaaacagagcatgcaaacgaaaaaagccgtccaaatttggtactcttatcaactacatctaatgcaggctcatggtctaagccgccagagctccaaataggcgactcgctcattttaaattgccacgataaaaaaaaggggacatggcccgcgaacacacgatttacgctcggtgtgcaagttgcgtcaccggatgaggtaagcacggttgactgctcttatgctgctctttatgcaccgcattggcccgaagatactcgtacttccgatggcaaccggccccataatggcttcctgacgtatacacctttttcctacctctactggtcaataaaattgcccttgggggcgaccttgtattatccatccctgatcctagtggcctatccttctgcccagacacgaaacaactcaatagcaaccttgggggtcggaacgggcaactctatcgacccgactccacaacctgcgccaatcgctggcgatgtaccgaactgctcactgattggtgcagaggcaacgtttgatcttggtactgcctcatcgcaaaatcagccaggaatgatgaaaacgactcacgatcaaatacagcatataagcctcgcttgcaactcgggcagttatggcagccgacccataaccgtgtcgctctatgcgcagacaacatcgacgctaagcaatgaccggaaacatctgctgacctctgcatcagactggcttggtctcggtctgaaactagagtccaaaaacggacccacactcacaatagctcctgggcaaatttcggataccgatgtggtgtggagtatcggccagaccctgctctggacgtggagtgtaggaggaagctcatcggctatggacatacccctatcctcggggaccctgcacccccacgtcgatcagttaacggaaatgaggggcactaaggacggtcagcgtaaatatcaagtaacctttaccgcgcttcttcagtaa

SEQ ID NO: 159704 - DNA, 1839 bp, Enterobacter cloacae
atgattactatgttcccctccgtcaaagctacgacacaccctgtccccgatcctgtggggttccaccagacggtgtgctccggtggagggctggtgtgcctggccctgtacaccctgctcgtgatgcacgtaaatgtgccgcacctccccggggccggcatgatggtgccgcaggttccgttggcgtggatgctagcggcggggttgatgatggtggccggctgtgcgcctgaaaggtcgctgatggccgccttgtgcccgacaccgtttatgctactgtgccttgcagctgttgtcatactaaccctgccgctactgtatgcggcgcagacctggcgctatcttgcggaggaacgggtggcagggctgtggggggggctgctgttgatgatggcttcacgggccctgttcaccacgccgtcgctgcgtaacactgtactggtactgatactggcaggctgcgtgctggaggcactgatcggtatcgcacaggtgttacatctacagtctctgccgttctggctgacgtcatctgataatggccgggcctacggtgtattccgccagcctaacgtgatggcgagtatggtcggaaccggggtttttctggcatggcgtctgctggatcaagcatgttgtcaactgacgcgtgtgctcgttctcatatcaacattcattctggccttctgcctgccgctgacgcaaagcacacagatttggttgaccctggctctggtccttgtctgcctgccgttattccaccgccccgaacaacgggggtggctgtgcgtgctggttgctggcttactggtcggtcagcttgtctgggctggactgcatggcaactcagtagaccactcttacggacgctacgggcgcctgcagatgtggtggaactgcctgtggctgattatgcaccgtccgtggcttggctggggatacgggcattttgatatggcctatgtgtatgcctggcagaccaacggcaatactccggcgatagatctggcgtatactttgcatccgcacaatgagttgctttactggctgacggaaggtggcatggttgctggggttggcatcagcctgctgatcgcagctggcatcagcctgctgcgccgaagtctgcaggccagaaaaagttcggacttgcagactcaggcctcaggtatggaagcgctgtctattgctctctgcgccctgcctgtgctgatacacacgcaagtggagtggcccctttacctctcagcctggcattacctgatgatggtgatgcttctggccctggctgacgctgccctgcagcaggcaacgacgtcatctatagctcctggggatgtattatacaccgcagacacatgcaccgtgaccccaagacgcgtcttctgcgcaccattggcgatactgctgatgatctcaggtaccaccatcttgtggtggatgatcaccggcctgactgtggggctgcagttgacgctggcagccagtcctgacgaccagaccgtagaccgcctgcatacggtagaagtcgtccgaacctacaacccttgggtgcttaaggaggaggtctggcggaccgaggcggtggtgcaggcaaaccgggcgtatcagaccggcgatctgtcgttgctacttccggttatcgacttggaggagcagtatttgctgcgccacccggacctggacatcactgcgaacttgattaaacaccttcgtctaagcgggcaggttgaaaaagcccggaccatgcagatgcagggacatgccatggctccgtgggatgcacgctttagtgacagcgctcaagtgccagatttcggacagcaaaaaaagcgttga

SEQ ID NO: 159705 - DNA, 2706 bp, Enterobacter cloacae
atgctgaaggtatcattatctacttcatatctctccgggaattccctgatttgcggtcatcttggtgagtatgctggtatcgctcgccggctgtctccgacctgcctgcaggtactgatggcactactgggtagtggcagcctgacagttcaggccggtgactactttgatccgtccctgttgaatctgggaggaggcgctcaggccgtggacttgagtcagtttgaacattcgggcggccaggcagaaggaacctacagcgttgatatctatgccaataacgagggtatgggcacgcacaaggtgaaatttgtgcatgacagtgagggaaatctacagcctgtcgtatcccccatggacctggacagttggggcgtgaatctgaaaaactgtgaggccctgaattcgctgcctgtgaaagagccgctcacgcatcccctgtcagactacattccgcagtcctctgcgaacctggatttttcacagatgcgcctgactgtgaatattccacagctctatatgaagccaaaccgagacagtctggcagatccgtctttatggcaggatggggtaccggcacttttgctcaactataacctgagtggaagcacttacgagagccgaaacgatggcagccgcaacgacaaccagggattcttcgcctccctgcagccggggattaatttggggccatggcgtatacgtaacagctcaacatacagctataaccagcagcgttctgaccgttatgatgtcctgcagaacgaaaaaaatcgcatggtgcagacccagactcagtggacctccctgcagacttatgtacagcgcgacattgatgttttgcaaagccagcttaccatcggggagaccagtaccggcagtgtggcaagccaggtgctggatggcttctcctatcgcggtgtcagcctgatgagcagtgatgccatgatacctggcaccatgaatggatttgcgccggtggtgactggaattgcccgcagtaacgcacgggtgaccgtcacccagaacgggtacacaatctatcaggccaacgtggcaccgggaccgtttcgctttgacgacctctccggcagcggtaccagtggcgacctgcaggtgagcatcaccgagagtgatggtagcgtgcacgggtatcgtctgccctactcaagcctgccggtaatgcagcgtcaggggcagcttcgctatgaggttgccgccggcgagtactacaccggacacggcggttatgatgccaccggtacacctggtttcggaatgctgacagctatttacggtctgaccagtgctatcactgtttacggcggcggcatcggcgcgaacggttatcagtccgttgcattaggggctggtttatccattctggattacggcgcagtgtcgctcgatgcgacgcactcccgaacctcgctctctggcaatagtggcacgctgacaggagagtcataccgcgcccgctactccaaaagtatgatggctactggtaccacagtggacctgacggcataccgttactccacacgtaactacctgagtttcaatgacgctaatgaccgcggttttgataccagtactggcctgccggactggctgaacgaccgtcgacgcaactcctacgagataagactcagtcagaccctatttactgactatcagttatggctgcaggggcatcgagacagctactggggatcggacaagaccaataccaccttgtctgctggtgtaagcggttctgtgaagaaggttggctggtcgctgaactacagtgtggaccgcatgcgtggtgacggtgactggccggagaaccgccagtggacgctgaacctgagcgtgccaatgagtctctttggctctgcagccatcctgcagaatgggtacgcgagctacaccttctccaacgataatacaggacgaagcaccaatatgctgagtatgggcggctccttgttggatgataacagtatgaactggagtgcctcgcagactcaggggaacggtgatctgagtaacagcggctccgcatcgctcggatatagcgacacatggggtatggcgaaccttggttacaactacgacggtggtggtggacatggcgtgacctacagcgccagcggcggcatattggcgcatcgctacggggtgacgctggcccgcaatatcggtgatgcggcggtgctagtgcatacaggtataccagatgtgaaaatcataaacggtaatgcgaccactgaccgctggggtaacgcggttgtgacctccatgcaggcctattcccgtaacagtatagatattgacccgtcctctctgcctgaaggtgccagtctgccgaccggtggcgggcaggcactgtacccgacttccggagcagtgctggtgacagattatcccattcgcctgggtcagcaggtgctgatgaacctgagccacaatggcgagccggttccgttcggcgccatggcgactctgaaggatgaggatgcggatgagcagggtagcatcgtcggtgagggggggcaggtttatctcggcggtatgccggagaagggtactctgctggtgacatggggaaacacgtccgacacacgctgcgaggtgccgttcaggctggataagccggagccccgcaaaaagggtgataagtcatggcgtccggtgaaaaccgttgacatgtcatgccgttaa

SEQ ID NO: 159706 - DNA, 846 bp, Enterobacter cloacae
gtgagtaaacattttattagctattcaaaaatattactgagctgtggtgcactcttacgactgactacatcatgtctgttggttttgttctgtacggcctcccatgcgcaggtagtccgtaatgagcttaaaggggtttactttacgtcaacacgtctgatttatccggaaggggcgttgcagggaaaaagtattgtactgaacaataacagcgacagtgagtttcttttgcaggcatacatcagtccgcggaatacggtaactggactgccaagtgaggcgacgcgggacttcctggtgacgccgccactggtccgtctggctgcccaccagacccgtacgttgcgtatcctgcgcacgggtggcgacttacctaaagacagggagtccgtgttcttcctgacggcacgcctgattccggctactgatgtccaggacgggaaatctggggaagggagtggtgcgatgattcattttgtgtctgcgctgtcagtcaaagtcttctggcgcccggatggacttgacaggccgaatgcagtggaggacgccgcaggtaaactgaaggcggccgttcacggtgatattttgacccttaccaacccaactccctactggatcacgttccgtacgctcaccattggtggagctgatgtgtcgtcgacggacattatgcgcatggtacctcctctcggtagccagagctggactctaccagggggggcgaaacgaacgtctagggtgatcccggttatatggaccgccatcaaggagaacggcttcgatacgcagctatttttaaatccggcacctgtcatttttgatgcaaccggacagaacgggggatga

SEQ ID NO: 159707 - DNA, 384 bp, Enterobacter cloacae
gtgtttcgcttcaggataaatgccattccgtccggcaccgcaccgataaaagggggggcgtcactgtcgattgctctggggatgggtatcaagctcttttaccgccctgatgggttggaaatgaaccctgatgaggcatacggaaagctgaatttcagccgccaggggaatactgtagtggtgaaaaacccaacgccatattatctgacctttgcgaggctgtcgctcggtggtgagctggtcaatatggataaattccctgcgatgatagcgccattctcgcaggcacgctatcccgaagctgggcatggcagccaggtggagtgggtgctgattacggattatggcggcaacagtgacacctactatgcgcagattaaatag

SEQ ID NO: 159708 - DNA, 588 bp, Enterobacter cloacae
atgaataaatgtttgtggtggcagttggcgaccagcgccggtatgttgttttcccttgcactgatatcaactgcagaggcgtggaacagcaccattgttgtaacacagaccctgaccaaaggaacctgcactatcgatagtacggcaataaatgggataacactgcctgacgtaaggcaggcggtgtttaactcaaccgatattaagattgcaaaaagtgaaggggcgaagtttaccgtgaatctgaaatgcgatggggcaccgaacccttcagaacaaaacatccttaaagtcactgggacggcggatatggcagatggcagcgggaaattgtttaagaacctgtccgctggcagtagcgcagctacgcatctcgggttcttgctgacaactggcagtgacggaagcggaactccttttgataccacctcgttacccatctcagtggtggtaggcaatgcaggcgataatgtcgatggtcgaaaggtggatttttacgtgatgccgtcaaagggaaattataactacactgacgtcacagctggtgccctgacaactacgctgactattacctgggatacccggtag

SEQ ID NO: 159709 - DNA, 633 bp, Enterobacter cloacae
atgatgaaacaggggatgcatcaacaatcggcagaacacacggtccgttttcaggaaacaaagtggtcttccagactggcgtggctggtggtgatagtcgggatactgagcggtggcggttcgtcccgcgcagcggaagacaagcagatgcggctaacttatagcgtcaaatcggttacctgcgatgtcgacgtccccccctcacttaccctgaatagcatgaatgtcgggatggtaacgggagcttcgccggtcaaggcaaccggaatgaaatttaacgtgacgctccactgcgatggtggggctgcaccaaaaggttccagtgtgggggtatggggaacaccggacatcaccgggaattacgcccaactgtacaaaaacgagaatacggggccaggtgctgcagcaggagtgggttttgttctgacgaacgacagtgatggcagcggcccccttctgaaggctggcacaaaggcggctccgacagtggtcgtggctgggaaggtgggggatacactcgatagcaagtcaatccccttttttatcatgccataccgcggtggctacagcgcttcggtagtggaggctggcactctgaaagctacgctgaattttgattttcagtgggagtga

SEQ ID NO: 159710 - DNA, 630 bp, Enterobacter cloacae
atgcaggagaacacgataaaacaatgtgcaacgacatcccacaacgtccggcaggccacccaacggatgtggcatctgataccagcactactgatagcattgatatgcaccgggaatgtgcaggccactgctcttggtcaaccagctatcagcacctatatagtgactacaacggcaccgacctgtgaaatctcggtaccatcaggtggaacgcttgcacttggcgatacaaccgtggctgatttatccacgtcaccactgaaggtggcaggaagatcgtttgcggtgaccctttctgcatgtactggaagtactgatggcacaaaatccaacctgactctctgggggacgccggataccacaggaggctcaacaacactgttcaaaaacatgctggcaacgggtgcagctgccggtgtcgggattgaagtgaccaacgacatgaccggtaatggttctgctgtgccagtgagaacatccagcacgccgtatgccattccagtaactctgacgggcgggagtggcacggtgaatttttttgccatgccttcccggggggggcatgctgcaaacactgtcacccctggtgcggtaagtactaccctgaacttcaacatggattatcggtga

SEQ ID NO: 159711 - DNA, 630 bp, Enterobacter cloacae
atgacgcaaaagatgcggtgcatattcagaacaacagcatgcctgcttctgtctgccgacgtgtgtattaccggggggttagcaacgcccctccctgtgaatgcaatgaatatccacgtcgcgcagacagttgtgccggccaattgtgatctagcattacagggtggtgacatgatcggcggtacggtggattttggtgcgctccagtcatcggatttggcaggggcggggaaggtgtctacttcaaaatggtttaatctggtgctgacaaattgtggtgtgaacacgagcacagtggcgccgcacattatgatacaggggacgtctctcggttctacaggcgatgatgtgtatctgtttaaaaacaccggtacatcagatggtcttgggtttatcttccgctttaatgccactggtaaaactgtaacgtggaatggaagcactgatgcgaaaaatatacaaagcggtgatgatatcaccaccacagtgaacaacaacggggcgcagctgcctccaacgtggctgagtcagtccattcctgttgcggtggcggtctccacaggaggaaatatttcgcagtctgcgggtgacctgtcgggggctattactttcacatttgagtatcgatag

SEQ ID NO: 159712 - DNA, 147 bp, Enterobacter cloacae
atgcctgtaggggacaggacgggacgttttagtattccggtgcgttacaccttgttttgcgttcctcacggcggaaagacggtcctcgactgccagcaggcaggcagcgtgaaggctgcactgacctttacttttgactatcaatag

SEQ ID NO: 159713 - DNA, 846 bp, Enterobacter cloacae
atgtctgaaccattaacttgcacagaatccgacgtactgacgggccataccgaacttatcagttccaccagcattgaacgtattgttaccaggcgcaattccgcgctgggacaaatcaggacgatgatccaccagctcgctgatatctctgcactgaccgagagtattggcgggcaaaccgcgcaggactgggcaatgcgtgatggctaccgctgtggctgttggttgcttgagaaagagaacaccggcatgaaagttatcacctgcaatctcgaccgtagtatctggcacgatttgatgaagaaatccggcatgatcgccctgatggatgctgcggctcgcgatgaatggaagcgaactcttgagcgggatgatatcccggccatcagtgaagagaatattctcagcaccttcagacagctgcaccacagcaaagacgacgtatttgagcgtgggatcatcaacgtcttcaaaagcctgagctgggattacaggtcgaactcgccgtgccggtttggcagaaagatcatcgtcaacgctctcgtgaaacatgaccgctggggatttggtttactacatggaaaacgacgggatcagttagcggatttagatcgtatgctgaatctgcttgatggtaagcctcttccagaaaatcgtcacgatctcagcgtcagattagccgaccatatcagcaagcaacacagtaccgtatacgaagatgagtatctgtcgatacgctacttccagaagggatcggggcatatcaccttcaaacgacccgacttggtagaaaagatgaatgagatcattgcgaagcactatccggggatgatggctgctaagtaa

SEQ ID NO: 159714 - DNA, 492 bp, Enterobacter cloacae
atgaaactgtcactcaacgtggaagccgacagtatcaatgttctagcgctgaacatgggccgaatcgccgttgagattgatggcattgaactggcccaactgattgatgtggtctgcgataacggctattcactgcgtattgctgatgagcccggaaagctgctagtcgaagctccgcttcctgccaacgcccgctatcacggcattaagtgtagtgccgcacatatcacccgcgaggataacgacctgctgcatcggctatcacgacaggtgctggactttgatgattctgagtgggtgggctgcacaggctcgggctatctcatccgtctggatgcgtgggcttttcctgttcttcaactgaaacggcgcgggctgtcaaaagccgctcgcctgttgattgtcaccctgatgcgccgctatcagttgagcatcattcacttcgatgcctttggtgaactgctgccgggttttgagatcttcgactggtag

SEQ ID NO: 159715 - DNA, 390 bp, Enterobacter cloacae
atgccagacactgaaaacaccgtgaccgaggtgatgccgcagaataataccgcttctccctggtggggcctgagtcgccccatcgccccgctgtttggcgcacgcctcattcaggagggtaaccgcctgtactaccttgccgaccgcgccagtattgcgggtaaattcaacgatgcgcatttacgccagcttgaccaggcattctcactgatgctcaaagaacttgagctgaagctggtttccggtgaactcaacccacgccagcaacgctgcgtcacgttgtatcacaatggccttatctgtgaagccgacacgctgggcagttgcggttatatctacctcgcgatttatccgggagaaccgccagcagcgtattcaccagacctgtaa

SEQ ID NO: 159716 - DNA, 354 bp, Enterobacter cloacae
atgtctttaaataacagtccagagaaaaaaaacgggacaacgttccctttacactgtttacctgagcaattaaaagagacagttgaacgtgtgaatatgtttacaggaatgtcaatggaactgacaataaacattattttcaccatgctttcaattatctgccagtaccttgttggtgttgtatcaccttactcgggtatacctggcccatgctctttatacctacttacgcttgccgagtctggtgaaggtaagacgtttctgtcacgactgttaatgaggcccataaaagacaacatcgtatctggaaaactagcttacagggattcgatgccaatcaacgtcaggctataa

SEQ ID NO: 159717 - DNA, 366 bp, Enterobacter cloacae
atgacaagtacagatgcaattaagaataaattacagaaacgtaaagcagctattagcatcaggggccacctgacttctcctatcggagactccccaagccctaagcatgtatggggtacatctgtagtgccagccaagttagtaacaagcttaatctctgctgataccgttcagccaagttacaaccaagatgacagtttagtcgatatgaagtacatcgtgagcacttcaggtctgacaaataaattcttctacgcccttatcaagcgtggggcgttcccccgcccaataaaactagggagagcttcgcggtggaagatgagtgagtttaaacagtggatcgaagaacgtgctgctgcaaggtaa

SEQ ID NO: 159718 - DNA, 156 bp, Enterobacter cloacae
atgaaatttcccctgatcaaggaaaccggcatcatcagcgtgccggctctcaacacagtccgggttagtattcatgttggcggcactgaacttgtgagactgatgagagttatgacgactgttcgcccggatatcctgcttcagcttaaggagtga

SEQ ID NO: 159719 - DNA, 372 bp, Enterobacter cloacae
atgcaaaccttatccgccataccgatgcggaaggcaccgtcacgtccgacgcccgttgaaatctggcagaaacttcttacatatctgctggaaaggcattacggcctttcgcttcacgacacacaatttggtgatggcaatgtgattcagcaacatattgatgccgggatttcactggcagatgcactcaattttctcgttgaaaaatctgaactggtccgaattgatcgtcctggtttctccatccatcatcagtccccttttatcgcggcaattgacatactccgggccaaaaaggccaccggcctgatgcaacgcgatggatataaagcggtgaccagtgccatcagtggtcagtcttccggaaaataa

SEQ ID NO: 159720 - DNA, 366 bp, Enterobacter cloacae
ttgtcgaataaaataccgcctgtaaaccacgatatagccgagccctggtgggggcttaaacgcgatatcaccccctgttttggcgcccggctggtgcaggagggcaaccggctgcattacctggccgaccgcgccagcatcaccggcaccttcagcgaatcagacctgcgccatctcgaccaggcgtttccggtgctgctgaagcaaatggagctgatgctgctttccggtgagctcagtccccgccatcagcactgcgtcacgctctacgcaaaagggctggtatgcgaggccgatacactgggcagttgtggttacctttatatcgcggtttatccgacgtcaggcaacagcatcccccgctaa

SEQ ID NO: 159721 - DNA, 222 bp, Enterobacter cloacae
atgaaaattatcagcaaacgtcaggcgatggcgatataccgccggcatccgcaggcacgactgtttcgcttctgcacgggtaaatacaaatggtccggcagcatctgccactacgccgggcgggaagtccaggatatccgcggcgtgctggcagttttcgctgaaaggcgtcaggaccgcaacggcccttatgttgtcctacgcagcgttaccctgaattaa

SEQ ID NO: 159722 - DNA, 480 bp, Enterobacter cloacae
atggaacaacagctaccattgtttgccaccggactcccgccgtcagcacagcagaccatccgggaagccctgaccctgctggagcgccagttacgcgagcccggcgcgtcatttacgtccagtaatgctgtccgcgactggctgcgactgaaccttgccacgctggagagagaagcactctccgttctgtggctcgacaatcagcatcgcctgatagcacacgacacgctcttccccggaacaatcaacactatcaccgtacatccgcgtgaggtcgtcagggccggtctgaaacacaacgccgccgctgccgttctggctcacaatcatccctcgggagaggctgagcccagcaaggccgaccgtaagattacagagcgcctgaaacaggcgctggacctggtggatatccgcctgctggaccacctggtggtgggcgggatggaaactgtctcgtttgcagagaggggctggctgtag

SEQ ID NO: 159723 - DNA, 480 bp, Enterobacter cloacae
atgaccgatattatcaaccttaacgacaacaacctgttacgtccgcaatctgccggtgaagccccctcaccggcactgaccgccacgcccgtaccggacgaacagcgtgtggacttctggccacaacacttcgggggtatcccgcagtggataatccttgaacccactatcttcgcctggatggaccgcttctgcacggactatatcgggggcatctggcagttctacacgcttaacaacggcggcgcatttatggctccggaagcggagaacaatgagccctggacgctgttcaaccccctgaacggtaacggcggtgaactcagcgctgaagccgccggaatagccgtctgtctgatgacgtacagccaccacgccatgcgtaccgaatgcgacgccatgacggagcactattaccgcctgcgggactatgcgctcagtcacccggaatgcagcgccatcatgcacatcatcgactga

SEQ ID NO: 159724 - DNA, 819 bp, Enterobacter cloacae
atgagactagccagccgctttgggcggacaaaccagatccgccgcgaccgtcccttaacccgtgaagaactgatgcagtacgtgcccagcgtcttcggggaagacaagcacgaatcccgttctgagcgttactgctacatcccgacgattaccctgctggagaacctgcagcgcgaagggttccagccgttctttgcctgccagtcacgcgttcgcgatccggagcgccgggaacacaccaaacacctgctccgcttacgtcgggcgggtcagataaacggtcagcatgtacctgaaattatcatactcaacagccatgatggcgcatcaagctttcagttgttgccgggaatattcagaagcgtgtgtacaaattcgctcgtctgcggacagtcgtttggtgaaattcgtgtgccacaccggggtaacgtggtggagcgcgttattgaaggggcttacgaagtgctcggtatctttgacagggtggacgagaagcgtgaggccatggagtcgttgctgttaccaccacctgcacaacacgccctggcaaacgccgcactgacctaccgctttggtgaagaacatcagccgatcaccgccacgcagatactgacgccacgacgctatgaagaccggcagaatgacctgtggacaacctaccagaggctccaggagaacctgctgaaaggcgggctgagcggacgaaccgcaaagggtaaacgtacccacacccgcgcggtcaacggcatcgatggcgatatcaggttaaaccgcgcgctgtgggtcatggccgaagaactgcagcaggcactgagctga

SEQ ID NO: 159725 - DNA, 234 bp, Enterobacter cloacae
atgtacaacaccgtcagtccgttattgcccgaaggcacgtttacccgcaggcaagctgaggccatcgtgatgtcgtaccagaacgtcgcgattgaagatgaccagggtacgcattttcggctggttattcgtgacagcgataaccagttgatctggcgggcctggaattttgaagccagtgcaggagaatggcttaaccgctatctgctcagccacggtattccccgggactga

SEQ ID NO: 159726 - DNA, 513 bp, Enterobacter cloacae
atgaccgacatttcgacactcagccagcgactggcaaccccaacccttcattttgtactgctcaccgtcgccacctgcggtatctggccgcttctctggctgtaccgaaaacagcagattatcagcgacaccaccggttacccggtaagtggcgatatcttcgtaatctggctggccatctgcttcgggctcgggcggcagttcggcgtgatggcctcgccggacctggcgggctacgacacgggcagcgacacgctgctggccttaagcggcattctgtcgctcgcctgtggcgtgatgtacatcgtatgggcctttaaggccagagccgcgctgcgacactatgcactgaacaccttccgcttcgacctgaagatgaacgcgttttataccgttattttcaacgtcttctacattacatactgcatcaacgacatgccgcaggcactggcaaaacaccggattattcatggtcagccccccttgccaccagaatcgtcgtcaccgcagtaa

SEQ ID NO: 159727 - DNA, 465 bp, Enterobacter cloacae
atgtcgttaaaacccttaattcctcttaccctcgtgctcagtgtctccggtcaggcgctggcgttcggtaatcacgacgcctggagcagcagcttcgcacagggcacggcggaatacatcatcctcggcaaggggcagtcacagctgtacctcgcatgcgacagctcaggctcacaggccgccaccatcatcttcaccgacgagaggggtcatcaggtcagcatggacagcggccagaccctgaccatgaaaatcgataacgctgacgtagccgacattagcgagagcgactctcacgtgggggagaacaacctgatgtgggcctggaacaagctgcgtaccggtaagcgtgtggtcgtctcgggcacagatgcaaaaacggccgtcttcacgctgaacggtgccgccggggtgataccggcatttggcgatagcggctgcgtggcgaagtttgacgtgccgtaa

SEQ ID NO: 159728 - DNA, 687 bp, Enterobacter cloacae
atgcaacgacccgctcaggaggcccgctatgaccggcttgccgtcaggctgtcggtcatcatcagccggttaatggccggagaaacgctgaacctgcaggcaatatccggggaatttggcgtttctgaacgtaccctgcgccgcgattttcatcagcgactggtccacctcgatattatcggggagaacggcacataccggctcagcgaaaacgccacgcgtgattactctccgggggcattgtcctttgtccgcagtaccggcatcgcccgcatcatcccgtcacagaaccgacaactgatgcatctgctgatgaatgaaaccggcacctcgccctgttttatctggcacaactcaccgccatcatgggcgcacgctgacagctttcaccgcctggccgaagccattcatcaccatcaggtcgtcagtctgctgactggcggcgtccgccacgacaccctcgagccttaccgtctgatttaccggcatcagcactggtatctggttgcctgccagggcggaagcctacgggtgttccggctggaggaaattatctccgtctcactctcagagcagaccttccgccaccggcgcgaaatcagttcactcattaccgaagagggctttatccgcgcacttccccattttcgctttatcagcgatgtccttcgtacttttcaggaatga

SEQ ID NO: 159729 - DNA, 297 bp, Enterobacter cloacae
atgcattgtccgaattgtggttcacccgacatccggctgcgccatgtgggtaaaaagacaggtggggtgattggcgcaaccgccggagggctggccggtcttgaaggggcctctgccggggcactgatcggctcagccgtccccgtggtgggcacgctggccggagggcttattggttttctgtcgggcgcctgtgccggcgcagtggcggggtctgttgcaggagagaagctggacgggacgatatttgatgaatatggctgcacgcgctgtgagcatagcttcaacgtgccttaa

SEQ ID NO: 159730 - DNA, 969 bp, Enterobacter cloacae
atggcaatacattacaacgatggcaggcaaacacccgttaaaaatcgtgatgtccggatctgcgggttttatcttgactggttaagcatcaataaaaacatcagaacagatggcgttgacaggcaaaatgcagaaagctgccacaaggccgtcaatcagctcatcacgcaccacttttccgataaagaacaacaaaacagtcttctggctgaaatgaatgccgcctgtgacgaaaatatcttaccggctgaatatttcgactggcttgaacgcgatgaacgggccgcattctggttatggtgctatatctgtaccgcaagcgattatcagctgggtatttccccatcgagagatgctcaatttggtcagaactggtatcagtcccttaatctgagtcagtccccgacaaatcaccaggaaagaattcgtcttatcttcagattctttgactggataattgttccggtgccaccggttaatcacctgaaaagtcaggttatggacaggctcaaaaaccagtggaaaataatttacagcaaacccgtcccgcttaaatggttaccagatgaggaagaagcggtactgtgggcatggaacagtcttaaatcgatacaggaagaaaaaaatgctcccacaggcggattctcatttagcctgttaacgccgggaatgactacctggtttacaccactgagtcattctgagcgtaatttagccctgcgcgccgcacttgatatctgggacgatgcgccggatacaaagcgcttatttatgctgaatctgaataaagcctggaaccagcaaaaattacgccagtcccgtaccgataaaaaagcactgaacacgtatctgaagaacgaaaccaaaacacgactggacttcatggctgaacgcagcggggttcgtatcagcgatatgctggaaacgctgattaatgaccattaccggaaaacctgtggtggagagtaa

SEQ ID NO: 159731 - DNA, 204 bp, Enterobacter cloacae
gtggcgtttaaggtcagctgcctggatgaggcgacagtgggtgaagcagtcattccggggccatatgaagcgaacgatgattaccgggtggctattgatgatggcggcgtgttggttgaactgattgaaaccacgctcagtggtgaggaacgcagtatccgggcaggggagtctgtgttgaaatccagaagtgcacgagggtga

SEQ ID NO: 159732 - DNA, 570 bp, Enterobacter cloacae
atgagttacacctaccattctcactggcagcaacgcatcgctgataccttccactgtgcgctgaacgcctatacccgcgtactggccctgcgcgttgacctccgtctgccggatacaccagccgccaccgatgctgccgtgatatcccgttttactgattccctgaaagcccgcattgacgcgtactttcagcgtcatcgacgcgaggggaaacgtatctggcccaccacgctgcgttttctctgggcgcgggagttcggtgaaatcaaagggaagaagcactaccacgtggtcctgttgctgaaccgggatacctggtgcggaccgggggattaccaggacccggactcgcttgccgggatgattaaacaggcatggtgcagcgcgctgcaggtggatgctgaagctcacgccgttctggcccgcttcccgaaaagcccggcgtcctggctgacacgcgaaaacgacacgcagctactgcaggcactggcgcaggccgcttatcttgccaaatgcgaaaccaaagtgaccggtgacggcgagcgtaactttgggtgcagccggggctga

SEQ ID NO: 159733 - DNA, 267 bp, Enterobacter cloacae
atgatgacaccgacgacaaacaacactcacactggcaccactgtactgctgtcagcagaagacccgcttatcgatatggtttttatcacgacctgtaccggcatgaccgacaagtggttctaccagctgattagcgacggcaaatttcctaaacccattaaattagggcgcagttcccgctggtacaaaagcgatgtggaaacctggatgcagcagcgcattacggcttcacgcggcacctggacctggagcggggctggagcatga

SEQ ID NO: 159734 - DNA, 423 bp, Enterobacter cloacae
atgtatgcaaaatcttttatcgctctcgacggtaatgggtgcctgaccggtgccagaaccgcgcagactgcaccgtacgaccgctattgctgccatctctgcgacagcgtcctgctgtatccccctgaatacgacactgaacgtccctggtttgaacaccggcacgacaggctgacggagaacgggcgtgaccactgcccgtatgtcaaaccggcagcgaaagagacccgccatatccggcagctgcaatggtatgtaccggatgcccgtccgctggtttaccgcgccgactggcactgttctggttgcgacagcaattaccacggtgagcgctattgtcagacctgccgaaccggcgaatacagccagcaatatgctgaggtgactggcggcacaccggaggtgacgatatgcgcatactga

SEQ ID NO: 159735 - DNA, 420 bp, Enterobacter cloacae
atgcgcatactgaaatgctatctcgcgaatgaggcttccggtcgctttgtgacggcggatgatgccgcgagagcgtcaggcggcgtatggacctgtgcgtcctgcggctgcgtgctgtacctgatgacggggttcggtgagaagccctggtttgaacacgaccagcagacggtggctgaacatgtgctgatgaactgtgcacatctggatccggaggtcaaagccgaagcctggcgccggaaactgcgccgcattatcaacgggctggacgcgccggtgatgtcgcttgcctggtactgcgtatggtgcggcagtcattatcatggcgtgaagtactgcacccgctgcatgaccggtatctacagcattgaggaggcgaactggcggatgaattactgctgtaacacgctccccggataa

SEQ ID NO: 159736 - DNA, 369 bp, Enterobacter cloacae
atggaccagggattaacaccgatggaattcaacgggatacgtcagaatctggagagcatctccgatacgtgggccgacctctggacgggggattccgtcatactcccggcgtgtggcaccttcccggcgaaacggcttaccctgagtcccacctcgcgtgttatcatcggccagcgtcgaagtcgctacccgaatgatatcttcctgtttcagagccattccctgcgggtgaaagtcaccgccagacccgttaccgtgattgcgttcaacatggcactcaaaaaagccgcgcagggaatcactcataaaactgtcagcagtaaaagtgcattgcacgtcagcctggtgaggtggaataccgcagagtaa

SEQ ID NO: 159737 - DNA, 204 bp, Enterobacter cloacae
atgagtaatattccttttaagtgtccggcctgcggttatgacctcatcgtacacagcggcacagaaatcagtgatgtggacgataccacgggtcccccctgcttgcgttgcgggcacaccgtcagtaaggatgaacttatccggcaggcacgtgaatatgccgccgctctcgtcagcagtattcttaataaactgcccggttaa

SEQ ID NO: 159738 - DNA, 3405 bp, Enterobacter cloacae
atgaacatgaatccagggtattctcctgagccgtcacgcactctgtacctgacggcctgggtaactcttttttttcaggtcttcttaccgttaactgtcgccttcagccctgtgtttgcacgagcagatacgtctggccattttttttcagagggatatgaccaccagaggtacgacacgaaaccgtatacactgaaagaccaggaaacagtctcttccgttgccagacaatacaatattactcccgatgagttacggaaacttaatcagttcagaacgtttgctcatggcttctacaacctcagggcaggagatgagctggacgttccctcatcccctgccaccggaaaacaaacagcaaaaacagccgccgcgaatactgatgatacgcaacttaagcaaatggctggcctggcatccggaacgggcgcgctgctgacagaggcacatgacagcgatgccattacatcccgggcgcgtggcctggccaccagtgaggcagggagtgccgccactcagtggctgaatacgtttggtaccgcacgcgtgcagctggatgcggacaaagatttttcactgaaaaactctcagtttgattttctacttcctcttgctgactctcctgacgacctgttttttattcagaacagccttcatcgcactgatgacagaacgcaggctaacctggggagtggtatacgctggtttgcgaatgactatatgctgggtggaaacacctttattgattatgacctttcccgtgaccatgcgcgcatggggctgggagtggagtactggcgtgattacctcaaactgggggcaaatgactatcttcgtctgacaggctggaaagactcaccggacatggataattatgaagagaggcccgctaatggatgggatatccgtgcagaaggttatcttcctgcatatcctcaactgggcgggaaactgacatatgaacaatattacggtgccagtgttgctctgtttgataaagataatctccagaagaatccgaatgcagtgacttttggccttacatggactcccgttcccctggtgacgttcagcgccgatgagcgacaggggaaaggcggacaaaatgattcgcgcataggcctgcagctccagtggcggccgggcatgtcgtggtcacaacagctttcgtctgatgacgtatcttccctgcgacgcctcagcagcagccgctatgattttgtagagcgtaataatgacattgttctggagtacaaagagaaggatggcattgtccttaaaactgccacagcactgagcggttatatttctgaaacaaaatcgctgggggtcagtgttaaatcgtcggacggggttcaggggattgagtggtctgcgcctgagcttcttgctgacggggggaaagtcatttctgcgggaggcaataactacagcgttattcttccgtccgaccctgcaacagaaggaaggcattataccatcaccggcgtggccattgaccgtaaagggcatcgctcttcaccggcgtacactcagctaagtgtgaatgcaccacagataagcacatcctacagcacgttcacccccgcggacagtcagcttgctccggatggtactggtaaacaaatactgacccttgttcttaaagataatcagcagaaaattgtcgatgaacccgcgacgaatgtaaaaatgacgactgccagtaccacatccagccagtcttcagttgcggcaacactctcatccgttgtctcacccgtcacgcgtactggcgcaggcacttacattgttacggtaaccgcaggcagcatgcctgaaaccgtcacgctgacgccggtcgtggaaggggctggcctggatatgcatgcccggatccatattactgatacaacgccctcatccagaagccagtttaaggccggcggtaatgctcaggctccggccgacggaagttcgtccgtcagtctgacctaccaggctctggataattctggtcgtccggtgagtggtgttgctgatagtcttacgtttgttgccgccgacagtcatggtaatccagcggatagtagcagcgtcatggtggaatcaataaaagaaacaccggcagggagtggcgtgtatatgtccagcctgaaaggtacgctggccggaaagtacaatgtaacgccgcaatttaaccataaacaggaaggggaagccgttgaggtcacccttacggctgacaatcacagtgcccggattgcctctggcgatctggttgttgtgacgaataatgcagtggccaacggcacggaccccaatgaggtcagggcaacggtaacggatgcacagggtaacctgctgtcggggcagacggtgagttttagtgttgacaatggcgcggtgctttccgcttccacggtggacaccggagagggtggcattgcagccgtaacgctgaccagcaccacggcaggagtaagtcatgtaacagccagtattaacggcagttcacagatagtgagcgtggactttacggctgaagatgcttttattttcactggtggcctgactattgtgaagaataatgcagcagccaacggcacggaccccaatgaggtcagggcaacggtaacggatgcacagggtaacctgctgtcggggcagagggtgactttcagggctgacaatggcgcggtgctttccgcttccacggtggacaccggaggggatggcattgccgccgtaacgctgaccagcaccacagcaggagtaagcaatgtaacagccagtattaacagcagttcacaggtggtgagcgtgagttttacggctgtggagcacgatgcagaatttgcatcacttacatctgccggggagaacattgctgtcagcgccgggttcccgaccaccggttttgatggtgcaaaattcaagctgaacttaccagccggaattcagacgggtgattttacctggtcctcgagcgataataatgcggtttcggtgaatgctggtgaagtaacgctcaatagcacaacacacggcgccgttaccatcacggccgccccaaactcaggcaatggggatacatacagctacaccttcacggtacaacactggttcacccatggagcggattttacctggacatccctggacaaggccacaagtgactgtgccgcacagggcggtacagtgcctggccgtggattattaaccaacggttcagtgggggcgcagggggggggtactacaggtaaggttggttcgctttttggcgagtggggaaatatgtccactggttacgcctggccagaggatgtatggtctcaggagggcgatgacgttgatttatattctggctggtatactccaggtgtaagtcaggcaggcgcagtagcctgcgtcagaaatacttaa

SEQ ID NO: 159739 - DNA, 630 bp, Enterobacter cloacae
atggcagacctgacacatctggcatggtgcgcgctgatggcgcttcgccttgcgcagcaggaaggccaggcaaagtcatccctgaccattaacacttttctggtccgctggctggctgatgcgcagagacaacaccggtttccccgttccgtggcagcggataatgacagcctgttgcgcctcggacgacagaaaggtcccgccgcgggtcttgaacaacgtctcgaagacctcctgaatgcctgcagtaacccggtttcgcagccgtcggatttgttgcgcctgacacaggcgattgagtacctgaaagcacagggctgggtcaatgcggcggtgtcagatgaagaatgggggtcaggctctctgtataccgaatatgccggggtatctgccttgctggtgagaaaatctgagctggtgcggcagtttacggaagacggcagactgacaggggaaattgagtttattgtggtcggggatggccgggtggtggctgaagtgttaagtgggaagagatttaactgtgcgcttcgtgaacggcattccggacggggtatgctggcactgctgtcttcatcagacaccttcgcagatacaatggatgctgagaaaaagatgaaagagagttag

SEQ ID NO: 159740 - DNA, 786 bp, Enterobacter cloacae
atgaaatcgttaagaggaaaaacagcgctggtcaccggtgccggaagtggtctgggtaaagatattgctcttctgctggcccgcgaaggcgctgcagtgggcgtggccgatattcatttgccggcagccagggatgtcgtcagtattattcatgcgtcgggaggagaggccctcgccgtgagcatggatgtttccgacgagcatgagacagaggcgagcactgcaagcctggtcagccagttcggcagcatcgatattctggtgtctaatgccggcatccagattgtcagcccggtacatgactacacgctgacagactggcgcaaaatgatggccattcatctggacggggcctttctgaccacgcggacggcgctgaagcacatgtacgctcagcagaccggggggtgcattatttatatcggctccgtgcattcgcatgaagcctcccccctgaaatcagcctatgtgactgccaaacacggtctgctggggctggcgaaagtggttgcactggaaggggcggcacatcaggtgcgtgcccatgtggtctgtcccggttttgtcgaaacccctctggtgaagaaacagatacctgagcaggcccttgaactggggctcagcgaagaggaggtggtaaaatcagtcctgctcgccggtaccgtggatggacaatttaccgcttcttcagacattgcgcagactgtgctttttctgaccaccttcccgtctgcagcactgaccgggcagtccatcacggtcagtcacggatgggggatgcgctga

SEQ ID NO: 159741 - DNA, 1086 bp, Enterobacter cloacae
atgatgaaactccgctttgtggcaggaatgttgatttcctgttccttcagtgtactggcagccggggggcctgctgacgcggttatacatgaccagcaggcccgctatgaagagtcatggaagacggcgaacggcgcgctgacggcggtaccgccggcaccactggaaacgtatctggctgctctgcctgttgccgccgatgtaccggtctatgactcactcagcagtcgtgacgggctggccagtctgacgcagaagtacgtgacgggccgtgataaggttgcccggatcattaacaccgatgtcagtctgacagacagaagcatccccgtgcgcatttacagcccgtccccggataaagcggcagatgtcattgtctttattcacggcggggggcatctgagtggctccgtggacgtgtacgacccgattgcccgacgtctggcggcaactagcggggatacggttgttgccgttgagtaccgccgttcgccggagtccccctatccggcggggctcgatgatactcgtgacgtgctgctgaaagtgtattctatgcttgatgaacagcacattccgtatggcagacatctgactctggccggtgacagtggtggtggcgcattcagcgccacactggctggtgaattccagaaaacacaccccgggtacatttcccgtctggtgcttatttatccaagtctggactacaccctttcctggccttctgtcagggaaaacggtaacgggaagctgctggatgaaagcaaggttgcctggtatttcagtcagtatttccgtcataacgaagatcgccatgcgctttcccctttgtaccggccggtcacccgggcttttccgccgacgctggttttcagtggtgggttggatccactgcgtgacgagaactttgctttcgtcgcccgcctgaaagcagagggtgttccggtaaaacacgttcattttccgggaatggtgcatgcattcctgatgctggataatctggcacctcagcagaatcaacaggtgtatacggacacggcttcattcattgcatccgggtcagataagggcgttaacccgtaa

SEQ ID NO: 159742 - DNA, 918 bp, Enterobacter cloacae
atgaagggattttcacgttcgggttcacttatcaccacagcgttatttctggcagtctctgtcacctgggggaccacctggatggcgatgaaaattgcactgacctctttcacacccgtactggcaaccgggctgcgctttctgattgcatctccggtactgattgggctcgccagagccggcgggcatcccctgttgttccccgcaggcaaacgtcgctttcagtgctgccttgccctgttttacttctccgtacccttctctctcatgatttacggcgaagaaaccgtctcctccggaatggcatcgctgctgttttccgtgatgccggtcgccattctgtccgtctcctggctcctgaccagacagggggtgaaccctttacagcttgccggcacggttatcgtgatgctgtccctggcaacgataatcatcagtgaaacaggcacagcagagattcaaagctggaaaggggtggtcgccatactggcggccgtaggctgccatgcgttcatgtacgttttatgcaaaaaacactgcgccggcatctccgttctgacgagcaatgcccttccctgtctgggggccgcatttattttactgtgttctggtctgatgcaaccccacgcgcattcttcacctgtagatgcccgtgccgttgctgctgttatttatctgggagtcgtggccggtattcttggcatcatggcgtattttcagctacagcagcgggtcacccccttcagggcctcaatggtctattttgtgttcccgctgattgccctttccctggatgatatcctttccggccagaccatcgctccgctgtccgcactgatgattatcccttttctgggggggatctttctggtattgcgtccgccgcaacgcctgacacgactcagacagccggaatga

SEQ ID NO: 159743 - DNA, 606 bp, Enterobacter cloacae
atgacaaaacaaagacgctacctgacacagggtgaagtggagcagctgctggaggccgcacggggtggcagtgccccggagcgggactactgcctgatactgatgagctttgtgcacggctttcgggtgagcgaggcccggcatctgaccctatcggatatcgacctgcgggagggctgcctgtacatccaccgcctgaagcagggcttcagcaccacccatccgctgctggccagggagatgaaggcgctgaaggcctggctgaaggtgcgaaaaggtctgaaaggggcagacacggactggctgttcctgtcaaagcggggtggtcccctgagccgtcagcgtatctaccagctcattcaggcgctcggggaaaaggcgggaatttcggtatgttcgcatccgcacatgttgcgacatgcgtgcggatttgcgttagcggaccgcggcgtggacacgaggctgattcaggactacctgggacaccgcaacatcaggcataccgtgcgttacacggccagtaatgcgggtcggttcgagggtgtgtggcggttaaaaaacaggcaaaaaaagttacacttaggaccaaactgttatctaatctag

SEQ ID NO: 159744 - DNA, 609 bp, Enterobacter cloacae
atgagaaatctttttaaaaacacagtattggccaccttgatggctgcggggatatcttcggcaatggctgcaggtggaagtggcgctcaggtgtttgttcatggtgacgttaagcctgtggcctgtacgatgggggcgggtgccgacggcccgaaagatgtggatttgggggggtgggctgtcagcgacttcaaaactggtaccggcgattatgccaacttgtataccgtagcagagtcaaagcaagtgtttaccgttaccgcaacaggctgtagcggtgttgggcctactgagaatggtaagctcaatctggtcattgatgagagcacaccaatgagatccacggaaaagaaaatttttggcgatgcagcaaaagccaacggaacgaccgcaggctttacgctggaagctagcgataacggtgttgatgtacagaggctcttaaaagcaggcgatgagattgtgcttcataagttcacatccggtgaagacatgaatgcggcaaatggctcaagtattaatttcaccactatgatggctgcagacaatcccaccccgggagcgggacacgttgaagcgccggttaccttctcggtcaactacaagtaa

SEQ ID NO: 159745 - DNA, 774 bp, Enterobacter cloacae
atggagagtcgatggatgaattcaggtgatggtgtggcggatgtacggcgaatatcctttggatttctgtgctccgcagtagcatcatttatggtgacgcctgcgtttgctactggtattggtgtgggggctgtccgtatcatttacgaagccggtcatgggcaaagccttgttcctgtcaccaatacggcggcaggcccctaccttgtgcagtccagggtgtcacagacgcgtggtgggcacgaggcgactcctttctttgtttctcccccgttgatgcgtattgaagggggggcaaagtcggtattgcgcatcactggcaatacgcagtcactgcctcacgatcgagaaagtcttttttatttgactgtaaccggtattccttcatccaacccactggcgcgccagagcaaaagtggctttatgtccggcagcctgaattttgcgtttgcgacctcgctgaaagtattttatcgccctgacaatttactaacaacagaggaacaggcagtgacaagtttaaaggcggtccgggttggcgatggcgtgagtattgaaaatgcatctccatactacattacctttaatgacctgaaaattaatggtcaatccgttaaattcggcaagggagggccgccagatatgatttcgcccttcagttctcagacatacccggcaggccgggcctatccgttgaatcagaccggtaaagtgacatggcaggccattaccggtccgggttttccggtatcatcaggcacgatcctgcagtga

SEQ ID NO: 159746 - DNA, 366 bp, Enterobacter cloacae
atgataaataccggaagaaaatggttaatgacatgtttactggtgaggatattacctgccactctattctgttcttcatctgtgctggctcttaacagtgagacaggcaattttaaggcagttattcagccggggacttgcagcgtgacgctgaatggtgggcagacaactgtcgatgtggatttgaaaagtgtgagtatggagaatattactacagccaatatggcgctgctctcttctgacgcacagccacaaactctggatgtcagctgccttgggtatcctggaacgcagtcaaagccctcattaatggtctccggtaatactatcggtaccggtaccgatagtattaccggagaccattaa

SEQ ID NO: 159747 - DNA, 366 bp, Enterobacter cloacae; identical to SEQ ID NO: 159746

SEQ ID NO: 159748 - DNA, 774 bp, Enterobacter cloacae; identical to SEQ ID NO: 159745

SEQ ID NO: 159749 - DNA, 609 bp, Enterobacter cloacae; identical to SEQ ID NO: 159744

SEQ ID NO: 159750 - DNA, 606 bp, Enterobacter cloacae; identical to SEQ ID NO: 159743

SEQ ID NO: 159751 - DNA, 918 bp, Enterobacter cloacae; identical to SEQ ID NO: 159742

SEQ ID NO: 159752 - DNA, 1086 bp, Enterobacter cloacae; identical to SEQ ID NO: 159741

SEQ ID NO: 159753 - DNA, 786 bp, Enterobacter cloacae; identical to SEQ ID NO: 159740

SEQ ID NO: 159754 - DNA, 630 bp, Enterobacter cloacae; identical to SEQ ID NO: 159739

SEQ ID NO: 159755 - DNA, 1140 bp, Enterobacter cloacae
gtgacgaataatgcagtggccaacggcacggaccccaatgaagtcagggcagcggtaacggatgcacagggtaacccgctgtcggggcagacggtgagttttagtgttgacaatggcgcggtgctttccgcttccacggtggacaccggagagggtggcattgcagccgtaacgctgaccagcaccacggcaggagtaagtcatgtaacagccagtattaacggcagttcacagatagtgagcgtggactttacggctgaagatgcttttattttcactggtggcctgactattgtgaagaataatgcagcagccaacggcacggaccccaatgaggtcagggcaacggtaacggatgcacagggtaacctgctgtcggggcagagggtgactttcagggctgacaatggcgcggtgctttccgcttccacggtggacaccggaggggatggcattgccgccgtaacgctgaccagtaccacagcaggagtaagtcatgtaacagccagtattaacagcagttcacaggtggtgagcgtgagttttacggctgtggagcacgatgcagaatttgcatcacttacatctgccggggagaacattgctgtcagcgccgggttcccgaccaccggttttgatggtgcaaaattcaagctgaacttaccagccggaattcagacgggtgattttacctggtcctcgagcgataataatgcggtttcggtgaatgctggtgaagtaacgctcaatagcacaacacacggcgccgttaccatcacggccgccccaaactcaggcaatggggatacatacagctacaccttcacggtacaacactggttcacccatggagcggattttacctggacatccctggacaaggccacaagtgactgtgccgcacagggcggtacagtgcctggccgtggattattaaccaacggttcagtgggggcgcagggggggggtactacaggtaaggttggttcgctttttggcgagtggggaaatatgtccactggttacgcctggccagaggatgtatggtctcaggagggcgatgacgttgatttatattctggctggtatactccaggtgtaagtcaggcaggcgcagtagcctgcgtcagaaatacttaa

SEQ ID NO: 159756 - DNA, 1077 bp, Enterobacter cloacae
atgatgaatacaatagaaattcaccgcaaacaaccaaacataactctagcccagcacatacaaaataaaagactacaacttggaaaagaaatctccaaaaaatacaagatttatctcgacttaaggttctggattttttttagagatattgagcttgggaataataacgatcgagacttaattaatctcctacaaaaaataaagtacttggttgataatggaaaggtagtttgccctatatctgctactgtttttttagaactaatgaaacagaacgatatcgaaacaaggatggccacagccaaaattattgatcatctgagttttggagttacacttatagctagtcatgagagagtcaaacaagaattatgtaatgctacgtattcgattttgggaactaaggacagcatcccaattgaccaattagtatggaccaaactaagttatattttcggcgattaccatccatacgatacatctttcgatgcagctgaagaactgatcattcagaaatctttttttgatcatatgtgggatatttcactcgttgaaatgatgaaccatatcaactatgaaagctgggaacaatttgattggcagaaaacagcagaaatgcttaacttggctaataaagagcataccaatgagcttagaagctatcaacacgcatatcgtattgagttcgacggagtgttaagccttttcaacgagcaattaatccagatattcaaagaggcttacaaggccggatataacaatgatgaaattaataataagaaaaaatcaaaaaatgaaaaacttaaacaatttgcacaattagtccgtactttacatattggtgccacttgtcatgctgcagtaagatgggatcagaaacgccagctcaatggtaatgatcttttagattttcatcatgccgaagcagctttaggatattgtgatttatttttgactgaaaaacctttgaaagttctagtgagtcaagaacatttgggattaagagaattattctcatgctctgttgagtcatcagctagtgaagggctcaagatacttaacatgtgtaaaatataa

SEQ ID NO: 159757 - DNA, 423 bp, Enterobacter cloacae
atggtaaatgacgataaccgtgaaaatacgcctttctgcctgtctttttttgccctgatatcaacatttctgaacagttatgaagttttcgctcagactatgtcatccattctgacaaaacaggatttttccgtgcagatcaacgaccagcctgtcgccttgggcgacagatggacgcctgatattgcccgtaaaattgacgttccggtggaaggctgttttatcggtgagattccttttgatggaacaaactataaattctaccagcatcaaaaggctgggtcgaaatatacagttcttatctctggtgggataaagcagaaagaagcgttgacgattatatcgtctcccaggttacgctggctgcctcagatatttcaacgctgcgtggagttcaggtgggttcaacaaccagagaattga

SEQ ID NO: 159758 - DNA, 393 bp, Enterobacter cloacae
atgaagagggtatggagtgggttgctgttggggatcggcgcgctgcccgccgtggcggcaacgtgcgagcagtcgtcccggcagggcgatgttcagggaaagtttgatgccagcggcgaagtctgcttctccctgcctgaactgggtgaaaattacgtttccgccacgctgaatggcgtgacggatgcgcgcctgctggatgggcaaaaccgccgcatccgcacgctgatcgaaaatggtcctgcggacggggaacacacgctgctgtttgccctgccggtgaaacagaacacctcgctggtgctacacggcgaagccggtaagccgtggcgttttcagtggcggatgaaagagacctctccattaccacgcgtgcagatgctgggccagtaa

SEQ ID NO: 159759 - DNA, 3861 bp, Enterobacter cloacae
gtgggcaacgccagcgcgcagaccggcggttacaccattaatgtggatgccaccgcccctgtcgcaccggcaatcacctcgattgaggatgatgtggggaccgtcaccggacctgttactggcaccaacccaaccaacgatacccgtccgaccttaaacggtacggcagaagccaataccaccgtacgtatttacgacggcacgacgctggtggggaccgtcactgccgatgccaacggcaactggacgctgccgcaaaccagcaccacgctgacggaaggcgcgcataacttcaccgcaaccgccaccgatgccgcgggcaataccagcgtggcttcaccgattatcacgattaacgttgacctgacgccgccaccagccccaaccgggctggcggtgatcaccaacgggacgcaggtcaccggtacagcagaagcgggaagcaccgtcaccatcaccagcagcaccggaaccgtgcttggaacggccgtcgcggacggtagcggaagcttcagcgccaccatcacccctgcacagaccgccggtgaatccctgatcgtctttgctaccgataaggccggtaacgcgggtatcaccacctccgtgattgccccgatcaccacaatcccgaacgcgcctgttatcgccaatattgacgataacgttggcacggtgacgggcaacctgaccaacgggaataccaccgatgacaccacgccaaccctgagcggcacggcgcagccgaacacgaccatcaccctctataacaacggggtgctgatgggcacggtcaccgcgaatgccagcggcaactggagcttcaccacgccggtgctgagtgaaggcccgcatgccttcaccgccacggcgagcaacggctcgggcaccagcccgatttccacgtcgaccaccgtcattgtcgatctcactgcgccaacggctccaaccgggaccttcaacgcagacggcagcgtactgaccggtagcgctgaagcgggcagcaccgtcaccatccgcctggcggataattcaacggtcaccgccacggcggacagcaacggttcctggagctacaccttcctcaataaacagacggaaggtcagacgctgcaaatcaccgccaccgatgcggcaggcaacgtttcgctgcccggctcagcccttgcgccggtggtgccgctctctgccagcaccaacgctgaagaactggcgctgacgaccaccgccacggtgaccaactcgcagtacagcgactatggtttcctgctggtaggcgccttaggtaacgtgctgacgctgctcggcaacgacaccgcgcaggtaggtttcaccgtcggcagcggcggcagtgcggatattgccgtgaacgccaacgccacgggtgccgttctttccctgctcaatacccttgaactggtggtacagcgctttgacgccgccaacaacacctggaccaccgtggtcgataccggacagccgcagttcgctgacctgttgaccctcggcgcgacgggggtgtcgctgaacctgaccgggctggcgaatggtcagtatcgcgtcctgagctacaacactaacctgctggcaaccggctcttacaccagcctcgatgtggcggtgaaagagaccagcgcaggcaccgtgtccggcgagaccagcgttgtcgggaacgtcatcactgacgtggatccaaccgcaggcagcgacaacgccccggcgggcaccaccgtcactacggtcaccaacgcccagggcaccaccaccagcgttacggctgacggcacggtgattcaggggcaatacggcacgctgaccatcaacctggacggcagctatacctataacctgaccaacaccagcgccgccgtcattggccgcacggagaactttacctacaccatcacccataacggcaccagcgcctcggcaaatctggttctgtcgctgggcgaaggcactaccagcagcgggatcgtggccgtggacgataccgcctcgctgaccttcgacaccaccgtggaggcgatcaacaacggcacctcgtcgcagggcggctttaccctggtggggatcaaccttggcaataccctggggctgaacctgctggacgatctggccaacccgatcatttataacgtggaagaaggcaccacccgcaccatgaccgttcaggcgtccgtgggcggcgtcgcgctggcctcggtgttcgacctctacatctataagttcaacaatgcgacgcagaccttcgagcagatgcgcgttgaacccggctggctgcgcgcgccgctgctgggcggcacctccccgcagctgacgttgaacctgcccgctggcgagtacctgttcctgctcaatacggcggcggggatcaccgcgctgacggcctacacgctgaacgtcttgcaggatcatgtctacagcgtggcaagcgtgagcgagagcacgaccggggatgtgctggcggatgatattgcgccagcaggtaccgtggtctccgacgttaacggcgtggcggtgaacagcagcggcctgacggagatcaccggcgagtacggtacgctgcggatcaacgcagccggggagtacacttacaccctggacagcggagtcggcgctgacagcatcagcaccccagataccttcgtctacaccatcaccgcgccgaacggctcgaaagacacggcatcgctgaacatcaacccgaccgcgcagccaatggacgcggtgaacgatgtcagcacggcgatggacgtgaactcggtgcaccgcaccgccgcatactcggataccaccgtcgggtcggcgagctggaacgccgcgctgcttgcctcaacccagggcagcggaagcgggaccttcgtggtggatcctaatactgcactgcataacgtggttctgtcgtttaacgtcgcctcgctgctgacccttaccgggttaacggtcgactggacgctgaccaacggcaccaccaccctcagatccggctcatttaacggcgggctgctgctgggcggcagggcgacgatcaacctgacgggcctcgatctggaagcgggaacctatacgctgaactataccggcagaatgggaccgctgggggtgggaaatatcaccgttaccccaagcgtcaccgggaccagctactccctgtcgcagtttgacgccacgggcacccacaccgttgacggcaatatcttcgacggcaccggctccgcgggcgcgatggaccagctgcactcggtggatacccgtctcagcattaccggctacgacggcgtaaccagcacgctggatccttacaccggcagcacgcaggtaaacatcacgggtcactacggcacgctggcgattgccgcagacggcagttacacctacacactcaacccggggatatcgttctctaccatcaccagcaaggaggtctttaactacaccctgaccgacgccaacggcacccgggataccgcctcgctgaccatcaatatggcaccgaaatttgtcagttcggaacataacgatgtgattagcggcacggcctacggcgacacgctgatttatcaggtgttgaacactacggcgggtaacgccaccgcaggtaacagcacgggtgaccactggacgaacttctccctgtcgcagggagacaagatcgacattggcgatctgctggtgggctggaacggtagcgcgtcgacgctggggaactatgtctctgtttcacaaagcggtaacaatactgtgatctccatcgaccgtgacggcacgggagccgcctacactaaatctacgctcgttacgctggacaacgttcagaccacctacgacgagcttgtaaaccagcaacacatcattacctga

SEQ ID NO: 159760 - DNA, 1317 bp, Enterobacter cloacae
atgaagcgcctgataccgccagacgactgcccggaggaaattgcccgccgtctcgacgtcattcagcagcaccgggcgctcaacgcgatcctcggggttaaccctgacgccatgtctcaggcggaacagcatcagcagcagcgtcgacgcggggagccgatcggctccctgcacggcgtgcctttgatcgtcaaagataatattgcctgcgcaccgatgcccattactcttggctgccgggcgctggcctcacttaacgcgacgtcggatgcgcttgttatacagcggttgcgtagggcaggagcgattatcctcgccagagcgaatatgtccgagtttgcttttgacgtgcgctcgcgaagctcgctggggggcgatgtggcaaacccgcttcgcccgtcactcaccgccggaggttccagcggaggatgcgccgcggcggtggcggcggggatggcggatggcgcattgggtaccgataccggcggctctatccgcattccctgtagctataccgggctggtggggctacggcctgcttttcgccgttcacagctggatggcgtggcgccgctctcgcccagcaaagataccgttgggccaatggtacatagcgttgaagatgccgccttgctgcatgcggtgatccatggtttgccaccggttgcgcttcctgtgcgttcgctgaaaggcgttcgctttggtgtggtaaccgcgttacagggagaggatgaggtacagctggaggtctggcagtcggcgctgcacacgttgcgccgtgccggagcgacgctggtggaggtttcactccccttccttgaagaggtgaggcaggccacctgcctcagtctgtatgaatttcgcgtggcgattgacgactggcttagcaaacagcctggcgctccctccggactgacaagcattgtggactccggcgctttcctgccagagtttgcgccgtttctacgtcagatgctggcgagtaacacgctgaaaaccccgctctggctggcggggcgtcgctttcagcgcctgttgcggcagaacctttgccaggtggcggaggtgcagcgcatcgacggatttgtgtatcccaccgtacaacgattaccagaaagtatggcgaagatgccgccaggctgcgcgccggaactggccgccatcagcggcctgccggctataacgttgccgtgcggcgtaagccgtatcggtctgccggtggggatggagatgttatcggtgcaggagaatgagacggcgctgatggtgctggcgctggcgtgtgagggggcgctgggcgagaagggacagatataa

SEQ ID NO: 159761 - DNA, 306 bp, Enterobacter cloacae
atgaagaattcttcctatcaaaatacaagcagtaaagattttaatatccacgacaagatcagagctactaatactcactggtgtcttcttttttcagcccaacctcatgatgacggttttaattaccagttcagaacaacctgtgtagatggggtagagtttgcggtttacgagcgcattgataatagtttcgtgttagttgatttcttcaagtcctatgatgaagcatgtgatgatgctaaaaaaataatcgatgattacccggacgttaagcggatgttttccgccaatcaattgagatattaa

SEQ ID NO: 159762 - DNA, 513 bp, Enterobacter cloacae
atgattacgtttaaagattttaaaaataagagagcggagttaaagaaaaacagaaatcagtacagagaattaattcgttcctctgtaaatgagttcatcagcacttatatccgctcactggagctacctggggaaacattccagactaatgataatcaaaaccatccttatgtatatgtaataaatgatgatggcacttggcgtcagtctttttttaatcttgacgttgataaggttgatggagccaagtttgatttgtacacagtggttgatgatgaaccgccgctgcctcgccctgtagctacgcgaatcaatgttcacatgatggacgaaaaactgatttatgttcttttggccgacagacaagataacaacgtttctgtgtcaattaatggccctgaagatttgattaagttcagcgaacttgtgaaacagtcaattatttcaaagattgaaagtgagccgttaggcaaaaaaacaccgcaagatgattccgtaaaattatgggattag

SEQ ID NO: 159763 - DNA, 468 bp, Enterobacter cloacae
atgacagccaataaaccaatgaccggcgaacagctggatgaactgatgactattgctgtcaacatgcaacgagatactgaaaaggtgagtgaccgccctgctgctatgttcgcttatgcggtgcaggtagctgtgcttgaactgcgtaaggttcgtaatgaagctgcggcgctggcagcggaaaatgcggggattaaagctgcgattgacgcaactatcagatggcagcaatcaaccgatccggagaatgtcgaaagcgttcgaatgctggtcgacgttaaaaccccagcaaccgaagttatcctggctgatgtaatggcgcagggtgtggagatgtttgccgcacataagcgagaacgacagcaggctctgcgtagccgaagcatgaggatgtctgaagaggctgctggcatggccgctgatgctgagaacttcgccgacgagcttcgcaaaggagtgcagtcatga

SEQ ID NO: 159764 - DNA, 672 bp, Enterobacter cloacae
atgtgtggacgatttgcacaagcccaaacccgtgaggaatacctggcctaccttgacgatgaagccgatcgcgacattgcatatgacccggagccgataggacgatacaacgtggcgcccggtaccaaagtgctgttgctgaatgaacgcgacgagcagctgcacctagatccggttttctggggctacgcacctggatggtgggacaaatcgccattgattaacgcgcgtgtagaaaccgcagccaccagcagaatgttcaagcctctatggcagcatggccgggcgatctgttttgcggatgggtggttcgaatggaagaaggaaggtgacaaaaaacagccctacttcatccaccgtgctgacggtcaaccgatattcatggcagccattggcagcacgcccttcgaacgtggcgatgatgcagaaggtttcctgttagtgacgtctgcggccgacaaaggtctggtcgacattcacgaccgccggccattggttttgtcaccggaagccgcccgggagtggatgcgccaggatataggcgggaaggaagcggcagagatagcagccgacggcgctgttccagccgacaaatttatctggcacgctgtgacgcgcgccgtgggcaacgtgaaaaatcagggaccggagctaatcaaggcgacacaataa

SEQ ID NO: 159765 - DNA, 558 bp, Enterobacter cloacae
atgttttgcgaagaaagagtagctcagatagctgcctatctactttcgaaagaaggtggacgcatggcatatctgaagctcatgaaattgatgtacttatctgatcgtctttcgatggaccgctttggtgaacctttaacaggtgatctgatggtcgcgatgcctcacggacccgtcttgtctcgttccttggatttgatgaaaggagcggctaaaggtgatgaaggctggaataactggatcacagatgctgaccattatgatcttcaattgcaggtacgcgaaattcagcgtgatgatcttgatgaacttagtgatgcagacctttccgttatagaccgcgtttatcaagatttcgggcatatgggaaaatggcaaattcgagattatacccacgatcactgtgccgaatggtgtgaccctaaaggcggtgcctttacaattaatcctgaaaatgtgtttcgcgctcttggaaaaccggaagaacaggttagacatttagcggacagaatgagagaattctcagaacttgataggatagccagtgggttgaaatga

SEQ ID NO: 159766 - DNA, 228 bp, Enterobacter cloacae
atgcagcaagatttagaaatgtctatctataatgctctgcgtatgtttgaaggatcatccggtgtcggttcatcttcaactgctaatgaaattatcagggttgttaaggcatattatgctcagggtaacgagcaagataagcgcgatatcctggcaaggctcgagaaactccgtaaagagcctggtgtgccgttcccaatgaaccttcagcagattctcgaaagttaa

SEQ ID NO: 159767 - DNA, 198 bp, Enterobacter cloacae
atgcttgaaaattatttcaaaagtggtgcaattcagactgacgaaaaaacgcagcgcttattagcagttcaggctgcactcgagatagctaaggcctcagctagttcaggaggcggtgtaatgcatagcgatttagaccaagctgctgagcgcattgggaaactggcggatgcaattcaggcagccatcaaaaaatag

SEQ ID NO: 159768 - DNA, 192 bp, Enterobacter cloacae
atgagtaattacaaagttggcgacaaagtaagattgagatcaggcgggccagtaatgacaatccatgagctcgatgtgcggcaaccggtaacctataggggaaatatgcgctgccaatggtttgccgggaaaaagctcgaagaaggttattttcctgatgaatccttagaggaagtcggagatgacgattaa

SEQ ID NO: 159769 - DNA, 273 bp, Enterobacter cloacae
atgacgattaataaggaacaaacagtcctttggatgctcgaacatcttcaaaaagacggctgcctatatcaagatgatgtagtagattatctggttaggactaaaagtgaagtcctattaatagaaaatgccgacggaaacttagccttgagtcgtcagattcttaccttgtttatgaaacatacagcagacgatgttgtttgggttaaaccccagcgttattggcgctatcgtgtcgctgaggacgaacctggccgtgaggctcgcggttaa

SEQ ID NO: 159770 - DNA, 471 bp, Enterobacter cloacae
gtgatcggcgcactggttaagcgttactggttgcagtttgtggtgattacgttaatcgttgtgctggcgttcttcgtaaatcactaccgcgacaacgccatcacctacaaagaccagcgcgataaagccactgagaaactcagcctggcaaactccaccatcaaagacatgcagacccgacagcgagatgtcgctgcgctggatgcaaaatacacgaaggaattagctgatgctaaaaagcagcttgatgatttgcagcgttgtgttcgcactggcaagtgtggcctgcacgtcaacgccatatgcaccgcgaacggaacgaccggcgccagcggcatgggcgatgctaccggcccccgacttactggctccgctgaacgggattatttcaccctcagagagcgaatcgtcatagtgacgaagcaggtcggctaccttcaggaatacatcaaagagcagtgcttgaattga

SEQ ID NO: 159771 - DNA, 393 bp, Enterobacter cloacae
atgaaacttcaattacatgggaacaaggttaatcaactcatttttgttgatgccgaagacagaaaattggatacccagtttggccttagttttgaacctgtattcaatgatgagagcgtgcgggagttcaaaatagtttttgattttgaatacattacggaagagggtaaatatcttcgagttgactatcatagtgtttttactacagatagcgacattggagatgatttcataacctcaaagttccctatcatcaacgcgccggcgattgccttcccattcttgagggcgttcgtggctaattatcttatcagtagtggttttcaaccggttcttctccctagcgtgaacttcgttaactttgttgctgaagagatttcgaaaccatcttga

SEQ ID NO: 159772 - DNA, 234 bp, Enterobacter cloacae
atgctttcctttgaagaaagaatgaaacttttggacgcagccttggaagcccatacgccggaaacgcttttagctgagctaagctcatttcctgcttacggtgattctttagcggcttcatatgtagcatgcgtttcagaaaacgtgacagtgatcgaaccttgcaatcttttcgcttcgaatccgtgtgaaagcacctattcctttgacgatgagtacagcgaagctgcataa

SEQ ID NO: 159773 - DNA, 573 bp, Enterobacter cloacae
atggggcgccaaagtcatgtcggttatcacaattgtcgtgatgacggcgggtatgagcatattagagctagcgtgcctttcttgagtggtaatggcgacaatcaatggcttacacagggttactacttttggactgactccctttactgggcagaaaagtggaatccagggaagagggtcgctataagtgagttttcaatctcatttagccacgatgaagaactgctagacttagtaggcaacactgcacaaatctttgagtttcagcgtatgcgcgaaagagtcgcgagtgggttacacctcaaagatgtcagcaaagttactgtaagccaagttattgcgtttctgagagaactagaacgacaaccaaagacagcgggtatattcccctatcttgctataaaggctcaggataacgcaaaagttgggttctttaggcgcatgtcattcatcgccggtcgtcgtgaggatttatgccttgctacgagacaacagatgtgtgtttttgctcatgctcgagatgcaattacctttaaagggtttgtatctccagatgagtacaaaaaccgataa

SEQ ID NO: 159774 - DNA, 249 bp, Enterobacter cloacae
atgaaagacttgaaagtaggaactctatgcctggttattggcggtaaaaatattggtagaggagtgacagtaataaaaattgatacttctggtgatgatgagtatccgtttttgtgtcgtgcaacagaaggaaagcttgatggaggtaatcaaggtttgtgggattgcttatggtttaaattcaatcagcttttgccgatagatggcgagactgaagtgaatgaaaaattcgcggaggccgcccaatga

SEQ ID NO: 159775 - DNA, 234 bp, Enterobacter cloacae
atgaaagcacttgataaagcaataagcattgcagggggcgcaacccgtttagcagaaaagctcgatgtatcttcaatgacggtaagccactggcgtcaccgtgaaaatggagttgtaccggctaaccgtgtcattcctatcttcaatgctacaggtgtaactccacatgagttacgccctgacctgtacctaaacccaacggatggattaccggcaccggaagtgaggccgtga

SEQ ID NO: 159776 - DNA, 291 bp, Enterobacter cloacae
gtgagcgcacagtcagtcaacaactggtttgtcagaggtgcgataggaaaaagctcagcaataaaacttgccgatacgttgggtgttagtcttgagtgggttctaggtcaggacgtggatgcaaaggacggtttgagacatgacgaacggagattgttggaactctacaatcaactaccaaacgaagaagagcagcagaacatgttgcggatcgtgtctctgcgcctgaaggagctcgacgaactgtacgagaagtacatgggacgtcggattaaaggtgatgaggaataa

SEQ ID NO: 159777 - DNA, 183 bp, Enterobacter cloacae
atgtttgcaaaagttctcaagaaaatcgtggagaaatctcccgatgtcgaaggcgttgataacctttcagaggcttttgctgaaatcgacgcgaaggagaaggaatttgctgataaaaaagcaaaaataaaagaggaacacacacgtggagcaagactcacaaagcacagattcactatttga

SEQ ID NO: 159778 - DNA, 804 bp, Enterobacter cloacae
gtggagcaagactcacaaagcacagattcactatttgatttcatttacattgataaacaaagggtgagctcccttattgctcaactttacggggctggagtgataacctcagtaaagcagaccacttcagatagtgataaaagtaacaaagccctagaattaaatgtaaaaatcgcaaaagctaaaatcggctttgatgaaacactcacatcatctcaagagcgattatttgatgcctcttggtcgttgcctcttaaccttcttgaccgactgtctgaactggacatgatcaagaatgatttaagcgaagtaaagatcggtgatattgccttagctactggtttaattaaaatttttgatgttgcgatggttcataaactaatgccagcagcaaaaataatagccaggcagaacaaaaacaaaaatcagagtaagaaagagcaacaagaccttgatactgctgagcaaatacttaaggtactccctcagtcaatccagattgacatggcaactgttgacggagaagcagtttggatgactgtaagccctgaccatctgacaatcccgacaggagacctgatgttaaagtatggtccaataattccgggccaatggcatgtactgggaattcttgatgcgcatgcacacgacatattcgaaacacccgatgctccttatccaacgtctgaaaatgaaatacgaaatagtatggatattgttggcatgatggtacgaatgcagatcggaaggccatcctcttcttacggcatcacacccttaatgattttcagaaaaattaaatga

SEQ ID NO: 159779 - DNA, 1842 bp, Enterobacter cloacae
atgcttgaaataaatgcctcacgtatatcgaacgtaattacgttttctgttgatcagaatagtcttagagaagcgaaacaagcgggaaaggatttacagaaatatttccaggccttggctgagcctaaacttagaattaaaactcagaggcaacgtagacagaaagcccgtcagcaagccgatgatgcacgttttaatgataaacctcgtgatacgaaggaaatgaaagcccaacgtgcggcggagaagcagaaagccaaggatgaaaaggccaatctgaaagcgaagcagcagctacagaagcgccaggaagtagccgaacttagacttcgccatgcagggctgcaagtctctgggattaaaggtaaatacgggcttgatcctaagtctcaatatgaagcgttacgtttcatacgtcagcaaacagaggaatttgccaaaggcaatctgaccagtgcccgtatgaacgctactattcgtgagcgtgtcaccctgttacgcagagaagccgcacaacaagcgaaagtgacacaggcacagcgtacccagtatgccgcagcagccactaagctaaaggctcagaagggcgggaatgctcctatcttcggtggtggggtattaggaagccttgcattaactgctggctctctcggagtggggcagcgaattgttgacaaagggaatgaaaatcttgatctggtgagaatgagtgaacgtgtgaaaaccaacccaaacgccataaaaacgatggtggcctggggacagcaacacggtgttgattcagctaatacctcaaaagccgtcgataacatgaaagatgtgcgtgaacgcctcgccatgactgttaacgatgctcaaatgaagaatggcgaatggaaaggtggggatggtggcattacgtcgataatgaacaaatttggatggagtaaggatcagatttccaagttccaagattcaccactcgattttgttcaagctacggtgaatgaagggcaacgccgtggtatgtcacaggctcagattggtactcttatagagagtttaggtgatgacctgatgcactacaccgatatgttcatgaacaacggcgcagaatataacaagacgctgaaacagcttgtcgatagtggtcaaactcttaacgatgagcaaataatgcaaactctgacatatggtgacctgagtgtagcgatgggtaatctcatgaatggcgttgataacagcatgtttacaggctttatgaaaggctttgctgatggtggtgacgacctggtgaagaacaccaaagtgataacagaatctgctggtatgctcggagagggattaggcgacctggctaaacaggtgacgggctttgttggagaaatctccagcgtagtgtctgatcttaacagtgcgcttcgtcatcgcttccctgaatggtttgctgaaaaagataaaccagcggcccaggctctctatgatggtgctgttataggctctgccaatgatgctgcgcagtggatcgctgataagacgggcttcgatacccgttcagtggctccggctatcaaagattggctgggcttaggtaatcagcaagcagggactgcggcgaatcaatataaccttgcaggtgattctctgcgtgattctgcaatgtcactcagcagcaacgtgccagcgtacacgttgaacccgatattcaacctacaagtgaatccacaagtgggattgactctgcaaagtgatgtttctcgattgtctgactatatcgactggtctgcaaaagcgagtgcggattcattcactcgtagccttacgctatcagccttgagcggtcagtcatccacagggggatga

SEQ ID NO: 159780 - DNA, 645 bp, Enterobacter cloacae
atgagcgtgtatcagcgagggatccgccgccgtctggcgccgatgcttaagggcgatcgaaagcggctggccttttgccatgcggtcttgttttcgctgccgggcgtaccggtcatgcgctacggggatgaaattggaatgggcgatgatttagatctggaggagcgttacgccgtacgcaccccgatgcagtgggccggatcgcagggcggcggtttctcagatgccgacccggaaacctttatcgccccaatgattgaccatggtccgtaccgctatcaaaaaatcaacgtggcggattcgctgttgcaccgcaactccctcctgcactgcattatcgatatcgccaatacgcgctcggagtttcctgagatcggcgtcgcgccgtttcgtcttattactatcgacaacgatgcggtactggggatctattacgaaaccgacacgcgcagcattctgaccttcgttaacttcagcgataagcccgttaattttaccgccagagggatccggcatgcgacctggaccgcatgcctggcggacaaacgctacgacgacgcgctggtatgcggcaaaaccgtcgcgcttaacctcagcggctatggctaccgctggttctggaccgatcgtaccgcactgcgctga

SEQ ID NO: 159781 - DNA, 219 bp, Enterobacter cloacae
atggaactttatatttttgaattcttctttttggctatatttagtcagaatagccgatttcccatcgccactactaccacaaacaaatataattttcccatccggagaatgggttataattttttcgaaatctttttccaagtctgttggaatgtacagataatctttgaacttgtttacatttcgctgagaatgttctatctcaactgcctgaggtga

SEQ ID NO: 159782 - DNA, 135 bp, Enterobacter cloacae
atggcgaaggtcaagggctgcggcttctccggccgtgccgtccggaacgccttcaccgcgccggctgatgccgtcgctttaatggcgccacgccgttccgacgtgtcgggtgtgtgcatcctgttcccctggtga

SEQ ID NO: 159783 - DNA, 480 bp, Enterobacter cloacae
atgctgtttaaaacccagctggatgttatcgaagaagacctgaagaaatggcgtgccgggaaaaagctacataagtaccggatattctggtgcgcagcagctataccggccagcatttttctctacggtgttttttatcagcagcctggttttatctttatgggcatggttgtcgccctcatcttgttcgcggcatcgtctggcagaatggacgctcccgacagctgggaaggccgaatcaatcaggcattacagtcccttagcccgatagataaagacgcgttcgaaaaattgtgccgcacagtgaatgagaagagggcaatagagcctgatgacattgctgcgtggctcaaagacgaaaaagaagcgcgtgcgcttttcgagcgtcagcgagatgagcagcaacgctacagcttcactaaatggctggataaacgggagtctggccagaaggccgaatgtaatgaggagggcaaatga

SEQ ID NO: 159784 - DNA, 426 bp, Enterobacter cloacae
atgaaacgcactgtcgcagttttgttgatggtgctttccctgacaatacctggcgccgtgaatgcggcggatacagtatcggttctcaatacgatggtagcagtgaatgcggcgaccacagtatcggttctcaactcgatggcagcccaaaatcgaagcaatcaaattgcccgatttgaagccctcgaacatgaagccctgactcagccagatgcatggaaagcgtatcaccaggtgtctgactcagtccctggggacgcacctaccgaactgcaaaatcgctaccgcagcctcactgtctcactagcaattaaggccgcaatgacctgttctccagaagccctcaagctccttgagcgtaacgatgtgattgagtttcgtgtactccgttcatcgttagtctcagcctgcaggaccgctaaataa

SEQ ID NO: 159785 - DNA, 366 bp, Enterobacter cloacae
atgcgtgatgaagagcttaataacaacctgctcaggagcatgcggatgcatgttgctgactgggagactggccgacccactccggcagcaagcaagtacatgtttttaggttttgtcatgtttcttggtgcaggggggccggtactttcgttctgccactcactgtgggcgctggttttcctgattgtctggctttttctgagtcaatggatatgcaggcgaatggtcccccgctacaacgaaagctgggctgagatattcgacaggaagctttctgcttatgaacccctgaacctttccgcctgggaacacctgaagcaccaggctgaaactgaggggctcacggccagcaacgtcagaaactga

SEQ ID NO: 159786 - DNA, 147 bp, Enterobacter cloacae
atgaagcataaagctgaaattgcactgctgataacaacggttggagcaaccggtgctgctgtttactacgatgccggcgcactcattgtggtagccaccctgatgaccatcggcgttctgtatcgtgtcatcaccttcttcctgtaa

SEQ ID NO: 159787 - DNA, 399 bp, Enterobacter cloacae
atgtcttccaacctggcgcgcaacccatttatcaaaatcctgtatgagtaccgacacgtcgcttttttggtgcttatttatgccgcagaaatgacggtatgggcagttctgaatctgaagggactcggtgacgaagacttttccacctggcgaatcttccttctcgtgagcgtgggtgttatcgccggcagtgcgggaatcttagatgatcccgatgacggatggatggtgtatgcaggagccctcacgccctggctcatcgcgccttttgtcgtcatcgtatatggtttcattcaaatgaacctccagtttctgtctatggaatggttctttacctgcgtactgctcagttttagcctgcaatttttggtcattttccttaaccgcttttccttttaa

SEQ ID NO: 159788 - DNA, 276 bp, Enterobacter cloacae
atgtcactgagacacgataccgccgtgccgtctgtgtctcagcatatgacggatcacaatgttaccaaaggctgtgacgaagccgtgaatcaactctctcagttgtaccctgaaatcgcttcatggcaaccggcgctgatcgccggtgcctggcatcagtggtgcgctgagaaccagcttcagccgatagcgccggaagaacgtgatgaggcgtttcccctgtacctcgtcaggcttatccgtaacagaatggaggagatgaacgcatggcgttaa

SEQ ID NO: 159789 - DNA, 492 bp, Enterobacter cloacae
atgacaaaaacactgtttaccctcacccgcgatgcagggcgggctgccctgtattccttcgtcctcgtcccggcactggtgctgtatgtgtttgtgatgctggcggcatcagacggctcactttcccggcaattcctgacgacttttcatcacctgactgagggggcgcctgccggcaaggtgatggggtgtgttaatgaacatgagatcgcaggacgcttctcgccacctgaacccggagagtcattaaagcctgtgcctcctgccttagcaaaaatcccgcctgaagtgttgtgtcagcgtggccctgtggacagcgattcgtgggcgcgtgcgacagatgcaacgttgctcaacacctggattatctcggtgatatttggctttggagtgtggtttgtattccgaggcctgaacctggccgcccgaaagaaaatttcaccagacacgcattcggttttggcacggcagaacaaggagacacacgaatga

SEQ ID NO: 159790 - DNA, 432 bp, Enterobacter cloacae
atgtcccctattgatgagagaacgctgacagaactcaacatgttgtcgctgcttttcagaaccaaaggggaagtggccctcatagaccaaagtgagatgagtgagtataaggcgaagattgaagagctcaaagaagacactatcgccgcagatttatccattgagatgcgcaccaccattctgcagtaccttaataaaatactcagtgcgattgagagctatcagataacaggtgtagagccgatcatggaggcaatggaatccatcattggccgcgccgcgcttaatgaggaatacagcaaagcgttgaaggacacgggcatcggcaaaaaaattggggatattgtcggactggttgccaatgcagtcacagtggcgcaggggataccattcgtggccacaccgcttctgacattccttggttcaagataa

SEQ ID NO: 159791 - DNA, 138 bp, Enterobacter cloacae
atgaactttatcggggtcttgcgggtttacttgagctgcctggaaaggtacagacagagcttgaaaatcacttccctgataacgggttatctcactggaatgacagagtttctcgtgcgtttagtcagattagcctga

SEQ ID NO: 159792 - DNA, 372 bp, Enterobacter cloacae
atgaaaaatcatatcctttctattagtggagtttacgggataatacgggatcattacgtttcaaacttcccacataaattacagtttcaagcagtagatgcgctcaatggatatattaaaagatataatgaaaatgctttcttaagcaaaactgataacgggaagtatatctttgaaaaccctaagccaactcctaaagatgatagtccatttgaaaatccagcaaaaaaccttgaattttacttatcgcaagaaagcggattgcaaaatttatttcaagataccaatgctatgcatgaatggttgctccagtcaggatttatcaatgcaggtatcgcgaccgaaaaaatgcttttaacacataaactgtaa

SEQ ID NO: 159793 - DNA, 363 bp, Enterobacter cloacae
atgttaaagctctttgctaagtacacatcaataggtgttatcaacacgctcattcactgggttgtgttcgccgtttgcatctacgcattccatacaggtcaggcacttggcaactttgccggattcgttgtggctgtgtctttcagcttctttgcaaacgccaggttcacgtttaagtcttcgacaaccacgatgcgctacatgctgtatgtagggtttatgggatccttgagcgcagctgttggttgggctgccgataagtccggtatggctccaattgtgactctcattctcttctccgctatcagtctggtgtgcggctttatctattcaaagttcattgtctttagggatgcgaaatga

SEQ ID NO: 159794 - DNA, 525 bp, Enterobacter cloacae
atgctgactgatgccagagggcacctgtactggcacatctgcaaggaacttacgggggaactcgcggaatttgacgataacgacaaaatcactggcgggcaggtcgcacagatcaaagagcttgtactcaaatatcagatcccggttgtgtgcgttgaggtgaacggccccggcagtttcgcgggtaaattgctgcgtcaggcgctcaagggtaccgggtgcggcgtgcgcgaagaattcagcattaccaacaagcagaaacgcatcctcgatgcattcgaagcgcctctgtcgtcgcggttcttatgggcgcataccgatgtactggacggccctgtctatgaccagatgcgtgattttaatccggctctgaccaaccagccggatgactttatcgattctggtgccggcgcaatcagtcagacaccagtacgtatcgggaaagtggtcgggattccgaccgggcatgcgcgcgaagattggcagttaagtgacggagatcatctggtcgacgtcgattactaa

SEQ ID NO: 159795 - DNA, 132 bp, Enterobacter cloacae
atgaaaagtcagttctttttaaatagctacggacaaaactcacttaatccgtttatgtcattttttgagaaaaacacgcttcacaaaacctttctgaatctcattaattttaagcagcaatcgatttggtga

SEQ ID NO: 159796 - DNA, 378 bp, Enterobacter cloacae
atgttacaagaagaaaaggatgcgtatgacaaggctattacatcgattgtctatgcactggaatcgttaggatcactgttttcagttcacggtatggaaggtctttatgagctgacaaatccgagttttgaagaacttcaggatacattggctaaaatgaagtcaggcgcggaagaccttaaccatgagatcgagcgtcttgtaactgaaaagcatgatctcgatgccgctggggccagcgtgggcttgatgaatatccgccaaggcatcatgtatgcagaaagtcttttgatggctgttcagcagaaggatttgaagaagtccttagaggcgcatgaacaggtcgttaaccacggaattcaacccaataattggtag

SEQ ID NO: 159797 - DNA, 198 bp, Enterobacter cloacae
atgacattaatgagagagcagcaaagaagaaaccagttaagaaagcagcttaacaaccagaacccggcaaagccgggttctttgtttactgagcctgtaaaccccttgtttcagatttcacgactgttcgccaggttggcctttaaattttactcgggtattattctcggcgattgctcggtcatgaacactgagtaa

SEQ ID NO: 159798 - DNA, 384 bp, Enterobacter cloacae
atgatagagcaggcaattaaaaccgcccttgaacgcctgtctggtatgtcggtttatccgttgctgcttcctgatagtgagcagaacggtgtgacgttccaacgtatctctgatcctgaaattgaaactggcatggtccgtacagggcttatcgctggccgcttccaaatctcgatgtacaaagtgaatgactacaccgggctggttcagctggataaagccatctgggctgaatggaaaaagattacccacggcacacttgagggctatccggttcagtatgttcagcgcggcaatatcctgcaggataaagccacgttgacaagcaaccaggtccagtaccggctaatccgcgattacgtactttatttttatgaggagtaa

SEQ ID NO: 159799 - DNA, 345 bp, Enterobacter cloacae
atgagttctttacgtgctggcgagcttaataaacgcatcagattagagaagctggaaactcagcgaggaccgcttggtgagccactcccgtcaattacggtggatgttgcgactgtatgggcaaaggcagaaaacgtatctaaccgaaaaatccgcacccttgaccagcagcaggtagttgaaacctggctgtttactatcagatcccgtaaggatgttcaaaccgactggaaaatcgtctggggtgatgaggtctataccgtgcgggctgccgactgtagtcagtctgatcgcactgtcattacagctgagagagataaccgccatgatagagcaggcaattaa

SEQ ID NO: 159800 - DNA, 225 bp, Enterobacter cloacae
atgagcgcatttgaacatcaagagttctttcagccgcaacttatctccactagtgaactggctaaaatcatcaattacaaatcccagaccattcgaaaatggctttgccaagacaaactacctgatggtttacctcgtccaaagcaaattaatggaagacattattggttacgcaatgatatttccgattttttgctaactctctcagcgaaaggatatttatag

SEQ ID NO: 159801 - DNA, 363 bp, Enterobacter cloacae
atgcaaaaacgtataacatttagccccaacaagcaatccactatcgaagcaattgatacgtatagccgtataaaaggatattctagatcagaggtgatatcatttttgctaaactcaactgcccctgcattaaataaaataacgttgcaataccatatagctcataattttgaattaacattgggcagcctttttaaagagaaagaaaatataacaacacgaaccgaaccaaaattaactatggaagagtttttttactccgcgtggaatatgcacattcgccacacagatgaagttattgatcaggggttttataaacacaaaataacccgtgatatgatgggcaagagtgaaaaaaattaa

SEQ ID NO: 159802 - DNA, 699 bp, Enterobacter cloacae
atgacaactataggaccagatattgcatatggacgatctgtaagtcatcgaacaaataagcaaagccagggccgctatttagttgaacaaacactagaaggttatgaattacggcaacccctcaatacagggattaatactattcactacctagcctactttcaggggattcaaaaccattttatgtctcctgagatggatccagaacttgccattacaccagagcatcaaaatttccttcaatgctaccaggaactaattatacctctcgaaggctgccaatacttaaaagagttgcttgatactgccataatgttatacatcagccaatttggcgaaaaaaatttaaccacggcattaaagaaattatttatggtgatatattcaccacgggtgaccaatgaaaaaacagttaaagagtcaacattaaacacattattagatagggcccctgtactggactggattgctactagctatacccctgaaatgtgttttcaatggttgaataactatactttcgacattgacattaagaatataggacctgatgataatagtgtcaaaaaacgatttatttaccaagtgttgcgttactttgatattaaagtaagtcatgacacccccgcacaatcattggctaatgaatatcaatacactctgcaaaataaaataataaacttgtcacatcaggattga

SEQ ID NO: 159803 - DNA, 1140 bp, Enterobacter cloacae
atggtgccgaaactgaggttcaaaaactttaaaaagatggaagaaaaaaaattaatagattttgcaccattacagcgtggttatgacctcccagtgagtcagattgagagtggagactatccagttgttttttcaaatggaatattgaaaaaacaccgtcaatataaagtaaaggggccaggagtagtgactggtcgctctggtacaattggcaaagttacctatgtcaacaaagatttttggcctcataatacatctctttttgtaactaatttctttaataatgtacccaaatacgtttattattattatcagcatattgatttctcaaaatttgctactggttcgggagttcctacactcaatcgaaacgatctgcattccttagatatattagaacctgaaatagatgagcaaaccaaaatcgctgattttctgtcctctgttgacgaaagaattacgttactgaaccagcagtacgacctgctatgtcagtataaaaaaggcatgatgcagaagatttttagtcaggaagtgcggtttaaggatgagaatggggaggagtttcctgagtggaattcttgccaattaaaagacgtagcaactcgtgtaacaagaaaaaataaagaaaacaaccaaacaattctaaccatatctggtcgagatggattggttgatcaaatgtcttattttaataagcaaatagcttctaaaaatgttactggttattatttgatcaacaatggtgagtttgcgtataataagagctattcacaaggttacccaatgggtgcgataaaaatgttgactaactatgatagaggtgtggtgtcaactttatatatttgtttcaaattaaatactaatcaatctaacagtttctaccagcattacttcgagagtggtcttcaaaatagatctatagaaaaagttgcccaagaaggggctagaaatcatggcttgttaaatattggggtaaatgatttttttgatatagaactgcaaataccgagcctaaaagaacaaataaaaatttcggattatctctctgctctagacgataaaatcgccgtaaaaaaagcagaactggacaagttaaaatcctggaagcagggtctgctccagcaaatgtttgtataa

SEQ ID NO: 159804 - DNA, 408 bp, Enterobacter cloacae
atgaggtgctggggatttttgaccgtgtggaagaaattaagttgggactataaaaccaataacccatgtagtttcggtaagaagattattatcagcaattttgttaaatacgataaatggggctataacctgaactggggctggcagcgtgacaggctgacggatcttgaacgaatgctcacgatcctcgagggacaatccatccctgacagtcgtgcggatattatccgtcgtcttgacgatcacatccgtgagaacaggcacagtactcattacgaagataagatgttttcgatcaaatattttcaaaaaggaactgcacacatcatctttaatcgaccagacctggtcgataaactgaatgacattatcgcccgacactatcccggaatgctggctgcaagataa

SEQ ID NO: 159805 - DNA, 2001 bp, Enterobacter cloacae
gtgttaattaaacagctggtactgcgtaattatcgggttttcaatggaacccatgttatcgatctggcccctaaaaaacgacagaacgacgataacccccgccctatcgttttattcggtgggttaaacggcgcaggtaaaacatcaatactttccgctatccgcctggccctttatggaaggcttgcatttggttcaactactcaacagcaagagtatgtggaagagcttagtgccctggtacacagcggctcaactttgggtgaacagcccgatgaggcctcagtcgagcttatttttacgtacaacaaaggtggtcaggaggctgaatttaccgttacccgcacctggcaaaaaggtaagcgagacaaactgtccttacagcaggatggcaaactcattgaaggacttggctatgatcagtgccagggttttttaaatgaattaatcccccacggcatagccgacctgtttttcttcgatggtgaaaaaattgcggagcttgctgaggacgaatcgggaaacatcctccgtacggctgtgcgtcgtctgctgggtctggatctaatcgagaagctccggaacgatttaacaattttcgtgaagcgccaacaatctggtcaactggctgaatctcaacagcagaagctgcttgaacttgagaaaaagattaaagaatttgcctttaaaaccgagcaaattcttgaaaaggctgatttcgctaaattgcgtattgacctgatctccaaggaaattgtgcagaatgagacccttcttaacgcacaagggggggcatttgctcaaacaaaaacccaggagaaacagaaggtcgagacgcttttaaaagaaaaagatcgcctggaaaaagcgcttcgtcatgagtgtgatagctcactaccgtatgctttagctccaaaaactctgggtcatttgctagaacagattagtgctgagacgcaaataaaacaggcaaatagcttcgaaaaggaattgaatcaattccttacgcaactaaaaagcgacatttctttccgttcaggaagcacaggcaaaattgctgctgaggctatagaagataactttaaaaaatatcttgctgataaaccaaaaggtgaattgctgtttgacatatctgaacgtgaagcagggatgattcagcaagccatcgaacaggatagtaagaaagcctggcaacgcttcgatctttatcgtaaccaactggcagaggtggaagaacagttagagcaagccgcagcaaacatcgcccgggcaccggaagatgatcagctgatggatatttttgaaagacttcgtgatctggatcgtcaacgtgaagctaagcggcaggagtatcgctcattgcttgaagaagcaaaaaataccaaacaacagcaacttgattgtgctcgccaggtacaaaaggctcacgatgcagcacgcaatcagcatagctttaatagcgcattcaacaatgcgcaagagacaatcagcttgcttgatcgatacagtgagctgttaacgcaggctcgagtaaaaaccctctcagctaactttgaagttgcataccgtaagttagccaggaaagaagatttgcagctgaatgcgcatattaatccacaaacctttgatgttgaactggtggacgagaataacagagttattaaccgtaaattactctccgcaggagagaagcaaatttatgcgatagcgatccttgaagctctggctaaaacatctgggagggatctgccagtaatcatcgatactccgctaggacgcctagattctcagcatagagataagttaatcaaccattacttcccttatgcaagtcaccaagtcgtgttgctttcgactgatactgaagtggatgaaagatattttgttgatcagcttagagatgatatttctcatgcatatgagatcgtgtttaatgctcggacaaagtcatctgcacttaaaccaggatacttctgggaattaactaaggaggtgatttaa

SEQ ID NO: 159806 - DNA, 348 bp, Enterobacter cloacae
  misc_feature (144)..(153): n is a, c, g, or t
atgtccgaaaattatgatagtcttcgtaaaatccttaaagagggtagagagtacggagttggtatgattctctcgactcaagatataactcatttccaaacgggagataatgactattctaattatatattaacgtggtttgtnnnnnnnnnntttgtacataaggtttcaaaaattaagaatcaagatattaaagcaatatttaatgttggtgataaaattagtcaggattctttgatgggaagcattaatactcttgagactcatcattgtttgtatgtcgatggtaaaaaagacattattaagctcaacgattttgctttttggatgttattaaatgagttgtga

SEQ ID NO: 159807 - DNA, 867 bp, Enterobacter cloacae
atggagaggggggttgtttttagcggttgtgaacttcttaaaactgagaacggtgacggttttcgcataggaaagtggattagctccttggagctaaattacctttctctatattgggataggcttgtctcgcctacgaataatattatgcatgctagctttataaacgaggatgaacttattggttgtggtttattgactcgtccaagtttccagcgccacggtttttttgatggtagggaattgccggatttttatgctgaaactcatgctaaaacaattgatgtacttcgcaactcggaaggaaatgttgactggcgaatgcatttcttgaatgatcaaatcaacttaaaacctgatttagcaagagactcagaagtaatacgttttgagcttgccagcctcttaccggttcctcccgcaagtgttgctcttcacgatatacttgaatttaaagagaggcgaaagccagagttgatggccttgcatgaatatcttgacgagatttatttggagattaaacgctctggtgacattaatctccaaaaagcgaaggctctttccaatctcggaaaagcattaagcgatattgaacggctaaatcatgaagggtggagaagtccaataaaatttagtatatcaacatcatttgaatttgaccttactcaggcttttggaagcttcgctggggttgcgcttgcattgaacggcccgcatccatatgacattttaggcggtctgggtactgtcgtatcaatactagggggttgtataaaaataactcctcattttcaaagcgtgctagcaaccggggatcacaaccttgcctatataagtaagggaaagagtgaaggtatccttatctga

SEQ ID NO: 159808 - DNA, 2166 bp, Enterobacter cloacae
atgacagtgaaatataaaacggtcatcaccaaagccggtgccgaaaaactcgcggcggcgaccgtcccgaacgggaaaaaggtgaattttacggcgatggccgtcggtgatggcggcggtacgctgccggtacctgacccgaaccagacaaaactcgttaaagaagtctggcgtcatgcgctgaacaaaatcagccaggacaggaaaaataaaaattatgtcgtggcggagctgctcatcccgcctgagaccggcggtttttggatgcgcgagctcgggctctatgacgacaccggcacgctgattgcggtcggcaatatggcagagagctacaagccagcgctggcggagggctctggccgcgcgcagaccgtgcgaatggtcattatggtgagcgacatcgagtcagtcgagctgaccatcgacacctcaacggtgatggcaacgcaggactacgtcgacgagaagctcgctgagcatgagcagtcccgccgccatcctgacgccacgctcaccgctaagggtttcactcagctaagcagtgcgaccgacagcgcgtctgagagcctcgcagcaacgccgaaagcggtcaagatggcgtatgaccttgcaaaagggaaatatacggctcaggacgcaaccacggcgcaaaagggtatcgtccagctcagtagcgcgacagacagcacgtctgagagcgtcgctgcaacgccgaatgcggttaaagcggtaaatgatgacctgacgaaagtaaaaaacagtctcaggacagcgtcggggaaagatgttgtcacctctcagacggatactacagcgggcagggtgttgactgttggctatggggggcttggtggtacagcccctcggacaaccgtggccgggtcaaatagttatgacaatattccagctggattaccttctggcttctggacgcacgctattgatggtggtccgtacgctcatactcttacattgctacaggatggaggcggaaacagggacgacagacatctgattattccgtcaggcagcacaggcaaaattgcgattcgctgggatgccgggcaaacaaagagttaccagtatttttataccgacaagaataaacctacagctgcggacgtgggtgcggttcctagcgggcgtaaggttaatggtcgtgcgctgacagacgatataaacgttacttctcaggatattttcaacggtcaggcaatcgggctttcgacagaggatttgaacacgctgaaaacgccggggatttattaccagccagcgaacgccaatacctcagccgctaggcactaccccgaaaataacgccggaacgctggttgtttataaaaatgccggagtaacgcaggtttacagggtttataacagttccagaagttataccaggagccagtattcaactggtgcctggactgcgtggacgcctgttgattcgtttcctgttggtgcccctattccgtggccgtccgatgtggcaccgttcggttatgccattatggcggggcaaaccttcgataaagcggcttatccccttctggcggcagcatatccgtcaggcgtaatccccgatatgcgcggatggacgattaaagggaagcctgcaagcggtcgtgcagtactgtcacaggaacaggacggcattaagtcgcacaatcacggggcatcagcttcatcaaccgatctcgggacgaaaaacaccagcgcattcgattacgggacgaaaacgaccagcgcctttgactacgggactaaaacatcaaacagcaccggcgcgcatacgcacagtgtttcaggtacggcggccagcgcaggcgaccacagccacgcccagcgagcatggcgtaacggtggcggcggaaacggtgtttatattgaccgaaacgttttcaataccaatggcaatgtagacacctcatcctcaaccgttaatgccggagcgcacacccataacattacgggtactgcggccagcgctggcgcgcatgcgcatacggtagccgtaggggctcatacgcatacggtggccgtagggtcgcacacacactcggttgttatggggtcgcatacccacaccattaccgttgccgctgctggtaacgcagagaacaccgttaaaaatatcgcttataactacattgtgaggcttgcataa

SEQ ID NO: 159809 - DNA, 711 bp, Enterobacter cloacae
atgaatttatatatattggctgaaggtaaacagacggagaggcgattatatcctgcatggatgaatgtgttatctccttctcttaaaaaagtagattatttgtcagcgatagacagtaataattactattttatcagtggcgagggttatcctcgtatgattgacgtaacacttgtcaatgccttgagggatttgagtgaaaacccaaaaatcactgatttttgggttgtactggattcagagggcgaagatgttgagtccagaaaacagcttgttatgagcaagattttatcatctggtgtagatatttctcattgtgaagtaaatgttatagttcaaaatccgtgtatagaaacatggggattgggtaatcgtgtaattatatcgcccaataaactaagcgagccatttttagaatattataatcattatgatgtacaacaaaatgatcctgaagaaatggcaacgccgccttcttatgaaggatcaattgctaagtatcatgagagttatttgaaaagtatgttgtcgcttagaaacgctacatatactaaaaaaaacccagcctctcttatggagccttcatatctgcaacaactcatatctagggcttatgctgctgacggtcatatcccaagttttaggcttttccatagtttggccactcagcttgaaaataaggcaaattctcttaatagtaatgttgcctga

SEQ ID NO: 159810 - DNA, 1137 bp, Enterobacter cloacae
atgagaataaaatcgctggagacatataattctcacagcaaattgagaattaacaaaattgaatttggttcattgaccttaatggtcggtgcatctggcgtaggtaaaacgcaaattcttcgttctattaataaaattaaatctatagcaaatggcgattcagttagtggattttgctgggatgtagaatttaatgcagaaggcaatgattataattggtctggtgagtttgaagcactcgaggattatgatgatttcacctacggcatgtttaactttgatgatgatgacaaagttgaacctaagattttaaaagaagaagttaagattaatggttctgttgttatcaccagaaatggtgatgatattgtatacaatgacagcaagacggttaagcttgcttctacggttagtattgtgcatcacctgcgagaagaagatgatatctctgctattcataaatcattttcgcgtattgtgcaggtagatgatgatgaaatgcagaaagtttttcctcgtaaaaacaaagagttgtctgaagacgaagatttaactattaacgatattagagaaaaggctttttctttaagcgcaaaactttatttatgtcaggaaaaacaaccggcttattttcagcaaataacaaattcttttgtggaaatattcccgtacattgaaaaaattaaggttgtaaaggtcgatactagtggattccctttctttgtgcattctgtttatgcattgaaagttaaagagcgtgggattgatgaatggatctctcataattcaatgtccacggggatgttaaagacatttgttcaattggcctatttgcatctcagccctacaggaactgttttcctaattgatgaatttgaaaatgggtttggagttaattgtataaatgatattactgatgtattgctcaatcatggtaataaagtacaatttattctaactagtcatcatccatatattattaataatattcctttggatgattggaaaatcatttctagaaaagctggggtggtagataactattctgctgattatttcaatcttaaagaatctaatcacgaagcatttactaagttaattaacttaagtatttattttgatggtgcagatagatga

SEQ ID NO: 159811 - DNA, 1323 bp, Enterobacter cloacae
gtggcggcaaaaaaatacgagctaacaaaggattactcttttcatggtgagttctggcactctccagaggataataaaggcagattttcggcgcgaattgaatactcaccttatcatggactgattttagattattgcatttcagatagcgatagtatcaattcatgcgaaaggttatatggagtgttaaatactggggaatcatgcactctaattgggccatttaatttcactcatgggagttaccactttggaacaggaataaaaacaggtcgacatggattcgcattaatcttattcaacggtttttatgataaagatatactgatagaatattttgatttatctctccatggattacaagagttcattcaccctcaaggctttataactaatataagacattcaaaacaacccatatttactactgaaaacagtgactggaaacttgaactcattaacaacgcatcatttagcttaatcggggatggcttattgaatataatagactgccgaaacgaagctgctctaaaaaaagtgctagacaattttcaagacacaaaaaatctttatccagactctatattttctattagaaaagcactaacattttatttcagatataaatataagaaaagttcaaaaataaaagaatatatatctaggatttgggatatctcaggattactttcaattcttatagataagccggtgttaccggaggaacttttctttaagtttgaggataacaaactcagagcgccatgcctattgacaatgagctttgagcaaagaacaattgatctggcattaagggagatacaccatcgcttcctaccaataaattggaaaattatagatatcgataaagtattctacaaatggtttgagatggcagagagatatgtttcattgacagtaacttatcagtatgaaacaggcttcagaacattacatcaagctcatgccgacattatattgttcgctacacaattagaggcgataaatatgacactacatggttcaaaatacgaaaaatatataaaaccaatcaatgaatacgcatctccattactcaaacaacgacttgacagttttttttcaaagataaataacgattcattaggtgctaatattgccacccttagaaatgaacttgcccatgttgaccgtgagaaaaaactgatgagaagtttaaacatcgatgattatattaaaatcggtatgtaccttaaactaatcgtaacatcacatttactttcagatttaggcattgaaaaagataagatagagaagtatcaaaatgatgtcgcacctgaatga

SEQ ID NO: 159812 - DNA, 855 bp, Enterobacter cloacae
atgattcttcgagtagtgtttctcacaagcaagactcacgggatggtgctctgcccctcgatggagtgcagtagaaagaaggtatccagaatgactacccttataaaaaaattaaaaatcatggcatcaggcgttgtgttcatttcaggtgttaccgccgcctccaataccgtctatttattgccagaggcaaaatcagctggtgtcgccagcaacgatcaaaatgccctgatgtttctcggaatggacaggaatgtaaatctaaaggggatatgcttcgcgatggcaaagcaatcatcatcgatcataccgcttgtagatatcactgctacaactgataacggcagattcacgatgcacggactacgcccaaagaataacgacgatgcgaaggaactagtctgttcacttggttctgaagctggggatttcttgattggcatttcgaagtcaggactcgttaaagtgaaactggatttcaatggtgagattcgcaattacagttttaacactacagaattcaggaaaatacttacggccaatggccaaggagtgtgggacaaagcagctaaagactacgctcagggagttcgcgcccccattttctataataaccacagcgaagccactaaaaaaaatgcagcaacctcaaatgtcgatacacacagttatgaagcaagcgatgagaaacttaatgctgtctggaaaagacttagccctgaaacacgaaaacgtttactcccttctcaaagagaatggataaagaaaaaatccgactgcaataacgaacagacatgccttattgacatgacaaacaatcgcattcatgaactggagtctgaaaatgagaaataa

SEQ ID NO: 159813 - DNA, 351 bp, Enterobacter cloacae
atgagaaataatgcacagactctagttttaaaaaacgattgggtaccttcgtcttctggcaatgcgtatatcggaaaatacacgatcgggcgatttcacatgacagagtcgttcatcattgagtatatgaaactgatacatagaattgaaatacctgattcatgggtcagtagctgtttcactaacatatcagatattgatactcgcaaggttatgtatatggaaggctgcgatattttaacgatagatacaatgaataaaatccgtaacgcagtgaagtccccgcctgaagatttgaaaatatactgcaatggcactcatgtaacaaaaatagaactcatggaagaatga

SEQ ID NO: 159814 - DNA, 129 bp, Enterobacter cloacae
atgagccttaagccaggtccgaaacgaattgccgactcaacaggggaacctgataaacgccagcgcgacaataaaaaaactccgggaaatactgacaaactgaaacccagtaaaaacccaaagaaataa

SEQ ID NO: 159815 - DNA, 1197 bp, Enterobacter cloacae
atggaagatgtaacagttattcttggagagaatggtaaagggaaaacaaggtacctacttaatttttttgaacaacacaagcatgaatactgtatagcacttatttcaaatgctttgattaatcctttcccgctagttcgtaggaccagtaaacatgattattattcactaagagcaagacaacatccttatggaaattactttgaaagggcaataaactcctattttttccgattacttgaaaatcataatcctagagagattttttatattttaagtcatatcggatttgataatgactttgtagtaagaagaaagcctttatataaagtcgaggaaagttacaatgcatacgataaaaaaaccaaatacactttagtaaattcttcttatgctaaagaacacttccaatacaattctatagaaagaaaagaaatcaccccgggatttgctcaggaaatttcgatattccttgaggaatcacatgattttcatctatcttacgagtcgcaccatcgagaaaatcaagaatatagtgaccatgtaaaaaaagaaaaatattttgtcaaagggataggtgactttaggcgttcgactctatttggcagcgagcttttttttagaaaagatggtagatacttccctatttatcatgcaagctcaggagagttacatatcttatcgcttggtttatttattaatagatttattgaggaaagcgaaaggtataaacttccaagggtaatattaattgatgagccagaaaatagtttacaccccaaatggcagcgtgattacattggttttctgaaagggtttataggttattctgaagttaaaaccataatagcaacacactcgccattaattgccatggaagatggggcgtataataaaagcatttctcttgtaagcgttgaaaactcaatattagttccaattaatcataagaaaaatgataacaatattgagcagatttactatgaattgtttggtgttttaacaccaaaaaatagatatctttcagagtattgcaatggtttactcaagcagttttcggataaaaaggtgagttatgatgttgcttataatgcaattttctccatgcgtgaagcatcattcgactctaatcagaaagattttctaagtggtgttattgaaattttgaaaaaattgaaaggtaaccacaatggctaa

SEQ ID NO: 159816 - DNA, 681 bp, Enterobacter cloacae
atggctaattttcaattttctgagaacgaacttactctgataagcgcaagtgtcaataaggggcacaagtcatggaaagatgactgtctaagtgaattgaaaactaaaataaaagagcatctgaaaacaaggcaaaggtttgtatgctgctactgcttgagaagttttcatggggagttcaattttgttatcgatattgaacatattcttcctaagcatcagcatgtgaagcatatgtttgagctcgaaaaccttgctgcatcctgcaaaagatgcaacatgaagatgaaaggaaggcgtacagattttcttactgaaaaatttaattcgaatcccgatccttttgccaaagaaaattatttgttcatacatcctaatagagatgtttttgaagaccatattgcgtatgaacatcatcaaaagggaagggatattatggtttactatagcgtcattagtgatagtgctaaaggaaatttcagcatggaattcttcaaacttgagcaactatctgttaatagttttagtaaagcgcaaggactagctgttgaagatgaggatttctatgaaggaaatcctgaagatgacgacatagaggacgatactgaaataatggcagtttcttatttcaatatagatagtgagcttgagaaattagctattgatcacaatcaaatttaa

SEQ ID NO: 159817 - DNA, 465 bp, Enterobacter cloacae
gtgctaactctgatcctaccgactaagcagcacaaattaatgatggcagcgctccgaaaagctggacaacgtgaagtcggcggtattcttatgggtgaaaatgtcgggaataatgttttcatcgttcgtgagataaccatacatcgtcatggtacgtttgcatcctttatgagacgtattgaggatgctattggtgggctccgtgctttttttcaagaaactggctacgattatgttcgcttcaattatatcggtgaatggcactcacacccttcatttgagccatatccaagtagaaaagatgatctgtctatgttacagatcgtaaaggatgaaactgttggagcgaattttgtagctttgttgatcactaagcttggccctgacggagagatgatttcaacagtccatacatatcttcctgatggttcgaagattccatcaacttttaagattgagccgtaa

SEQ ID NO: 159818 - DNA, 177 bp, Enterobacter cloacae
atgattaccgaacgaacaaaagaagataaggaacgagcgaaacacaacgcgaagaaattagttcgccccttcgcaacttgtatccgtgaactcgaacagaaagccaatgcgaaagggttgagccagtcgaagactgtatcctctttgaaactagggatcgcaacagcggaacgataa

SEQ ID NO: 159819 - DNA, 264 bp, Enterobacter cloacae
atgacccataaaactatcgttagtgtcgctagctatgttcaacagctggcaaaagataacaatgttactgctaaccgtgatggcatgagccgcgttgctgtgaccattaccgcacttgccgatgactctgtcgagctggataacgttgagcaattactggtaaaccttaaaaagaaaggtgtactcagtaaagctgaaattttacagcttcagggacgttacttccgcgaacaaaagcactttcataaaaaagccactgcatga

SEQ ID NO: 159820 - DNA, 729 bp, Enterobacter cloacae
atgagttttgatccatttggcgatttcgataccgcaggctatcttcaaaatgcccttcagcttaaggagcctgaagaggtcaaacgggcagaacatcttgcttttgaagcaagtattgaaatcgcattcaactacttagctcaaacagaaattatagattaccaggctgtacttaaagtccatgagatccttttctccgatttttatccctgggcaggaaaagaccgtaacgaactcgttccccatcttgccgtcttcaaaggttctcaggataacccccgtcacacggtcttcgagcgacctgactccatccgtatggctgtcgaatacgccctttatttggccaataacaagcaacgtttccgggaaaggcctggagaagtcatggggcaattagcctatgcacatcctttcctcgatggtaatgggcgtactattttgcttgtgtttatggaactcgcctttcgagccggttttgccattgactggtcacagacaagcaagaatgactatttgaaggcactcagcgacgaaatcggagaaccatctaaaaagtaccttgatcattacctggaaccattcgtagtgaacatcacaaaccgggatgcctggccggctattattggcgggattaaggggctagatggtttagataaagagaacatctcttatgaaagcctggatgaccccgaagtacaaaagatttatatgacttaccgttcagaatga

SEQ ID NO: 159821 - DNA, 675 bp, Enterobacter cloacae
atgagtgagcagcgaacgcctccatcacgcccaccacagggaccgattggctggctgctgtcgctgaccgggcagctcatcgggctggttattggtgcgctggtgctgcgggtagtactggagctggcgggactctatttctggtggccgcaggaggggatttttcatacttatcggatgatgatgcgggaactaggcgaattgaaccaagagttacatatccattcgctagggggaagtatacgtactcttttggagtataccagtataatggtaatacatataggaagatgcgtgtacagccttttcaggcaggacaaactggtatttcctcagaatcaagtagctcagatgataactgatgtattggtttacgcgctgatcagctttatgatacgtattttcaggctagttttaactttaccactaatgctgcttttcatagtcatagggctgattgaaggcttcgtactacgagatctacgccgatttggtgcaggctacgagtccgggtttatgttctattgggcagtaaaaatagcgggagaattatttcttaagattatattttgttatctagtgctatatactgcaataaacttactaataccccttgctctctttactggtttcattgtattagtaaaatcggctcagttcaaaaaatttatatag

SEQ ID NO: 159822 - DNA, 852 bp, Enterobacter cloacae
atggattatccaggtctttatgacttcgcagatgaaaaatcagcaaagtatcaaaaatgtttttttagattactttttttagagtattttttattgttactagtgtctgtcattgggcttgtgactagagttcatgccattgagatttcttacgcggttattttttgtgcgcttttaacgcttatgctttacagaaactttatcaaacatgaacagaaatggtataaatatagagcgttatctgaatcaataaagacaatcagttggcgttatagtatgagaactcctccatttaatgagggtgaaaaagaatcagctgagaaatttatcaaaacaatagggggtattgttaaggataataactatatttctgatgagatagatgaaaaatatgcaaggaaagataaaataacaggagagatgcatataatcagagatttaccctataatgaacgcaagcagtattattatgataatcgcgttgttgatcaacggaactggtacctcaataaagcaacatataacaaaaaaatcagccggagatggtcattatttattggtttaatatatgtggcatcaataattatagtcgttttaaatgcaataaatattaatgggatacctgattttcctgttgatccagttacaacattagctgcatctgttgttggttgggtccaaataaaaaaatataacgaactagctgtgtcttattttttaacagcacatgaaattggtgacataaaagagcagtttaattacatttcatctgaaaatgactttcttgaatttgttaataatgccgagaaggcattttctagagagcatactcaatggttggctaggagatag

SEQ ID NO: 159823 - DNA, 309 bp, Enterobacter cloacae
atgcaacatcaattttttctactgctgctaatcccactcttttacgcccaatctaactcaaccttagagcccacccaactcgcccttgcgctgaagcaactcgacggagtgaagacctcgctcgagcgcgcccaaaccagcgccagcattaacccacagtcacgctactccttcgactacttacaggcgcagcaggacatctcgaccattgagcagggaatccgccgctacctgaccccggcaagagcgcagccgcgcgccattcagcccctgagcgctagctaccaacgggagaaccccgatgactga

SEQ ID NO: 159824 - DNA, 1107 bp, Enterobacter cloacae
atgtctatcacacaacaacttcgacaaattgcagaccagctccctgattactcaaaaaaagatttcagtgaacttgaaaaaatagtcaatgttgcagatgacataggtaaagcatggtcaggctcttggttgggttaccagtcacgcgtatattatgctaatttttcctctcctcctcccggtgcaattttcagcatgcaattcggactcagagatatgtatacaatgggtacaaaaggagactggagggaatatgaattcgaaggtgttacgaatcttatatatgaagagtctggtgatattgatttagagttatataagaagcaagctgatgatgctgctgaaatattcgaatcagcaaaaggtgatgtgttatctaccatatatgcaaacaaatcaaaacttccatcagatgacaaattcctcgatgatttaatcaaaaaaatcgaaggtatgaaaatctacagtgaatctgattatgttaaagtccagatgcctagcggaaagttcatgagttcagacatgaatgccatgtctcagggattgagaacaccgcctcacattgcaattattgcaaaagtggctgctttaagagaatcatttaaccgatgtatggaactaaaaaaagaaacaaaaaaattaattagtcatatcaataatatagaagcaaaggagataaaaaacgatcgaatcggaataaatatttttattggtcacggccgttctcacttatggcgtgaactaaaagatttcgttaaggacaaattacgtcttccatatgatgaatttaaccgcgtgcctgttgctggaacaactaatatagcccgattagctcagatgcttgatcagtcatgctttgcgtttttaattatgacggcagaagatgagttacatgatggtagtatgcaggccagaatgaatgtaattcatgaggttggtttatttcaagggcgtcttggttttgaaagagcaatagtacttttagaagatggctgtcaagaatttacaaacattaatggtctaggacaaataagatttcctaaaggaaatatatctgcaatatttgaacaagtaagagaagtattagaaagggaagaaattatttaa

SEQ ID NO: 159825 - DNA, 546 bp, Enterobacter cloacae
atggcggctttctttagggaatacagagatacccttctcgccttcaccggaattattatcgcgctgctttccctgtggtttacctggtcgcaaagccaggaacaaataaagcataaccatatttcagttgagccgcggatgaatgcttatttttcaaatgacgggcgggtgaacaaatcaggtatttacatcatcaataatggaatggggacagcatttgtctcggctatatctgcaacggtcaatggcaaaaaagttgaacctgttgccgggaatatctttgtcggagtggcgcaggcgttaggcctggatatccagtgctttgttattggtgggcccagaccaaatgattcatttaaagttggtgaggagatttttttaattgaagccaggggaactgacgaacgctgctcaggcgattcacttatccttcggtctgcggctttagagcctgcccgcctggattttgtcctggatattgaatcaatctacggtgacagattccggtatgtttattctcagaataaacaaattaagcttgattaa

SEQ ID NO: 159826 - DNA, 960 bp, Enterobacter cloacae
atgagaaacgtcattctgttctttttactgctgatggctgtgcctggtgtcgcgatggcaagctgctcgtttaccggcggcgtgacgtccgaactggcgggatacctgaactttggcaatgtcaccgtccagcgggatgcgcctgtcgggagcgtgcttgccaccaccgttaccggcgcttacaacaacggcaacgcgatcgccggatgtacgcgggaagcctggaccgcacgctgggaactgacgcaatggggcacgctgagcggctatggcagcggtgtttacaacaccaacctgccgggcgtcgggctgcggttgagcagcgcctcatcgggtaaaccgctgccttttgaaagcagttatccctataacgccggaggttcctgggcctccattcccggcgatggcatcaaaggcgaactgatcaaaaccggcgatatcaccagcggcacgttaaccaatggcgtgctggccagagcgtcggtggtgaatcagttttactttgccaacgtcacgctgaacggcaccaacacggtgacgtccgcaggttgttcggtcacgtcggtggatgaaccggtgcaactgggcgactacagcaaacgggacttcagcggtgtcggctacaccacgggctggaaggcatttaatatcgtgctggactgtaataaaagcgcgcatattaatgtgcagattgatgccactaaggatgcgtcgaacgcgccgggcgtgatggcaatagataccgaaagtggaagtacggttgcgacaggtgttggcgttcagctttactttgcgccagataacagcgcggcgcagttcgggcaggtaaaagattactatacctcgcctaatggtgggatggagaccgtacagcttaaggcgcgttattaccagacggcctctgctgtgacggcgggcccggccaatgccacggcgacgtttacgctgacgtataaatag

SEQ ID NO: 159827 - DNA, 951 bp, Enterobacter cloacae
atgatgaaaaattacaaccagctcctgctggcgggagcattactgctggtctcaggaatggtaaaggcatcttgctacctggcagatggcttatcaggggaaatcccgggctatctcagttttggtaatgtcatcgtgcagcgggatgtttctgtgggaagcgttctggccacggcgactaccggggcatacaacggtgggaaccgtctggctggatgtactgaaccctggaccctgcggtgggcagtgacgcagtggggaacgctgagcacattagggaacagtatctataacacgaacctgccaggcgtggggatcaagctgactaacaccgcgtcaggtaaggtgattccctataacgaaagtcggggtgtggtggatgtggtgatcacgggcgacggtatcaaagcggaactgattaagaccggcgatattgccagtggtccgttaacctccggtgtgctggctcgcgcttcggcaaaccagctttatttcgctaacgccacgctgaatggtacgaatgttgtgacttcggcggcgtgcagcatcattacccctgatgtggacgttccgctgggccaacataaaaaagctgagttttccggtcccggctcggccactgactggaaggcgttcaatattgggctggactgcgacaaaagcgctcgtatcaacgtccggatagatgccgtacaggatccctctcatgtcgcaggcgtgatgaaacttgatagtgcgctcggcgatatagccgccaccggggtgggggtgcaactctactttgcgccggataacagcgccgtgcagttcggccagagccggtattactacacctcgccgaacggtggttctgagacggtgcagctcaaagcgcggtactaccagaccgcatcggcgataacggtgggcacggccaacgccacggccaccttcacgctgacctataagtga

SEQ ID NO: 159828 - DNA, 681 bp, Enterobacter cloacae
atgaacaggtatgcagacgtgatgctggcgctggtgctggttttcctgagcgtgcaggcacaggccgggatcgtgattggcggcacgcgcgtgatttatgacggggataaaaaagagacctccgcttcggtacgcaacccggagaaatccggcgtctatctggtgcaaagctgggtggatagcggcgagcagggcggcaaagtgccgtttatcgtgacgccgccgctgttccgcattaatcccggtgaggagaacatgctgcgcattgtacgcaccgggggcaacctgccgcaggaccgggagtcggtgttctggctgaacgtgaaatcgatccccgccagcgacgacagacagccgcgcactaacgtattgcaggtggtggtcaagtcgcgcctgaaactcttttaccgcccggcagggctggaagggcagccggagagcgcgtatcaccagctgagcgtcgcccgcagtggcaaccatcttaccgtcagcaaccccacaccgtattacgtcacgctgttcaccctgaaggtcgacgggcaggagatcaaagaggcagatatggtgccacccgaggggagtgtgacattcccgttgccgtccggccctgcaaccagcgtaagctggcaggccatcagcgactacggcggcatcagccagactgaaagccgccgtctgtaa

SEQ ID NO: 159829 - DNA, 525 bp, Enterobacter cloacae
atgaaaaaaacgatgttaagcgcgtgcgttatggtaatggcgagtatggctggcaatgttcaggcctcagacggaaccattcacttcaccggcaatattaccgatcagacctgtactgtggacggggcttcacaggatctggaagtcccaatgggcaatattggcgcttcttcactggcgggcggcgcggggacagtttcatcgcccacccgttttaccctggtgttaactgactgtccggatacggtaaccagcgccacggtaaaatttgatggcaatacggatagttctgctgccggttcgggtgttctcaaactggatagcgacagtaccgccacaggtgtaggcattgttatttctgataacgccgggactccgattgcgatgcataccgactctccggcttacgccctgacaacgggtgagaacgatttgctgttcaccgcccgctatatcgctaccggcgataccgtgaccaccggtacagccaacggtacctcacagttcaccattaattacaaataa

SEQ ID NO: 159830 - DNA, 1314 bp, Enterobacter cloacae
atgaatgagtggaataaaacaacgctcgctgagattactgatattagagttagtaatgtagataaaaaaagctattatggtgaaaaaaccgtgaagctttgtaattatatggatgtttattccaatgattatatcactcgtgatattagctttatggaggcgacagctaatattacggagattgcaaaatttacagtatcgaaaggcgatgttttgattactaaagactcagaaacaccttttgatatcggtattcctgcagttgttatagaagatatcgatgatttaatttgtggatatcatttagcacaattaaagcctgatgcaaaaaaagttaattccgtatttttggcaaaacaattagctatgccacagactgcagcttatttttcgagggttgctgctggttctactcgttacggcctatctaatagtgcgattgctaaaacagaagtgtttttaccttctttagctaaacaagaaataatttcgcgcattttaaataccattgatcgtgcaatatctctaagcgagatgtcaattaagaaataccaagaaataaaatgcggaattatccatgatttatttactaaagggatcaggagtgatgggaaattacgagaagaatcgagagttgcacctcatttgtacaagaatactccaataggtctgttaccaaaagaatgggatgtattacaattgaaggagttatttggcccgaataatattgttaatggtccatttggtagtgaccttctaacttctgaattaagaagtgaaggtgttcctgtaatatattgtcaggatataagacctggtgtttacttaaaagtttctaaagcttatgtatctgcattaaaagcagcgcaacttgctttttgttctgtacataagggtgatattattttggctaaagttggttcacctccttgtgatagttgtgtttatgacagtgatgataatgcgatagttacacaagatgtaattcgaataaggccaactagtggtcataattctaattttttctctgcatggttttgttcagagtttggacgagccgctattaggaaaatatctattgaaggtacacgtgagcgggtgtctttaggcgattttaaatcgttattattaccagttccagacaaagatgaacaggaacgaatcggtaaaaaaatcgcttgcattgaacgtaatattagggtttcaaagaatgatcttgagcaattaaaatataagcgtataggattaatgaacgatttgcttacgaacaaagtctctgtaaacttcccaaatgctgaggccccacatgtctga

SEQ ID NO: 159831 - DNA, 201 bp, Enterobacter cloacae
atgaaccgacaagaattacacgcactaaagaactttgattttctggcgcgcagttttgcccgtatgcacgctctgggtcagccgatagatgttgctgccgtaaccggcaatatgagtgatgaacagcaagcatggttccgggagcgatacgaacactaccgaaagcaggctgagcgggcgagggtgatagaactgcggtga

SEQ ID NO: 159832 - DNA, 840 bp, Enterobacter cloacae
gtgagtagaaacccgtgggaagtacatgaatggcatgctctgggtcgagaagcatcattagtcaggcatctcattgggtcaggtgctacggctataggtagggccaattacgcagataagatgggcgaatattatactgcgttctttggactttcagttgggttagaaaggctttcaaagttaatactggttgcgcattatgctattgagaaccaaggaagaatgcctgacgagcgagttgtgagaaaatttgggcacaaactaattgacttgaccaacgaggttgagaatatttctgaaaaaatgcaactgtcgctgagctattcacgccctatacaagaaatcccccaaaagatactagaatgcctagattcatttgctgatgctcgacgaggtagatacgcaaattttgcttcattagacaaccccaatttaaccggtgatgagcctgttaataaatggtggggtgaggtagcggagtgcatactggaaaagcactattacggtaaggtcgctcaaagacgcgttgaaggtagtgctgaattaattgatgctatgatttcaccgtttacgatggtgatacatacgaatgagagcgggaatactatgttagacgttaaatctgcctctatacgcactggccaaaatgctattgtgcaaaagtgggggagatattattctttagctatcgttcgctggcttgcaacggttttatctgagctctcccatatcgcttgctataaacatggtatagacggttttttcggtctaaatgaatactttgatagttacgctgttgacgatagttttttaaaaactagaaaggtatggcctctttag

SEQ ID NO: 159833 - DNA, 1062 bp, Enterobacter cloacae
atggctcgaaaatttgttatacaaaaacctcagtcaaatgaggagctatttaaatcattcaaaaactcaattattgatttttatactgctattgagctttttttaaaagcaagattgatgcgagagcattggactcttatcttagaagatccagggaatgcacatagtcaaaactttagcgtgggtgactttaaatcggtttaccttgatgcagcagttaaacggctaagatctattctcggtataaatcttgatgataaagttatagataatttcaaagcgttgggtgagcacagaaatcaaattgttcatttcgcgcatacagaatattcaaatcagcaagccaataaagctggtgtggtagcgcagcaatggtcttcttggcattatttatatcacctcttatcggtagattggaaagacatctttttagatcatcagaaaagcatagagcgtattcatagaagaatgctcactcagaaagagtttctaaatgcacgatttactgaactctctcaacaaattgaaataaatagaaaaaaaggaatgaaagttgtaaattgcaatcaatgtaatctacctgcaggcatagttaatgaaaatcataagtggggagatgattatgaatgcttggtatgcgaatcacaaggtgtagcattggaaaaggttcgggataccctagattgtcctcaatgtggtaatccttttgagttttttagccatgatgtcaataaatgttcgacatgcaaccacaaaatagatacaaatttattaattagactgtgtaaagcaaagtataaaacaggtgatgattggtgggaacctggtggagatgtcattgctggatgccatcaatgtcaacatactcctgattctgttttttacattgaaggacagtggagttgcgtttcatgttttgatcgtggatggtctgcaactaactgtccacattgtgacgcatatgttactggagatatggaaagaattaaatactttgcttgttataaatgtgaagataaacagagggcttcgattttatcaacggcgggcgttaatttataa

SEQ ID NO: 159834 - DNA, 921 bp, Enterobacter cloacae
atgttacataagaaaacaacacaagaaaatgtagcttttggacttgctgtacttaactactatcttcgtttcaattctaaagcaaatttacaggacgctaatgtaagttcagaggaattgataagtaatttagtaaatattctgaatggtcataattttatctgtacgtcggaaatttcagcaaattatccaggaatagatgctatagataaaataaatagactaggactccagataacacatacaaaaaccaattcaaaaattaataaaacaatagataaaatccgcgaaaacaaagttaacaatgacattggcgtgctatattttttcattacatcaagaaggcagaagaaatacactatcacagcacaatgcccaaatctaaacgtcacagtaaataacatacttgactttgattccctgtctgaactgctttcgcaaaatcagaataaactggctctagcagaagccgaacttattaaagcaatgcctcgtctctaccaagatggaaaagcacgatatgaggttatgtttaatagtattcttgtggctaggaaggaattagatagaagagtattcactgctgacaaaattttagaagaacctgaagaaatgcttacatcccttagggaagtcagaatcgtaatacaaaaaacaggcataatgaatgaagctaattctgttgtatcttcttcatttaaagaaataataaacattattaatgatgcagagggtcaaattgcaaaaaaatacatgagtggatataaaaaatataaggccgggatttttccctcgtgggattatcctgataaaggagattgtttaaacattttaatgggaataaggaaagatgttttagaccaaatagataatgttgacattgagatcaataaactgaaagggtttcttgggatacagtaa

SEQ ID NO: 159835 - DNA, 129 bp, Enterobacter cloacae; identical to SEQ ID NO: 116266

SEQ ID NO: 159836 - DNA, 474 bp, Enterobacter cloacae
atgaaccgtcgcgcaggtaagccaacaacaaaaaaaacgacgcaactggtgaacgttgaagagcatgtggaaggcttccgccaggtgcgtgaggcgcaccgccgggagctgattgatgattatgtcgaactgatctctgatctgatccgtgaggttggagaagcgcgccaggtggatatggccgcacgcctgggggtatcgcagccaaccgttgccaaaatgttaaaacgtctggcgtcggtcgggctgatcgaaatgatcccctggcgcggggtgtttctcaccgctgagggcgagaagctggcgcaggagagccgcgagcgacaccagatcgtcgagaattttttactggtgctgggcgtcagcccggaaattgcccgtcgggatgccgaaggtatggaacaccacgtcagtgaagagacgctgttgaagttccgcgagtttacgctcaaatacggtccctccgctgaatga

SEQ ID NO: 159837 - DNA, 396 bp, Enterobacter cloacae
ttgagcgttcgcggcatcgatactttgttgcgtggtcgcgcgcgggtcaacgccgcgctgacggcggtactccgcctgcgcgttggccatatccgcctgggctttcagtacctgggctttggcttcatcgcgctgagcgggatattgcaccttcgagagcgccagctgcgcctgcgcctgatgcaactgcgcaaccgccagcccaagctgggcctgggcctgatcgcgctgggcggtggtatcacgcggatcgatcaccaccagcacatcccctttcttcacgcgctggttatcccgcacgcgaagttcggtgacgtagcctgccgtttttggggcaatggtcactacgtcgccgtcggtgaaggcgtcgtcggtggtctcttcgttacgggttaa

SEQ ID NO: 159838 - DNA, 240 bp, Enterobacter cloacae
atgccacgcacagcagacatacatgccgcttttatcgcggcaatagaggttaacccaaaaggttaccgctatctacgaacagacagcttcatcaaaaagctgcgggggtttaactggcacttcagccgtgcagaagcaaactcatggatagagcgctaccagtccgggtttgcagataagacgacagacggcagcgacaaccgttattggatcctgcgcaacatggggagagttctctaa

SEQ ID NO: 159839 - DNA, 198 bp, Enterobacter cloacae
atggggaataagtggacagaatgtgaattaggcgtttttattgagcttaaacgtggttacgatcttcctaaaagcgctcgaaacgaaggcagcatcccaataatttcctcatcgggttttactgattacaatgacaaaccaatggttaaggggccaggggtagtaacaggtcgatacggaacaatcggtgaggtttga

SEQ ID NO: 159840 - DNA, 210 bp, Enterobacter cloacae; identical to SEQ ID NO: 119099

SEQ ID NO: 159841 - DNA, 2490 bp, Enterobacter cloacae
gtggccagtaacttttccgttggtgttgttattggtggcatggttggcagcaccttccgctcggcggtgagcggcacccgacgtgccctcgactccctaaatgatacatcccgccgcctccaggagcgccagaatgccttaacccgtgcaactgaacgttacggtcagttaggctcttcccggatgctgcgcctcaacagcgacctgttacggctcagccgaactatggaacagattgaacgccagcagcgtcgtctgtctgcggtatcagccaccagtgatgcactaaaaaccaaccgtatggcgttgtatggtcagggtgttgaagcgtatgccatggcgcagaccgtttatcatacggtctccccggctgttcagcagtctatgtcttttaaagacaaaatgattgatatgtcgatcaccgcaaaatatgacgataaaacacgagacacccttgccgaacagataaaaggctgggcacttaaatacaatcagtatcaggatgacatgcaggacgcagtcggttcactcatcagcgacaacattgataatgtatctgatattgggtatttaatgccggacattgctcgtgcggcaacagcgacacgtacagccggacaggactgggctaaggttgcagcggtctggcaaaactcactgaaaggtgctgccaaagattttggtgccgtccagaatattatggcttatgccggtgaccagggatcatttgaaatcccggatcaggtcaaatggatgcagtccctggcaccaatgatggcgggagttgccagcgggaaagaggctgtggctgaaatcggtgccagcctccagatagcaaaaattggtgcgggttccaccgatgaagctgccaataactttaaaaacttcctcaccaaaatttttgcccgcgatactcagaaacaatttgccgatttgggtgttgacctgcagggttcaatcgaaagttataaggctgctggaatctctccgattgaaggcatgatgagcgtcatagagcgctacctcaatgctaaaagccctgaagctctggccgggttcaaatccgccatgaaaataaagaacgatacggcgagggatgaggctcttcaggcactggcaaaaaatttcggcctgggcgagatgttcgctgatatgcaggtcatggcgtttgtccgcccgatgctttccaacatggacaggtaccgtgaaatacgtgccggtgctctcaaagcagcggataacgatcttcttggaaactcttacgaccagcggctgaaatcccctcttgaagcgaccaaagctctggtggtcaacagtcgcgatctggctattacgttgggcgatcaattagctccatcttttatttccctggcgcaggagcttctccctctgattcagggggcaaaacattgggtagcggctcatccacaatttgtcagtggtacttttaaagttattaccgcgctcattgcttttaaaattgcggttattggtctcaagctggggataaaccttcttatttccccctttgtcaacgtctggaaaagtatcgtactgctgcaatccagttggcttcgccttacgctcgctctgggtgaaggcggcaaacttcgctggctggtgaccggcttcagcgccgtcgccagaggtgccagaacactgggtggtgtgctctccggagggctggttcgcggcattatgatcgccgggcgtgccgttctctggattggccgggcgctgctgatgaatcccattggtctcgccatcaccgccgtcgcggcagcagcttaccttatttaccgcaactggggcgcagtcagtagctggtttaaacagcgttgggctgacattaaagaggcgtttaacggcggtgtcgtggggattggtaagctgctgattaactggtcgccggttggtctgctctataaagcctttgcggctgcgctgaaatatctcggcgttgatctgccagcgaagttcaccgacttcggtggccatcttatcgacggcctgattaacggcatcaaaaacaaatgggagtcgctcaaaaccaccgtcacagacatgggcgacagcgttggcggctggtttaaagaaaagctgggtatccattcgccaagccgggtattcatgggctttggtgacaacatcgcgcagggtgccgctatcggcctgcagcgtaccaccccgctggcagcactggctggccagcgactggccgcagagatgacgccagacgttccccgtatcccgtcgccggaaatcatggctgcgggatattcaggccgtggcgcagctgcaactggtggcggaacgtctggcggaacgtctggcggtatccaggtcagctttaatcctcagttttacctcaatggcaaagaaaccgcagcgcctgacgggttgaccggcgcactgaatatgagcctgcatgaactggagaaaatgctggagcgtctgctggctcagcaacaacgcaggaggtacagctaa

SEQ ID NO: 159842 - DNA, 315 bp, Enterobacter cloacae
atgtcacagacccaatccgatacttttaagctgtcttaccccttcaccacagctgctggcaccagagttgagcaggttgaactgaaacgcctgacggtcaaagacctgaagcaggtgcgcaaaatcagtaaagacccggctgactgggacgaaccgctgattgcccgtagcaccggtattctcccggaagacctcgacaatatggatttagctgattacctgcagttgcagaaacgatttcagctcgtcactgggatgggcgagagcggcgaaggcgttgacgcaagcacaggggctgctggcgaggtggtttag

SEQ ID NO: 159843 - DNA, 258 bp, Enterobacter cloacae; identical to SEQ ID NO: 15583

SEQ ID NO: 159844 - DNA, 939 bp, Enterobacter cloacae; identical to SEQ ID NO: 15584

SEQ ID NO: 159845 - DNA, 462 bp, Enterobacter cloacae; identical to SEQ ID NO: 83033

SEQ ID NO: 159846 - DNA, 264 bp, Enterobacter cloacae; identical to SEQ ID NO: 83034

SEQ ID NO: 159847 - DNA, 585 bp, Enterobacter cloacae
atgaatacggtactgattccacccggtcccggcggttacggtaaagggctgtggctgcccgtcgggagcggtaaaaaggtgctgtcactgaccgggcgggaaatccatcccgtcgcgatagaaatcggcgcactcaccgaatcggaaatcgttaacggcttctcagacattccgccggataacgacattctgtgcgtggtgattaactgcgccgggtccctgcgctgcggcctgtatccgcagaagggcatcccgaccatcaacgtgctccccacctggcgcgccgggccactggcacactttattagcgaggataactacgtctccggcgtgacgacggagcagctggttctggtggacaccgccgaagtgccggacggtgaaccggagtccgtgcctgtcgctgcaccacgggttatcagcacgccaccacctgcacgtggcgcggaaaactggtacgcatggttgaaaagacaggtacagccgtcggccacgttatcgccctgctgttcgccgccagccgtgaggcagtggacgtgtcgctgcgtaacgttatcccgtttatggcctttgtctcattgctga

SEQ ID NO: 159848 - DNA, 231 bp, Enterobacter cloacae
atgtcatctatttattctgatgaatatcagttagttataaagttactgcgctctgcaagaattggtcgggggattactcaatctcaactggctaaatcgctgggcaaaccccagtcattcgttgcaaaggtggagaatggcgaacgtcgtttggatgtgattgaatttgcagctattgcacgcctgctttcgcttgatcccgcagaaatactgaatgcagttatgaagtaa

SEQ ID NO: 159849 - DNA, 225 bp, Enterobacter cloacae
atgacttctatctactcaaatgactaccagatggtgattaaagctcttcgggatgcgcggattgcttgtggccttactcagcaggaggttgccagtgctttcggaaggccgcagtcatttatcgcaaaggtagagagtggagagagacgactagatgtcgttgaatttgtgcttttttgtagaacggtaaatattgaaccaggcagtattttgggtaagttgtga

SEQ ID NO: 159850 - DNA, 249 bp, Enterobacter cloacae
atggaaataaatgatggctctttgtactttttaactgaaaatggaagccataaaatatctaatgattttgtatcatggcgggtatatccacgagcaaaaaatcatgcgaatcacttgcatataattaatgatgacaatattaacattcaggtctataacaacgacacagagacctctggacttaatacattctattcaaaaagtaagaatgatcagtacaaatacagactcgaagatttattaaggtaa

SEQ ID NO: 159851 - DNA, 843 bp, Enterobacter cloacae
atgatttacatcaaacgagacgccacgctaattcctgcaaaggtacttgccgttgcccaacgcgcgcaagatgctctggaacagcttcccgctgagcagaggaaaggtttcatcaagaaaaagtctcatatatggagaggcttttctaaatacctagcccaaatgtcttatgggaagtgctggtattcagaagctaaagatgcaggtgcaaatttcgatgtagatcatttccgacctaaggctgaagcaaagaggacagaagatttggtcgatgcggatggttatgcgtggctcgcatttgattgggaaaacttcaggctttctgctcagaattgtaaccgtttaaacacagatgaatcaggtaacacggtaggaaaaggcagttggttcccgctgctagatggtagccctaaagcctgctgggataatcgctgtattaacgatgaaaaagtcactttgctagaccctgtagttaaagctgacctcacctatatagactacgacgacagcggtagatttacttcaagtaagctctgcgttggtaaggcagcattaagggttaggcaatctggcattatttatggcctcaatttggagaaaatgcgtgaagcacgatttcaggttatgagggaggctaaagaactccttgaaactattcaccaatgtgccgaagacttagaccctctgggcaatgaagcccccatgagaactattgaacgacaaatagaacaactccaatccagaacccgggccgatgcaccatttagccgtgcagtaagaacacaactgataaaactcggtgcagaggattacttaattgatcgaagtttggatgcagcctag

SEQ ID NO: 159852 - DNA, 1605 bp, Enterobacter cloacae
atgaaagtcgacaaactgcatattcgctcacgctttaaaaatcttgaaaacgtgaaagtggactttgacgaaaaccacctgatgaccgttatcgtaggccgtaatggttccggtaagtccaatgttctagaagccttggttgctatatttcgcaatcttgatttaggtgaagcaccaacattttcttatgagttggactatcaactaggtgaggaagccggggttaagtggtatgacgtcaaggttgatgcagatccagaccgcggaacgctagcaaagcaataccaagtttatgtcaaagataaacacgatagcaaagcggatttcaagcttacacccttctccaaagtgaaacgcgataagaaaaccaaacaagcagagtttcttcctaactttctattcgcctattattccggaccatcggatagattagaaaaatactttcgaaagcatcgtgatgattattatcgaaacctactctacaacaagcttgacttgaaagcagatattcgttctctattttatgccaaaccctatcacagtcagtttgtgctcttggcatttttcctgtcagatgaaaatagtcctcagcgcaagtttattaaggagcatttgggtattgagggattggacagtattcattttgtgatgcgccaacctgagtgggctaagctgaagggggaattattctggggagcacaaggtgtagttcgtcgctttttggatgaattgatacagcacacattgtcaccgataaaagtaactcgtcaagaagatacgtcgttaacgggtagttatattcgaaatgagttctttcatctatttttacctgacgtaaacgcactacatgaatttgctagagatctcagtgctgacgaactgtttaaaatgcttgaaagcactctgctgtcagaaattatctctgaggttagcatacgggtgaaagtaaccagcagcagggagcctctcactttccgtgaacttagcgaaggtgaacaacagctattaaccgtattgggcttactctggttcaccggtggtaaagattccttatttttactcgacgaacctgatacccaccttaatccgtcatgggccgttaaataccttaaattcctgcgtgaattcgtacccaatcatgaaaccagccatttactaatggtcacacaccatcctttagctattgccgagctgaagaaacaacaagtacaagtcatgtggcgtgacgatgaaaataatgttcactcacaagagccttatatagatcctcgtggcgctggctttatggccacacttactgagatttttggtctaaatacaacactggatctggaaacccaaaagttattggacgataggaacgaactagcccatatcgaaaatcgaacagaagatcagaacaaccagcttgaccttcttaatgatgagttaaacagactaggattttcacttgaaaacagggacccgttatacagcgagtttcttttagcatggcaagacctaagatacagcgataaaccaccactaacaccggataaagcggctcagagacgagctgctatgaaaaatgtaattgaggcgcttaaagctaagaagggttgctaa

SEQ ID NO: 159853 - DNA, 1686 bp, Enterobacter cloacae
atgattgagacttctttaccatggctgagagtccagctcggtgacgtagttccctatggtaaaaccgaaaaatgcgaattatctgacgttacaggtaacacttgggtacttgagctcgaagatatagaaaaagatagctcgaagatcatacaacggctagatgcaactgcacgaccatttaaaagcacgaaaaataaattccgtaaaggagatgtcctttacgggaaactgcgaccttacttaaataaagttgtcattgcggacagttctggcgtttgttcgactgaaatcatgcctctaaatgctgagccatttattgacaataggtacctcttttactggttgaaaactgaagtttttattgattttgtaaattctgtaagctacggcgtgaatatgcctcgactcggaactaaagatggattagctgctccatttattgtagctccgcttgctgagcaaaaagttattgccgataaacttgataccttgttggtgcaggtggatgccattaaggctcgcctcgaacgcatcccagaaatcctaaaaaccttccgccaatcgatcctcaccgccgcagttagtgggaagttgacggagggatggcgattaaagaataaactcagtaatgtagttgtaaaacaaaatatcaatctaccaaaattaaccccaaatgaacactacctcgaacatgttgaaggatggcaatgggtaagactgggttctgttgttagtctaataaacggcgatagaggaaaaaactaccctaataaaaatgaatatgttaaggatggaataccgttcataaatacagggcatattaattcagatggaacactttctgatgaacgcatgaattttatttccaaggataagtttgactccttaagtgggggaaagacgaaatcaacagatctagtttattgcctccgaggtgcaactatgggaaaaactgcacgtgtccactacaaaataggggcaatagcatcctctcttgtaattatccgaccgagtgattacatagacagagatttcgcatattattttcttattagccctccggctaaagatttaattaatgaatttgataacggatccgctcagccaaatctatctgcaaagagtttgtctacataccctttacaactcccttcgtttaaagaacaaatcgaaatcgtcagtcgcgtcgaagaaatgttcaacttttcatctcttgccgaagcaaaagctaaaactgcattagagcgtgtcaataaaattactcaatcaatcctagccaaagctttccgaggcgaactcactgcagattggcgcgccgccaacccggatttaatcagcgaagagaaaagtgctgaagctttgctggaaaaaattaaggcagaacgtgaagccatcgaaaaacaacctaagccaacacgttccgttataaaaaaaaatacaggtggccgtatgagtaaacagattatcaaagtggttgaagcgctaaaacaagcgggaaaaccgcttagtggccaacaattgttagctgcagctggttaccctagtgatagcagtactgagcaactggaacagttctttctggatatacgtgacgctcttaccatagaagagtccattgtaaagcttgagcgcggtggcgacagtcaagattggttcgccttggctaataataaagcaaagaactaa

SEQ ID NO: 159854 - DNA, 1536 bp, Enterobacter cloacae
atgaagcaagaaacgatcgttcaaaaaatttggagtctctgcaacatactaagaggtgatggtatcacctattatcagtatgtttctgaactaagttatttgctttttctgaagattgctcaagaaaatggttcagaaaagctgatacctcaaggctaccgctgggctgatcttgaatcccatccagaagcaggattattagggttttatcaagagatgctcactcacttgggtgcgcatgttaaaaatgaaatcataagagagatttacgcattccctacaaccgttttctcccattctgaaaatttaaaagctgttgtagatggtatttcgaaaatagagtggcaccaagtaggaaaagatgggtttggcgacctctatagtggtttaattgataaaagtgctcaagatacgcgttcgggagccgggcagtattttactccacgctctttagttaacacgatagtgagattgataaaaccgagtcttggcgaattgattcaagatcctgcgtcaggaagtggtggcttcttagtttctgctgacagctatattcgagtcaaatattcacgaaaagagtatcaattgaaccctcctaaatatcaaggagtggaaatagagaaaaatactcgtcgaatttgcttaatgaatacctttttacatgatttagatgcacacattatctatggtgatgcactgactgatgacgtagcagggttggatgaagccgatgtaatcttagccaatcccccttttggcaataaggctgggggacaacgtcctttacgtaacgatattccattccccaatacaaataagcaattagcttttttgcagcatatttatttgaagcttaaagctggcggtcgagctgctgtagtggtacccgataatgtactattcgaatctggggttggtaccgatgtacgtcgtgacttaatgaataagtgcaatcttcatactatcttgcgactgcccactggtattttttacgcccaaggtgttaaaaccaatgttctgttctttactaaaggctctgacaaagataaatatcaacaagatagctgcactgagaacgtctgggtatacgatctacgtaccaatatgccaagttttggtaaacgtacacccttcggtaattcagatattggctttgcggcagaagatttcggtacagatcagcacctcggcgcgttcgaaaaagtgttcggagataatccagacggcaccagcaagcgcaccgaaggtgaatacagctttggtgcaacagatattgaaattgatacagaagcagtagaagaaaacctgaatgttgatgaacagctagcccattctcgctggcgctacttcagccgtgagtggatagccaataataaaggcgattcgctggatatctcatggttaaaagacaaaaagagtgtcgatgcggctggtttatccgagccaaacgttctcgctcgcgaggcaaaagaagaattagaagcagcattgagtgagctggatagtttattgatcgcattggaaggggccgaataa

SEQ ID NO: 159855 - DNA, 1485 bp, Enterobacter cloacae
atgaaagcctactgcacacaaaacaatattctcgtcacggaaagcacgatgaatgctttcagggaggccatttttagcgttccattcgacgacacatgtgacggacgatgcaagccaacgtggtatatgtccattgctatttttttgcagcatcttatttgcagcgccactgcgagccgtaacacgcgtaagcggtcgcaatttaaggggaaccgactatggacctgttcagttccgtttccttatgcactgggagaaaaagtggctccggcagtattcagacgctcaagagagctaccgtttgaaagagcgctggaaaagctggaggaagtagggtttatcagaatcattacacacgatgttatacgtcacaaatgccgggaatttgcgctttctcggcggtttctcgacgtgctgtttcccggggacagaactgcttatctcaacctggaagatcggtatggctatctgaccgatgtttaccgcagacgtatgggaccgatgacgctggaagaacggcttgctcaggccatgttacgaaagtgcaaagtcaggcatttaacgtcaacccggaatatacctgataaggcctttcgtgagcgggttgcagcggtgtatgaccggcttgaagcgttgccggttaacatcgatgcgctgaggatgtactgtaacgagcaaccatccactgtgaacagggtttattatcacaattttatcagccatctttgtgaagccggtgttgaggctatcagcctgagtccgttaatcgtctcatatcggcaggtatatcgtacggctaggctgggcgggcgttcgtttgaggtggggaaggggtttcagtatctgccaaaaggcatgaaatgggcatgtctggggcagggctataactacgatataaaaagcagccagcttgagatactgcgtcatgagctgcagcgtatcggattatccgataaaaacctgaagcggctggaaacggattacattacaaagaaactgggcgtcaccacggatgaggtaaaacaatttaggtttgctgctgtctttagcgctggttcggtcagcctttcagtgaaaagtggagtaaggaagaggctgaataaagttctcggcgataagagggcagaaaacgtgctcaaacgctggaaaaaattgatgcaaccgctacgggaagatctgaagaggctgatcgaggattatctggcgacgggaaccacaaatcgatacgggctttgcgtgaaaaatgctgtgggacaaaattttaactgtagctggaagaatttcagcgccagacaggcatggcagccagcgcagatgcaccgaaagctgcttgcgcacatgttacaggggctggaaagtcaggctgtgtacgattatgttgccagcaataaaggcgtttgtgcgctagagcatgatgggtttgttacatatgaagagataactgactggtcccatccatatcttttgatagagaaaaagcattga

SEQ ID NO: 159856 - DNA, 1095 bp, Enterobacter cloacae
atgattacagttaatcgtgagcgtgtggacaatctctccgggtctgtatacctggggcgaaatactgacggcaataggtgctatgggcgaattgataaactcgcctgggtaatggatttgtctgatgatagcgagaatgcagtgctgagtgggcgtctggctgggctgagagcgggagggaactatatcgtgcggtgccgccctgccggtaaaggggagtgttctggcctctatcgatccgtggtggagatccgtctcaagagtaaatccagtcatcatccgctgatgctggtcatttactttgcgccgacgaatacggtgcggggctcagtgcgtatggaaatgagtcctcagcactattcagcagagcagatcacaggactgttcatctggcttgggcgtaagggacgtctggggaagtacctgtacaggggcttgcgccaggcatgggtgacgtccattcactacgcactggatgtaaagggaatgaaacttcatgactacctgattggtctggcaaaggttcatgatggtgagttttacgatttgcatggtgaacaggaagggttgcgtctgggctctgccacgctggtagcctctgtctacgccaaggtccattctccgtcgttgagcgtggaggagcgctatgcatctccaaagattacgctggaggaggcgcaattcgagcgttttttacgtctggaactccgcctgcagccggggcgccagcaattgaagctaagtcagatgacgagtatgacctgtctggtcagcaggctgatgttctggcgtcgggaggtactccaggatcgtcggctggatccggattttgcgcagcggctggcgttgatgtcagtaccacgtgcacgggccacgtttgagcccgcgaggagtctgaatggccacagagtcagtgcaaccccaaaggctgccaggaaacgcgtggacaaggtcatggctaattaccgggcggcattgtttgattctgcggctatctgggaccagttaccggtcattctcgcaaaactcgggcttctcgcgcagcctcagtactggatttaccgtaatcgcgtgaagtggcgagggagccgctga

SEQ ID NO: 159857 - DNA, 207 bp, Enterobacter cloacae
atgaataactgcaggctgctcgatatcaagactgtgctcgggatgtacccagtatcacgcgcaacgttatatcgccagatcaaggcggggctctttccggagcctgtacgcatcggtgcccgtcgggtggcatggcgtatggaggatatccacgcgcatatcagtgggctgcccaatgttgagctggctgaagcagctcgtctgtaa

SEQ ID NO: 159858 - DNA, 516 bp, Enterobacter cloacae
atgggaaaaaacgaagaaaatatggctaaggcggagcccaggacgcctaagcagaaaagccgcaaagggctggaggagaaatatggaaagcggtttgaaatcaacctgcatgaagacagccaggagcgtttactggagatcgctaactggcttgacgacgacgattattcaatgctgaagaaaggaagaggaaaagtatatcgccaggcgctggataacatgatcaacatggtctacatcgactacttatatgaacctgtatcgaaagaagcgaaactgctgaaagaactctatctgaaatttcatgagttgaaggaaaagtgtgaactgaaggatatcatgctcaaattttgtaaaaaatatccatcgccagtggatatagagaagaaaaaaacagcagtaacgggcaaaacatggagcaaggaaacgactgaaaaaataaatgattttcgctgggtaatccaaacaatggaaaagctggatggcacagagcgggcagacagtccttcggcgtag

SEQ ID NO: 159859 - DNA, 948 bp, Enterobacter cloacae
atgacctcgaaccgcaagggcaggcgtgcggaaactgtgcgccaacaaaacgtccccaccatcaacccggcacagctttggctggcaggtctgacgcgcgccgggcgcaaggggatgcaaagccagcttcggcgctgtgccggtatcctgcttccgggctcggataccgacagctacccctggcagatgctgaactacacggggatgatgcagatccgtgcgcacatgctggatgctggctatgctgtcgcgactgtcaacatggcactgtcggcgctgaaatcggttgcctttagcgcgttcagtatgggtctgatggatgctgacacgcttgcgcgcatacgcaacgtcaggcgggtcagtggtgacggttgtaggctggggcgtgcgctggcccgccatgaaatccggtcaatgctggcggcggcagcgacgttctccactgtgcgctgtcagcgcgaacgggccattttgttgcttctgtgtggtgccgggctgcgagcgggtgagctggttgccctgaatgcggaggatattgacgttgccgcagggattgtctgggtcagggagggaaaagggcgcaaaagtcgtgaaattcaccttgccgcgaaggtatgcacgcagctgcgccgttggctgaagtgccgtggagaccatgaagggccgttgttcagtcgtatcagccgggcagaccggccagggccacacaggcttaccacgactggattgacggggctgttggcacagctacgcgaagccgctggcgtggactatttcaccccgcacgacctcagacgaacgttcatcacacagttgctggagcagggaaccgacctcaacgtggtacgccagcttgcggggcatgccgatatcgccacaaccacccgatatgactacaggggccggggtacgcaggacagagcctccagggctttctgttgctggtaa

SEQ ID NO: 159860 - DNA, 618 bp, Enterobacter cloacae
atgaaaaaacaacctgtctcactggctcgggagacatcgtgctgcctgtcgcctgctgatgtctggcgtaccctgctgactcacctgctggcacagcactatgggcttgccctcaacgatacgccgtttggtgaggaaggcaccattcaggcgcatattgacgctggtgttaccatgatggaagccctgaataccgtcgttgagaagtatgatctggtacgtacagatcgggacagtgtgggccttcaccctggctcctcattgattactgctattgatgttctccgggcgcgaaaagccaccgggctcctgaagcggggagcatatcagttcgtgagccacatcacgcaggggcgcaggcccgccccggacagtgcagtaaccgccgggccctccgcgccgttaccattgctaccatcggacacattcacccgacaggacgcggtgtccattatggcggtgtatgactgtgtggctattgaggatgaccagcatacccatttccgtctggcaatacgcgatgctgaaggtcagcttatctggcgggcctggaactttgagtccggagccgggcaggggcttaaccactatctgcaacgttatggtgtgaaaaaatga

SEQ ID NO: 159861 - DNA, 330 bp, Enterobacter cloacae
atgaagggtaacacaataaagaagcatattattaccgcactgctcatcacaacgacatccgccccggcgctggctgcttacccggcaagccagcctgctcaggccgcagaagtaatggtcagaatgtgccagcagcaacacaccggcatggataagaacaaggctatcagtaaagtctacgacaccgtgagcgattggcccatagcctcaacaacagaggttgctgcggcgatggacgaggggtggagtttcgcagtacagaatccgggcatgaagtgcgaaaagatttatcccatgatgattgatatgctggccgggaaaaagaactga

SEQ ID NO: 159862 - DNA, 885 bp, Enterobacter cloacae
atggatattttttctggagaatcaattctttcccaagtccctgatgtcaatcattggttagcttcttacggcttgaattcaactacatcaagatatagcagatatatctcttatattgatgctttttttgagtcgaaagatcccacctcatctgatggaagagacaaatttgatttattaaccaagtcgtatgcagaaattatagaaatagtcagcgttaaaaaagcgtttgaacatgaaagaagccccggatttattgagcgtttaagtaaggttgtttctggagttgatcatgttggtattaaagaacccagtgagccaaggaattttctctacgaattacttatggctgcccggctaaaaaatgctggctttattattgattttgaccaaggaactgatgttgtcgcatatggatttggtcgtgctattttcgttgaatgtaaacgcacaacatcaataagagggttcgaatctaatttcattaaaggtggaaagcaattagagagaaagtttaagagtacgaaacttccccattttatgattcggggatttattgctatcgatgttttaccatatgtattgaacgatattcctaaatttgaaatagataatgaaatggaagctcgcatttgtgccaggatagtgatggaacgttttaagcaagatgcaagtaggcatattaataagtatatatcacgttatgaaaatgttagtgcaggggtggtgataatggcgatgatacctgtttggttgcgtgatgttatattacttcatgttaatgaaaaagctcatgtaattcctccatcaactaacacagaagatgtaggtgaagtcatatttttagccgagaagttaagctatccgctacttcctgatttttag

SEQ ID NO: 159863 - DNA, 1296 bp, Enterobacter cloacae
atgatgccgcgccagagtctcctgctgaaaatcctgctgccggtgattgtctttctcactgtctggctgctgctgcgcccggcaggcaaaagcacgccggagaaatctccatcccgcaccgtggctgccttaacgccgcaggaactgcgcgaactgggtattgacggcgacacgcccgccgataccgtcgccacgctggtcggccagatgaagcagtatcgtcgggagcttcagtcaatccagagcgataacgaaagccagcaggcccgcgaaaagcggctgaaagcgcaacaaaccacgctggtatcggagttgcgcggcgatatgcgcaggcagcaggatcagatgcgcgatgaactactgaaaagccagcgggggctgctggataagctcgatcacctgatggcgaaacgtccggacgatatcccgcccggtctgggactgacgcccggcgaactacctgccgacgtacagccggatatgcgctggctggagccactcgatgcgcctccgcccgtggacgaaaagctgctacgcgtccccctgaaagcagccgacaaaccgccgccaaaacctgacgtgaagatctacaccctgccgcagaacgccacgctgaccggttcggtggcaatgacggcgctgattggccgcgtcccgcttaacggcaccgtcaacgatccctatccgttcaaattgctgattggcgaggacaacctcaccgccaacggcatcgaactgccggacgtggcgggcgcggtggtctccggcatcgcttccggcgactggacgctctcctgcgtgcgcgggcaaatcacctccatgacctttgtgttccacgacggcaccatccgcaccgtcccgcagggcggcaaatccggcaacaagcagcaggagatcggctggctctcggataaccaggggctaccgtgtattcccggcgagcgcaaaagcaacgccaaagagtacctgacctcgcagttcctgctggcgggatccggcgcggcggcacaggccttcgccaatggtgaaagcaccaccgtggtggaggacggcagcatcaccagtgcggtgacgggcaacaacggccagtacgtcctcggccaggctattggcggcggattaaaagagaccgccgactggatgaaacagcactacggccagatgttcgacgccgtgtatgtgccgccaggccacaaagtggcggtgcatctcaccgaaccgctggctatcgactacgagccggaaggccgcaaagtgaaataccagcaggccagcacaccgggagggctggaatga

SEQ ID NO: 159864 - DNA, 123 bp, Enterobacter cloacae
atgagccgctttcgccatgcgctggccgagcgcgataaccatattctgacgctgcgggcggtgattattctgctatgtctgtgtctggcgggcgtcggctacggttggtacagcgccccgtaa

SEQ ID NO: 159865 - DNA, 573 bp, Enterobacter cloacae
atgttacattttggtaaaatcctagattacaacgataaggggtacggttttattgaaggctcgtgcttatccttaaccaacgtactaagtaagaaacacttttttcacatttcatcattgaaagcacttggcattacagagtctcttattaaagatccaaatataactatttggttatggtataacatcgaaaataataaaaaaggtcaagcgttaagccaagcttggttaaattacaatgaaattaacgaaggtgaggtgataaaaaacttacctttcttacattaccgttcttcaaatcatgacataagagtagggatagaagattgctatgaaataatgcattacgtccaaatatacaaagaaaattcatgcaccgttcaagccgaagccaataaccttatatctcagaaaggaatttggaatgagttcccgcacatccgtagtttaaatgaccatacgatacatctgaacgtccctggtatattacctgtatactatgcaataatatgtaaacttcttaatataaaaggaggaaaaggcctcccgcttactaacttcaggcaatactaa

SEQ ID NO: 159866 - DNA, 633 bp, Enterobacter cloacae
atgagtgagcaacgatctccgccttcacgtccgccacaaggaccggttggttggctgctgtcactggctggacggattattgggctggttatcggcgcgctggtgcttcgggtggtaatggaattggtagggctctatttctggtggcctcaggaggagagctggcatgtttttcaggtgatgatgcaggagcaggcggaactggttattgcgttacagccgcatccgcagggggataaaattgtgatgctgctggagaacagagcatctcacgtgcttataaccaacaaactaattcaaaaaacactcacaattctggcttatacactggtgagttttatgctgcgtctgacatggatcgtcgccatacttcccctgctctgcctgtatgttttaatcgggctaacagaaggtctggtacaacgggatttgaggcggtttggctccgggctggaatccgtttttctccaccgttatatcatcaggtatggcagttctgttgctacaacgctttgggtggtttatctggcgcagcctctgtttctgcctgcgaggttagttttattaccagccaccatatggtttgggataacagtatggatggtggcaggtagctttaagcgttatatataa

SEQ ID NO: 159867 - DNA, 534 bp, Enterobacter cloacae
gtgattgtcagcggctggcggcaactgtttttgcgcgagatggcaacccaatcgccggaagaaacacagtccatccccgccctgcaacaggggcaaacctgcgaggtggaacaggtggacgttcgcgcccgccagacccagccgccggagcactacacggaagggacgctgattgcagcgatgaaaaatgccgcccgttttgtcagcgatgaacgcctgaagcagcggctgaaagagaacgccggtattggcaccgaagccacccgcgccgggattatccagacgctgcttaagcgcggttatctgattaagcagcgacgctttctgctggcaacggataccgccagcacgctgattgacgccctgccggaaacgctgaaagatccgggcaccactgcgctatgggagcagatgctggatgacatcgcgacggggaaaatggggctggaggcgttcctggtgcagcagaaagaggccgttacagcgctcacggctcaaatagtcaggggccagaaaatcgccccatcaggttag

SEQ ID NO: 159868 - DNA, 270 bp, Enterobacter cloacae
gtgcgcataaaatacgggctatctgcgccagcgccgaagctgattgaactcgccccgtctggccttctccagcgttgccagcagataggcgagggggcggtggatatcgtgggcggcgatccgccacaggcagtcgtccagaacctgctggcagagggcgagttccatattgcgcatcgcgcgttcggcggcgcggcgctcgctggcgctgaagggattatccacaggccagtgcaggtctggcgtacgcttttgatgtttattgtgtaa

SEQ ID NO: 159869 - DNA, 3684 bp, Enterobacter cloacae
atgaatacgtcaaatattaaaaaatacgccccggtggcacgtaaacagttccgcgatgcggtcatgcaaaaactgactacgctgggtattgaggccgataaaaagggcaacctgcaaattgcgcaagcaaccgatcttggcgacagcgtgcgttatggtcagttctcgttggataagcaactggcgtcacgccgtgagcgtctggtcaagcgagcagataagcagggctacgacgtgctggtggaacacattgcttacacctggtttaaccgcttctgcgctattcgctatatggagctgcatggctatcttgatcatggtttccgtatgctgtctcacccgacgctggaagggggttttgaggttctggatcatgtgccggaagtggctgatgctctggggctggacaaagcgcgtctggtggagatgaagctggcgggcgatcgtgacgaagagctgtaccgtgaactgttgcttgcccagtgccatgctcttcatggcgcgatgcctttcctgttcgaagctgttaatgatgaaattgagttagtgctgccggataacctgactcgcaccgactccattctgcgtgggctggtggacattattcctgaagaagactgggagcaggtcgaagtgatcggctggctgtatcagttttacatctccgagaaaaaagacgatgtgatcggcaaggtggtaaagagcgaagatattcctgccgctactcagctgtttaccccgaactggattgtacagtatctggtgcagaactcggtgggccgccagtggctgcaaacctatccggactcgagcctgaaaggcaaaatgccgtactacattgagccagcggagcaaacgccggaagtgcagtcgcagctggctgctattaccccctcgagtattgaacccgaaagcattaaagtgctggatccggcctgcggttccggccatatcctgactgaagcctataacgtgctgaaagcgatttacgaggaacgcggctaccgtacccgtgatattccgcagctgattctggaaaacaatctctttgggctggatattgatgatcgcgccgcacagctgtctggttttgcgatgctgatgctggcccgtcaggacgatcgccgtattctgggccgtggtgtgcgtttgaatgttgtatccctgcaggagagtaagctggatatcgctgagctgtggaccaagctgaatttccaccagcaagtgcagcgcggtagcatgggagatatgtttgctgaagggacggcactggccaataccgacagcgcggaatataagctaatgatgcgcacactggcgttgttcaccagtgcaaaaacgctggggtcactgattcaggtgccgcaagaagatgaagctgcgttgaacgagtttctggatggattgtatcgtctggctgttgaaggtgatattcagcagaaagaggctgcggcagagcttatcccctatatccagcagtcttggattctggcgcagcgttacgacgccgttgttgctaatccgccgtatatgggcagcaaataccaaacgcctgatgtgaaaaaatatctaaaatataattttttgggatatgacaaagatctattttctgcctttattattaggaatttagagctttctaaaagtggtggccagcttgggtttatgacgccatttgtctggatgtttatctccagctacgaagagcttcgttctcgattgattaataaggaaattataacctcgttagtgcaactagaatattcaggttttgatggcgcaaccgtacctatctgtacatttactttacagaaaggacatattgcaggttttacaggaagttatgtccgtctttctgattttagaggggcagtaaaccaagggccgaaaacgcttgaggcaattcagaatcatgactgtggctggttcttcgaaagtaaaccggatgatttcaaaatgattccgggagcaccaattgcttattggataaatgaaaacttattgcatgcatttgagaactcaccaaagctaaattcgattgcggaacctcgtaaaggaatggtaaccgctgataatccgagatttattcgctcttgggctgaagtatgttttgcgaaactgggtattaacattaaaaaccgggaagaagctattcattcagaaaaaaaatggtttccatatcaaaaaggaggcgagtatcgattatggttcggaaaccatgaatgggttgtaaattgggaaaatgatggccgtgaacttttcgatatgcaaggaaatggatataaagttggttcaacaaatcacaatcttgaatatattttcaaaccggcaattgttttttcaaagataacgtctagcacacctcactttcggtatgcccctcagggctttttgtttgatgatgcatcaggtctatgtgcgataaaagatgaaaagaacacctttaagttgttggcgtttctttgttcgggagtgtgttctgttttcaacaacataataaatccgacattaaatttacaaccagggaatgtagccaacttaccagccccgctcattaatgaatctgaatacattgctataaaattagtatctgcatttaaggaggactgggactcatatgagatgtcgtgggattttaaaaaagacaaattgcttaaattcaaatgcaattcactaagtgaggcatatgatcaatatttattatatgtagatttaactgttgataacatcttaagacttcatcagcagaatgatgagcttttcattaaacatctcggtttggaaaacactttatatcataaaaaaacaagatccgatatatcattgacttgtaattcatttttcttatattcaaatgatagtgaattggacagaattaataaaaataaagcaacaattttatttgaattactgagctatattatgggttgcatgatgggccgatactccctcgatcgcgaaggcttggtctacgcccacgaaggtaacaaaagctttgctgaattagtcgatgaaggtgcctataaaaccttccccgccgatgaagatggcatcctgccattaatggattccgactggttcgatgacgatgtcaccgcacgtgttaaagagtttgtccaaaccgtatggggtgaagagcatctacaggagaacctcgattttattgccgaaagtctctgtttgtatgcaatcaagccgaaaaaaggcgagtcttcgctggataccatccgtcgctatctttccacccagttctggaaagatcatatgaaaatgtacaagaaacgcccaatttactggctgttcagctccggtaaagagaaagcgtttgagtgtctggtctatctgcaccgttataatgaaggcacgctgtcgcgtatgcgtaccgaatacgtagttccgctgttggcacgctaccagggcaatatcgatctgcttaacgatctgcttaacgatcagcttaagaatgctgaatctggcgcggccaccacacgcctgaaaaaagagctggatggtctgaccaaaaaattcaacgagctgcgtagcttcgacgaccgcttgcgccattatgctgatagacgtatcactattgatctggatgacggcgttaaggttaactacggcaaatttggcgatctgctggcggatgtaaaggctattaccggtagcgcacctgaggagatttga

SEQ ID NO: 159870 - DNA, 1092 bp, Enterobacter cloacae
atgaaaatagcggcgatttatacgcagagagttggcccgttgggcgatgcggacattagcttcaaaaacgactggacgggagaggtggaggaaaacgttctccttaccggcccgaacggctgcggtaaatcgacgctgctgcgtggtatagctatgctgtgggatgccctgggttattggcttgatcagcgtgatttcatgcctttaagaatggagacaaagaaatggctgcgccgatggaatggagtagccatcgttcttgaagacatgggttttcttggtactgaaaaagttggcgtttattttggcaacaaggaatgggtcggaaaacttttcatcgaacatcctgaggtctcctggactggtgaaacctttggcagtagctctggacgcataagtctcagtaaaggcatatggagtgcagagtcaggccattcgtcattgattcctgatcttattgataagtggtcacagattagacagcgactcctgattactagtgagtacgttgatgctccaaatattatctatctcgatgcagatgagcgacgctgggtttcaccgcaaaaaaatatatcgtccttatcccaggatgatttaagtcaacggtggttagctacttactctccctccgctgactggaaagatcagcttgaagcgtcgctgttcaacatgaaagcgaccttgcccgatcagtatcccgagatgatgaaaaccctgaatcagttcttctcaggcaaagtcattgaagaggatattcagccaggacagcgtcagcaggtaatacttgctaacggcgacactcatacgctggatgagctgagttctggtgagcatcaggtcttgatcatgctgtttatggttcaacgctggcttcagccgggcggtgtcgttttaatcgatgagccagatctgcaccttcatccttcgctggtttcccctttgcttgcgactctggaaaacattatccagaaaaagcaggggcagcttattttgacttcccacgctactgatatctgggaaagatacgataacctaggaatcagaacagatttgagtcgactcaaggaagtacgtcatggcaaagattga

SEQ ID NO: 159871 - DNA, 816 bp, Enterobacter cloacae
atggcaaagattgataaatttattcaagacatcaaagaccgtgatcttgctgcctttcctaataaacgagtcctcgtactggaaggagtggatgacatagcagcatttcggcaactgttgaccaaacataatcctggttgggaacagcaatgggtattagttaaagctaataaaaaacagaatgtcctggatattctcgcattagaaaacacctggtatggccttatcgatcgcgatgaatggtctgaagataagataatgcagctagagcaagaacatcctcgccttatgtttctaccaaggttctgtattgagagctatctggtcaatccttctgaaatctgggaggcgttacagccaaaacatcaggctcgtattgaaggtggagagcccgctttcaccagcctgtttgtgcaggaagctcaacgttggcttaaccattccgctatctggtatgtcgtgaacccactttgggaacgccttcgtacagctgggtttaactcagcactgcttgatgttgataccgttcagcaagatgcagaggttgagcgaattttgcgctcttggggggctttaattaatccagaaaaccttgcccaagaaatacagcggcgcaaggcgcaggtcgagagtctttctctaactgaacaattgtccatctgtattcatggcaaactcttctttgaaaagtttgttgatccacttctgacgagtttcttgggacagcgtggcagggaacagcgtcaaaaggatctgtttaggacacttccggttcctaatgatttatccccgatttgggtgagaatgggattataa

SEQ ID NO: 159872 - DNA, 1416 bp, Enterobacter cloacae
atgacgcgctatcaacatctggccaacctactggcggaacgtatcgaacaagggctgtatcgcagcggcgaacgtctgccgtcggtacgcacgctgagccaggaacacggcgtgagtatcagcaccatacagcaggcctaccagatcctcgaaaatctccagctgatcacgccccagccgcgctccggttattttgtctcgaaacgcaaagcgcagccgcccgtaccggcgatgacgcgcccggtgcagcgccccgtggacgtcacccagtgggatgaggtgatgatgctgctggacgcccgcgccgacaaagagatgatctcctttggcggcggctcgccggacatcaaccagccgagcctgaagccgctgtggcgcgagatgagccgcattgcgcagcataaccctggcgaaatgctgagctatgacgtgctcgatggtcgtctggagctgcgcgagcagatcgcccgcctgatgctggacggcggctccaccgtggcggcaaacgagattgtgatcaccaacggctgccacggcgcgctgtcgatcgccctgctctcggtgtgcaaaccgggggacatcgtggcggtcgagtcgccgtcgtttcacggcaccatgcagatgctgcgcggattcgacatcaaggcgattgaaatacctaccgatcccgagaccgggatcagcatcgaggcgttagagctggcgctggagcagtggccgatcaaagcggtgatcctggtccccaactgcaataacccgctcgggtttatcatgccggaagcgcgtaaaaagcaggtgctggcgctcgcccagcggcacgatattgtgattgtggaggatgatatctacggcgagctggccgcagagtacccgcgcccgcgcaccattcactcgatggacattgatggccgcgtgatcctctgcagctcctttaccaaaaccgtggcgcccgggctgcgcgtcggctggattgtgccggggcgctattacgaccgggtgatgcacatgaaatacgccgcgggcgggtttaacgtgccgggcacgcagatggcggtggcggcgtttattcgcgacggccattaccatcgccacgtgcggcgcatgcgccagatttatcagcagaatatggagacctatacctgctgggtgcggcagtattttccggcagagatatgcgttacccgcccgcagggcagcttcctgctgtgggtcgagctgccggagacggtcgacatggtgtgcgtcagcaagcagctgtgccgtctcaaaatccaggctgcggccgggtcgctgttttccgcctccggtaagtaccgcaactgtctgcggatcaacgtggcgctgccgccgacggataaacatcgcgaggcgttgaaaaagatgggtgaggcgattgtgattgcgatggaggggtag

SEQ ID NO: 159873 - DNA, 219 bp, Enterobacter cloacae; identical to SEQ ID NO: 118985

SEQ ID NO: 159874 - DNA, 498 bp, Enterobacter cloacae; identical to SEQ ID NO: 118855

SEQ ID NO: 159875 - DNA, 219 bp, Enterobacter cloacae
atgacgccagaaacagacaacgccatccgcgcagcctgccgccgctgcaccgaggaaatccagcaggccatgcgcaagaagccaaagcctaactggaacgaaacggtgcctccaatcatcaacaagcatcacaagaaaatagaagctctgggagttagcctcctggagttcgtcgtcaaaactggccgccttaatgggcggtttggagttgaatcgtga

SEQ ID NO: 159876 - DNA, 363 bp, Enterobacter cloacae
atgagcaccggaatcggaaagcatcagtacagcaccaaccatcgcaacgtctaccatcctgaccttgctatttgcccgtattgcggattcgacagctgcgaggctgaccacgttgatatcggtatcggcatggagcaatgcgggccttactactgccctaagtgtgaggcatctgaaattagcagcctcgataagcgcgaactcactccgcgggaacaggaaactggctggttccagccaggcagcccagtaagtgacgtcgccaatacggttaacggcctgttggttgaccacaaggaagccaagcaggcctatgacattggcttgctcgatttgaagaaatcagctcgggaggcctcatga

SEQ ID NO: 159877 - DNA, 852 bp, Enterobacter cloacae
atgaccgacggcgtgacccggactgatgtcgacaaaacaatgtggctcgtgacactggcggatatcattacaaataacagtacccgccaggaggaaaatctggtcgtcattctgagcagggaggaatcgtgggggcctgcttctgaacgtaattccaacgcgttgtatcgggcctcctgcataatgacactgtatctggccgatactgaacagacgaagactcagactttcactgcaaattactggcctctactgagttccctgcacctgtttacagaggaattcagactggaagagcgcctgcggggacacggcctgggtacctggatcacgcagcagtttgtgctctgggccagaggtctgccgcctgaaaccagggtctggccgattgacatttcgaaggctgatgaaaaaagcgaagaaaaccagatccggagggacaggctgtggcatgcaatggggttccggttcccggccgggcataactgctcaatgccgctgggggtagacgaactgcagttgccgcggagcaggagttcaacgctccgggtggagcccctggcatccggagtacgccggctggaagacggttaccgcgggctgcaggaaaaaattgtgcagctggaaggggaaatattgtcgaaaaaacagttaattggttcaataaagaagcatccttttcttcatctgttgcacaggaaatggcgcccgctcccggacgggaaatgtgatgccctgccgctgcgggcagcaaaactgtctctgccgcagagcggggattctgaccaggaggtggagcaacgggcaaccggggtcatccggctggctaccctgtgtgctcagtcgcagtaa

SEQ ID NO: 159878 - DNA, 1089 bp, Enterobacter cloacae; identical to SEQ ID NO: 110851

SEQ ID NO: 159879 - DNA, 906 bp, Enterobacter cloacae; identical to SEQ ID NO: 110852

SEQ ID NO: 159880 - DNA, 2178 bp, Enterobacter cloacae
atggtgctggccgtcgttgggaccatgaaagccggaaaatcaacgaccatcaacgcgattgtgggaaaagagatcctgccaaaccgcaatcggccaatgacctcaatcccgacactcattcgccacgtgccgggtaaacatactccagaccttcagctaaacaatatcgaccctatccatcagttgttgagcgcgctcaagaaaaagattacaactgacgaaggcaaaaagcgtgtacttgaactcgataaggatcaagagaaaagtaagttattgcgaattgccatggatgataattggttaaaaaatagctacgctggtgaagctgaaattttcacctgcctcgcctcgctgaatgacctggtgcgtctggcaaccgcgctgaatgtcgaatttccgttcgaagcctatgaagaggttcatgagcttccggtaattgaagttgagtttagccacctgacgggaatggatgatagccatggaacattgaccctgctggacaccccaggtcccaatgaagccggacaaccccaactccaggcaatgatgcgcgatcagttgcaaaaagcgtctgcggtactggcggtgctggattacacccaattaaattccgaagccgatcagcaggttcgcgcagaattgaacgatattgcaaacgtggcggcaggccgtttgtttgtcctggtcaataaattcgaccagcaagatcgtaacagcgataacgctgagacggtcaagcagagcgtgcccgccatgcttaaacatgacgtcctgaatagcgagcgcgtttaccctgtctcctctcgccatgcatatctggctaaccgcgcccgcagcgtgataagccaagccggaacgctgtctggtcaggaagactgggtgaaggattttgcgaaactggcctttggtttatcctgggaagaagaggatcttacgagtctggatgatgtcaggagaaacgccgataaaatctggcgtcgttcactttttgataagctcattaccgaagtgattcaggctgcgcatactaaagcggcagcactggccgtcgattctgccgcagccaagctggttcagaacgcagaaaacgccaatgaatatctctcggtgcgtcatcagggtctgttgaccagcattcaggccttacaaaatcaaatcaacggcttgcttagcgatatcgataatatagccacctgccagaaagaggtcgacgccgaggtgaaacgggccatgaaaggcatcacgcgtgaaacggacgcattgcttgaacaggccgagaaaacgctgagcaaagacctgaatgaatacttcaaaaatggaaaacgtcaggagaaagaagcattcgggatcgatcaaccgaaggaatcaacaagtctcacgatctttggaacgttctttaagacgctgaccggtactacccagccacgagagcgtgatttcgatccgaacaatccggaaatgaagtttagcgcgcgttctgatgccgaaagattcatccagcaaatcgaagactccgtcactagtttgctggcagagaccgaagaaaaaattaaaccgacgctgacagagatcgttgtcggcatcgaaaaaagcttccatggcaacgcgatcaaggctgtggaaaaaatcgcccatcaaatcaatactcgtcttgaagacgatggctttgcggtcaatattcgcttccctaaagtaagccagctacagactaatctttctatcagaactcgtatggccagtcttctggaggaaaaaaccttcagtgaaaccagacgtcgccgtacgagtggagtatggggaacggtgtgtgggtggtttaaaaccgatgactggggctgggaagattacagcgttgatgtcacccgtagtgtggtagatattcgcaagattaaaactgccgtgaaaaaacagactaaagagcattttgcagagttaaacgagaccatcgaggcgagtatcaatcagcctatattggtcgaaattgaatcattctttggagcctttaaaagtaaagtggagcagttgcgtaatacgcttatccagagcaccgaagatcataaaaattgccagaatgagcaggaacagctgacactgcgcctaagtgagctaaaaaaactcacaccggagatgatccgtgacggcaaagcgctcaaagaagaactggagccgatgctgtga

SEQ ID NO: 159881 - DNA, 267 bp, Enterobacter cloacae
  misc_feature (255)..(264): n is a, c, g, or t
atgttcactaacattgaaaatatttcaaaatcgaaacgcatctctggcgaagctttttttgtcactgatattcaaggtacgatagatatatttaaggttaaccttgaacctgatgctgaaaaagatctgaccacttcattttctaaaagcttaatcaataatattattgaacctaacagaggtaaagtggccgttccacttgtatccactttattagaaagagataaacaagttttcgaatatgatcacttagcnnnnnnnnnntag

SEQ ID NO: 159882 - DNA, 393 bp, Enterobacter cloacae; identical to SEQ ID NO: 118853

SEQ ID NO: 159883 - DNA, 138 bp, Enterobacter cloacae
atgcacgagaacaatatcacgttactgtgtaatgaagcagagcgattattgcagcttaatattagtttgctgcaaaaaatggttgatgagccgaatttccttgtcgaaagcggtaatggtgccaacttactgatttag

SEQ ID NO: 159884 - DNA, 198 bp, Enterobacter cloacae
atgccggtgcaaaccagtattgacggcggggtggtgacctggacggggacagttatcgcgaaccacctctacaacgccgacgacgagtttgacgacgtgattgttgagttgccgccgccgtgggattcgtggctggatatcgttgtcactggctatccggacgggcgcgatccggaatcactaccgagggtgccttaa

SEQ ID NO: 159885 - DNA, 1272 bp, Enterobacter cloacae
atgtcctataatgaacaaaaccaagccttactaataagaagatatttcttaacaatttatcttttctttaacgtagtttgcggtttttattttatctatgacggcagtttgggtggtgatttccaaggggaatatcctaccgaacctactatgatgattatcgccatcataatcgtattatctattttctattttatactttcgttccttttccctttttttgaaaaaataaaggttagagaattatcatattgccgaagcaatcttttggactattttgtaattatattgttgtcattatccattcatgcagcaattaaccttaatgttggtatctctggtctaaaacttgaagagcctgacggtagttcgaagttttatttctatttgatttccatttttcagcctgtaaactttgcactcatttatcttttctatagagcagtaccttttcgggtaaataaagttttcctactaaacgtactgttatatattgtgtatgttattgtcagtgctcagacagttaacattctgactttgtttgccttattcattatttatcttcaacttaaacaggttaaggtctcaggcagaaaattatttacgctaaccgcattaggattagcaatttatcccgttattagatttttgaaatatgcaattgtcagcagcggtcgacaaaatgttgcattagccagcactttccagaataatattggcgacggtgcgactgatatgtatttcgactttttctttaaaagtattgagcgttttcaaatggttgcaaatatacaatttattatggagcactgggagtctttatcttatgcatacaataatgcggtaaatggtggatatactttcctatcctcatactggttcattgatgcagtactaagaagagtcttcggagagaatgtttttgcgacaggtttagcgccacaggactttatggcaacagcaataaatggtcaagatacctggtcttcacatatcagttttctgggttatatcccgttcttcggtttttacagtattctggtatatacattaatgataatttttattttcctcagtatatttctttccagaaaactgatgtccagtcgttacttcgtaacgctaacttggctgatgtgtttatttctagtatgtcacggttggttcattccatttattaattacattcaatcattattagtttttatttccgtcattatgacattgcaagtttttaatgtgggacgaaaacagatacaacctcgcaggtaa

SEQ ID NO: 159886 - DNA, 477 bp, Enterobacter cloacae
atgagcactaccctaaaagaatggctaaagcataccatcgcggagcttgaagaagagcgcgttgctacgccaggcacagtaaacgaagatgcggttaaggcgcttagtgcgatgaaacttgcgctggaaatgttgagtgctgagccggtctatcagtgcgagttttgccatcaggactctaatggtgagcttcaatggcactgggaagacgttaataaggatttttatgatcaatacgactctgaacgtcgcggcgagcgtcgggtgctttacactgccccgcctgttattaataacctggctgaagcaattatcgctgcgatcgaaaaagagcagaaccgtcttttcaaacaggattatttgatggattcgaaagactgcattgatgtgacccgtgaagagatgcttcggctgagccctggccacgaagcacagctcacaaggtcttatacgcaggaggcgaaaaagtgtacctga

SEQ ID NO: 159887 - DNA, 159 bp, Enterobacter cloacae
atgatgtatttaggcatgggcttcctcgcccaacagatagagcacctgcaccagaagctcagcttcagtgccgtacttcatttcccaggcgcggcggccagcatgaatcgccacaccgtaaccgccattgcgatggtgtgtatggcaaaggggaattga

SEQ ID NO: 159888 - DNA, 1035 bp, Enterobacter cloacae
atgagcaaaaagatcagagtattcgattttttctctggatgcggaggcactagccaaggcctcaaaactgctggctgtgagattgcttttggccttgatttcgattatgactcaagcgaaacctttaaggctaacaatccggatgccatattcatcaatgatgacattaggtcagttgatgttgctaacatatcacaattagttgatacagcaaaaaaagatgctcagatcttattctgcgggtgcgctccgtgccaacctttttctaagcaaaatcagaataaaacctcttcagatcccagaagaggcttgttatctgaattcggtcgctttgtcgaattctataagcccgattatgtattgattgaaaatgtgcctggcctacaaaaagtggatgtgaacgatggtcctctctatgatttcatttctattctgaataatgaaaactacaaaattgtttatggtgtaattcctgcgttatggtatggcgtaccgcaaacacgtgaaaggtttgttttaatggcttctcttcgatcacaaattcatttaccggagcgtactcataatggaactaatattccattcgctacggttagggattggattggtgatctaccttctattgaagcaggggaagctcatccgttggtgcaagaccatgttagtgcaaagctttctgagctgaatttaaaacggattaggtgcacccctgaaggtaaaggacgagaatattggccaagagaacttttgcttgaatgtcataagaagcatacaggccatagcgacgtttatgggcgtttggcatgggataaaccagctagtgggttaactactcgatgtataagttattcaaatggcaggtttggacatcccgaacaggatagagccatttctgttcgggaggcagccttgcttcaaacgtttccattaaattatatttttaaaggatcaatgctgtctaaagcaaaacaaattgggaatgctgttccgccaaaaatggctgagtcaataggaaaagtttttatcaaaatctaa

SEQ ID NO: 159889 - DNA, 1755 bp, Enterobacter cloacae
atgagttctaaagccatagagccattcatccgacacattcgatttccattctataaaaaccttgaagaatacagtgtaattaattttaattaccctatcactgcattggttgggcaaaacggaacaaataagagttctgttttaagggcactctatgggtcgcctaacaactactcaattggtagcttatggttttctactgacatagatgaaataaaagatgatggtagatcacgatttatatatggttatttcgattatacaatcaaagaagttgtcgaggtaatcaaaacccggatcgttgaccataatgaccctgatctttgggaaacatccagaccacttgctggcgatgggatgaaaaaaatgccaaagagcattgtttctcctaatcaacaaaagtcgcgatggaaacaaattgataaaatagttacctatatcgactttagggcatcaataagcgcctttgacaaattcttctaccatgctgattttaatctataccctaagaaaacctttttgcggaaaagaagccacatcttaaaagaagtaattgaaaataatgcatccagttgtaaaccatttaaggggaaaaaggagaaattatataggaacgaacttctttccgaagagaaaattcaaataataagtcatatattaggtcgaaattatacaagcattagactagtggaacatgccctcttcactaatgataaagcatctacagttatactggagtctaacagtctaaactattcagaagcatttgcaggtagtggagaatttgcagtcactctattggttaaccagataataaattcccccaatgcttctttaattctgttggatgaaccagaagtttcgctccatcctgctgcgcaagtaaggctcatggaatttttaaaccgaatttgcctaaaaaacaaacatcaggttgttatctccacccattcctcttcaattgttagtgaacttccccaagagtcaataaaactgtttacattaaattcaacaacaggaaaagtaagtattcttgaggatgttagcccagaggaggcatttttcactctcggtgacagactttcgaaaaaaacaatttttgtggaagataaacttgcccaaaaatttgtagaaaaggcgctaaaaacagggggcgaagccttactcaacacatttgatataatttattgccctgctggtgcaagtactttattaggtaatattgccgtaccgttatttttatctaatgtagctaatgcagtatttttgttggatggggaccaaaaaacgctcactgacttttcaacgtccacccaaatcccagaaagccaagattccgctctatcagaaatattaaaaagcattcttggttgtgaaattaaaatccctacagatggcaatggtggcaaacctaacgaaaagcaaaaaaaacagctttatcgtggctttatagatttttcatataacttcataagttatttaccggttacaaaccccgagatttttcttattgaaaacctccctgaattttatgccaatttaatcaaagataaaaacaaatcaggcctatcacccaaagaaataactgtggaaatttgtaaggaagacatcgggagtaatgaaataacatctgatgatatatttgccacacaaatccggatcctatcaaaaatacctgatgatcatcctgtttttatagaaacaagagagatgctgaagtttttccttgaacatggtataatcagaaaaaagtaa

SEQ ID NO: 159890 - DNA, 735 bp, Enterobacter cloacae
atgagaaataaattagcaaaaaccgtacttattgccagtgctgtactgtcattctcttcatatgcggctattactccgggaggactctcacaatccacctggtcgattacgaatgcgccagcaagtggggtaagtgagatttcgttcccgattcgggtaaatgaggcgccggtttcgaagggatattatttcgctcagcaatttcgtattgttggagctaatctaggttatatcggtattcagcctcaggccacctcagagaagcatgctcagcttatcttttccgtgtttggtagcggcactaagccgattagctcgaattgtagtagcggtgcagatggtggttctggtgtttcatgtagtacgatgttcacaaacttcgtccgtggcaccctttattatttcaacgtcaaacaagatgccaatgacaaatccatttggcatggctcaatgagtgacggagtcaacgaacatcctattggttcatggcaaatcactggcagtaccaaaggtattaataaaacagaacttggctttattgagtatttcaaatcactgccatcctgcgagaagttaccaaaaatttctgtccagtatcatcagcctcgtatcactggcttcaaaaccaccattacagggccaaccgaatatggaaaatgtaagggcgcagcgaactttgtcggtttcaataccggacgatggatggctacgcatgcattaggtttttcaaattaa

SEQ ID NO: 159891 - DNA, 387 bp, Enterobacter cloacae
atgtctgacccggtttccagcacagctctaactggtgttgctctgactggtgccagtgtctacgggctgcttacaggttccgattatggtgtggtatttggtgcattcgcaggggctgtattctatatcgcgacagcatcagaccttagtattttgcgccggctggcctacttcgttgtgtcgtatatcgttggcattcttggttcaggtttgctgggctcaaaactcatgtccctgaccggttatagtgataagcctctggatgctattggcgctgtaatagcttctgcgctcgccgttcagatcctgacattcctgaacaagcaggatataagctcgctggtggcgctgataacgcgccggggaggttcaggtggtactaaatga

SEQ ID NO: 159892 - DNA, 273 bp, Enterobacter cloacae
atgagcatcatcgaaatgatattaggcggtattgctgcgctggtggccgtcgcgctcagtggtttttttgccgggaatgttcgtggtcgcggaaaagcagaggctaaagccgaccagcagcgcattgaagataacgcagcggcaacagtcgcagcagccgaacgccgggtagaagcaacgaaagaggccagcgatgtacagcaaactgttaaccatatgcctggcgacgatgttgatcgcgagctgcgggacaactggacccgtaagggttaa

SEQ ID NO: 159893 - DNA, 552 bp, Enterobacter cloacae
atgacgcctactgttataacaagtaatctttatcttaaaacggctgtcacacagctttttgagaaagatttagcagctaaaaatatttgcctgatagatttcgatgaacagctgacgcttcacgggctattggatattctcaaaaaaaacatcgatatcgagaaagccagggttgtctttgttggtacgccttcattgttccggggatttgttctgaaacatgactggattgatttaagccttcccctgaataacatcaggaaacagattagtaaggtggaaggtgtcacggtatgtacactgaaagatgatatttacagatacctttcgttgagaatcttttctccacgtcaggcaaggatatctcttttaaccgccagttatgaagtaagcgatatatcattgcttactggagagtcagaaaagagcatttattgtgaaataagcaatataatgcgaaaaatcagtcttcgctcaattaatcatctacgttactttatgatgagagaatttagggtgcgcaaaaaaattaatatcactctgatgatatag

SEQ ID NO: 159894 - DNA, 144 bp, Enterobacter cloacae
atggataaaaccatctttgccaacataaacgcccacatgcctgacattgggttccgtcataaagaaaaccagatcacctacacagacaaaaaattcatccatgattctctgttgcaacactggcttgtcatttacaggctgtaa

SEQ ID NO: 159895 - DNA, 291 bp, Enterobacter cloacae
atgacttactacaactttaatgatagtgaacagcaaagccgcttttccaggaacaagcatatccccgttccggaggctgctatgcgtaaatactacgaatggcgaagaatggttcgggatatgggacatgatccaaaatccgcagcaaactatgtttgtgatggtaatccagagaaactgcacggagacacttactcattcagactgacacaggagcacagggttgtgtatacaaaaatcggcaataacatcaccgtgcattcggttggtggtcattacgtgaggcaatag

SEQ ID NO: 159896 - DNA, 201 bp, Enterobacter cloacae
atgttggaaacgtattatggactgggctcgaccgataactctaaccgcgaacaaaagcaaagattgcttgcggttcaggctgccttagaaatagcaaaagcagcggcaccttcaggcagcgttctgtctgctctaaccaatgtcgttgaatctgtatcgaaaaccgctgatgcaatacaggaagcactaaataaacagtag

SEQ ID NO: 159897 - DNA, 309 bp, Enterobacter cloacae
atgggggatatcggcaatctcaacgaggtgtttcagtggagcatttctaaagtatcggaggcattttctctcgatcgcgccacggtcagaaagcgtttagcggaagctggtattcaacctgctggtaagttgcgaggcaatccaaaatacgcagcagcggataatacgctaatcgactgcgaactgttttacgaaaacgcatgtcatccgttcacggccagcccggatgattgtgcctggtggaggaaagagatttatcagttcgcccggcagggaagtctgggagaaatagccccgtttgaggcgtaa

SEQ ID NO: 159898 - DNA, 699 bp, Enterobacter cloacae
atgaaaaaaatatcagttttaatggcaacattgcttgtatatggatgtgcatttgccggtggaaatactgaaaaatccatcaaaccttcaagtttattagcaccttatgatgagtggtattttgatttcgtaacacctaaagcccttcccgctgttgtaacctatgcggagttgctcgatacagatgggattttgtaccgcttgcgaactttggatggggttaatacaagtgatgccagtgttgggcaatgggccaaaagagggttgggtggaggcattcctgcatttaacaaagctaaaaaccctccgcaatttattcacttttgctgggattcagttattgataaaaaagtttacgagaccagaataaccttcagcagtgatgtctggaagttgatgctgacgccttattttgctccttataatgaagcagagtcagcttatcataatggcgctaaaggcgagcaacgataccatcaatttatggttatcggactggcaccggaagggaaggccagggtatggttacagaacagtcgcaagccgaatatagagctcactgatatactggttgagaccgtttccggtgataagttagatatgtgtaaaaacatcactgattttagtcgcgggtacaaatactcgaaagggacagaagattttattaaaggtaaaaaatatccgtatggagagtggtga

SEQ ID NO: 159899 - DNA, 741 bp, Enterobacter cloacae
atgcacttgcttaagaaaataatattgtcggttatatttattcatctgtcgggttgtacagcatttctttgggatggaaatagggttacagaaacaaagctcgatgggaaaacattaatctcagacgaagttacagctgcgttttattatgagaatctctctgcttcagctattcagggaaagacacaggtcaaggtgggtatacctcagaatggtgtcgcttttcagggtgaaaaaaacatctatatattaacgaaaggcgcaaaagagttacttgccctggataagttatccacacaggtagcgctggttagcggttttgagaaatttgatggtctaaggctaaagttggatgtgccgcatgaaaatgatgttgtcatgcatttttccgatacgcttgtactacaggttaatgaaagctacagcaaacttaccgctcaggaggttgatgcccttaaaaatacggggttctggaatgagggtggaaggtatgttaagcaactacgcctcgaaggggtaattattcccagggatgggaacgaaagtctgtttaatacgagcgaaagattggtaaaaaaacataatgtggaattttattctataaaagactcaactcgctttcatcctctgcggctggcaactaacatcgtgttaacacccttcacggccgttgcggatattgtatttttcccaatatcactgcgtgtgttagggctcatcaccaatcctcctgtacattaa

SEQ ID NO: 159900 - DNA, 252 bp, Enterobacter cloacae
atgccaaaagaagtaaatgtatcgaaaatatacggaaagataaaaattgttgattcctcccctgattttaaggtgaaagtcgttgatgctttcccggacctgaaggtgaagttggttgatgcgttccctaacgcccctggaaaatggaaaatcgtggattcagttccagactacaaaattcaattagtcgacgctttcccagactttaaaatcaaatatgttaaagcttttcccgggccagccaaacgctaa

SEQ ID NO: 159901 - DNA, 246 bp, Enterobacter cloacae
atgaatgatctagctagtagtggcatgtgtcattttaatgcacattatgattttgagaaccttgaaaaggaactaaagcgtcatctgtatcagtgtgaaattaagaatgtaaccgtaaatcagtatacggatggtagtgtcattattgtccatgaatgggcagatagtgatgatgatcttcgcatatccaatatggtttgcaaaaaaatcgttgagaattttggtggctcatatatcaccaaatga

SEQ ID NO: 159902 - DNA, 198 bp, Enterobacter cloacae
atgagcgacaacacaaaagtgctgaattatgaccctgctgacccggataagatgcgcctgccacaaggctctagttgcggtaactgccatcacatccggcgctgcaaagccatgttcggccacaccgaaacggatacctattgtgactggtctccatcgcgcttcataccggcaaagacagaaggagccgcccaatga

SEQ ID NO: 159903 - DNA, 327 bp, Enterobacter cloacae
atgatttcgtatgatgttgagtttccgactcaaaaatctgtaggtttcaaaattgatgttttaactgctgcatctgaatggccgaaattcatggcgactgatgctattggtggtgatgttaaagtacagctcgctaagaaaactgtgttgactgtaccttaccgcgaagatatctcgccagacttcacccttgagggttacaagcagcgcgcaaagcatcatgccgagactgtggtttctaagcttgtagaagcggcccaggagcaggccgctggaaaaaatctatcagcggaatataaccttaaattaactattaatcgccagtaa

SEQ ID NO: 159904 - DNA, 228 bp, Enterobacter cloacae
atgaagccgacaattgaatatgtcgaaaaaaatattggcatgaattctgatgcaagcacacctaaacaaatcgtcgatgaattaaacgacatcaaattcattatgctagctattgcctgtaaactcggtgaggatgaaaggaaggatataattagcgctctttcctctagccaatcaccaagaataggtgaatggctgaaaacctttcgcgagtttactggcgattaa

SEQ ID NO: 159905 - DNA, 567 bp, Enterobacter cloacae
atggttggaatatgctcagtagctgagtgtgataatccagttaagtgcagatctctttgccagcgtcactacgataggaaaaggcgtagtggtgaacagctccccgcaagaaaagtatcaataaacgctgacgatgcagtaagcaatcgaacaattaacgttgatggttgcatgatctggactgggcacataaatgcaaatggttatgggcacattaatgtgaacggtgtggttatgcgggctcaccgatatgtttgggagagagcttacggtctaattcccgatggaatgattattgaccataagtgtcataaccgcgcgtgcttaaatatcgctcacttgcgattggcgacgaaccatgaaaaccaaagtaatcgctctggtgctaaccgaaatagcagtacaggactgagaaatatttacctcaaaaggggaaagtatcaggtaagggttcattatcaaggcaaaactcattacggcggagtttttgagagtgtcgcagatgcaactgtagctgccgagcggttgcgtgcaaaattattcggtgatttcagggggctttcttga

SEQ ID NO: 159906 - DNA, 579 bp, Enterobacter cloacae
ttgaaaataatcatcgtatcccatcattctcggagagatttagcacaacgcctttattcctctattgacgcccatcacatgttagttgacgaggttggggttggtgcaaatgcaacccatcttcgtgctcttcgttgggccgctgagcagtcagatagagtgatcatcatcgaagaggatgcattacccgttgatggttttcgttataaggctcaggactggctggctcgtttccctgacgacatgctgagcttttatctcggtaccgggcggcctccacagtatcaaatgcagattgctgagcggctaatcgtggctgataagacacgcgctgactacatcacactcccgcggctgatacacggtgtctgctacagcgtcccacagcatcacattgaacgtgtgctgtctcgatgggacagcagcaagcctgccgattatgccgttggtgatgcctatggcggcgatgtggtttatccgtgttactcgctggtggatcatgcagatggtgaacctgttgaacgtcaccctgactcagcgccacgcacagaacgccgtcgggcgtggaggttagcctga

SEQ ID NO: 159907 - DNA, 1725 bp, Enterobacter cloacae
atgtttttgaaacgacttgtcgttagttctttcaaactaggaataattcgtgatatcgaatttcatattggcgttaatttaattattgaccggaacactgccagcaaagagcaaactggaaatggtgttggaaaaaccactgtattaagagctttagatttttgctttggagcagagcagttaaatttttatactgaccctgagttcaaaaaagaaaatccagttataaaaaattatttaatagataatgaggttgagttttgcttaacccttacaaaagatttgaataaaaatacagcacctttgatcaaaataaaacgtaaaattactgctgaaactaataaaaccaaggttatagcctcaataaatgaagagagttttacgaaagctaaggatttcaacgaggctttaaaaaaaataatatatcttgattccgcgataaagcctactatacgagaaattatgggtcgtgttatcagaaatacacaggacaagatgtctaatgcattgaaaacgataaagatgggttctaatgcacagtatgaaaccttaaatctttttatgtttgggtttggtaactcacagattcttgatgaaaaacaatcagtaacgaaagcctacaaactggctaaatctgattatgaggtaattactcgccatcgctctaagaatgctttagaacaagctgttgcaattataaatagagatattgaagcgcaagaagagtctatttctaattttcaagtggcagactcttataatgatatgcttgcagagttaaatgagctgaaaagtaaaattagtgaatgttctattaccctatcatcgttagagttcaagaaagctttaaatgagaaagctattctagaattagaaaagagctatgaaagtatcaatccactagacttacaaaaattgtacttagaagcaactgaacggctaggtgggttaaacaaagagttttctgagttactttctttccataataaaatgcttgttaaaaaagctgagtttatcagaaagcaaatgcagccagttcttcaagaaattaccaagtataaagatgagctaaataatttattagacctagagtcaggactgttaaagagtttgtcttcacatgggacattgacagacttacaaataatgcagaaaaagttaaattcattatttgaggaaaagggtgggctcgaagcaggattgcttcaaattcaagagatggaagataaacttgatgttctcaagaaaaaatttgataacgtatcagacaaattaaaatctaagctggaagattttaataaacgcctttcgttatttaattcttacttttcattatatactaaaaaattatatcaagatgaatatattctttcttataaagattcctctggctctttcgtatttactatagagcctttagggactttgctcacactaggcaatcagggtgaaggtaaaaagaaagctcaggttgcttctttagattttgcgtatttatctgtccaagagtttttagaagcccgaactccgcggtttatagctcacgatggtatcgaagcaattcatgtaaatcaaataagtaagttgttcgagattgcttcagaaattaatggtcaatatatattagctattcttaaagacaaattagagaatgttgagcaagatttcattgataagagtgttgtgcttgaacttggcgaagatgataagtttttcaggctttaa

SEQ ID NO: 159908 - DNA, 237 bp, Enterobacter cloacae
atgatcatctctgatattacaaaaccaagtcaaaccttgtattacttgggtgctaagttattagaatgcatgagttcaaatgcttattctcacgttgatattattgagttatatgatgagttcatatctaaaaataacaagatttctttcacgcagtatatttacaccttgaactggctatatttattaggtctggttgaagctaatgaaaatggagatttgatattatgtttttga

SEQ ID NO: 159909 - DNA, 597 bp, Enterobacter cloacae
atggtcgatgttactcagcggtcagggaaatactcacgtaatgtgcaggtagttgtcggttctgactctgttgatattataagatctccatcgatttttatggatcttgtttctattttggttgatacgaatgctattgagcctcgtacagctaatgactacgagccatatgatatcgagaataagatagacttcaatgatgttataaagcatagagaacgcattgaagggttttatctatattcttcgatgatagataatgcgtatgaaacattaaatgaaagtatgcctgccgcaaaggaaacagctctaaaaaatatcaattcccgatatctcgattgccaaggtgatttattgcttaataatagagaagcatataagctttgcaagaattctcaggaaagaaataatttaaagattcgattggttagagagtttgcggattggataatagattgcgtaatagatcatattattaaaaagtgccaaggttcacttatggcaatgaattacacaagtgaagaaattgaatgtcatgcttcttttattgtatatcatgcattcgtagagtgtaagattttggaaaaaccaatatga

SEQ ID NO: 159910 - DNA, 7686 bp, Enterobacter cloacae
gtggacaaggcggggaacgaaggcccgcagaccagcggcaccgatgatgcggcctggaactttacccttgacactattccccctggcgcagatgcctttgaagagggcagcatcacgctgacagataatgtcggaccggtacagggcagcattgatgatggcagcaccacggacgatgcccagccaacttatgcaggaaagatcactgctgctggactggctgatggtgtagtgagcgtcaatatttatgacaacggcacgttgatcggcagtgcgccggtagatcagactactggggcgtggagtttcacgccgggtagtgcgatggtcagcggcgagcacgcgctgactgtgtcagccgttgatgctgcgggtaacgaaggaccacagacgagcggtacagcagatgaaagctgggacttttccctgttaaccagcgccccggcgcagccatctattgaaagtattaacgatgactatacccagggcgaagatgcggatatcggctatctgcagaaaggccaatcgactaacgacagcacgctgacgataaatggcaccgcaggagcgggaatgacggtgcaaatctgggcaacggacagtagtgatcaacgcgtccaggtaggggaggggcaagttagcaaggatggtcgctggagcatcactaccagcgcgctgggcgatgacggtacctataccctgactgcaacagcagtcaatgcggcaggtgttccatcggcagaaacgggcggcttcccgattatcctcgatacggtcgcgccggatgtggccgttgccactctgatggatgacgaaggggacaaacagggcgagatcgccccgggcgagaccaccgacgaccgctctccaaccttaaccggtaccggtgaagcaggggcgacggtcagcgtttacctggacggcagcactacgccgatcggtaatgtgtctgtggacgctgaaggcaactggacgctgtcgctgggtacgctgacggatggtgagcacagctataaaaccaaaatcaccgatgcggcgggtaacgaaacgcagggcgaggtggtgaacttcacggtagacagtagcactgtggaactcactatcgaccaggcgaatgacgatgcgggcaccatcaccggtgcggtactgaccaacggcctgaccgacgatacctctccgcaattgcagggcaccgccacaccgggtgcaacagtgaccattaaggatgaggccaacacagtactgggaacggctgaggcaaatgtcaacggggagtggaccttccaactggacggcgtcaccgatggaacccacacgtggacagcagaaaccaccaatgcagcgaataataccgctcaggcctccattactctgacaattgacagtacgccaccggcggcaccgattatcacctccctggaggatgatgtcggaacggtgcagtacacctcgaaagttcaggggaacatgaccgacgatccggctcctaccttaaacggtacggcggaagcgggtagcaccgtgaccctttatgacggcaccagcgtactgggtacagtgaaggcgaacgccgcgggcgaatggagctataccccgaccaccaacctggttgaagggacgcacagcattaccgccacggcgaccgatgcggcggggaacgtcagcgatccttccgatagctggaactttatcctggatatcaccgcgccaaatgtgggtatctccgataattccgccgactcgctggcaggtcaatcagagccaggcgcgatcgtcaccgttgaaaccgcgagtggtgataagtttaccgccacagctaatgaggatggccgctggatcattacgccaaaccctattcccgcaggtgaatctggcaaaatttatgccacggacccggcaggcaatgtgggggattcggtcagcttccagggatcggcgctggcaagtttcgatctgatgaatgaaagttcgcaggtcaacaccaccacggtgggagatcaggctaacccgaccactacccgcctggcggatggccgcattgtggttatctggcagggagcaggcaccggaaccgatatatttatgcagctctatgaggctgacggcgtgcataagatcggcaccgagcagcagatcaaccagcgcatcagcggcagtcaggatagtccacaagtggtggctctggcggatggcggcttcctggtagtgtatgaatcctacggtggcggcctggataacgatcaggatggtattgttgcccgtcgctacggcgctgacggacaggcggtgactgatgagttcctggtaaacgtgaccacggcgggcagccagcgtatggcgagtgccgtggcaacggaagacggcggctataccatcacttgggagagcgatagcaagacgattttccagcgcacctacggggccgatgatcagccgacaaccggcgaagtggtggtggcgaccggcaccagcatgggcagtaacggcggaccggagatggccgcctttaccgacgcggcgcacagcggaatgtatatcaccgtctggaacgcagcgagcggcccgtcagataccagctctaccggtgtggtcgggcagatcttcggggcggacgggaagccgctgggtggcgccttccaggtgaacactaccatggacgccagccagaactacccggatgtgcttaccctcgcggacgggagcttcgtggtctactgggataccaacaacagcggtgcgaacggctcggatatccgtgcggtgcactacaccgtggatgccgaaaccggcaaggtctccgtgcagggaacgggcgacttcgtcgtcaacagctacacagcaggcaagcagtacaagccggtgggtgtggcgctggaagatgggggctacctgcttatctggggctcggaagggggcgacggtgatggctcggcgatttatgcccagcgctttgacgccaacgaccacagggtgggacgtgagtttatcgtcaacactaccacgctgggtaaccagggctacggcggtgactccaccgacgtcacccatattctggatgcgacgctgaccgccgagggtaacgtctacgtcacctggcagtccgataatgtcgacggcagcgggatgggcgtgagcggtatcgttatcgacccggatgccgcctactactcggagtttacagtcaataccaccgtgactggtgcacaaacggtctcatccgtagcggccctgcctgacggcggcgctattgtggtctggcagtctgccaacggcgacggctctggtagctgcgtgatgggccagatgctggatgcgaaagggcagccggtgggcggagagtttatcgttaacaccacgacatcggggaatcaaaccacaccgcaggtggcagtcctgactgacggtacctttgaagtggtctggtcatccggcgactatatcaaaggccagaagttcgtctacagctacgacagtgacggtgcggtgaatggcgtagctacttccggggctgaatttaacgttaacagcggcaccgcggcatcggaccagggcaatcctgagatcgcaatgctgaacgacggcggatatatagtgacctggcaggcagtggtgaacggtaactggcagatctatggccgtcagtatgatgccgacggatctccagtggcggatcagcagatcctggcgtcaaccacgctcagcactggcttcctgggggtaggggtagactggcagccgctgccgtcagtaacaaccctgagcaacggtatggtggctatcacttataccgtgaagggcaccggttatgattcagcggtacgactctacgatcccaccacacagaccgtagggacagagttcattgtcaaccagacgctggccaacgatcaggcgtcaccaagtgtaagtgcgctggataacggtaactttgtggtgacctgggactcaagcgataacagcggaccggatcagaatggctacagcgtttggggacgtatctacgacgcggaaggtaaagcagtatcgaatgagtttcttatcaataccgcaaccaaaggtgaccagcatctggcgaaggtggtgagccgcccggacggcagttttgtcaccgttttcgtttcggcaacggacgccgatgcgggggccgatacctatggcatctatgctcagttctttgatgccagtggcaataaagtgggccaggagatgcgcatcaaccagctgacctatggcgatcagaccgaagtggatgccactttcctggaaggggggcaactctatgttacctggaccgattcgggtgtgggagacggcaacggctctgcgattaaaggacgcattgtcgatctggtggatacgctggggcttgagcagcagacgccgcagaatgacgatccgacgctgattgagtattacccgtctacggtctcgacccagactggggatgacaccataccgccgaacgtggggatctctgctaatacggcggataaactgggcggtcaaaccgagccgggcgtaacggtcacggtgaccgatgccaaaggcattgagcataatgcggttgccgacagcaccggtgcatggagcattgagcctaacccgcttggcgttggcgataacggctatatctcagcgacagatgcggcaggtaatcagagtgcgccagttctgatcagcggctcggcgctggataactatgatctgttgaatgagagcgcgcaggtcaataccacgacgggtaacgatcaggctaacccgaccactacccgtctggccgacggccgaatcgtggtgatctggcaggatacgacgagtaccgggcttctgacgtcgcagatggatgtctatatgcagctgtatgaggcagacggcgtacataagatcggtaccgagcagcaggtcaaccagcgtactgccaataatcaggacagcgcgcaggtggtggccctggctgacgggggattcctggtggtctacgagtcctataatggcggtctggataacgatcaggatggtattgttgcccgccgctacggtgctgacggacaggccatgactgatgagtttctggtgaatgtgaccaccagcggcgagcagaataacccgagcgtactggcaactgacgacggcgggtatattatcacctggaccgatcaggcgaagagcgtggttcagcgcacctacggggccgatgaccagccaaccaccggcgaagtggtggtggcgacgggtaccagcatgggcagtaacggcggaccggagatggccgcctttaccgacgcggcgcacagcggaatgtatatcaccgtctggaacgcagcgagcggcccgtcagataccagctctaccggtgtggtcgggcagatcttcggggcggacgggaagccgctgggtggcgccttccaggtgaacaccaccatggacgccagccagaactacccggatgtgcttacccttgcggacggaagcttcgtggtctactgggataccaacaacagcggtgcggacggctcggatatccgtgcggtgcactacaccgtggatgccgaaaccggcaaggtctccgtgcagggaacgggcgacttcgtcgtcaacagctacacagcaggcaagcagtacaagccggtgggtgtggcgctggaagatgggggctacctgcttatctggggctcggaagggggcgacggtgatggctcggcgatttatgcccagcgctttgacgccaacgaccacagggtggggcgtgagtttatcgtcaacactaccacgctgggtaaccagggctacggcggtgactccggcgacatcacccatattctggatgcgacgctgaccgccgagggtaacgtctacgtcacctggcagtccgataatgtcgacggcagcgggatgggtgtggaaggcatcgtcatcgacccgaacgcggcctactactcggagtttacggttaacaccaccacggccggtgaccagaccgattcgcaggtggtcgcgctgccgacgggcgggctgtttgaagtctgggtttccgccagcggcgacggctctggtacggccatcaaaggccagatgctggatgccaaaggacagccggtgggcaccgagtttaccgttaactccaccactacgggcaaccaattgacgccggtcgtgctggagaacggcaatattgaggtcgtctggaccagtccgggcacgggcggggctaactacatcaagggccagcaatatacctactcctatgacaaggacgggaatattaccgggcttaccgcggtcggtgctgagtttaatatcagttcgggggcaggagcgaccagccagcagaacccggatgtgacctcactggatgacggtggttatatggtggtctgggaagctatcgtggacggcgagtataagatttttgctcgtcagtacgatgcagataactccccggcaacggacgagataaccctggcgtcaaccggccttactacaggatttttaacaggcaatagcaatggctggagcgctctgccatccatcacgcaactgagtgggggacagatcgccattacttatgcggtgaaaggaaccggttacgacaccagcgtgatgatatatgacccggtgacccatacagcagggactaccgctatcgtcaaccagacagctgcaggcgatcaggcctcagctaccgtgtcagcgctggagaacggtaactttgttgtgacctgggactccagcgataacaacgggccggatcagagcggctacagcgtctggggacgcatctatgacggaagtggtaaagcgctgtcaaatgagtttctcattaacaccgataccgctggcgatcagcatcttccaaccgtagtaagccgtgccgatggtagctttgtggcggtatttatctcggcgaccgacgttgatgcgggtccgggtacctatggaatctacgcgcaggactttgacgtcaatggcaacaaagtcggccaggagatacaaatcaaccagttgacctacggcgatcaggttgatgtcagtgccacctttatcgaagggggacagctctacgtcacctggaccgataaaggagtaggcgacggcgacggctcggctattaaaggccgtctggttgacctggttgaaacgctggggctctccgatgttggcgatggcgtgacccatatcgattatcagcctgcccatttctatctcaacggtacggaaggtaatgattcactggatgggcgcggcgctataaccatcgacggtaaaggtggggatgacaccatctttattaacagcacttcttttaccagtattgatggtggggaaggaaaagatacgttggtctgggattcgaataataatttcgaactgggcagcgtctcgtcgaaaattagtggtgtcgaaactatccacatgggaaataacgcggcgcaaacgttggttattagcgcgaacgatgttctcgaaatgactaaagacaatggagagactgaacatgtactgaaaattaccggtgacgacggcgattcaaatacgaacggcgcacgtgatacggtcagcatcgataaatctggctggacggcttctacgtctgaaaccgaccacggtgtaacttatgatgtgtatgttcataatgatgatacgaccgttaagctgatgattcagcatggcctaaatgtagtataa

SEQ ID NO: 159911 - DNA, 1602 bp, Enterobacter cloacae
atgttacggatgacggcagatcatccttctattcaatctgcggtctcttcaaccagtgctgcttattttgatattgagcaggcaaaagcgggaaatagtcttcaattaactgccggattaagttctacagcctattccgggcagccaggttatgaaaataaccctattgcgccacatatcagcatcagtaaggtgttatacgatcatggacgtactgacgatacggttcagggtaaagaggcagcgttttctatgcagcgcgcccaagtgatggcgacccgcgaaaccattaaccagcaggcattgacgctgttcacctcggcggtgaccaacgctaaagttgttacgatcctcgatcaggagattgtcgcccttaacgatctgctgcaacgggtaaaaaccattgccagcattgatcccggacgagcgtcggagatcaaccaggtcgccacgcgtttaaactcagttgtcgcgacccgcgagagcagtaataccaccctgcaacaatcctggaagcagctctcactgctgcttaacagaaatattaccctcaccagcgaactgcccgatctgaaacaggccgggttgctgcctgaaagtctggatatcggcctgaaagcgttgatggataaccctacttacatggtataccgctacaaacgtgacgaagcacgcgcggcgttgcaactcgcgtccaaatggaatcgtccgcagtggaacgtaaagctgagccttgacagcccacgtaataatggcgaaatggaaccgtttaaggcagccacacttcaggtgagcagcgatattaatctctgggatggcgggtcaggagcctcggcggtgaaagggcagacccagcgcctggcctctgcggagcaggatatggatgccaccttgcgttcgcttcagcagcaactggagcagctctggatttcactgccgctacgccagcagcagatcaacgccctgaaacagcagtctgaatccgccctgaaaacctggaaagcgggtgaggtgcagttctttgccagccagcgcccactgaccgatctgatctcttttgctacggattactactctagcctggcaagtcttgaggagcagaaggtgcaatacgccgccgcgcagtggcagattgtgggcactcttggaaagatgagcgatctggcgaaaaacgttccagcgctgcccggcgcgccgctggcaacctcagcgcagaacagaaaagaacagacggcggataccatcagtacgcttaatgcgcaggttgtcgccaatacgcggaaaaacaatctggccgacgagaaagatatcgaagcctttaagagagcgattgagaagacaagcgataatttcgaaggcggcaagttgttagccatgccacagaatcagccgcaacagatggctttagcccctgtcacttcgcatagcgcgttattaaccgcaccagagagcaaacctgagccggtagcatcggcttcgacttcatccactcaaacaccgttgatcgcgtcagggcctcagcagagcaatttcacccctaaagtccagaaaaaggccaatgctgcgcagaatacattgcgcgaatggccgtggcatggatag

SEQ ID NO: 159912 - DNA, 2193 bp, Enterobacter cloacae
atgacattacacgaggtatcggatgtcagcctgcccatggcattacagaacgcattacgtctattcgatgtgcgcttaaccctaagtgaactaaccgacggcatgcctcgctgccctgacagcaaccagatcgataatcagaaaaagtgggccagcctggtgctgcagcgacgcagtatgacggcagcctggcggcaaattgccttaaaggatgtgaaatcttttttgctcccagctgttattcgctatcaggacagctacgcggtgctgactcgttatgatgctgagcagtgccgcataatcctgccgttgcttggcagccagcctgttgccatcaagacggaagaggtagtgagtcattacggtggcgaaatgctgttgatgaggccaaaagcccatatggaccatcgcgctgaagatctcgtacagctgaccgggcagcactggttttggcatacgctctggcgctttaaacgctacatctttgaggcggcggcgctctcagtggtgataaacgtgctggtgctagcaatgtccatctttaccatgacagtttacaatcgcgtactacctaatcagacctatgtcaccctctggacgatggcgattggcgttatgctggcgctttttttcgaactggctgcacgtgtggcgcgagcgtgggtaaccgaccgggccggaaagaagatcgaccttatcctgggggcgcagattttccggcacgtattgcagggcaagatggaaaaccgcgcccagtccagcggcgcattcggcaatatcatgcagagctttgaaagtgtgcgggagttgactacctcggcggcgcttaccacggtggcggatctgcctttcgttgtgctctttttatttgttatccatatggttgccgggccactcgtctggtgcgttattctgattttagtggctatcgtcagcatggtgctgctgatgcaaatcccgctgaagcgccacgcggaagagtcgataaaaatcggcagtaaccgctacggcctggtaatagagacgttggataaccttgaaacgattaaagcgctgcgtgccgagaacctggtgtccggcaagcacgacatcgccagtgtaaaactctcttctgtttccatgaagtcccgttttctgtcgacgatgggatcgagcatgatccagaccacccagcagtttggcacggtgctgctgttgctctgggggtcgtatctggtgggggacggtgagatctcgatgggcggcattatcgccaccatgacgctaatggggcgcgccgttatgcctatcgccacccttgcggcgctggggctgcgtattcagcaggctaaaacctcgctcgatattcttaacaagctgatgaaaacgtcgactgaacgcgaaaaggaaaaagtctatatgcagcttcctcagggcagtcagacggagatcgtatgtcaggatctcagtttcagctatcgcaaagagttgccagctgtggttgaccgcctggaccttaccttgcgtcacggcgagcgggttgccatcctcggaaaaatgggcagcggtaaatcgtcgcttttgcgcctgctggttggtttgtatgaaccgatcgggggcaccgtcaaaattagcggcgtcgatatcaaccagatcgaaaagggggagctacgctcaaggattgcgctggtgaaccaggagccgcgtctgatgttcggtacacttcgcgacaacctgctcatgggggctccctgggccagtgatgaagaaatgatgcgcgtggcgcagatgactggcgttagcgaaatcgtctcccgtcatccgatggggttcgggatgccggtgggggaacgaggtgagacgctctccggcgggcaaaaacaggcgatcgcacttgcccgtgcgctgctgactgagccggatgtgcttctgctggatgaaccgacttccggtatggatatgggctcggaacgtatggtacttcaggcgttggtacccgctatggaagggcgtaccgtggtgatcgtgacccatcgcccggcggtgcttaaatatgtagatcgcattgtcgtcatggacgaaggcatgaaggtagctgacggcccgaaagaggagatcgtcgccatgcttaacgatggcaatatcccggcggcctcggtactacgtgcttccgcaaagccaaatgttgttgaaggtaagccggtggcggcatag

SEQ ID NO: 159913 - DNA, 1278 bp, Enterobacter cloacae
atgcgtaatttttttattaaaaaacagccttctgcttctgaaggcggtatcaaccgtaccgatacatcgttccatgccaacaatgtgacggccagcgagattgtccgggcggcaggagaagatcgctgggagggctggctctatatcttcgggggaattattgcgatgtttgcccttgcgataatctgggccgccacttttaatatcgaagaggttaccaccggcaccgcgcagatagttcccagctctcgcgagcaggttttgcagagcctggaaggggggattttacaggagttgctggtgcatgaaggagatacagttgagaaggggcaaattgttgcccgtatcgacccgacccgtgcggaagcgtcgtttcgggagagtgctaaccgtctattggccctgaaagcgcagtcggcccgactggcggcggaggctgccggaacggatatcattttccccccagaggtgcaaaaggagccagagctgattgcgagagagatggatgcttaccgcttacgtaaacgtgggctggatgagtctatcgcgggctatgtaaaaaccagagagttgattgccaaggagttggctatggcgaagaaactcgccgctaagtcgctgctttccaatacagaggtactaaagcttgagcgtcaggcgaatgataccgagctgcaaattgtcgatcgccgtaaccgctatcgcaacgaagcaaacgatgagttatccaaagtggaagtggagatgagcagccttcaggagacggcgctaggaaggcaagacactttggagcgtaccgaactacgatcttccgtacgtggcgtggtgaacagcatccgcatcaatactatcggcggtgtcattcagccaggggcggagattatggagataactcctctcgatgatcagctgcttgtggagaccaaaatcagaccgtcggatgttgctttccttgcgccgggtcaggaggcgatggtaaaaatctctgcctatgactactccatctatggcggcctgaaagggcgggtacagagtatcagccccggcgcgctgaagaatgaggaagccaaaatgccgaaacggcagggggtggatgagacatactatcgggtgatggtgctgacggaaagtaatacgctgaccaaagcgggtagcagacaactacgcgtgatccctggtatgacagccacggtagatatccgcaccggcgagaagagtctgttgcagtatctcctgagaccgctactccgggtacaggaagctttccgggaaaaataa

SEQ ID NO: 159914 - DNA, 420 bp, Enterobacter cloacae
atgaagagacttattttatctatcattgccgcagggattttttctacctgtcatgcagccaccaatagctgccaggaacaaaaagatgatattaaccaaaagctggcggttgcaaaagaagggggtgacagctatgccgaacgcagacttgaaacagcactgtccaaagtcaatacctggtgcacagaagggcggcagagtaacaaagcaggaaatgaagttcgtgaaaaagagcgcaaagtaaaaaaagctgagctggagcttgaagaggcccaggacgatctggcagaagcacagcaggatggcagggcctctaaaatcagagataaaacccgtaagattgaagagaagaaattaaagcttgagtcagcaaaagaagaactggaagaggcaaaaagcgattatcagcgactaaattag

SEQ ID NO: 159915 - DNA, 711 bp, Enterobacter cloacae
atgaaatatgattcagaccagaagaatagtgtctttttgaatgcgggcatatttctctggggaatggcccttctggcatggtgttatgagtatcgcaggactgcaaccgcctgtttcttgctgctgtcactctcttttgccatgcatattcaacaggaaaagatgcttactactatgtttggaaaaaataaaacgaccggggataaagatgaggccctccctttctccgttacgccgactaccccgtcacagattaagaagaacgagctgtcagatccagaaccactacgcagcgacagagcgaacagcacgatcattgccaccgatgtggagtttgagggcaatattaacgccggtggtcaagtgtatgtttacggaaaggtaaaaggcaatatgacctctgctgagggtctggtaaaagtgatggataacggtctggtcgagggcaatatcctctgtcgggagctgattattgatggcacgatagaaggccactgccaggctaattcaattcatatctgcgaacatggtcgcctggacggcaccatgacatacgatcagttctcagtgaaaaaaggcggcgtctttacagggcaggctattcagtcaagtcagtgtgaaactgtgatcaacgttatcggcattaaccatgagactttttatggtcccatccaggaagcgaaaacgactaatacgaagttaaaagaatga

SEQ ID NO: 159916 - DNA, 3546 bp, Enterobacter cloacae
atgaaaaataatcatatacatattgcggtagtgaacaacagcaagatcgttgaagcggcggaagttaatgtcgataccagcgcaatatcgactacagttcagccagtcattgtaaaagcgattgccgggggcaagtatttattaaccgaagatgtgaacggtactgcgccagagaatattaccgtcaaacgggtaggccacaatctgtggatcagctttgaaggggaagacctggatcatcccggccttattattgaagatttctacgactatgacggggaggtgattggtaaaggcgaagacggcagctatcacgaatatatcgcttccgatgcacgtgacgcccatgaagccgctgctttactgagcggtgactcgtcggcactggtgctgggtaccgataacgttgtcggcgtaggggcattagttgcgcccgttggaatgatcagccctgtctggatgggactgctgggtctgctggtggcgggtggcgctgccgctgcattggcgggtggtggtggtggtggtggtggtggcggtgataacagtggcggcagtaacgcagacagtaacaccggggcaactgatgatactaccgtggcacctgtggctgtggtgccgcctgccacacagattactcaggtcagtgacgacgcgggagcagtccatggttccgttgtttccggcggcctgactgacgacaacaccccaacgcttaccggaaaatctgacccgaatgttaccattgctatctatgataacgggagcaaaatcggtgatgtggtgacagacaataacggagtatgggtctttaccccgaccataccgttggaggatggtacgcacagcttcaccagtatggcaacggatgctgccggaaacagcggcgcgcaatccgatccctgggatgtcactattgacgctaccgccccggatgcgccgttaataagtgtcataaatgatgacgttgcccctgctaccggctccatcgtaagcggtggtgtgactgacgataatacgcctactgtttctgggcagggcactccgggtgataccatcaccattactgatggcgggacgccaatcggcactgcgatcgtagacggtagcggtaactggacctttactccggacacgccgctgacggatggtgagcacgatctggcggtgacggcgaccgatccggcgggcaatgtttctgccccctccgccatttaccctattattgtgaataccacgccgcagatcgaaggagctcctttattgacagatgatgtcggcaaggttagcggcaccatcgtcagcggtgataccaccgatgacaatcttcccgactatagtggtaaaaccgagccaggtgctgaggtgattatccgggataacggtactgaaattggtcgtgtcaaggcagatgatgcgggtaactggagctttagccctgagactccacttgatgatggcgaacacagcttcaccgcacagccgctggatgtctccggaaacgttggcgatgaaagcgtgccaaccgattttgtcgttgatacagtgccgttagctgtgacaatcttgaatgccaccgatgatgttagtccagtcaccggggagcttacttccggtcaggctaccaatgacgctaccccgacgctgaacggcaccgctactccaggagcgacagtgaacgtttacgacgggggaatactgcttggttctgtgaccgcaacgccggagggagggtggaccttaacgccatccatctctcttgctgaaggcgaacatgactttaccgccacggcttccagctcctcccagggagagaccgatcccacgcctgtatttgcccttactatcgataccacaccgcccgatacgccggtcacggacattaatgatgatgtgggagcaatcgtcggccccgttgcgccaggtggccttacggatgacaatcagccaaccctgagtggtaccggcataccgggggatactatcaccatcaccgatggtgatacacctctcggcacagctattgtgaatgatacgggcgcgtggacctttacgccggataagccgctagtggatggcaaacacgatcttggcgtatccgccaccgatccggcgggcaacgaatcggtgcctgccaccgttatccccattatcattgatactctggccccggatgtgcccgtcattacgggcgtaatggatgatgttgatgcccttaccggtgccattgccgaagcgggtctgaccaacgacccacaaccggctatcagcggaacggcggaggcgaacagcaccgtcacggtatatattgacggcagcgaagtgggcaccactaaggctagcgattccggcgactggacctttacccccgaaacggatgtggcggatggcacgcatcagattaccgcctcggcggctgatgctgctggcaatatcagcgagttaagtaacgcctggtctgtcgtgatagatacggtgagtgaaacgccggttattacgactgcaaccgatgatgttgccgggattctgggtgatatcagtaatggcggcctgaccaatgacaacctgccggtgatcaacggtacggcagagcatgacagtatggtctccatttacatcgacaatgtgatggctggtacggtgcaggccgacaccaccggtacctgggcctttacggtgaataacttactgtctgatggtacacatcagttctccgccattgccgtggatgccgccgggaataccagcagccagtcggcgtcatggggattgacggtggatactgttgcgcccgcctcttcgattctatatgcctccgatgatgcaggtgcagattcagggttagtctacgacggagaagcaagtgatgacactcgtcctaccttcattggcaatgctgaggcgggtagtaacgtcactatatttatcgatggagtagagacgggtaccacctttgcgggtaataaagatacctggtcatatacccctacctacgatcttgaaactggtcagcacacaattcaagttttggccacggatgcggcaggcaacaacagtgagaaaacccctgactttacaatatcagtagagccgttagaggcagctttacaggaaaacctatctgataagagtgaagttcctgtgactggcgtaaaatcattcttatcacaactggccctctcaggcccgacagcaacggaagacaaactttccctgagcatgaccgataatcacaatgatattagcttgtcggtgaatgcagagacagtgcagggcaacggggcggcaggggtgccggagagtaaagggactatgctgtccagtacagatgtcctggccccggaacaagaatcctggcggtttgacgatgccggtacggttcaaaaaggggaggcgagcaggccgagtgaacctcatggaaatgacaaggctctgccagtcgcggatcagcacctcaatgaggtaacaggagatcactacagtaccttacaccccacgggtagtgatcttactctgcttctgcagcagcagggggggatccattga

SEQ ID NO: 159917 - DNA, 504 bp, Enterobacter cloacae
atgaaaaaagctgatctacatctgttcattatgctgctggcaggtgctgcgctatgtagcaacaccgctctggcgcgtaatgcgatgggaaaacaatatgtgccggtatcaaccgtaccgttgtctcagtctcagattatttattatcgtactaaagcagggacccctgacggtgcggcacatgtatatgtggacggggagtttcagacagcgctactgccgggtggttacaatgtattctgtctgacacctggcagccatacgctgggaagttatatcaacgatgcgcccgcttatgccgggaaaagggatcaaccgtgggcgttgacactggaagggggcaaaacctatttcatacgtatagataaagggagtgcgcagcggcctgagatggttaaccgtacgcaggcggagcaggagttaagcgcaatgcatcagcagatccacactctttccagagcgtcatcggtggtgaagtgtcaaaccccgaaagtccaggaatag

SEQ ID NO: 159918 - DNA, 699 bp, Enterobacter cloacae
atgaaaaaaaagagcgtatcacagaaaattctccgtataaccgtactggatgagcagcccgttgtatgtagaggaatacaatctatccttacagataaagaggggctggaactgatcggactttttggcaatcgtcgcgatctcatcgctattctgaggagccgcgaagttgatcttcttgtactggactaccagcttggcggtgaagagattgacgggttatatcttatcaagtatctgcgcgcccagtttccccgattaaaaatacttatctactcctcaatcgctagcccagtcattctccagttggttatgcatgccggagtgcggggctacgtcagtaaaaatgacgataccgacatggtggttcacgccatccgccaggtcggaggcggaaaaatctttataactcatgagatgcagcggcaacttgacctttttcgggaagcggacgcaaaaagcgagaatgagctctggcatgaggggacaaatatcagcgtgttaaaacgcgtgctctctccgcgagaaactgaagttattcgctgttacctggcgggtatgacactgatgcagatcgcagccaaatactcccgcagtcgcaaaactatcagctgccagaagcagactgccttacgtaaattgggattacgctccgatcttgagctattcaaatatggcgagcatcttaagctgagctaa

SEQ ID NO: 159919 - DNA, 471 bp, Enterobacter cloacae
gtggcccatattctttaccagtcagttttgatgttttcccttctcgtttgcttcacagccattgcaaagggcaatgaatggttttttgcgcaggaggaaggagtgcaagagtatgttgtcgaagatacattaggtaatgtgcttaatttttcctgtgagacgacatttgatgcatcgtccccagaccttattggtgaacgcatcttgtatctttatgttgccgctcaggtatacgattcacaaactcaaactattacgctgagtacggaaaaccaaagctatcatattggtgcgggatctatctggggagatgggcagtggtatgccttctggattgccacacaaaaaaaagaagctaacatcgttaatgtttatgtggctggaaagaaaattgcgacatttactatgcacggggcagccgatctttatcagcaagctcccaatgatggatgcataaaaaaaatcctgtaa

SEQ ID NO: 159920 - DNA, 573 bp, Enterobacter cloacae
atggaattctacaattttatactcacgttgtcaggtgtccggattgatactgaggggcttgcagattcattgtattctcacggttgcgatgacgcgctcatctgctactacggtaactccgtgtccgtagaatttgatcgggaggcggagtccttagaccaggcaatccaaacggctatcgataatattgaagcatcaggtaccggtgccattgtcgaatccgttgactctgctctggtcggtctgagtgatattgcacaacggtcaggattaacccggcaggccattacgctgcttaaagacggcttacgcggcaaaggagatttcccgtgccccgctcagcgaattagcggccagtcatccctccgggactggtcagacgtggccagatggttgaacgagtctggtcgccttgacagcaaagatgcacatgcgagggaagagctggtgcgtaatgcacatacgctgaataaatggaacctcgccttacgcatgaggtcgtttggggatattcaggaagtggaatccatagcgcattcgctcatggcccaacgacgccacgcggttgcataa

SEQ ID NO: 159921 - DNA, 126 bp, Enterobacter cloacae
atgagtgacaaaaagaccgcggagctggccctgctgaagaatgcgctgaagaagcggcatcaggccagccagaaaatgatcaaaccaggaaaaaatacactacaccatgacggaactagccgctaa

SEQ ID NO: 159922 - DNA, 237 bp, Enterobacter cloacae
gtgattgtggccgcaacgaaccatcctgaaatcctggattatgcgttattcagacgctttgatgacgtcatcgaatatcaggtacccaccacggctcaggccatggaactgttgcgtattcatctgggtagctttatggtgaaatcattcaaaacagccacgtttgacatgttgctgaccggactcagctatgcggaaatttgccgggccgcagatgaagcgatgaaaaagcactga

SEQ ID NO: 159923 - DNA, 282 bp, Enterobacter cloacae
atggcacaccgttacctaccgtatatccataatcaggtacttgagctggccgatccgacgcgggatttaagcagaaaagcgatgcgggagagattccgtgacaaggtgaagaaaagtgcatctggcagcaatccggatgaggtcgagcgtaaccgcgagttcctggcgcttcacgacatgctgccagtgacgctgacccggacacgcgctgaggagaccggaaaaaatgctttgatccgctttgcggaggtaacggatgaagacgttgaattttctcagtag

SEQ ID NO: 159924 - DNA, 1335 bp, Enterobacter cloacae
atgtccccgttaatagcattattttgggttctggtcggtattgcgcttttggttgtcatgaatctccgttttaaattccacaatatattcgctttgctgatagctggtatttttgtagctataatggaaggtataccgctggataaaattgtaaaagtggttcaggacggcatgggaagtatactgggccaccttgctttaattattattttcggtgctattatcggaaaattcatgaccgaatccggcgcgagccagcagatcgctgacacgattatagagcggtgtggcacacgttttcttactgtaggattaatgtttatcggtgttatttttggtattgccatgttttacgaagtggcattcctcattgctatgccgttggtgttaaatatagccaaaaaagccgatatcccgtatatgaaattagtggtccccactgttgtaggggcaacaatgggtcacagccttttcccgccacagcccggtccagttgcgctgatcagcgcctttaatgcagatattgttcaggtctatctgtatggcgctttagttatcctgcctgcgctattttgcgcgggaattctcctgccgaaatacctaccgggtattaaaacaattccgcttaattcgcttttaaaaccggtcaaagagaaatcctctcaggagttaccctctttcggtatcagtatctttatcccgctaatcccggcggtgttgatgattgtggcctctatcgtcaaagggtttatgccaactgactccgagttggtaaaactgtgtacctttttaggcagtgcggaaattagcatgttgcttgcaacactcgccgctgtgtggttcctcggcatgaaacgtggtatgaaggccgatgatgtgacctactgcgtgagtgacgccattgcaaaaatcgcaaacgtattatttgtgataagcgcgggtggcattcttaaacaggtgattgttgtttccggcgtaggtgatcatattgttacgattatgagtaatgtttctttgtcgccgtttatcgtggcgtggataattaccgcgattatacgaatcctcaccggtcagggcgcagtggcggctattacttctgccgggattgttgcgccaatggtcagcgcgtttaatctcaatccggcgctgatgtgcctcgctgttgcttgcggaagtaatactattacacttatgtacgatggtggctttctcttgtttaaggagacgttcgggatttcaatgaaagatacctttaaaacctggggtttgctggagttaattaactcggtggtcggcttggggatagtgctggttctcagccagttgttttcttag

SEQ ID NO: 159925 - DNA, 1071 bp, Enterobacter cloacae
atgcaaatgacaatgcgctggtttgggcctgtcgaggataagatttcactggagtatatccggcaggttccaggtgtcgaagggatcgtaggagccttatacgacgttccggtaggtgatgtgtggccaaaagaaaaaatacgtgccctcgcagagcaggttcatcaagcgggtttaaaaatggaagtaatcgaaagcgtaaatatccatgacgatataaaaattggtctctccagtcgtgaccagttaattgcaaattaccagcagacgatccgcaacctggcggaaactggcattaaagtcatatgttataacttcatgccagtttttgactggatgaaaacggatatgaattataccctgccggatggttcattgaccatggcctttgagaaaaatggcattgataaaacccttcatgaagtcgtaaaggaggtacttgataactcaaacggtttcgctcttcctggctgggagccggaacgacttgcgagagttcagcaattattcgacaaatataaacatgttgatgatgaaaaattgcgggaaaatctggtctattttcttgagcgtgtgattccggtgtgtgaagaagttggtattaaaatggctattcacccggatgatccgccctattctattttcgggctaccccgcatagtgaaaaacagagatgatctcgactggatttgtaatgccgtagactcagaagccaatggtatcacgttatgtactggctctattgctgaagacccagataacaatgtttatcaaattctcgcagaatttacccgccgtaagcgcattcctttcgcccatgtgcgtaatattaaactacttaaagataaagatttttacgaatccgctcatctatcccgctacggctcactggatatgtatggagtgataaaagccctctttgataacggttttgatgggtatattcgacctgatcacggacggtttatctggggggaaacggggcgtccgggttatggactgtacgatcgcgctcttggcgtaacctatttgcacggattatgggaagctatcgaaaaacaaaataaataa

SEQ ID NO: 159926 - DNA, 279 bp, Enterobacter cloacae
atgcattatatcccgagctttcatgcgaaagttccgaaaatgttctatttcaaattcatcagagaactgagcactgccattttcagcaaaccccttaatgcgctagcgcatgaaaggcggctctcgggtcttaaacagctttgcaggctggccgccggagccccgcaaagctatacccgcgatcagctatggggctatttcattgagcgttcggagtggccacggcaagacatagccacagccggggtatatctccgctttgagagcaaggcgaactaa

SEQ ID NO: 159927 - DNA, 945 bp, Enterobacter cloacae
atgaaaacggttggttatgcagcgcacgcctccgacgccaaactggttccctggcattttgagcgtcgcgatttacgtgaaaacgatgtcgccattgaaattctgtactgcggcgtttgtcactcagaccttcatacggtcaatggagactgggggccgcagccttaccccttggtcccgggtcacgaaattgtgggggtggtgacgtcaacaggacagaacgtcaagaaatatcatgtgggcgatcgtgttgccgtcggttgcatggtggatagctgcatgcactgcgatcagtgtgagcatggcgaagaacagttctgtcgtaacgggatgaccctgacctacgctggtccggatcgcataagcggcgaaatcactcagggcggttactcaaaacatattgttgtgcgggaagagtttgtactgcgtgtaccggataatatggacctggcgaagactgcgcctatcctttgtgccagcattaccaccttctccccgctgcgtacctggaatattggcccgggcagccgcgttggcgtgataggactcggtggtctgggccatatggcggtgaagctggctgtggcaatgggtgcagaggtgactgtcatcagccgtactaaaaacaaagagaaagatgcaaaagcgctgggcgcgaaaggcattctactttcatcagatgcgcaggcgttacaggcctcagcctgcgcattcgatctaataattgatactgcgcccgtaaagcatgacctgaatatctacactcctctgttagatattgatggctcattagtcattgtcggccagattggtctgatggatgaaccgttgacgatccctcttgtcacaggccgccgccgcgtagcgggttcgctgatcggaggtattgcggaaacccaggaagtactggagttctgtgcaaagcataatatctatcctgagtga

SEQ ID NO: 159928 - DNA, 243 bp, Enterobacter cloacae
atggcttttatttctatgatgaatatcacagttctttttaatgctttaagcttcatcagccagaacggtgatatcacctgtgatatttacaccatggtagatctgattctcgggcgtaataatgaacctccaagtaaacttcacgcgctctcattgtgcttttgctcgcaacacgtcgatattcctgtttttaactgtctgcattgcacagccgtttgtatcctccccgatagcaagatataa

SEQ ID NO: 159929 - DNA, 738 bp, Enterobacter cloacae
atgcaggcgcagaaagacccacaacatgaaaacgaagttcaacagctttatcgtgatatttattcttttcacaagcgctccgaaaagtgctggtacatgaaagatttctgccatcactttgtcgatgccagcgacggatttatctctcgtttcctccctcctgggatcagatttgattctggttttttcaagtatctcgtcaccgaaaccacgaccagaaatattgaaattatgcacagttttgaatcactggtcactgaacaacaaaagacaatcaaccttctggtctggaacattttctgcgatgttaacagcgtcagagctttcattatgaccttaacaccctgtgaatacaaaaacaggggaggtgtgatggtttttctggccgatctggcggactgtaatgaacatattgattggttttcgtctctggtgcccggtgcgttatcgacaaagaagagaaccagtctgatttcgctagccggacaggaagagttagccagggtcacgctaggagaatgggaaacggcatggatgatcatttgtggatgctcaatcagaaagattgcggcttataagggagtaagcacaaaaactgtggaaaacaaagccagaaatgtttatgcaaagttaggtgtttttaatcgggagggattgttaagtgcggcgaaagagcataaatggatcaatcgtattccagaaaaaatgatttcatcacctgccatcatcagactgtga

SEQ ID NO: 159930 - DNA, 804 bp, Enterobacter cloacae
atgcttccagacacgacccgacgtcagctcattctgacgggactgacgacgcttctcaccagctcgttgctcagtccggtttcatacgcatactcgccctcagcgcagaagacccaatcccgcagtatgcgtaaaccccgggtgatgatagatccggggcacggcggaaaagaccccggagccatcgggtttgcgggcactgaagagaagcacgtcgttctcgagacggcaaaataccttcaggcgatgctgaccatgaatggcgttgatgcccgcctgacacggatggacgatgtctttgttcccctgtatgaacgggtgttgaaggcacatcattatgaagcggacctgctgatatctctgcatgcggatggatttaccagcccaaacgcggagggcgcttccgtttttgccctctcgacccgcggagcaacgagtgcgatggccaggtatctgtcagacagtgaaaacgcagccgatatcttcccgggagaaaacacccgtgccggagaccggtatctgcagcaggttatctttgatctggaacagacggaaacaatccgggaaagtctggcgctgggtgcccaactcattcaccacatcgcccctgtccatactctgcacgcccgggaagcggaacaggccgggttcattgtactgaagtcacctttaattccttccgtcctggtcgaaatggcgttcatcacaaatccaggggaagaagaactgctcagcacatcatcattccgttaccgcatggcaggtgctctgactgaaggtatattaggatatctgagcagataa

SEQ ID NO: 159931 - DNA, 363 bp, Enterobacter cloacae
atgtttgtgcaaaaagggttactggaaaaaaaacgccaaaaagggatatatcagcacgtatactcacgaacggaggatttcaacgtcaatgttggaaatgtgcaacttatccaaattaatcaatgcattataccgacctcaccttcagtgcttaataacaaaaaattgtctgcagttaatgaattgcttgaaaaatatgaggcggagcttgaaagaatatccggtttaatcgaaatttatgaggaattgagccttaaaatcccagaaatgaaaagtgagtttgaaagttattctattgaaaacataaagaaatcaatcagagttagtgcgaaaattaaaactctcattgatgtatgtagttaa

SEQ ID NO: 159932 - DNA, 219 bp, Enterobacter cloacae
atgaaaataaaatcaatcgtagaattaaagtgttcctcgccattactattaataaaaacttataagacatatggttttcattcaaacatgcttgcatccaattttagctctattgctgagaaattgtataaatgtgagattcaaaaaaaagacatcgaaatgctgaataaaatcacatcggagtatggattgctatcggatgactataaaacattctaa

SEQ ID NO: 159933 - DNA, 1086 bp, Enterobacter cloacae
atggtgatttttcgtccatgcggtctccagggctgtcaccggggccgccgtggtggcgatccctgcggtaccgacctgcgacatatgcgtatggagatagaccacacccgcattgacgacccgctgctggcgcaggaggtcgctgacttttcgcgggactgctacggccctgcgcgagctaaattgtttatgaaccgacccacgttaactgaagcccagttgcacgacgtcacctggataggttcgcgctttttactgacccacgctggcttctacgacagctaccactcccgcacgccccgcaccaactggccgtacgatgccacccgcgacgccggactggctcaggtacccagcggcggcggatatcccacgtgccagcaatggtggatcgatgcaagtaaaggactgcgcgcaagattgctgaaccaggtggatattgagttactcccccagctcagcaactgggcaaggtttatccccaaagaacaagccgatgacgccgtgatccgcgccattgctgcacagcaaaaacagatagtcaatcaggggcgcgtttacaccgactacggcggccaactggacatgaccttgcccaatgcggcatcgcgcggtgccggggatgtcggaatggccgtgggttcgctgatcctctttccggccatggatgtgatgcgccaggccctgccaatgggcctgtcattcctcaaagccgcgctggtgatcggcatctccttactgctgattttcagtgccttcgatcttaaaaccctgatcaccctcagcgtggtgatgttcgccctgtacttcgttgacttctggtttcagctggcgcgctggatcgacagcaccatcctcgatgcactctatggctggggtttcggtgccaaccgaccgcacaccaactttgacccactgactgggctggataacgccttcagcgacctgctgttgaacatcgtaatggccacgatgtttcttgtcctgccggcattctggggcaatagctcaggacctggctgtcgcgggcagagaggcgaaagacacgaccgccaggggcatgggaacaaccctcagcaaacttaa

SEQ ID NO: 159934 - DNA, 540 bp, Enterobacter cloacae
atggacgcggataaaattcagaccgatatcgatacgctgttgacgtttataaatgacgatatggaaagtatgggagggacgattaaatccgtgtattactcctttgaaaccggggctggtgaccggacatccttcgatgaaaaacacaactggccagaagaacacctatttaaaatcatcaatatctgcaactcaaggtcgctgcttgaaaaccgttatcgggatttctcggaaattacactaacggaagaaggccagagcagagccatttcggttaaacacggtaaaaatcgcgcatatgaactgggggccagcatgcaaatcgccacactgaacgtccacggcccggctcaggtcggtaatggtaatatccagaatatttcaacggtgtttaatcaactgctccggcaaattgaagaatctggtgcgtcagaagaagagattaaagaggcaaaaagccgactatctaagttcctggaacaccctctggtcgggtcaattgtgggtggactcgccggcgcgttacctgggctggtttag

SEQ ID NO: 159935 - DNA, 135 bp, Enterobacter cloacae
atgacgtccctgctcgtcactgcaaaagccgtcggcttagctatagcggaagagtatgccgaacagctaatggacgagatgacaaagaagctgaaaaacaccttccggaataacaagtttattacgatcagataa

SEQ ID NO: 159936 - DNA, 933 bp, Enterobacter cloacae
atggcacctacggtatttatatcttattcacacgatgatgaattgcacaaaaactgggtgctgcaacttgcaacgaggttgagagccaatggcgttgatgtcttgctggaccgttggaatctgaagctgggtcaggatttggcggccttcatggaacgtggcttatcgtcatcccatcgggtgctgtgtatttgttcagaaacctacgtcaccaaagcgaatgacggtaaaggcggcgtcggttatgaaaagcagattatcacaggcgagctattagctgatttgaatacaaactgggttatcccagttatcagaaacaaccctcagcctaaaaaagcccccaaatttttggacggaagattctatgttgattttgaagacgataaattgtacgagacccgctatgaagaggtgttgagagagctgctggatgaacctttgttacccattccgccgttaggtcccaacccatttaaagcagtaaaaatctacggtgagcaaaaattctttccgaccagtgagcagtacgtttcacccacaccaaaaggtcgggtgacttttgactactctaacaataacgggcgctatttcatcgggcaggacgtgctggcgtttgagctatgttttaataagtccggcgaccaggatattcaactactgaatgaccccgtcagtatcaataccgttgcggtagttaaagataaaaatgattttgccgaaataaatgatgcacggatttataatagttcgtcgagagtcagacggccaaaaataaaccaaatcgcgatacttcagaatagtaatggattttatgcagccattaaaatcctgtccattaaggacgacacacgcggcgccgagaatgatgaggttacgtttgactacgttattcagactaacggcactcccgattttacggcgttgaaacgttag

SEQ ID NO: 159937 - DNA, 1062 bp, Enterobacter cloacae
gtgttgaacaataaaatcctttccctgatacaggatgtggctggtcgcaacaatatgtcttctgcagaggcggcagagtggctcaacacgcattctgaagagatagaacacattgtggcgctgagtatgttcgagcgcctggaccaggcaaaagaggacgtattaaaggatcattacgaaaatgcagacgcattcagaagcaggctatttgcaacatgggagtgtcctttaaaacggctggatgccctaatttatggctgtactgaaatttgtcatgaggtaaacagcgagtatcgctgcggtcctggcgaaaggtctgcaaagctgaacatagctacccggctgcatgcacgtgccgttcaggtttcccgcgaaatatcgcatcttttacacggtgggtttgcagacggtgcgatggcccgctggagaaccctgcacgagaccaccgtcatattgatgtttatcgccgagggtgacgaagacctggcggaaagattcaccgactttcagagcgtacagcggcgaaaggcggctaatcggtacaacaagtacagtgaagagttgggttttgcgtccttctccccggaagatctgaatcggtttgatcttgaaagaaatgacatcgttgataagtacgaagcgggattttgcaatgatttaggctggtccgcaaaagcgttaggaaaagagccaggtgccagaacaaggactcactttagtgatatcgaggaatttgtcgggctggactttttgcgacctcactatgggtttgccaatcaatatattcacgcaggtattgacagcattggcttcaaactcgggacgtcgctttcaaatacagatttcttgttgtgcgggccatcaaatgaaggactgatagagccgattcagtgcaccagcctgtccctgatacaggccactcaggcaataatttcactttcaccaggcgatcagcgcctgctctacagcgccgtgctctggctgtggcatgataagttaaaagaagaagttatcgccgcatctgacgcgctcaggaagaaaggcgaagccagtagcggttaa

SEQ ID NO: 159938 - DNA, 1737 bp, Enterobacter cloacae
gtggtcagagtttgtaaagttgaaatccagaactttcgatctatttgttcactgacctggcagccttcgccagggctcaactgcctcattggccctggggacagtggcaaaaccaccattcttgacgctatagatctgtgcctgggggcgcggcgcaatgtcagtttcagcgacaccgatttttttggtctcgatgtgactcagcccatcagcattaccctgaccctggggtcattgccagatgcgctgaaggcaatggaaacctacggtaattacttgcaggcgtttaacagcgtgacggggcaggttcaggaagagccccagcttgggctggaaacggttttgtgcctgcggcttagtgtagacagtgaactggaacccaactggacgctggtgtctcagcgtgcggaggccctgggccaggaacgcaatctggcctggaaagatcggctgctcatcgcaccggcgagacttggtacctatgcaagctcaaatctgtcctgggcacgcggttcggtgctgaatcggctcacggaggagcgccctaatctgggggctgagctgtcaaatgctgcgcgtcacgcccgaaacagctttggtggtcaggcgtcggcgcagctggcggcaacgctggaggtagtgactcagaaggccaatgagctgggtgtcccggtaggtggtcagactcaggccttactggacgcgcacgcggtttccatcggcgatggcgcaattgcgctgcacaacgcagccggtgtgccgctgcgttctcttggtacggggtcgtcccgtcttctggtagctggaatgcaacgtgctgccgcgcaacgggcctccgtggcactggtggatgaagtggaatacggactggaaccgcatcggcttacccagttgctgaactcccttggggccagggaaacaccgccgccacttcaggtttttctgaccacacactctcctgtggccgtgcgtgagcttaatggcaaccaactctttgtcgtaagggggcacccgacagctccccacctcgttctgccggtgggcattgccgatgatattcaaagtaccgtccgggccgaccccgaagcttttctggcgcgtagcgtgatcgtctgtgaaggggcgagcgaggtggggctgatacgcgggctggatcattactggaccgccctcaacggtaattccatgctgagtgcaggaaccgcattcgtgaatgttggtgggggagagcctgaccgatgttttgtgcgtgggctggcactgcgtcggcttggttaccgtgtgctggttctggtggatgcggataagccgcccaccccggccacggtcgaggccttcgaggctgcgggtggagaacatatcacctggcgagccggtcgcgcgctggaggatgaactgtttatgagcctgccggatgccggcgtcgacgcgctgcttcagcgaggcattgagcttatggaggaggagctggtggcggcacatatccagacgcagtccaacggtcaggtaacgcttgcccatatccggcaccagcggcaacagattgggggtccttattctcctgaaatacgacaactactgggactcactgcgcgtaaccgacgaaatgggtggtttaaatcggtgacccggtatgaggatgtggcgcacgatatccttggacctcatctcccggcgtctgctgccgggttccaggcgctgattaaccggctgtacgggtgggcacatgccgcctga

SEQ ID NO: 159939 - DNA, 1188 bp, Enterobacter cloacae
atgacgaatattcctgattttactgcaaaagggtacctcccaaagggcagacacagctgttcggcgcaacagtttattgatcgcttctgcgcggttaacgagaaacgccaggccctgaaaaaggcgtttatcgacatactggacttcgcgaactcgcgcaacgccatatgtgttttcgtcggaggctcttatgtcaccagtaaggaagaccctcacgatctggatgtggtgattgtacttcagtgcaaggaacacatcccgtcgaggtcggaacgcctggttctcgaaggaaaacgcaccgacataatgttctgctctgcagacgatcccgtcgttaccgcctcgtttataaaactgctgtctttcgaaagatacggcagtggcgtaggtgtaatacagatcaaccttaaccatccggatgaaccatgggtgactcatcacgaaccggatgacgatacctacgaagtcatcaaaagagcctacttcaaccgacatctggtcgatttgaacgaagctccaggcgttctggtcaccatccacgggataatgacgcacgcggaatggaacgcgaatctgatacctattgcaagcagccagggctgggttgttgcaccttatatctacggctataccacccctgacattttgctcaacaagggaaaaagaaaagaagcagtggatgctttcagggactggattttttccatcaagagagatttttgccagaacggagaacagatttcagtgattgcacactcctttggcacctatctgatcggcgcatacctcgatggtttcaaggagtttgctccggtcaacttcaacacccttattctcaccggcagcattctgaatgagggttatgactgggaaagttgtgtcggttacaaagtcgcacgggtcagaaatgaaatagcacctaacgatcagtgggtaagctggatgcagagaaacccatcagaatggcttggcctcgacccactctttggtcaagccggaacaaaaggttttacttcaccgagcaaaattctcactcagcccacgaacaaaatattcgatcacaataatgtcattaaaaaagatgtcatcacaacaatgtggatgccgtttctgaacagcaataaacatgcggcagatgaagaagggtttaagagatttatggccacattcaacaagcaggaaccctga

SEQ ID NO: 159940 - DNA, 903 bp, Enterobacter cloacae
atgactacagatcagttttatgaaatctatcgccagctcgttgcattacgaaccgatgcaggcaattgtccttccgttatcgctgaactgaccctgctgtgccgcgaaaccatcagggcctcatccgttgatgagtgccttcgcgccgcagacgactgcctgcatgaaatcggtcattctgctccgcttttcgcactcgccctctcctgctggctgaccgataaagagtgtattggactggcaaaagccctcgcgcatgaggcaagcgtgtaccactttcaggcagcaaccccacaggcgtacaacctatcctccgtcgatgagacacgcgccatactggcagcgtcacgactctgcgccctgcatgtttcccccgccgtctcgctcggctgggctttaagcctggcaaccgcttaccctgccagcgtcacggcaataaatgcggccagcgcactcctgcagcatcacatggaagaatatccgcggaccacgcagcggctgcttgccagccctgaatcgacgtttacctcgcttgagttggcgaaaaccgcgctggcgcagctggaacaacaggaaaaccatctgaacggactaccggtgcttcgagagcttgcgatgacgcctgagatgcgactgatgtatgccagtctgaaacgcagtgagaatcgggagattcagcgacactcagatgagcactccatttttggtcagtttgtcacaaagcaacatttcaaatacgccaacaaaaccgcagtcgagttttctgtgggtgacaatgtcaaagaaaccacactggaaatgacgtcctttcagattgaagttgaattgcctatcacctggcgcaccgatccactttccggtgacctgaccagaaacagactgtggaaaggagatctggaatga

SEQ ID NO: 159941 - DNA, 1680 bp, Enterobacter cloacae
atgagtattcagctggttctctcccattacctggcgggcctgcgtgagcgcaacgagctcgatgttctgctgccagaactgcttaaggccatggggcacaatgtgctcagtcgcccacagattggccccgcccaggcgggtgttgacgtgctgtcgacccaaacgggtgccgacggggttgatgaggtttttgtctttatcatcaaattcggtaacgtcggacgggccgatttttacggtgggccgcagtctattgacccctctatccgggaggcctgcaatgacttcctcagaaaccgtttaccggaaccgctcaagccgctgtgcaagcggattgtcctggtctccaatggcgaactgctgcaggaagcccaggccggtttttcagccctgacggcagacatcgcaacacgtccgctttgcagccttgagttctggggcaccgatcaactcacaccgttggtagagcagtacctcttcgatgaaacattactgctggcacggggaaaatctgacctgcgcgcggccctggccggccttgaggagtcgggctcggcgataaaccggtttatccgctttgttgatgcctgttttgaaatacaggccggggagtcagaacagagtgcggagacacgaaagaaaaagtttttaaggcgatgtgccgccgcgtcgatgggctgggcggtcctgctggtctggggaaaaagcgaaggcaatttaaagcctggggtcgtaaccggcgaatacctgatactgcgtatatgggccgaggctgtaaaactggaattgtacgccgaccacgcctttatcgaccgctttgaaaccctggttacgctgcatatacaggctctggtggactactttggaaaagtaatgcccaccctggagtcgccacgcgccgtcctgcgctggcgcccggatcgcgtcttctacctggagctaatatttgaggagctgggtcgcctgtctaccctactgctattgctccaacaaagaccaggagaggaggcgcttcgcacggagatccgcaacgccatcattcatctggtcaatcagcattcgggggtactacttcccctttatgacgggcacagcattgacctgaccctgctcttctgcgccctgatgggcgagtcagactgggacaatacgcggattatcgcaggagaagttgtggcccgacttcaccatgcgctgagaacagaatcttatctgccggtcgacaccgactcgctggaagatgctattgccctcgacagtaacaaggctaagagccgggatttcttccagacctcaacgctggtgccagcactcgcgacggtgacgtcactgctcggtgatgaagaagccctccaggcactgcgtgataagctcctgcctctgatgaagggggtaacgcttgagcgctggttccctaccgcatcacttgaaacactcagcggctcggctcaagggatccacagcgtcggcatttccagagcattgtctggcctcaggccttcagcaagggaggaagccgaggcgtcaattaaaaccttcgatggtgccgctgccccctcagacttcaggtggtccggtaactggcaagtcctgatcgcgttgtcagctcgactgtaccgacatcccttacccacctggtttatcggtgagtattgccctcctgaacatccggcgcagtaa

SEQ ID NO: 159942 - DNA, 261 bp, Enterobacter cloacae
atgtatagctatcaggatattgaaaaaattaaagccagccttgagtggattgttaatcaagcgtccacgtatgatcacttaccgactcgacaggatcagcgcgttattgacagtcttctggagctcatacagacctatgacctgctgctggccttaatccttgagcatggcgattccgtaattgaccgtgacatgacccggggtctggccgccacagaaatgttcattgcaaaagcgaagcgcaatacggggactgtgtga

SEQ ID NO: 159943 - DNA, 201 bp, Enterobacter cloacae
atgaagataaaccgtaacctttttgccggtatcctgctggcattctctctctttactgcggcgcagatcgagctactgagcggcgtactgcctgccgcagacggccatcctcattttcaggtccggagtgctgacacggcagagttgcccgatgaaaaaatccagccgcatgtcgccaccccttctcacttagcggggtaa

SEQ ID NO: 159944 - DNA, 582 bp, Enterobacter cloacae
atgtccagtacagcggtatcgccgccagcacgcatcatcgttggcatcagcggcgcatccgggtttggctacggcgtggcggccctgcgggcgctcagggcgcttcaggtggagagccacctggtcatctcccccgccgcgcagctgaaccgccgtcatgaaaccaccctgacggaagaggcggtcgccgcgctcgcggaggtgacgtatgacattggcggtgtgggtgccgccattgccagcggttcatttccggcggccggccttggcagtaacctgctgacgcgggcggcagacgtgaccctgaaagagcgccgcaggctggtgctgatggtccgcgagacgccgctgcatgccggacacctgcgcaacatgctccaggtgacggaaagcggcggcattattttcccccccgtcccggcctggtatgcccgtcccgccggctgcgaggcgatcatcgcgcacagcgtggcgcgggcgctcagcctgctgggtctgacctgcgacgccctgccccggtggggggaaacgcatcaattggaaacaggagaacatcattatgatcacaggtccctggattaa

SEQ ID NO: 159945 - DNA, 492 bp, Enterobacter cloacae
atgagaccggaagttgtaaccagtcatgatggtgcagtgtcatcccgggtatcgcgctcagtccccttccctgcatcccgccagcacgcaggagcaccggcacggtcacagacgtgtccgcgtcggagagccggtgtcgtggccgtcatccggctgagggcatcaactgaagcttacgccctgcaccctgatgaaaaattgcacatcattactatgaaattcaataagataaggaacataactatccagaattcagtcgggaacaggataaaggtcactgacctgactcctgtccgtacaacacaccgggtcaaacccgaaagcccgttccggctgcccctccctgaccgatatctggggtatcctgctctgaaggtccctcgtactggactgtcctgtttcgggcaacgctcctcagcgttagtgtccatcgactgtattgaagacaacccaaaagtgggaccacggtcccagctgcgtgttgtcttttaa

SEQ ID NO: 159946 - DNA, 732 bp, Enterobacter cloacae
atgagcaccttactctctttaatcgcatttatgctgtttgtggcctttattatcggcgtgattaagccctcgctggtcaggatgtccggtcgcaagcaggtcagcgccgtgtatctgggcggttttctggcgctctgcgtcatcaatgccgttctgttcaaggcggagcccggccagaccgtcgcaaaaaaacaggatcagccgcagaaggcggaagcctctccgccaccctttaaatatgcggataaaacccttgcggagtaccgtaaggagcgtacggatacgcgacacaagatcgtggcggcctatatggcataccgccagatacctgaagcctctgcacaaccgttttatgcctgcgtaagccagagcagttacaccaatcagggtgagacaccgcttggcgtggtggcagactggtgtttcaccgagtaccggaccagtccggagatgctggcaaaacgcatcaacttcgatacgtttcaggctaacttcagcggctggaacggggcttaccggccgttagaggccctgatcaaagccgacatgcatgatgattcctcttacaaacatctctcgacacggtatcgcctgatcctgaccgacgatccccatgccacagttgagaccactttccgcggcaccaacgccttcggtggcgtggtcaaagagacggtctctgcacgggtggatctgcgaaccgggaacgtggtttcgttcaatgagatctaa

SEQ ID NO: 159947 - DNA, 717 bp, Enterobacter cloacae
atgagacataatcgctgccatgcagttaccaaaaaatggaagcgttgcgggcgagagggagactggagacttttttgcgatgagcataagctccagtggctgaaagcggtgctgattggcattatcgcgcctgttgcaacaggcatgatcgcaacctgggcgtactccgcgctaaccgcaacggaacctgcgttgtctgtgaaagtgcctggccacaacgtgatagaccaggcgatttcacaggcgaaaatggaaggtaccggatataacactcccagcgccagtgaagtggtggccaagttctatgtgttacccacagtcacgcctgagctggatacgcattcttcctggtttgcgctggtttcagtcagcccgtttaagcctgttaacgctgacttcacgtttgatgccggtgactgccgttttttggggtatgtgaccgattttaatcccctgacaagggatgctgtattttcaataaaaaccgtttcctgcacggacaacgcgaatcagtcttatcaactggtctttgatgattatctccacgcgcctcaggggctactcgctgacatcaagtcacccacagagcggcaccttaccctctcgcgtgagaagggtggcatcttctcgcttcccctctacaccaatgttctggtcaaattcaatcaaccggttagcgcactggaagccacagggaaagtcatcacgcgattttaa

SEQ ID NO: 159948 - DNA, 927 bp, Enterobacter cloacae
atggtagtccatgccaaaccgaaagacagatccggatactcagccattaatacggaaatgtgtgaacgggtattagtcacgttattgaccaccttcggcaccatgaaaggcacgcttcgtctgataggcggtctcgtcccacgctatttaacccctgcgcaggaacctcaggtgcctgaacattatggtacatctgatgtggatatcgtgctcaacctgcaagtgatcgctcaaggcgagaattatgcgtctctgcacgatcagctggttgaaagaggcttcagaaaacacgctgagacaaacgcatggcgctgggagttccccattcccgatagccctcccgtactggtagagtttttacagggaaacaatgctgacggcaaacccggcaaagaagtcccgatagacggcgaggcggtttctgccctggtgatcccctttgctgaaatgtcatatgactggtacgccgagaaagagatctcggcgatgctctttggcgatatgggcaagggagacgcggggattgtttttgaaaccatacggtttgcagatgaagtggcattcattctgctgaaagcgatttcgtttcagaaccgcaacgaacccaaggatgcggccgatttgatccacgtgatgcgttacgccggagcacctgaagacattgcagagaaatttcttgatcgcataaagagtggaaaacatcagaaagcgatcgaaacgggacttcaggctctgcagaaatgctttgctgaaggtaataacagtgttgaaggctatctgttgacgggccccgtgcgttacgggcagttcatgcatggtaccgatgccagtctggaaaatgagagactgcaggagcagcgcttcgccgctgcactggtaacggaagttctgcgcctcatcaatgaaggccggaatgacactcagtaa

SEQ ID NO: 159949 - DNA, 1068 bp, Enterobacter cloacae
gtgattcagtcagaaaaccagcttctacaggatgtgacatcgacccttgaaagcctctttgaagccaggataaaaatacgggatggtctgccgggcgacgacggtattgattgtgtgctggaggtcaggggtattcagggggtctggatgatgcctgtagagattaaaaaacaggcttacccacgggacatcaggcaggccatctggaaaatggaggcgttctgtcagaagaacatcaatacgccggatattgttccgatttttgtcgctgagctgatcagtgagggggcaagagaaatgctcaaagcgcatgatgttggctattatgagctgggtggtactctctttatcaggcataaacagtcaattatcgatatacaaaaaccacgcaaaagaacagcgaaacgcgggagtggcgttctgttcactgaagcgagggaaatggtcgttcatgcactactccagtcaaagggaaagtggctttcaggtgaagagctcagtgaatattcaggaacgtcagccttcacggtttcgggcgttttaaaagaactggaaatgagggaatggctggagaaaagccgtgaaggcggtcgttcacagcgccgcaggctgattaatcctggcgcgttacttgatgcctggtcggaggccaccagacaacggaaaaatgatgccttctacgggtatttgtttgcaccagatgcagtgggctgtgtcagaaaaattgaaagcaaggttagtcacacaggcggtgacatctgctgggcactgacgggtgccctgccagcaaatcaggccacgccattgctcacgggcgtcaacgtggcagagatcatcgtccccgtaggaagtgcgcagcagtttacgcaactgacggggatcaaacgtgcagaaaaaggctacaacgtagttgtacatgaatgctcccccgcagccctgcaatttatacgccatgaaaacaacatccccgtcgccagtaacttcattcagtatctgtctctgctggacggcaaagggcgaaatgctgaacttgctgaactgtttcgtctgaacattctggagatttaa

SEQ ID NO: 159950 - DNA, 390 bp, Enterobacter cloacae
atgaaatattctcactcccttctggctggcctgctgatgctggccccgacagtatccgctctggcggcaacgccggtcgccaccggctgcgaggccaaacgccaggatatcgaacagcagctgcgttatgcccgagcgcagggaaacgatcaccacacagccggcctggaaaaggcgctgtctgaggtcaactcgcactgtactgacagcggtttacgggcagaacgcgaagcggacgtgcgcgaaaaagcacggaaggtgacggcgcgcgaacaggagttcgctgaggcacgggctgatggacgtgcggacaaaatccgtaaaaaagagcgaaaactgaacgagacccgggcagcgctggaggaggacatagtagcgctgacgctataa

SEQ ID NO: 159951 - DNA, 960 bp, Enterobacter cloacae
atgaaatttcctggccttccgcacaatgaagaagagcggctgcaatccctgtctcagagcaatatgctggatgttcgcagtaatgaacagtttcagcgattaacccgggtgacgaagaaactctttcaggccccggttgtgcttatcagcctccttggccgcgatcggcagtggtttctcgcctgcgaaggcgtggctgagcgtgaaacatcgcgcgatatttcgttttgtgcgcacgctattttgcagcaggggccgttcatcgtgaacgatgcgtctctggacgatcggtttcatgataaccccctggtcaccggctcaccgtatatccgattttatgccggttaccctgttcatcttccggacgggcatgtggggggatcgttgtgcatcattgaccgcaagccacgtgagttcagcgaggctgacattgagatgctgaaagatatggccttcatcgtggaagatgaatttaagctgacagacatggcgatgaaggacagcctgacgggcttaccgaatcgccggggattttaccgccaggctgaaagatgcctgacggaggccggtaagcggcaggccggagccagtctgatttttttcgatctggataagtttaaatccatcaacgatctgtggggacatgcagaaggggataacgtcctgaaggcgttctcagcgctgttactggtgcccctcggcgaaggggggattgccgcacgactgagtggcgatgagttcgtggtcctgcttggtaacactcccgatgccgccacgtatctgacgatgcttcaggacgaggtggataaccataaccggcaggctgataagccatacaacattaattattcgtatggcgtacagcttctggatctggccaaaccggtttctctggaggagatgctggcgaaaagcgacagcgtcatgtattcacagaaacggaaaaaaacattgccgtag

SEQ ID NO: 159952 - DNA, 171 bp, Enterobacter cloacae
atgaccatgtacccaagggaagtgaagccgaacggctggcagagcttgaatatggtctgcaagtacaatgaccacgataaacctgtttatcccctgcggcgtctcgcgacggcgacagaatggggcaccgggctacaatgcgcctcactaaaagtttttaggattgtttag

SEQ ID NO: 159953 - DNA, 378 bp, Enterobacter cloacae
ttgcacgaagatgaaagatgcacagaaaccgaaacagccagcattcgatttgtgcccgatgaattgttcaccaattgtgatggtgaacttgtttcgtcgctggtcgtgcaggatttgctacgcgaagcacgagatcttgatcccgagttggctggtgtaaagcatctgatcgtgaacaatgcagcactttggcagtctatccgcaaccgtaaagctaaaggtgggccatgcaaccgcttcgtattacgcgacgatatgatcgttttaatggataagaacggacgaaaaggctttacccgttggctggagaagctggtgcgtgacggcataattgtggtggatgttatggagggagttacagtactgaaatctcattag

SEQ ID NO: 159954 - DNA, 381 bp, Enterobacter cloacae
atgagtggccggtcccttcagggtgcatttgactatatggatgaggcctttgacgtgtggcgggaacgctctcgtcatgcctggcaactggatatctcgtggatcgggacacaagggattaaactccgggatgagacagcagcagagggcgacaatatccctgctgagtatcagctttctctggagcttgaggttccgcctgttgcggcgccgagcactgcggtgccctccgtcgtggagcaagaaagcatttccggcgatttgcggccaatcctgaaggacaaccctgtatcccgctcatcgttcgcagggtcaacgttctggccagtctgccagcgggtgttctgtcaggtgaaaaaggtgatacgggagcagtggtga

SEQ ID NO: 159955 - DNA, 330 bp, Enterobacter cloacae
atggaaacgccgggcccgtttctcagggaatttatggatcgtaaggtattaatgtccgctaatggcacaaagcggacgtccattctcacgcataaacatctaaggcatacttcactcgaattcttgcccttcccttgccaacaaccaaaccgcttgccctggaggcagcgctggtggaaaacacgacgcgctctgaaccgctatgagtctgaagcgcgctacagcttcatcgtctccctgcatgtaccgcagaccgatgtcgatctgctgacgccggtacagctcaaagtggatgcgctcatcgccagccagatcgaaattatgtcctga

SEQ ID NO: 159956 - DNA, 402 bp, Enterobacter cloacae
atgcaacgtgtcaccatcaccctcgatgacgatttactggaaacgctggacagcctgagccagcgccgtggctacaataaccgctccgaagccatccgcgatattctgcgcgacgccctggcgcaggaaacaacgcaggaacacgatgttcagggttttgcggtgctgtcttatgtctacgagcatgagaaacgtgacctggccagccggattgtctccacccagcaccatcatcatgatttgtctgtcgccacgctgcacgtacacatcaaccatgacgactgcctggaaatcaccgtactgaagggtgatatgggcgaggttcagcactttgccgatgatgtcatctcccagcgcggtgtgcgccacggccatctgcagtgtttacctgatataaaatga

SEQ ID NO: 159957 - DNA, 801 bp, Enterobacter cloacae
atgacattactcagcgtatccgacctttcacatcaatatgcccactcagggcttcgcggcagacatccgcatcaggcggtactgaaagccgtttctctggagttgaaaagaggcgaaaccgttgccctgctgggacgcagcggctgcgggaaaagtaccctggcacgcctgcttgtggggctcgaatccccaacggagggaagcgtccattggcggggtgagccgctctcgcaactaaacggcgcaaagcagaaagcgtttcgcagggaaatccagatggtatttcaggattcagtcagcgcggtaaatccacgtaaaaccgtgcgtgacattttacgggagcccatgcgccatttgctgtcgctgacgaaaacagagcaactggcgcgggccagcgagatactccaggcggtggatctcgacgacagcgtgctcgacaagcgaccacagcaactgagcggcgggcaacttcagcgcgtctgtctggcgcgcgcgctggtcgtggagccgaagctcctgattctggatgaagcggtgtcgaacctcgatctggtgctccaggctggtgtcatccgtctgcttaaaaaactgcaacagcagtctggcaccgcatgtctgtttatcacccacgatttacgcctggtcgagcgcttttgccaccgggtaatggttatggaagaaggacaaatcgtggagacgcaaagcgtgggcgagacattaaccttttcgtcagacgccggacgtgtattacaaaacgcggtacttcccgcatttcccgggcaccgtcgcgccatagtgtaa

SEQ ID NO: 159958 - DNA, 765 bp, Enterobacter cloacae
atgccacaacagattgaactgcaaaacatgactttacgggccggggggccgctggttaatagcgtctctttaacacttaaacgcggacgcgtgctggccctagtgggcagcagcggaagcggtaaatcactgacctgtgctgcggcccttggcgttctgcctccaggcgtaaggcaaaccgcaggggtgatcctcgccgatggccagccggtcaccccctgtgaactacgtggcatcaaggttgccaccatcatgcagaacccgcgcagcgcctttaacccgctgcataccatggcgacccacgcacgtgaaacctgccgggcattgggcaaacctgcagacgatacaacgcttatcgccacgcttgaggccgtcggactggagcatgcagaacgcatccttgagctttacccgtttgagatgagcggcggcatgctgcaacggatgatgattgccatgacgctgctgtgcgatgcaccttttatcgttgccgatgagcccaccaccgatctggacgcggtagcccaggcgcgcattcttgatctgctggcagacatcatgcaaaaccgagccccgggcatgctgttggtgacacatgatatgggcgtggtcgcccgactggcagatgaagtggcagtgatggataacggcagaattgtggaacagggagatgtcgacacattgttcagtgcgccactgcataccgttacccgtaatctggtcactgcccatctcgccctgtacggtatggagatggcatcatga

SEQ ID NO: 159959 - DNA, 834 bp, Enterobacter cloacae
gtgagatttttcctcgcttcacgctggtctgtgcgtatcgctttgatcattatcgtcctgctggcggtgattgcgctcaccagccagtggtggctcccttatgatccgcaggctattgatttaccgtcacgcctgcttgcgcccgacagccagcactggctgggtactgaccatctggggcgcgatatcttttcacgtctgctggcggcaacccgcgtctcgctcggttcggtcatgctctgcctgctactggtactcactctggggctcattgcaggcggcagtgcgggtcttatcggtggccgggtcgatcaggccatcatgcgtgtggcagacatgtttatgaccttcccgacctcaatcctctctttctttatggtcggcgttctgggaaccggactcaccaatgtgattatcgctatcgctctctcacactgggcgtggtatgcgcgcatggtcaggagcatggtgatgtcgctgcgccagcgtgagttcatacttgcctcgcggctttccggggcggggcatgtccgggtgtttattgaccatctggccggtgcggcgatcccgtcgctgctggtactggcgacgctggatatcggtcacatgatgctgcacgtcgccggaatgtcgttccttggcctcggcgtgacggcgccaactgctgaatggggggtaatgattaacgacgcgcgccagtatatctggactcagccgatgcagatgttctggccggggctggcgctgtttattaccgtgatggccttcaatatggtgggtgatgcgctgcgcgatcgcctggatcctcatctggttacggagcatgcccactga

SEQ ID NO: 159960 - DNA, 945 bp, Enterobacter cloacae
atggtacgttacgcgttgcggcgcttaacgctgctgatcccgatgattttcgccgcctcggttattatatttctgatgttacgcatgggaaccggcgacccggcgctcgactacttgcgcctgtctgacctgccacccacgccggagatggtcgcctccacccgtgtgatgctggggctggatcagccccttgttatgcagtacggcagctggctgtggaaggcactgaatctggattttggtatctcatttgccacccagcgcccggtgctggatgacatactgaactttctgcccgccacgctacagctggcaggggctgcgctggtactgatcctgctcacttctgtcccgctcggcatccaggcggcgcgtcaccgcgatcgcctgccggatttcgtcgtacgcattattgctttcctcggcgtatcgatgcctaacttctggctcgctttcctgctggtgatgtttttctctgtttaccagcaatggctgcccgcgatgggttatggcggctggcaacacattcttctgcctgcggtatcaatcgcttttatgtcgctggcgattaacgcccgtctgctacgcgcaagcatgctggacgtcgccggacagcgccatgtgacctgggcgcggcttcgtggcctgaacgagaagcaaaccgaacgtcgccatattttacgtaacgccctgctgccgatgatcaccgccatggggatgcatatcggcgaactgattggcggcacgatgattatcgagaacatctttgcctggcccggcgtgggccgctatgccgtctcggcgatatttaaccgcgactacccggtgattcagtgctttaccctgatgatggttatcgtttttgtggtctgtaacctgattgttgacctgttaagcgccgcgctggatccgcgtatccgtcgtcatgaaggagcacatcagtga

SEQ ID NO: 159961 - DNA, 1572 bp, Enterobacter cloacae
ttgtccatactaagccgctcgtttgtggtgctgtttacgcttgcctctttttttgcaaatgcccgccccataactgaaattactaccgcatggccggttaacgtgggaccgcttaatccccatctctacacgccaaaccagatgttcgcccagagtatggtttatgagccactggtgaaataccaggtggacggctcggttaagccctggctggcaaaaagctggactcactcggcggacggtaaaacctggacctttaccctgcgcgacgatgtgacgttttctaacggtgaaaaatttgatgcccatgccgcagcggagaacttccgcgtcgtgctggataatcgccagcgtcacgcctggctggagctggttaatcagatcgctgaggttaacatagtcgacgatagccgactgcaaatcaccctgaaaagcgcctattacccgttcctccaggagctggcgctaccgaggccgttccgctttatcgcgccctcgcagtttaaagacaatgagaccatgcacggtattaaagcgccggttggcaccgggccatggctgctgaaggagtcgaaacttaatcagtacgatgtgctggtgcgaaatgaccgttactggggtgaaaagccgcagcttcagaagattacggtcaaagtcatcccggaccctaccacccgcgccgtcgcctttgaaacgggtgacattgacctgctgtacggcaatgaggggctactaccgctcgacaccttcgcacgtttcagtcagaacccgggataccgtactcagctttcccagcccatagaaacggtgatgctggcgctgaactcagctaaggcaccgaccaacgagatactggtgcgtgaagcgctgaactatgcggtcaataaaaaatcactgatcgatcacgccctgtacggcacgcaacaggttgccgatacgctgttcgctcccaccgttccctacgccagtattagcctgaaaccgcgccagtacgatcctcagcaggcgaaggcattactggacaaggccggctggacgttatctgccggcaaagcaattcgggagaaaaatggtcagccgctgcgcattgaactgtcgtttattggcaccgacgcactgagtaaatcgatggcggaaatcattcaggctgatatgcgccagacaggcgtggatgtcgtgctcgtcggcgaggaagaaagcagcatttacgcccgccagcgtgacggccgctttggcatgattttcaaccgtacctggggggcgccatacgaccctcatgcctttatgagttcgatgcgcgtgccgtcgcacgccgattttcaggcgcaacaggggctggccgataagaagttaatcgataaagagattggcgaagtgctgcagaccactgacgaaacacagcgtcaggcactgtaccgggacattctgacgcgtctgcataacgacgcggtttatctgcccataagctatgtctcgatgatggtagtggccagaccggaactgggtgcgatcccttacgcgcctgttgcatctgacattccgtttgaacagatcacaccggtgcaaccctga

SEQ ID NO: 159962 - DNA, 861 bp, Enterobacter cloacae
atgcttacgatcgcagctcatgtcaggaatgaactgggagaatgtcctctctggtgcgaaagaacgcatcgcctgtactggacagatattgagggccgtgaattactcgccatgcaggaagacagtgaagaaatcagccgctggtccttaccggaacgcctgggctcatttgcactgactgatgaagaaaacgtactgctgatggggtttgaatcccgcctcggctattacgatctgcagaacggtatttttaccttgattgctgcttcacctggtgcccggggtacacgtatcaacgacgggcgctgcgatcgcgcaggaaattttgtattcagctcgatgcacgacggcaatcccctacaggctattggcaaattttataggctgaacgcagccactctggaaacagagacgctgagcctgcctgcggtggccatacctaacagcatctgcttcagcccggatggctgcaccatgtattacagcgattccatgcagggacgcattttttgttgtgattacccttcactcagcaatcagcgaatttttactgaagtagaaggcgacggcgcgcctgatggatcctgcattgatgcgcagggctatctgtggaacgcagaatggggcggtagccgggtcgttcgctacagccctacaggagaaatgcacagctccctgtctgctcctgccattcagacgacctgtccggtgctcggcggttcgtcactgaatacgcttttttgtaccagtgcacgcgttggtctcgctgaacctaccaactatgacggtgcacttttcagcatccgttcacccttttttgcagggttacctgaaagccggtttgcagcgcaaaaaatataa

SEQ ID NO: 159963 - DNA, 1398 bp, Enterobacter cloacae
atgaacgattacatcagaaatattgtgaataaccagactgcaaacccaccgttaacattgattcggggtgcaacgatcctgagcatggatgacaacgtgggcaacattgagcacggcgacatccttattcgtggttcaaccatcactgccgtgggtcagaacctggacgcgcaggatgcccacgtgatagatgccacgaacatgattgccatgccgggtatggtggattcacatcgtcactcatgggaaggccagttgcgtcgtatcaaccctaatgcatcctgtctggatgactacagcaacgccacgcatttctctttcgccaaatattatcgccctgccgatatttatgtgggtaacctgcttactgccctgggcgcaattgatgcgggtatcaccaccgtcattgataattcccacaacagtcgcaccgctgcacactctgatgccgccgtagaggcgctgctggattcgggcattcgtgctatccacgcctccggggcacccgttgtaggcgaatgggacagagcgcactggcccggtaactggcagcgcctgcaggagaagtatttcaaaaacaaccctgaaggacttgtctctctgggtgtcatggcccagctggagccggaactgtgggcggaggcgcgcaggctgggactaccaatcgtcacagaattcttcggtgctgagatggcctctgaacttgaatcactgcatcagcaggggctgttggggccggacaatattttcaatcactgcacggcgctgcccgatgagggatgggacatcctgcgcaaagccggtgtacgggtaaacgtctgcccccgttccgattcgcactatggcattgaaagcgggatgttcgccattgaagccgcgcagcgtcatggtatcaacccgggcctgagtgttgataacgaaacgtcttacagtaccgatatgtttatggaaatgcgtgtggccttttacctgcaaagggtaatgagcatgcaccagcagcactgctgcgattcaccccactcgctgaaaacgctgccggcagcgcagctccttaaagccgcgactgtcgatggcgcagcctgtgcagggttgcaggacaaaattggcagcctgacgccaggcaaacaggcagaccttatcctgattaacgtcggcgatattaacctctacccgaacggtaatgcgtttggcaccgtggtgcatgcaacggagcgaagcaacatcgataccgtcatgatcggcggacgcatcgttaagcagcatggcaaagtcgtgggcgtggacagcgcgcgtcttcacgaagcgattgatgaatcccgggcgcatttgtttgccgccgccgggtatgagcctgacatttttgctgagaccttcctgccgccggcgcagacacactga

SEQ ID NO: 159964 - DNA, 885 bp, Enterobacter cloacae
atggatcgcattcaggctatgcacatctttttacgcgtggctgaagccgggagcttcgtacgggcagcagaaacgctttcactgccctcatcgacggttaccagcacgataaaaagtcttgagaagtatttgcaggttcgcctgcttaaccggacaacgaggcgggtcagccttacccctgaaggtatgcagtatctcggtgagtgcagggaaatactttccttaatcgaacatgcagaatctgggctgaaggatgccggaaggcggccacagggacgtttacgcgttgatatgccgggcgggatagcccatttcatcgtcatgccaaacctgaaagatttttaccggctttatccggatatttacctgatgattggcgtcagcgacagacaggtgaatctggttcaggagggcgttgactgcgtgatcagaacgggagagcttaatgactctacgcttgtggcccgcccacttggccggtttcggtggatcacctgtgcctctcctgactatctcaaggaatatggtattcctcaaaccccggatgatttgtcagagcatcgggccatccactatttttccggctcgggcaggcgcacagacgagctgcatttcctgcgtggcaccgaaaatttgtacgtgcctgtaactggaaacgcagccgttaacgaaacgggactctacattaaaatgtgtcttgaaggttttgggctggcacagctggcagaaagtattgtttctgaggatcttcagaaaggcaggcttgttgaagttctggatgactggcaaccgccatcagttccggtcacattgctttatccgcatcagcggtttctttccccagcggttcgcgcttttgctgactgggttaacactattctatga

SEQ ID NO: 159965 - DNA, 1107 bp, Enterobacter cloacae
gtgattttactgtgccagtcatatgaacagtatttcacggtaacagggtggatggcagcctgcataactctcccccatatgctggggccgtttattgcccgcagtatagatacggccagcgacggacgttgggttatcgcgactgcctgcctggcttatgccgttatcaccgcattaatgacagcgacttttggccacgtctccttacttttgaccgcactacttcttatcgccgcaggactttgcggccctctactgaccggtggaattagtactttcctgcctgccattgcagggccagaccagagaagccagcgccgggctcagggtcttgatgtagcaacctacggtttcggcggcacacttggcccttccgccgtagccgctatatccgcctgggtttctccttctgcggcgttttaccttctggctgttggtactgtccttgccgcttcctttatcatgcggctaccggtttcacaggtagcaaacgctggcaaggatgtaaaagttgccagtgccaccgcaacagtgggtttgatgatcaggcacacgcagttgcgcaggacattgtatctgacaatggctgtcgcttttgctgttgccgtcttaccagttgttgcggtgaacctggcagatgttcttggtgttcctgcagccacggccgcttttcttactgtggcctatggggcgggtaatctgacaggatcagtgtgcctgatggttattccgctgagaggtgaagctgacaggctgatgctgagtaccggcgggctgattgttgcagggctgctttccattcttatagtcagcagctttttgccagtgttcgtatgtttcttcatcaccggaatgcttaatgccgcattcttcgccgccacgcttgcagcacgcagtgaatactctcctccctcctgccgggggcaggtttttgtctgggttggtgcgatgaagattactgcgggatcgcttggcaccgctgcagcaggccaattggtgctgctgggggcttatacaccactgattttaagcttgtgtactctctcggcaatactgcttagttctctcgtggcccgcgcctggccgtggattaaaacatattactga

SEQ ID NO: 159966 - DNA, 1005 bp, Enterobacter cloacae
atgcaactggaagactacatttcatccgagcgtctgaatatttatacggacattcttaagttaaagcctgaagaggtgcttggcggatacaactggaacaaggctctttcagctgcgatgcagccgttgctccactgccttgaagtcacattccgaaacgccattgattatgccattcgtcataatccgccgccgggagcaacaggcttatggcgaacggatgcttactggatctatgacctgcctcgttatatcggagacaaaacgtacatccggcagggtaagcgattcaaaacggacgggcagggaaccccccggacatttcccgacggcagcccgatgtatcatttcaccgcctgggaagagacctgtgtacgcaaggtctcgaagcgcattatcgacgctggtaaaccgttgacccctgagcgcgtgatctccgggctggactttggcttctggacaaatctgcttacggctgaatatgaagaatcaaggaagctctcgctgctgtggccacatctgacctccgacgtctttccctcacgtcctgcacacgtaaagcgccatcatcttgagcagaagttcagtcgcattcgtgacctgcgaaaccgtctggctcatcacgaggcggtatggaagtttcaggagcgtaacgaccggggagtccccgattacaatcgccccgtttatgggctgaacgcgtcgctgcatcttctgcgccgggcctgggaagatattcttgaggcgctttactggatcagtcctttgcgacacgccgcttttctgtcggaaggtcatcatgtgcgatttgaaatgctggcaacggtagagggtctgcagtgttacaccggacgagagaacgtcacgggtaacttaaatatccggcccagccgtgaagccaggaaattaattcgatcattgcggcaaggaaaaacgttgaggatcactgaccgcgaccgtctgctggctgtcatcggccctgactggagtcgtctggaagaataa

SEQ ID NO: 159967 - DNA, 543 bp, Enterobacter cloacae
atgcagccggaacaccaaaatccagttccacaggcttcgacaaatacgcaagactataccgggaaacaaaacgatagtcctgaatttgaagaagtagaggaagatctcagtaaggagatcatccaacacccggatgccttttctcgtgtgctggacaggcctgaaattcaggaaatcgttgtcgcgcatcatgcgtttcaagggccattgccacctccttatcttctcagggggtatcaggatatcttacctgatgcccctgaacgtatattccagttgaccgagaaggaatttgcccacagacaaaggatggaagaaaaagcccttgatggtgcaattaacagagaccagcgaggccagcgtttcggtcttggtgccacactcttcacagtagcatgcgcgacactattgggtctgacaggccatgaggttctcgcgggggcggtgattggtacagtagtcgcagtcgcatgtatttttgttctcaggcagaagccagtcatcaaaaagaaaactgaagacatagcgtcagacgaagagtag

SEQ ID NO: 159968 - DNA, 471 bp, Enterobacter cloacae
atgcgaaaacagttcatcttagggatattagtgatagcagtgggcatggtgatcctgacaacgtttatactgctcaatcgaagtcatcaacaacgccattttagttgttttacccattactattcccgtaaaaatacgttaactctaaatgtcatattacggtttgattttaatggcaatgagggaattgtaacgatgatggggagggtaaacgacgaaaatggtagtatacagatagtcgataaaaaattactctattcctttacgcataccgcttctcactttcttatgatatccaaaaaaaaatttacgcagccacatgacgaagcagatgatacaaccctcgctcaatttgttgcccccttcttctttcaagagggacgaacgctgctatatcgcttttttgcccagaagaacggtgattatgtgatagaagatggcaaactgccgttagggtattgccaaaactaa

SEQ ID NO: 159969 - DNA, 786 bp, Enterobacter cloacae
atgcaaaaaaaatatttaattaacaattatattgaatttcagccaagcaatagtttgctcatttgtcacatcgagccgttgcgcagcgtttcattacctttaccttctgcccgctgctttactctgctgctggaaagaggggatcttgtcacccataatgagttttacccttatgtatggggtaacgattcagatcagatcatgcctaataatctctatcaaaatatatctttacttcgtaaagcgctacgcagtattacaccagatggtcacgcctgggtggtaaccgtaccgagaaaaggatttaaactagccccttttgtggaggtggtaataaagcgaagtgacgaacaggaatcctgtccgacagcacctgacgtaatgcagttaatgacaaccggaaagttaaacataatttcagattatatatctcaatcacttccccatctgctcaaattcggtagttatctttttcttgtttccctggcagtggtctgttttgtggtgattgagcaatataataataaagaaatggaattcgctgatcaattccttttctataagtcttatggtttatgtgagctgaatattaataaaaaatcccgtgcttctcattttgaagagaaattatcgccatttgtactacagaaatgttcaagctcaccttatgtttatatcactgcctataacgcatcaccattatcatctattattatctgtgaaaaacctatttcttataaaaagccaaattgtgattcatttttcgtgacggagggaagtgaataa

SEQ ID NO: 159970 - DNA, 390 bp, Enterobacter cloacae
atggaaaaggaactcgttgggtactatatcggtgaaaattttcaactcgatattttgcataagaaaatcacgagctacgattgtaaaggaacgccacaaaaattttttgtcatgcgagaaacaatgatgcggctttttgtttatctgctgcaaaacgcctgcgatcgaattgtgacaactgaagagattctttacaacgtttgggatttacatgggcttaagtcatccagtcagcgactatggcaagtaatgcaatcacttagatttaaattagctatgcttggtgtttcccacgattttattatgcgtattgaaacgatagagacaaaaggcttttcaatcaaaaaagatagtgtccggcctttgtttatgattagggaagaagtatag

SEQ ID NO: 159971 - DNA, 579 bp, Enterobacter cloacae
atgaaagcatacgtcgtgtctaatgatacctattttaaattaggaatgatttctcttttgactgaagctaactttgaggtgtgtctgtccgagattaattatgacggcattattaactctgaaacagcatttcccgctagtctgatcttatttgatctccgtaatgaaacgcaatctttagattatttcacaagcgttattcatagcggagcaaaggtcatttttattgttgaacgttttggcgttcaagatttcacgtgcaataattttattcttgctgtaccggacaaagcacgtcttacaagcctaataaccaggttaaaaaatatcgttagaaattatcagcgacgctatacaaggaagtctttggacttatctgacagggaagatatggttttaatgcactatattaatggagatacaccgaagaacatttcaaagaagttgaatatttcaatcaaaacattctctacttacaaactaaatgctcttaataaacttggcgtcaggaggataagcagtagatcgttgatttacctgaatagttatatttcaagaaaaatgaattgcctccagtaa

SEQ ID NO: 159972 - DNA, 969 bp, Enterobacter cloacae
atgattaatttatggaataatatggacctgataaaacgccacttcttaaagcttttttatatcttttttataagcagctttacctatggtacgtgtgcatacgcgcaggatacgcaatctaattccgaagcgcatcattcgtgggttttggatacctcaccgggtaatgatcaatggaagacagaagagacgcgggcgcgcatagtcatatttcgactagctcgggatcaggatacgcttgcatcaaaaccccttaacatttttctcaacggtcatctgcacactagccttttacccgagcatcaggctgtggcgctttcactttgccctggtaaaaaagagctgagcgtagtttctggcgatgtgaaaaaccctttaagagcagtagaggaaacgccgtatttagagccgggtacgctctatttctatcaggttgccgccgatgatcaggcgaaaatggtcgcccgttgggtcgatcgggatcaggcgaaacaggtcttagccaatgtgaaggtgcagatgcacatggtatcacgtgttgtggacgataagagttgccctactgggatctactctatcagctcttcagcgctctttaagctgaaccgtaatgaccgtggcggcatgttgccaggcgcagcccaaacgctacaaaaactggctgaacgaatcggtactgattataagacgctggataaagttatcgtcaaaggttatgccgatccgcttggcagagaggaatttaaccagcgactctcggagaaacgtgcagaaaccattgcgtcattacttatcgagttaggcttacctgaaaatgtcataacttctcaggggatgggggcaacacatcttcttgttgatgattgccagtctcgtaattttaagaaaaagcagctgatagagtgtaatcagccaaatagaagagtggaagtcgaagtatacggtacaaaacaacacgcagaaggttaa

SEQ ID NO: 159973 - DNA, 144 bp, Enterobacter cloacae
atgtttttttgtgattcacatcttaaaaatgaaagaatcgaaagtgaaaataagcatgcgaaagaatcaaaagcaaaaaaaagcatggccgaagccatgctaagcaaggttcactatgaattcacgtcaccggcgccgggttaa

SEQ ID NO: 159974 - DNA, 408 bp, Enterobacter cloacae
atgccattcaaaacggctattaaatggattcatcgccttgttaccgtttcgcttctggctctggtcattggatttctctggttaaaccaacaacccaatcagcgaaatagcgatgagcttcagcgcgtttataaattatccgatagcgtctggctttatatgaccatgaacaatcagggtggcgcgaccgtacccataatctaccgttactatctgtcagcggagatagcagggaaagataccgacattatcaatcagttggccatgaagcatccggtcattgaaggtacaggtacgattaccgcggccagcattgataaaaacggagaagtcagaatcacctatagcgggaaggttattgcgattgagagcaatatctccgatcttcggttctcagttaagccctga

SEQ ID NO: 159975 - DNA, 183 bp, Enterobacter cloacae
atggctattccagcttacctgtggcttaaagatgacggtggcgcaggatgggcgcaaagccgcgcaggaacaacggatccggcttttggtgattggtttggctcaacgccttacggtgatgatcctaacgaccagtactggataagagcgggtatcgactatgcaaaacgcacaggtttttaa

SEQ ID NO: 159976 - DNA, 249 bp, Enterobacter cloacae
atgccactcaccgataccgccatccgtaacgccaagcccatcgacaaaccttacaagctcagtgacgcgcagggtctttacctgctgattaaacccaacggctctaagctctggcagctcaagtaccgctttggcgcaaggagaagaagctggcgtttggcgcttacccgaccgttacgttggcgaatgcgcgcaagctgcgtgaagaggcccgcgccgtactcagcgcgggtgacgatccgggggtga

SEQ ID NO: 159977 - DNA, 1014 bp, Enterobacter cloacae
gtgaaaaggcagcaggagaagcaggcaaagaaaagcggtaatacctttgaagaaattgcccgtaagtgggtggcaggcaatatccgctggactgaggcacacgccgccaaagccctgcgctcgctggaactgcacgtattcccgctgattggcaaaatccccgtcgccgacctgaaaaccgccgatctgctgatcccgctacgggtggcagagagaaagggtaatctggaaaccgccgcgcggatacagcagcgcactacggcgatcatgcgctacgcggtgctggagagcctgatcgccagcaatccggccaacgatcttaccggcgccatcgcgccgccgccgaaaaatcactaccccgccctgccgctggaaaagatgccggaattgctggagcggctggagggctattccggcaggctgttaacccgcctggcggtgcagctgaacctgctgatcttcatccgctccagcgaactgcgctttgcccgctggacggagatcgatctggatggcgcaatgtggactatccccgccgagcgtgagccgattccgggcgtgcgttattcagagcgtggcgcgaagatgaagacgccgcatctggtgccgctgtcaaaacaggcggtgacggtgctgaaacagctaaagctgctgtccggcaacagcgaactgctgtttcccggcgatcacgatccgcgtaagccgatgagtgaaaacactatcgacaaggcgctgcgggcaatgggctatgacacaaaggtggacgtgtgcggtcacggctttcgcacgatggcctgtagcgcgctgattgagtccgggcgctggtcaaaagacgccgtggagcgccagatgagccatcaggaacgtaacaacgtacgggcggcgtatatccacaaggcggagcatctcgacgagcgcacgcagatgatgcagtggtggtcggactatcttgatgcctgtcggcagaagtttgttgcgccataccggtatgacaggcaggttcaggtagcctga

SEQ ID NO: 159978 - DNA, 861 bp, Enterobacter cloacae
atgaaggcgctggcgaaaaaagcgggcggcagttttaaaacggtggatgatcgcattcatattgtgcagcgattcagccgccatttacgctcgctgaatatccagatccagcgggtggaacaaatcaaggttcgccatatcgaatgctatattcaggcgcgtctggcgcaggatattggtaaacggacgctgcaaaatgaaatgtccgcgctgcgtggtgtgctgcaacaggccggacgtaagcaggtggcggaacatgagcggctgaccaataaatcattggggctggctggcgcatcccgtaacggcaccaaccggtccatcacaccggaatactaccagcaggtgctggaagcggcccgagagaaagacgcagggctggcggcgacgctggaactggcgcggctgatggggctgcgctcgcaggaagcggtgcagtgctgtcagtcactgaaaacgtggaaacaggcgctggagcgcggcgaaacccggctgacggtggtgtttggcaccaaaggcaagcgtccccgcgagacggaaatacaggatacaggcgcagtgaaaaaagcgctggataacgccttatctgttgcagaagaacgtaacggcaggctgattgaccgacccaatctccagaaaacgatgaattactggaggggagagattgcaaaagctggtctggcaggcgattacaccccgcactcattgcgttatgcgtggactcaggatgcgatccgctaccatctggcgcagggattcagcgaaaaagaagcgctggcgctaacctcaatggatttgggccacggcgacgggcgagggcggtatgtggtgcaggtttacggacgtcgggaagaggaataa

SEQ ID NO: 159979 - DNA, 222 bp, Enterobacter cloacae
atgactaataaggactggcacccggcagacatcatcgccgggctaaggaagaaagggacatcgctttccgctgtctcacgtaacgccgggttggcgtcctcaacactgaccaacgcccttacccgtcgttggcccaaaggcgaaagactgatcgccgaagcgctgggcgttgcgcctgaaaaaatctggccctcccgctaccgtaagcctgaaaattgctaa

SEQ ID NO: 159980 - DNA, 648 bp, Enterobacter cloacae
atggacattagatttatcaatatattaaaattaattgagctcgaagagaaacgggctaagaaaacagaaagtaagagtaaattagaattcagagcatttatattaataataggatttgtggctctttccatagtgttggcattacttagttacgctttagaatataaagcattactgctatactcattgattttattaataataagctattgcatccttataataacaccttttatttccgcatatcaaaacagaagtaagataaagaaatcattcagattaccattcagttcagcgatcaatcaaaacgtaaaaaaagagtttattatagatcaacgttatcttccgaaactcattgcattagataaaaaagaacttgagctagggttactggagataaaacacgaaagaaatttcctagaaaaaagaattctccttataactggtcctgtagataaactaggtatacttcctggtattatttccgcattagcagccacaacaaaactagccgatccaaatggttggctaatggggatcacctatggatacattgcattagttgttctttctttattcttttatcaaataatgatgcgttatgatagaatgatagcacttaccgaactagtaatttctaaaaaataa

SEQ ID NO: 159981 - DNA, 2139 bp, Enterobacter cloacae
atgcatgatgtatcctataacgatcaaccgatacaaattccctcagaggatcgatttggtatagatccttttgcccgaacattggctagcagtattctcaaaatgaagtcaccacaaggttctgttattgcgcttaatggtccttggggttcagggaaaagtagcgcattgaatttgattaaacatcatcttgaacaacctgttaaagatgaagatattgttattattgattttgcttgctggtggtttcggggtgaagaagcattggcattagcattttttcgtgaattatatgcggggttatcaccatctttgggggaaaaacttaaacagtcccttcctaagttgggggcaaggttgttgaaggctggttctgtattaggtggggcagcagatttggttggcgcaggcggagtcggcggcgttgctggtaatgcaatggagtggctgggagggttaattgagcaagatgaaggtgtcgagacgcttcatgcaaaactatcagcgtcattgcaagaacaatcaaagagattccttgtggtgattgatgatattgacagactttctcctgacgaagcgttactgatttttcgtctggtgaaatctgttggacgtcttccaaatgtgatgtatttgctcgtatatgatcgacttctggcagagaaaattgtgagtgaacgatttccttccgagggaccacattatttagaaaaaattgttcaagcagcatttgaattacctgaaccaataatgagtgatgtgcaacggcacctgttagaacaagtgagtgttatttgtggtgatattcctgatgagcaggttgttcgatttttaaatattttttatgctggaattgcagacgagatgcgaacgccaagggacgtggcccggtttgttaattcactctctgttacgtggcctgctgttgctggggatgtcaatgctgccgattttgttgcgctggaagtatttcgtttgctgcattcagatatttaccgcgcgataaggcagaataaatcattactttgtagtatagagttacgagatcaaaccaataagaagtcggtcgcagaaagattagataacttattttttaaagacaaagaacttgaatgccagaataggttgcgatctttgttaaaaagaatattcccggtattggaaagtgtctggggcaacatgacatattcgcatgattgggaacttgtgtggtccagagagagacgagtgtgctcaatatctcattttgacacatatttccgtttctctataggttgtgatgttttatccactgaggaacttaatgatattttgtcaaaaatatcagatgtcgaatatataaaaagtgtattgcgagattctcttactattaatcgtagtactggtggtacaaaagcggctgttatcttagatgaattaaaagtcaatgctgagaaaatttcagtagatgacatagaaccgcttctgactgcgttgtttgaaattgcggacgagatggatatcgacgcagatcaggctaaagggttagattttagcaataacgcattccggctacactggttattgcgcgctctgactaaagaaagattgtcgctggtggagcgttcaggaatatttgtttctgcttgtaagcacgcctcattaggttggttggctgattttacgaattcagcatggactgattatcatcctactgatgaaagaccaccagagtgtgaagacaaatgcttaacaactgaagaagatgctgggtatctgagaacgatgctggcagatcgttttgccatggaacttgatagggataatggttatgctttattaaggcataaggatttttcgttattgatatatcaatggcaacagttactcggagaagatgatttacgaattaagcaatggataggaactctccttgacgatgatgagaatattaaattaattgcaattgcatttacctcttacggatggactcaaacgatgggtgatgcagttgccagaagaaagatctatattaatattaagaggttagagcaatttatagatattaatatatttagaaaacggatagaagaattggttggaaagggttgtttctctgaggttaacgaattttgggattgttggcttaaactgaaatag

SEQ ID NO: 159982 - DNA, 123 bp, Enterobacter cloacae
atgaataccaatgagcaaagaaatgcttttattgaaatggcaacggaaatgagaaaggatgtcgggcttagaacaaacttatcagcagaggacttgagttgggttttactgggaaagtattaa

SEQ ID NO: 159983 - DNA, 1200 bp, Enterobacter cloacae
atggttacgactaattgtatacggtgcttaatatgtaaccacgaatatcgccttagaattggtgtcggatacgattcgtatcaaaaacattatttcgactgtataacatgcaaaagtcctatagttattgccgtgagggctatcccgccacaagcttatattgaagttgttgaaaattcagaattaataaaattcactatggaagatcgtcatcatacaataatgaattttcatcctaatttctcgtttaatagttttgaactacacgatccaaaagtctttgtatctatgtcattgatgaggttaatatcttcttttcttcgtttatctgaaagacaagttcaggatataagtactcaatttgatgtcccaaatgctcctaatctatggggattagttaagaggataatcagatttcctgatgagtcatataataaaagtcaagataagcttctctcttcatatatagatcaaagaaagaaaaatagtacaaacgttaagattgaagacaaatatgacataattaatgattttttagattcattgttttatccaaaaataacatcattaactaaccccattttttcactggtagatagtttacataaagactcaaagttggatgatttttatgtatattataaaaataatattctgttggaaaatatggagcgatatattactacatttagtgattattttagatttagggaccactttggacagttggttgtattttcaaggatatcatctgatgatgtggatggtagaatagtaggatcaaagaactttgatgaaattaaactttattatggtcaggtttatgaatctttaacatcaaactttgtgattttagcttgcttatttaatataaaatctggccgttcatttgatacttttaacagtatgagtttgaataagtatatcaaggatgtggagaaagcaaagaagcatcagccttttaaggatgatggtgactttaggaattttattgatggagttgactcttctttgcgtaatggctcccatcatgcatctatatggcatgatggtgaattagtcatgtatcgaagcggaggaactggagagagaaaacagctaacatatagtagatatatacatttgtgtaatcaactttccatatcattagctgcaataatgttaattgaattttacattcaatataattttgaaaaataa

SEQ ID NO: 159984 - DNA, 2073 bp, Enterobacter cloacae
atgcctttgcaaataaaagacattatagatctacaaactcttgtcgagtctgaacaggtagagttcaagctggcagggggaaaagacggcaaaggcgagttacctaaagacttctggcccacctattccgcaatggcgaatggtcggggcggttgggtagttctaggtgtaaaagaacaggctggaaaatttataccagttggtattgttgatcccgaaaagattaagaccgatctgtttaatcagttaaacgatcgcgatcgggtcagtgcgaatgtgctgagatcagaaaacgatgtgcaacaggtctctttgcagggaacggacgttctggcgatccatattccacaggcgatgcgcaaacaaaagccggttcacctgaaaaaatccccttttggtaatacctatcaacgtctgcacgaaggcgatcgcctttgtgatgatatgaccgtcaagcggatgcttgcagagcagctccacgacagtcgcgataatgaagtgctttctgaacactacacctttcaggacgatatcgatctggacagcctgaaagtctatcgcaatctgctttcggcaaataacccgcagcatccttatctggcctgtgagccgtttgagctttttaaaatggttggaggatggcgtaaagacagggaaaccggaaaagagggcataacgctggctggcgttcttatgtttggtaaatgggatgcgattattgccgcagcgcccaactacatggtggactatcaggaacgccccgaggctaaaacggagctgcgttgggtggatcgggtatgtccggatggtacatggtcgggaaacctgtttgatttttaccgcaaagtataccaaaaactggtcgctgatttgaaagtcccctttatgcttgaagagggacaacgcagaacggatacgccagtacatatcgcgctgcgtgaagcgttggtcaacacactggtccatgctgattttaccgaccgggtttctattctgatcgtcaaacgtcccgacatgtttggctttcgcaatcccggcttgatgcgcctgccgttggaggatgtgattgcaggtggagttagtgattgccgcaataggttgctacaccagatgtttttgctgattggtttaggtgaacgcgcaggttcaggaatgccgaagatttttagcggctggcgaacgaccaactggcgtatgccgagactgagagaaaatcccttcccggcgcagacaatattggaactaccgaccgccagcctgatcccgcagcatgttctggatgacctgcatcaacgatttggcgaggccttcgatctgcttgatgattttgaacaggtgattgttgcaacggcggcgattgaaggctgggtcaaccatgaacgagcctgccagttaacaacacggcacacccgcgaagtcacgctgacgcttccccgactggaaagtaaaggttttctggtcgcaggcggggagcaaaaaaacaaatactataccttgccgggggtatcggtcatgacgccggatgaagttttctcgttgggtgcggttgtgagctccacacataacgagggtaactccgcatataacgagcagaggtccacacataacgagggaaactccacatataacgagcagaggtccacatataacgaaggtgactccacatataacgagcagaggtccacacataacgaggaaaactccacatataacgccggggacgatcaacccgcatctcgggatgagtatgggcgtttgcttaaccgctttatcgacagaccctatatagatgatgttgacaatctcaccgagattttccgggattcgttgtttgctttagctgccgttccgcgtgaaaggctgcgtctgggggataaagagctgatgaagagtgtgatcctgaatgtgtgtcagggacactatatttccgttgctgcgctggggcagatccttagtcgtaaccctaatgcgttgcgtcagcagtacttaaaaccgctggtggagcaaggggagctgaagctggcgtttccgcagtataagaatgacccgaagcaggggtatagtgctgtttga

SEQ ID NO: 159985 - DNA, 1149 bp, Enterobacter cloacae
atgtattctcctgatgaactgcgtataaagcttgtccggcaatgggataacgccaaagttcgggcagagcgcttacttccacccggtaactggccgctctgcctgcccattggcaaaccttccgcgaaaatattcgcagagcagactcagcgcgttttgcaacatgtgcagttatggcgacaagtcgcagttgggcgtgtggaatgggaagaggtcagttatcgggcgagcgacggaccgatatcaatgccgttgcgctggctcctggacagtccttctgactggatcaacgcagcggcagatgcgacggtgagtcgggaatttcgcttgctggagagaattattgagcaggttgatcccatttttcatccgctgttggtcagccatcgttctctctggcggcataaaggcccgcaggaaatcatcagcgccgccaggttggcctgccgattagagccgggctgcgcaaatgggctgccgctaagactgctttccgggcaaggggtggataccaaatttatcgagaataatatttcgttattaacccgactgctggatgtgcgtttttcaggtgaagccagcgagcagggattaacgatttttcttgatgcctttgatgagtccagccattgggttttgattgtgccgctatcacccggcttgctcccttttaaaaaatgccgggtgacgacggcggaactggtggaaacgacattacccgcgtcgcgtgtgctggtgattgaaaatgaacagtgtctgcatcaacttccagtgttatctgacactatcgcgattttagggtgcggccttgatgtgcaatggttatccagtgctgttctggatgaaaaacgcgttgcctattggggggacatggatagctgggggctgctgatgctggcgagagccaggcgctgtcgtccgacgcttgatgttctgctcatgaaccgtgagttgtttgagcaatatgccagccatagcgccgttcctgaaccggtaaaagcacaggaagcaatacccgatggtttgcttaatgaagaggccgatttttattgctatttgacccgcttgccgcgtggtcgtctggagcaggaatttttgcctgcgggaatagttgaagaggcgctggtcaggtggcaaaaaggattataa

SEQ ID NO: 159986 - DNA, 1356 bp, Enterobacter cloacae
gtggggcttttgcaaaaccaggccatttcattccagaaaatacaacaaattgatttcgatagcatcgatgttcccggcgcaaagtgccaactggaagcgctcaaggaacggctggagaatcttatccgcccggattctgacgccagcgtagcgaaagcaaaacttaatgaggcccaagcggttgaatctgaacttgataagcagctcagagccgccaataaagtcactaatgggctggataccgagctcacattagcacggaccgcagaacataaggcccagcaaaccgcgcaacaaggcatgcaggatgaagagcgagagttgtgcgcgtcacatttttcgatggtgactctggagcaactgcccgacattcgtgatctggaacgtcaatatgagcggggaattcagcaagaaattgagggcgttaaaggtgaactgcatcgaatgaacattgagttgaccaaacgtatgtctgaagccaaacgtgtggataccggggcgctcgttgaggccggagctgatttggacgatattcctatttatttacagcgtttgcaggaactgaccgaagaagccctgccggaaaaactcaaccgctttcttgattatctgaatcgttcatctgacgacggcgtaacacaactgctcagccatattgagcatgaagtactggtgattgaagcacgactcagcgaactcaatgaaaccatgttcagggtcgattttcagccgggtcgctacttgcgtctggatacgaaaaaagttgtccatgaaagcctgcgcacgcttgaaaaagcgcagcgtcagctaaatgccgcccggtttgttgatgataacggtgagagccattacaaggctttgcaggtgctggtggcgcaactgcgggatgcctgtgaacgaagccgtaccctgggagctaaagcgctgctggatccccgttttcgtctggagttcgccgtatcggtgatggatcgccagagcggaaatgtgattgagtcacgtaccggctcgcagggcggtagtggcggagaaaaagagattatcgcttcctacgtgttgaccgcttcacttagctacgcgctatgccctgcggggagccgttatccgcttttcagcaccattatccttgatgaggccttctcccgcagctctcatgccgtggcgggcaggatcattgccgcgcttagagagtttggcttacatgcggtatttatcacacccaataaggaaatgcgcctgctgcgtgaccatacccggtcggcgattgtcgtccaccggcgcggtcaggattcaaatatggcttcgctgagctgggaagagcttgaacaacactcccagcgacgggagaacgcgtag

SEQ ID NO: 159987 - DNA, 1788 bp, Enterobacter cloacae
atgaatcaaatagtgcatctggctggaaaggaatcatttattctcactcgtatcgagttgttcaactggggcggttttcatggattgcatcaggcagcaatcgatcaggaaggtaccgccgttattggcccaaccggaagcggaaaaacgacgctggtcgatgccttaatgacgcttctgtgcgccaatccccgctacaatttggcctcaaccggagggcatgaaagtgaccgggatcttatctcttacgtccgcggtgtatctggacctggagatggcggagaggggcaatcacatattgccagacagggaaaaaccgtgaccggtatctctgctacgctggagcgtgaagggcagcaggtacgtctgggggcgctgctgtggtttgattccaccagctccagcgtgacggatatgaaaaggctttggctgttcagcgataacccggggcagacgctggagcactggctgaacgtttatcatgagggcggcacacgtttgctccggcaaatggaaaaagaagcgatcgggatctggacatacccgaataaaaagcagtacctggcgcgcctgcgggatttcttcgaagtaggggaaaacgcgtttacgctgttaaaccgggctgcagggttaaaacagctaaacagtatcgatgagatttttcgtgagctggtgctggacgatcattctgccttcgatcgcgcaacagaagtagccaatagttttgatggtctgacagaaattcatcaggagctggaaacggcgcgcaaacagcagcaatctttacaacctgtcgcgctgagttgggataagtaccagaagcaagagcgacagcttgcagacaagcaggcgctggaatcgctgttacccatctggtttgcacaacaggcaagccagctctggcgcgaaaagattagcctccttaacgctaagcttgatgaggcacaaaccagcgaagaacaaatccagtcacggcttgagttgcaaaaaaaggtggtcagcgactgtatgcagcgctatctccaggtcggcggcgccaatattgatgaactgaacgagcgtatcaaggactggcaaaaaacgctcggcagtcgggagactctggcacgtcagtatcaacagctgacccgcaatcttggattgccgcctgacttgagccaaccacagctggaggcgaatcagcatgaagccgaggcccgatgtaagcagtttgccgatgacataaagctgaaacaggaagaggcatatcaaaaaggtgcgcttagccatcgcattaccgaagaacttcgggaacgggaaactgaacgcgccgagatcgcgcgtcgtccggattctaaccttcccgcacattatcaggcgtttcgcagcgagctggcaaaagcgctgaacgttgatgattctgaactgcctttcgtcgctgaactgatacaggttaaaccggaagaggcgcaatggcgcggtgcgattgagcgcgctgtcgggagcaataggctgcgtattctggttgcgcctgaatcggcacaggaagcgctgcgctgggtaaaccagcgtaacaatcgtctgcatgtgcggctactggaagtcaaattaccgcactcgcccgcccgattcttcgatgatggctttacccgcaagctgttgtggaaagagcatccgtggcgagaggccgtcaaagcactgctggccgaaagcgacaggcattgtgttgacaaccctgaacaactgcgtgacacacctcatgccatgacggtgcaggggttaatgtctggtaaaacagcgtttctatga

SEQ ID NO: 159988 - DNA, 750 bp, Enterobacter cloacae
atggcgggtttttttgacagactgattaaccggagtgttgctgcaaatgcagacaatgaaccagaaacatcggacgaagaggttaccgatgagtcggttgaagaaaatgcggccagtagcgaaacgcgaacgctgaaaaaaatacgcgaagcgactcaggaattacttaaatacggccttctggaagaagccagtaaacccaatctgtaccgcatcgtactcacccatcctgaagaggttactcgcattctggaacctctcgatctggatatcggcattgatgagatccgcggcctgctgtatgtcaaggtcaggcttgacgaaacgccagagcaggatgaatggtctcaccctctggtgaggcggcaacggcttaaccttgaacaatcattattagttgccatactgcgccagcattttgttgcttgggagcaagaaagtggaaccggcgccagccaggcgcagatcgctatcgacgatctcctccctcagctccagatttaccttggcgatccgggcagtgaatcaaaagagcgcacccggttgcttaccttactggatcaattaaagggtcatggactggtcacgtcgccggatgcgcatgagcggatcgtgattcgtccgattattgctcatcttgccgacccgatgaatcttcaggcattactggcatggctgcgggaacaaattgctcaacaaaccccctcagatgattcgtcagaaaaggaaagtagtgaggaggacgtatga

SEQ ID NO: 159989 - DNA, 1497 bp, Enterobacter cloacae
atggaagaaaacacaaggcagcgtacggaaaattatatttcagcaaaaaatcagcatccagcctggatacttcttgccacccgccgcgccccgctggtattgagcagcctgaaaacgctgtttgaaaaatcacatgatggtatcccccttgaggaagcgattcagtctcttaccggcattcttgtcgagcacgtgagccaagaacaatatgacattaatcaggacaatccctctcttcaggccagccgtgagctgcgggaatggattaaacgccgtttaatcgtcgaacgggacggccatatctttgctactgatgcgcttgaggtcgcaattacgtttgttgagtcgctggataatcgtttcatgacctctacggcttcccgtttgtccatcgtacagcgagaaattgaaaaccttgaaacccggcttaatcctaatcctgcaaaccgggtttcaaccttacgtcgtcgtattgccgaactggaacgtgaattacagatggcggaagccgggcatattgaggtgctggaaacgcatcaggcggttgaacatattcgagaggtcttcaacttagcttccagcctgagagctgactttcgtcgcgttgaagactcctggcgcgaggccgaccgcgcgcttcggcaatccattattggtgagcaatatcatcgtggcgatatcgtagaacgcctgctcaacgatcaggatgcgttgcttaatactcccgaaggaagagtcttcgacagttttcagcaacagctacgacagtcagctgagttaacggcaatgagcgagcgactgcgcgttatccttagccatccttctgcttccgatgcgcttaaccgtctacagcgtcacgatttgcgctggctggttaaacgcctggtagatgaatcgcaaaccgtactccaggctcgcgcccgtagcgagcgcgatgtccgcggttttatgaaaaccggtctcgctgctgaacaccatcgcgttggtcatctgcttaacgaatttctgaatctggcgttaaaactcgactggcagcgccagatgattcgcaaactagaggttccgcttcctgctgttggcgtagcggtaacgggtgtccctgcgattgaacgtttacgttttaaagaagtggatgatgaagcggagcaaacgttggatctcagtaatcatgcggcggatttgacgcagattggcgatgatttctgggatgctttcaatggcctcgatcgtgaggcgttaatccagcagacgttgcagcttctggcaaaagaaaatcgccccgttggtctggctgaactggcggcgctgttgcccccggcgcacgatctcgaaacgttcgccgtctggattggcatggcgagagaagcgggcattgaggttattgattcacagcgcgaatttgctgaacttagtgatggggtaggtcgccgctggcgatttaatcttcccactaccggtctggaaagtcaggcattaatggatattgattgggagtaa

SEQ ID NO: 159990 - DNA, 1197 bp, Enterobacter cloacae
atgattattagagatacaactaacaaaataaaaagcgtctacacagaaataaaagatggtgatcttgatttgcgccctaatttccaaagaggtgaagtctggacattaaataagaaaaaattgttgattgattctatattaagagaatggtacgtcccaccaatacatacagtagcactaggtgttggtaaatcggaagtgctggatggacaacaacgattaaccgctatcaaggattttcttgataaccagtttgcagtagatggcaatattgaaccaaaagatgaagagattcttgcattgcatgggaaaaaatttaaagatttacctatcgatgtacaaaagaaaatagagagatttggtataacaatttatgagattactgaatacaatttaggtgagccaagtgagttattctatagactaaatcaaacagttaaactaacctcgtcagaagcaagaaatgctatttttggagacgtgagagatgatatttcttcatttgtcacatatatggatgagcttggagttgggaggaatatattagggtttagcaattccagaatggcttataatgacttattatctagagtgtgtttgttgctggaaaaaggtagcatacgatatcaattaagtgatgcaacactaacaaatagataccgggatgatactagctttgattcagacatatcaaacgcaattaaatccacaattaaattctttggctatctatctaagtactcttctcaagaagatataaaaacaaatttaacaaaagcatcatcacttaactggatatatcttatctgttgtatgaatatccattccgatggtattgatgtcgagaagttatatagtgcttttatttatttagagactgcgaggacatgtatcaaaactaatgagcgattccctaaagatgtagttgatttttttggaattggtcaggcgaatctacgtgaactaatgatgatttacatagagcgttcttcatcacgggtaatgtccataggttctataattataagagatataatacagaattttgcatgttacatggctggaattgtgccagtacacttaactgatgttgataccaatcatcttgaaaaatttgccgatgcattaagacatgaaaatgatgttaagttcttaattgaagatatggccgaaatttggaaggaaactggattatga

SEQ ID NO: 159991 - DNA, 354 bp, Enterobacter cloacae; identical to SEQ ID NO: 112491

SEQ ID NO: 159992 - DNA, 846 bp, Enterobacter cloacae
atggattaccttgcgcatgtgtcctcgcaacgaggcatttggattttgctctctagtcactctgaaacaattttaagtaaagtaggtattaaaaatgcaaggctaatttcgaatgttagtaacgttggtattagcgtagtttccccaaaacatgaaagaaaatattttacagcgttaggtatcaagcctagaaagaaaggcattttcattgttgaggacaagttttcatatatgtttcttaaaggcatgttgaatcgtgctgcttctgatattgcttatgattatcatatagttagttttcaggatggtgagtcagatatcgaaaaagtagtaaaacattttaaccctcataaaaaaattaattttgatttattagctgtgtttgatgcagatatgcgtgataaaatatcgaaacttatagggaaacaaatccccgtagtttctttaccatcaattgatggattaaacccagaacaggaactatggaatgttttatctaaaggagtcgataacgtagctctgcttttaggcactaaacctgatgatctattacaatattatgaacaatgtggatctttagatcatcatgatagattcatgcaattggctaattatcttaatgttaatgaagaaacattatttaattatatattttccatttggtattcggaaaataaaaaccttgttaataaattcattttttgcatctttaactcttgttatcacctaacgagagaggagattgatttgcttgcaaaggaaatggagttagagggaataccgttggatgaaaaccttaacaaaaaaatgctgttcgatggcaaagatttattatttttagaatag

SEQ ID NO: 159993 - DNA, 1428 bp, Enterobacter cloacae
atgttagagaattttttagaacgtataaaatcaatgggatataacgtatcaataaaagagaatggaaacatttttattaggttggattgctgccctcagtggttatttgtactccaaaattattatccagataaatatttcccttatttctactacagaatgaggcgagtagaagaagttacagatttacatgaggttatcccaagtgtactagcggcaataaccaagtcatttggaaatagttcttttcgatttctacaagaagagaatggttttagtggcgtggaagacgaattgtatgcaatgtattggtttccaggacaaccacttaacgaacaaataaggaaaaataaagagcaagattttgactgcttattcgcaatcctgatggatctctatatgttccataaatatcagggagatattttgggcgtttgcgctatcgattatcaagactattcattcgattccccgaagctaaatgtatgggtgaataaaatacgctcatttatcggggataatgagtcatatgtagcaaataagaggattaaccctaactggttttacttcaggagcattacttctggagtctcggtgacatatagtccgcatatcgcacaaagactaaaaacacttgctagtgccactaatgaagttacttttgttgatggtgtgggcgcgaggattgaaattgtcaaagatatccaaacaacaatatcatacgagagagaaaagttcgtaaaacaacttctgaaaaggcttgatgataactctgatttaaaggtgattactcaagaaaaccaacttgtttttatcagtgattgccatcttgtgtttacatatggcgattatggtgtaggttcggtttattttgagaaacagcaaatattgcatagacagcaaagagagatttcaattctatttggagatcttaactttaaatggaatatcaaagatcggcattcaagcgcggaatttgaggatttaattctggaattgttagatcgcgagccatgggtcttgacagtaaaaaaagtcgcaccaacaaatcaaggtgataatggaagggatttaatttgtgaatataatatgagatataatgagcttgggatgacagaaggtgaaaactctttcaaagtaggcaaaatgattattcagtgcaaaacaaatttgaaagactctaaaaaaaattcaattggaaagtctgatgtagacatagccaatacaatttttgattatcgccctgatggatatatgctgattgtaaatacccagatcactcgtgatttaactgagatgttggaaaggcaaaaggatagaaaggaacaagataggatactctggtggaacgcctatgatgttgaggacagattacgtaaacatcccgatatacatgcaaggtacagacatattgttgattatgtgtaa

SEQ ID NO: 159994 - DNA, 1143 bp, Enterobacter cloacae
atgccctgggatgcgagagataccatgtcattacgtaccgagtttgttttgttcgcctcgcaggacggggcgaacatccgttccctttgccgtcactacggcatttctcctgctaccggctacaagtggcttcagcgctgggctcaggaaggcgccgccggccttcaggaccgcccgcgcataccgcaccattccccgaaccgctcatctgacgacatcactgccctgctgcgcatggcacatgcccgtcatgaacgctggggagcccgcaagattaagcgctggctcgaagaccagggacacaccatgcctgccttcagcaccgtccataacctgatggcccgccatggcctgctgccgggtgcttcaccgggcattcccgctacgggccgcttcgaacacgatgcgccgaacaggctctggcagatggattttaagggccactttccctttggcggtggccgctgccatccgctcaccctgctggacgaccactcccgtttttccctgtgcctggcgcactgtaccgatgaacggcgcgagaccgtgcagcagcagctggtcagcgtgttcgagcgctacggcctgccggaccggatgacgatggacaacggctcaccgtggggagacaccaccggcacctggactgcgctggagctgtggctgatgcgccagggtatccgggtgggccattcccggccttatcatccgcagacgcagggcaagctggagcgctttcaccgcagcctgaaggcggaagtgctacaggagagatggttcgcggacagcggtgagttgcagcgcgctttcgaccactggcggacggtgtataaccttgagcggccacatgaagcgctggacatggcagtaccggcctcgagataccagccgtctgcgcggcagtaccgcgccggcacgcccccaccggagtacgatgaaggcgtggtggtcaggaaggtggatatcagcgggaagctgagcatacagggtatcagtctgaacgcaggaaaggccttcaggggagagcgtgtggggctgagggagacacaggaggacggctgttatgaagtatggtggtacagcacgaaagtgggggtgatcgacctgaagaaaaagtcgatcaccatggataaaggatgttaa

SEQ ID NO: 159995 - DNA, 576 bp, Enterobacter cloacae
atgttagaaatcgcagcattaatagtaacgtttaatcctgatgtaaaaatccttgctaggctaattgagcgtctgaaagcttctaaactgagtttaaaaatatatttgatcgataatgcaagtgaaaatgctcatgttttaaaaaagaagtatttgccagagcatgattttatttttcttcaagaaaatgtagggttggcgggagctcaaaacattctacttaaaaaaatcatggattctgattcagatgcagtacttttctttgatcaggattcagaaccgactgatgaatttattggttctttatcacaaggtttgatagaacttaacgccaaaggtcataaagtcggtgctgttggacctgttttttatgatcccagaacaggaacaaatactcctttttcattaattgatggatgtcgtattagaagcattcatccacaatcacatgaaccactaagagtttcttttcttataaattcaggaatgttagttcctgttgaagtaataaaaaaagtcggtttaatgcgggatgaattatttattgattatattgatatcgaaatgcccaaatga

SEQ ID NO: 159996 - DNA, 231 bp, Enterobacter cloacae
atgattcaggaacgtcaaaatattctgaacgtaaaaattcaggccgagcaacttaattttctcatgcagacaatacatgcccaccacaatgattttgactgtcatcaactaaacgcccttttagggcttgcttacgatattgctggttcggtttacgactggacggataaagaagaacaaattgttctggcgaatgatgaagctggaagaaaaggcgggaagcatgaataa

SEQ ID NO: 159997 - DNA, 822 bp, Enterobacter cloacae
atgaaaaaaactctaagcctaaaagatgcaatgcgtagccttcacgttatcgaaaccgatgaaggaatcgaactacaaagcgcagctggcacggcaaaatatgatgcatggggcgcacgccgtgaggtgaatggtatcccagagtactttccctcttctgtcacggtaaataagcgtcagcctgcgccagtgggcgataaagccccatctgtaactgatgaatcatgcgcaccattagtacgcacaatgaagcttcgtgttgagttggacacctcagacgcacaaaaggctattgatgatctggacgacaaaatccgtaatagccatgcattcaaagtcctgaaagatggcttgtcattcgaaaagaacggggcgctggtgattaatgacgggcaggtgttcattaccgatgcgaagattagcgatggcgtattgtctacaaactataacgtaaagttgaacgactccgataaaggcaagccgcacgaagctggcatgaccctcggtattgaaggtgaccagagcaaggtagtgtttaaagctgatcgctttcatgtgcatgaagccgatccatccatcatcggaaacgccgttgtatcagccacgaagacgaagattgggtttggcgatgaaacgaagcaggccgtcattgatgccgtgcgtgaaagcgatttgttcgcagccctccaggcaagtattaatgcgcaggcagcttcagtagctagcctgcaacaggcgatgcacgatgcggtgaacggtgctatccgcaatgcgctcaagcctggcggtatcctctggaatgcacggtcgcgtggattctga

SEQ ID NO: 159998 - DNA, 210 bp, Enterobacter cloacae
atgctgaggaggtacgctataacaaacgccgtgtatcagccgcggcagtgtgatgtaatcagcctgagtcttatcagcaactatcagccgttcggctatctgtatttgatactgaggtgggcgaccagtccccagataaaagcttacgagagcctcagggaaacgggtcagccagtcctgagccttataacgaaaaccatcaacgggtaa

SEQ ID NO: 159999 - DNA, 1872 bp, Enterobacter cloacae
atgcttgatatcaacgtagcttccatcaagacgacagtttcctttgtggtggataagcaaagcattgcagaagctaagaaagccgccactgacctacagaaatacttccagaaaatagccgatccgaaaattcgatttcaggctcagaaacaacgccgacaatcagcaagggaaaaagtcgcagatgctaaggtggctccctcgaagagcgtcagtgacttgaagcagcagcaacgccaggcagaaaaggctgggaaagcgcaagccagggaagcggcgaagattgccaaacgtaatgaaacagccgatctgaaattccgcagtgctaatctacagatgaaaggcatagccgggaaatacggcattgatcctgcgaagcaataccagttttcccgcttcgctaaggaacagacagagcttttccgtaacggtcagattagtagccagaagatgaactatgagctacgcgaacgcatagctcttatgcgtcgtgaagcagcgttacaagctaaggtgacagcttccactcaggctcaggcggcggcaatacgccatgctaagaaaacagactatgcaggggctgcaaagggcattaaagaaagaggtataaacggcatcatcggcggtggagtgggcttaatcggggccactgctgcatttgctggcggggcaggtgtcctgtctcgtattcgtgacaaaggtaatgaaaaccttgatttagttagaaagtcagcactggttaaaactaatccaaatgctgttaaagcccttgtagcttacggacagcaacatggtatagatagcgcatcagtagacaaggtgacggacaacttcaaagatgtgcgcgaacgcttgggagaatcggttacaaactccgcatttgaccagaaatctggtaaatggaaaggtggtaacggagctatagacaacgttatgaacctgttcggctggaacaagaagcagatcgctcagtaccaggataacccgttagatttcattcaagccactgttaacgaaggtcagcgccgtggaatgtctcaggcatctatcgggcatctgatcgaggattttggagatgaccttgcgcattacaccgatgcttttatgaataatggtgcgcagtttagcaagacgttgaaaacccttgtagagagtggtcaaacccttaacgatgaacagatcaaacaaacctatgcttacggcgatcttaccgttgcaatgggtaatctgatgaatggcgttgataacagcctctttactggattcatgaaaggttttgctgatggcggtgatgacctcgtgaagaacaccaaagtgatcaccgaatcagctggaatgctcggagagggtttaggcaatctttctaaagaaatcaccggatttatgggggaaatctccggcgtaatctccgatcttaatgcagggcttcgctctcgtttccctcagtggttcactgaaagcgataagccagcggcccaggccctctacgatggtgctgtgggtggttctgcgaatgctacagcggattggattcaggataagacaggctttgatactcgcacagtggggccagctatcatggattggttgggcattggtggcggtaatgctggaacagcggcaaatcaatacagcgtaaatggtgattctcttcgtggttctgcaatgtcactcagcagcggcaatgcgccagtgtacacggtgaatcctacattcaatctaaatcttgaggcatccgtaccgctcactatcgccagcgattcgagcagacttgcggattatgtcgatttcacggctaaagcctcacaagccagcttcatgcaatcgctcacgttgtcagcattaagcggtcaatcatcaacgggtggctaa

SEQ ID NO: 160000 - DNA, 303 bp, Enterobacter cloacae
atgactaaaacccagttagaagattctcttcaagaattccacgatgaacttcacattccactacttgatgcggtaaatgctgtatacaaggctctccctgaaagcaagccagagaagctctctgacgctgtaaggctgatccaagtgtcagcagtggcgctggaggggattatcctctctgtggagcgtacagagagcctacgtgaggagcaggaactgataggagaggtgacacagttggcgctgtctctggcagcgtgtaaagatgaactgaacgatctgttaccaaaccaatttgcataa

SEQ ID NO: 160001 - DNA, 204 bp, Enterobacter cloacae
atgattatggaaataacaaaaaaagattactttcaagaccgtatgcaatacgtgcaggatttagttaaacaggctgaatgggcagaacaggcacaagatgttaataaaatagagtaccttctcgatgtgctggcaactgagattgccccgtttcaagtggcattgaacatcgtcaagttgaccaaaacacggatgacacaatga

SEQ ID NO: 160002 - DNA, 399 bp, Enterobacter cloacae
atgagtaagaaggaacgtagcaccctcacccgcattgagcgggaaaatgtcaacaggatcggcaaagcagcacaaaaacagcaacagcgattattaatcacatccctcgaagaaatcccaggcacattgatagaacatgttgaagaagtgcattcaacaccgccctctgtggaagagtgggccgcgttaaatgatcttctcgaatgttcaagcggagtttattaccgaccacgtaaacgcaaagtttacacctgggacgatagccagcttcaccgttggcaatgcctcggcttctcctctttacgccattacctcacatacaacgtaatgaataacaccgtggcgggatccagggattttgatgaactttttaacattggagacaagtacaaagaatga

SEQ ID NO: 160003 - DNA, 249 bp, Enterobacter cloacae
atgcgtgatggaatgttgttagatgaggtagatgataatgattatcaccatacttttaataatacactaaaagcacacttgctgtcaacctatttttcaataacttcaaaaaagtcaagtgcattacgtgctttacacaaaaaaacagatggttgctgtcaatcaaaatctgtggtagaaattgccaccagagaagacagtcacaagaaacacactaagcatcttgtaacgctctctgcgacgttctga

SEQ ID NO: 160004 - DNA, 267 bp, Enterobacter cloacae
atggatttttattttggtaagaatggttcatacaaaacttattcacttaagcagcttaaagactatccgctccctttcagtgggcaaataaagggtgaatactttgttcccgatggaaattctaaggttggaatggttcaaataataaatgatgagtttacttttccgattgggtttagagctgaaacgcttaaagttgataggaaaaataatgcgctgttatcatcgggtggagttaaaattgccgatctagtgctagtagagtag

SEQ ID NO: 160005 - DNA, 828 bp, Enterobacter cloacae
atgtctggaacattcaaggggctgacccaggcccagatcgatagaaggctcaaggacgggcgtggccaaggccagggatcagactacaagccgttcatctacactagggacgtgtcctcgctggggcgctcccaccgcctgcctggcagcaagacccggcgtttacaccatcttctatccgatcttgaactggccatcttcctgaccttggatcggtctccccatgtcaccgatatccgtgaacagtttccgatgcgggtcgaagatacggtgcgcatcgccgaggagcttggcttgccccacgggcgttacaagggcaccccgcaggtactgaccagcgactttctggtggatttcgaagatcctcagcgcccgagcatcgcgattcaggccaagtacagtaccgacctgcagaagcctgaagttaccgagaggcttgagcttgaaaggcgctactggcaggaaaaaggtattccctgggccatcgtcacggagcgcgaggtatccaaggtggcatttgccaatatccaatggctctatcctgcccatgctgaagacgacatcgctcaggacgatctcgcccattaccagcagctgtttctgctcgagtttcagcgtcacccagaccggaaggtgaccgctattgcccaaggactggatacctccggccagctggaggccggtcaggcgctctattggctacgccagttgttggcccggcactgtttcttgttcgatcttgacactccttaccgggagctgaagccgaaagacctggttgccaacgctcatcaaatgcatcaggagctgagcagtgtttcccgttaa

SEQ ID NO: 160006 - DNA, 2088 bp, Enterobacter cloacae
gtgtttcccgttaatcaggtgttccggataggggaactgcgaaagcgcctgctgtggtccggcaccgagcaggccatctggatcgatatcgattcggacacggcgttgcccgaaccgatatcggttgcagagctggagcgtctgctcatggagcgggagctggagagcattgccgatcccttcgaggagacagtcctacgggaggttgaggaaggttctcttgatcagcagaagcgtgatgaagcttgggcaatgctggcggattttgtgcacgatccccagcttttcgtgcggcgccccagagggctcattgtcagaggcatcatggagcgccatggtgtcaccaatcagacggtgtacaggttactgaggcgctactggcagcggggcatgtgcaggaatgccctcttgccggactatgtcaactcgggcgcccgtggcaagcgcagaaagccgaaccaggccaagctgggcaggcccagagtggtgatggaggggaaagggagcaatgtcacgccggacatcgagcgcatttttcgccgggtcatcgaggaacgcttgctcaaggaaaagcatccgtccattcctgatgcctacgcctctgggctgaacctgctccgtgctgttctgccggagctgacgacctccgaactgcctacattggggcaattccgttacttctatgggcgcgaatatcacttcaccgacaccttgccacgcagggtgtccgcagtggattttgccaaggatttccgacctctcagcagtacatcgacgaccgaggcactggggcccggataccgctaccagatcgatgccaccatcgccgatatctatctggtttcagaacatgatcgcagcctcatcgtcggcaggcctgtcgtttacatggtgatcgacgtgttcagccgcatggtcgttggtatgtacgtcggatttgaggggccttcctgggtcagtgccatggtggcattggccaatacggtcgccgacaaggttgagtattgccgccagtatggcgtggagatcgatgccagcgactggccggtcaaaggcttgccggatgtggtgctggccgataagggcgaactgaatggcaccaaggtggaagcattttcccaagccttcggcgttcgcatcgagaatgcacctgccaggcgaggagatgccaaggggatcgtcgagcgttatttccggacggtgcaggagcgtttcaagccctatgccagcggtgtggtcgagcacaccaccagccggaagcggggtggccacgactacaggcttgatgccagtctgaccttgcccgagttcacccagatcatcattgccggcatcctctaccacaacaactttcacaccttgagcaaatacgacaggacctctgttatgccaggcgatctgccagccatcccagtcatgctatggaactggggcttggccaacctgaccggccggttacgtactgcgcccgaggagctggtgcggatcaatcttttgccccatgagtcggccacggtttcggagctgggaatcaggctgttcggctgcttctacacctgccaggaagcaatcagggagggttggtttcaccgaggtcaggggcgccggccgacaggggtaacggtcgcatacgatccgcgtagcgccgaccacatctacctgcggccatccaatagtctcaaggactactgggtttgcgatcttgccgaccgcagtcgacgcttcagggggatgaccttctgggatgtctggatgctgtccagagaggaacggcgtagcgataccaacgcggcggcggaagctttggtagagagaggcaatcttctgaagcagatcgagtccatcgttgcccaggcagaggatgccagtccggtcaaaacgggtatgaccacgaaggatctgggaacccagatccgcgagaacaagcagcaggaaaagcgccaggaacgccagaaaacagcattcaaactggagaaatcacagcagaaaaagccagccgaggtgatcccactgcggggcgagaagcaggaagattatgccttcccagatctcagtgacctgatattcaaggaggaagaggatgactga

SEQ ID NO: 160007 - DNA, 1611 bp, Enterobacter cloacae
atgactgaagaattccagcgcggagtcattcccctggcgcgttaccaggagcagcagcttcctgagtatcaggacaatccgctcatcagcgcattgcctccgattcctgatctgcaggaggtggtcggtctattgcagcagcttcccggtttcgagccgcaggaggcgcttctggatggtcggctcagggcacatgcaattgcccgcctgttgcacggcttcttccagccgctgagccatcacttggagctggagagcaagatcagcctgatgatccgtcaagggtacatcggtcggaatccggccagtggtgcctggtatgcgcacctgcagaatggctatcgccgtgtcgaggaggaggatctggatgcggcggtgtaccagagtgtctcctctacggccaacagcctgtcgctgttcggctgctccggttgcggcaagacgcgcacgctggagcggattctgagcatgtacccccaagccctccatcaccctgattacaacatcactcaactggtctatctgaaggtcgactgcccaattgacggtgacttggatgagctgtgcctgagcttcttcaacgaagtagacaagatcctgggtacctactacagccgtagccacggacgcaagaagctgggtaccaaacgtctgctggcatccatgtgccaggtagccaatctgcacgcgctcggagtgctgatcatcgacgaggttcagaacctcaacgaggcacgctccggtggtgccgaaaaaatgcataatttcttcgtgtcgctggtgaacaccatcggtgttccgatcattcaggtcggcacccaccgggccagcaagttcttccagcgcacgttccgggctgctcggcgggtctccgggttgggcagcatccgctgggataggttgcctcgggacgagcattggaagcgtctgttgaagcggctctggaagtatcagtggctgcgaaatgcggcgccgccggatgatgaactggaggctacgatgtacgacctcacccaaggggtcatggacatcgtcatcaagctgttcgcgctggcgcagatccgggcgatagtgacaggtgtcgagtgcatcaagccgctgttgctgcgcagggttttcgaggacgagttcaaaccggtccatccgatgctagcggccttgcggagcggtaggcccgagctgatcgccaaatatgacgacctgctgatgccagagatcgagggacggttgctgaccctgactcgctctctggatagcgtcccccaacctaaaccgccggcccctccggcagatgacaaggcaaagcggctggccgccctgctcgaaggtatggaaatcccgagggacatcgccattcccatggcagatgaattgttggcggagaatccggacatcccgctggcggccctgattcacaaggccacggcctacctcgcgcaggacgctcccaagaggcccggcatttccagagttaagcggacggagtgggggtgcctatccgaggaggatctgcgccgacgttatgccgatgggcctgaaagcgaggcctatgacagattcaagcaggctggcttgatcctcgatctgcggcctctgctgagagcgagctga

SEQ ID NO: 160008 - DNA, 1503 bp, Enterobacter cloacae
gtgtactttcccaggctctatccggacgagctgctctacagcggccttgctcgctgccgggtccatctggggatcagcaatcacaaaactctgcttcatatggcgttcggtgacagcaaggtcgccgccatcaccgacctgcccacgcacttggccgctctggcgaacaacactgggctggatacggcgaacgtgatcatgcatcacacgctgtttccgctctatgcccccttcattccagcgaagcggcgtaacgatctgttccaggccatgcttgcttccgaccggtcgaccatcggtctggctgggtcttcggcggctttggtcaagtggcccgactggctgcgttactgccctgtctgttttgaggaaatggctgcccgtttcggtgagacttattggcggcgaagctggcagattaaaggggtagatgcctgtcccgagcatggctgtcagctcctgaactcacctatcccgttccgtcgagcgcagcggcatgaatttcatccggcctcgccattgtttctgccctgtgactctcgcacgagcccggcgagcgaagaagctatcaggctcgccaagactgccacgcaactgctggcgcttgaagaggcgcaatcgcctggctacggtcgctggaccaacctgtacaggtacctggccacagagtgcggtgccaggcgtggccggcaagttagggctgaagtcatatgggaaaagatcctggaatctcactgcaggaattggcttactacgaatggtctgctttcccacgaagagcctccgccctggctgctggcgatgttcaggaagcatcgcaagggattcagtgcgctgcagcatctgatcgtctggactagcctgcgccccggccagcatgctggcgagctgatcggcgaggcgaagacacgccaggccgacgtttctcccgatcagtttgccaggcaacttccggcaagggcaggccaaacacagatgtaccgtaccctttggctgcaagcactggataatcacggtggagccaaggcagctcgacaaaatggcggggatgcgtgttatgcctggctctatcgtcatgatcggcactggctgatggctgcgaaccaagccaggcagcgtcgacagggcaacaacagccacatcgattggcgagcgcgcgacaggaagctagtacgtctgctgatccggcttggcaaagacagcgaagatgacctgaccttgccacgcaggagccgcaactggttcctgcagcagctaccccatcgggcatcaattgagcaccatctcgatcaaatgcctctgtgccgcaccttcctgaatcgctatgccgagtccgtcggcgagtttcagattcgccgcctgactgcagcgatgcaggaggatattcgggtcggcatatcatccaggcgctgggagttggaaaagcgttgtgggctggaaaaaagcagtatggcaccgctgaccactgcgttcattcgattgataggaagatggattgaatag

SEQ ID NO: 160009 - DNA, 1623 bp, Enterobacter cloacae
ttgaataggaccttattccgtcagatccagaccggatctaggctgttggctattggaaacttgttcagagcccctactcctggggcgcagtggcgactggcggcactcttcgagggtaatggccagtcgcaattgaagcggtttccactggaaatgtcctgtgtccttgcggttggtcgcgagtttcctggcgaagaaggggccccttaccggtccagtggtttcaagaaggcggtggtgctgcctccaatagatagctggcgggaaaggcaattgggtgactgtccaaggctcgccagaaggctggctgcaaatcctgagatatctggacagcgatgctttgtgttcgaggttgacggtctgaccgtctggttaccgaaattcgagctggcacgcaaactgttcttccacgcagctttcatagtccgtgcagccttcgagccgaatggtctagacatggctttcacaatctacaaagagggcgatgctgttcatatccatacgcctacgaagacgggcgcgccaagtcagcttctcaaaattaagggatatagggaccacttcagttggctgctactgaatcaggatgtgaagcgatccttcgagtcaatctggcaaagcctcaaccaagagcaagagcgcacatcgcaagagtcggcatatgccaggtggcagttcgacttcatggcacccccttccctcgtgggtaccaccatggatgtgcgaggcccctttgatccggaaagcaacgagttgctggtctgggaaatcgaagcgcttcaaggcctcagcttcagccatcgaggcgatatttttttccaccatcctgccctgaagcaaccagtgaggggagagggtactggctgtgtatccgtgccatcgggagctgaagaggtggaagtagatgctatcgaagagccgactgctgccaaggaaccaaggctgattcatctacccgttgagggaattacttttgatgctcagttgagcaccaggattgcctacaacggggagcgtgccagcggtcatggcaagaagatcgacgatgagcaatgcccgagcaaagaaggccaactcttaggcgtggctgatcctgtgagcggtggcagcatagcgccaggggaattccagcaattgggcgagggtgatagggaggagcatgagcggtttgcaaatcgcttctcgttgctccgtgaggtcattgaacagatcgctcaggagcctcgaattacgctggtatcactggaggtgagaccattgccacccgttccgcgctgcagctatcacatgctcgatcacgaaaaaccacgctgttatttgctggcaaaattcaaactgccaaacggcaatcagcgctaccttctagaaatagacacctcagacaaccgcaagaccatgtcaacacggatcatgggcttcaaagcaggtgttgaggccgagaaatgcatcgacaggatcttgaggcagacagtgaaaggttcgttgcgctggccgcacactatggcgaagttctgtgagcctttgcgctctgtacatcacccgaaagaaagctcattcggtgtcaatcatgccaaggtgttcgaatggaagcagcgtatacaagcctgtcttagtcgggagtaa

SEQ ID NO: 160010 - DNA, 570 bp, Enterobacter cloacae
atggctgcccgccgcttctgggagaacctcaggcatgacgccggcagcctgctggatgatgccctgacaggcaaggatccgatcaccgaactgatctacagcgaccgttatgtatgcagcccgctagtcgtaaatctgctggtcaacgttattcatgagctgggcaggcatagcgatggagacttcgccatccgcatccaggggcgtcagtaccagaaagatgacaaccgctcaccttggcagtgctggcacgactggcggacatctcaggagcgcgatgaagctatccgtcaggctttggagtactgcggcttcgaaggcgaggtgctcagcctcccatctttgccgcactaccgtcagctgcaactgcagttgcgctccggaaggcagctgaccgtccagctcgatcagggactttcatattgggaggccgagcgtagcgagaagtcctacctgctcaggttcgacttcgcagcgcgtcagttaggagaggaaatcatggagcgcatccagtgcaaggttgtagctaccggtgatgaatgcacccagattttcatttacgtgacctaa

SEQ ID NO: 160011 - DNA, 366 bp, Enterobacter cloacae
ttgcccagcgaccagaaggactggctggcaaaactggccttcaacgggatcgagatttgcttgcacaaggccatgccggatctcgggatgctcgggctgaacatcaccctgcaggggccacaaggaagcctcgcctgggccagcgacaatgcgaacctgagcgcacctgggcgcacctgggatctggcggcggccggtgtgcggatcgtccgcggcacactccccgtcctgccggcagagcgcgtgctgaacgcacccgatctgatgcttcctacgcgccccggtctggtcaaggtcgagatcagcgatcagctggatggttcgctcgatggctgcccgccgcttctgggagaacctcaggcatga

SEQ ID NO: 160012 - DNA, 1509 bp, Enterobacter cloacae
gtgatcagtatggaaatgatgggcaaaattcggcggatgtatttccgcgacaagctgtcgctgcatgagatagccaagcgcaccgggctggcgcgcaacacgattcgcaagtgggtcagagcacctgaggccaagccgccggtctaccaacgccgcgcgatcttcaacaaactcagcccttttcacgccacgctggagcaggcgctaaaagccgattcgctgcgccccaagcaacagcggcgcagtgccaaggcgctgttggcgcaaatcaaagccgatggttatgacggtggctacagccagctcaccgcgtttatccgtgcctggcgagggggacagggcaaggcgtcgcaggcctttgtgccgctgacctttgctcttggcgaggcgtttcagtttgactggagcgaggaaggcttgctggtcggcggcatttaccggcgtatgcaggtggcacatctgaagctgtgtgccagccgtgcgttctggcttgtggcgtatccgagccagggccatgagatgttatttgacgcccatacacgctcgttcggcgccttgggcggcgtgccgcgccggggcatctacgacaacatgaagaccgccgtcgacaaggtcaataagggcaaaggccgggcggtgaatgcacgctttgcggtgatgtgcgcgcattacctgttcgatccggacttctgcaacgtcgccgctggttgggaaaagggcatcgttgaaaagaacgtgcaagacagccgcaggcgtatctggctagacgcccaggactgtcagtttcactccttcgaggaactcaatgcctggctgggccagcgctgccgcgcgctttggaacgagctgacgcaccctcaatacagcgggctgagtgtggccgaagtgcttgagttggagcgcgctgaactgatgcctgtgccagcgccattcgacggttacgtcgagcggcctgcgcgggtctccagcacctgcctggtcagcgtcgggcgcaaccgctactcggtgccgtgtgagtacgcgggtaagtgggtcagcagcggtttgtatccgacgcgaatcgaggtggtggctgacgacgcgctgatcgccagccatgtccgcttgctggatcgcgaccaggtcagctatgactggcagcactacctcccgctgatcgaacgcaagcccggtgcgctgcgcaacggcgcgccctttgctgatctgccggcgccgctgcgtcagcttaagcacggtctggggcgtcatgccggcggtgaccggatcatggcgcaagttctggctgccgtaccggtcgccgggctcgatgccgtgctggtagccgttgagctggtactggagagcggcagcctgagcgccgaacacatcctcaatgtcgtggcacggctgacagcatccgaaccaccacccagcgtcgaaacccacttgtcgctcaaggaagcccccgtcgctaacacggcgcgctacgaccgcctgcgtggccaggccgaggaggtcggtcatgcgtga

SEQ ID NO: 160013 - DNA, 804 bp, Enterobacter cloacae
atgcgtgatttgatggcggaactcaaggagctgcgcctgcacggcatggccacggcctgggcggagttaactgcacagggtgagtcgaacacagcctcgtccaagtggctgctcgaacacctgctggaacaagagcacacagatcgcgccatgcgctcggtgagccaccagatgaacatggccaagttgccgatgcaccgcgatctggccggcttcgacttcagcgcctccagcgccgacgctcgcttgatcagcgagctggccaatctgagctttaccgacaccgcgcagaacgtggtgctgatcggtgggccaggcaccggtaaaacccacctagccaccgcgctggccgtgtccggcatcacccggcacggtaagcgcgtgcgcttctactccacggtcgatctggtcaatctgctggagcgcgaaaaacacgacggcaaagccgggcggatcgcccaggcactgctgcgcatggatctggtcatcctcgacgaactgggttatctgcccttcagccaggccggcggtgcgttgctgtttcacctgctatccaagctgtacgaacacaccagcgtggcgatcaccaccaacctgagcttcgccgaatggtcgagcgtgttcggcgacgccaagatgaccaccgccctgctggatcggctgacccaccactgccacatcgtcgaaaccggtaacgagtcctatcgcctgcaacacagtagcttggcggcccaggccaagatcaaatcacgggagcgaaagcgtaagggcggccaggaaccggaggacgatgagccgttctga

SEQ ID NO: 160014 - DNA, 1014 bp, Enterobacter cloacae; identical to SEQ ID NO: 54411

SEQ ID NO: 160015 - DNA, 471 bp, Enterobacter cloacae; identical to SEQ ID NO: 54414

SEQ ID NO: 160016 - DNA, 747 bp, Enterobacter cloacae; identical to SEQ ID NO: 54416

SEQ ID NO: 160017 - DNA, 273 bp, Enterobacter cloacae; identical to SEQ ID NO: 54417

SEQ ID NO: 160018 - DNA, 282 bp, Enterobacter cloacae
ttggtctcagccatctggaaagacactactatcgccacaagcgacgaaacagtcatcgtcgagggaaatcactacttcccaccgtcaggagtcgacctgagcctgcttgagatgagcccgcacacatctgtctgtccgatcaaaggcgccgcgcgcttctttcatgttcgcgcgggtgacgcgctcaacgtgaacgccgcttggacctatcccgcccccactccggatgccgagggtatccgggattacatcgctttctggaaaggcgtggacgttgcctag

SEQ ID NO: 160019 - DNA, 267 bp, Enterobacter cloacae
atggagcattccgagttcgatgccgctttcgcgcagcttgcggagggatacagagaagggacttatgaaggccggcgtttcagcttgatcgtccggcgatctggggacggacgtcgcaacagtctgttcgccagggagttggacgggactgacattgtcagcttcaacctcttccgcgttacatcagataggacattgttgaagccgtgcgaaatgtccgccgaaaaggtcgtagcgttcgtgctggagttccgaccggacacctga

SEQ ID NO: 160020 - DNA, 375 bp, Enterobacter cloacae; identical to SEQ ID NO: 54418

SEQ ID NO: 160021 - DNA, 1272 bp, Enterobacter cloacae
ttgaaaattgtacaaaaaataaccagtccgctcgattgtcccgccttcatcgccgcccaccgccagaatcctcaagactttacccgccgacgccagctcaccttcaagaacctcgtcctgttcctgctcaatcagccgcgcacggccctgcaaaccgaactcgatcagttctatcgcgtactcaatcaggcgtcgactgagacgcaaatggtcactgcgcaggccttctgcaaagcgcgcaaaaagctcaaccccgaggtatttgaaagtctcaatcgcctcctgcagcaacaaattgactgcttcgggctgcgtcagaagtggcgtgggctgagggtgctcgcggtggatggctcgaccgtgcatttacccctggagtcgaccatggcgaccttctttggcagtcactctggctttcccatggctcgcttgtccacactctacgaagtcgctgacggtcaaaccttgcatagcctgatcgtgcccctgaccgtcggcgagcgcgactgtgcccatctgcaccttgagcacctgccggctgacagcctgacgctgtttgaccgtggttaccctgggcactggttattcgcgctgttcgcgcagcaacagcggcactttctgatgcgcctgccctgtggctataacgcccaggtcaaagcgtttctacactctggccaagttgaagacacacagcttttcgtggccaaccatcctgaagcacgtctgttctgctccgaggctggcgttgatcctgccagccagatcgagctgagactgatccgggtcgagttggccaacggcgaaagcgaagtattgctgacctcgctgctggatcgagaagcctttcccgctgaggtgtttgccgagctttaccaccgccgctggggcatcgaaaccgatttccgtcgcctcaaacaaaccctgacgctggacaacttcagcggccgcagcgtgaccgctgtaaagcaggactttcatgccgctcaactgttgaagaacctggcgctgttgatgcagcacctgctacagccggtcatcgaacagcgccacaaaggtcgcaagctgcgatggaaagtcaacttcacccaaggcgtgtcacggctcaaaaataccctggtcgagctgctggtgcggcactgtgctcaggggctgagcaatgtgctggccttgatggctaaaagcctcagtgccgtacgctcaggccgtagctttgcgcgccaacgcaaacgcgcagccagccgaggttgtgagggctacaaaccgacgcgctga

SEQ ID NO: 160022 - DNA, 519 bp, Enterobacter cloacae
atgaaaaccataggcattgaaaactcgaagtccagcgtacaggcccacttaacgcttggaaccaaaactatggggctaggtatctatggcgcgtacttggctctcgctattatttacttctggttcggcggcatgaaatttacccactacgaggccgagggcctggttccactggtgagcaacagcccgcttttgggatgggtgtatagcattttttcggtcgacatgttctccagcctgctcggcatactagagatttcgatcggcactctgatcgcaggccgcatgctgtcgcccaaactatccgtggtaggaggcgctctgtctgcaggcctgttcttcacaacccttagctttatgttttccactccgggcgtcattgagcctagtttagggtttccggcgatttccgttgcgccaggtcagtttctgcttaaagacttagggttgcttgctgtttcgatatttgtggcaggccattcgctggttgaactggaaaaacgtaaaattaatgcataa

SEQ ID NO: 160023 - DNA, 846 bp, Enterobacter cloacae
atggatcgtttgtctaatttgctctcgcggttcggcgtgcgggccaatctgttctatgacggcgacctatgcggctctgcatcttacgatggcgccgagcggcgaggttatatccatctgcttcaggccggcagcgtgacgttgcttggtcccgatcgcaaggatttgcagctcactcgccctagcttgatttttatgccacgccccgccaagcatcaattgtttgcgggtgagtccgatggcgcaaagttgttgtgtgcttccatggagtttgagggcggaattgataatcctttgtcggcttcattaccggactgtttggtgctcgcactcgatgatctgcccatgctggcagacacgttggagtggatgtttgccgaggcggcaaatgtgcattgtggaagggaagccgcgcttgagcgcttatttgagctcctaatcattctgttgctccgttacctgctcgatcatcaccagttgcgcaccggaatgatggctggactggccgacatgcggcttgcccgatcgcttttacagatgcacaactccccggaacatgcctggtcaatagcagagctggccagtgagtcaaatatgtcacgcgctgcgtatgccgtgcatttcaagagtgtcatcggacagacgcctgctgattatttgttgagttggcgagttagcctggctcagaagctgatgcgagaagggcgctcgattacgctgattgcagctcaagtcggctacgaaagtccttcggcgctgtctcgcgcatttagacgcaagacggggttgagccctcgtgactggttgaaagatctggcgggggaaaatgatggcaaaaaggcctaa

SEQ ID NO: 160024 - DNA, 1491 bp, Enterobacter cloacae
gtgatcagtatggaaatgatgggcaaaattcgccggatgtatttccgcgacaagctgtcgctgcatgagatagccaagcgcaccgggctggcgcgcaacacgattcgcaagtgggtcagagcacctgaggccaagccgccggtctaccaacgccgcgcgatcttcaacaaactcagcccttttcacgccacgctggagcaggcgctaaaagccgattcgctgcgccccaagcaacagcggcgcagtgccaaggcgctgttggcgcaaatcaaagccgatggttatgacggtggctacagccagctcaccgcgtttatccgtgcctggcgagggggacagggcaaggcgtcgcaggcctttgtgccgctgacctttgctcttggcgaggcgtttcagtttgactggagcgaggaaggcttgctggtcggcggcatttaccggcgtatgcaggtggcacatctgaagctgtgtgccagccgtgcgttctggcttgtggcgtatccgagccagggccatgagatgttatttgacgcccatacacgctcgttcggcgccttgggcggcgtgccgcgccggggcatctacgacaacatgaagaccgccgtcgacaaggtcaataagggcaaaggccgggcggtgaatgcacgctttgcggtgatgtgcgcgcattacctgttcgatccggacttctgcaacgtcgccgctggttgggaaaagggcatcgttgaaaagaacgtgcaagacagccgcaggcgtatctggctagacgcccaggactgtcagtttcactccttcgaggaactcaatgcctggctgggccagcgctgccgcgcgctttggaacgagctgacgcaccctcaatacagcgggctgagtgtggccgaagtgcttgagttggagcgcgctgaactgatgcctgtgccagcgccattcgacggttacgtcgagcggcctgcgcgggtctccagcacctgcctggtcagcgtcgggcgcaaccgctactcggtgccgtgtgagtacgcgggtaagtgggtcagcagccgtttgtatccgacgcgaatcgaggtggtggctgacgacgcgctgatcgccagccatgtccgcttgctggatcgcgaccaggtcagctatgactggcagcactacctcccgctgatcgaacgcaagcccggtgcgctgcgcaacggcgcgccctttgctgatctgccggcgccgctgcgtcagcttaagcacggtctggggcgtcatgccggcggtgaccggatcatggcgcaagttctggctgccgtaccggtcgccgggctcgatgccgtgctggtagccgttgagctggtactggagagcggcagcctgagcgccgaacacatcctcaatgtcgtggcacggctgacagcatccgaaccaccacccagcgtcgaaacccacttgtcgctcaaggaagcccccgtcgctaacacggcgcgctacgaccgcctgcgtggccaggcctag

SEQ ID NO: 160025 - DNA, 804 bp, Enterobacter cloacae
atgcgtgatttgatggcggaactcaaggagctgcgcctgcacggcatggccacggcctgggcggagttaactgcacagggtgagtcgaacacagcctcgtccaagtggctgctcgaacacctgctggaacaagagcacacagatcgcgccatgcgctcggtgagccaccagatgaacatggccaagttgccgatgcaccgcgatctggccggcttcgacttcagcgcctccagcgccgacgctcgcttgatcagcgagctggccaatctgagctttaccgacaccgcgcagaacgtggtgctgatcggtgggccaggcaccggtaaaacccacctagccaccgcgctggccgtgtccggcatcacccggcacggtaagcgcgtgcgcttctactccacggtcgatctggtcaatctgctggagcgcgaaaaacacgacggcaaagccgggcggatcgcccaggcactgctgcgcatggatctggtcatcctcgacgaactgggttatctgccgttcagccaggctggcggtgcgttgctgtttcacctgctgtccaagctgtacgaacacaccagcgtggtgatcaccaccaacctgagcttcgccgaatggtcgagcgtgttcggcgacgccaagatgaccaccgccctgctggatcggctgacccaccactgccacatcgtcgaaaccggtaacgagtcctatcgcctgcaacacagtagcttggcggcccaggccaagatcaaatcacgggagcgaaagcgtaagggcggccaggaaccggaggacgatgagccgttctga

SEQ ID NO: 160026 - DNA, 249 bp, Enterobacter cloacae
atgcacgactgctgccaagggctctgctgcatcctaaccaatctggaagagcgcaccctgctggacctgctacccggtcgtcagcaagagagggtgacaagacgcctcatgagcatggccaaccgccaccaggtcgagatcgtcagcatggacatgtggaagccctaccgccgcgccttccagacggtgctgccacaggcccgtatcgtggtcgataagttccacgtcgtgcgcatgtgttggcgctga

SEQ ID NO: 160027 - DNA, 522 bp, Enterobacter cloacae
atgtctacttatggcagtcggctcgcagagaaagcccacgagccgggaaaggcgatgcgctggctgtggctctcgctcctgttactgtttgtcgatcaggcgagcaagtaccttgccagcaccatgctagcgcatggtgaaagcgtgcctgccgcacccttcttcaattgggtccaccgccacaatacgggggcggccttcagctttctcgcggatgtcggcggttggcagcagccgcttttcatcggactggccctggttatctcgatattactggtgtactggctttggcgttcaccacgcgtactgagttatcggctcgccctcagtgcgatcctcggcggcgcgttgggcaatgtcgcagatcgcttgcggttaggctacgtagaggattttctcgattttcactatgcccagtggcactggccatcgttcaacctagcggacgtatggatcttcctcggtgtcgccctctttatttgggcggaaatacgacatcaaccaggcagccgccgccgctga

SEQ ID NO: 160028 - DNA, 1440 bp, Enterobacter cloacae
atgccgcttgcctttgcccctgtgggctgggcatggcttgcggtgatcgctctggcaacattttttgtcctgaccgcgcagtcttcaaggcgtcaggcgctgtggtcggcctacctctttggccttggctacttcggcgtgggtgtctcctgggtctttatcagcattagccagtacggcaatggccccgtggtggcggtgttagtcacggcggcctttgtctcgctgctcgccctctttccatggggcgtcgcgtacctcgtgcgctgcctgcgccctgagatggatgcaatggcactctggctagggctacctgcggcatgggtgctgagtgaatggatgcgcacctggttcttgaccggctttccctggctcttcattggctacagccagaccgacaccacacttgccactatcgctcccgtctttggcgtgcttggcgtgagtttactggtggcacttctcgctggcgggcttgcctgggttgtccaggggccaagcctgcgccgtgctgcggtagtcggtgccgtgttagtcgctaccctcgccggcttgcaactgctggatcgtgaatggacgcagccagccgctgacccgatcgatgtcgtcctcttgcaaggaaacatcgcgcaagacaagaaatgggacccgagataccgggacatcacacttgagcgctatcaggcgcttaccgcgcagcatctcggagccgatatcgtgatctggccagaagcggcaatcccgatgtggcatgaccaggccaaagcatatcttgctgagcttgaggcgttagccgatcaggcaggcacatcgttaatgattggcgtcccggtacgcgaggcggagggccgtacctacaacgccgtggtaagcctctccgatccctcaggcttctactacaaacgccacctggtgcccttcggtgaatatgttccgtttcgggatcttttggggtcggccctcgacgtgctcggggcgcccatgtccgacttcacaccgggacgggaagcgcacgtcctgaatgcagcaggggtgcccgtaggggcactcatctgctacgaggcggtctttggtgccgaagtcactgagcttctgcccgaagcgcagttactggtgaatgtcagcaacgatgcctggttcggcagctcgctcggccccctccagcatttccagatggcacgcatgcgtgccatcgaaaccggacgtgaccttcttcgagccacgaacaccggtatcacagcagccatcaatcatgagggcaaagtgctcaagcgtgctccgcagttcgaagtggccaccctcagcgccgaagtgacaccgcgaactggcgcgcccccttatgtacgctggcgggattggcctgttcttggcctgaccgcactcggactcggcctgctcctgctccgtcgaattcgtcggcatcatcggttgggtacatga

SEQ ID NO: 160029 - DNA, 762 bp, Enterobacter cloacae
atgatggatagtatctggctggtactcggcctggcgctgttgcccgccttaggcaattttagtggtgggctcgctgcggaggcctcccgaactaccgggcgccgtctcaattacgcccttcacggcgctgccggcctcgtcattgcggtggtggcggttgaaatcatgccgcgcgtgctagagaacctctcagcctgggtaatcgccctcgctttcgcgctgggcggcattgcttacgtaggtatcgagaagctcgttgagagtctccagaagcgacaaggccagcagggagaaggcggtcagacgagtgtctggatgatctatatcgccgtatccatcgacctgttcagcgatggcctcctgatcggggcggggtcggcggtctcaccgtcggtcgcgataatcctggcggcgggtcaggttctcgccgatgttcctgagggctttgcgacgatcgccaccatgaaagataaaggaatccctcgtagcaagcggatactgctctctgcttccttcgcgattcctgtgctctcggcagccgtctttgcttacttcgtactcaggaaccagacggaggcatttaagctagcggcactgacgttcacggcaggccttctcacggtcgctgccatcgaagatatggtctccgaggctcacgagagcggtgacgatacgcacatctcaccgctggctttcataggcggcttcgtcctgttcgttctggtatcagcgggcttggaaggggtggtatcgcaaagctaa

SEQ ID NO: 160030 - DNA, 837 bp, Enterobacter cloacae
atgccggtctcctccgaagcgtcaggggaatgggtcagcgtgtatgctgtgccgaagatggattgtccctcagaagaacggatgatccgcttggcgctgaacggctttgatgagattcgaacgctgtccttcgacttgtcgaaccgccgattggaggtcgtgcatgacggcgaggctgagcccattaccgcgaaactggcgaccttggggctaggcgcctctcttcaggaaaccgtcattgccgacccagagacgatcaaggccgctaagagctcggcagtctctgctacgcaggagtcaggcactctgcgcgtgttgctcggtatcaatgcgatcatgttcgtggtggaaatgactgctggcctgatcgcccagtctaccggcctgatcgctgattccctggatatgtttgccgatgcagccgtctatggcctggctctctatgccgtagggcgcagtgcgaaaatgcaggtacgtgccgcgcatctggcaggggtactgcaactgattttggctatcggcgtactcgtcgaggtggtgcgacgctttgttttcggtagtgagcctgaatcgctgatgatgatggcgatcgccttcgtcgcgttgatcgccaataccggttgcctgctgttgatatccaagcaccgcgaaggcggcgcgcatatgaaggcaagctggatattctcggccaatgatgtggtgatcaacatgggcgtcatcgccgccggtgccttggtcgcctggacggggtccagctaccctgacctgattatcggtaccatcgtgggcctgatcgtcctcaacgacgctcggcgcatcctggcgctcaaggggtga

SEQ ID NO: 160031 - DNA, 435 bp, Enterobacter cloacae
atgcgcattggtcagttagcccagatagcgggtatcgacacgcagacgatccgcttctatgagcagcagggcctgttgccgccgccagaacggcaggagaatggttaccgtgtctataccgagaagcatggcgagtggcttgcctttatccgccgctgccgaattctggacctgtcactgacagagattcgcgagctacagagctatcaggacgaccctcgccagccctgtaccgccgtcaacgccatgctcgatgaccacatctctcatgtgcggtcgcagataactgctctgcaagcgcttgagcaacaactcgtttcactgagggcgagttgcaacgagggtcgggagatcaatgcctgcggcatcctgacggggatcagcgaggagagcaaacaacagctgtatagggctagctcaggccgtaaggactga

SEQ ID NO: 160032 - DNA, 372 bp, Enterobacter cloacae
atgaacctgtccaccatcgaggcgctggctatcgcttgggcgcgaatcgctgaagaagcagaactcccagccggctacgagggcacggcgacgccagaggcgcatcgggcctgcgaggtgatccaggagcggattcgagagcacgtcgtcgccaccaatgacatgcggctgttcggcctgctgcacctgcttgggcaggcgtcgctgcgcatggagcaagcgctgtggccggaagaatatgcgcggatgacccgcgaggtcgaggaagctctccgagaggccgacgaccccaacgccaagtcgtacacccacgaagaagtcatgcgggcgatgcaggaactcatcgaccaagcgcgagacaagccatgttga

SEQ ID NO: 160033 - DNA, 414 bp, Enterobacter cloacae
atggcccctttgttgcagtatgagcaattagaactggtaaaccagacccagcgcgacgatatcgtcggtaccgatacctgtctgacgggtgaagtcattttcatccagcaggttgattttgtaatcaacgtaggtggacatgtttttgttgaagtagtaagtcgcgccaacatcaacatacttcaggatatcctgatcgccatagttttcgatgtctttacctttagattgcaggtaagccacggatgggcgcaggccgaagtcgaactgatactgagcaaccacttcgaagttctgtgctttgttagcccagccctgatcgccaacgcgggtcgcgttgtaagtctgagtatactgtgcagccagatagatgttgttcgcgtcgtatttcagaccaccgggttacccggataa

SEQ ID NO: 160034 - DNA, 990 bp, Enterobacter cloacae
gtggcgattcacctgaatggtacagataaccgtgtctatgatttagatgttattgagggtgataataatcgccaggatatccagattcacaacctgcaaggcgatcgtgacaatctgcaagcctctattgattccactaatactaacgttgcgggtaatacgtcattactgaaccagacgattactgatgtgaataacatcaatgcagatctgcaagctaacaaaacgttgttaagcgctggcattagcaccgcacaaaccaccgctaatgatgccgatagcaccgctcatactgcgttagctgctgctggtaatactcaaatcaccgcagacaacaatgcaaaaaatattgctgctgtggcagatcaaacacgtatcaatagcgggttaatcagtattaacgatacccgtatcactgcacttgagaatgcgcctgtgccgaaagatggtaaagatggtaaagatggtgcaaaaggtgatgtaggcgctactggtgctcaagggatgcaaggcatccagggtattcagggtgtagcaggcactaacggtgccgatggaaaagacggtaaaaacggcgtaacaaccaccatcacgaagaaagaagttgatacaaccactatcaacaaagttaaattgctcaatactcaaacggcggcgcaagctgctgatctgaaagccgctcaacatgcattcgcacaagcacaatcttcaagcaatgctcaattcaaaaacctgaaaaatgaagttgatgataacaagaaagaagcgcgtggcggtgttgcctctgctatcgctatcgcttccatgccacaagttgagaaagagcagtctgtcatgttctctgccggtgtgggttcatttaaaaatgagcaagctatcagcgtaggagcatctttccacgcaggcgatcacgctgtaatcaaggcgggtataagtgattctacaaacagcgatcttgctatgggtgcaggcatcggtattggcttttaa

SEQ ID NO: 160035 - DNA, 582 bp, Enterobacter cloacae
atgaagaaggccattgccgttgctatcatctcaacctttatggtcgtcctgtcgctgtatgcggttaacgccattatcgttgagcagcaaaagaaccggcagagggagatctcccacacgctcttaagctattccgaagagttaacgcaaaatatcgccagtacgcttaaaaatacctccgcacagggatgcgatagcgccagtctgaacgtctaccgaaaattaaagatgcgaagtctctatttcgccgatgtggggtttattgaaaaggggaaatcacctgcaccgcgttttggggcaagctggcaaatcccatcgcccttccctctgagctgcataaaacccagaacggattcagtctggcgcagttttcgcagaaagatttctttgtcggcaatgcgacaatttataaccaccttattatcttcacctcccgttcagcctacgataaatttgcccccgttaccgccaactattcgcttcgttcttccactaaagatttcggccgcacctttttcaccgttacgccaccatcagaaaaccttagccgcttacagtctctgttatttacgctggctgtga

SEQ ID NO: 160036 - DNA, 639 bp, Enterobacter cloacae; identical to SEQ ID NO: 156268

SEQ ID NO: 160037 - DNA, 1674 bp, Enterobacter cloacae
atgaacacgctggtggatgcgacccgcggggatgtcaccacgtacggtgaggcctatcactgggcggataactacctgacgccgggcagcgcgtatgaccgcaacccggcaccggagtccggggcgttttacgcccgcatccgtcacgaacgctacctgaatggccagacgcagaccgtggccttcaccagctgcccggtgctctctccgggtatgctgctgaaagtcaccggcgggtatgaagtggcggaggtgtttgcgcagggcgtggttgtcacggcgatgcacagccatgcgcagcgtgatgcggacttttgcgtcaggtttgacggtatcccggacagcccggatttcagtttccgcccggaacctggttcacgtccggtgatggccggtaccttaccggcccgcgtcaccagtaccactgaaaatgacacctacgggcatatcgacaaagacggccgctaccgcgtcaacatgctgtttgaccgtgagaactgggagaccgggttcgaaagtctgtgggtccgtcagtcccggccgtacgccgggaatacctacggcctgcacctgccgctgctggcgggtaccgaggtggcgattggttttgaggatggcaacccggaccggccgtacattgccggtgtgctgcacgactcggcgcacggcgaccacgtcaccatccgcaactacaagcgtaacgtgctgcgcacgccggcgaacaacaaaatccgcctcgacgacgagcgcgggaaagagcatatcaaggtcagcacggagtacggcggcaagagccagctgaatctcggccacctggttgacagcgacaggcagaagcgcggtgaggggtttgagctcaggacggacagccggggtgccatccgggcgcagaaggggatttttatcagtgctgacggccaggcgaaggcgcagggccaggtgctggagatggcgccggcggtcagcaatctcggcgatgcccgggagcagatgacatccatctccggtgatgcgcagcaggcgaccgcgaacccggcagaccttcaggcgcaaatcacactgctggagcagcatctgacggaccttaaaaaatcggtgctgctgatgagcgcaccggacggtatcgcactgaccagcggagaccatctgcaggtctcggccgggcagaacctgattgccacggcgggtaaaaatgcggacgtcagcgtggtgaaaaatctgttcatcggggtgggcagtgccctgagcgtgtttgtgcgcaagctgggcataaagcttatcgcgaaccaggggccggtgcaggtacaggcgcagaacgacctgatggcattgctggcccgcaaggaaatcagcatcgtcagcacggaagatgaaatcaaaatccttgcgaagaagaagatcacgctgaacggcggcgggagttatatcacactggatgtgaatgcgattgaggcggcgacgctcggggattaccggacacgggcgggattttatgaccggcagcagaaggcaaataaaccagaagatttcccgagtattgccccgatagcagcagaacctgccagctccggtaacaaccagcaagaaaaaccagacaaagacgaagatgtcccgggtactggtcctgctgctccggaagcagcagagccagccagttatttccttttttcctga

SEQ ID NO: 160038 - DNA, 1449 bp, Enterobacter cloacae
atgaaagattttccatttaatgcttttacaggactattgcgtgaaactatttttaatattgaggatcacacacagtcaccacctgaaatgattgcatccgcagttttaagtgcattatccctggggtgccagagcctgattaatgtaaagatcaatgacactttaatatctccggtgtcattgtattcattcgtgatagcagagtctggcgagagaaaaacgacggtggataaactggtattcaagccttttcatgagcatgatctacgtgtattactccagtatgaagaacagcaaaaagaacatgagcgctactctaaaatatggcgcagaaaagaaagtgcactcttgaaatgtgtagataaagccactatgaaaggaaagtgtacagatgaattttcactgcagttaaaggcgttatacgctgaaaaaccagaaccaccaaaagccagaagatttgtttataataataccacaccggaagccctgcagtttgcaatgtacactcagtcgccgcaaacaggactcataaccgatgagggagctaatatacttaacagaaagaccatgactgacttcggttttattaactcaatgtgggatgggggatattttcaggttgaacgtaaaacaacaccgagttttacgctcaggaatggacgtattactttgttggttatggtacaaaaagctatatttgatgattatttaaaaagtaagggcgaaagtgcacgcggaagtggtttttttgcacgttgtcttgtcttgaatattgatgagaatttatcgacacaaggccagcgtttgattcgtcgtcaatcaggccctcagtctggtgacctagagaatcttaattccttctaccaacgtatgaatgaactggtagaaaaaagtgcttctcaacacggaaccgggcatcagacatgtttatccttcgaacctcaagctcaggaagcatgggtgagtattcacaataagatagagcgtcgcctggggccagagggagactatgaaaactcgaaagattttgcatccaaaatgtcgaataatactgcacgcgtagccgccctgttgagttactggagtgagggggaatgtgcgataaaaaaagaatatgtcgaaaatgcatggttgctgtgcgaatggtatatgcaacaggcagtaacactctttggcaatgaggagggctattatgaagcactgttattgtcgtggctacgtcggcagtattcacgctcatggaaagatgtagttcgatataatgatatccgaaacggcggacctaatgtgttacgtaagggaaagttactggacagggttattgacagacttgaaaaggaagaggtgatagatattgattattcaaaatatggtgcccgaaaggtatataaaggtcgtcattttgataataatccgtttacaaaacatgcagcatatcaacactattga

SEQ ID NO: 160039 - DNA, 585 bp, Enterobacter cloacae
atgcaacttaattccttgaacgctgattaccagcaggcattttacgatgttattcgtaatgcagtagatgagtttccgcgtacgttagcactacgtgttgatttacgttttccccgcaactatcattatggtgattcgaacaaagaggttactcgttttattgaatcactgaaagctaagttactggtcgattgccaacgtaagaaccgacgatggaaacgtaatcggtctaataggttacggtatgtatgggtacgtgaagtcggtgagcttaaccgccgtaaacattaccatgtattactgctgcagaataaagacttctaccatggtgccgggaactataacgccgatgacagtttatacgcattaatccagcaggcatggtgtagtgcgttaggtctggattcggaggaatattcaggtttaacgaatatgactgagaacgggtgtttttatttaaacagaaattcccctaattatatgcaacagattaccaaattgctgaagcgtatggagtatatggcaaaagaccacaccaagaactataacgacagatatcgatcaatcggaatgagccgagggtga

SEQ ID NO: 160040 - DNA, 1941 bp, Enterobacter cloacae
atgtttttgaatgatcaagaaactgcaacagaccttttgtattacgaagctatcgcgaggacggtcgtaaaactgatagatcatactcctgatgcgccaataaccatcggtgtgcatggtgattggggggctggtaagtcaagcgttttgaaaatgctagaagcatcatacgaaggaaaaaataagacactttgcttatggtttaacggatggacatttgaaggctttgaggatgccaagacggtcattatagaaaccttggtcgaagaattaatgcaagcccgaccggggtgtatcaaggttgctgcggctgcaaaaaaagtattgcgccgggttgactggttgaaaatggcacgtaaagcgggggggttagctttcaccgcatttacaggtattcctacaatggagcaactcaaaagtgtctacgagcttgcctccggtatccttagcaatccccaagataatatatcagtcgatgatataaagaattttgcggacagagccggtgatttcataaaagaagcggattccgatggggaaacccttcccaagcatattcatgcctttcgtgaagagtttaaagaccttctcaatgttgccgaagtcgaaaagctagttgtaatcgttgatgatcttgaccgatgtttgccaaaaacagcgatagaaacacttgaggctatacgtttatttctttttgttgagaaaacagcctttgttatcggtgcggatgaagcgatgatcgaatatgcggtgcgcgaacattttcccgaccttccgcaaagcactggtcctttgacttatgccagaaactatttggaaaaacttatacaggtgccatttcggataccggcgctaggtagcgctgaaacccgtgtttatacaacgcttcttcttgcagagaatgccttaggctcgaaaaataagcattttatgaaattgcttggcaaagcccgtgaagaaatgaaaagaccatggattagtagtgggttagataggaaagtagtacttgaagccttgggagagcacataccagaggaaattgaacaggctttaaagattagtgcacacgtaacgccacttcttagtaaaggtactaggggaaatccacgtcagataaaacgttttctcaattcgatgatattgcgccagtctattgcagaagaacgggggtttggtgaagacattaagcgtcctgtattggcgaagattatgttggctgaacgtttttatcctgccttttatgagcaaatagtgagacaggcaagtagtcataaagaggggaaacctgaggcactaattcaatttgaacagctggtaaggggagcaaagtctaaacagcagcaggaatcgaattcacctagcaaaattactgttgccgagcattctgacataaatgaatggctgaaaaacgactgggcagttggatgggctgaaattgaacctgcattagctaaccaagacctacgcccctatgtgttcgtgaccagggacaagcaaagtacatttggagtctccctaacatccagtcatcttgccccgcttgttgaaaaacttctcggctctagtatggccgttgcaggaacaaaagcagtacttgaaaaacttacagcctcagaagtggacgaggtatttgaaacacttagcgagcagatcctccaagaagatagtttcggtaaaaaaccagctggaattgacggaattcaattcctcgtgaaagtactgcctcagatgcaaagaaagctgcttgatttcatccgccgaatcccggttccgaagactggtggagtctggctgggatcaaccttcatgcagtgttttgttgacgatactcatgaagaggaattccgatctatccttcagggatgggtagatcagcctgataattcaaaattaagcagtacagctcaagcgatgcttgatttaccaaggaagaaaaagtaa

SEQ ID NO: 160041 - DNA, 843 bp, Enterobacter cloacae
atgggaacttcaaaatcttatggggggcctaccagcggactggtacctgactttgtagacaaccctccggcacctacattacctatatccccaacaactccggaagatgaccaacttcagggtgggcctttaactccatcactaatccctcccgattcaaatggtgcagggccgttaagtacacctaaaggtaactttacccgctacgttcgttccggaagtcgaagttcgctcggcaaggcaattgccggttatgtgcgcaacggcacaggggggacgagtagagccagtcgccgtatgggctcctcccgcgtcgttgctggtgggctacttcatatcttgggtgatttccagcagggaggtgcagaacaagcccttcagcgttttaatctaagcaatttggctggagagcctgcaccaacagttttcgtatcgcttgtcgaatttttgtgcccccctggcggatcagtcgatgaaggggtctccagacaggcaatgcttgatacgattgctgacatgtctgataccgatgtggttagttttgattcattaaacaccgagcagatgcaagaaatatttatcggtttcatcgttcactccattgaagggcgaatcatggccgatataggtaaaaatggcatcaagttacctgatgatgtcgatgctattggtgacattcaggatacactccacgattttgttgatggtgctactcgtgttcagttgagagacgagttgagagatgtatcaggactatcaggtcgtgaaattaaccaaaaggtcgaacagatttatgaactggcattcgaactgattgctagtgaaggggagagatcagaatga

SEQ ID NO: 160042 - DNA, 1374 bp, Enterobacter cloacae
atgagccatcacactattattgcgagacttggcgctagagattcccagcagcctgtactaagccgattacagaccaatattacccaaattaactttttaaaaaataatgggcagttggactttggtctagggcaagcgttaacaggattaagggagcttgggctcactccttcggaaacctcagttgatcttgctctgttagctgcaacagttactgctgcagatactagaatttcacgtaatcgaaatgcccaagatctttggactcgtgaattatctttgcatattcctgtatttgatcctgttttatggagtagtcagacggggctgctaagtaatttattgaattttttgacaggggatcgttggtcattgcattttcatgaacggcctgaaattgagcgcggccttgtcagagaatcaactaaaccacgaatacttaatcccacttctgtatgtcttttctctggcgggctggacagttttattggtgcgattgatcttctttctcagggaagaactccactatttgtcagccattactgggattctattactagtaaataccaaaaaaagtgttcagaattattgtctagcagattcactcaagaatttggccatgtccgggcacacatcggttttaagaaagataccattgtaggtgatgagggcgaaaataccttaagaggtagatcatttctctttttttcccttgcaacgttagcagcagatgctgctggtggagctatggagataaatgttcctgagaatggtctcatatctctcaacgtccctttagatccattacgtgtgggcgcactcagcaccagaacgacgcatccatattacatggctcgctataatgaactgctacgtaatttaggggtagacgcttatttaaataatccttatgccttcatgacaaaaggcgaaatggcgcgacagtgccatgatcagacatttcttcgccaacatgctgaaaataccatgtcatgttcatccccacaaagtacccggtggaatcccgatttaaatgaagaacagtctatacactgcggtcggtgcgtaccttgtttgataagacgcgcatcgttatttgcggcttttggttcagacggaactgcttatcgaatcccggatcttcgagcacgagtactcgattgtagtaaagctgaaggggagcatgtgcgagcctttcagttctcactggagcggctagcacgtttccccggccatgcgaaatttgatatccataaacctggaccactaagtgatcacccagataattatgatgactatgcaggcgtatatataaggggcatggaggaagttagccgcctgctaactggggtgagaacgagaccattatcatga

SEQ ID NO: 160043 - DNA, 780 bp, Enterobacter cloacae
atgaatacaaccaagcatcaactttctccgcactgggtagattttcactgccaccttgatctatatccggatcataaggctgtcattgcggaatgcgagctggcacgtgtggctacacttgcggtaactacaacccctaaagcatggcaaagaaattgtgaattggctttagattcatcattcgttcgtgtcggattgggtctacatccacaactggtctcagaacgtgaagatgaagtggtactgctagaacgctacttgtcttcagcacgctatgtgggagaaattggtctagatgccggtccccgtttttaccaaagctttgaagctcaggagcgtgtgttttcgcgtattcttcaagcctgtgcagaacaggggaacaaaatacttagtatccatagtgtacgtacagcagcaaaagttttagatcatcttgagaaaagcaaaattcttgaaaattgccaagctattcttcattggtttacagggtcatctgcagaggctcgacgtgctgttgaactcggatgctacttttcagttaatgaggagatgctacgttcagtcaaacacaggaaacttattgctagtattcctctaaacagactgctgacagaaacagatggcccttttgtaaagaacgagggaagggctatatgtcctcgagatgtttatcgcgctgtgcatgaaatagccctgcttcatggtatttctgaagatgctactagattcgtagttttgagtaatcttaaaaaaattgtgacaatggactgtcttaaatag

SEQ ID NO: 160044 - DNA, 801 bp, Enterobacter cloacae
atgcctctaacgctgactgaaatagtacacgactctctttgccatggttcaagatggatcattgctgatgaaaatgatctcgctagtaaggttgcttctctcgctctgggccaagcacggcatatatccataatccttgctggaattgataaaaaaccaccatccacccgccctgatactgctaaggaagcaatcaaacttctcaccgtgcccgctggaaaggatccttatcatcgagacggttggattttccaagcgatttcatggattgcagcccatagagcaaataaaggaaatattgttcgtgcgccacatgctatcttggcgcataaagggtttgatggtatgcaacttcaactagaccaaaccaatgaaaatgttattgctgttgttatattcgaagataaggccactataaatccccgatcaacaattactggtgatgtttggaagggaatacgctcattagagtgcggtgaacgaatgcctgaattaatacaagagacaggcgcactgttagaagctcatcagattaaattcccagagatggatattgatgctgcggtcgaaaagattatttgggaagaggctagacattatcgtgttgcggtaacgatagatactaaagatgacgatgatagtagccgtaaagctctatttaagggctttgatgaagttgctcctggtaagcatgaacgtcgacaaggcgaaactatgtgcataaaagatctacgtaactggatggagcagttttcgtcaaaggcaataaaatatattgaggcttggatagacaatgtttga

SEQ ID NO: 160045 - DNA, 3288 bp, Enterobacter cloacae
atgtttgaccctgtaactatagatctaattagctcagctcctcagcttgactctctcgaattagaggaactacctcagcgtttcactaatgcttatgcagaaatcgttgctgcacgtgtcaggtaccatggtgccatcgatacaaaagagaaaaacgaaaaattggaagaattgctagaagagatgcgacgtttagcggctacacaggagctattagtcacatcttcgcctgagagagttgatcgagctgctgctgcatttgttgcaggaactgcacatcaactttgcatgatggctgaggttattaaaggaggagagcgtgaagcctttatcgatatagttcgtgtcgcgccggaaatttgtagcaccttactctttttgattgctgactttcaaagtgatgcagcagaaatggcaaagcatttgaatcaacgggatgattcaaattcttccgaatcaattttgataaaagatattggagctcttgcaacaggacggcttggtgaaattctggatatagaatcacgggaaaaggatttgggtaatgaaactactggccccgaagttgctgttgacgcattactaaggcatcttcatgctggtttggtagagcttgctcaagaattattatcagagccaaatgaagtcgctgagattcctcgctctcagatgatatttaaagaggttatatcgttatgtatttctcgtatcgatggggtttttgatgatgaagggcctgttgctgttaatatctttcccggtccacttcatttagcaaaattactactagcggtttctattaaccttgccgatacctcattatgccgaattgaggcacctgccggtataaatgtaaaacaatggtggcgtattgtgcgtcaggcggctaataaacgtccctacctttggcgtaatcaccgcactgcgcttgaaagaggttatcttaccaaaggcgtttctgctgcaataagttttccgactggcggggggaaatcaacacttgcggagctgaaaatagctgtttcattactgagcggcagtaaggctattgttcttgctcctacgttggctctagtagatcagactgcttttacacttaaaaatgctttcaaagactttagtgtttatggcgatcttgacgaagatattgtgtttacagatattgttgaattgccagaaataatcgtgacaactcccgaaagatgcttaatgctgcaatctctgcagccagaagcatttaacgatatcggtttgatagtgttcgatgaatgtcatcttttgcatccaagagatgctgatcgaagtcgtcgcagcattgatgcaatgttatgtattttaaatcttactcaactggcacctgaagcagattttttgatgatttcagcaatgatgcaaaacgctgccgaaattgctggttggatttccgaacttactggccgtccttgtcttgagttagatttagcatggaaacctacccgacaagcccgtggttgcgtagcttacagttcagatcgaatttcaaagttagaagaaatacttcgaaaagcccaagccaaagcaacaactaaaggtgtaccagcaaaagttaaatcacagcttaatgctcaaccgtctgctttcttctgtcttagacagacttgggcgacgcgtaagcgtaaagattatgcgttgatgacattattaaataaatcggtgtcattttctacaggtataaataaatataaaggtaactggtacttaaccccaaacggaaataaagttgcaggggagattgctgctgctgctgcacaagataagcttaagacacttatatttgttcaaagtactattgctgcggaatctactgttaaatactttcgtgaactattaccgaaacacggagttactcttacggaagacgagaaagtattacgaaaaatagttgaggaggaacttggtggatctcaacattgttatcttaaaattgacgataattatagagttgtaggtggtgctataagtcatcatgctcaattgataaaacaagaacgtctcttgcatgaatcgctttttaaacggtctgatggtctaagtgctatgtttgcgacttcaactcttgctcaaggaatgaatcttcctagtgatatcgtcttgattgcgggagatagccgctgggatgttgagggagacaaaatgaagcagttagatgctcatgaattgcttaatgctgcaggcagagctggacgagcaggggaaggagggcaagggtttgttttagtcattcccagtaaaataatcaatattgatgaagataaaagtaacataaatagtcattggatgactttacaaggaatattttctcagtcagaccagtgcctcaggatagacgatccgctcacaggtctacttgaccgtatccactcaggagctcttgatgataatgaggcatatttcctcgccagattaccaaagggtgatggcgatgctcctgatgaattagcgaaatatatgatcaatagatcattcgctgcttaccgcatgcgtcaggagggcaataatgattggatcgagactcggatatcttcagctatacttgagcgctctagactttctccgaagcaagagttaacttggttagaaagagttgcggcgtcttgcggactgccttatgtagttattgagagtatgactcagttggtaagtagtggggcatttcttgggagcacccgcgattgtatccaagatctttttgaatggcttgaaaagcatcctggttggttgttccagctaattagacccaacgatattgccggtctatttggtacaaattatcgttctttaagcgatgaaaataaaacaaaattagctatccctttgttgaaaaaacttttagtcgcgtggatggatggtaaacctctcagcgatcttgaacgcgcgattggaacagcagagaaggatatcaagacatgtgaaatagcgcgacattttgcggttcgtttaactgcagatcttgcttttgtcgcgggtcttccagcccgtatatataccgcccaagctatcgctaatggtaatgaacccattgttcctgtcagtatactgactttaagtggggcggtaaggaaagggtgctctagcccagaacttcttgcaaatgcaatctatctcaatggttcttcgcgtcctgccgctcgcgctgaatttacaaagattttaccatatctgcagtcaggattagcgtctgaaagttttgaggatgtgcgtgatagggtacgtgaagcacatatatcagcattactggatgaattttaa

SEQ ID NO: 160046 - DNA, 213 bp, Enterobacter cloacae
atgtcatcatctaccgtaaaaatccttcgtatcaatgcacttacccaaaaactgggcatcgcccgctcgacgatttacgactggatcaatcctaaatcgatacgctatgacaggacatttccaaagcagcgccgccttgggaaccagtctgtcggttggctagaatccgaagtagatcagtggatcttacaacgcgaaatttcctcccaataa

SEQ ID NO: 160047 - DNA, 765 bp, Enterobacter cloacae
atggatgattttaatctctgtttttttgtcgatacgataaaggaatcattcaacttaaagaaaagtagactggtgctcgctctacgtgcggttggatggaaaagctgtataacctgtttaaatgatggcgatactcatattaacaaaatagtcaatgatattatgctggatacagcgaagcgtcgtgaattggaaaatcagtcgtaccatattttgtatgaagaggctgacactatccaggaatcaatagatgagtggatctttttggctgcagtatactggtgcctagggatacatctcgtggcttcagattggcgtgatggtgtcacgttgttgctcaaatcgacagaacttctcgacatgtgccatggaattgttcaccatgaaatatggcaaaacactgaggcgaaaaaaaaagaacaggccactaatgggggtaaagcaaaagcatcgctttacgctcctctaaaagctgaaattatccgtttgttgtattgcaacaagcctgcggatggctggagaaacaggagagaggctatagagttgattgatgaggatgtaagcatatttattcaagagcatggctatcctggttcccctgaagaaaaacaggaagacttagctgtattattttcaagaattccccggctgattgaagattggtctagaaatgacgccgtagttaaggctgcctttaacgcaacgctaaagaaaaaaagcgccaataaaggcgcagaacagaaaccttggacatcagacatctaa

SEQ ID NO: 160048 - DNA, 1239 bp, Enterobacter cloacae
atgctcaataaagaacggcattatgcaattttgacctggcttaacaggtacgaacgggcgacggtgaatcagcttgcgaaagtatttaacgtcaccagggaaacgattcgcagcgacctgaacttattagcgcaggaaggcggcattgagcgatgccacggtggggcaattatcaaacgccgtatttttcatacccaatcagtcaataatttagatagcaatatcattcatttttttgactccgcgcagtcaagaaaaacgatcaaatcccgacacaaagggcgaaagatgaaaggtaaagtctgtattctgggttcattcaacgttgatattattgctaatgtcgatcgtttcccgcaaagcggagaatctattttttccgaaaatacgattattggacccggcggaaaaggcgcaaatcaggcgctggccgtaagcaaatgcaatgttaaaacccattttgtcggtaaggtgggtaacgatcagtttagtcagatggcctttgaacatctttcatcttctgctatcgacagcttcacgctttatcaggataaggatcagaaaaccggcaccgcgcttatttatgtttgtcaaagcgatggtgaaaatatgattgccatcagccctggggccaaccggtccattacagccgatgaagttgaagcaattacccctgaagtgaaaaacgcagatatttttttaacccagctggaaaataatctacccgctacctttcgggccattgaaattgcccgccgtaacgggatcaaggtggttttgaaccctgccccctggtcatctgatgtggttagctgcctgaagaacgtggactttctgaccccaaacgagactgaggcctcattgctgtccggcattcatattgtggatcttgccagcgcaaaggaagccgccagagccattaaagcgaaaggggtaggccacgtcatcattaccatgggagcgaaaggcgcgcttatttatgacggtgagcaattcattcatatcccggcgctgaaagccgtatgtgtggataccaccggtgctggcgatgccttcaacggcgcattcgccgccgcgatggcgaaaggggaatctattattcaggcagcaaaatttgcctgtgctttcgcctctttggccgtcgaaaaagaaggcgcatcaaatatgcccgaatataaagatgtcctgacccgcctcgcgcaatataacgataaaaacattctcaccgagaaaatttaa

SEQ ID NO: 160049 - DNA, 207 bp, Enterobacter cloacae
atgctttatatcaatcttggggatccccacacagcacaggataaaaacagaatgaacgatacatgggatttttatactgatggtaaaggcgaatggcgctggcgcagaacggccagcaatggtcgtattgttggtgcatccagtcagggctatgtaaaccgagcggattgtatcgctaatgcccgccgcaatggttacaccggctag

SEQ ID NO: 160050 - DNA, 768 bp, Enterobacter cloacae
atgcggtttttatggaggcctttgccttactctaggttaagagaatgtgattttttaaactgtattgatgaaaatgattcgtcttcatggatagctgcattgaaaatattcatttgcattgttattaaatctgatctggatgagaatggagagtattgtgcaatgattacgtatccacaaatccagaaaatgacagggatgagtagacagttaatatgttgtggttttgataaattgaggttttataaaataatatctagcgaaggtgttaggaaaaaaaagcattcattattaacttgtgaaaaaggctctacaagacaaaaacctttgacgaaaaggtttgatgggctgtcaacggggcgatggtgtaaactcccgttaaaaggattgattgatgatgatggtgtaatcccttcgtttctggcaatgagcaatagaaatattaacgaccttcatgcacttcggttgtttatctatttgttgtcagtgagacggcatggtgatgtttttattgttgtaaaagcagaaacgctgatgaaaaaattacgacttaaaagagttcagctaacattggctttggctcatatgtcagctttggggttgatagttaaagagcgatatagggagggcgattttttgagtttaaataaaacacctgcatatgcttttttattgtgtgggtgggatgttcttgaatggaatcacaatagaataaaagagagcaactggagaaatgattatttagagtcgtttgataactgggcttga

SEQ ID NO: 160051 - DNA, 174 bp, Enterobacter cloacae
atggatatcaagacaaagcttaaacgttctttaagttctgtggaaagtgcaatttcatctttaaagcgtgcaagagggcaaactacggatgcataccatgaaataagcaaagcaattcgtgaacttgaggatgccgagtacaacataaggaaatccattcgtgagatggagtga

SEQ ID NO: 160052 - DNA, 1638 bp, Enterobacter cloacae
gtggtcacgcttcttgcccactcatcgcatgataagggactggagctgacgctcaatattaaaaatgatgtgccggataacgtcattggcgacccgctgcgcctgcaacaggtcattaccaatctggtgggcaacgcgattaagttcaccgagagcggcaacatcgacattctcgttgaaaaaagggcgctcagtaataacaaagtccagattgaagtacagatccgggataccggcattggtattccggagcgcgatcagacgcgtctgttccaggctttccgccaggccgatgcgagcatttcccgtcgtcacggcggaacgggcctggggctggtgatcacccaaaagctggtgaaagagatgggaggcgatatctccttccacagccagcctaaccggggctcaaccttctggttccatatcaaccttgatcttaacccgaacgtgcagaccgacggcccgctcaccggctgcctgaaagggatgcgtctggcctatgtggaaccgaacgccgcggcggcgcagtgtacgctggatgtattaagcagcacgccgctggaggtcatctacagcccgaccttctccgcgctggcgaacgatcattacgatattcttttgttagggattccggtgacgtttaccggagaactgaccatgcagcaggaacgcctggcgaaggcggcctcaatgacggattacctgctgctggcgctgccgtgccacgcccaaatcaacgccgaagagctgaaaaacgacggagcggcggcgtgtctgctaaaacccctcaccgccacacggctgttacctgcgttgaccgaatattgccgtctgacgcatcagtccctgccgctggaaaacgatgaacataaactgccgatgacggtgatggccgtggacgacaacccggcgaacctgaagctgattggcgtgctgcttgaggatcaggttcagcacgttgagctgtgtaccagcggcgccgaagccgtggaacaagccaaacagatgcagttcgacctgatcctgatggatattcagatgccgggcatggatggcatccgcgcctgcgagttgattcgtcagcttccgcaccagcagcagacgccggtgattgccgtgacggcgcacgcgatggcggggcaaaaggagaaactgctgggtgcgggcatgaacgattatctggcaaaaccgatcgatgaagagaagctgcacagcctgctgctgcgctacaagccggggcacattggcgggacatacaccattacagctgaatcgccggagatcagcgttaaccagaatgccacgtttgactggcaactggcgctgcgccaggcggcgggcaaacccgatctggcccgcgatatgctgcaaatgctggtggacttcctgcctgagatccgtaacaaggttgaagaacagctggtgggtgaaaaccccgaaggactgctggaagccattcataaactgcacggcagctgcggctacagcggcgtaccgcggttgaaaaatctctgccagctgcttgaacagcaactccgcgcgggtacgccagaatccgatctcgaaccggagttcctggagctgctggacgagatggacaacgtgacgcgggaagcaatgaaggtgttggggagctaa

SEQ ID NO: 160053 - DNA, 1074 bp, Enterobacter cloacae
atgcaaggtttaaattacctttcagaaattgaaaaattaaagcttttcaaaaacattcgaattggaatgagttcagaagaagaatttgaggctttccttacctctgtagggaatgatgaaaataaaaatgaaataaaaaggcgaattaacggtttgtttttagaggatgaattcgctttgctgtgctttttcatggaagtatgtacaagtctaacctctttaggtcaatcaccagtaaataacactggcattaaggtgccagattatctggctagttttaatatgccaaaagggaaggaattaaaatgttttattgaggtgaagacgagcaatgctctagaaactaaaaaaatatcagggtctttcttgaataagtacagtgagttttgtcatagattccgacaccctttatttatagcatcacgcatacatcaaaacaatcttcttttctggatattgcaaagcgagagcgagtttataaactctggtcgaaaagtagatgtgagtaatataacaaataatagtggatgtattcttttggatgattggtttatttcctcaattaatgctttaacagtgacaattcattttagcgaacaccctttagtatcccaggccagatatgaggataaggggtatttacatcaaattaccgtatcacagaagcatgaaggaaatattttcgagtttaatcttaacgagaaggaattcgttttaaatgcattcctagatgagtttcagtctaatgatacttatcataaagaaaaaaatatattagtaagagaaatacctgaacactctgctaatctaataagcagtttattactaaaaatgaacatgcgagtaattgattcagaaagtccagatgacagattgaatgccagtagaatgttggcgaaaatagaatcaggttatagtacttacataaacaaaagttatcttaaaaaaataatagatagtttgaataaaaaatcaatcgtaagtggtgctggtattatttttgccccaatggggcttgggagtagccatgatagaaaaaagaaattgggtgaattactcaaaatttctagatga

SEQ ID NO: 160054 - DNA, 1275 bp, Enterobacter cloacae
atgctaattttttatagtgatagatataacgtaaataagttaccggcagatttaagagcttttttgacttctaaaggtgttattgttcaagatgacatttttattcactttgttgggttggtatacttcaaaggtaaaccttatattttccttccaaggaatagcgatgtaaataatcttcaacaatactcaatttctgaaaaagaaaagattgcaagagaattaatgttttcgattaatatttatcaacaatcgaaaaaaaatagtattgataatagagacaatggagaaggttttataggcgaagaaaatctcacattaatcatctctcttttggaggattttaatctcaacggtttatacaaacgaagaagtaaaagaaaagtctacaatgcaggcaagattaattggaagaaaaccattcatagttttcaaccatatccttctgataactcgccgctttatcttgagtacgagggtatttcaaagcgaactgaactcgacagtgagatctcaaaaattcatgctggaattatttatgacataagcaaagatttgggatggctcacttactcagaaccagcttattacgaaagtgttctaaactcgattggtcgctctgaattaagcgaagagattcagatagctaccatcaaaaaagaactggacacaatatatagcgaaagagatatttatctgctgaaatcaatcagcaactatcttgaaaaaaactctggatatgacaagtcaaatattattattggtattaaagagtttcatgggatgtgggaaagcattctcggttcagttttaaatgacagaataaacatcaataataaatttgcagcacctgtatacgaaatatctaatgaatatattcatgcgtcctcaagaggtcaaaagacggatatagttcttaaaatcaatgagttatactatataatagacgccaaatattacagagcaagtaatgctaataacgcccctagcttgcctgatattatcaagcaattttattatgttaagtctatgagtttgattgcaaaagaagctgttgagatttttagtgtttttgttttccctggagtgaagggaaatatagaatcaatccatatggctttaaaagataaatcaaccaaacttgaccaaaaagatttacttgatgaacactacccacctatattttgtttatataaagatcctattagattaatacatttatatgcgaatggaaaaaaaacgaatctcgattttcctaaaggattacgtaagtag

SEQ ID NO: 160055 - DNA, 1404 bp, Enterobacter cloacae
atgtacaacaaaaacattaacgatttcattattgattgttcaaatctatcaagttcaatgtctgtcagctatagtcaagtagcaccgagttttgtattttcaaatactggcagaagaaatagcgttaaatttttttcaataactctgcctcaactaatttcagttttaaaagatattgaatcaaatatagatgaatttattaattttaatacctataacgaatctacatggcgtaatttatttgaagtaaatataaaagacgcagttgtcaatacactatctacaacacagacactaccgcttttttcattaataaataaagttgttaccattgctaatgatgatggtaaaaattactcagaaaaaacaatgcaaattagtaaagagtctcttagaaatacaataaactatcttgaaacacagatacctgataataatgagtatatattagaattatctaaatatagtgagcactcaaaattaatcgaatcagtcaacaaaattttttatggtgccccagggacaggtaaaagccatcggattaacgagatattaggttcatcgaaatatataagaacagttttttatccagacatgctctattcagactttgtaggaagtctaagaccaagaacaatcgaagatagcgaaggaaataaaaaagtagtttatgaatatagagcaggcccttttttaagagctttaatacttgcgttaaattcaaaagaagaaaatgtatatttggtaattgaggaaataaatagagcttctgcctccgctgtatttggtgaattattccagctattagatcgtaatgagtatggtgaaagcaaatatgaaattgatataattgatcctgacatgttggattacatcaatgaaagagtggacgacaatctatcaagcttaagaattcctcgcaacctctcaatcttagcgaccatgaatagtagcgatcaagcagtaatgcctatggacacagcatttaaacgccgttggcaatttgagtatcttctcatcgattatagtaatgctactaaaggtgaaataccaataaacatatataatgacgaagctaatatagaaacaataaatattacttggggtgatttttctaagatacttaacgatgaattgaaagagctaaatgttcctgaagatagattatttggacatcgtttccttgatgataatgaactaaaaacaaaagaaaaagccaatgacacagttgctggtaagttattagtctatctttgggacgatgtgttacgacatgggaaaaaaagccttatatttcggactgaagaatttaaaacatttggtgaattgcataatgcatttctgtctggaaaaccaatttttaatgatacgattgaagagaaaattaaaattttcaaattgtag

SEQ ID NO: 160056 - DNA, 1272 bp, Enterobacter cloacae
atggggattggatgctcagcctttgctcaaatcttaggtatggggtcttctggagaacgtaccgttagagggtgggagtctggcgaacatgagcctacactcaattactggaatcagattattaaactggaagatgtcatgaacacaaacactgaaaactctccatttaaacaagaatctattgaaaatagtaaatttactttcatagatttatttgctggtattggcggtatacgtttacctttccagcagttgggaggccattgtgtttttacatctgaatgggataaattcgctcaaaaaacctattttgctaattatggcgaaatgcctgatggtgatatcacacaaatcaaaaattcagatatcccagatcacgatgttctcttaggtggtttcccttgccaggctttttctcaggcagggctgaaacaaggatttagcgatacccgtggaacaatgttttttgaaatacaaagaatacttgcaggtaagagaccaaaagcattccttttagaaaatgtaaaacaattacaggggcacaataaaggtgatactttaaagacaattatcaatatcttacaaggtaaaaatgcccaagatataccctctgatatacctatgagcaatgatgcacgaagcgccttatcacaacgtttaaactactgggttgattataaagttttgcgcgctgctgattttggtgtacctcaaaatagagaacgaattttcatcgtaggatttgatagagattattttaaaaacgttgattttgataaactattttcttggcctgaagctcctaaagaaaaaacgcgcttaggtgatatccttctttcaagaaaagaattaaatgagcttgaaaaagttcatggaaaagatttttacactatttccgataaattatggactggtcataaaaaaagaaaagaagagcacaaaactaaagggaatggcttcgggtattcactcttcaatgagaacagttcttacgtaaataccatcagtgctcgttattataaagatggctctgagattttaattgatcaagcatctcttgggaaaaaccctaggaaattgactccaagagagtgtgcaaggcttcaagggttccctgaagaatttattgtagatgcagtttctcatgggcaaatttataagcaattcggtaattctgtttgcgtaaaagtcatagaagctgtagctgaaaatatgattaccgctctgaatagagcaacagatcttattgaagaaaaaaataaagttgcttaa

SEQ ID NO: 160057 - DNA, 876 bp, Enterobacter cloacae
atggcatttatgaatttaggattattaagaaccttaaacgcaacatcaggtgcattttcaattgttacaaacagagaagctaccggtgatagaagcattacattagatcgctatgaaaaagaagtaatggcagaaaaatatgatttaacaaaaattgttagaaaaggatcatacattgaggaaacaagatcagaacgattaaaattcattactttcactgactatcaattaaataattttgaatataacgatatccctatcgtctatcctaaagaaagtggaaacgaaattaggctatatatgcaaggaagattaagattccaaggaaatacaaatgatgtattccttatatttaataggcaagagaatgatgtacctattataggtttcttatcaccgttacaatgggagcaactgttaaggcaggcagagagaaatttcatactatatgagcaagatcatgatgacgacgtttatcttaagaatatagtacttcaacaagcaggtcaggcagttccatttagtagctatagattccaacgcaactattccttagcactacaagcattagaaaatgcaaattttaaatgtgaatataatccagaacacattactttcatttcaccgattacacagaaaagttttatggaagcacatcatttaattcctcttgcattccaaaaaaatcatatacattctttggataatattggcaacatttactcactttgccctatctgccatagagctattcactacggtgatagtcaaacgaaaagaataattttggaaaaactttattactcacgaaatatgttttttgaaaatcagttaggaactgatttcggtaagttatgcttttattatggaatataa

SEQ ID NO: 160058 - DNA, 2127 bp, Enterobacter cloacae
atgactgatgtaactgatagtctacagcataatgaaacggatgttgtgatggctgccgaatgggaccttcagcctccagattatgcacctaaagcacgaacacagctctttgatattcatgatgctgcagatgtaatgttggaaaaacttctgcaattaccctcggcaaatggttggggaattgatgcaatctgtatcaacaaggtaaaagaatacaccatgaaatgggatgatttttttattgaattgcacagagagattcaaaatatattatccttaaaactaggcgtgaagaataacagagatttccagtatcaaacgttaagaaaagcaaacagctatcttgtgatgtttctgtcacctgatgcccgtccgtatcatcaatggattaatgaactaaaaattaagggctttgatcaatataaaatttctcaaactgtgctcgggctgcgtctgaaactacattttttagataatgccggaaagtattttgatgtgagtcatggggcttataatagcgaaatttttctgggtgccgtcgtacaaaaagaagaaccagacaagagaggaaactattacgtcgatgcattgcaaagtgacctcttttacagcccggattatggcgacctcacttttaccctgaaaggggtctgcttcagagctaaagcggaagagcttggtgtactcagcgattatggtcggattctgattaagggtaaaaaatcattgcagttgcttgagaaagtagatggtagaaaataccggaaaatgccctatatgcgttttgccagtaaagcttattctggctgcaaaaatcatgcagaaaatctggttcaaaacgtgctcggtgatatactggctcaggctgacatcgctttttcaccacgtgttttttgtgcaacccacagtcagttagactttttaacgaccaatatcaaagcacttcaacgcccgttagttattatagacaatcttgataatggcgaagaaccagaagcgcaccaacgatttattcactatctgaaaaaagaattaggtgcagtagatataatttcacctcaggaacttattgatcttgatagaaatattaactatctggtgcttaatcagtctaaaaaaataaatgggtccagcatttcccttggtgaagatacctttttaaactctacctggcaggcactgaatgaggcaaaagcgggtaaaaaagatctgttagattattattcaaggctaaaagtggatttcatccttgattttgagaaaaattatcagcgagtctttcagggatgtaatattgaagccatagagcagaataaaaaagaccctgttacccaagtggttaaaaaagttcttaatcctgtatctgtcgctaagttggaaatgatccgcagcgaactctggctaaaagaagctgtgctggtgagaaagaaacttaccggttttagcattaacgatggtgagtacattcttgtctcaattcggtgctcctcttccggaaacagaagagggaatgatttttatggcgttgctacacccgtcgtattcagccatggcgtaatgaacatcgcagagccaaaaatgtatacaaatgaggtggatttccgtaataatgttccggggatgaatatcaactgtattgataaattgcgtgatgataatttttatcttgttgatacaataaatcaggttgtgattaagcgatacaatactgttcgcattccgagattattaggttcttcggaacgttgttctcttcaggtagcagaagagaatcatgataaaattaataaattcggtgcggcggataaaacatgtttgccttactacttaacgccgaaacctaaaagtcatgctgtcagtcagtatcaacaactctttattgaaaaacgaggcaatgaggcattacttttttgtactaaaagcaaccagcccaaccagattatggacagggcaaccttagtttataatttggtggcgacaacatttgacggtaaagaggttgatgtgatgacgcaaccagcaactgaattactgttgcgaactttaacttacgataccacccgttataatgaagtcagtcagacatctcttctggaaaagatatcgcgtttgatgctgcataactaa

SEQ ID NO: 160059 - DNA, 3984 bp, Enterobacter cloacae
atgcagtccgaacaaaatcacaactcccgacatcttccattaccacaaagtgtcagagaagccattaccgcagcaagaaaacaggccggtacgttttacgcttttaccgaagcagatacaccactactgattcaatcccaggatggtacggcgagcggtaaaagctataacgtttttgctcaatacatcgaaagcgtaaatccagcaatcaaccctggcaatagtcatcgcaatctggtgtttatcacaccgttgaaatcacaaattgacatcccggaacaactcatcgctcgcgcccgagataagaagattgaattgttaccttatctttcgcaaggggatgtcgcagatcttggttttacgtcatgggtcaaatctcctgaagggaaaacacctacaaaccgggaacgttatcgtcgctggatcaagcaagccaacgaattgatgtcgggtgaaattcagcttatttttcaacgtctgaaagctgaagttgatgcacgtaatagtttggaagtacgtctggaaacagagattaaagtgggggcaacgtttgaacaaaaacgtctggaggatgagttacgtctcaatagttttcatttagccggccgcttacaggaagcgactgtggcgatgcttaatgccctgaatcaggatctggcggctttacttgatggggaagcgactaaccctcgatatgcactggcgacggaaatggttaaacatcttttcccgtttcagattgcactgtatcgccgatgtatcctgttggccacgacgaaaaagttcgatggcagtgtgctgttactgaaacgcgataaagaaggcggctatcaccggagttcacaaaacctggaccacgttctgggtcagaaaaaaagcctcaaagtgaatccgttaggcgagattgctaaccagactaatccacagcgaattgagagcttaaaagagcaatattggataaccgacgaagactcaccttttgcacaacgtgatattcgttttacattagttctggacgaagagcacgaagcctaccgtatcttccagcagaatgtttgccagacattaatgaacgacgatcagcaacttccttcgttactggcaattttacatcgtgtactggaatatgtggatgaatgttcttcagatgaaagagcgccagggtatacccctctgaaaaattatgtcgatgagatcaacaaagccttattacaatgtgatttacgaccagatttcgatcttaagaagctgaccagactctttagaaatagtttgcttgatatcgtcgtcgatagccgtaatgctgagcaggttatcgcgttaattggtaatattttcagttatcagattcagcgattttaccgtgagtcagatcttcgtcgtattcatttacgtagtcacgggcgtcactcatacactgaagtctatgtttctgaagatgaaaaaaaagttccagatgaatttaccttatatgaactgtatcagacactgaccgctctattattagcctctgctcggctggaaacacccaaacatgtctgcgatttgctggcacagcaggagatggcaaatcagaataacccattatcagttttcattcgtaaagcccaaagcattaaaggagatatagatcatttatcttccagtgagcctcagaacgaacagttgatagatgacttttttacctattttcaacccaaaacattgttttccctttcgccacgtgaacaggtaagaattgaggctgaacaactgaggggatgggtattactcaaatttcggatggagttaattaaggagttacccgaaatagcattattacgtgtgctttataatacacgtaatactattattttactgtcagctacagcaggatttcctgcaacgtataatgggcagtacagccgcccgtttctggataaatacgcccgtgacttgaactatcgcatcaggcagcgggatgttgattctgcttcgcccctgtcggcgatccgcgataacagaaaccttcaccgccctgtagcgctggaggtatttgacgatcaggtactggagtttttaccacaaaacgaggagcctgagttcaggaatgcatatcgtttctggctcaaaatgctcgaaccatactctacatcagttcagtttaatcgctatcataaacgagagtttcatcgtcagttacagagtatgttacttgcggcctatactggccggcacattttatgtattgggatcagtagccgtttttttgcgattatcgggaattttcttcgtgccaataagttaagtgcaaatccctatcgtggggttgctattcttgacaatgaaacacgtcgggggaatgatttacctcgtgtatttgaaatcactccttttgctgagcggcatagattgcgtgtcgtcatgtttgattcaaaactcaaccgggaagatccggtaagagactatctgcaaattgatcaccaaaacttagcaatatgcatggtttcccacttccagggggctggcacagggcttaattactatgtcacttatccggtaccgtcagaacttacaggagcagattcagagcaaatcgacttcgatgaattagcaatggtctgcggtagctactggagtcagattaatgcaactccatcgcgaaacacgctggaaaattatattaccttactcaagcattatgctcatggaagtgtgcctcgtcaggttggtgatttcgatacggatctagttgattctgatgctgcccaattgctggatactgaacataccgtcgagcttcataaaattgcaatgcaaactattggccgtacagaacggcgtgatgcccaaatgaatggggttattcgtttaccttctggtgttcatcataatgcattgtgtgtttttcgggatttggatcgtcacccaaatgcacaatcgttacttgcttccctgagtctgcataaccacctatggttcaaacgctcaaaaaaggatttattaaaagccagcttttcttccgatagtcaacgtagcgaatttgaaattaaagttgctaaagcaatagatatgtatagcgactttgaagctgaactgaaaaataaaattctgccactggcaaggcaaggtgatcgagatgcaattgagttaaatgaagcattacgtcaccgggacagttttaccgatcctcagtcatatataaagcgtcttaaacgcaacgtgattattaagaaaaatgcttaccttagcgactgtgtaagccatttttatctggagcgtactgccgattggaaaagtgtaatactggctaaaaccttagatggttatggattaacagatatttcagctggagcaaatccatacaaaccggaatattgtttaccccaatatcatgaagccatggctgaagagtcatccggaactgaacagcgtatttttgcgaagattctgggattagatgccaagcctttacaacaatacatccccattccttcattgatgccacttctaattggcaatattggtgaatggcaattacatcttgtgctccaggaaatgaatattacgcccattccatcacaagagctatcacactatctggatagtcattgttatgagttgtttgatgtgtattgcattaacaagaaccgaattgttgcaatcgatgtaaaaaactggcgaatgcaaggaaataaccgtcaattagcgaaaaaaatgcataataactcattgggaaaagtcagtgagttgcagaaaatagttgcagcaaaaacacagtttgatggtgttgacgtcgtttatcttaatacccgatatgctttaaacagcctcaacattcgtgccgaacactctaaccataaaggcatctgctattataacctttttaaaaatatttcatcttatgaaaaagataatggcaaaaatccttatgatgcaaaaataaaatcagaattaagaataaatcaatacttacttaatattctaggagtgaattatgactga

SEQ ID NO: 160060 - DNA, 753 bp, Enterobacter cloacae
atgtctttagtttcaataataatgccgtcatataattcttcaaaaactattcgcgcgagtataaattctattttggcacaaagttatgatgattgggagttattaattactgatgatcaatcaacagatgacactttagaaataataaaggatttagcagcgaaggactctcgaataaaaatatttcaaaatgagaataacagtggtgctggaatttcaagaaataaatctatttctaacgctcaaggccgttttatagcttttttagatagtgacgacatgtgggagaaagataagctcacgaagcaaattaatttcatgattaaaaatggttatcacttaacttacacccaatacattaaggttgacgaggatggtaatattaaagggaaaatacatcctcctctagaagtcgactataatgaattgcttaagtctaatgtcattggatgtcttaccgcaatatatgatacagaaaaactcgggaaggtttttatgccatctatacgtaagcgacaggatatggctttgtggttaaaaatactacaggttattccaaaggcatattgttttccggaagagttggctatttatagagaaggtcgcgggagtctgtcatctaataaattggcgatattgttcgttcaatggaaattttaccgtggctatttgaaattcaattttttgaagtcgttatggtattttaatttttatatttttagagcacttaagaaacataaacttagttcttaa

SEQ ID NO: 160061 - DNA, 1155 bp, Enterobacter cloacae
atgagtattggattatattgtaattggaaagtcaaaatttgtggttgcggtggattttatgttaataatgttcatgcaagatatatttcggcttttattaaaagatttggcaaagtatatcttctctccaatttaagttttgactctccggaacagtctgacacattattcaatgacgactccatagaattaattccattgccggcatttaaaaattatttctcctctataagatatttttggtgtataactaaaggggtaaaagagctatgtaataaggcagagttaatttatataagaacgccggagcctttatgctggttgtttactttatttaaaagaaataatattatcaaccaccacttcacctctaatcctttggaggtaatacttaatcaatcaagtagcaccgtattaaaaaaatatgttaaatattgcatgtttttgccagaatattatctatcggcttgctcagcttacataaataatgcttcatgtaatggaccttcagtagttaaaaattcacctttttttttgcaggagaaattaaaggtattgattgaaaatactgtgacagttaaggagttagatgagaagaattatttcgaaaggaatttggatggaaaaatagagttgttatgcgtatgtcgtttgcaggaaggaaagggactaattgaattaattgatgccttttcaaattttatcacaagaagcaaagcatttaattttcatctttctataatcggtgatggaccattgcgcaattctcttcagggaagagttgatgaacaaaagttatcatcttttataacattaaatggttatgttaaaaatggagaagaacttaacgcattttatagaaaagctcatatactcataaatccatcattttccgaaactggtcccagagtaatattagaagctatggctgaaggttgcgtgtgcctgtcaacagatgttgggtatgtacgttatatatataaaaacgaacccagctttaataatttaattatgaatgtcaactttcaagatgaatttgatgagaagctcaaggctataataaactctcaagaggtttatgataacttgtctagaaaatcttttgctttagcgaaacgttattctttagattcttttgttaatgatatattttag

SEQ ID NO: 160062 - DNA, 471 bp, Enterobacter cloacae
atgtttttaatcaaagagaaaactatgaagcataaatcacttctgatatattcatattttattcggctggtaactgcttggcttccagatactccattaattatgcgatttcgtggtaagttatattctttggccatgaaatcttgcggtaaaaatttccaagtcgcagcaacttctgtcttgcgtggtattgaatatattcaatgtgggcaagatgtatattttgggcctaattcatatatcatggctagaaaatcaatcattattgggaatgaggtattgattgctatgaacgtagtagtagtcgatggtaatcatggtaaaaacaataacagttatagattcaagagagggagtataaaagaaatacaaatcggtaatggagcctggatagcggcaaacagcgtagtgacagccggtgctattattagtgaaggcacacttgtaccaccttgttcggtagtgagatga

SEQ ID NO: 160063 - DNA, 1251 bp, Enterobacter cloacae
atgacagtattaagagagcctaaaacaagtttccttaagattataataattttgttttttatatacaatgttaattatagttttatcccattagatatacctagtacttatatatcctttgcagttattcttttgttgtgtttgtatagcgcactcaaaaccaaaagaatcccattatctaatacaaccgccacatttttttgtcttttactatttgcagtatcacttgttagttattttattaatgcagaacatgcagatatttatatgctgcgaacaaccttcatttacctgttaatgtccttatgtatatctccttttttgagagtggtgtttaaaaataaccgaatagttattatgaaaacaatcggttacgcgggagtggtgaatgctttatttattttatcaatgctagtaattaaaccatttcagcatttttacttatctcttttgagccaaaaaacattcctgttaatagggggtgaagatgctattgagagtttaatgtctttgaggatgataggcataactggtttttctgcatatacgacagggtttgtgcaaattttatgtgctataagttatatatattttatgattttgagagatgtaaaaattaaactgcggttgaaagactattttatactggttgttatttttatgtctgcgcttgtatcggctcgatcttctctaattggtattgtcttatcagttggaatattaatgttcaatatgaatgcaataaaatttataaaaacagtgttagcttctatattggcgataataacgatttttatattaatagttcctatgttgcctgttgattcaagagattttttcattaactgggctacagagttttttgtctcgggtactaaaactggttcattacaatcaaatattgatatgtatatttatagtttaaaagattttagtatgtttggtgaatctcgatggtatggagataataatgattattttatgaatactgatgttggttggtatagattggctttttcgattggaattgttggtgttattgtttggtgctttactattttttcagtttttggatttgataaagtgtttacttcaaaaataagaatcgaaaatgtcatttcaatagcgttattgatttatattttattaatgatgtttaaaggggcaattgtatttgatagttttcaatcaatctttatatttttaatcttcaattatgtttttaatcaaagagaaaactatgaagcataa

SEQ ID NO: 160064 - DNA, 930 bp, Enterobacter cloacae
gtgcaagataatattgtcactattcttttaccagtgtacaacgctgaaagatatatcgatgagtgcataagttcaataagaacgcaaacatatcacagtttggaaattatcattataaatgatggttcaacggataactcagaaaaaattatattaaaacacgttgaacaagactctagaataaaatatatcaaacaggaaaatagtggtcttatatctacactgaacattggcttaaaacttgcgactggtaagtatattgcaaggatggatgcggacgatatatgtttaccggttagaatagaggttcaggttaaacatatggagaaaacaaatgcagatgtttgtggtggaaattattatgaaatagatgaaagaggacattttgaaagagagaggtatgtgccaattgatgatagcgtgcttttttccgctttaatattaagggttccttttgcacatccaacggtaatgtttagaagtgattttcttataaagaataacattacctattcaaaaagtagaaaattatatgctgaagatttagatctatggtataggttgcataggcttggagctaaatttcataatgtaaatgaatttttaataaaatatagagttttacaaggttcgctgtcaaggttaaatcaaaaagggatattctatgattccatgagaataacaagtgctttttattttgagaataatgagcgaattattgagcaattaaagaagatatcgagggataaaaagtttaatgtagaagaagaaaatataatcctggcgtttgtttatagaaatattttgtttaaatgggatttttctctgttgtatttaactgaaaaaataaaattaataaacaaagtgaaatcactgctgcgcgaattaaaacattatcgatataggctgaagtttaagggaaataattaa

SEQ ID NO: 160065 - DNA, 1248 bp, Enterobacter cloacae
atgcttaaaaatataatctatttatttggaatgcaaggggtgaattatttaatcccattgatagttttaccatatttggttcgtgtgttaggccctcaggaatatggtaggttaggtttctctgtagccataatccaatatcttgttttattgattgattttggcttcaatttattgtcgtcttcgagaatagcaaaaaataaaaacaatttatctattgttagtcgaatatattcaataacaattctttcaaaactggctatttctcttttcattatttccatcactataattttagtgtttagttttccaaaattatacgatatacgttttttgttacttgtttcattgattcaaatttggggagctatatttacaccaaactggtttttccaaggtatggaaatcatgaggaactttgcagttatttcagtaattgcaaggcttttatctttgccattgatattcatattcgtgaagtctaaagatgacgtaatcattgctgcttttttacagtcttttgtatttgcattatctggattcattgcttttatcatgatccatagaatgaaagtcaaaatgctgtatgtgaaattttcgattataaaaaagtacttaatgcgcagtttcaccatatttattggcacggttgcgataagtttgtatacattaagcacaacaataattctcggaatggtttctaatcactacgaattaggtatattcaatgctgccgataagattagagcggcactgctaggattatttgttttaatggggagtgttttctatccacgggttaataatctactaaaatatgacaaggttagagcatttagattattaaaaaacattttgctttatcaatcttttgttactttgttgctcgcgtttatattttattattgtgctccattgattgttcattactatttaggcgaagagttcaatgagtgtattgatatcctaagattaatggccccaatggttgttttagtgccggcatctatagtaatgtcgaattatatattgttgccgctagggtatagaaagtttttcagtttcattccagttaccacagcaatttgtcatcttttttatgcaatatacttttcgtcaagaatgggtgcgtatggtgctagtctagcaatattaattactgaggctttaagtttcacattacttttattagttaatatcaaactaaagaatttcaacaagatatttggagtgggatgtgcaagataa

SEQ ID NO: 160066 - DNA, 318 bp, Enterobacter cloacae
atgctggatcagcagctcaataatgacctgcatccccagctcccgcgcctgttcaataaaggcgatgatatcgttgagcttgccgaagcggggatcgacctgcaaatggtcgctcacgtcatagccttcatcgagaaaaggcgtgaggtaaaacggggtgatccagataaccgtcgcgcccatccggcggatgtagcgcagcttcgcggtgattccggcgatgtcgccacagccatcgccgttaagatcgtaaaacagggcggtatcaatctggtaaataatggcgcgtgtatgccagcctgccatagcaatccttaa

SEQ ID NO: 160067 - DNA, 852 bp, Enterobacter cloacae
atgaaaaaaatgaccgtgaaagcaattgttgaatggattgaagagaacgtgtcatcgggcatttccattgatgatattgtaaggttctccggatactcaagacgacatattcatgaaatttttaaagagtatgtaaatatgtctccgggacaatacatacgacacagaaggttatctagggcagcgattagattaaggttaacgtcacaatctgcaatcgatatagcatatcagttagcttttgactcacagcagtctttttcgcgggaatttaaaaaactatttggggtatcacctcgagagtataggaatcgagaatgctgggacttgaataacttaaaaacaccatttgattttaacttgcaggatttgccagaattaagattggtagagttaccagaaatgaactttgtgggttatgaagtaaattacagtgaatttatcagagataaaccaatagatagtaacccactcaggatggatgcagtcgttagaaatttaaattactacaaagaggatgtttatttattatcaagctttgaaccaataagaaaaaatgataataaacttgatatcaagacttttattggaactaaatatcaggaaggtaagcaaaccagaatggtgaagacccaaaaaaacggaccaggtttatatgcaagcttaacattcatgggaagttgggaagactattcctctgtctcaagacgaatatatatggaaatgctacctaagtacaaccttaaacgaagaaatggagttgatattgagcttttcaggttcattggcaacacatcaatagcagaagataattggtttgaggtggaatattacattccagtaacctattag

SEQ ID NO: 160068 - DNA, 468 bp, Enterobacter cloacae
atgtctaaaaaaactaatgaagagcacaataatgatgaagaactggctccaatggttgatggcttgagtggtgcattgtgtatatttatacttatcactacagtctttatgcttagcgggattgaaactgtcgttaccggaggggggagatatttcacaggagagaatacctcaataaaccattataaaaataccatatatttcgaaaatgtcatctctttaccaaaagaggattatgataaaattacttccaaaataaattctagcggtaaaaataaaataatatttgaagcatttacttcagatgttacggagggggactcattaaaggccaaaagaagactaatatataatttattagattttaagaaacaactcaagattgaaaacatacgagtaacgttaaaggtttcagaaaccaacttttgcggcagtgcatcatcatgtattaaatggagcgtagaataa

SEQ ID NO: 160069 - DNA, 789 bp, Enterobacter cloacae
atgtatttgattgggttcttattttatataataatcgcaatttcttattttcatatcgatgagatatatgaaatagtgaatcaatcatatcttttggctcaatcaatcacaataggtatgggggttctttatatctatccccttgcaatatttgtttttatttgtgctttatctaaaaaaacggataaacataaacatatcatcgactcacaaactaagatagcggcctcggtgtcggtatcactcgggttgattggtacgtttcagggcctgactgcgatggtatcctctatcgccagttcaatggggggggagggcgatatagcggagaaaatgaattcaatgcttgctgcaatttcatctgcgctgtcagcgatgtcatacgcttttttgacgtccattttgggtgtagcagtatccgtattattgcttttaagccttaatttttggttattctattttaaagagtcatcgcctaaaaaaattaaaaatcgttctcttaccatcaattacggaaaagtaattgtggataattttgatgaagtagaagaaaagctatcattaataaataaaaaactagacagtcagagacttattgaacaacagactcttctggtgaaccagcaagtgcttgcttcgctgtctggtatatcagatagtttgaaatccataaatcaacaattagaggaaacctcggaacacgaacgagagcaaatatcaggaattaaagcaaactttgaacagcttaaaactaaccttcgaaacgcaatggagattatgatcaaatga

SEQ ID NO: 160070 - DNA, 1236 bp, Enterobacter cloacae
atgaagtatgcaggtatttttctgttgatgtttataatggtgtcaatgaagagttatgctgctactaaagattattatagttatttaacaatggttctgggtaatgcggaaagcgttaaatcaaaagaggctttggtcaacgctgaggaagtaaataaacttagctctcagctttatgcagtacctaaaatgtcagcatcagtaacaccaaaaacaagtaaatccaataacaataaacaatttgttgaaagcaaagtaactctttcctcgttactatttgaggataccatatttaacaacattaaagctcagaactataaattactggcatcagtcgttgaactggataaagagaaggagagaataacaaccgctattatgagcgatcagatacatatttctttgtatgagaagttacgcgataacgctgtgcagttgaaacttgaagctgaatcactttatgaaaagataaatgtaaagtatgatttcggtatcattaaagaaagcgatgtacagttggccaaacttttagtacaaaaaattaataatgaaattgacagcattgagcatgcaatcgatcgtcttaaagtaaacatcgagtcaaattctttgcacccttatccaacagaagggataaagatcgaaaattctaaaatcgatgcgctgttgaaatttaacaataaagaatcagcattagttaataacttggaccttcgaaaattatctctaaataaagatgagtcgaaagaaaatgcgcgtaagcaggattcaatgctgtcagtcagtcttgtagcagaaaacaaatggaacgatgacgaaaaagtaaaagatgattcttatatcgggttaaaaatttcgctaaatgttttcgatcttgacagtaaattagcgaaatcagcaggcatgaaaaattatgaatctctttcttgggattatgaccataaatacaaactattacaaaatcaaaccaaattagcgaaactgacatctgaagcaaatattcgtgagattactaaccttgaacgtcaatacaaaacaactaaggaattaattaaaaaccaggaacgcgaatacggtatcaatcaggcatcggtatatgagatgcttaacacccgcttcgatctctttcagctagagaaatccatcactgaaatgaaagtttcagaagcgaaaaacaaaattaatcttttacaggcttatgggcaagtccttgattttttcatgggtgaaacttaa

SEQ ID NO: 160071 - DNA, 465 bp, Enterobacter cloacae
atgaatgataaggtttcgaccaatagcgttacatccccattttctggcaaagttctaaaaatcgaaaacaatttaaaagaaggttcatttattgagcaataccagccggtagtgaccgtcaagcaagataacattggtcgtgttattgaggcaaaatttgatacaaagtatcgcccttatctatatgaaggcgccgatgttaaaatctcagttaactcgacggcattcaagaaaaattttactggcaaaatatctaaaattagcgctgactcttttgtcgacaatgtgcgaaacaacagtgagcagcgttattatagtgtgacgatagatacctttgaagagattgaaccgtccctcctgcccgaggggatagaagttaacgtttttgcaacaagtaagaaagtgtcaatttttgaatatatgattgcaacactaaaatctaatcttgtttttaatgtttggtga

SEQ ID NO: 160072 - DNA, 498 bp, Enterobacter cloacae
atgtttggtgaaaatatgcttggattcgtctctgctctatcttcaacacttgctattgtcgttttaatatcatcagttttattggtgaaccttctcacttttacgctaaaaaaaagtgagaaggaattccagctaaaattaaatgaaagtatattgaaacaagaggagatattaggtgacgtgcagaatggtgtacaggagagtgggcaggaaaagtcatcgtcaagcagtaatttaagtggagccagcattagtaagaatattatttcaccaaaggagttaccgcctcgcgattccaaaatttcggatatagcgacggggtgttcctatggcaataactttagctacgaagtggcaaccaaactatcaacgctaaattatatcattctggcaaaaaaatttatagatacaaacgtgaagataacgcttgaaaaaccaaagctagatgaaaataaagtgaatgattgctgggtaaatatggaacgcggggataaataa

SEQ ID NO: 160073 - DNA, 1944 bp, Enterobacter cloacae
atgttgataaatgcatttaatatctattgcagaaaaataggtttgacattttcatgcgatcaaaatgtcacattaatagaactaataaacaatctcaatgaatatattgatgatgattattttgattataaaatgcataccttcgtttgtcacgatacagtcgaacttccagatttttttatgcttgaaagtaatggtgatgaatttcttgtgtatgaaagaattatggatgatttctgttgcctttcggaggaattgcacactgagcacagttcttttttaggcaagaaaattatcgtgatcatttctgagccaaagagtatcgatgcacatcatgtatataatgtaataaaaaataaactttcacgtatgaatttattttttataccattggttgttttttcactattattgccgttctactcgaacctgttcaattccaggttggtgtacagctcatcgctaatgtcggtaatttatatcactgtcttttttatcttctttgcatttctggagaaggtgttaagaggttgggtataccagtcggttgcaaaaattaaccatggaaacagcattaaattaagtagttttttggtgtatatgttatctataagtaaagataacactgctccggcaacatgccgtactatcgaaatatctaccgttggatactggaaatcggtgacgtcatcgcttgttgatattgcattgtttgctgtgttttttgtctgcattatgctcatgctgggaaaatatagcatattgctactattatactatctattatttagttttttatgcatttatgtacggtttaaatcatatgaaaatacacttaaaagtatgcagctaagtaccgatcgattgacagatcatctctctttacattctaaccgcacccagactcggtttgtgaaatttgatagtctgcggaattttttatttgctaaaaactgtggtagcgaaaaatcgacgttacaattaaatatgcacaaccatcattggggggagctgcttaaactaaatacttttatttcaatggttgtcatgtatatagcatgctatcttgcgattaacgcaggcagcctgtcgatagcaacgatcatcgctgttatgatcgtcagctctcgtttgtctgcttcattgataggttctgtgaatggagtatataatataaaggttcatttacatcagataaaatcgagtctggtgaaattaatggataatgtcgattctgtccagagtaaagtacatcttgataagatagaacaagtaacactagaaaatgtcactattgaaccacatggtaaagccacattgtctgattatagtgggaaatttacttcaggagacatagtaactgtatccggaaaagtgggagcgggtaaaagcactttgttacgtagcttagttgctaccagtgagatgtatcagggaactatccggtataaccaagttaatatatgcaatattaatagaatgacttttgagaaagaggtcgcattctatgacacgagctgtcatttcttttcaggttctttacgctttaattttaacttgtatggtatctatgcaaatgaccgtatttttgaaatacttaaagaatgttgtccagggctcgcattggattccagtattcttgatgagggagatgccgcttctttaaatctctcagcgggagaaaaacagaagcttatgatagcaatgattctagagaagaaaccatcgctgatcgtattagatgagccaacctccttcatgcctgatcatgaggggttagcatttttacaaaaattatttaatggtcatcaacatgcgatgttctttattgccactcacgatcagcgtattaaaaagctttcaacggcatcaattcagatttgtccagaaccggtgcacaagaagatctttattaacacgcccggtttggtgcataattgctga

SEQ ID NO: 160074 - DNA, 5622 bp, Enterobacter cloacae
atgaaaactattaatattaatgcttttgatgcaaatgatttttctgttgataacctcaaggtttctgggtttgatgtgattattactgacgtcaaaggggaaacatttagaattgcggacggtttacctgaacttctgttgggtaatatcaagctaaaacatgccaacggtcaacatgttgaaacgtccgatgtattgaaatcaattgacgcgagtaaattgggcctggatgtagctatcctcggtggacttatcgaaggttctgacgtcaagggggaacaaacaggtaataaatcatcctcaacagaagacatcgcaggtactgataagacacaacttgctgaattacttgctgaaaaccagaagcttaaagaaaaactggcggaagctgaagagcaatcggaagaagaaaaagttcagataacttcagaacccattctaaccgtttcaacagatttgggtgaacaacctcaggttcagattcaaccagcacctgtcagttcacagagaaaaaaattgccattagacgaggggagcgggagttctcccgccggggccgctcaaacggagaacgccaattctggacaacaaggaaataacgcgtctcagggaacagctattccactaagtgctgagctgggaaaggaaagcgatacgggggttgccggagacaatatcaccgctgattcacagccagtatttactggtatgacggcaccgctagctaaagtgttgctaactatcggcggcacaatttacaccactacagccggagcggatggtagctggaaaattaccgtgtccaacccacttccggaaggaagcaacacatataccgtcagtgccagcacctataacggtgctaccggtatcctgcagggcggagtcataatcgatacccagtcgcaggagatcaccgtggcgctggacagcgtatcggataccggtgtgaaaggggatttcatcactcagattcagacgcctgccctcagtggaacggcagaggcagaagcaacgctggtacttgaaatcggcgggcgcagttacacgttcagcgcagacgcatcggggcgctggagctttaccctgcctgatgcattaagcgagggggtacataattatacgcttacctctaccgataaagcgggtaacagtactgccacacagggtgtgctgacgattgatacgactggtccgcagctaagtcagcaactggacgcttccaataatgtacttacgggtaatgtccttggtaataatcagccgacattctcagggagcactgaacccggcctgacggtgacgattacggtcggtgacaaaacttaccaggtcgttgctgatggcaacggagactggagctttaccgtgcccgttgccctggaaaacaagacctgggaatacacggtgacggcaaccgatgcggctggcaaccagacgtctatcaaagatcaggttgtgattcatcatcaggaaagcgcggagagtcttcctttgacgggagggctggatgcgggcagcgactccggtgtcgcaggtgacaaaattaccagctttaataagccagtttttaccggcgctacagcacctggcgcttcggttaccgtttcaattgcgggaaatgattacaccgcaacggccgatctgaacgggaaccgggcgatcgtggtaaccgatcgccttcccgacggtgtacacgattatacgattacagcgacaggcttgaacggagctaccggcatcctgcagggcggagtcataatcgatacccagtcgcaggagatcaccgtggcgctggacagcgtatcggataccggtgtgaaaggggatttcatcactcagattcagacgcctgccctcagtggaacggcagaggcagaagcaacgctggtacttgaaatcggcgggcgcagttacacgttcagcgcagacgcatcggggcgctggagctttaccctgcctgatgcattaagcgagggggtacataattatacgcttacctctaccgataaagcgggtaacagtactgccacacagggtgtgctgacgattgatacgactggtccgcagctaagtcagcaactggacgcttccaataatgtacttacgggtaatgtccttggtaataatcagccgacattctcagggagcactgaacccggcctgacggtgacgattacggtcggtgacaaaacttaccaggtcgttgctgatggcaacggagactggagctttaccgtgcccgttgccctggaaaacaagacctgggaatacacagtgacggcaaccgatgcggctggcaaccagacgtctatcaaagatcaggttgtgattcatcatcaggaaagcgcggagagtcttcctttgacgggagggctggatgcgggcagcgactccggtgtcgcaggtgacaaaattaccagctttaataagccagtttttaccggcgctacagcacctggcgcttcggttaccgtttcaattgcgggaaatgattacaccgcaacggccgatctgaacgggaactgggcgatcgtggtaaccgatcgccttcccgatggtgtatatgattatacaattacggcaacaggagcaaatggggaaacaggaacagtaaataattatctgacaatagatacggagctgccacatacggaaatccagatagatgctgcctcggattccggtgtaaagggcgataacatcactaatgttaaaaaaccgctcttaaccggcactacagaacctaatgcgattgtcaaaatttatattcagggagttgaatatgaaacaaaagcagacagttctggccaatggaatgtacagctttccgcaccgttgtctgagggaaataacagctacaccgtgacggtgacagatgctgcgggtaacagcagcagtacaacaggtgagctcatattggatactactggaccgagcctgtcaggaattaaatttgccgatggttatgacgatcgctattcgaatacttatactccaacgatcggtggatgggcagaggcaggatcaacggtgtatattcagatcggtagccgggagtacagcgtaacagtgccatccaaccgtcaatggcagttcaaagttcctgcgggattcattaccgtgggtaacccataccaatatattacttttattgctgaagacgcggcaggtaacagaacacaacaaacaattaagttttccttcattacggataaaccaatcattaccgctgatatttctgcgaataccgatacggatattgtaggtgataaaataacaagtaataacaggccgacgttaaccggcacaattgagtgcaaaggacagactgccgctcaaatagcaatggcaaaagttaccatttctattaatgggaagatttatgaaaacatttccgttaaaagcgatggaaagtggacattcgctttacctgatgaactggcaaacggtaatacttacaactatacaattaccgttacagatttcgtcggaaatacgaatacatatcaatcttatgtaactatttccacgctttctggttcgctgggcgccgagagtataactggcctgggatctgaccaggttacttctgacgttacgccaaccctctcaggaaaggcgaatgccggatcaaaattaattatcctgatcaataatcagagttatgaactaaaagttggttctaacggacaatggtcgtttgagatcccagacacacttggtgatgggaaatatgattataaaataacggagagtacgacggatggaaaaacaaatacattctctggctactttgtcgttgatacaaaagccccacaaatgctcagcgctggacttgaagagcatgcttcgggcgcctcgaatatctcgacccgccccgatctaacccttaaaggtaagacggaagcgctggcagtgataaccattgtggttgcaggtgtaacgtatcaggcattagcaaatgaaaaaggtgaatggtcatacacctttgataaaaatgcattcaacatcaatactccttatgtctatacggttactgccagtgatgcggctggaaataagactaccatcacgggcagttttattattgatactattacagttgacgctactcttgatgatgggaccaactcgggtgatatttcagataatatcaccaacaatgcaaaccctaaaataaccggtgtaacagctccggatgctactatttctttagctatcgatggtaaaacttactatacgaccgccgatagcaatggtcgttggtcaataatcattgacgataccttaagtgataacacgtacagttatactgttacagctgaaaaagacggtaaagttaactatgcgactggcagtattgttattgatacatcttcactcacaccaacgcttgagcttgatagtaatagtgattcaggagttaaaaatgattacatcactaatgattcaaccccgacattaacgggcaaagccgaagctgaagctgcaattaccgtaaccataaacggtgtctcttacaccactattgctgcggatgatggaacatggtcactggttgtcaacttaaaagaaggcgttaatcactataccgtcaaggcagaagataaagcaggaaacatgtcggaagttgcagagggtgaattaactctggattcacaagcgccaggtacaacgtctggtttggtcgatgaagacaatagtggtgatagaatggataccattaccaatgtctcaacgccatcgttaatgggcaaaaccgaacccggcgtgacggttacggttgaaataaataatcatgcttataccaccattgcgggagaagacggctcatgggcagttcagatcgtggatccattaaaggaggggagaaacgaatataccgtaacagtggaagatatcgcgggtaatcagagtcagacgaagggagagataacacttgacacaaaatcgccgataatcagcgggttaaagatatcagcatctgatgatgctgatagcgatggggtaaccgaaacgagcaggccaaccatcgaaggcgaagtggatgaaaatgatgttgagatgacaatatcattttccgaagatggtccaaaatatcctgtagatataaatagtgatggtaaatggagttatcagcactccgaggattttgcgccagggaaatatgagtttatcctggaggttacggataaagcaggtaacacttcatccagtactggagcttttgaagtggtttcacctggggctgcaccgttgccttttgaagatgtcgaagcaaccgcacctgtagaatttgaaggcgttacgcaagcaggctctcacgttcagttatccattggcgatgatatgtactcaacgcttgccgatgaatcggggaagtgggcaattaccagccagacttattccaagggcaattatgcctatagcattcaggttaccacgccgtcgggggggatttttgctgacaaaggtgaaataaccgtcactgaagatcgttctacgatggagaaaccagcaagcaattacggaccgtcagaaacgtcagaaacatcgtcattctttgttaatgcttttgatgctacgactgaactcagcaatagcgaagaaactctataa

SEQ ID NO: 160075 - DNA, 294 bp, Enterobacter cloacae
atgacctacatatggttttatcaaatggtcagaaaccatggtccctgggattacaaacaaggccgtgcagagtatgctaattttggcaattttcattacggtgccgttggtgcggcagcaggcattcctgagggaattttgctccgggaggcaggtactgcacagattctcgccgggacaagcgatcctgccgagtttgcgaaattccagaacaataataattacggtgatgacccagtcgatcagttatggataagggcaggaatagattatgcgcgacgttcgggtttttaa

SEQ ID NO: 160076 - DNA, 978 bp, Enterobacter cloacae
atgttcacagcaatagataatatattaaactcagctcaactctcaggtgaggcttattttgttacagaacaccaagggcaaatagatatttacagagtagccctagaaacaggcgcagaacagaaattaacacagtctttcagtcgatcacttaagcgtgatgttgttgacccaaactctggacagaacgcgttgccgttagtttcttctctgctaagtcgagataagcaggttcatgaatatgatcaccaagtaataaaccatctgcctcctgctctagcaaagatggcggacgtgcttaccttcggagttaataatgcgcccactgactttgactttgctcagcaaaacttatcaaccgttaaaggaataatttattatctttgtgatggtcaaggtaatggggttgttgtttaccaacacaaatatccaatcgcattacataaaaaaacaaaattgtcatatttttctgcgaatggtagaacccttgatgaagtcacccatgatagcattgatataaatgggaatgttgatttcttttacttcaacaataagtattatgcactaaatattaacttacttgaaaggtcatatggccttgaacaagtcataaacaatttagcagcaaatgcaaccccttatataatcgcactgaacatcctagacgtatcaaatcatccgaaccctgctgacatttttaatgacatgcatcgaaatagaaacttcatgcgcagacttgccaccacagcaaacagcccactaatacagaacggagctattaacatagccaaaattcagactttaattcaaaacttcccgattcttggaaggaatataataatcaatcaagctggattgatagaattatcatctcaaaagcaaaaactatatttcattcgcctgctaaataatgaggcttctttcacagcattaaaccaagagccttttcttgcggtcggaaaagactcagcagcataa

SEQ ID NO: 160077 - DNA, 597 bp, Enterobacter cloacae
atgaaaaaaagaacaggtttaaagtatgcattatatatattgtcactatggctattatttgtatcactttttataatgtcatatgacaagaatctttttgtaagtatatcaacatatctgggcagcagagacactggaatattactatcaagcatcacacctaaaaatatagtttttatttccagctttgcaatgattgtagcaggtgttttgatctttctatatttattattttcctttaactctggttggtcagtagcatgcacggtttctgatgttagaaatgaaagccatgagcaccttgaatttttaactacctatgttatgcctttggtatttactgacgtgaacagcaagaggactatgctgaatcttttgatcatgatagtagcaataggaatgatttatgtaaaaacaaatcgtttttattctaatccatcgttagcattgcttgggtttagaattttcaaagctaatataaatgacagaggaaccaaagaatttgtaatcatttgccacggcgaaattgataacaacagcagaataaaatatatcagactagataacaacacatgtcttgctaaaatcactcaataa
